United States Patent Application Publication US 2014/0259212 A1 - sequence listing, part 36

SEQ ID NO: 126526 - protein, 636 aa, Methanococcus maripaludis S2
MKTGDKYIMLEKYSELQQKALDDPEKFWGEQAKCLEWDKTWDKALDWNPPYAKWFKGGSLNASYNCVDRHIKGNRRNKAAIICEKEDGSCGILTYYELYREVNKFANVLENLGVEKGDVVTIYMPMMTEAIIAMLACSRIGAIHNVVFSGFSSDALADRINDSKSKILVTTNLLYRRGKEIDLKKILDKALLNCNSIKHVVYAKRGIEEFNLVSGKEYFWDELMGGAKSYVEPVPVESEHPLFILYTSGTTGSPKGVVHSTGGYLTYATKTMDWTWGLNEMDVFWCTADIGWITGHTYVVYGPLSLGATIVLYEGAIDYPEPDRLWGIVENHGVTILYTAPTAIRMLMMYGEKWVNTHDLSTLRLLGSVGEPINPRAWKWYYKVIGKEKCPICDCYWQTETGGHIIYPPIGIQSVPLKPGSATFPGIGIDVDVVDNEGNPVDANVKGNLIIKRPWPGMLAGLWNNDERYRAAYWDRFKNKFSTSDYAIKDQDGYIWVLGRSDEVLNVSGHRIGTAELEHELVSNKMVAESAVVGKPDDVKGEVPVAFVILNEKYRELPSNEVKAELIKHIRDTVGPIGTPAMIFFVNKLPKTRSGKIMRRILKKLIMGEEIGDVTTLEDNTSLEEVKKELEDFKYD

SEQ ID NO: 126527 - DNA, 1965 bp, Yersinia pestis biovar Microtus str. 91001
  CDS (1)..(1965): transl_table=11
atgacgatgagccaaatacataaacatcctattccagctgcaattgcagagcatgctctaattaccccagaaaaataccaacattattaccaacaatccgtgcagaaccctgatgaattctggggcgaacaaggcaaaatcattgattggattaaaccctataaaacggtaaaaaatacctcctttgaccccggtcatgtgagtatccgctggtttgaggacggtacattgaacctcgcggcgaattgccttgatcgccatttggcagagcgtggtgatcaaacagccatcatttgggaaggtgatgaccctaatcaatcaaaaaccgtcacttataagcaactgcaccatgatgtgtgccagtttgctaatgtcctaaaaagtttaggcgtcaaaaaaggcgatgtggttgccatctatatgccaatggtgcctgaagctgccgtggcgatgttggcttgcgcgcgcatcggcgctgttcattccgttatctttggtggattttctccagatgccgttgccgggcgtatcatcgattctcactctaaactggtgattactgccgatgaaggtatccgtgcaggccgtgctattccactgaaaaaaaatgtcgatgaagcactgaaaaaccccgctatcaccagtattaaaaatgttgtggtcttccaacgtactggtaacgccagctattgggaagatgggcgcgatgtatggtggcatgacctgataaaagaggcatccgctgactgcccgccagaagagatgaatgcagaagacccgctgttcatcctttatacctctggctctaccggtaaacctaaaggggttgtacatacgacgggcggttatctggtttatgctgcactgacattcaaatatgtctttgattatcaccctggcgatatctactggtgtactgcagacgttggctgggtaaccggacacagctatctgttatatggaccactggcttgtggggccatcactctaatgtttgaaggcgtgcctaactaccctggcgtcaatcgcttaagccaagttgttgataaacataaagtcaatattctatacaccgcgcctacagcgattcgggccttaatggccgaaggtgacaaagccatcgaaggaaccaaacgcgactcactgcgtattatgggatcggtcggcgagccgattaatccagaagcctgggaatggtattacaacaagatcggtaacagtaaatgcccgattgtcgatacttggtggcagactgaaaccggtggtttcatgataacccctctgccgggtgccaccgagttgaaagccggttccgcaacgcgtccattctttggggtacaacctgcgttggtagataacctgggcaatcctcaggaaggggtggcagaaggtaatctggtcataaccgactcatggccggggcaagccagaacattatttggcgatcatgaacgtttcgaacaaacctacttctcaacctttaaaggcatgtatttcagtggcgacggcgcacgtcgtgacgaagacggttactactggataaccggtcgagttgatgacgtactaaacgtttcaggccatcgcttaggaacggctgaaattgaatctgcattggttgcacacccgaaaattgccgaagcggctgttgtcggtgttccacataatattaaaggacaggctatttatgcctatatcacgctaaatcacggtgaagaaccaacgccagagttatataccgaagtacgcaactgggtacgtaaagagattggcccactcgcaacacccgatattttgcattggacggactcattacccaaaacccgttcaggcaagatcatgcgccgtattttacgcaaaattgcgacaggagataccagcaacttgggcgatacctcaacacttgccgatccaagcgtggtagaaaaattactagaagaaaaacaatcaatgcagacaccgtcgtaa

SEQ ID NO: 126528 - protein, 654 aa, Yersinia pestis biovar Microtus str. 91001
MTMSQIHKHPIPAAIAEHALITPEKYQHYYQQSVQNPDEFWGEQGKIIDWIKPYKTVKNTSFDPGHVSIRWFEDGTLNLAANCLDRHLAERGDQTAIIWEGDDPNQSKTVTYKQLHHDVCQFANVLKSLGVKKGDVVAIYMPMVPEAAVAMLACARIGAVHSVIFGGFSPDAVAGRIIDSHSKLVITADEGIRAGRAIPLKKNVDEALKNPAITSIKNVVVFQRTGNASYWEDGRDVWWHDLIKEASADCPPEEMNAEDPLFILYTSGSTGKPKGVVHTTGGYLVYAALTFKYVFDYHPGDIYWCTADVGWVTGHSYLLYGPLACGAITLMFEGVPNYPGVNRLSQVVDKHKVNILYTAPTAIRALMAEGDKAIEGTKRDSLRIMGSVGEPINPEAWEWYYNKIGNSKCPIVDTWWQTETGGFMITPLPGATELKAGSATRPFFGVQPALVDNLGNPQEGVAEGNLVITDSWPGQARTLFGDHERFEQTYFSTFKGMYFSGDGARRDEDGYYWITGRVDDVLNVSGHRLGTAEIESALVAHPKIAEAAVVGVPHNIKGQAIYAYITLNHGEEPTPELYTEVRNWVRKEIGPLATPDILHWTDSLPKTRSGKIMRRILRKIATGDTSNLGDTSTLADPSVVEKLLEEKQSMQTPS

SEQ ID NO: 126529 - DNA, 1968 bp, Strongylocentrotus purpuratus; identical to SEQ ID NO: 121964
  CDS (1)..(1968)

SEQ ID NO: 126530 - protein, 655 aa, Strongylocentrotus purpuratus; identical to SEQ ID NO: 121965

SEQ ID NO: 126531 - DNA, 2046 bp, Nasonia vitripennis; identical to SEQ ID NO: 121966
  CDS (1)..(2046)

SEQ ID NO: 126532 - protein, 681 aa, Nasonia vitripennis; identical to SEQ ID NO: 121967

SEQ ID NO: 126533 - DNA, 2055 bp, Nasonia vitripennis; identical to SEQ ID NO: 121968
  CDS (1)..(2055)

SEQ ID NO: 126534 - protein, 684 aa, Nasonia vitripennis; identical to SEQ ID NO: 121969

SEQ ID NO: 126535 - DNA, 2010 bp, Anopheles gambiae str. PEST; identical to SEQ ID NO: 121970
  CDS (1)..(2010)

SEQ ID NO: 126536 - protein, 669 aa, Anopheles gambiae str. PEST; identical to SEQ ID NO: 121971

SEQ ID NO: 126537 - DNA, 1941 bp, Anopheles gambiae str. PEST; identical to SEQ ID NO: 121972
  CDS (1)..(1941)

SEQ ID NO: 126538 - protein, 646 aa, Anopheles gambiae str. PEST; identical to SEQ ID NO: 121973

SEQ ID NO: 126539 - DNA, 1959 bp, Magnaporthe grisea 70-15
  CDS (1)..(1959)
atgactcccgaagcttccaaggcgcccgttgtggcagaggcgcatgaagtcgacacttaccacctcgaggagtaccagcagctctacaaggagagcatctccgagcctaagcaattctgggcacggatggcacgagagcttttgacatggagtcgggatttcgaaacggtttactcggggagcctctctgctggcgacagtgcctggttcctggagggcgagctcaacgcttcgtataactgcatcgacaggcatgcgctcaaggatccaaaccgagtggccatcatatacgaggcggacgatccgagcagcgggcgaaccctgacctacggcgagctgatgcgcgaggtttgcaggacagcacatgttctccgtcagatgggtgttcgcaagggggacactgtagccgtgtaccttcccatgatccccgaggcgctcatcgcatttctggccgtcactcgcattggcgctgttcactccgttgtgtttgcaggtttctcggctgactcgctgcgcgaccgcgttgttgatggccagtccaaggtcgttatcactactgacgagggcaagcgcggtggcaagctgattggtacaaagcgcatcgttgacgaggccctgaagaactgcccagatgttagtcacgtgctggtttacaagaggacgggcgcagatgtgcccatgatgcaggggcgcgatttttggtggcatgaggaggttgagaagtggccaaactatatcccgcccgtccccatgaactcggaagatccactgttccttctgtacacgtccggttctacaggcaagccaaaaggtgttatgcataccaccgccggctacctgttgggcgccgccatgacgggcaagtatgtcttcgacatccacgacggggatcgctttttctgcggcggtgatgttggctggattactggacacacatatgtcgtttacgctcctctgcttctgggtgtttcaacggtcgtgttcgaaggcaccccagcgtacccaactttctctcgctactgggacatcatcgaccagcacaagatcactcacttttacgttgccccgactgctctcaggctgctaaagcgtgcaggagaccagtgggtcaagcatgaaatgaagcaccttcgggtcctgggctctgtcggagagcccattgcagccgaggtgtggaaatggtacttcgagatcgttggaaaggaacaggcgcaaatcgtggacacctattggcaaacagagacgggctccaatgtcatttgccctctcgcgggcgtcaccccaaccaaaccaggctctgcctcgctgcctttctttggcatcgaacctgccatcattgatcccgtatctggtgaggagatccacggcaatgacgttgaaggagtgcttggtttcaaacaggcatggcccagcatggcgaggacagtgtggggtgcccacaagaggtatatggagacttatatgaacgtttacaatggattctatttcactggagacggtgctgcacgggaccatgaagggttttattggatcagaggcagagtggacgacgttgttaacgtgagtggccaccgactgtcaacagcggagattgaagccgcgctactcgagcatcattatgttgccgaggctgccgttgtaggtatccaggacgagctcacgggtcaggcagtgaatgcatttgtgtcgctggccgagcatgttacaacggacaacgacgagtccctgaggaaggaactcattacccaggttcggcgtagcattggcccctttgcggcacccaaagccgtgttcgtcgtcccagatttaccacgcacaaggagtggtaagatcatgcggagaattctcaggaagatcctcgccggcgaggaggaccagcttggcgatgtcagcactctttcggacccgacagtggttgatagaatcatcacgaccgtccatgagtacaagaagaagtag

SEQ ID NO: 126540 - protein, 652 aa, Magnaporthe grisea 70-15
MTPEASKAPVVAEAHEVDTYHLEEYQQLYKESISEPKQFWARMARELLTWSRDFETVYSGSLSAGDSAWFLEGELNASYNCIDRHALKDPNRVAIIYEADDPSSGRTLTYGELMREVCRTAHVLRQMGVRKGDTVAVYLPMIPEALIAFLAVTRIGAVHSVVFAGFSADSLRDRVVDGQSKVVITTDEGKRGGKLIGTKRIVDEALKNCPDVSHVLVYKRTGADVPMMQGRDFWWHEEVEKWPNYIPPVPMNSEDPLFLLYTSGSTGKPKGVMHTTAGYLLGAAMTGKYVFDIHDGDRFFCGGDVGWITGHTYVVYAPLLLGVSTVVFEGTPAYPTFSRYWDIIDQHKITHFYVAPTALRLLKRAGDQWVKHEMKHLRVLGSVGEPIAAEVWKWYFEIVGKEQAQIVDTYWQTETGSNVICPLAGVTPTKPGSASLPFFGIEPAIIDPVSGEEIHGNDVEGVLGFKQAWPSMARTVWGAHKRYMETYMNVYNGFYFTGDGAARDHEGFYWIRGRVDDVVNVSGHRLSTAEIEAALLEHHYVAEAAVVGIQDELTGQAVNAFVSLAEHVTTDNDESLRKELITQVRRSIGPFAAPKAVFVVPDLPRTRSGKIMRRILRKILAGEEDQLGDVSTLSDPTVVDRIITTVHEYKKK

SEQ ID NO: 126541 - DNA, 1974 bp, Magnaporthe grisea 70-15
  CDS (1)..(1974)
atggaatccagggaaatctatcctccagaggccatatctcagggacatgtcaagcctcatattgatgggtttgccgaataccagcgcctgtacaagcagtctattaccaaccccaacgagttctgggcgaggatggctcgggaacacctcacatggcagcgagacttccagacggttatgacgggctcctttcgccatggcgatgtggcctggttcctcgaagggcagctcaacgcagcctacaacatggtcgaccgccacatggcaaagcacgccaacagccccgccgtcatcttcgaagccgacgagccgggcgagggctacaccttgacctacagcgagctcctccgcgaggtctgcaagctggcccacgtattgagagacatgggggtgaggaaaggggacacggtcgtcatctacatgcccgtcatccccgaggccattatcgccttcctcgccgtcgtccggatcggtgccgtccactcggccgtctttgcgggcttctcggccagcgccctgcgcgaccgcatcctggacgcccgatgcaaagtcgtcatcaccgccgacgaggcgaggcgtggcggcaagaccatcggcctcaaaggaatcgtggacctcgcgctgcagggccacgacgattgctgcgtcgcacacgtccttgtctacaagaggaccggcgctgccgctgccgccgccaacgacgtacccttcacgccgggccgtgatctgtggtggcaccaagaggtggaaaaatggccgccgtacatggcacccgagaccgtcaactcggaagaccccctcttcctgctctacacctcgggctcgaccggaaaacccaagggcgtgctgcacagcacggccggctacctcctgggcgcggccgtctcggggaaatacgcattcgacgtgcacgacggcggccgctacttttgcgccggcgacttcggctggatcaccggccacacctatgccgtgtacgccccgctcctcctgggcgtcgcgaccgtcgttttcgagggcaccccgacgtacccgagcgcctcgcgctgctgggatatcatatcggcgcacggcgtgacgcacttttacacggcccccacggcgctaaggctgctcaagcgcgcggccgggagcgacggtgacgtgccccgcatgccgacgttgagggttctagggtcggtcggggagccgatcgcgcccgaggtgtggaaatggtactttgaggtggttggcaagggcagggcacacgttgtggacacatacttccaaaccgagactgggtcgcacgccataacccccttggccggggtgacacccgtcaagccaggcagcgcatccctccccttctttggcatcgccccggcgatactggatcccatctccggccgcgagatccttaccaggggcgtcgagggcgtcttggtctttaaacaaccctggccaagcatggcccgcaccgtcaggggcgcccaccagcggtttatggacacctacttgaggttcaccggcgacctggccacctgcgatcacgacggacactactggatccgcgggcgcgtcgatgacgtcgtcaacgtcagcggccatcgcctctcgacggccgagatcgaggccgcactgctcgagcatcccgccgtggccgaatccgcggccatcgccgtccccgacgacgtgaccggtcaggccgtcaacgcgttcgtgtccgtcaaggacgacagcggcggggagctcgacggtctgcaaaaggagttcatcctgcaggtcagaaaatgcatcgggccgtttgcggctcccaaacagatatacgtcgtgcctgatctgcccaagacgcggagcggcaagatcatgcgtcgtgtgctcagaaagatcctgcttggcgaggtgcatgcggatcagcttggagacatgtccacgctcattaatcctactgcggtggatgtgattatcgctgctgtccatgggactgggaaatag

SEQ ID NO: 126542 - protein, 657 aa, Magnaporthe grisea 70-15
MESREIYPPEAISQGHVKPHIDGFAEYQRLYKQSITNPNEFWARMAREHLTWQRDFQTVMTGSFRHGDVAWFLEGQLNAAYNMVDRHMAKHANSPAVIFEADEPGEGYTLTYSELLREVCKLAHVLRDMGVRKGDTVVIYMPVIPEAIIAFLAVVRIGAVHSAVFAGFSASALRDRILDARCKVVITADEARRGGKTIGLKGIVDLALQGHDDCCVAHVLVYKRTGAAAAAANDVPFTPGRDLWWHQEVEKWPPYMAPETVNSEDPLFLLYTSGSTGKPKGVLHSTAGYLLGAAVSGKYAFDVHDGGRYFCAGDFGWITGHTYAVYAPLLLGVATVVFEGTPTYPSASRCWDIISAHGVTHFYTAPTALRLLKRAAGSDGDVPRMPTLRVLGSVGEPIAPEVWKWYFEVVGKGRAHVVDTYFQTETGSHAITPLAGVTPVKPGSASLPFFGIAPAILDPISGREILTRGVEGVLVFKQPWPSMARTVRGAHQRFMDTYLRFTGDLATCDHDGHYWIRGRVDDVVNVSGHRLSTAEIEAALLEHPAVAESAAIAVPDDVTGQAVNAFVSVKDDSGGELDGLQKEFILQVRKCIGPFAAPKQIYVVPDLPKTRSGKIMRRVLRKILLGEVHADQLGDMSTLINPTAVDVIIAAVHGTGK

SEQ ID NO: 126543 - DNA, 2103 bp, Magnaporthe grisea 70-15; identical to SEQ ID NO: 121976
  CDS (1)..(2103)

SEQ ID NO: 126544 - protein, 700 aa, Magnaporthe grisea 70-15; identical to SEQ ID NO: 121977

SEQ ID NO: 126545 - DNA, 2052 bp, Gibberella zeae PH-1; identical to SEQ ID NO: 121978
  CDS (1)..(2052)

SEQ ID NO: 126546 - protein, 683 aa, Gibberella zeae PH-1; identical to SEQ ID NO: 121979

SEQ ID NO: 126547 - DNA, 1989 bp, Gibberella zeae PH-1; identical to SEQ ID NO: 28190
  CDS (1)..(1989)

SEQ ID NO: 126548 - protein, 662 aa, Gibberella zeae PH-1; identical to SEQ ID NO: 28191

SEQ ID NO: 126549 - DNA, 1989 bp, Apis mellifera; identical to SEQ ID NO: 121984
  CDS (1)..(1989)

SEQ ID NO: 126550 - protein, 662 aa, Apis mellifera; identical to SEQ ID NO: 121985

SEQ ID NO: 126551 - DNA, 1974 bp, Yarrowia lipolytica CLIB122; identical to SEQ ID NO: 121986
  CDS (1)..(1974)

SEQ ID NO: 126552 - protein, 657 aa, Yarrowia lipolytica CLIB122; identical to SEQ ID NO: 121987

SEQ ID NO: 126553 - DNA, 2085 bp, Aspergillus nidulans FGSC A4; identical to SEQ ID NO: 121990
  CDS (1)..(2085)

SEQ ID NO: 126554 - protein, 694 aa, Aspergillus nidulans FGSC A4; identical to SEQ ID NO: 121991

SEQ ID NO: 126555 - DNA, 2016 bp, Candida albicans SC5314; identical to SEQ ID NO: 28222
  CDS (1)..(2016): transl_table=12

SEQ ID NO: 126556 - protein, 671 aa, Candida albicans SC5314; identical to SEQ ID NO: 28223

SEQ ID NO: 126557 - DNA, 2028 bp, Candida albicans SC5314; identical to SEQ ID NO: 28224
  CDS (1)..(2028): transl_table=12

SEQ ID NO: 126558 - protein, 675 aa, Candida albicans SC5314; identical to SEQ ID NO: 28225

SEQ ID NO: 126559 - DNA, 1995 bp, Ustilago maydis 521; identical to SEQ ID NO: 28230
  CDS (1)..(1995)

SEQ ID NO: 126560 - protein, 664 aa, Ustilago maydis 521; identical to SEQ ID NO: 28231

SEQ ID NO: 126561 - DNA, 2043 bp, Cryptococcus neoformans var. neoformans B-3501A; identical to SEQ ID NO: 28238
  CDS (1)..(2043)

SEQ ID NO: 126562 - protein, 680 aa, Cryptococcus neoformans var. neoformans B-3501A; identical to SEQ ID NO: 28239

SEQ ID NO: 126563 - DNA, 2055 bp, Strongylocentrotus purpuratus
  CDS (1)..(2055)
atggatgagttcagagggatcattaacagctcttataacctgaaaatcgagtcatatgatgacctgtggcagtggtccgtggatcattatcctgaattctggggagaatgttggaaattttttgatattgttcattctcagatgtatagcagggtggttgatccaagtaaagggatagacgaagtgccggtgtggtttgagggcagcagactcaacttcgctgaaaatcttctgagataccgagatgatagggtcgcactctttgctgcagtggaaggaaacaaagaaattgagaggataacgtatgctgagctgcacagggttgttgggcaatttgctgcagctttgaagaagatgggggtcaaagcaggagacagagtagtaggctatattcccaactgtgctgtagcaatagaggccatgttagcagcagcaagtataggagccgtctggagctcaacatcaccagattttggagtaaccggtgtgttggacaggttcaaacagatcaagcccaaggtcatcttctccgtggacgctgtggtctataacggcaagacccatgaccacctggccaagctgaagcaggtcgtagagggcctcccagagctggagaaggtcgttgtcattccctacgtcagagccccagctgaacttgacctctcagacattccaaacagcgcatttacctccgaattcttaaagtccggtcaggagatggatgggtcctatcctctgctggagtttgaacagctacccttcaaccaccctctcttcatcatgtattcatccggaaccacaggggcgccaaagtgcatggtccactcctcagggggcactctcattcagcatctgaaggagcacattctccatggtaacatgaggagagaagacaacatcatctattatagtacgactggttggatgatgtggaactggctagtctctgggttggctgtaggcagcggtatagtcctgtacgatggttccccattagttccaggacccaatgtcctttgggacctgatagacatgttagatatctccatcttaggaaccggtgccaaatggctgtctgtactggaagatttaggagtacatccaagaaaaacacacagacttgagaagcttcatacgatattgtcaaccggttcacctttaacccctgcatcgtatgactatgtgtactcatgcgtgaaggatgatattctgctgggctcaataacaggtgggactgatctgatctcatgctttgccggtcagaactggactgttccggtttacagaggagagatccaagccaggaatctaggcatggctattgaatcttggagtgaagaaggcaaacttgtatatggagaaagtggagaactggtctgtaccaaaccattcccatgcatgccaactcacttctggaatgatgctgatggattcaaatacaaaaaggcttactttgccaaattcagtggcgtgtgggcccatggtgatttctgtacgatcaaccctaagacaaaaggcatctacatgcagggaaggagtgacgggactctgaatcccaatggtgttcgatttggaagttcagatatatacaatattgttgaacatctgaaggagatccaggacagtctgtgtgtgcctcagaggaatgctctcaatgaggagagggtcattctcttccttaagatggcaccaggaatgacctttgacccgcaactggtcaagcgggtcaaagttgagatcaggtccgaactgtcggcccgccatgtgcctgcccttatcttggagaccaaagacattccatacaccatcagcggtaagaaagtggaggttgctgttaagaggatcattgccggtcagaagattgtccagaggggggcattctcgaatcctgactcactcgatctataccaagatataccagaactccaaggttatgcaaaaccagtcaagaaccctggtcctcctatgtgtggtgaaatcaaggccaagaaatcgatggttctccagagcagcacatccacttccagcatcgactctacctcaccagaaaactga

SEQ ID NO: 126564 - protein, 684 aa, Strongylocentrotus purpuratus
MDEFRGIINSSYNLKIESYDDLWQWSVDHYPEFWGECWKFFDIVHSQMYSRVVDPSKGIDEVPVWFEGSRLNFAENLLRYRDDRVALFAAVEGNKEIERITYAELHRVVGQFAAALKKMGVKAGDRVVGYIPNCAVAIEAMLAAASIGAVWSSTSPDFGVTGVLDRFKQIKPKVIFSVDAVVYNGKTHDHLAKLKQVVEGLPELEKVVVIPYVRAPAELDLSDIPNSAFTSEFLKSGQEMDGSYPLLEFEQLPFNHPLFIMYSSGTTGAPKCMVHSSGGTLIQHLKEHILHGNMRREDNIIYYSTTGWMMWNWLVSGLAVGSGIVLYDGSPLVPGPNVLWDLIDMLDISILGTGAKWLSVLEDLGVHPRKTHRLEKLHTILSTGSPLTPASYDYVYSCVKDDILLGSITGGTDLISCFAGQNWTVPVYRGEIQARNLGMAIESWSEEGKLVYGESGELVCTKPFPCMPTHFWNDADGFKYKKAYFAKFSGVWAHGDFCTINPKTKGIYMQGRSDGTLNPNGVRFGSSDIYNIVEHLKEIQDSLCVPQRNALNEERVILFLKMAPGMTFDPQLVKRVKVEIRSELSARHVPALILETKDIPYTISGKKVEVAVKRIIAGQKIVQRGAFSNPDSLDLYQDIPELQGYAKPVKNPGPPMCGEIKAKKSMVLQSSTSTSSIDSTSPEN

SEQ ID NO: 126565 - DNA, 2037 bp, Tribolium castaneum; identical to SEQ ID NO: 122000
  CDS (1)..(2037)

SEQ ID NO: 126566 - protein, 678 aa, Tribolium castaneum; identical to SEQ ID NO: 122001

SEQ ID NO: 126567 - DNA, 2025 bp, Tribolium castaneum; identical to SEQ ID NO: 122002
  CDS (1)..(2025)

SEQ ID NO: 126568 - protein, 674 aa, Tribolium castaneum; identical to SEQ ID NO: 122003

SEQ ID NO: 126569 - DNA, 1977 bp, Prochlorococcus marinus str. MIT 9303; identical to SEQ ID NO: 122004
  CDS (1)..(1977): transl_table=11

SEQ ID NO: 126570 - protein, 658 aa, Prochlorococcus marinus str. MIT 9303; identical to SEQ ID NO: 122005

SEQ ID NO: 126571 - DNA, 2001 bp, Mycobacterium sp. JLS
  CDS (1)..(2001): transl_table=11
gtgtgcagttcacgtcgggtgactacgctcacacccatgtccgacgtgcacaccgaagtcccgtccagctacccgccgcccgccgaattcgccgagcaggcgaacgccaaagcggagatgtatcgagaagccgaggaggaccggctcgccttctgggccaaacaggccgagcgattgtcgtgggacaccccgttcaccgaggtgctggactggtcggacgccccgttcgcgaagtggttcgtcggcggcaagatcaacgtggcctacaactgcgtcgaccgccacgtcgaggccggcaacggtgaccgcgtggcgatccactgggagggcgaaccggtcggcgactcccgctcactgacctacgccgaactcaaagacgaagtgtgcaaggcggccaacgcgctgaccgacctcggtctgaccgccggcgaccgggccgcgatctacatgccgatggtgcccgaggcgatcgtggcgatgctggcgtgtgcgcgcctcggcgtcctgcactcggtggtgttcgccgggttctcggcgtcggcgctcaaggcccgcatcgaggacgccgaagccaaactcgtcatcaccaccgacgggcagtaccgccgcggtaaggccgcctcgttgaaggacgcggtcgacgaggccgtcgacggccaaccctcgatcgagcacgttctggtggtgcgccgcaccgggatcgacgtcaagtggaccgacggacgcgacctgtggtggcacgagacggtcgacggtgcgtccaccgagcacacccccgaggccttcgactccgagcatccgctgttcctgctctacacctcgggcacgacggggaagcccaagggaatcgtgcacacgaccggcggctacctcgtgcagtcgtcgtacacccaccacaacgtgttcgacgtcaaacccgacaccgacgtgtactggtgcaccgcggacatcggctgggtcaccggccacacctacatcacctacggcccgctgtcgaacggcgtcacccaggtggtttacgagggcaccccgacctcaccgagcgagcaccgtcatttcgaggtcatcgagaagtacggcgtcaccatctactacaccgcgccgacgctggtccgcacgttcatgaaactcggccgcgcggtccccgacgcccacgatctgtcgagtctgcggctactcggttcggtcggtgagccgatcaaccccgaggcgtggcgttggtaccggaatgtgttcggcgacaacaatatcccggtcgtcgacacgtggtggcagaccgagaccggcgcgatcatgatctcgccgctgccgggtgtcacggccgcgaaacccggttcggcgatgaccccgttgccgggcatctcggccaagatcgtcgacgacgacggtaaccaactcccgcccggcagcgaccacggtgagcaggccaacgggtacctggtgctcgaccagccctggccggcgatgctgcgcggcatctggggcgatccgcagcgcttcaaggagacctactggtcccgattcgccgagcagggttggtacttcgccggtgacggcgcgcgttacgacgccgacggcaacatctgggtgctgggccgcatcgacgatgtgatgaacatatccgggcaccggatctccaccgcggaggtggagtcggcgctcgtgggtcacgcgcacgtcgccgaggccgccgtcgtgggcgccaccgacgaccacaccggtcaggcgatctgcgcgttcgtcatcctcgagtcctccgcggccgacaaaccgcacgagcacatggtcgaggagttgcgcgccgaagtggccaaggagatctccccgatcgcccgcccgcgcgagatccacgtggtgcccgagctccccaagacccgcagcggcaagatcatgcgacgactgctgcgcgacgtcgccgaaggccgcgaactcggcgacacctcgacgctcgtcgaccccggcgtgttcgaggcgatccgcgccagcaaggccgaggtttag

SEQ ID NO: 126572 - protein, 666 aa, Mycobacterium sp. JLS
MCSSRRVTTLTPMSDVHTEVPSSYPPPAEFAEQANAKAEMYREAEEDRLAFWAKQAERLSWDTPFTEVLDWSDAPFAKWFVGGKINVAYNCVDRHVEAGNGDRVAIHWEGEPVGDSRSLTYAELKDEVCKAANALTDLGLTAGDRAAIYMPMVPEAIVAMLACARLGVLHSVVFAGFSASALKARIEDAEAKLVITTDGQYRRGKAASLKDAVDEAVDGQPSIEHVLVVRRTGIDVKWTDGRDLWWHETVDGASTEHTPEAFDSEHPLFLLYTSGTTGKPKGIVHTTGGYLVQSSYTHHNVFDVKPDTDVYWCTADIGWVTGHTYITYGPLSNGVTQVVYEGTPTSPSEHRHFEVIEKYGVTIYYTAPTLVRTFMKLGRAVPDAHDLSSLRLLGSVGEPINPEAWRWYRNVFGDNNIPVVDTWWQTETGAIMISPLPGVTAAKPGSAMTPLPGISAKIVDDDGNQLPPGSDHGEQANGYLVLDQPWPAMLRGIWGDPQRFKETYWSRFAEQGWYFAGDGARYDADGNIWVLGRIDDVMNISGHRISTAEVESALVGHAHVAEAAVVGATDDHTGQAICAFVILESSAADKPHEHMVEELRAEVAKEISPIARPREIHVVPELPKTRSGKIMRRLLRDVAEGRELGDTSTLVDPGVFEAIRASKAEV

SEQ ID NO: 126573 - DNA, 1983 bp, Burkholderia vietnamiensis G4
  CDS (1)..(1983): transl_table=11
atgtctgcgattgaatcggttcttcacgaaacccgtcagtttgcgccgcccgcggcgctcgagaagacggcgaccatttccggcatgccggcctaccgtgcgctcgtcgccgaggccgagcaggactacgagggcttctgggcgcgtctcgcgcgcgagaacctgagctggcacaagccgttcaccaaggtgctcgacgagagcaacgcgccgttctgcacgtggttcgacgacggcgagctcaacgcgtcgtacaactgcctcgaccgtcacgtcgaagccggcaacggccagcgcgtcgccgtgatcttcgaggccgacgacggcaccgtcacgcgcgtcacctacgccgagctgctcgcgcgcgtgtcgcgcttcgccaatgcgctgaaaaaacgcggcatcggcaagggcgatcgcgtcgtcatctacatcccgatgtcgatcgaaggcatcgtcgcgatgcaggcctgcgcgcgcatcggcgccacgcactcggtcgtgttcggcggcttctccgccaaatcgctgaacgaacggctcgtcgacgtcggcgcggtcgcgctgatcaccgccgacgagcaggcgcgcggcggcaagacgctgccgctcaagagcatcgccgacgaagcgatcgcgatgggcggctgcgacgcggtcaagagcgtgatcgtctatcgccgcaccggcggcaagatcgactggcatgccgggcgcgatctgtggatgcacgagctcgccgacgccgagtccgaccactgcccgccagaatgggtcggcgccgagcatccgctgttcattctctacacctccggctcgaccgggaagcccaagggtgtgcagcacagcaccggcggctacctgctgtgggccgcgcagacgatgaagtggaccttcgactggaagcccgacgacgtgttctggtgtacggccgacatcggctgggtcaccggccacacgtacatcacctacgggccgctcgcatgcggcggcacgcaggtcgtgttcgagggcgtgccgacctacccggacgccgggcgcttctggaagatgatcgccgaccacaaggtcagcgtgttctataccgcgccgaccgcgatccgttcgctgatcaaggccgccgacgccgacgacaaggtccacccgaagagctacgacctgtcgagcctgcgcatcatcggcacggtcggcgagccgatcaatccggacgcgtggatgtggtatcacaagcacgtgggcggcgagcgctgcccgatcgtcgacacctggtggcaaaccgaaaccggcggccacatgatcacgccgctgccgggcgcgacgccgacggtgcccggttcgtgcacgctgccgctgccggggatcatggccgcggtggtcgacgagacgggccaggacgtgcccaacgggcaaggcgggatcctggtggtcaagcgtccgtggccgtcgatgatccgcacgatctggggcgacccggagcgcttcaagaagagctactaccctgaggagctcggcggcgggctgtatctggcgggcgacggcacggtgcgcgacaaggacaccggttacttcacgatcatggggcgcatcgacgacgtgctgaacgtgtcgggccaccggctcggcacgatggagatcgagtcggcgctggtgtcgcacgagctggtggcggaagcggccgtggtcggccggccggacgacacgacgggcgaggcagtggtcgcgttcgtggtgctcaagcgctcgcgccctgaaggtgacgaggccgcggcgctggccaaggcgctgcgcgactgggtcggcaagcagatcgggccgatcgcgaagccgaaggacatccgcttcggcgacaacctgccgaagacgcgctcgggcaagatcatgcggcgcctgctgcgctcgctcgcgaagggcgaggcgatcacgcaggacacctccacgctcgagaatccggcgattctggagcagctcaccgaggtgcggtaa

SEQ ID NO: 126574 - protein, 660 aa, Burkholderia vietnamiensis G4
MSAIESVLHETRQFAPPAALEKTATISGMPAYRALVAEAEQDYEGFWARLARENLSWHKPFTKVLDESNAPFCTWFDDGELNASYNCLDRHVEAGNGQRVAVIFEADDGTVTRVTYAELLARVSRFANALKKRGIGKGDRVVIYIPMSIEGIVAMQACARIGATHSVVFGGFSAKSLNERLVDVGAVALITADEQARGGKTLPLKSIADEAIAMGGCDAVKSVIVYRRTGGKIDWHAGRDLWMHELADAESDHCPPEWVGAEHPLFILYTSGSTGKPKGVQHSTGGYLLWAAQTMKWTFDWKPDDVFWCTADIGWVTGHTYITYGPLACGGTQVVFEGVPTYPDAGRFWKMIADHKVSVFYTAPTAIRSLIKAADADDKVHPKSYDLSSLRIIGTVGEPINPDAWMWYHKHVGGERCPIVDTWWQTETGGHMITPLPGATPTVPGSCTLPLPGIMAAVVDETGQDVPNGQGGILVVKRPWPSMIRTIWGDPERFKKSYYPEELGGGLYLAGDGTVRDKDTGYFTIMGRIDDVLNVSGHRLGTMEIESALVSHELVAEAAVVGRPDDTTGEAVVAFVVLKRSRPEGDEAAALAKALRDWVGKQIGPIAKPKDIRFGDNLPKTRSGKIMRRLLRSLAKGEAITQDTSTLENPAILEQLTEVR

SEQ ID NO: 126575 - DNA, 1959 bp, Dehalococcoides sp. BAV1
  CDS (1)..(1959): transl_table=11
atgagtaccgaagaaaagaagtttgacacgcaaaatctgcctaccaagacctatttctggccacttaaaagataccaggatctatacaacagctcgctatctgaccctgaggctttctgggcaaaacactcagatgtgctttcatgggaaaagccatgggaaagagtactggactggaatccgccttatgcccgctggtttgtaggcggcaagctgaatatgtcttaccaatgcgtagaccgccatgccaaaagctggcgtaaaagcaaggtagctatctactgggagggtgaaaacggggatacccaaactatcagctattcgaacctttacgaaaacgtaaaccgctatgcctctgtactgaaaaagctgggcataggcaagggagacaaagtaaccgtctacctgcccatgatacctgaaatggtctatatcctgctggcctgcaaccgggttggggccgtccacaacgtaatattttcaggtttttcttcccagtctattgcagacagggtgaatgactccggttcaaaaatgattgtaaccgccagcggcggccaccgccgcggtaaaatactgccgctcaaggaaatagtagatgaggcagtcaaatccacccctactattgaacatgtactggttattaaatataccggccatgaagtggttatggaccccaccaaagatgtgtgggcacatgatttgcttaaagatgccgataaatatgtagctcctgaagccatggaatctaccgacccgctctttatcctgtacacttcaggtactaccggcaaaccaaagggcattctgcatggtacgggcggttacggtgtctgggcatgtaataccttaaaatgggctttcaaacccactgatgaatcagtcttctggtgcacagcagacgtaggctggattaccgggcacacttacgtagtatatgccccgctggctctgggtctgactcaggttatctacgaaggtgcaccggactatccttcggttgaccgctggtgggagattattgataaatacggggtaagcatattctatacctcacctaccgccatacgcatgtttatgcgccacggcgaggaactgcctgccaaacatgaccttagcacccttgagatgctgggaagcgtaggcgaacccatcaaccctgaggcatgggaatggtactacaaaaatataggccatgagaactgccctatttctgatacctggtggcagaccgaaacaggcggttttatgattaccccctgtccgggtatccagtccttcccgttaaaaccgggctcggccactttgcctctgccgggtgttgatcctgtagtggtagatgctgaaggtaaaatcctgccggctaatgagaccggttttattgctatccgcaaaccatggccgggcataatgctgggcatatataacggagatgaactttacaaaaagacctactggagccgtttccccggctggtattgtccgggtgacttctccatgaaagattcagacggctatctctggcttttgggacgggctgacgaagttatcaaagtagccggacaccgcataagcaccgccgaactggagcatgcactggtaggccacagttcagttgccgaagcggcagtagcttcacgccctgacgaagtaaagggcgaggccattgtggttttcgtcaccctgaagaaaaacgtggaagcctctgcagaggtaaaaagagaactcacccaccatctccgctcggctatcggcactattgccactccggaggagattatcttcgtagagaaactgcccaaaacccgttcgggcaagattatgcgccgcctgctgaaggctgttgccaacgaagtacctatcggtgataccactacccttgacgatgaaacttcggtcaatgaagccagagcggctttcgacgaactgctggcggcacgcaaacaccacaaacactag

SEQ ID NO: 126576 - protein, 652 aa, Dehalococcoides sp. BAV1
MSTEEKKFDTQNLPTKTYFWPLKRYQDLYNSSLSDPEAFWAKHSDVLSWEKPWERVLDWNPPYARWFVGGKLNMSYQCVDRHAKSWRKSKVAIYWEGENGDTQTISYSNLYENVNRYASVLKKLGIGKGDKVTVYLPMIPEMVYILLACNRVGAVHNVIFSGFSSQSIADRVNDSGSKMIVTASGGHRRGKILPLKEIVDEAVKSTPTIEHVLVIKYTGHEVVMDPTKDVWAHDLLKDADKYVAPEAMESTDPLFILYTSGTTGKPKGILHGTGGYGVWACNTLKWAFKPTDESVFWCTADVGWITGHTYVVYAPLALGLTQVIYEGAPDYPSVDRWWEIIDKYGVSIFYTSPTAIRMFMRHGEELPAKHDLSTLEMLGSVGEPINPEAWEWYYKNIGHENCPISDTWWQTETGGFMITPCPGIQSFPLKPGSATLPLPGVDPVVVDAEGKILPANETGFIAIRKPWPGIMLGIYNGDELYKKTYWSRFPGWYCPGDFSMKDSDGYLWLLGRADEVIKVAGHRISTAELEHALVGHSSVAEAAVASRPDEVKGEAIVVFVTLKKNVEASAEVKRELTHHLRSAIGTIATPEEIIFVEKLPKTRSGKIMRRLLKAVANEVPIGDTTTLDDETSVNEARAAFDELLAARKHHKH

SEQ ID NO: 126577 - DNA, 1947 bp, Thermus thermophilus HB27; identical to SEQ ID NO: 122006
  CDS (1)..(1947): transl_table=11

SEQ ID NO: 126578 - protein, 648 aa, Thermus thermophilus HB27; identical to SEQ ID NO: 122007

SEQ ID NO: 126579 - DNA, 1947 bp, Desulfovibrio vulgaris subsp. vulgaris str. Hildenborough
  CDS (1)..(1947): transl_table=11
atggcatcgcccgccgccactctcgatgcgctgctgcgtgaagagcgcgtgttccgccctctgccacgcgtcgtcgccgatgccgtggtcaaccctcaggacgtggcccgcgcacgcgaacaggccggaacggcccctctcgccttctgggaagaggccgccgaagagctggaatggttccgccgctgggacggtgtgctcgatgacagcaacgccccgttcatgcgctggtttcccggtgcgctgtgcaacatcgtccacaacgccctcgaccggcatatcgagacatccaaccgccaccgccttgccctcatatgggaaggcgaaccgggtgacagccgtcgtttcacctatttcgacctctaccgtgaggtgaaccgcctcgccaatgccatgcgttccctcggcgtgacgaagggcgacagggtggtcatctacatgccccccctgcccgagacggtcttcgccatgctcgcctgcgccaagataggcgcggtacacagcacggtgttcggtggcttctcggcccgttcgctgtgcgaccgcgtcgaagacgcaaggcccaccctgctgctgacggttgacggattctaccgcaacggccgcgtcgtaccgctcaaacccgtcgccgacgacgccgtggacgccctgtcaccggaggcacgggccggtctgcatcatgtcgtggtcgtgcatcgcgcccacctcgagacccccatgcgcgacgggcgcgacatctggtatcacgacctcgtgcgcggacagtccaccgaggcgcttaccgaagtcctctccgccaacgacccgctgttcgtcctctacacttccggcactacaggcaagcccaaggggctggtgcacagtcacggcggctacatggtgggcgtacaccgcaccatgcgctgggtcttcgacgtgcggcccaccgacatcttctggtgcactgccgaaccgggctggataacgggccatagctacggcgtgtacgggccgctcatggcgggcaccaccaccgtcctctacgaggggcaccccctgtaccccgaagcgggcaggctgtggtccatggtcgaacgatggggtgtcaccatcctgtacaccgtccccacggtcatccgcatgctcatgcgattcggtccgctgtaccccgcgcgccacgacatcaccacgctacggcttctggctaccgtaggcgaacccatcagcccggagacatgggtgtggttctaccgcaccatagggcgagggcgctgcccggtgctcgacacatggtggcagacggagacgggcatgatcatggtcagcccgctgccggtgtcggccctgaaacccggttcggtggcccgccccctgcccggtgtggatgtggatatcgtggacggggaaggtgcccccgtcccccccggcaggggtggactgctggtggtgaagaacccgtggcccgccatggcatgcggtgtcttcggtgacgatgaggccttccgcaggctttactgggagcgctttcccggatggtactgcacgggtgacgtggcccgccgggatgacgacgggtacatctggatacagggacgtgccgacgacgtcattctcatcgccggacaccgtatcgggacggcagagatggaagcggccctcgcgtcgcatcccgccgtggcggaatgcgccgtcatcggcgtgcccgacaggctgaagggcgaagtgggcaaggcgttcgtcgttctgcgcgataccgaagaggctgcggcagaagagcaggccctagccacgtcactggtggggcatgtccggcgtgaactcggcccggtggccgtcatacgcgatgtcgtattccgtgagggactgccacgcaaccgcagcggcaagatcatgcgccgtattcttcgttcggaagagatgggcgtggagacgggtgacctctcgacgctggaagacgcctatatctga

SEQ ID NO: 126580 - protein, 648 aa, Desulfovibrio vulgaris subsp. vulgaris str. Hildenborough
MASPAATLDALLREERVFRPLPRVVADAVVNPQDVARAREQAGTAPLAFWEEAAEELEWFRRWDGVLDDSNAPFMRWFPGALCNIVHNALDRHIETSNRHRLALIWEGEPGDSRRFTYFDLYREVNRLANAMRSLGVTKGDRVVIYMPPLPETVFAMLACAKIGAVHSTVFGGFSARSLCDRVEDARPTLLLTVDGFYRNGRVVPLKPVADDAVDALSPEARAGLHHVVVVHRAHLETPMRDGRDIWYHDLVRGQSTEALTEVLSANDPLFVLYTSGTTGKPKGLVHSHGGYMVGVHRTMRWVFDVRPTDIFWCTAEPGWITGHSYGVYGPLMAGTTTVLYEGHPLYPEAGRLWSMVERWGVTILYTVPTVIRMLMRFGPLYPARHDITTLRLLATVGEPISPETWVWFYRTIGRGRCPVLDTWWQTETGMIMVSPLPVSALKPGSVARPLPGVDVDIVDGEGAPVPPGRGGLLVVKNPWPAMACGVFGDDEAFRRLYWERFPGWYCTGDVARRDDDGYIWIQGRADDVILIAGHRIGTAEMEAALASHPAVAECAVIGVPDRLKGEVGKAFVVLRDTEEAAAEEQALATSLVGHVRRELGPVAVIRDVVFREGLPRNRSGKIMRRILRSEEMGVETGDLSTLEDAYI

SEQ ID NO: 126581 - DNA, 1986 bp, Desulfovibrio vulgaris subsp. vulgaris str. Hildenborough
  CDS (1)..(1986): transl_table=11
atgagccaggaacgtatcgagagcatgatggatgagaagcgccacttcgcccctcccgctgacagccggggcagggcacatgtgtccggcgaagccgcgcgagaggcgcttgtgcggcgtgccgccgaagaccccgaaggcttctggggcgaacgtgcggcacagctcatcgactggttcaagccgtgggataccgtgctggatgccgacatgaacgaaccgcgcatcgagtggttcaagggcggaaggctcaacgtggcccacaactgcctcgacaggcatgtggcaggaaaccggcgcaacaaggccgccatcatctggcagggcgaacccgaagaggacgtgcgggtgctcacctaccagatgctgtatgacgaggtgcgccgtttcgccgccgttctgcgcaagatgggcgtgcacaagggcgaccgcgtctcgctgtacatgcccatgattcctgaactggctgtcgccatgctcgcctgcgcgcgcatcggggctgtccattccatcgtctttgccggattctcggctgtgagccttcagaatcgcatccacgactgcgaggccaaggtcgtggtcaccgccgacgcggtgctgcgtgccggacggcgcatccccctcaaggtgaacgtcgacgaggccgtgcgccagtgtcccagcgtggagaaggtcgtcgtcgtcaaccgcgggagcctcgaagtgaccatggaggaggggcgtgacctgtggtggcatgaggtcatggccgaccgcaccctcgacgtcgaccgcccctgcgaggagatggatgcggaggacatgctgttcatcctctacaccagtggcagcaccggcaagcccaagggcgtggtgcacaccacgggcggctatcttacctatgccgcgcacaccacgcagtgggtcttcgacgtgcaggacgacgacgtgtactggtgcaccgccgacatcggctggattaccgggcacagctacatcgtctacggcccgctggccctcggggcgacctcgctgatgttcgagggtgtgccctcgtggccctcgcccgaccgtttctggcgcatcgtcgagaagttccgcgtcaacatcttctacaccgcccccaccgtcgtccgcgcactcatgcgtgaaggcacggactggacggaacggcacgacctttcgtcgttgcgtgtcctcgggtcggtgggcgaacccatcaaccccgaagcgtggatgtggtaccatacccacatcggcaagggacgcctgcccatcgtcgacacatggtggcagacagagacgggtggcatcatgatttcgggcctgccctacgccaccaccctcaagcccggttcggcaacgcagccgctgcccggcgtcgatgccgccatcgtccggcccgacggcagccccgcagggcccaacgaaggcgggcatcttgtcatccgcaagccgtggccgggcatgttgcgcggcatcttcggctcgcccgaacggtaccgctcgacatacttcgaacgctttcccggcatgtacgagtccggcgatggcgcacgcaccgatacggacggctatttctggatcatgggccgcctcgacgacgtcatcaacgtctcgggacaccgcatgggcacggccgaggtcgagtctgcgctggtcgcccatcccagcgtcgcggaagccgccgtcgtgggcatgccacacgccgtgaagggtgaggccatctacgcctacgtgactctcggcgccgatgcggaagagaccgaggagctccgcgccgagctgcgcgcatgggtgcgcaaggagataggccccatcgccacgcccgatgtgctccagttcgcagaggggctccccaagacgcgtagcggcaagatcatgcggcgcatcctgcgcaagatcgccgccggggccaccagcgagttcggggacacttctactctcgccgaccccggggtcgtctccgacctcattgaaggtcgcctgcaacttaccggaaggtag

SEQ ID NO: 126582 - protein, 661 aa, Desulfovibrio vulgaris subsp. vulgaris str. Hildenborough
MSQERIESMMDEKRHFAPPADSRGRAHVSGEAAREALVRRAAEDPEGFWGERAAQLIDWFKPWDTVLDADMNEPRIEWFKGGRLNVAHNCLDRHVAGNRRNKAAIIWQGEPEEDVRVLTYQMLYDEVRRFAAVLRKMGVHKGDRVSLYMPMIPELAVAMLACARIGAVHSIVFAGFSAVSLQNRIHDCEAKVVVTADAVLRAGRRIPLKVNVDEAVRQCPSVEKVVVVNRGSLEVTMEEGRDLWWHEVMADRTLDVDRPCEEMDAEDMLFILYTSGSTGKPKGVVHTTGGYLTYAAHTTQWVFDVQDDDVYWCTADIGWITGHSYIVYGPLALGATSLMFEGVPSWPSPDRFWRIVEKFRVNIFYTAPTVVRALMREGTDWTERHDLSSLRVLGSVGEPINPEAWMWYHTHIGKGRLPIVDTWWQTETGGIMISGLPYATTLKPGSATQPLPGVDAAIVRPDGSPAGPNEGGHLVIRKPWPGMLRGIFGSPERYRSTYFERFPGMYESGDGARTDTDGYFWIMGRLDDVINVSGHRMGTAEVESALVAHPSVAEAAVVGMPHAVKGEAIYAYVTLGADAEETEELRAELRAWVRKEIGPIATPDVLQFAEGLPKTRSGKIMRRILRKIAAGATSEFGDTSTLADPGVVSDLIEGRLQLTGR

SEQ ID NO: 126583 - DNA, 1953 bp, Picrophilus torridus DSM 9790
  CDS (1)..(1953): transl_table=11
atgtatagtttaatgttaaatactataatgagtgagacattaccaacagatgagagatacaatacctcttttagcaggtatcttgatgagtacaggagatccattgagaacacagaggagttctggaatgaaaaatcaaaaataatagaatggttcagggactacgacagggttctggatgattcgaagaagccattttttagatggtttgtcaatggaaaaacaaacgtttcatacaactgccttgacaggcatataaagaccgataaaagaaacaaggttgcatacatatgggtctcagaatcaggaaatgaaaagatagtaacatactacggtttatacagaagggtcaatgcccttgcaaggggacttttaaacatgggccttagaaaaggggatcacgttacaatatacatgccaatgatacttgaggctccggttgcaatgcttgcatgtgccagaataggtgttgtgttcaacgttgttttctctggctttggcgctgaggcacttgcagagagaataaaggattcaagatcaaagatggttataacagctgatggtgcatggcgccgtggaaagatcgttgagttaaaaagcatagttgacagggcacttgagttaaccgagaacgttgagagcgtaatagttgtgaaaaatacaaacaatgagataaacatggaatcagagcgcgatttctattacaatgatattatagaggacggctacgttgaaccagagaaaatggattcaaacgatcctttgtttatattatacacatcgggaacgactggaaagccaaagggcatagtccatggcaacggcggttaccctgtatggatatcaaacacaatgaaatgggcctttgatccaaaggacgaggatagatactggtgcgccgcggatattggctggataaccgggcacagctatattgtctttgcgccgctgctccttggagtaacatcaataatgtacgagggcgcaatagattatccaaagccggatcgtgtctgggatataatagaaaggtacggtgttaacatattatacacgtccccaacggccataagattgttaatgaagtacggagataagtatccaaattcacatgatctgagctcattaaaaacgcttggaactgttggtgagccaataaacccggctgcatggcactggttctatgaggtaataggaaaatcaaggtgtccaataatagatacctactggcagaccgagaccggtggattcacaatagcacctgcgcttggacttggacttcctgatttaaaaccgggctctgcaacatttccgctgcctggaatagatcctgtgatactcgatgacaatggaagggaggtaaagagaaacgagaagggatacattgttttaagaaggccatggcccggtttaatgctaacagtgaacaacgacgataaaaggtacatagaaacctatttttcaaagtttaaggatatgtacttaatgggcgactacgcggtaaaggacgatgatggctacatatggctgcttggccgtgctgacgaggtattaaaggtctcagggcatagaataggaacaatagaaatagaggatgcacttgtatcgatgaaggagatagccgaggcagctgtgttcggaaaacctgatacaataaagggcgatacaataatagcatttgtaacattaaaggagggctatgaaaagagtcctgacctgatagattattttaaaaggaagatcagggaagagcttggaccaatcatggttcctgaggagatacatatagtcgattcactgccaaagacaagatcaggaaagatcatgaggcgtgttataaaggccgtttatctggaccagcttccaggggatatcacaacgcttgaaaacgaggcatctgtagacgagataaaaagggccgttgaggaattaaaaaggtacacaggtgattaa

SEQ ID NO: 126584 - protein, 650 aa, Picrophilus torridus DSM 9790
MYSLMLNTIMSETLPTDERYNTSFSRYLDEYRRSIENTEEFWNEKSKIIEWFRDYDRVLDDSKKPFFRWFVNGKTNVSYNCLDRHIKTDKRNKVAYIWVSESGNEKIVTYYGLYRRVNALARGLLNMGLRKGDHVTIYMPMILEAPVAMLACARIGVVFNVVFSGFGAEALAERIKDSRSKMVITADGAWRRGKIVELKSIVDRALELTENVESVIVVKNTNNEINMESERDFYYNDIIEDGYVEPEKMDSNDPLFILYTSGTTGKPKGIVHGNGGYPVWISNTMKWAFDPKDEDRYWCAADIGWITGHSYIVFAPLLLGVTSIMYEGAIDYPKPDRVWDIIERYGVNILYTSPTAIRLLMKYGDKYPNSHDLSSLKTLGTVGEPINPAAWHWFYEVIGKSRCPIIDTYWQTETGGFTIAPALGLGLPDLKPGSATFPLPGIDPVILDDNGREVKRNEKGYIVLRRPWPGLMLTVNNDDKRYIETYFSKFKDMYLMGDYAVKDDDGYIWLLGRADEVLKVSGHRIGTIEIEDALVSMKEIAEAAVFGKPDTIKGDTIIAFVTLKEGYEKSPDLIDYFKRKIREELGPIMVPEEIHIVDSLPKTRSGKIMRRVIKAVYLDQLPGDITTLENEASVDEIKRAVEELKRYTGD

SEQ ID NO: 126585 - DNA, 1959 bp, Bartonella quintana str. Toulouse
  CDS (1)..(1959): transl_table=11
atgtctgaaaaaatctatccagtaccaaccgatatcaaaaaaaatgctttgatcaatgaagagacctatcaaaaatggtatcgggaaagcattaatgatccagaagccttctgggcaaaacatggccaacgcattgagtggtttaagccctatacaaaagtaaaaaacacttcatttaacggtgatgtatcgattcaatggtacgaagatggtataacaaatgttgcctataattgcattgatcgtcatctaaaaaactctggcaaccatatcgcactgatttgggaggggaataacccttatcatgataaaaaaataacctataatgaactttatgaacatgtttgtcgctttgctaatatattaaagaatcatggcgtaaaaaaaggtgacagagttaccatttacctcccgatgatacccgaagccgcttatgccatgctcgcctgcgctcgcattggtgctattcattcggttatttttgccggcttttcttctgaagcgatagcagaccgcattgttgattgcaaatcaacctttatcatcaccgctgatcaaggcctgcgtggaggaaaattgatcaagttaaaaaacaatattgatcatgctattgatattgcagcacgccgtggtgttcatgttaatcaagtcttggtcatacggcgtacaagtggaacaattgattgggtaaagggacgtgatttttggtatcatgaagaaatatctcatgccaaaacggattgtccagcagaaatgatgaatgctgaagatccactttttattctttatacctccggttcaacaggcaaaccaaaaggtgttctgcatacaacagctggctatctcgtttatgtatcgatgacacatcaatatgtttttgattatcatcctggtgaaatttactggtgtactgccgatattggctggatcagtggtcattcttacttgatttatggtcctctatgcaacggtgccaccactttaatgtttgaaggtataccaacctttcccgaccaaggtagattctgggaaattgtcgataagcataaagtaaatacgctttacactgcaccaactgctattcgcgcattaatgggtgctggaaattcttttgttgaacattctaaaagaacatccttacgcctcttaggcaccgtaggcgaaccgattaatccagaagcatggaaatggttttatcatacggttggagacaatcgctgtcccattctcgacacatggtggcaaacagaaacaggagggcatatgatcacgcccctaccaggcgcaacacaactcaaagcaggatcagccacccatccattctttggtgttcaactccaaatcattgatggcgaaggaaatgttctggaaggtgaagcagaagggaatctctgtattattgactcatggcctggtcaaatgcgcactctctataatgaccatgagcgttttatcgaaacctatttttccacatataaaggaaaatattttacaggcgacggttgtaaacgagacaatgacggttattactggattacaggacggattgatgacattctcaatgtctctggacacagattaggaacagctgaaattgaatcagcgcttgtttctcaccccgctatttcagaagcagctgttgtcggttaccctcatcccattaaaggacaaggaatttacagttttgtcaccttaatggaaggcataaccccaagtgaagaattgtataaagatcttattcagcatgtcaaaaaagaaataggatcgattgccctcttggataaaattcagtttacacctcagctccccaaaacgcgatcgggaaaaattatgagacgcattttgagaaaaatcgccgaaaatgatttcgataacctaggagatatttcaacccttgccgaaccacaagtcgttgacgatcttattgccaacagacaaaatacagaagccacggcttaa

SEQ ID NO: 126586 - protein, 652 aa, Bartonella quintana str. Toulouse
MSEKIYPVPTDIKKNALINEETYQKWYRESINDPEAFWAKHGQRIEWFKPYTKVKNTSFNGDVSIQWYEDGITNVAYNCIDRHLKNSGNHIALIWEGNNPYHDKKITYNELYEHVCRFANILKNHGVKKGDRVTIYLPMIPEAAYAMLACARIGAIHSVIFAGFSSEAIADRIVDCKSTFIITADQGLRGGKLIKLKNNIDHAIDIAARRGVHVNQVLVIRRTSGTIDWVKGRDFWYHEEISHAKTDCPAEMMNAEDPLFILYTSGSTGKPKGVLHTTAGYLVYVSMTHQYVFDYHPGEIYWCTADIGWISGHSYLIYGPLCNGATTLMFEGIPTFPDQGRFWEIVDKHKVNTLYTAPTAIRALMGAGNSFVEHSKRTSLRLLGTVGEPINPEAWKWFYHTVGDNRCPILDTWWQTETGGHMITPLPGATQLKAGSATHPFFGVQLQIIDGEGNVLEGEAEGNLCIIDSWPGQMRTLYNDHERFIETYFSTYKGKYFTGDGCKRDNDGYYWITGRIDDILNVSGHRLGTAEIESALVSHPAISEAAVVGYPHPIKGQGIYSFVTLMEGITPSEELYKDLIQHVKKEIGSIALLDKIQFTPQLPKTRSGKIMRRILRKIAENDFDNLGDISTLAEPQVVDDLIANRQNTEATA

SEQ ID NO: 126587 - DNA, 1959 bp, Bartonella henselae str. Houston-1
  CDS (1)..(1959): transl_table=11
atgtctgaaaaaatctacccaataccggataatatcaaaaaaaatgctttgatcgatgaagaaacctatcaacaatggtatcaggaaagcatcaatgatccagaaagtttctgggcaaaacatggtcaatgtattgaatggtttaaaccttatacaaaagtaaaaaatacttcctttaatggcgatgtatcgattcaatggtatgaagatggcataacaaatgttgcctataactgcattgatcgccacctaaaaacccatggtgataaaatcgcactgatttgggaaggagataacccttatcacgataaaaagataacctataatgaactttatgaacatgtctgtcgttttgccaatattttaaaaaatcacggtgtcaaaaaaggcgataaggttaccatttacctaaccatgatccctgaagcagcctatgcaatgctagcctgtgcccgtattggcgctattcattcggttatttttgcaggtttttctcctgaagcaatagcaggacgcattgtagactgcgaatcgacttttatcattaccgcaaatcaaggcttgcgtggaggaaaacagattaatttaaaagacagtgttgaccatgctattgagattgccgctcgccagaatgtgcatgtggatcaagtcatggtcatacggcgaacctgtggaccaatccattgggtagagggacgtgatttttggtatcatgaagaagtatctcataccaaaacggactgtccagcagaaaagatgaatgctgaagatccactttttattctttatacctcaggctcaacaggtaaacccaaaggtgttttgcatacaacagcgggctatcttgtttatgcatcaatgacccataaatatgtttttgattatcatgctggtgaaatttactggtgtactgctgatattggttggatcaccggccattcttatttggtttatggtcctctttgcaacgctgctactactttaatgtttgaaggcacaccaacctttcccgacaacggcagattctgggaaattgtcgataaacatcaagtcaatatattctacaccgcaccaacagctattcgcgccttaatgggtgcgggcaattcatttgttgaacgctcgaaaagaacatccttgcgtcttttagggtccgtgggcgaacccattaatccagaggcatgggaatggttttaccacacagttggaaacaatcattgccccattctcgatacatggtggcaaacagaaacaggaggacatatgatcacccccctccccggtgcgacaccccttaaagcaggatcagccacacgtcctttttttggagtacaactccaaatcatagatgcagaaggaaatgtcctagaaggtgaaacagaaggcaatctttgtattattgattcatggccaggacaaatgcgcacactctataatgatcacgagcgctttattcaaacttatttttccacctataaagggaaatattttacaggcgatggctgtaggcgcgatagcgatggctattattggattacaggacgagtggatgacattctcaatgtttctggacacagactaggaacagcagaaattgaatcagcgcttgtttcgcatcccgctgtttcagaagccgccgttgttggctaccctcatactattaaaggacaaggaatttacagttttatcaccttaatggaagggacagccccaagtgaagagttgcatcaagagcttatccgacatgtcagaaaggaaataggctccattgccatattggataaagttcaatttgctcctcagctccccaaaacgcgatcaggaaaaattatgagacggattttgcgaaaaattgccgaaaataattttgataatctaggagatatttccactctttctgaaccacaagtcattgatgatcttattgctaatcgtcaaaacagagaaattacagcgtaa

SEQ ID NO: 126588 - protein, 652 aa, Bartonella henselae str. Houston-1
MSEKIYPIPDNIKKNALIDEETYQQWYQESINDPESFWAKHGQCIEWFKPYTKVKNTSFNGDVSIQWYEDGITNVAYNCIDRHLKTHGDKIALIWEGDNPYHDKKITYNELYEHVCRFANILKNHGVKKGDKVTIYLTMIPEAAYAMLACARIGAIHSVIFAGFSPEAIAGRIVDCESTFIITANQGLRGGKQINLKDSVDHAIEIAARQNVHVDQVMVIRRTCGPIHWVEGRDFWYHEEVSHTKTDCPAEKMNAEDPLFILYTSGSTGKPKGVLHTTAGYLVYASMTHKYVFDYHAGEIYWCTADIGWITGHSYLVYGPLCNAATTLMFEGTPTFPDNGRFWEIVDKHQVNIFYTAPTAIRALMGAGNSFVERSKRTSLRLLGSVGEPINPEAWEWFYHTVGNNHCPILDTWWQTETGGHMITPLPGATPLKAGSATRPFFGVQLQIIDAEGNVLEGETEGNLCIIDSWPGQMRTLYNDHERFIQTYFSTYKGKYFTGDGCRRDSDGYYWITGRVDDILNVSGHRLGTAEIESALVSHPAVSEAAVVGYPHTIKGQGIYSFITLMEGTAPSEELHQELIRHVRKEIGSIAILDKVQFAPQLPKTRSGKIMRRILRKIAENNFDNLGDISTLSEPQVIDDLIANRQNREITA

SEQ ID NO: 126589 - DNA, 1707 bp, Staphylococcus aureus subsp. aureus MRSA252
  CDS (1)..(1707): transl_table=11
atgaaagtcgaagtttataaaggagcgcaaggcaaacataaccttaaagattatgaagaaacatataatacttttgattggaaagacgtagaacaagcattttcttggagtgaaactggaaaaatgaacatggcatatgaatgtatagatcgccatgtagatcaaggattaggggataaaatagcattaaattacaaagatgaacacagaaaagaatcgtatacttataaagatatgcaacggttatctaataaagcggcgaatgttttgtctgaacatgcagaagttgacaaaggtgacagagtatttatatttatgtcgcgtacacctgaactatattttgcgttgttaggtgttttaaaaattggtgcaattgttgggccgttatttgaagcatttatggaaaaggcggttgcggatagattagagaacagtgaagctaaagtgttaattactaataaggcattgttacctcgagtacctgtagataaattaccgaacttgaaaaaaattgttgtcgtagatgaggatgtagaagacaattacatagacttcattagtttgatggaaactgctagcgatgaatttgacattgaatggttaaagtcggatgatggtttgattttacattatacatcaggttctactgggcaacctaaaggtgtattgcatgttcaacaagcgatgttagtgcactatatttctggaaaatatgtattagatttacaagaagatgatgtttattggtgtacagcagatccaggttgggttacaggaacatcttatggtatttttgcaccatggttaaatggcgctacaaattgtatagctggtggtcgcttttcaccagaacaatggtatagtatgattgaagattttaaagtgacgatttggtatacggcaccaacagctttaagaatgttaatgagtgctggtgacgatattgttgagaaatatgacttgtcatcgttacgttcgattctatcagtaggtgagcctttaaatcctgaagttataaaatgggcgaaaaaagtatacggtttaacggtgttagatacttggtggatgacagaaacaggtggacatatgattgttaactatccaacgatggacgtcaagcttggctcaatgggcaaaccattacctggtattcaagctgcaattatcgatgatgcaggtaatgaattaccaccaaatcgaatgggcaaccttgctataaaaaaaggctggccatcaatgatgtatcgtatctggaagaatccagaaaaatataagtcatattttattggagactggtatgtatctggtgattcggcatataaagatgaagatggttacttttggttccaaggacgtgttgatgatgtaattatgacagctggcgaacgagttgggccatttgaggttgagtctaaattggttgaacacgaagcagttgccgaagcaggaattattggtaaacctgatccggttcgcggtgaaataattaaggcgtttgttgcactgagaaaaggatatgaaccaacagacgaattaaaagaagaaattcgtttatttgttaaagaaggtttgtcggcgcatgcagcaccacgtgaaatcgaatttaaagataaattacctaaaacacgctcaggtaaaattatgagacgtgtattaaaagcttgggaattaaatttagatgcaggggatttaagtacaatggaataa

SEQ ID NO: 126590 - protein, 568 aa, Staphylococcus aureus subsp. aureus MRSA252
MKVEVYKGAQGKHNLKDYEETYNTFDWKDVEQAFSWSETGKMNMAYECIDRHVDQGLGDKIALNYKDEHRKESYTYKDMQRLSNKAANVLSEHAEVDKGDRVFIFMSRTPELYFALLGVLKIGAIVGPLFEAFMEKAVADRLENSEAKVLITNKALLPRVPVDKLPNLKKIVVVDEDVEDNYIDFISLMETASDEFDIEWLKSDDGLILHYTSGSTGQPKGVLHVQQAMLVHYISGKYVLDLQEDDVYWCTADPGWVTGTSYGIFAPWLNGATNCIAGGRFSPEQWYSMIEDFKVTIWYTAPTALRMLMSAGDDIVEKYDLSSLRSILSVGEPLNPEVIKWAKKVYGLTVLDTWWMTETGGHMIVNYPTMDVKLGSMGKPLPGIQAAIIDDAGNELPPNRMGNLAIKKGWPSMMYRIWKNPEKYKSYFIGDWYVSGDSAYKDEDGYFWFQGRVDDVIMTAGERVGPFEVESKLVEHEAVAEAGIIGKPDPVRGEIIKAFVALRKGYEPTDELKEEIRLFVKEGLSAHAAPREIEFKDKLPKTRSGKIMRRVLKAWELNLDAGDLSTME

SEQ ID NO: 126591 - DNA, 1962 bp, Acinetobacter sp. ADP1; identical to SEQ ID NO: 122008
  CDS (1)..(1962): transl_table=11

SEQ ID NO: 126592 - protein, 653 aa, Acinetobacter sp. ADP1; identical to SEQ ID NO: 122009

SEQ ID NO: 126593 - DNA, 1965 bp, Symbiobacterium thermophilum IAM 14863
  CDS (1)..(1965): transl_table=11
atggattccaagcagtttgcggcacttctcaacgaggaccggcgtttcccgccgccggccgagttcgccgcccgggccaacgtggcggatgagagcctctacgagcaggccgcgcgggaccgggagggcttctgggccgcccaggcggagcggctgcactggttccggcggtgggacaaggtgctggagtggaacccgccgtttgcccagtggtttctggggggcaagctgaacgtcgcttacaactgtctcgaccgccacctgcagacgcacacccggacgaaagcggccatcatctgggaaggcgagcccggcgacgagcgggtgctcacctacctggacctgcaccgggaggtctgccgcttcgccaacgtgctccggcagatgggcgtcggcaagggcgaccgggtgaccatctacctgcccatgatccccgaggccgccgtcgccatgctggcgtgcacgcggatcggggccattcactcggtcgttttcggcggcttctccgcggagtcgctgcgcgaccgcatcaacgacagccgctccaaggtggtggtcaccgcggacggcggctggcggcgcggaaacatcatccgcatgaagcagatcgtcaacgaggccgtggtcgactgcgcctccgtggagaaggtgatcgtggtcaagcgcatcggccacgagtcgctggtggagcacggctggcaccccgggcgcgaccactggtaccacacgctgatgcgcaacgcgccggtcacctgcccggtggaggagatggatgcggaggatcccctgttcatcctgtacacctccgggtccaccgggaagccgaagggcgtgctgcacaccaccggcggctacctgacccaggtcgcggcgaccacgaagtacgtgttcgacctgaaggacgaggacgtctactggtgctccgccgacatcggctggatcaccggccactcgtacgtgatctacggcccgctggccaacggggccacgacgctgatgtacgagggcgcgcccgactatccggaccgcggccgcatctgggagatcatccagaagtaccgggtgaacatcttctacaccgcgcccaccctgatccgttccttcatgcgctggggcgagggctggccgtccaagtacgacctctcttcgctgcggctgctgggtaccgtcggcgagcccatcaacccggaggcctggatgtggtaccacaagcacatcggcggcgagcgttgcccgatcgtcgacacctggtggcagacggagaccggcgcgatcatggcgacgccgctgcccggcgtggtgcacacgaagcctgggtccaccacgcggcccttcccgggcatcgagatggcggtggtgaacgaggagggccaggaggtgcccccgggcgccggcggctacctggtggtcaagtcgccctggccgtccatgctgcgcacggtctggggcgatcccgaccggtacgtctccacctacttcggccggttcggccaccaggtctacttcaccggcgacggcgccaagcgggatgaggacggctactactggatcatcggccgggtcgacgacgtgatcaacgtctccggccaccgcatcggcaccatggaggtggagtcggcgctggtggaccatccgctggtggccgaggccgccgtcatcggccggtcccatgcggtgaagggccaggccatcaccgccttcgtcacgttgaaggaaggccggcggggcacgcccgacctggtggacgaactgaagcagcacgtggtcaccaagatcggcgccctggcccggccggaggagatctacttcgcggccgacctgcccaagacccgttcggggaagatcatgcgccggctgctccgggacatcgccgagggccgggccctgggcgacaccaccactctggccgatcccaacgtggtggcgcagctgcgccagcagtacgagtcgcaggaagccggataa

SEQ ID NO: 126594 - protein, 654 aa, Symbiobacterium thermophilum IAM 14863
MDSKQFAALLNEDRRFPPPAEFAARANVADESLYEQAARDREGFWAAQAERLHWFRRWDKVLEWNPPFAQWFLGGKLNVAYNCLDRHLQTHTRTKAAIIWEGEPGDERVLTYLDLHREVCRFANVLRQMGVGKGDRVTIYLPMIPEAAVAMLACTRIGAIHSVVFGGFSAESLRDRINDSRSKVVVTADGGWRRGNIIRMKQIVNEAVVDCASVEKVIVVKRIGHESLVEHGWHPGRDHWYHTLMRNAPVTCPVEEMDAEDPLFILYTSGSTGKPKGVLHTTGGYLTQVAATTKYVFDLKDEDVYWCSADIGWITGHSYVIYGPLANGATTLMYEGAPDYPDRGRIWEIIQKYRVNIFYTAPTLIRSFMRWGEGWPSKYDLSSLRLLGTVGEPINPEAWMWYHKHIGGERCPIVDTWWQTETGAIMATPLPGVVHTKPGSTTRPFPGIEMAVVNEEGQEVPPGAGGYLVVKSPWPSMLRTVWGDPDRYVSTYFGRFGHQVYFTGDGAKRDEDGYYWIIGRVDDVINVSGHRIGTMEVESALVDHPLVAEAAVIGRSHAVKGQAITAFVTLKEGRRGTPDLVDELKQHVVTKIGALARPEEIYFAADLPKTRSGKIMRRLLRDIAEGRALGDTTTLADPNVVAQLRQQYESQEAG

SEQ ID NO: 126595 - DNA, 1950 bp, Symbiobacterium thermophilum IAM 14863
  CDS (1)..(1950): transl_table=11
atgtcggagtacgtctggcgacccgacgaggcctggcggacgcgcgcgcggatcgcccggttcctcgcgtcctgtggcgtgggcagcctggaggagctgcaggcccgcgcggcggccgacccggcctggttctggggggaggccgtgaaggacatcggcatcgagtggtacgaaccgcccaggcagatcctggacctctcggccggcgcaccgtgggcggcctggttccggggcgcccgcatgaacctggcccacgaggccgtggacaagcacctgcgcaacaggccccaccagctcgccgtcatctacgagggcgaggagggcaccgtccgcacctggagctaccggcagctctgggcagagtcgaaccggcttgccggggccctgcgggcgctgggggtggcgaagggggatcgtgtgggcatcatgctgccgctcatccccgaggcggtggcggccatgatggccgtggcccgcctgggcgccatcttcacgccgatcttctccggcttcgcgccggcggccgccgccagccggctggccgactgcgaggcgaagctcctgatcaccgcggacggcttctaccggcgcggccggctggtcaacctgaaggcggtggccgacgaggcggccgcgcaggcgccctccgtccggaacgtgctggtggtgcggcgcaccggcgccgccgtcggctggaccccggggcgcgacctctggtaccacgaacaggtcgcggcgcagccggcccgcttcgagacggcgcgcatggaccccgaggacccgtgcatgatcatctacacctccggcaccaccggccgcccgaagggggcggtgcacgtgcacggcggcttcccgctgaaggcggcccaggacatggcccactgcttcgacgtggggcccggcgacctggtgatgtggttcaccgacctgggctggatgatggggccgtggttgatctacggggggctcatcctgggcgcaacggtcttcctgtatgacggcgcccccgaccatcccgcccccgaccggctgtgggacatggtcgaacggcacggcatcactcacctggggctgtcacccaccgtcatccgcgccctggcgccggcgggcacggactgggtggcccggcacgacctgtccagcctgcgggtgctgggcggcacgggcgagccctggaacccggagccgtatcgctggttcgtggagcacgtgggcggcggccgctgcccgatgatcaactactccggcggcaccgagatctccggcggaatcctgggctgcgtgcccatccgtccaattaaagaatgctccttcaacgccgtggtccccggcatggcggccacggtgctggacgagcgggggcagcccgcgccgccgggacaggtgggggagctcgcgctcaccgccccctggccgggcatgacccggggcttctggcgcgaccctgaccgttatctcgagacctactggcgccggtttgagggcttctgggtccacggggactgggcgtcggtggacgcggaggggttctggtacatccacggccgctccgacgacacgatcaacgtcgccggcaagcgggtggggccggcggagtacgagtcggtgctggtcagcgacccccgggtgcaggaggcggcgacggtgggcgtgccccacccggtgaaagggacggcccccgtctgcttcgtcgtgctgcggccgggggtgacgccgggtcccggcctggcggacgagctgcgggagcgggtcgcccgggagatgggccgcccgctggtgcccgaggcggtgctctttgtcgggtccctgcccaagacccgcaacgccaagatcatgcgccgggtcgtccgggcggcgtacctgggtgaggacccaggggacctctccgccctggagaacccggaggcggtggcggagatccagcgggtgcgggcggcgcagtccggctga

SEQ ID NO: 126596 - protein, 649 aa, Symbiobacterium thermophilum IAM 14863
MSEYVWRPDEAWRTRARIARFLASCGVGSLEELQARAAADPAWFWGEAVKDIGIEWYEPPRQILDLSAGAPWAAWFRGARMNLAHEAVDKHLRNRPHQLAVIYEGEEGTVRTWSYRQLWAESNRLAGALRALGVAKGDRVGIMLPLIPEAVAAMMAVARLGAIFTPIFSGFAPAAAASRLADCEAKLLITADGFYRRGRLVNLKAVADEAAAQAPSVRNVLVVRRTGAAVGWTPGRDLWYHEQVAAQPARFETARMDPEDPCMIIYTSGTTGRPKGAVHVHGGFPLKAAQDMAHCFDVGPGDLVMWFTDLGWMMGPWLIYGGLILGATVFLYDGAPDHPAPDRLWDMVERHGITHLGLSPTVIRALAPAGTDWVARHDLSSLRVLGGTGEPWNPEPYRWFVEHVGGGRCPMINYSGGTEISGGILGCVPIRPIKECSFNAVVPGMAATVLDERGQPAPPGQVGELALTAPWPGMTRGFWRDPDRYLETYWRRFEGFWVHGDWASVDAEGFWYIHGRSDDTINVAGKRVGPAEYESVLVSDPRVQEAATVGVPHPVKGTAPVCFVVLRPGVTPGPGLADELRERVAREMGRPLVPEAVLFVGSLPKTRNAKIMRRVVRAAYLGEDPGDLSALENPEAVAEIQRVRAAQSG

SEQ ID NO: 126597 - DNA, 1899 bp, Symbiobacterium thermophilum IAM 14863
  CDS (1)..(1899): transl_table=11
atgtctatggaagcgcagtttgcccagctgctccaggggaaggggcgcatcgcccctcccccggagctggcccggtctgcccacgtgaccgactacgaggcatattacgaggccgtgatggcggatcccgcggcctactggggccgggtggcccgggaggaggtgcactggttccggccctttgaccgggtggtggagggggacgggccggatgcccgctggttcctgggcgggcagaccaacatctgttacaacgccgtggaccggcacgcggacgacgagcggcgcaataaggcggccctgatctggctgtcggaggacggccgggagcgggtcttcacctacgcgatgctccgccgccaggtagcccggctggcggggggcctgcagcaactgggggtcggcaagggcgaccgggtgatcatctacatgccgctgaccccggaggggatcatggcgatgctggcctgcgcccgcatcggggcgatccacagcgtggtctatgccgggctcggggccggggcgctgcggcagcgcatcgaggacgccggcgcgaaggtggtgctctgcgcggacgcgggctaccgccgggggaggcggatcgacctgaaggccatcgtcgatgaggcggtggaggggaacccgcaggtggagcacgtggtggtccaccgccgggcgaccccggccctggagctgcaggagggcgagaccgacttcgccgagctgctcacccggggctcggcggacaccccctgcgaggtgatggacagcgaggactggctgttcatcctctacacctcgggctccaccggcaagcccaagggcgccgcctacacccacggcggctacatggtgggcaccacgcacctgtggcgcatcgcctgcgacatccgggagaacgacatctactggtgcacgtcggacatcggctggatcgtgggccactcgatcatggtctacggcccgctggtgaacggctccaccatcctggtgcgggagggggcgccggactacccgcacccgggcatcgtctgggagatcgtggagcggtaccaggtgaacaagctctacaccgcgcccacggcggtgcgcatgttcatgcggatgggcgaggagcacccccggcgctatgacctctccagcctgaagctgatggtctgcgccggcgagccgctcaaccccgaggcccagctctgggcctacgagcacatcatgcagcggcggggcccggtgctggacaactggtggcagaccgagacggcggcgcccaccatcggcacgctgccctgcatggacgtgaagccgggacgggcggggaggcccttccccggcatccgggcggaggtgctggactccgacggaaagcccgtggctcccggaaagggcgggctgctctgcctgcggggggcctggccccacatgttccgcaccatctggggcgaccggtcccggtacgaggcgtactggcagacggtccccggtgtgtacacctccggcgacgtggccaccgtggacgaggaggggtacatcgccgtcctgggccgggcggatgacgtgctgaatgtagccggccaccggatcggcaccgccgacgtggagtcggccctggtgagccatccggcggtgggtgaggcggccgtgatcggcaagcctgatccggtgaagggggaggcgatcaaggcgttcgtcatcctccgcagggggtacgagcccagcgagcaactggcccaggccctcatcggccacgtgcgccaccagctgggggcgattgccgcgccggcggagatcgccttcgttgcgtcgctccccaagacccgatcgggcaagatcatgcgccgggtgctgaaggcgcaggagctggggctggatccgggggatctgacgacgatcgaggagtag

SEQ ID NO: 126598 - protein, 632 aa, Symbiobacterium thermophilum IAM 14863
MSMEAQFAQLLQGKGRIAPPPELARSAHVTDYEAYYEAVMADPAAYWGRVAREEVHWFRPFDRVVEGDGPDARWFLGGQTNICYNAVDRHADDERRNKAALIWLSEDGRERVFTYAMLRRQVARLAGGLQQLGVGKGDRVIIYMPLTPEGIMAMLACARIGAIHSVVYAGLGAGALRQRIEDAGAKVVLCADAGYRRGRRIDLKAIVDEAVEGNPQVEHVVVHRRATPALELQEGETDFAELLTRGSADTPCEVMDSEDWLFILYTSGSTGKPKGAAYTHGGYMVGTTHLWRIACDIRENDIYWCTSDIGWIVGHSIMVYGPLVNGSTILVREGAPDYPHPGIVWEIVERYQVNKLYTAPTAVRMFMRMGEEHPRRYDLSSLKLMVCAGEPLNPEAQLWAYEHIMQRRGPVLDNWWQTETAAPTIGTLPCMDVKPGRAGRPFPGIRAEVLDSDGKPVAPGKGGLLCLRGAWPHMFRTIWGDRSRYEAYWQTVPGVYTSGDVATVDEEGYIAVLGRADDVLNVAGHRIGTADVESALVSHPAVGEAAVIGKPDPVKGEAIKAFVILRRGYEPSEQLAQALIGHVRHQLGAIAAPAEIAFVASLPKTRSGKIMRRVLKAQELGLDPGDLTTIEE

SEQ ID NO: 126599 - DNA, 1953 bp, Bacillus licheniformis ATCC 14580
  CDS (1)..(1953): transl_table=11
atgggcgaaaaagcggtttggcagcctgatccggaatttgtaaaaacaacccggctgtttcaatggatgacagccctcggtttttccgactatgatgattttttgaaagcaagtacaaacgatatcgcctggttctgggaagaggccgaaaaagcgctcgggatcagctggtacaagcggtacagccaaacattgaatctcgacaaaggcataaaatggccgcaatggtttaccggcggccgcttaaatgccgtttacaacgccgtggaaaaatgggcccgccggcctgatacggccggcaggacggcactcatctgggaaagtgaagacggaaaaacagaacagatcacctattcttctttacaccaacaagtcgcccgtgcggcggcaggctttaaaaagcaaggcatctcaaaaggggatgtcattgcgatttacatgccgatgatccccgaaacggtcatcgccatgctggccgccgctaaaatcggagcggtattctcaccggttttttcaggctacggcgcccatgcagcagcggcgagacttaccgctgccggagcgaaaatccttgtcacagcagatgcctttttgcgaaggggaaagaaggtctgcatgaagaaagaagctgacaaagccgcggaccgttcccccactgttcaaaaagtcgtcgtctgcaagcttcacggcggcgatcaagattggaattataagagagatatcgactggaatgaattgatgaaaaacgagcccatgcaaaacaccgaagaaatggacagttcagatccgctcatgctgctatacacatcagggacgacaggacagtcgaagggagcggttcatacccatgccggttttccgctgaaagctgcatttgatgcgggattcgggatggatgtcaaacaaggggacacatttttctggtttacagacatgggctggatgatggggccgtttttaatattcgggggcctcataaacggagcggctgttttgctgtttgacggagcaccggactacccggccccggatcggctgtgggagcttgtcagcagacaccgggtgacgcatctcggcgtctctccgacgctcattcgctcgctgatgcagcacggcgaagattttctctatcaatacaatctgaacagtctgaaggcaatcggctcaacgggcgaaccatggaattatgagccgtggatgtggctgttccgccatgttggaaaagaacggattcctatatttaattattcaggaggaacagagatctcaggcggaattttaggcaatgtgctcctgcggccgatcacgccgatgacgtttaattcgcctcttcccggcatggcggccaatgtcttcaatgaaaaaggagaggaagtcgtcaatgaagtcggagagcttgtcctgacaaagccctgggtcggcatgacgaacggtttttggaaggagccgtcaagatacgaagaagcatattggagccgctggaccgacgtctgggtgcacggcgattgggcaaaacgggatgaaaacggctactggacgatcagcggacgctctgatgatgtgatcaatgctgccgggaaaaggatcggccccgccgaaatagagtccgttctggtcggccatccagcggtggcggaagcaggcgtcatcggcgttccggataagctcaaaggccaggctgccgtctgcttcgtcgtcctcagacagtcggaaaagccgtcggaagaattaaaagatgatttgctgaaccttgcatctgatgcgatcggtaaagcggtcaagcccaaagcggtttattttgtcagcggtttgccgaagacgagaaatgcaaaagtgatgagacggctgatcagagctgcctatatgaacgagcccgcaggcgatttgtcaactttggaaaaccgcgaaacatatgatgaaattgccggtctttcagtgcgaaaaaatctgtag

SEQ ID NO: 126600 - protein, 650 aa, Bacillus licheniformis ATCC 14580
MGEKAVWQPDPEFVKTTRLFQWMTALGFSDYDDFLKASTNDIAWFWEEAEKALGISWYKRYSQTLNLDKGIKWPQWFTGGRLNAVYNAVEKWARRPDTAGRTALIWESEDGKTEQITYSSLHQQVARAAAGFKKQGISKGDVIAIYMPMIPETVIAMLAAAKIGAVFSPVFSGYGAHAAAARLTAAGAKILVTADAFLRRGKKVCMKKEADKAADRSPTVQKVVVCKLHGGDQDWNYKRDIDWNELMKNEPMQNTEEMDSSDPLMLLYTSGTTGQSKGAVHTHAGFPLKAAFDAGFGMDVKQGDTFFWFTDMGWMMGPFLIFGGLINGAAVLLFDGAPDYPAPDRLWELVSRHRVTHLGVSPTLIRSLMQHGEDFLYQYNLNSLKAIGSTGEPWNYEPWMWLFRHVGKERIPIFNYSGGTEISGGILGNVLLRPITPMTFNSPLPGMAANVFNEKGEEVVNEVGELVLTKPWVGMTNGFWKEPSRYEEAYWSRWTDVWVHGDWAKRDENGYWTISGRSDDVINAAGKRIGPAEIESVLVGHPAVAEAGVIGVPDKLKGQAAVCFVVLRQSEKPSEELKDDLLNLASDAIGKAVKPKAVYFVSGLPKTRNAKVMRRLIRAAYMNEPAGDLSTLENRETYDEIAGLSVRKNL

SEQ ID NO: 126601 - DNA, 1884 bp, Legionella pneumophila subsp. pneumophila str. Philadelphia 1
  CDS (1)..(1884): transl_table=11
atgcttcccgttcatctaaagcaccctcatttaacagctacagaagaatatctatctgaattttggtctgaaattgccgcacaaaccattgactggatacaaccttggagtatcaccctgcagggaggattacacaaaggcgatgtgaagtggtttcaaggcggcttactcaatgttagcgctaattgtctggataggcatttaccccataaagcaaatcaaacagccatcatttgggaaggtgatgatgaaaaccaaaataaaaccctgacttttgcgcagctttattctgaagtatgcaaaatgagcaatgtgttaaaaagcctaaatgttcgcagaggggatacggtaggcatttacctacccatgattcctgaagcggccattgccatgctggcttgtgctcgtataggagctattcataccgttgtgtttgccgggttttcggcccatgcattgcagcagcgattaatagcctcttcctgtaaatgtttaatcactgcggatgcgtttcaacgcggtggaaaaactatccctttaaagaaacaggctgacgaagccagcgtggacttaaatatcaccaagctggttgttaaaaattcaaatgccccaacggcactaaataagaacaaagaacattggtggcatgagctaaaacaaaccgtatcggatcaatgcacgccggaaccaatgaacaccgaagatcccctgtttattctctatacttccggaagcacgggacagccgaaaggagtggtacataccacaggcggctatttagtgcaggccgcttatacgcatcaactgatatttgcttgtcaggataatgaagtattttggtgtactgctgatgtcggttggattacagggcatagttatgtcgtctatggccctctctgcaatggcattaccacattgatgtttgaaggaatacccacgtggcctgacgcagcaagaaactggcgcatcattgataagcaccaagtgaatgtgttctacacagctcccacagccatccgctccctgatgagagctggcgatcaatggctaaactcaagctcaagaagttctcttcgtttactgggttcagtgggtgagccaattaacccggaagcatggaattggtatcaccaaaaagttggacaagggaaatgcccgatagtggatacatggtggcaaactgaaaccggagctattatgattagtcccagagccagtgatgaagtgatcaaaccaggctctgctcgtaaacctattccggggatcgtaccactcctgttaaatgagcaaggacatgaaattaatggcgctggagaaggccttttggctatcaaatacccatggccttctatggcaagaaccattgcaggagatcaccaaagatactgtaacacttatttatccaacggctattacatcactggtgatggagccaaacgagatgaagatggagattattggattacaggccgaattgatgacgtacttaacgtttccggccatcgattgggtactgctgaaattgaatcagcattggtcagccatcctaaggttgctgaagctggcgttgtaggtattcctcatgatttaaaaggtcaagcaatatttgcctatgtcattctgaagcagggaaataagcctgatgccgagctccaaactgaattgatggagcgagtcaaagatcaaatcagtgctatcgccaaaccagatgtcattcagtttgcaaatgatttgccgaaaacccgttcaggtaaaattatgcgccgaatactaagaaaaattgcttgtaaagaagtgtcgcacattgatgagctgggtgatttaacaactcttgctaaccctcagatcgttgaggaactcatgaaaaatattttgaagcggtaa

SEQ ID NO: 126602 - protein, 627 aa, Legionella pneumophila subsp. pneumophila str. Philadelphia 1
MLPVHLKHPHLTATEEYLSEFWSEIAAQTIDWIQPWSITLQGGLHKGDVKWFQGGLLNVSANCLDRHLPHKANQTAIIWEGDDENQNKTLTFAQLYSEVCKMSNVLKSLNVRRGDTVGIYLPMIPEAAIAMLACARIGAIHTVVFAGFSAHALQQRLIASSCKCLITADAFQRGGKTIPLKKQADEASVDLNITKLVVKNSNAPTALNKNKEHWWHELKQTVSDQCTPEPMNTEDPLFILYTSGSTGQPKGVVHTTGGYLVQAAYTHQLIFACQDNEVFWCTADVGWITGHSYVVYGPLCNGITTLMFEGIPTWPDAARNWRIIDKHQVNVFYTAPTAIRSLMRAGDQWLNSSSRSSLRLLGSVGEPINPEAWNWYHQKVGQGKCPIVDTWWQTETGAIMISPRASDEVIKPGSARKPIPGIVPLLLNEQGHEINGAGEGLLAIKYPWPSMARTIAGDHQRYCNTYLSNGYYITGDGAKRDEDGDYWITGRIDDVLNVSGHRLGTAEIESALVSHPKVAEAGVVGIPHDLKGQAIFAYVILKQGNKPDAELQTELMERVKDQISAIAKPDVIQFANDLPKTRSGKIMRRILRKIACKEVSHIDELGDLTTLANPQIVEELMKNILKR

SEQ ID NO: 126603 - DNA, 1989 bp, Methylococcus capsulatus str. Bath; identical to SEQ ID NO: 122012
  CDS (1)..(1989): transl_table=11

SEQ ID NO: 126604 - protein, 662 aa, Methylococcus capsulatus str. Bath; identical to SEQ ID NO: 122013

SEQ ID NO: 126605 - DNA, 1989 bp, Azoarcus sp. EbN1; identical to SEQ ID NO: 122014
  CDS (1)..(1989): transl_table=11

SEQ ID NO: 126606 - protein, 662 aa, Azoarcus sp. EbN1; identical to SEQ ID NO: 122015

SEQ ID NO: 126607 - DNA, 1965 bp, Silicibacter pomeroyi DSS-3; identical to SEQ ID NO: 122016
  CDS (1)..(1965): transl_table=11

SEQ ID NO: 126608 - protein, 654 aa, Silicibacter pomeroyi DSS-3; identical to SEQ ID NO: 122017

SEQ ID NO: 126609 - DNA, 1710 bp, Bacillus clausii KSM-K16
  CDS (1)..(1710): transl_table=11
atgaaagcgcttcctgctattgaaggaaaccataacctgaaaaattatgaagaagctgtacaaaactttgactgggaggatgtcagaaaaacgttttcctggcataaaacaggcaaagtcaaccttgcctatgaagcgattgattatcatgccgagaacggcaaaggcgaacaggttgctctttattatagcgatgcgcgccgtgatgaatcctatacatttgcggaaatgaagacgttctcaaacaaagcagcgaatgtgctaaaagaagccaacgttaaaaaaggcgaccgtgtctttatttttatgccacgcacacctgagctgtattttacgcttcttggcgccataaaaataggggcgattgttggcccgttgtttgaagcttttatggaaggggctgtgcgtgaccgtcttgaagacagtggcgcaaaagtgcttatcacaacaccgacattactagaacgggtgccgtttgatgatttgcctgatttagaaacggtgctagtcgctgatgaaacgtatgaagacaatggcccttttttacagttaaacaagcggcttcaggcagcaccaagtgatgttgcaattgaatgggtagatcgggaagacgggctcattctccattatacgtctggctcaacgggcaagccaaaaggggttcttcatgttcatgaggcgatggtccaacattaccacacggccaaagtcgtcctcgacttgcagccagatgacatttactggtgcacggccgaccctggctgggtaacgggaacgtcttacggtatttttgcgccttggcttgcaggggtaaccaatgtggtgcgcggcggccgcttctcaccgactgattggtatgagacgattcagcgctacaaagtaacagtttggtacagcgcgccaaccgcatttcgtatgttgatgagcgcaggcgacgaacttgttaaacaatatgatctctcgtcactgcgtcatgtcttaagcgttggcgaaccgctcaatcctgaagtggtgcgctggggagtgaaagtctttgacaaacgcattcatgacacgtggtggatgacggaaacaggagcgcaaatgatctgtaactacccggcaatggaaattcgaccaggatcaatgggcaaaccgattccaggcgtcgaggccgccatcattgatgatagaggcaatgaactgccaccgaaccgaatgggcaatcttgccattaaaaaaggctggccagcgatgatgcgtgccatttggaacaatgaagccaaataccaaagctattttgagcttgacggctggtatgtgtctggcgattctgcttatatggatgaagatggttacttttggttccaaggtcggattgacgatgtcattatgaccgcaggtgagcgtgttggtccatttgaggtggaaagcaaactggttgaacacccagccgttgcggaagcaggggtcattggcaaacctgaccctgtccgtggagaaattatcaaagcatttattgcactgcgccaaggctatgaagtcactgacgaattaaaagaagagattcgccaatttgtaaagacaggactcgcagctcatgcagcaccgcgggaaatggaattccgcaagtcattgccaaaaacgcgcagcggaaaaattatgcgccgcgtattaaaagcgtgggaattggatttgccgacaggcgacttatcgacaatggaagattaa

SEQ ID NO: 126610 - protein, 569 aa, Bacillus clausii KSM-K16
MKALPAIEGNHNLKNYEEAVQNFDWEDVRKTFSWHKTGKVNLAYEAIDYHAENGKGEQVALYYSDARRDESYTFAEMKTFSNKAANVLKEANVKKGDRVFIFMPRTPELYFTLLGAIKIGAIVGPLFEAFMEGAVRDRLEDSGAKVLITTPTLLERVPFDDLPDLETVLVADETYEDNGPFLQLNKRLQAAPSDVAIEWVDREDGLILHYTSGSTGKPKGVLHVHEAMVQHYHTAKVVLDLQPDDIYWCTADPGWVTGTSYGIFAPWLAGVTNVVRGGRFSPTDWYETIQRYKVTVWYSAPTAFRMLMSAGDELVKQYDLSSLRHVLSVGEPLNPEVVRWGVKVFDKRIHDTWWMTETGAQMICNYPAMEIRPGSMGKPIPGVEAAIIDDRGNELPPNRMGNLAIKKGWPAMMRAIWNNEAKYQSYFELDGWYVSGDSAYMDEDGYFWFQGRIDDVIMTAGERVGPFEVESKLVEHPAVAEAGVIGKPDPVRGEIIKAFIALRQGYEVTDELKEEIRQFVKTGLAAHAAPREMEFRKSLPKTRSGKIMRRVLKAWELDLPTGDLSTMED

SEQ ID NO: 126611 - DNA, 1974 bp, Campylobacter jejuni RM1221
  CDS (1)..(1974): transl_table=11
atgcttaatcaaaataatcaagagctttttaagccaagtaaagaattttctcgtaatgctcgtataaaaaatttatgtgaatactatgatttatgcgatgaagccaaggaaggttttgaaggtttttggaaaagacaagcacttgagaagatcgagtggttttcgcctttttcaagagtgttaaatgaggataaagctccattttataaatggtttgaaggtggaactttaaatgtaagttatcaatgtcttgatcgtcatatgaaaacaagacgcaataaagctgctttgatttttgaaggtgaaatgggagattatgaagtttatacttatagaagattattgcatgaaacttgcaaggcggccaatttgcttaaaaaattcggagtaaaaaaaggcgatagggttgtaatttatatgcctatgattccagaaacagctatagtaatgttagcttgcgcaaggattggggctattcatagtgtagtatttggagggttttctcctgaagccttaagagatagaattatagatgcaggagctaaacttgtagtaacggctgatggtgcttttcgtcgtggcaaaccttatatgttaaaacctgcagtagataaggctttaagtgaagggtgtgaaagtgtagaaaaagtacttatagttatacgcaataatgagcctatagaatatattaaaggaagggactatgtttataacgaacttgtgaaaaatgagtcttataagtgtgaacccgaaattatggatagtgaggatttgttgtttttgctttacacttcaggatcaacaggcaagccaaaaggagttatgcatgcaagtgcaggatatatactttgggcacaaatgactatggaatgggtttttgatattaaagattatgataattattggtgtagtgctgatgtgggttggattacaggacatacttatgtagtttatgggcctttagcatgtggagcaacgactataatgcatgaaggaactcctacttatccaaattctgggcgttggtggagaatgatagaagagtatcaaataagcaaattctacacttcgccaactgccataagaatgcttcatgctgatgcacctaatgagccaagaaaatatgatttaagtacgcttgaagtgcttggaacggttggagagcctatcaatcctagtgcttggaagtggttttatgatgaaatagggggaactaaaagtcctatagtcgatacttggtggcaaacagaaacaggtgggcatatgatcacgcctttaccaggcgccactcctttaaaaccaggttgtgccaccttgcctttgccagggatttttgcagaagttattgatgaagaaggcaataaaaaagatgaaggtgaagatgggttgctttgtataactaaaccttggccttcgatgattcgtggaatttggggcaatgatgaacgctatatagaaagttatttttctcaagctaaaaaagatggaaaagctgtatattttagtggcgatggtgctttttatgataaaaatggttatattaccatcacaggaagaacagatgatgtggttaatgttgcaggacatcgtataggaacggctgaaattgaaagcgctattgctaaacatccaagtgtagcagaatcagctgtagtgagtattttggatacgattaagggcgagtcattgtttgcttttgtggttttaagtcctgcatccagttgtgatcttggcggagctatagaaactttaaaagaacttaatgacattttaagagtagaaataggacctatagctaaaatagaaaaaattctttatactccagatttgccaaaaactagaagtggtaaaataatgagaagaattttaagaactatagcaagaggtgaagaaatcaaacaggatatttcaacacttgaagattctaaagtagtagaaaccattgttaaattagctaaggcagagtttgaataa

SEQ ID NO: 126612 - protein, 657 aa, Campylobacter jejuni RM1221
MLNQNNQELFKPSKEFSRNARIKNLCEYYDLCDEAKEGFEGFWKRQALEKIEWFSPFSRVLNEDKAPFYKWFEGGTLNVSYQCLDRHMKTRRNKAALIFEGEMGDYEVYTYRRLLHETCKAANLLKKFGVKKGDRVVIYMPMIPETAIVMLACARIGAIHSVVFGGFSPEALRDRIIDAGAKLVVTADGAFRRGKPYMLKPAVDKALSEGCESVEKVLIVIRNNEPIEYIKGRDYVYNELVKNESYKCEPEIMDSEDLLFLLYTSGSTGKPKGVMHASAGYILWAQMTMEWVFDIKDYDNYWCSADVGWITGHTYVVYGPLACGATTIMHEGTPTYPNSGRWWRMIEEYQISKFYTSPTAIRMLHADAPNEPRKYDLSTLEVLGTVGEPINPSAWKWFYDEIGGTKSPIVDTWWQTETGGHMITPLPGATPLKPGCATLPLPGIFAEVIDEEGNKKDEGEDGLLCITKPWPSMIRGIWGNDERYIESYFSQAKKDGKAVYFSGDGAFYDKNGYITITGRTDDVVNVAGHRIGTAEIESAIAKHPSVAESAVVSILDTIKGESLFAFVVLSPASSCDLGGAIETLKELNDILRVEIGPIAKIEKILYTPDLPKTRSGKIMRRILRTIARGEEIKQDISTLEDSKVVETIVKLAKAEFE

SEQ ID NO: 126613 - DNA, 1962 bp, Psychrobacter arcticus 273-4; identical to SEQ ID NO: 122024
  CDS (1)..(1962): transl_table=11

SEQ ID NO: 126614 - protein, 653 aa, Psychrobacter arcticus 273-4; identical to SEQ ID NO: 122025

SEQ ID NO: 126615 - DNA, 1947 bp, Colwellia psychrerythraea 34H; identical to SEQ ID NO: 122026
  CDS (1)..(1947): transl_table=11

SEQ ID NO: 126616 - protein, 648 aa, Colwellia psychrerythraea 34H; identical to SEQ ID NO: 122027

SEQ ID NO: 126617 - DNA, 1956 bp, Pseudomonas syringae pv. phaseolicola 1448A; identical to SEQ ID NO: 122028
  CDS (1)..(1956): transl_table=11

SEQ ID NO: 126618 - protein, 651 aa, Pseudomonas syringae pv. phaseolicola 1448A; identical to SEQ ID NO: 122029

SEQ ID NO: 126619 - DNA, 1965 bp, Dechloromonas aromatica RCB; identical to SEQ ID NO: 122030
  CDS (1)..(1965): transl_table=11

SEQ ID NO: 126620 - protein, 654 aa, Dechloromonas aromatica RCB; identical to SEQ ID NO: 122031

SEQ ID NO: 126621 - DNA, 1965 bp, Thermobifida fusca YX
  CDS (1)..(1965): transl_table=11
atgacactcaagccgcagccgccgatcctgtggagtcccgacgaggagcgcaaagaacgcgccaacctcaccgcgttcacccgctgggtgcgggagcaccgcggtgtggacgcaccggactacgaggcactgtggcgctggtcggtaaccgacctcgaaggattctggtccgcgatctgggagtactaccgggtgcgcgccgccaccccgtacaccacagtgctcgcctccgacgccatgcccggcgccgtctggttccccggcgccaccctcaactacgccgagcacatcttccgcgaccgtgacccatcagccgtggcgatccggcacgcgtccgaactccggccgttgaccgagtggacctggggagaactgcggacccgcaccgccgcgatcgctgcggccctccgcagcctcggggtgggccccggcgaccgggtcgtggcctacctgccgaacatcgccgaggcgacggccgcattcctcgcctgcgccgcgatcggtgcgacctggtcgtcctgttcccccgacttcggggtgcgcagcgtcctcgaccggttcgcgcagatcgaaccgaaagtgctgctggccgtggacggctaccgctacggcggtaaggacttcgaccgccgtgacgtgctcaaagccctgcgcgacggcatgcccagcctgcagcacaccgtcgtcctgccgtacctgggctgcggccctgtcgccgacaccctgtcctgggcggagttcgaagccgcgggcgaaggcgcggaactggagttcaccccgctgccgttcgaccatccgctatgggtgctgtactcgtcggggaccacaggcctgcccaaggccatcgtgcacggccacggcggcatcctgctggagcagttgaagaacctgcacctgcacctggacgcccacgccgacgaccgggtgttctggttcaccaccaccggctggatgatgtggaacttcctggtcagcgtgctgctcacggacgcgtccatcgtgctgtacgacggcagccctgcctaccccgacctgggagtgctctgggatctggcggaacgcgccgggatcaccatcttcggcaccagcgccggctacctggcgaactgccggaaagcgggcatccaccccaccggcgggcggaacctgtccgcgctgcacgccatcggctctaccggctccccgctgtccccggacgagttcgcgtggtgctaccaggagttcggctccgacctgtggctgttctccaccagcggcggcacggacatctgcagctgcctcgtcggcggggtgcccaccctgcccgtctaccagggagagatccaggcccgctccctcggcatggcagtggcctcctgggacagcgcaggcaacgaactcgtaggcgaagtcggggagctcgtggtgacccgtcccgccccgtccatgcccctctacttctggggggacaaggacggcagccggctccgcgacagctacttctccatgtacccgggggtgtggcggcacggcgactggatcgagatcaccgaccgcggcaccgcgatcatctacgggcgctccgactccaccatcaaccgcggcggggtacggatgggcaccagcgagatctaccgctccgtgctggccctggaagaagtcatcgacgccctcgtcgtcgacgtgccacagtccgacggaagctcccggatcgaactgttcgtggtactgcgcgagaacaccgtgctcgacgacgacctggtgcggcggatcaaacagggcatccgcgaagactgctcgccgcggcacgtgcccgacgggatccaggctattccggctgtgccgcgcaccctgtccggcaaagtgctcgaggttcccgtcaaacgcatcctcatgggagaaccaccggaacgcgtcgtcagccgcgactcgctcgccaacccggaggcgttggactacttcgtccaccagtcccgcgacgcgtaa

SEQ ID NO: 126622 - protein, 654 aa, Thermobifida fusca YX
MTLKPQPPILWSPDEERKERANLTAFTRWVREHRGVDAPDYEALWRWSVTDLEGFWSAIWEYYRVRAATPYTTVLASDAMPGAVWFPGATLNYAEHIFRDRDPSAVAIRHASELRPLTEWTWGELRTRTAAIAAALRSLGVGPGDRVVAYLPNIAEATAAFLACAAIGATWSSCSPDFGVRSVLDRFAQIEPKVLLAVDGYRYGGKDFDRRDVLKALRDGMPSLQHTVVLPYLGCGPVADTLSWAEFEAAGEGAELEFTPLPFDHPLWVLYSSGTTGLPKAIVHGHGGILLEQLKNLHLHLDAHADDRVFWFTTTGWMMWNFLVSVLLTDASIVLYDGSPAYPDLGVLWDLAERAGITIFGTSAGYLANCRKAGIHPTGGRNLSALHAIGSTGSPLSPDEFAWCYQEFGSDLWLFSTSGGTDICSCLVGGVPTLPVYQGEIQARSLGMAVASWDSAGNELVGEVGELVVTRPAPSMPLYFWGDKDGSRLRDSYFSMYPGVWRHGDWIEITDRGTAIIYGRSDSTINRGGVRMGTSEIYRSVLALEEVIDALVVDVPQSDGSSRIELFVVLRENTVLDDDLVRRIKQGIREDCSPRHVPDGIQAIPAVPRTLSGKVLEVPVKRILMGEPPERVVSRDSLANPEALDYFVHQSRDA

SEQ ID NO: 126623 - DNA, 1971 bp, Thermobifida fusca YX
  CDS (1)..(1971): transl_table=11
atgggcgacgaagtgctggcgaacctgatgcagcagagccaggtcttccctcccgacgaagcgttcgtggcacaggctaacgccaccgcggacctctacggtgaagcggaagctgaccgggaggcgttttgggagaagcaggccgagcggctgcactgggagaccaggtggaaccaggtgttggactggtccaatgcaccgttcgccaagtggtttgtgggtggcaggctcaacgtcgcctacaactgtgtggaccggcatgtagagaacggttacggcgatcaagtcgccatccactgggtgggtgagcccggagacacccgcgacatcacctacgcccagttgaaggacgaggtgtgcaaggccgccaacgcgctgtcttctttggggctgaagccgggcgaccgggtcgctatccagatgcctatgatccccgaggcgatcgtgtccatgctggcctgtgcccgcctgggcctggtgcacagcgtggtcttcgggggtttttcgccttccgcgctgcgttcccgggtggaggacgctgacgccaaggtggtcatcactactgacggccagtaccggcgcggcaaggccctgccgatgaaggccaacgtggacgaaggcatcgaggggatcgacgcggtccagaacgtcatcgtggtccgccgcaccggcatggacgttccgtggaccgagggccgcgacctgtggtggcacgacctggtcgactcccagtcggccgagcacacccctgaggcgttcgactccgaacaccccctgttcatcctctacacgtcgggcaccacggggaagccgaagggcatcctgcacaccactggcggttatctgacccaggcggcgtacacccaccacgtggtgttcgaccacaagccgggcaaggacgtctactggtgcaccgccgacatcggctggatcaccgggcacagctacatcgtttatgggccgctcgcgaaccgcgccacccaggtcgtctacgaaggcaccccgaacaccccgcacgaggggcgccactgggagatcgtgcaggagtacaaggtcacgatctactacacggctcccacgctgatccgcacgttcatgaagtggggggaggagatccccgcccgctacgacctgtcgtcgctgcggctgctgggcagtgtaggcgagccgatcaaccccgaggcgtggctgtggtaccgcaagcacatcggcggtgacaagaccccgatcgttgacacctggtggcagaccgagaccggcgcgatcatgatttcgccgctgcctggcgcgttgagcctcaagccggggtcggcgctgcgggcgctgccgggggtgagcgcgaaggtggtcgacgagaagggcaacgaggtttcgcacggttcgggcggctacctggtgctggacaagccgtggccgtcgatgctccgcgggatctggggcgacgagaagcgctaccgcgaaacctactgggcgcggttcgcggacaagggcttctacttcgccggggacggcgccaagtacgacgacgacggcgacatttggctgctgggccgggtcgacgatgtcatgaacgtctccgggcaccggatttccaccactgaggtggagtcggctctggtggcgcacccgacggtggcggaggccgctgtggtgggtgcgtccgacccgacgacgggccaggcgatcgtggcgtttgtgatcccgcgcgccggggtggcccaggacgaggcgagcggcgaggaggccatcaagacgctgcgggagcacgtggcgaaggagatcggtccgatcgctaagccgcggcagatcatcgtggtgccggagctccccaagacccgctccggcaagatcatgcgccgcctgctgcgtgacgtggcggagaaccgggagatcggtgacgtgaccacgctcgccgactcgtcggtgatggacctcatcgcgaaggggctgcgcagcggcaaagacgactga

SEQ ID NO: 126624 - protein, 656 aa, Thermobifida fusca YX
MGDEVLANLMQQSQVFPPDEAFVAQANATADLYGEAEADREAFWEKQAERLHWETRWNQVLDWSNAPFAKWFVGGRLNVAYNCVDRHVENGYGDQVAIHWVGEPGDTRDITYAQLKDEVCKAANALSSLGLKPGDRVAIQMPMIPEAIVSMLACARLGLVHSVVFGGFSPSALRSRVEDADAKVVITTDGQYRRGKALPMKANVDEGIEGIDAVQNVIVVRRTGMDVPWTEGRDLWWHDLVDSQSAEHTPEAFDSEHPLFILYTSGTTGKPKGILHTTGGYLTQAAYTHHVVFDHKPGKDVYWCTADIGWITGHSYIVYGPLANRATQVVYEGTPNTPHEGRHWEIVQEYKVTIYYTAPTLIRTFMKWGEEIPARYDLSSLRLLGSVGEPINPEAWLWYRKHIGGDKTPIVDTWWQTETGAIMISPLPGALSLKPGSALRALPGVSAKVVDEKGNEVSHGSGGYLVLDKPWPSMLRGIWGDEKRYRETYWARFADKGFYFAGDGAKYDDDGDIWLLGRVDDVMNVSGHRISTTEVESALVAHPTVAEAAVVGASDPTTGQAIVAFVIPRAGVAQDEASGEEAIKTLREHVAKEIGPIAKPRQIIVVPELPKTRSGKIMRRLLRDVAENREIGDVTTLADSSVMDLIAKGLRSGKDD

SEQ ID NO: 126625 - DNA, 1983 bp, Ralstonia eutropha JMP134
  CDS (1)..(1983): transl_table=11
atgtccgccatcgaatcggtgatgcaagagcatcgcgttttcaacccgcccgagtccttcgtccggcaagccgcgattccaggcatggacgcctaccgcgcgctgtgcgccgaggcggagcgcgactacgagggcttctgggccagccgtgcgcgcgacctgctgcactggaacaagcccttcaccaaggtgctggatgaaagcaatgcaccgttctacaagtggttcgaggatggcgaactgaacgcttcgtacaactgcctggaccgcaacctgcagaacggcaatgccgacaagaccgcgatcgtgttcgaggccgacgacggcaccgcgacgcgcgtgtcgtatcgcgacctgcacgccaaggtctgccgcttcgccaatggcctgaaggcgcttggcatcaagaagggcgatcgcgtggtgatctacatgccgatgtcggtcgaaggcgtggtggccatgcaggcgtgcgcgcgtctaggtgccacgcattctgtggtgttcggcgggttctcggccaagtcgctgcaggagcggctggtggacgtcggcgccgtggcgctgatcaccgcggacgagcagatgcgcggcggcaaggcgctaccgctcaaggcgattgccgacgatgcgctggcgctcggcggctgcgaggcggtcaaaaacgtgatcgtctatcgccgcaccggcggcaaggtcaactgggtcgaaggccgtgaccgctggatggaagacgtatccgccggccagcccgacacctgcgaggccgtgcccgtgagcgccgagcatccgctgttcgtgctctacacctcgggctccaccggcaagcccaagggcgtgcagcacagcaccggcggctacctgctgtgggcgctgatgacgatgcagtggaccttcgacatcaagcccgacgacctgttctggtgtactgccgacatcggctgggtcaccggtcacacctatatcgcgtacggcccgctggccgccggtgccacgcagatcatcttcgaaggcgtgccgacctatccgaacgcaggccgcttctgggacatgatcgcgcgccataaggtcagcatcttctacaccgcgccgaccgcgattcgctcgctgatcaaggccgccgaggcagacgagaagatccatccgaagcagtacgacctttccagcctgcgcctgctcggcaccgtgggcgagccgatcaaccccgaagcctggatgtggtactacaagaacatcggcaatgagcgctgcccgatcgtcgatacgttctggcagaccgagaccggtggccacatgattacgccgctgccgggcgccacgccgctggtgccgggctcgtgcacgctgccgctgccgggtatcatggcggcgatcgtcgacgagactggacatgacgtacctaacgggagcggcggcatcctggtggtcaagcgcccgtggccggcgatgatccgcacgatctggggcgatccggaacgcttcaagaagagctacttcccggaagaactcggcggcaagctgtacctggccggcgatggctcgatccgcgacaaggagaccggctacttcaccatcatgggccgtatcgatgatgtgctgaacgtgtcgggccaccgcatgggcacgatggaaatcgaatcggcgctggtcgcgaacccgatcgtggctgaagccgccgtggtcggtcgcccggacgacactacgggcgaggccatctgcgcattcgtggtgctcaagcgtgcgcgtccgagcgatgccgaggcgcagcagatcgccaccgaactgcgcaactgggtcgcgaaggaaatcggtccgatcgccaagcccaaggacatccgcttcggcgacaacctgccgaagacgcgctcgggcaagatcatgcgccgcctgctgcgttcgctggccaagggtgaggaaatcacgcaggacacctcgacgctggagaaccctgcgatccttgatcaattgaagcaggcgcaataa

SEQ ID NO: 126626 - protein, 660 aa, Ralstonia eutropha JMP134
MSAIESVMQEHRVFNPPESFVRQAAIPGMDAYRALCAEAERDYEGFWASRARDLLHWNKPFTKVLDESNAPFYKWFEDGELNASYNCLDRNLQNGNADKTAIVFEADDGTATRVSYRDLHAKVCRFANGLKALGIKKGDRVVIYMPMSVEGVVAMQACARLGATHSVVFGGFSAKSLQERLVDVGAVALITADEQMRGGKALPLKAIADDALALGGCEAVKNVIVYRRTGGKVNWVEGRDRWMEDVSAGQPDTCEAVPVSAEHPLFVLYTSGSTGKPKGVQHSTGGYLLWALMTMQWTFDIKPDDLFWCTADIGWVTGHTYIAYGPLAAGATQIIFEGVPTYPNAGRFWDMIARHKVSIFYTAPTAIRSLIKAAEADEKIHPKQYDLSSLRLLGTVGEPINPEAWMWYYKNIGNERCPIVDTFWQTETGGHMITPLPGATPLVPGSCTLPLPGIMAAIVDETGHDVPNGSGGILVVKRPWPAMIRTIWGDPERFKKSYFPEELGGKLYLAGDGSIRDKETGYFTIMGRIDDVLNVSGHRMGTMEIESALVANPIVAEAAVVGRPDDTTGEAICAFVVLKRARPSDAEAQQIATELRNWVAKEIGPIAKPKDIRFGDNLPKTRSGKIMRRLLRSLAKGEEITQDTSTLENPAILDQLKQAQ

SEQ ID NO: 126627 - DNA, 1968 bp, Thiobacillus denitrificans ATCC 25259; identical to SEQ ID NO: 122032
  CDS (1)..(1968): transl_table=11

SEQ ID NO: 126628 - protein, 655 aa, Thiobacillus denitrificans ATCC 25259; identical to SEQ ID NO: 122033

SEQ ID NO: 126629 - DNA, 1974 bp, Anabaena variabilis ATCC 29413
  CDS (1)..(1974): transl_table=11
atgtctcagccaactatagagtcaattctgcaagaaaaacgtttatttcatcccagtgccgagttttcccaaaatgcccagattaaaagtctagaagattaccaacgtctctacgacaaagccaaagctgatccgcaaaaattttgggcagaattagccgaaacagaactgcactggttccaaaaatgggacacagtattagattggcaagcacctttcgctaagtggtttgtgggtgggaagattaacatttcctacaactgtttagatagacatctcacaacttggcggaaaaataaagctgctttgatttgggaaggggaaccaggggattcccgtactttaacttatgcccaattacatcgggaagtttgccagttcgccaacgtcttgaaacaactgggagtgcagaaaggcgatcgcgtcggtatttatatgccgatgattcccgaagcggcgatcgccatgttagcctgcgcgagaattggcgcacctcatagcgtggtatttggtgggttcagtgcggaagccttgcgcgatcgcttaattgatgcccaagccaaggtagtagttacagctgatggtgggtggcgtaaagatgcgatcgttcccttgaaagaacaggtagacaaagccttggctgatggtgctgttccatctgtagaaaacgtcctggttgtcaagcgtaccggacaagatatttatatgcagttgggaggacgagatcattggtggcacgatttacaaaaaggcgcatccgccgactgtcccgccgaaccaatggatagcgaagacttgctatttgtcctctacacttccggtagcacaggcaaacccaaaggcgttgtccataccactggtggttataacttatatacccacatgaccaccaaatggattttcgacctacaagacacagatgtatattggtgtaccgccgatgtaggttggattactggacatagttacatagtctacggccccctctccaacggtgcaaccacactgatgtatgaaggtgcgcctcgtgcctccaatcctggttgtttctgggatgtaattgaaaaatacggcgtgaacattttctacaccgcacccaccgcaattcgcgcctttattaaaatgggtgaacaccatcccaacgcccgcaacctttcttccttaagattattaggaactgttggtgaaccaattaacccagaagcttggatgtggtatcacaaagttattggtggcgatcgctgccccatcgttgatacttggtggcaaactgaaactggcggtatcatgattacccctctaccaggggcaatttccactaaacccggttccgctacccttcccttccctggcatcctggccgacatagttgatttagatggtaacactgtaccccaaaacgaaggtggttacttagcagtgcgttatccctggccgggaatgatgcggactgtttacggcgatcctgaacgcttccgccgcacctactgggaacatataccccccaaagatggcaactatacttactttgctggcgatggcgcgagaaaagatgaagacggctatttctgggtaatgggacgagtggatgatgtattgaatgtgtcaggacaccgcctcggcacaatggaagtagaatcagccctagtttctcacccagccgttgccgaagcagcagtagtgggtaaaccagatgacttaaaaggcgaagaagtggtagcttttgtcaccctagaaggaacttatcaagccagcgatgacttgagtaaggtactcaaacaacacgtagttcaagaaatcggggcgatcgctcgtcctggggaaattcgctttaccgacgcattacccaagacgcgatcgggtaaaatcatgcggcgcttactgcgaaatctcgccgccggacaagaagtttctggcgatacttccactctggaagatagaagtgttttagataaattacgggaaggtgcgtaa

SEQ ID NO: 126630 - protein, 657 aa, Anabaena variabilis ATCC 29413
MSQPTIESILQEKRLFHPSAEFSQNAQIKSLEDYQRLYDKAKADPQKFWAELAETELHWFQKWDTVLDWQAPFAKWFVGGKINISYNCLDRHLTTWRKNKAALIWEGEPGDSRTLTYAQLHREVCQFANVLKQLGVQKGDRVGIYMPMIPEAAIAMLACARIGAPHSVVFGGFSAEALRDRLIDAQAKVVVTADGGWRKDAIVPLKEQVDKALADGAVPSVENVLVVKRTGQDIYMQLGGRDHWWHDLQKGASADCPAEPMDSEDLLFVLYTSGSTGKPKGVVHTTGGYNLYTHMTTKWIFDLQDTDVYWCTADVGWITGHSYIVYGPLSNGATTLMYEGAPRASNPGCFWDVIEKYGVNIFYTAPTAIRAFIKMGEHHPNARNLSSLRLLGTVGEPINPEAWMWYHKVIGGDRCPIVDTWWQTETGGIMITPLPGAISTKPGSATLPFPGILADIVDLDGNTVPQNEGGYLAVRYPWPGMMRTVYGDPERFRRTYWEHIPPKDGNYTYFAGDGARKDEDGYFWVMGRVDDVLNVSGHRLGTMEVESALVSHPAVAEAAVVGKPDDLKGEEVVAFVTLEGTYQASDDLSKVLKQHVVQEIGAIARPGEIRFTDALPKTRSGKIMRRLLRNLAAGQEVSGDTSTLEDRSVLDKLREGA

SEQ ID NO: 126631 - DNA, 1956 bp, Pseudomonas fluorescens PfO-1; identical to SEQ ID NO: 122034
  CDS (1)..(1956): transl_table=11

SEQ ID NO: 126632 - protein, 651 aa, Pseudomonas fluorescens PfO-1; identical to SEQ ID NO: 122035

SEQ ID NO: 126633 - DNA, 1938 bp, Pseudomonas fluorescens PfO-1; identical to SEQ ID NO: 122036
  CDS (1)..(1938): transl_table=11

SEQ ID NO: 126634 - protein, 645 aa, Pseudomonas fluorescens PfO-1; identical to SEQ ID NO: 122037

SEQ ID NO: 126635 - DNA, 1962 bp, Rhodobacter sphaeroides 2.4.1; identical to SEQ ID NO: 122038
  CDS (1)..(1962): transl_table=11

SEQ ID NO: 126636 - protein, 653 aa, Rhodobacter sphaeroides 2.4.1; identical to SEQ ID NO: 122039

SEQ ID NO: 126637 - DNA, 1884 bp, Carboxydothermus hydrogenoformans Z-2901
  CDS (1)..(1884): transl_table=11
atgggcgaactaaataatttacttcagatggaggagaaaatttttccacctccaaaggtacaggaggcagccaatttaaaggattttgaccgggaatacagggagtcggtagaagacagtgagaagttctggggaagagtggctgaggagcttttctggtatgaaaaatgggagcgggttttggagtttaattatccctggcatcgctggtttatcggcggaaaaaccaacataacctataatgctttggatgcccaggtggcaaagggccgggggaataaagcggcgtttatttttttaaccgaagacgggcgggaagaagtttatacctaccggatgcttaaagatcgggtggagcgcttgagccggggactaaaaaatctggggattcaaaaaggcgaccgggtggtaatttatatgccgttgaccccggaaggggttatggccatgctggcggtggcccggattggagcggtgcacagcgtggtttatgctggccttgggtttaaagctttaagggaacggattttagattccggagctaaattggtgattactgccgattacggttatcgccggggcaaaaaggttgcgttaaagcccatagtggatgaggcgttagaaggggtttcttgcgtggaaaaggttgcggtgtggtttcgggaagagcgccaacctttagggccgcgggaagtggattttctgacgttatttaaaaatccaccgggggaacctgcggaaataatggaagctgaagatcctctctttattttatatacctccggtaccaccggcaaaccaaaaggggtactgcacgtccatggaggctacatggtgggaacctactaccatgctaagaccttttttgatttaaaagatgatgatgtgttctggtgtacctcggatattggctggattgtgggccacagctatattgtttatgctcctttggtagcgggggcaacgacattatttagggaaggggcgctggattatcctacccccgatactccctggcagattatcgagaaatatcaggtatcggtcgtttttaccgctcctacggcaatccggcttttaatgaaatacggggaaaagtggacggaaaattatgatctgtcatccttgagactgattacctgtgcgggagagcctttaaatcccgaagcctggcgctgggcttacgaaaatcttttaaaaacccacggaggttttattgttgacaactggtggcaaacggagctgggagggcctaccctggggacgccgccggtaaaagcggcaaagccgggcaaggtgggatttgcattaccgggagtggtagcggatgttttagaccgggaaggaaaaccggtgccggcgggacagggtggacttttatgcctgaaaaatccttttccccatatgctgagaactgtttacggggatgatgcccgctacgaaaaagcctggcgggaaattcccgggtggtattttaccggtgatgtggcggtgaaggatgaggaagggtattttgctgtcctgggacgggcggacgatgtgctaaatattgccgggcatcggattgggacggcggaagtggagagcgctctggtttcgcatccggcggtggcggaagcagcggctgttggggttccggacccgttaaagggagaaattttgaaagcttttgtgattttgaaaataggagcggcgccttcggaggaactggcgaaagagctaatagagcatgtgaaaaaggagttagggccaatagtggtgattggggaactgaaatttgtggataaacttcccaaaacccgctccggcaaaattatgcgccgggtgttaaaagcccaggagatgggagtggatccgggggatttaactactctggaggaataa

SEQ ID NO: 126638 - protein, 627 aa, Carboxydothermus hydrogenoformans Z-2901
MGELNNLLQMEEKIFPPPKVQEAANLKDFDREYRESVEDSEKFWGRVAEELFWYEKWERVLEFNYPWHRWFIGGKTNITYNALDAQVAKGRGNKAAFIFLTEDGREEVYTYRMLKDRVERLSRGLKNLGIQKGDRVVIYMPLTPEGVMAMLAVARIGAVHSVVYAGLGFKALRERILDSGAKLVITADYGYRRGKKVALKPIVDEALEGVSCVEKVAVWFREERQPLGPREVDFLTLFKNPPGEPAEIMEAEDPLFILYTSGTTGKPKGVLHVHGGYMVGTYYHAKTFFDLKDDDVFWCTSDIGWIVGHSYIVYAPLVAGATTLFREGALDYPTPDTPWQIIEKYQVSVVFTAPTAIRLLMKYGEKWTENYDLSSLRLITCAGEPLNPEAWRWAYENLLKTHGGFIVDNWWQTELGGPTLGTPPVKAAKPGKVGFALPGVVADVLDREGKPVPAGQGGLLCLKNPFPHMLRTVYGDDARYEKAWREIPGWYFTGDVAVKDEEGYFAVLGRADDVLNIAGHRIGTAEVESALVSHPAVAEAAAVGVPDPLKGEILKAFVILKIGAAPSEELAKELIEHVKKELGPIVVIGELKFVDKLPKTRSGKIMRRVLKAQEMGVDPGDLTTLEE

SEQ ID NO: 126639 - DNA, 1629 bp, Carboxydothermus hydrogenoformans Z-2901
  CDS (1)..(1629): transl_table=11
atggtcgactatgaaaaaacttaccgtgaatttcggcaccaggtgcccgagtattttaattttgcccgggatacttttgatgtctgggcccaagatccgaataaacttgctatgctctgggtcgatgacttcggcaatgaacggcgttttacttttaaacaattttcagaattatcaaaacaaactgccaatttctttaattttctgggggttaagcagggggaccgaattttagttattttgccgcggttaccggaatggtgggtaatttacctggcggcaattcgggctgggataatttttattccggggactacccagctgacttctaaggatattaaataccgggtggaaacagcggaaacggttatggtgattaccgatgaggataatgcggccaaggtggaagaaattaaaggagagttaccggtattaaaacatctcgtaatcgtcggcaagagggacggatggctttccttaaacgaggagattgctaaatttagtccggagtacgaagctgctaacactaaaagcgatgacccggcgattatctttttcacttcgggaaccaccggctatcccaagatggccgtgcatacccacgccagttacccgataggccactatattaccggaaagtactggctggatttaactcccgatgacctgcactggaatatgtccgataccgggtgggcaaaagcggcctggtccagcttttttgggccgtggatttgcggtgcggcaatttttgtccaccattcggtgggtaaatttgacgctaaaaaaacgttggagcttttagctaaatatcccatcaccaccttctgtggtccgccaaccgcttaccgggtttttgttctggaagatttaaaaaagtataagtttccgcatttacgccattgcgtagctgcgggcgaacctttaaaccccgaggtaatcaaagtgtggaaagaagcaaccgggctaaccatccgggatggttacggccaaacggaaacctgcgtcctggtggcgaacttcccctgttttgaagtaaaacccgggtcgatgggtaaaccggctcccggctattatgtctcgatcattgacgatgaagggaacgaactgccgcccggcaaggaaggtaatattgccattaaagttaaaccggagcggccggtgggactgtttaaagaatactggaaaaatcccgataaaaccgccgaagtgttccggggcgactggtatttaaccggcgaccgggctattaaagatgaggatggctacttctggtttgtgggccgggctgatgatgttatcctggctgccggctaccggataggaccgtttgaggtggaaagcgccctggtggagcatccggcggtggccgaggcggcggtcgtggcgagccccgatgaaatccggggagaaattgtcaaggcgtttgtggtactggccccgggatattctccgtcggaggaactggttaaagaattgcaggagcacgtgaagaaagttaccgctccttataagtacccgcgggaaatcgaatttatcgatgctttacccaaaaccgtttccggtaaaatccgccgggtggagttgagggaaagagagtgggccaaaaagctcggtaaaaagaaataa

SEQ ID NO: 126640 - protein, 542 aa, Carboxydothermus hydrogenoformans Z-2901
MVDYEKTYREFRHQVPEYFNFARDTFDVWAQDPNKLAMLWVDDFGNERRFTFKQFSELSKQTANFFNFLGVKQGDRILVILPRLPEWWVIYLAAIRAGIIFIPGTTQLTSKDIKYRVETAETVMVITDEDNAAKVEEIKGELPVLKHLVIVGKRDGWLSLNEEIAKFSPEYEAANTKSDDPAIIFFTSGTTGYPKMAVHTHASYPIGHYITGKYWLDLTPDDLHWNMSDTGWAKAAWSSFFGPWICGAAIFVHHSVGKFDAKKTLELLAKYPITTFCGPPTAYRVFVLEDLKKYKFPHLRHCVAAGEPLNPEVIKVWKEATGLTIRDGYGQTETCVLVANFPCFEVKPGSMGKPAPGYYVSIIDDEGNELPPGKEGNIAIKVKPERPVGLFKEYWKNPDKTAEVFRGDWYLTGDRAIKDEDGYFWFVGRADDVILAAGYRIGPFEVESALVEHPAVAEAAVVASPDEIRGEIVKAFVVLAPGYSPSEELVKELQEHVKKVTAPYKYPREIEFIDALPKTVSGKIRRVELREREWAKKLGKKK

SEQ ID NO: 126641 - DNA, 1944 bp, Carboxydothermus hydrogenoformans Z-2901
  CDS (1)..(1944): transl_table=11
atgagcgataattttgaagcgctcttgcaggaaagccgtatttttgaaccgccggcagaatttaaagaaaaagccaaagttgcggacttatccctttatgaatgggccgagcgggattttttaggtttctgggcggatgcggccaaagatatcgagtggtttttgccctttgagaaagtattggatgattccgatgcaccattttaccgatggtataccggtggaaagttaaacgtttcctacaattgcgtggaccggcacaccaaaagctttcgccgcaacaaagcagcgttaatctttgaaggcgaaccgggggattcaaaaattttaacctatcaggagttgtaccgggaagtaaataaatttgccaatgttttgaaaaagttgggggtgcaaaagggagacagggttaccatttacatgccgatgattcccgaagcggtaattgcgatgttagcctgcacccgcattggtgcaccccacagcgttgtgtttggtggttttagttcgcaggcgttgaaagaccggattgatgatgccaaggccaagcttttaataactgccgacggtggttaccgccggggaagtattgttgaattaaagaaaaatgccgatgctgccttagaaggggaaaccaccattgaaaaggtggtggtggtgaaaagaacggggcaggaagtgcccatgaccgagggcagggactactggtaccacgagttaatggccgatgcggctctatactgcgagccggagcagtgcgatgcggaagatatgctttttatcctttactcttccgggactaccggtaaacccaaaggcattcagcataccaccggcggttatctggtaggggtccataccacctttaaatacatttttgattaccgggaagaagatatttactggtgcaccgccgatataggctggattaccgggcacagctacattgtttacgggccactgtccaacggtgctaccgttgttttatatgaaggtgctcccgactggccgcaaaaagaccggttctgggagattattgaaaaataccgggtaaatatcctttatactgctccgacggccattcgaacctttatgcgctggggagaaaagtggccgaaaggacgggatctgtccagtttacggcttctggggacggtgggtgaaccgattaacccagaggcctggatttggtatcacgaacatattggcggcggccgctgtccgatagtcgatacctggtggcagacggaaacgggaatgattatgattactcctttacccggcgtgattcccaccaaacccggttcggctaccaagcctttccccggggtggaagcggacgtggtcaatgataaaggtgaaccggtacctcccggacagggtggttatttggtgctgaaaaaaccgtggccggcaatgcttcgcactttgtatggcgatccggaacggtataaaaacacctactggagcaagttcccgggctggtattttaccggtgatggggcgaaaaaagatgaagatggctacttctggattttaggacgggtagacgatgtcattaacgtttccggccaccggataggtaccatggaagtggaaagtgctttagtggagcatcctttggtggcggaagcagcggtaatcggcaagagccatgaagtaaaaggccaggcgatagctgctttcgtcaccctgaaagaaggggtagagggtacccccgaattggtgcaggagttaaaacagtttgttgcccagaaaattggtgctcttgcccggccggatgacatcttctttactgctgagcttcccaagacccgcagtggtaagattatgagaagattactccgggacattgccgagggtcgggcactaggtgacactactactttgaccgatccggcggttataaacaaaataaaagaacagtacaaagacgaaggttaa

SEQ ID NO: 126642 - protein, 647 aa, Carboxydothermus hydrogenoformans Z-2901
MSDNFEALLQESRIFEPPAEFKEKAKVADLSLYEWAERDFLGFWADAAKDIEWFLPFEKVLDDSDAPFYRWYTGGKLNVSYNCVDRHTKSFRRNKAALIFEGEPGDSKILTYQELYREVNKFANVLKKLGVQKGDRVTIYMPMIPEAVIAMLACTRIGAPHSVVFGGFSSQALKDRIDDAKAKLLITADGGYRRGSIVELKKNADAALEGETTIEKVVVVKRTGQEVPMTEGRDYWYHELMADAALYCEPEQCDAEDMLFILYSSGTTGKPKGIQHTTGGYLVGVHTTFKYIFDYREEDIYWCTADIGWITGHSYIVYGPLSNGATVVLYEGAPDWPQKDRFWEIIEKYRVNILYTAPTAIRTFMRWGEKWPKGRDLSSLRLLGTVGEPINPEAWIWYHEHIGGGRCPIVDTWWQTETGMIMITPLPGVIPTKPGSATKPFPGVEADVVNDKGEPVPPGQGGYLVLKKPWPAMLRTLYGDPERYKNTYWSKFPGWYFTGDGAKKDEDGYFWILGRVDDVINVSGHRIGTMEVESALVEHPLVAEAAVIGKSHEVKGQAIAAFVTLKEGVEGTPELVQELKQFVAQKIGALARPDDIFFTAELPKTRSGKIMRRLLRDIAEGRALGDTTTLTDPAVINKIKEQYKDEG

SEQ ID NO: 126643 - DNA, 1983 bp, Burkholderia sp. 383; identical to SEQ ID NO: 122040
  CDS (1)..(1983): transl_table=11

SEQ ID NO: 126644 - protein, 660 aa, Burkholderia sp. 383; identical to SEQ ID NO: 122041

SEQ ID NO: 126645 - DNA, 1620 bp, Geobacter metallireducens GS-15
  CDS (1)..(1620): transl_table=11
atgctgatagaaaacggccagtacaacatcggggatatctgtacctcccgccaatgccgactggggaggggagatcgcgttgccatgcggtggctcacgcccggcatggagcgtcgtgattacaccttcaacgagcttgacggcctttcgggcagattcgccaatgttctcgcctccctgggggtcggggctggcgaggtgttcttcacgtacctgccgaagcagccggaacagttcgttgcctttcttggcgcattgaaacttaccgcggttgcaggcacccttttctccaacttcggcgaagaggctctcctggaccgtctcgccgacgcccgtgcgtgcggcatcatcaccaagaagagccttctccggaaaattatccgaatccgcccgcaactgccggatcttcgcttcatcatcctggttgacagcgacgatcaccaggccgacggcattttcagttacagccggctcatggcggaggcatcccccgcgttcgtcactcccctgacacctgcggatgcgccgtcggttctccattacacctctgggtccacgggaaagccgaagggggtgctccatcgccacggcgcggtgactatgatcaactcgactgcccagctggtcctcgggcttcgtgaggatgatgtgtactggtgcaccgctgatcagggatgggtaaccggaacctcctacggcattatcggcccctggagcatgggcgtgacccaggttcacttcggcggcggctatgcagcagagcagtggttcgagatcctggagcgggaagaggtttcggtctggtacactgcgccgactgccctgcgaatgctcatgagggaggaaccgctccttttcgcccgctttgacctcggcatgctccggcatatttgcagtgttggcgagccgctcaacccggaggtgatccactgggcccgccgcgttctggcaaaagaggtttatgatacctggttccagaccgaaaccggcgccattatgattgccaaccgtccgggaatcccggtgaaaccgggttccatggggaagccggtggatggcatcgaggcggttgtcatatccaccgagggggaactcctcggctccggccaacagggggacctgtgcctcaagccgggatgggcttccatgttctcctcttacctgaacaacgccggtgcctatgcatcaaagttcaggaacggcttctactgcacgggtgatgtcgcctatcgcgataccgacggatatttctggttcgtcggcaggagcgacgatgttatcaatacggctgggcatctcatcagccccttcgagatcgagagcgcgctcatcgaggtccacgaggtggctgaggcaggggtgatcggtgcccccgacgaactgctctacgaaaaggtcgtggcctttgtatccctccacctggggtatgccttgaccgacgaactccagttgaagattcggcttcacctggccaacaagctttcttcggttgcaaccccccacgagatccactgcctcgaacggattcccaagaacaagagcggcaagatcatgcgccgctacctgaaggcaacctacctggggcaggacgccggggacatctctaccatggaggaatga

SEQ ID NO: 126646 - protein, 539 aa, Geobacter metallireducens GS-15
MLIENGQYNIGDICTSRQCRLGRGDRVAMRWLTPGMERRDYTFNELDGLSGRFANVLASLGVGAGEVFFTYLPKQPEQFVAFLGALKLTAVAGTLFSNFGEEALLDRLADARACGIITKKSLLRKIIRIRPQLPDLRFIILVDSDDHQADGIFSYSRLMAEASPAFVTPLTPADAPSVLHYTSGSTGKPKGVLHRHGAVTMINSTAQLVLGLREDDVYWCTADQGWVTGTSYGIIGPWSMGVTQVHFGGGYAAEQWFEILEREEVSVWYTAPTALRMLMREEPLLFARFDLGMLRHICSVGEPLNPEVIHWARRVLAKEVYDTWFQTETGAIMIANRPGIPVKPGSMGKPVDGIEAVVISTEGELLGSGQQGDLCLKPGWASMFSSYLNNAGAYASKFRNGFYCTGDVAYRDTDGYFWFVGRSDDVINTAGHLISPFEIESALIEVHEVAEAGVIGAPDELLYEKVVAFVSLHLGYALTDELQLKIRLHLANKLSSVATPHEIHCLERIPKNKSGKIMRRYLKATYLGQDAGDISTMEE

SEQ ID NO: 126647 - DNA, 1986 bp, Desulfovibrio desulfuricans G20
  CDS (1)..(1986): transl_table=11
atgagccagaccaatattgaaagcatgctggatgaaaaaagagtgttcgaaccgccttttgcccgacgcgacaacgcgcacgtacgcagcatggaacagtaccgcgaactgtgcagcagggccgacgaagatcccgaaggcttctgggccgaaagagcggtgaagctgctggactggttccggccgtttgattcggtgctggacgccgacatgcagcaggcggacatacggtggttttccggcggcaggctcaatgtggcatacaactgcattgacaggcacctgacacgcggcagacgcaacaaggcggcaatcatctggcagggcgagccggaagaggacgtgcgtgtgtacacgtatcagatgctgcatgatgaagtatgccgttttgcagcggtgctgcgttctctgggggttaaaaagggcgacagggtgtcgctgtatatgcccatgattcccgaactggcctttgccatgctggcctgtacgcgtatcggggcagtgcattctgtggtgtttgccgggttttcggccgtcagtctgcagaaccgcattcaggactgcgaggcgaaagtgctggttacggccgatgccgtgctgcgtgccggacgtcgtattccgctgaaaaacaatgtggacgaagccctgcgccaatgtcccagcgtggaaaaatgcattgtggtacgccgtgcgggtgttgatattcccatggaggcaggccgcgacctgtggtgggacgaactggctgccgaccccgaactggatgccgtgtgtccctgtgaagagatggaatcggaagacccgctgttcattctgtacaccagcggttccacgggacggcccaagggggttgtgcacaccaccggcgggtatctgacctatgccgcccacaccacgcagtgggtgttcgacctgcaggatgacgatgtttactggtgcacggcggatgccggctggattaccggacattcctacattgtgtacgggccgctggcgctgggcggcacgtcgctgatgttcgaaggcgtacccacatggccgtcaccggaccgtttctggcatatcgtgcagaaattccgcgtcaatattttttataccgctcctacagttgtacgctcgctcatgcgggaaggcgtggagtggacacagaagcatgatctttcatcgctgcgtgtgctcggctcggtgggcgagcccatcaaccccgaggcatggatgtggtaccacaactatatcggcggcggaaaactgcccattgtggatacctggtggcagacagagacgggcggcatcatgatttccgctctgccttacgccacgccgctcaaaccggggtctgccacgtttcccctgccgggcattgacgccgcggtggtggatgccgaaggcaatgccgtggaagccaatcagggcggctatctggttgtccgcagaccgtggcccggcatgctgcgcggcgtgtacggcgatccggaacgcttcagacagacatatttcgagcgttttgcaggcatgtatgaatccggcgacggtgcacgggttgatgaagatggctacatatgggtcatgggccgccttgatgacgtgatcaatgtgtccggtcaccgtatgggaacggcagaggtcgagtccgctcttgtggcgcatcccgccgtggcggaggcagctgtggtgggcatgccgcatgctgtgaagggcgaaagcatctatgcctatgtcactcttgcggctgacgaggatgagtctgaagaactgcgcgccgaactgcgtacatgggtgcgcaaggaaataggtcccatcgccacgccggaggtcattcagtttgccgacgggctgcccaaaacgcgcagcggcaagatcatgcggcgtatcctgcgcaagatcgcttccggtgaaaccagtgaattcggcgatacttccacgctttcggatcccggtgtcatcaccgacctcatcgacggacgtcttgaactgacgggacgctga

SEQ ID NO: 126648 - protein, 661 aa, Desulfovibrio desulfuricans G20
MSQTNIESMLDEKRVFEPPFARRDNAHVRSMEQYRELCSRADEDPEGFWAERAVKLLDWFRPFDSVLDADMQQADIRWFSGGRLNVAYNCIDRHLTRGRRNKAAIIWQGEPEEDVRVYTYQMLHDEVCRFAAVLRSLGVKKGDRVSLYMPMIPELAFAMLACTRIGAVHSVVFAGFSAVSLQNRIQDCEAKVLVTADAVLRAGRRIPLKNNVDEALRQCPSVEKCIVVRRAGVDIPMEAGRDLWWDELAADPELDAVCPCEEMESEDPLFILYTSGSTGRPKGVVHTTGGYLTYAAHTTQWVFDLQDDDVYWCTADAGWITGHSYIVYGPLALGGTSLMFEGVPTWPSPDRFWHIVQKFRVNIFYTAPTVVRSLMREGVEWTQKHDLSSLRVLGSVGEPINPEAWMWYHNYIGGGKLPIVDTWWQTETGGIMISALPYATPLKPGSATFPLPGIDAAVVDAEGNAVEANQGGYLVVRRPWPGMLRGVYGDPERFRQTYFERFAGMYESGDGARVDEDGYIWVMGRLDDVINVSGHRMGTAEVESALVAHPAVAEAAVVGMPHAVKGESIYAYVTLAADEDESEELRAELRTWVRKEIGPIATPEVIQFADGLPKTRSGKIMRRILRKIASGETSEFGDTSTLSDPGVITDLIDGRLELTGR

SEQ ID NO: 126649 - DNA, 1971 bp, Synechococcus elongatus PCC 7942
  CDS (1)..(1971): transl_table=11
atgagccagccaacgatcgagtcgatcctccaagagaagcgggtttttcctccctcggcagaatttgccagtgcggcgcgaatcaatcccgaagcgtacgaagcgctctgccagaaagcggcggccgatccggtggctttttggggcgaattggcagctcaggagctggactggtttgagccttggcaacagacgctggactggagcaatccgccgtttgcgaagtggtttgtcggtggcaaactcaatatttcccacaactgcctcgatcgccacttgacgacttggcgcaaaaataaagcggcgattatctgggaaggcgaacccggtgactcacggacgctgacctacgcgcaactgcatcgcgaggtctgtcagttcgccaacgtgctcaaatccttgggcattcaaaaaggtgatgtcgttggcgtttacatgccgatgattcccgaagcggcgatcgccatgctggcctgtgcgcggattggcgcagtgcatagcgttgtctttgggggctttagtgcggaagcactgcgcgatcgcttggtggatggccaagccaagctggttgtcacggcggatggtggctggcgcaaagatgcgatcgtgcccctcaaggattctgttgatcaagccctggaaggcaatgcctgccccagcgtccagcatgtcctcgtggtggaacggacgaagcaagacatccacatggaaccggggcgcgaccattggtggcatgagctgcaacagaccgtcagcgctacctgtccggcggagccgatggacagcgaagatctgctcttcgtgctctacacctccggtagcaccggcaaacccaagggtgtcgtccacaccaccggcggctacaacctctacgcccacatcaccacccagtggacttttgacctgcaggataccgatgtctactggtgtacggcggacgtcggctggattaccggtcacagctacatcgtctacgggccgctctccaacggtgcgaccacactgatgtatgagggtgccccccgcgcttctaatcccggttgcttctgggatgtgattgaaaagtatggcgttacgaccttctacacagccccaacagcgatccgcgccttcatcaaaatgggtgagcagcatcccgccgctcgcgacctctcctcattgcgactgttgggcaccgtcggagagcccatcaatcccgaagcttggatctggtatcaccgcgtcattggtggcgatcgctgcccgattgtcgatacctggtggcagaccgaaacgggcggccatatgattacgtcgctgccgggagccgtgccgaccaaaccgggctctgccactaaacctttcccgggcatcttggcagacgttgtcgatctggatgggcgatcggtgccggataacgaaggtggctacttggtgattcgccatccttggccaggcatgatgcgcacggtctacggcgatcccgatcgcttccgtcgcacctattgggagcatattcctccgcaaaatggccagtatctctacttcgccggcgatggcgcgcgccgcgatgccgatggctatttctgggtgatggggcgcgtcgatgacgtgatcaatgtctcaggtcaccgtctcggcacgatggaaattgagtcggccttggtctcccatccggcagttgccgaagctgcagttgtcggtcggcctgacgatctcaaaggtgaaggcattgttgctttcatcacgctggaatcgggcattgagactggcgatgagttagttaaagacctgaagaaacacgtcgcccaagaaattggcgcgatcgctcgtcccgatgaaattcgcttcagtgaggcgctgcccaaaacgcgatcgggcaagattatgcgccgtctgttgcgcagtctcgccgctggtcaagaagtttcgggcgacacttccaccttggaagatcgctcggtgctcgataagctgcgtcaaggcacttag

SEQ ID NO: 126650 - protein, 656 aa, Synechococcus elongatus PCC 7942
MSQPTIESILQEKRVFPPSAEFASAARINPEAYEALCQKAAADPVAFWGELAAQELDWFEPWQQTLDWSNPPFAKWFVGGKLNISHNCLDRHLTTWRKNKAAIIWEGEPGDSRTLTYAQLHREVCQFANVLKSLGIQKGDVVGVYMPMIPEAAIAMLACARIGAVHSVVFGGFSAEALRDRLVDGQAKLVVTADGGWRKDAIVPLKDSVDQALEGNACPSVQHVLVVERTKQDIHMEPGRDHWWHELQQTVSATCPAEPMDSEDLLFVLYTSGSTGKPKGVVHTTGGYNLYAHITTQWTFDLQDTDVYWCTADVGWITGHSYIVYGPLSNGATTLMYEGAPRASNPGCFWDVIEKYGVTTFYTAPTAIRAFIKMGEQHPAARDLSSLRLLGTVGEPINPEAWIWYHRVIGGDRCPIVDTWWQTETGGHMITSLPGAVPTKPGSATKPFPGILADVVDLDGRSVPDNEGGYLVIRHPWPGMMRTVYGDPDRFRRTYWEHIPPQNGQYLYFAGDGARRDADGYFWVMGRVDDVINVSGHRLGTMEIESALVSHPAVAEAAVVGRPDDLKGEGIVAFITLESGIETGDELVKDLKKHVAQEIGAIARPDEIRFSEALPKTRSGKIMRRLLRSLAAGQEVSGDTSTLEDRSVLDKLRQGT

SEQ ID NO: 126651 - DNA, 1941 bp, Rhodospirillum rubrum ATCC 11170; identical to SEQ ID NO: 122044
  CDS (1)..(1941): transl_table=11

SEQ ID NO: 126652 - protein, 646 aa, Rhodospirillum rubrum ATCC 11170; identical to SEQ ID NO: 122045

SEQ ID NO: 126653 - DNA, 1944 bp, Syntrophus aciditrophicus SB
  CDS (1)..(1944): transl_table=11
atgtcggatttattgtttcctgttccggaatcgtgggcgaaatcggcttggatagacaacgatgtctaccgacgaatgtatgagcagtccatcagtgatcccgaaggattctggggggaacaggccgggcggctcgattggtttcagccctggatgaaggtaaaggaggggtcatttgacggcgatgtccgcattcggtggttcagcggcggaaagctgaacgtcagttataattgtctggaccgccatcttgtcgggcgcggggatcagattgctctcctctgggaaggggatgacccggcggtgagccggtctctcacctatcgccggttgcatgaagaggtgtgcaggttcgccaatgtaatgaagtccctggggctccgacgcggagatcgcgtaaccatctatctgccgatgattcccgagctggctgtggccatgctggcctgcacccggatcggcgtggttcactccatcgtgtttgccggcttttcgcctgaatccctgagagaacgcatccgggactgccaggggagggtggtgatcaccgccgatgaaggtctgcgcgggggcaagccgctccccttgaaagaaaatgccgatgaagccgtgggaaaatgcccctttgtcgaaaaggtgatcgtggtgaggcgtacgggaagtcagatcccgtggacgtcgggacgcgatttcgattgggaggggctcatgcaggaggcttccgccgactgcccgccggaagagatggatgccgaggaccccctttttattctctatacctccgggtccacgggaaagcccaagggcgtgcttcataccactggaggctatcttttgttcacggccatgagccaccagcatatcttcgattatcacgatggcgacatctactggtgcactgcggacatcggctgggtgacgggacacagctacaccatctacggcccgctggccaatggggctaccacggtcatgttcgagggcgtccccaattaccccgactggtcccgcttctggcgtattgtggacaagcacggggtcacgatcctctataccgcgccgacggccattcgcgccctgatgcgccagggtgacgagccggtccggaagaccttccgaaaaaccctgcggcttctcggcaccgtcggggagcccatcaatccggaggcttggctctggtactacaatgtcgtcggagaaaaacgctgtcccattgtcgacacctggtggcagacggagaccggcggaattctgatcacaccgtttcccggcgccatggccctcaaaccgggttccgccgcccggccgtacttcggagtgaagccggccatcatggattccgagggccgtttcctggagggaactggaacgggcaatctggtgatcaccgagccttggccggggatgctgaggacgatttacggcgatcatcagcggtttctcgatacctatttttcgacatacaaaggggtctactttaccggcgatggagcgcgccgggatgaggacggcgactactggatcacggggcgggtcgacgatgtcatcaacgtatccgggcatcgtctgggaaccgcggaggtcgagagcgcacttgccgcccattccgccgtagccgaggcggcggtcgtcggatttcctcatgagatcaaagggcagggcatctatgcctacgtgaccctgaaaacggatcggcaaccttcggatgcgctgcggaaagagcttgtttcgtgggtgagaagggaaatcggggcaatcgccgcaccggactttatccagtgggcgcccggattacccaagacccggtcgggaaagatcatgcggcggattctccgcaaaatcgccgccgacgacatcgccgatctgggcgataccaccacccttgctgaaccggcagtggttgacgatctcctcaaggggcggttggcggcagcatgggaataa

SEQ ID NO: 126654 - protein, 647 aa, Syntrophus aciditrophicus SB
MSDLLFPVPESWAKSAWIDNDVYRRMYEQSISDPEGFWGEQAGRLDWFQPWMKVKEGSFDGDVRIRWFSGGKLNVSYNCLDRHLVGRGDQIALLWEGDDPAVSRSLTYRRLHEEVCRFANVMKSLGLRRGDRVTIYLPMIPELAVAMLACTRIGVVHSIVFAGFSPESLRERIRDCQGRVVITADEGLRGGKPLPLKENADEAVGKCPFVEKVIVVRRTGSQIPWTSGRDFDWEGLMQEASADCPPEEMDAEDPLFILYTSGSTGKPKGVLHTTGGYLLFTAMSHQHIFDYHDGDIYWCTADIGWVTGHSYTIYGPLANGATTVMFEGVPNYPDWSRFWRIVDKHGVTILYTAPTAIRALMRQGDEPVRKTFRKTLRLLGTVGEPINPEAWLWYYNVVGEKRCPIVDTWWQTETGGILITPFPGAMALKPGSAARPYFGVKPAIMDSEGRFLEGTGTGNLVITEPWPGMLRTIYGDHQRFLDTYFSTYKGVYFTGDGARRDEDGDYWITGRVDDVINVSGHRLGTAEVESALAAHSAVAEAAVVGFPHEIKGQGIYAYVTLKTDRQPSDALRKELVSWVRREIGAIAAPDFIQWAPGLPKTRSGKIMRRILRKIAADDIADLGDTTTLAEPAVVDDLLKGRLAAAWE

SEQ ID NO: 126655 - DNA, 2004 bp, Frankia sp. CcI3
  CDS (1)..(2004): transl_table=11
gtgaccgacacaggtgtcagcgtctcgaccggtctcgagaacgtcgccgatctcgaggcgaccctggagagtctgctgtcggtggagcgtttcgacccatcggcggccttcacccggcgcctgccgatggacgccgaccgggccgccgccgaggcggacccgaacgcgttctgggctcgcaaggccgaggagctgctgacctggcacacgccgttcacgcaggtactcgacgactcgaacccgcccttctacacctggttcgcggacgggatgctgaacctgtcggagaactgcctggaccggcacgtggcggccgggcgcggcgagcgggtggccttccactggcacggggaggagggggagcggcgcaccgtcacctatgcggacctgctcgccgacacccagcggctggcgaacgggctgcgttcgctcggcgtgcgcgccggcgacgtggtcgggatcttcctgccgatgattcccgaggtggccgtcgcgatgctggcctgcgcccggatcggcgcggtccacaacgtggtcttcggcggtttcgcgccgtccgcggtccgggagcggatggaggtctccgacgccaaggtgctgatcaccgtggacggcgcgcggcgcaagggacggacggcgccggtgaaggccgccgtcgacgcggagctcggtgacctcccggcgctggggcacattgtggtcgtgtccgggccgggcggtaccggggcgccgatgaccgcgggccgggacgtctggtaccacgagctgctggccacggcggcgcccgactgcccgccggaaccgctgtccgcggagcatcccctgttcatcctctacagctccgggtcgaccgcgaagccgaaggggatcctgcacacgaccgcgggttacctgctcggcgccacctacactcaccgggcggtcttcgacatcgacccggacaccgacgtctactggtgttccgcggacgtcggctggatcactgggcactcctacatcgtctacggcccgctatcgaacggcgtgaccagcgtgatgtacgagggggcgccggactaccccgactacgacatctggtggcggctcatcgaggagtacaaggtcaccgtgttctacacggcgccgacggcgatccgtacgtgcatcaagtggggcgcgcggtatcccggtcggcacgacctgtcctcgctgcgggtactcggcacggtcggggaaccgatcaacccgaaggcgtggttgtggtaccacgtggtcatcggcggtggtcgctgcccgatcgtcgacacgtggtggcagaccgagaccggctccgcgctcatctcgccgctggccggcgtcacgtcgaccaaaccgggttcggcgaccctgccgctgcccggtatcagcccggcgctgctctcggaggacggcgagccggtcactgagggcaccggaatcctggtgatcaccaagccgtggccgtccatgctgcgcaccctttacaaggacgacgagcgattcgtcaagacgtacttctcccgcttcggcccgtcaacctacgtcgtcggcgacgccgcacgcctcgacgccgacggctacttctggatcatcgggcggatcgacgacgtcatcaacgtgtccgggcaccggctgtccaccgcggaggtggagtcggcgatcgtcgcccatgaggccgtcgccgaggcggcggtggtcgcacagtacgacgagcagaccggccaggcgatcgtcgcgttcgtgacgctcgccggtgaccgctcgggcgacgaggccaccgaggccgagctgcgcgagcacgtggccaggcggatcggcaagctcgcccggccgcggcggatcatctgggccgacgacctgccgaagacccggtccggcaagatcatgcgccggttgctgcgtgacattgccgaaggccgggaactcggcgacgtcacgaccttgcgcgaccccgcggtgatggccgcgctcacggccaaggtgggcaccgcccgagacaacgagtaa

SEQ ID NO: 126656 - protein, 667 aa, Frankia sp. CcI3
MTDTGVSVSTGLENVADLEATLESLLSVERFDPSAAFTRRLPMDADRAAAEADPNAFWARKAEELLTWHTPFTQVLDDSNPPFYTWFADGMLNLSENCLDRHVAAGRGERVAFHWHGEEGERRTVTYADLLADTQRLANGLRSLGVRAGDVVGIFLPMIPEVAVAMLACARIGAVHNVVFGGFAPSAVRERMEVSDAKVLITVDGARRKGRTAPVKAAVDAELGDLPALGHIVVVSGPGGTGAPMTAGRDVWYHELLATAAPDCPPEPLSAEHPLFILYSSGSTAKPKGILHTTAGYLLGATYTHRAVFDIDPDTDVYWCSADVGWITGHSYIVYGPLSNGVTSVMYEGAPDYPDYDIWWRLIEEYKVTVFYTAPTAIRTCIKWGARYPGRHDLSSLRVLGTVGEPINPKAWLWYHVVIGGGRCPIVDTWWQTETGSALISPLAGVTSTKPGSATLPLPGISPALLSEDGEPVTEGTGILVITKPWPSMLRTLYKDDERFVKTYFSRFGPSTYVVGDAARLDADGYFWIIGRIDDVINVSGHRLSTAEVESAIVAHEAVAEAAVVAQYDEQTGQAIVAFVTLAGDRSGDEATEAELREHVARRIGKLARPRRIIWADDLPKTRSGKIMRRLLRDIAEGRELGDVTTLRDPAVMAALTAKVGTARDNE

SEQ ID NO: 126657 - DNA, 1950 bp, Novosphingobium aromaticivorans DSM 12444
  CDS (1)..(1950): transl_table=11
atgggcgaggcagtctatcctgtaccggctgagtgggcgcagaacgcgctggtcgacgaggcgcgctaccaggatatgtatcgccagtcggtcgacgatcccgaaggcttctgggccgaacacggcaagcggatcgattggatcaggcctttcaccaaggtcaagaacacctcgtttcacgaagccgacttcggcatccgctggttcgaggacggcacgctcaacctcgccgcgaactgcctcgaccgtcacctcgccgaacgcggcgacgagatcgcgatcctgtgggagcccgacagccccgacgaggcacaccgcgagatcacctaccgccagctccacgccgatgtctgccgctttgccaacctgctgaaggccaagggcgtccagaagggcgagcgcgtcaccatctacctgccgatggtgccggaagccgccgtggcgatgctggcctgcgcccgcatcggcgcgatccattccatcgtctttgcaggcttcagcccggatgcgctggccggccgcatcaccgactgcgacagccgcatcgtcctcacctcggacgaaggcctgcgcggcggacgcaaggttccgctgaaggccaatgtggacgaggcgctgaagcaatgccccggcgtcgacaccgtgatcatgctgcgccgcacgggcgccgacgtggactttgtcgaaggccgcgacatcgactgggcaacggcagtcgccgagcagagcgccgattgccagcccgaggaaatgaacgcggaagacccgctgttcatcctctacacctccggctctaccggaaagcccaagggcgtgctgcacacgacgggcggctattcggtctgggcgtcgatgacgcaccagtacgtgttcgattaccgtcccgggcagatctactggtgcgcggccgacatcggctgggtcaccggccactcctatgtcgtctacggaccgctcatgaacggcgccactacggtcatgtttgaaggcgtgccgaacttcccggacgcaagccgcttctggcaggtggtcgacaagttcaaggtcgaaatcttctacggcgcccctaccgcgctgcgcgccctgatgcgcgagggcgacgaatgggtgaagaagacgagccgcgcctcgctgcgcctgcttggttcggtgggcgaaccgatcaatcccgaagcctgggaatggtatcacaaggtcgtaggcgacagtcgctgcccgatcgtcgacacctggtggcagaccgaaaccggcggggcgatgatcaccccgctaccgggcgcgaccgcgctcaagcccggctcggcctcgcgcccgttcttcggcgtaaagcccgcgcttgtcgataacgacggcacgttccttgaaggcgcgactgacgggtgcctcgtagtgaccgatagctggcccggccagatgcgcaccgtgtggggcgatcacgagcggttcttccagacctatttcaccactttcaagggcctgtacttcaccggcgacggatgccgccgcgacgaggacggctactactggatcaccggccgcatcgacgacgtgatcaacgtgtcgggccaccgcatgggaacggcggaaatcgaaagcgcgctggtcgcccacccgaaggtggccgaagctgcggtcgtcggcatgccgcacgacatcaagggccagggcatctacgccttcgtcacctgcaatgccgaaatcgagcccgacgacctgctgcgcaaggagttgatccagtgggtccgccacgaaatcggccccatcgccacgccggacgtgatccagttcgctcccggtctgcccaaaacccgttcgggcaagatcatgcgccgcatcctgcgcaagatcggcgagaacgacgtctccaaccttggcgacacgtcgacccttgccgatccgtcggttgtcgataatctgctggccaacagaccgcagctcgcaggggcttga

SEQ ID NO: 126658 - protein, 649 aa, Novosphingobium aromaticivorans DSM 12444
MGEAVYPVPAEWAQNALVDEARYQDMYRQSVDDPEGFWAEHGKRIDWIRPFTKVKNTSFHEADFGIRWFEDGTLNLAANCLDRHLAERGDEIAILWEPDSPDEAHREITYRQLHADVCRFANLLKAKGVQKGERVTIYLPMVPEAAVAMLACARIGAIHSIVFAGFSPDALAGRITDCDSRIVLTSDEGLRGGRKVPLKANVDEALKQCPGVDTVIMLRRTGADVDFVEGRDIDWATAVAEQSADCQPEEMNAEDPLFILYTSGSTGKPKGVLHTTGGYSVWASMTHQYVFDYRPGQIYWCAADIGWVTGHSYVVYGPLMNGATTVMFEGVPNFPDASRFWQVVDKFKVEIFYGAPTALRALMREGDEWVKKTSRASLRLLGSVGEPINPEAWEWYHKVVGDSRCPIVDTWWQTETGGAMITPLPGATALKPGSASRPFFGVKPALVDNDGTFLEGATDGCLVVTDSWPGQMRTVWGDHERFFQTYFTTFKGLYFTGDGCRRDEDGYYWITGRIDDVINVSGHRMGTAEIESALVAHPKVAEAAVVGMPHDIKGQGIYAFVTCNAEIEPDDLLRKELIQWVRHEIGPIATPDVIQFAPGLPKTRSGKIMRRILRKIGENDVSNLGDTSTLADPSVVDNLLANRPQLAGA

SEQ ID NO: 126659 - DNA, 1707 bp, Staphylococcus aureus subsp. aureus NCTC 8325
  CDS (1)..(1707): transl_table=11
atgaaagtcgaagtttataaaggagcgcaaggtaaacataaccttaaagattatgaagaaacatataatacttttgattggaaagacgtagaacaagcattttcttggagtgaaactggaaaaatgaacatggcatatgaatgcatagatcgccatgtagatcaaggattaggggataaaatagcgttaaattacaaagatgagcacagaaaagaatcgtatacttataaagatatgcaacggttatctaataaagcagcgaatgttttgtctgaacatgcagaagttgacaaaggtgacagagtatttatatttatgtcgcgtacacctgaactatattttgcgttgttaggtgttttaaaaattggtgcaattgttgggccgttatttgaagcatttatggaaaaggcagttgcggatagattagagaacagtgaagctaaagtgttaattactaataaggcattgttacctcgagtacctgtagataaattaccaaacttgaaaaaaattgttgtcgtagatgaggatgtagaagacaattacatagacttcattagtttgatggaaactgctagcgatgaatttgacattgaatggttaaagtcggatgatggtttgattttacattatacatcaggttctactgggcaacctaaaggtgtattgcatgttcaacaagcaatgttagtgcactatatttctggaaaatatgtattagatttacaagaagatgatgtttattggtgtacagcagatccaggttgggttacaggaacatcttatggtatttttgcaccatggttaaatggcgctacaaattgtatagctggtggtcgcttttcgccagaacagtggtatagtatgattgaagattttaaagtgacgatttggtatacggcaccaacagctttaagaatgttaatgagtgctggtgacgatattgttgagaaatatgacttgtcatcgttacgttcgattctatcagtaggtgagcctttaaatcctgaagttataaaatgggcgaaaaaagtatacggtttaacggtgttagatacttggtggatgacagaaacaggtggacatatgattgttaactatccaacgatggacgtcaagcttggctcaatgggcaaaccattacctggtattcaagctgcaattatcgatgatgcagggaatgaattaccaccaaatcgaatgggcaaccttgctataaaaaaaggctggccatcaatgatgtatcgtatctggaagaatccagaaaaatataaatcatattttattggagactggtatgtatctggtgattcggcatataaagatgaagatggttacttctggttccaaggacgtgttgatgatgtaattatgacagctggtgaacgagttggaccatttgaggttgagtctaaattggttgaacacgaagcagttgccgaagcaggaattattggtaaacctgatccggttcgcggtgaaataattaaggcgtttgttgcactgagaaaaggatatgaaccaacagacgaattaaaagaagaaattcgtatatttgttaaagaaggtttgtcggcacatgcagcaccacgtgaaatcgaatttaaagataaattacctaaaacacggtcaggtaaaattatgagacgtgtattaaaagcttgggaattaaatttagatgctggggatttaagtacaatggaataa

SEQ ID NO: 126660 - protein, 568 aa, Staphylococcus aureus subsp. aureus NCTC 8325
MKVEVYKGAQGKHNLKDYEETYNTFDWKDVEQAFSWSETGKMNMAYECIDRHVDQGLGDKIALNYKDEHRKESYTYKDMQRLSNKAANVLSEHAEVDKGDRVFIFMSRTPELYFALLGVLKIGAIVGPLFEAFMEKAVADRLENSEAKVLITNKALLPRVPVDKLPNLKKIVVVDEDVEDNYIDFISLMETASDEFDIEWLKSDDGLILHYTSGSTGQPKGVLHVQQAMLVHYISGKYVLDLQEDDVYWCTADPGWVTGTSYGIFAPWLNGATNCIAGGRFSPEQWYSMIEDFKVTIWYTAPTALRMLMSAGDDIVEKYDLSSLRSILSVGEPLNPEVIKWAKKVYGLTVLDTWWMTETGGHMIVNYPTMDVKLGSMGKPLPGIQAAIIDDAGNELPPNRMGNLAIKKGWPSMMYRIWKNPEKYKSYFIGDWYVSGDSAYKDEDGYFWFQGRVDDVIMTAGERVGPFEVESKLVEHEAVAEAGIIGKPDPVRGEIIKAFVALRKGYEPTDELKEEIRIFVKEGLSAHAAPREIEFKDKLPKTRSGKIMRRVLKAWELNLDAGDLSTME

SEQ ID NO: 126661 - DNA, 1932 bp, Desulfitobacterium hafniense Y51
  CDS (1)..(1932): transl_table=11
atggaagaaaagaatcttgaggctttgctggaagaggatagacagttcatccccagtgaggaattccacaaaaacgcactcattcaaagcgcggatatctatgaacaaggtcaaagcctcggcttttgggaggaacaggctaaacaactctcctggttgagcccttgggaaaaaaccctggagtggaatcctcccttcgcccagtggtttgtcggcgggaaactcaacgcctccgccaactgtctggatcgccacctccaggattggcatcgcaataaagccgctattatcttcgaaggcgaaaacggggacagccaggttcttacctaccaggatctccatcgtgaagtctccaaattcgctaatgtcctcaaagccaatggggtgaacaaaggtgatcgggtcaccatctatctgcccatgattccggaagctgtgatttccatgctggcttgcgcccggattggggctccccacagtgtggtcttcggaggcttcagttcggaagctttgcgggatcgggtcattgatgctcaggccaaagccgtcatcacttccgatggcagcttccgccggggcaacaccatccccttgaaagataataccgatatcgctttggacggcgtggactgcgtggaacatgtctttgtcattcaacgaaccaaacaaaccgtacaaatgaaggaagagcgggacctttggtatcatgaagaaatggccaaggcctccccggtgtgtccggcggagcccatggatgcagaagatatgctctttatcctctacaccagcggtaccacaggaaaacccaagggtgtagtccataccacggggggctatatggtaggggtatccaccacccatcgctgggtctttgatctcaaggaagaggatgtttactggtgcaccgcggatgtgggctggattaccggtcactcctatattgtctacggccccttggccaatggagccactgtccttatgtatgagggaagtcctgattatccgaaccgggatcggttctgggaaatcgtcgagaaatacaaagtcaccattctttataccgcacccaccgccatccggacctttatgaagtggggtccccaatatccccagagccgggatctatccagcctgcgcttgctgggctctgtgggtgaacccatcaatccggaagcctggatgtggtactacaaatacatcggcggggaacggtgccccatcgtggatacctggtggcaaaccgagacgggtatgattatgatgacccctctgccgggaattacttccttaaagcccggttcctgtaccgtacctttcccaggagtcagaatcgaagtggtggacagcgccggccatcccgtcccaaagggaggcggcggctacctggctatcaaggagccctggcctgctatgctgcgcaatatctacggagatccggcgcgcttcgagcggacgtacttcggcaactggccgggagtctacttccccggtgatggcgccaagtgggataaggacggatatttctggatactgggccgggtggatgatgtcatcaacgtttctggtcaccggatcggcaccatggaagtggaaagcgctttagtggatcacccctctgttgccgaggctgccgttatcggtaaaaaccatgaagttaaagggcaggccctggcctgtttcgtcactttaaaggaaggcatcgaaatcactcccgatctggaggacgaattaaagaaacatgtggcaaagaagatcggagctctggcccggccggatgatatcttctttaccgccgaactgcccaagacccgcagcggtaagatcatgcgccgcctcctcagagacattgccgagggacgtgctatcggtgataccaccactttggccgatgcctctgtggtcaatacccttaaagccaattaccaggagtaa

SEQ ID NO: 126662 - protein, 643 aa, Desulfitobacterium hafniense Y51
MEEKNLEALLEEDRQFIPSEEFHKNALIQSADIYEQGQSLGFWEEQAKQLSWLSPWEKTLEWNPPFAQWFVGGKLNASANCLDRHLQDWHRNKAAIIFEGENGDSQVLTYQDLHREVSKFANVLKANGVNKGDRVTIYLPMIPEAVISMLACARIGAPHSVVFGGFSSEALRDRVIDAQAKAVITSDGSFRRGNTIPLKDNTDIALDGVDCVEHVFVIQRTKQTVQMKEERDLWYHEEMAKASPVCPAEPMDAEDMLFILYTSGTTGKPKGVVHTTGGYMVGVSTTHRWVFDLKEEDVYWCTADVGWITGHSYIVYGPLANGATVLMYEGSPDYPNRDRFWEIVEKYKVTILYTAPTAIRTFMKWGPQYPQSRDLSSLRLLGSVGEPINPEAWMWYYKYIGGERCPIVDTWWQTETGMIMMTPLPGITSLKPGSCTVPFPGVRIEVVDSAGHPVPKGGGGYLAIKEPWPAMLRNIYGDPARFERTYFGNWPGVYFPGDGAKWDKDGYFWILGRVDDVINVSGHRIGTMEVESALVDHPSVAEAAVIGKNHEVKGQALACFVTLKEGIEITPDLEDELKKHVAKKIGALARPDDIFFTAELPKTRSGKIMRRLLRDIAEGRAIGDTTTLADASVVNTLKANYQE

SEQ ID NO: 126663 - DNA, 1938 bp, Saccharophagus degradans 2-40; identical to SEQ ID NO: 122048
  CDS (1)..(1938): transl_table=11

SEQ ID NO: 126664 - protein, 645 aa, Saccharophagus degradans 2-40; identical to SEQ ID NO: 122049

SEQ ID NO: 126665 - DNA, 1965 bp, Methylobacillus flagellatus KT
  CDS (1)..(1965): transl_table=11
atgtcgtccattgaatccgtgctgacggaaacgcgcgtttttgcgccgcatgaaacattccgccaggccgccaccgtctcgggattgcctggctaccaggctttatgcgatgcggctgagcaggattacaccggcttttgggccaaccttgcccggcaggaaatctcgtggcagaccccgttcaccgaggtactggatgagtcgaatgcccctttctatcgctggtttgccgatggcaaactcaatgcttcctataactgtatagaccgtcacctggaaaaacgggccaacaagatcgcgctgatttttgaggccgataacggcgatgtcgccaacattacctatagggaacttcaccagcgcgtatgccgcttcgccaatgctttgaaaaagcaaggggtcggcctcggcgaccgcgtcatcatctacctgcccatgagcatagaagccatcgttgccatgcaggcctgtgcccgcatcggggcaatccactccgtggtattcggcggcttttccgccaagagcctgcacgagcgcatcgtcgatgtcggcgccaagctggtcatcactgccgacgccggtatacgcggaggcaaacaggtagcattgaaggcttcagtggacgaagcgctggagctgggcggctgcgaatcggtcgagaaagtcatcgtctaccagcgtacaggcgtggatattgcctggaatccgcaccgcgacgcatggtggcatgaggttgaagccgccgagaacgacaattgcgagcctgtctgggtggatgccgaacatcctctgttcattctatacacttcgggctccaccggcacgccgaaaggcgtacagcattccaccggaggctatctgcttggcgccatcatgagcatgaaatgggtgttcgaccataaagccaccgatattttctggtgtacggccgacgttggctggatcaccggccacagctacgtagcttacggcccattggcgctcggcagtacgcaagtggtgttcgagggcgtgccaacttatcccgacgccggccgcttctggcaaatgatagaacgccacaaggtcagcattttctacaccgcacccactgccatccgttcgctgatcaagctgggcggcgacctaccccacaagtatgacctctcgagcctgaggctactgggcaccgtgggtgagccgatcaaccctgaagcctggatgtggtattacaaagtggtcggcaaggagcgctgcccgattgccgatacctggtggcagaccgagaccggggcgcatatgattgcgccgctgcctggcgccatcgacctcaagccaggatcctgcacccgccccctgcccggcatcatcatggatattgtcgaagaggacggcacccatatcgaaggcaccggcggcggcctgttggtggtgaagaagccgtggccctcgatgatacgcaacatctggggcaatcctgaacgattcaggaaagcctatttccccgaagagctcaacgggctgtacctggcaggcgattcggcgcaccgtgatgaagacggttatttctggatcatgggccgcatcgatgatgtactcaacgtttccggccaccgcttgggcaccatggagatcgaatctgccctggttgccaaccccttggtggctgaagcagccattgtcggtaaaccgcacgatatcaagggcgaatccattgtggcctatgtagtgctcaagggtgagcggcctgagggcgaagccgccaaaaccattgccggtcagttgcgcgagtgggtaggcaaggaaataggcccgatcgccaagccagacgaaatccgcttcggcgagaacctgcccaagacgcgctccggcaagatcatgcgccgcctgctgcgctcgctcgccaagggagaggaaatcacatcggacatttcgacgctggacaatcccgccattctcgatcagctcagacagtcagcgggctga

SEQ ID NO: 126666 - protein, 654 aa, Methylobacillus flagellatus KT
MSSIESVLTETRVFAPHETFRQAATVSGLPGYQALCDAAEQDYTGFWANLARQEISWQTPFTEVLDESNAPFYRWFADGKLNASYNCIDRHLEKRANKIALIFEADNGDVANITYRELHQRVCRFANALKKQGVGLGDRVIIYLPMSIEAIVAMQACARIGAIHSVVFGGFSAKSLHERIVDVGAKLVITADAGIRGGKQVALKASVDEALELGGCESVEKVIVYQRTGVDIAWNPHRDAWWHEVEAAENDNCEPVWVDAEHPLFILYTSGSTGTPKGVQHSTGGYLLGAIMSMKWVFDHKATDIFWCTADVGWITGHSYVAYGPLALGSTQVVFEGVPTYPDAGRFWQMIERHKVSIFYTAPTAIRSLIKLGGDLPHKYDLSSLRLLGTVGEPINPEAWMWYYKVVGKERCPIADTWWQTETGAHMIAPLPGAIDLKPGSCTRPLPGIIMDIVEEDGTHIEGTGGGLLVVKKPWPSMIRNIWGNPERFRKAYFPEELNGLYLAGDSAHRDEDGYFWIMGRIDDVLNVSGHRLGTMEIESALVANPLVAEAAIVGKPHDIKGESIVAYVVLKGERPEGEAAKTIAGQLREWVGKEIGPIAKPDEIRFGENLPKTRSGKIMRRLLRSLAKGEEITSDISTLDNPAILDQLRQSAG

SEQ ID NO: 126667 - DNA, 1983 bp, Burkholderia xenovorans LB400; identical to SEQ ID NO: 122050
  CDS (1)..(1983): transl_table=11

SEQ ID NO: 126668 - protein, 660 aa, Burkholderia xenovorans LB400; identical to SEQ ID NO: 122051

SEQ ID NO: 126669 - DNA, 1950 bp, Methanococcoides burtonii DSM 6242
  CDS (1)..(1950): transl_table=11
atgacagaaacaatagaatctttacttaaagaacagcaagaattccacccatcagcagattttgtcaaacaagccaatatgaacgaccctcacatatatgaaaaggctgaggctgatatcgaaggtttctgggagggactggccgggaatattgactggttcaaaaaatgggacactgtccttgactggcaacccccccatgcaaaatggttcagcggtggaaaattgaatgcatcctacaactgtcttgaccgtcatgtccaaaaacatggtgataagcctgcactaatttgggaaggtgagatggagaactccgaaacctacacctataaggaactcagggatgcaactgctcgttttgctgcaggcctgaaagagcttggtgtgaagaaaggagatgtcgttaccatctaccttccgatggtaccagaagctgtcatatccatgcttgcatgttcaaggataggtgcacctcacagtgtcgtatttgctggcttctcatcagaagcactggcacaacgggtggaagatgcacatagcagatttgtcataacatgtaatggttacttccacaaaggaaatctcatacaacaaaaagaaagagccgataaagggcttgaaaatgctccggcggtcgaaaaggttattgttgtcgatcatgctgcaaacattattccgatgaaagaggaaagggacatctggtggaacgatctaattcataacgtagattctgaatgtgaaccagaacacatggattcagaagacactcttttcatcatgtacaccagcggaactaccggcagaccaaaaggagttgttcacacgaccggtggttacatggtcggtacaaatgtgacatccaactggatcttcgatctaaaggatgatgatattttctggtgtactgcagatgtcggatggatcacaggacactcatatcttgtttacggacccctctctaatggtgcgacaattgtaatgcacgagggagcgcctgattacccggacaagggtagattttgggatattgttgaaaaatatggcgtgacaatattttatacagcaccgaccgcaatacgcactttcatgaagtggggagatgagatccctgcaaaatatgatctgtcctcattgcgacttctgggaagtgtaggcgaacctatcaatccaaaagcatggctctggtattatgagaccataggcaaatctaaatgccccatagttgatacctggtggcagacagagacgggaatgataatgataagcccattaccgggcatcaccacaatgagaccgggcactgcaacccgaccatttccgggaataaaagccaatatccttgacgatgaaggcaatgaagtgccaatgggatcaggaggctaccttgctcttcagaacccctggccaagcatgatacggaccataaacggagacgaacagagattcattgacacatactggagcaagtggggggccgatacctaccttaccggtgatggtgcacgtaaggatgaggacggcaacttctggatacttggaaggttggacgatgtcatcaaggtatcaggccacagactcggaacaatggagatagaaagtgcacttgtctcacacccctcggttgccgaggctgcggttgacggaaaagtggacgagataaaaggagaggtcatctgtgcatatgtgatcctcgaatcatcctgtgacgaccaatgttcaatccttgaagatgaattgaagcagcatgtggtagatgagatcggacctatcgcacgcccaaagatgatcatcttcaccgaggagctgccaaagacgagaagtggcaagataatgaggcgtgttctaaaggccatcacgaacggaacggagataggggacatatccacactccaggatccggcagttgttgaagatctgaaaagaaaggttaatgaaataggggaacaatga

SEQ ID NO: 126670 - protein, 649 aa, Methanococcoides burtonii DSM 6242
MTETIESLLKEQQEFHPSADFVKQANMNDPHIYEKAEADIEGFWEGLAGNIDWFKKWDTVLDWQPPHAKWFSGGKLNASYNCLDRHVQKHGDKPALIWEGEMENSETYTYKELRDATARFAAGLKELGVKKGDVVTIYLPMVPEAVISMLACSRIGAPHSVVFAGFSSEALAQRVEDAHSRFVITCNGYFHKGNLIQQKERADKGLENAPAVEKVIVVDHAANIIPMKEERDIWWNDLIHNVDSECEPEHMDSEDTLFIMYTSGTTGRPKGVVHTTGGYMVGTNVTSNWIFDLKDDDIFWCTADVGWITGHSYLVYGPLSNGATIVMHEGAPDYPDKGRFWDIVEKYGVTIFYTAPTAIRTFMKWGDEIPAKYDLSSLRLLGSVGEPINPKAWLWYYETIGKSKCPIVDTWWQTETGMIMISPLPGITTMRPGTATRPFPGIKANILDDEGNEVPMGSGGYLALQNPWPSMIRTINGDEQRFIDTYWSKWGADTYLTGDGARKDEDGNFWILGRLDDVIKVSGHRLGTMEIESALVSHPSVAEAAVDGKVDEIKGEVICAYVILESSCDDQCSILEDELKQHVVDEIGPIARPKMIIFTEELPKTRSGKIMRRVLKAITNGTEIGDISTLQDPAVVEDLKRKVNEIGEQ

SEQ ID NO: 126671 - DNA, 1983 bp, Ralstonia metallidurans CH34; identical to SEQ ID NO: 122054
  CDS (1)..(1983): transl_table=11

SEQ ID NO: 126672 - protein, 660 aa, Ralstonia metallidurans CH34; identical to SEQ ID NO: 122055

SEQ ID NO: 126673 - DNA, 1959 bp, Silicibacter sp. TM1040
  CDS (1)..(1959): transl_table=11
atgaccacgcccgagagcgcagtttacccaccgtctgaggacatcgtcaaaaacgcccatgtcaatgcggcaaaatacgacgagatgtacgcgcaatcccttgagaacccagagaagttctgggcagagcaggctgaacgcatcgactggatcaagccgttcaccaaggtcaagaatgtgtcctatgattttggcaacgtggacatcaaatggttcgaggacggtcagctgaacgtcgcagccaactgcatcgaccgccatctggagacccgtggcgatcagaccgcgatcatctgggagcctgatgatccatccgatgaggccaagcacatctcctacaaggagctgcacctcagaacctgccgcatggccaacatcctcgagagcatgggtgtcggcaaaggcgaccgagtggtgatctacctgcccatgatccccgaagccgcctatgccatgctggcctgcgcgcgcatcggtgcgatccactcaattgtttttgcagggttttcaccggacgccctggcggcgcggattaatggctgcgacgccaaggttgtgatcaccgccgacgaggccccgcgcggagggcgcaagacgcctctgaagtcgaacgccgacgccgccctgctgcactgcaaggaaagcgtgaagtgcctcgtggtgcgccgcaccggcggtcagaccacatggatcgacggtcgcgaccacgactataacgagatggcgctggaggcgaatgactactgcaaacccgccgcaatggacgcagaggatccgctgttcattctctacacctccggttcgaccgggcagcccaagggcgttgtacacaccaccggtggctacctcacctatgccgcactcacccatgaggtgacgtttgattaccacgatggcgacatctactggtgtacggccgatgtgggctgggtcacgggccatagctatatcgtgtatggccccctcgccaatggcgccaccacattgatgtttgagggcgtgcccacctaccccgatgcgggccggttctgggcggtctgcgaaaagcacaaggtcaaccagttctacacggcaccgacggcgatccgcgccctgatggggcaagggacggaatttgtcgagaaatacgacctctccgacctgaagctcctcggcacagtgggcgagcccatcaacccggaggcctggaactggtacaatgatgtggtcggcaagagcaaatgcccgatcgtcgatacctggtggcagactgagaccggcggacacctgatgaccccgctgcctggcgcccacgccaccaaaccgggtgctgcgatgaagcccttctttggcgtggagcctgtcgtcctcgatccgcagtcgggcgctgaaatcgacggcaacggcgttgagggcgtgctctgtatcaaggacagctggccgggccagatgcgtacagtctggggcgatcacgaacgtttcgagaagacctacttctctgattacaaaggctattatttcacgggtgatgggtgccgccgcgatgccgacggcgactattggatcaccgggcgcgtggacgatgtgatcaacgtctctggtcaccgcatgggcaccgccgaggtggaaagcgcgcttgtcgcacatgccgccgtggccgaagccgctgttgtgggctacccgcatgagatcaagggccagggcatctactgctatgtcaccctgatgaatgatcgcgagccttctgacgagctcctgaaggagctgcgtcagtgggtgcgcaccgagattggccccattgcatcgcctgatgtaatccaatgggcgcctggcctgccgaagacacgttcgggcaagatcatgcgccgcatcctgcgtaaaattgcggagaatgattttggcagcctcggcgacacctcgaccctcgcggatccttcggtcgtcgatgatctgatctccaaccgtgccaacaagggttaa

SEQ ID NO: 126674 - protein, 652 aa, Silicibacter sp. TM1040
MTTPESAVYPPSEDIVKNAHVNAAKYDEMYAQSLENPEKFWAEQAERIDWIKPFTKVKNVSYDFGNVDIKWFEDGQLNVAANCIDRHLETRGDQTAIIWEPDDPSDEAKHISYKELHLRTCRMANILESMGVGKGDRVVIYLPMIPEAAYAMLACARIGAIHSIVFAGFSPDALAARINGCDAKVVITADEAPRGGRKTPLKSNADAALLHCKESVKCLVVRRTGGQTTWIDGRDHDYNEMALEANDYCKPAAMDAEDPLFILYTSGSTGQPKGVVHTTGGYLTYAALTHEVTFDYHDGDIYWCTADVGWVTGHSYIVYGPLANGATTLMFEGVPTYPDAGRFWAVCEKHKVNQFYTAPTAIRALMGQGTEFVEKYDLSDLKLLGTVGEPINPEAWNWYNDVVGKSKCPIVDTWWQTETGGHLMTPLPGAHATKPGAAMKPFFGVEPVVLDPQSGAEIDGNGVEGVLCIKDSWPGQMRTVWGDHERFEKTYFSDYKGYYFTGDGCRRDADGDYWITGRVDDVINVSGHRMGTAEVESALVAHAAVAEAAVVGYPHEIKGQGIYCYVTLMNDREPSDELLKELRQWVRTEIGPIASPDVIQWAPGLPKTRSGKIMRRILRKIAENDFGSLGDTSTLADPSVVDDLISNRANKG

SEQ ID NO: 126675 - DNA, 1668 bp, Myxococcus xanthus DK 1622
  CDS (1)..(1668): transl_table=11
ttggtttcttccgcccaggagtcggccaccatgcccctgtcaccccctcggaacatgaaggactacgaggccacccgccgggactttcgctgggagcggcccgagcacttcaacttcgcggccgacgtcatcgaccggcacgccgccgagcgcccggaggcgctggccctgctgtggtccgacgaagccgggcaggcgcggcgcttcacgtgggaggacttgcggcggcgctcgctgcacgcggcccgcttcctgacggagcaggggcttcgccggggggaccgggtcttcattatgatgccgcgcgtgccggagtggtggttcctggtgctgggctgcattcgcgtgggcatcgtcttcatgccgggcacgcccatgctcacgccgaaggacatccgttaccggttggaggtggcggaggcccaggcggtgattgcggacgtgagctgcctggagcgcttcgacggcctggtggggacggccggcaaggtccgcacctgggtgtcggtgggcgagggcgcgccgtctccgtgggggcgctacgtgtccggcgtcgcggaggcgaacgcgggcgcggccttcgagcccacgcgcgcggatgcgccgctgctcatctacttcacgtccggcaccacgggcatgccgaagatggtgctgcacacgcaggccagctacgggcaggggcacgtgattaccggccgctactggctggacctgacgccggaggaccggcacctgacgctcagcgacaccggctgggccaagtgcgcgtggggcaagctcttcggcccgtggagtcagggcgcgtgcaacgtcgtctatgacttccgtggccgcttcgagcccgcgaagctgctgaaggtgctggagacgcagaaggtcaccaccttctgcgcgccgcccaccgcgtggcgggcgctggtgctccaggacttgaaggccttcgacctgtcctcgctgcggcacacggtgagcgcgggcgagccgctcaatccggaagtcatcgacacgtggaaggatgccaccgggctgcacatccatgagggctacgggcagacggagacggtgatgattgtgggcatgttcccctccatggcgccgcgcgtgggttccatgggcaagccgtccccgggcttcacggtgagcgtcatcgacgaccagggccaggaggtggcggacgggcaagagggggacatcgcggtgcgcgtggcgcccgagcggcccgtggggttgttccagggctatctcggggacgacgcggccaacgcggcgtgccggcgtggtgactggtacgtgacgggagaccgggccgtgcgcgacgcggacggctacttctggttcgtgggacgcgcggatgacgtcatcaagacgtcgggctaccgcgtggggcccttcgaggtggagtccgcgctgctggagcacgacgcagtggcggagtcggccgtcatcggtgtgccggacgagaagattggccagcgggtgaaggccttcgtggtgctggcgccggggcatacggcatccccggtgctcgcgcaggcgttgcaggagcacgtgaagcggacgacggcgccctacaagtacccgcgcgaaatcgagttcgtcaccgagctgcccaagacggtgagcgggaagattcgccgcgcggagctgcgcaccacgcggacgtag

SEQ ID NO: 126676 - protein, 555 aa, Myxococcus xanthus DK 1622
MVSSAQESATMPLSPPRNMKDYEATRRDFRWERPEHFNFAADVIDRHAAERPEALALLWSDEAGQARRFTWEDLRRRSLHAARFLTEQGLRRGDRVFIMMPRVPEWWFLVLGCIRVGIVFMPGTPMLTPKDIRYRLEVAEAQAVIADVSCLERFDGLVGTAGKVRTWVSVGEGAPSPWGRYVSGVAEANAGAAFEPTRADAPLLIYFTSGTTGMPKMVLHTQASYGQGHVITGRYWLDLTPEDRHLTLSDTGWAKCAWGKLFGPWSQGACNVVYDFRGRFEPAKLLKVLETQKVTTFCAPPTAWRALVLQDLKAFDLSSLRHTVSAGEPLNPEVIDTWKDATGLHIHEGYGQTETVMIVGMFPSMAPRVGSMGKPSPGFTVSVIDDQGQEVADGQEGDIAVRVAPERPVGLFQGYLGDDAANAACRRGDWYVTGDRAVRDADGYFWFVGRADDVIKTSGYRVGPFEVESALLEHDAVAESAVIGVPDEKIGQRVKAFVVLAPGHTASPVLAQALQEHVKRTTAPYKYPREIEFVTELPKTVSGKIRRAELRTTRT

SEQ ID NO: 126677 - DNA, 1977 bp, Myxococcus xanthus DK 1622; identical to SEQ ID NO: 122056
  CDS (1)..(1977): transl_table=11

SEQ ID NO: 126678 - protein, 658 aa, Myxococcus xanthus DK 1622; identical to SEQ ID NO: 122057

SEQ ID NO: 126679 - DNA, 1965 bp, Myxococcus xanthus DK 1622; identical to SEQ ID NO: 122058
  CDS (1)..(1965): transl_table=11

SEQ ID NO: 126680 - protein, 654 aa, Myxococcus xanthus DK 1622; identical to SEQ ID NO: 122059

SEQ ID NO: 126681 - DNA, 1935 bp, Rubrobacter xylanophilus DSM 9941
  CDS (1)..(1935): transl_table=11
atgaccgaagagaaggcgtccgtccgcacctacgatccgccggaagagttcgcctctcgggccaacgtcagggaccccggcgtctacgaggaggccgcccgggactacgagggcttctgggccgagcgcgcccgcaagctgcactggttcagggagtgggacgaggtgctgcggtgggacccgcccgaggcccagtggttcgtcgggggcaagataaacgcctcctacaactgtttggactaccaggtccagcagggccgcggggacaagcgggccatcatttgggagggcgatgagccgggagagaaccgcaccctcacctactccgagctcaaggcggaggtggagaagttcgccaacgtcctcaagggcctcggcgtccgcaagggggatgccgtctccatctatttgcccatgatcccggagctgcccatcgccatgctcgcctgcgcccgcatcggggcgccccactcggtggtcttcggggccttcagcgcccagagcctcagggacaggatcaacgactgcgaggccaaggtgctggtgaccgcggactccgggccgcgcggcggcaagcggacgccgctgaaggccaacgccgacgaggccctcgaggacaccccctccatcgagaaggtggtggtggtccgacgcaccggcgacgaggtgaacatggtcgagggccgcgacctttggtggcacgagctcatgcgcgaggccgagcccgagtgcccggccgaggagatggactccgaggacatcctctacatcctctactcctcgggttcgaccggtaagcccaagggcatcgtgcacaccaccggcggctacctgacccacgtcaacaccaccaccgactgggtcttcgacctcaaggaggacgacgtctactggtgcacggcggacatcgggtgggtcaccgggcactcctacatcgtctacggcccgctctccaacggcgccacggccctgatgttcgagggcacgccctcctacccggccaacgaccgctggtgggacatcatcgagcggcacggggtcaccatcctgtacacggccccgacggcgatccgggccttcatgaagcagggccccgggcccatcgagaagcacgacctctccagcctgcggctgctcgggagcgtgggcgagcccataaacccgcgggcctgggagtggtaccacgagcacgtcggcggcgggcgttgcccggtggtcgacacctggtggcagacggagacggggggcatcatgatctccccgctgcccgggatcacgcgcaccaagcccggcagcgccaccttcccgctgcccggcatcttcgcgggcatctacgacgaggagggcaacgagatagagggccccggcgtgggcaacctggtcatcaagcggccctggccggggatgctgcgcaccctctacaaggaccccgagcgcttccgggagacctactggcagaagtacggcgacgtgtacttctccggcgacggggcccggcgcgacgaggacggctacttctgggtgacgggccgggtcgacgacgtgataaacgtcagcgggcaccggatctccacggccgaggtggagagcgcgctggtcgcccacccggcggtcgccgaggcggcggtgatcggccgctacgacgaggacacggggcaggccatcgtggcctacgtgatcctcgagggcggccgcgagggcaacgacgagctggcccaggagctccggcagcaggtgaggaaggtcatcggggcccacgcgaggccgcaggagatcatcttcacccccgacctgccgaagacgcgcagcggcaagatcatgcgccgcatcctgcgcagcctctcggagggccgggacgacctgggcgacacgaccacgctggccgacccgggcgtggtggagagcctgaaggagcaggtcgcggcgagccggtag

SEQ ID NO: 126682 - protein, 644 aa, Rubrobacter xylanophilus DSM 9941
MTEEKASVRTYDPPEEFASRANVRDPGVYEEAARDYEGFWAERARKLHWFREWDEVLRWDPPEAQWFVGGKINASYNCLDYQVQQGRGDKRAIIWEGDEPGENRTLTYSELKAEVEKFANVLKGLGVRKGDAVSIYLPMIPELPIAMLACARIGAPHSVVFGAFSAQSLRDRINDCEAKVLVTADSGPRGGKRTPLKANADEALEDTPSIEKVVVVRRTGDEVNMVEGRDLWWHELMREAEPECPAEEMDSEDILYILYSSGSTGKPKGIVHTTGGYLTHVNTTTDWVFDLKEDDVYWCTADIGWVTGHSYIVYGPLSNGATALMFEGTPSYPANDRWWDIIERHGVTILYTAPTAIRAFMKQGPGPIEKHDLSSLRLLGSVGEPINPRAWEWYHEHVGGGRCPVVDTWWQTETGGIMISPLPGITRTKPGSATFPLPGIFAGIYDEEGNEIEGPGVGNLVIKRPWPGMLRTLYKDPERFRETYWQKYGDVYFSGDGARRDEDGYFWVTGRVDDVINVSGHRISTAEVESALVAHPAVAEAAVIGRYDEDTGQAIVAYVILEGGREGNDELAQELRQQVRKVIGAHARPQEIIFTPDLPKTRSGKIMRRILRSLSEGRDDLGDTTTLADPGVVESLKEQVAASR

SEQ ID NO: 126683 - DNA, 1965 bp, Mesorhizobium sp. BNC1; identical to SEQ ID NO: 122060
  CDS (1)..(1965): transl_table=11

SEQ ID NO: 126684 - protein, 654 aa, Mesorhizobium sp. BNC1; identical to SEQ ID NO: 122061

SEQ ID NO: 126685 - DNA, 1896 bp, Cytophaga hutchinsonii ATCC 33406
  CDS (1)..(1896): transl_table=11
atgatcaaagcaattcaatcttttgatgaatatacccgcgcatatgctgccagtattgcagatcccgaaaaatattgggacgatcaggctgcgcaatttatatggaagaagaaatgggataaaaccctggaatggaatttttctgatccggatgtaaagtggtttatagggggtaaattaaacatcactgaaaatattttagaccgtcatgcaacaaaaacacctgataaagtagcgatacactgggaatccaataaccccgatgaagcaggcaaagatataacctataagcaattgtatgaacaggtatgtgtgtttgcaggtgtattaaaacagaaaggcattaaaaaaggagatcgtgtatgtatctacatgccgatgattccggaattggcaattgctgtactggcctgcgcgcgtataggtgccatccattcggtgatttttgcaggtttttcagccagtgcggttgcagaccgtgtaaacgatgcgaaagccgtagctgtgcttacatccgatggctctttccgcggaacaaagagcattgctgtaaaagcgcttattgatgaagcgctgcagcagtgtgaaactgtaaagacagtgctggttgctaaacgtaccggcgatgcagtggctatgaaagacggtcgtgattactggtgggatgaagcgattgcaggggcaacaccagtatatgaagcagaagaaatggattcggaagatcccttgtttattttatatacttccggttcaaccggaaaaccaaaaggtgttgtacatacgattggcgggtatatggtgtatacagcattctcttttgcgaacgtgtttcagtataacgaaggcgatgtttatttctgcacggctgatatcggctggattaccggacatagttatttagtgtatggtcccttgctgcagggagctacacaggtaatgtttgaaggcatacctacgtatccggatgccggccgtttctggagcatcattgacaaatatgccgttacacatttctatacggcacctacagcgatccgttcactgatgtctttcggcgatacaatggtagaaaaatattcgttgaaatcgttgaaagtacttggctctgtaggcgaacccattaatgaagaagcctggcactggtttaatgaacacattggaaagaaaaactgtccgattgtggatacctggtggcagacagaaacaggtggaatcctgatttctccattggcgagcattacaccattggtgccctcgtatgcaaccttgccgctgccgggtgtgcagcctgtactcgtagatgcaaatggtacggtactggaagggaataatgtagaaggaaatttatgtatgaaatttccatggccatctatcatccgcactacatatggcgaccacgaacgttgtaaacaaacctatttttcaacctatccgaatctgtattttacaggcgacggctgtaagcgtgatgagaagggatattaccggatcatgggaagagtagatgatgtaatcaatgtatcgggtcaccgttttggaacagcagaaatagaaagtgccatcaatgaacaggccgatgtaattgagtcggcagtagtcggctatccgcatgaagttaaagggcaaggtatttatgcctatgtgatctgtgataaaacagataaaaatgaagaccagcttcgcaaggaaattctggatagtattgttaaactgatcgggcccatcgcgaaacccgataaaatccagattgtaacaggtttaccgaaaacacgttcaggaaaaattatgcgccgtattttacgtaaagttgcagaaggagacctgaataatctgggtgacacctctacgttgcttgatccggaaattgttgaagagattaaaaagggggccttatag

SEQ ID NO: 126686 - protein, 631 aa, Cytophaga hutchinsonii ATCC 33406
MIKAIQSFDEYTRAYAASIADPEKYWDDQAAQFIWKKKWDKTLEWNFSDPDVKWFIGGKLNITENILDRHATKTPDKVAIHWESNNPDEAGKDITYKQLYEQVCVFAGVLKQKGIKKGDRVCIYMPMIPELAIAVLACARIGAIHSVIFAGFSASAVADRVNDAKAVAVLTSDGSFRGTKSIAVKALIDEALQQCETVKTVLVAKRTGDAVAMKDGRDYWWDEAIAGATPVYEAEEMDSEDPLFILYTSGSTGKPKGVVHTIGGYMVYTAFSFANVFQYNEGDVYFCTADIGWITGHSYLVYGPLLQGATQVMFEGIPTYPDAGRFWSIIDKYAVTHFYTAPTAIRSLMSFGDTMVEKYSLKSLKVLGSVGEPINEEAWHWFNEHIGKKNCPIVDTWWQTETGGILISPLASITPLVPSYATLPLPGVQPVLVDANGTVLEGNNVEGNLCMKFPWPSIIRTTYGDHERCKQTYFSTYPNLYFTGDGCKRDEKGYYRIMGRVDDVINVSGHRFGTAEIESAINEQADVIESAVVGYPHEVKGQGIYAYVICDKTDKNEDQLRKEILDSIVKLIGPIAKPDKIQIVTGLPKTRSGKIMRRILRKVAEGDLNNLGDTSTLLDPEIVEEIKKGAL

SEQ ID NO: 126687 - DNA, 1965 bp, Rhodococcus sp. RHA1
  CDS (1)..(1965): transl_table=11
atgaccagtgcagcacaggcgagcggagcgacggagaagtcggaacattctgattccgtcccgcaggtgtatcccccgagccccgagttcaccgccacggcgaacgccggccccgacctccaggccgccgccgacgaagaccgcctcgcattctgggcgaagcaggccgagcgcctgcactggcacgcccccttctccgaagtcctcgactggtccgacgcccccgtcgcgaagtggttcgtgaacggacggctcaacgtcgcctacaactgcgtcgaccgccacgtcctcgcgggcaacggcgaccgcgtcgccatccacttcgagggcgaaccgggcgacacccgcgacctgacctacaacgacctgctcgccgaagtcagcaaggccgccaacaccttcaccgacctcggactcgtcgccggcgaccgcgtcgcgatctacatgccgatgatccccgaggccatcgtcaccatgctcgcctgcgcccgcctcggcctgacccactcggtggtgttcgccggcttctccgccagcgccctgcgctcacgcatcgacgacgccgaagccaagctcgtcgtcaccgtcgacggacagtggcgccgcggccaggccgcacccctcaagcccgccgtcgacgaggccgtcgacggcgccgagtccgtcaagcacgtgctcgtcgtcaagcgcaccggcatcgacgtcgaggtcaccgagggccgtgacctgtggtggcacgagaccgtcgagaaggcggagggcacccatcaggcgcagccgttcgactccgagcacccgctgttcatcctgtacacctccggcaccaccggaaagcccaagggcatcatccacacctccggcggctacctcacccaggcgtcgtacacccaccacaacgtcttcgaccacaaggccggccacgacgtgtactggtgcaccgccgacatcggctgggtcaccggccacagctacatcgtctacgggccactctcgaacggtgtcacccaggtggtctacgagggcaccccgaactcccccgacgagcaccgccacttccagatcatcgagaagtacggcgtcagcatctactacaccgcacccaccctggtgcgcaccttcatgaagtggggccgcgacattcccgacgcccacgacctgacctcgatccggctcctcggctcggtcggcgaaccgatcaaccccgaggcctggaagtggttccgcgaggtgatcggcggaaacaaagccccgatcgtcgacacctggtggcagaccgagaccggcgcgatcatgatctccccgctccccgggatcaccgccaccaaacccggatcggcgatggcacccctgcccggtatctccgcgaagatcgtcgacgacgacgccaacgaactcggcgccggcggctccggctacctcgtgctcgacaagccgtggccggcgatgctccgcggcatctggggcgacatggaccgctaccgcgaaacctactggtcccgctaccccgagcagggctggtacttcgccggcgacggcgccaagtacgacgaggacggcgccctgtgggtgctcggccgcgtcgacgacgtcatgaacgtctccggacaccgcatctccacctccgaggtcgaatccgccctcgtcggacaccacggtgtcgccgaggccgccgtcgtcggcgccgcggacgagaccaccggccagggcatcgtcgcgttcgtcatcctccgcgagggcgtggagaacaccggcgacaccctcatcgccgaactcaaggccgaagtgtcccgggagatcagcccgatcgccaagccccgccagatcacgatcgtccccgaactccccaagacgcgctccggcaagatcatgcgtcgcctgctcaaggacatcgccgaaggccgcgacctcggcgacacctccacgctcgtcgaccccaaggtcttcgacgcgatccgcggcaagtag

SEQ ID NO: 126688 - protein, 654 aa, Rhodococcus sp. RHA1
MTSAAQASGATEKSEHSDSVPQVYPPSPEFTATANAGPDLQAAADEDRLAFWAKQAERLHWHAPFSEVLDWSDAPVAKWFVNGRLNVAYNCVDRHVLAGNGDRVAIHFEGEPGDTRDLTYNDLLAEVSKAANTFTDLGLVAGDRVAIYMPMIPEAIVTMLACARLGLTHSVVFAGFSASALRSRIDDAEAKLVVTVDGQWRRGQAAPLKPAVDEAVDGAESVKHVLVVKRTGIDVEVTEGRDLWWHETVEKAEGTHQAQPFDSEHPLFILYTSGTTGKPKGIIHTSGGYLTQASYTHHNVFDHKAGHDVYWCTADIGWVTGHSYIVYGPLSNGVTQVVYEGTPNSPDEHRHFQIIEKYGVSIYYTAPTLVRTFMKWGRDIPDAHDLTSIRLLGSVGEPINPEAWKWFREVIGGNKAPIVDTWWQTETGAIMISPLPGITATKPGSAMAPLPGISAKIVDDDANELGAGGSGYLVLDKPWPAMLRGIWGDMDRYRETYWSRYPEQGWYFAGDGAKYDEDGALWVLGRVDDVMNVSGHRISTSEVESALVGHHGVAEAAVVGAADETTGQGIVAFVILREGVENTGDTLIAELKAEVSREISPIAKPRQITIVPELPKTRSGKIMRRLLKDIAEGRDLGDTSTLVDPKVFDAIRGK

SEQ ID NO: 126689 - DNA, 1968 bp, Trichodesmium erythraeum IMS101
  CDS (1)..(1968): transl_table=11
atgtcagaattaactattgaatcaatcttacaagaaaaacgtcttttccaaccaccagaaaaatttgtccaaacggcccaaattaaaggtatagagcaatacaaggaactctacgaaaaagctaaaagtaacccagaagaattttgggcagaattagctgaaacagaattagactggttccaaaaatgggacaaagttcttgagtggcaaccaccctttgcaaaatggtttattaatggcaaaattaatatctcttataactgtctagatcgtcaccttactacctggcgaaggaacaaagcagccctaatatgggaaggagaaccaggagactctcgcactataacctatgctcaactgcatcgagaagtatgtcaaatggcaaatgtctttaagcaattaggagtaaaaaaaggcgatcgcgtcggtatctacatgcccatgattcctgaagcagcgatcgccatgttagcttgtgcaagaattggcgccccccatactgtcgtctttggtggattcagtgctgatgccctcaaaaaccgccttgttgatgctgaagcaaaattagtcgtcactgccgatggaggttggcgcaaagatgccattgttcctctcaaagaacaagtcgacaaagcactcatggcaggtgcccctagtgtagaaaatgttctagttgtcaaacgtactgcccaaaaaattcagatggaaccagggcgcgaccattggtggcacgaccttcaaaaaagtgcttccggggaatgcccagcggaaccaatggatagtgaagatatgctatttatcctttacacaagtggcacaacaggtacacccaaaggagtagtacacaccacaggtggttataacctttatactcacgttactaataaatgggcatttgacttacaagacacagatgtatattggtgtactgctgatgtaggatggattacaggccatagttatattgtctacggtcccctctctaacggtgccactacccttatgtatgaaggggcaccacgggcatctaatcccggttgtctctgggatgtagtcgaaaaatatggcgtcaccatcttctacaccgcccccactgcaattagagcattaatgaaaatgggagaacaacaccctaactctagaaatctaacttctctacgtttattgggaacagtaggagaacccattaacccagaagcttggatatggtatcatcgtgttattggtgacagtaaatgcccaatagttgatacttggtggcaaactgaaactggtggatttatgattacccccctacctggtgctactccgactaaacctggttcggcaactttcccttttcctggtataattgctgatattgtgaatgaggagggagaatctgttgatggtaataatggtggttatttagtcgttaaacatccttggccgggaatgatgcggactgtctatggtgatcctgatcgttttcgtcgcacttattgggaatacctacgcccgaaaaatggagaatatatttattttgctggtgatggtgctcataaagacgaggatggttatttttgggtgatgggtcgtgttgatgatgtgattaatgtagcaggtcatcgcctgggtactatggaagttgagtcggcgttggtgtctcaccctgctgtggcagaggctgcagttgttggtaaacctgatgaggttaagggtgaagatattgtagcttttgtgagtttggaagggggacgggaacctgatgaaaatttggagaaggagttgaagcagcacgttgtcaaggaaataggagcgatcgctcgtcctggagagattcggtttactgatgatttaccaaagactcgctctggtaaaattatgcgacggttgttacgttctctggcagcaggtcaggaaattacaggggatacttcgactttgcaagaccgtagtgtattagataagttacgcgctggttcataa

SEQ ID NO: 126690 - protein, 655 aa, Trichodesmium erythraeum IMS101
MSELTIESILQEKRLFQPPEKFVQTAQIKGIEQYKELYEKAKSNPEEFWAELAETELDWFQKWDKVLEWQPPFAKWFINGKINISYNCLDRHLTTWRRNKAALIWEGEPGDSRTITYAQLHREVCQMANVFKQLGVKKGDRVGIYMPMIPEAAIAMLACARIGAPHTVVFGGFSADALKNRLVDAEAKLVVTADGGWRKDAIVPLKEQVDKALMAGAPSVENVLVVKRTAQKIQMEPGRDHWWHDLQKSASGECPAEPMDSEDMLFILYTSGTTGTPKGVVHTTGGYNLYTHVTNKWAFDLQDTDVYWCTADVGWITGHSYIVYGPLSNGATTLMYEGAPRASNPGCLWDVVEKYGVTIFYTAPTAIRALMKMGEQHPNSRNLTSLRLLGTVGEPINPEAWIWYHRVIGDSKCPIVDTWWQTETGGFMITPLPGATPTKPGSATFPFPGIIADIVNEEGESVDGNNGGYLVVKHPWPGMMRTVYGDPDRFRRTYWEYLRPKNGEYIYFAGDGAHKDEDGYFWVMGRVDDVINVAGHRLGTMEVESALVSHPAVAEAAVVGKPDEVKGEDIVAFVSLEGGREPDENLEKELKQHVVKEIGAIARPGEIRFTDDLPKTRSGKIMRRLLRSLAAGQEITGDTSTLQDRSVLDKLRAGS

SEQ ID NO: 126691 - DNA, 1953 bp, Shewanella sp. MR-4
  CDS (1)..(1953): transl_table=11
atgagctcgcagtctctctacaaagtctccggcaatatcgctgccaatgcacttgtaaataacgatcaatataaaaaaatgtaccaagagtcgattgtcaatccagagggtttctggagagagcacggcaaacgtatcgattggataaagccatacactaaaatcaaaaaaacctcttttgacgatcataacttatcgattaactggttctatgacggcaccctaaacgcctcggctaactgcttagatcgccatctagcagaacacagtgaccgcgtcgccatcatctgggaaggtgataacgccagcgaacaacgtaaaatcacctacggtgagctacacactcaagtgtgtaagtttgccaacgccctacgcagccaaggcgtacgtcgtggcgatattgtgaccatttatatgccaatggtaccagaagcggctgtggcaatgctggcctgtgcccgcattggtgccgtgcactcagttgtctttggtggcttctcacccgattctatcgcttcacgggtcatcgatggtaaatctaaggtcgtgatcaccgccgatgaaggtatgcgtggcggccgcgctattccgctcaaacgcaacatagacgatgcgctaaaacatcccgatgtgactagcgttgagaaggtaatcgtacttaaacgtactggcggcaaggttgattggatagaaggccgcgatgtgtggtggcactctctggttgaaaccgcatccgagcactgcgccgttgaagaaatgggcgccgaagatccgctcttcttactctatacctcaggttcaactggtaatcccaagggcgtattgcacactaccggcggttatatggtgtatgcctcgatgacccacgagtatgtgttcgattacaaacccggtgagatttactggtgtaccgccgacgtgggttggatcactggtcactcctacatggtatatggcccgcttgccaacggtgcgaccgtgctcatccacgaaggtatccccaatcacccaagccctgcgcgtttaggcgagatgattgaccgccataaagtcaatattctctatactgcaccaacgcttattcgtgcactaatggccgaaggtaaacaacattttgataagtacgatggcagctcactgcgcatcatgggctcggtaggcgaacccatcaacccagaagcttggcgctggtaccacgaggtcatcggtcatgagcattgcccaattgtcgatacttggtggcaaaccgaaactggcggtattttgatcaccccactgccaggcgcaaccgataccaaacccggctcggcgactcgccctttctttggagtacaaccggcgctcgtagacaacatgggtaacattttagaaggcgcaaccgaaggtaacctagtactgctcgactcttggccaggccaaatgcgtaccgtgtatggcgatcatgaacgcttcgtactgacctacttcaaaaccttccgtggcatgtactttaccggtgacggcgcacgacgcgatgaagatggttactactggatcactggccgtgtggacgatgtgattaacgtctctggtcacagattaggtaccgcagaggtagaaagtgcactggtatcacatgaactggtcgctgaggccgcagttgtgggctatccccatgatatcaaaggccaaggtatttatgcctacgtgacgctaacccgcggcacagaagagagtgaagaacttcgccaagagctgcgccaatgggttcgtaaggaaattggtgccctagccacaccggatcttatccagtgggcaacggggttacctaagacccgttctggcaaaatcatgcgccgtttcctgcgtaagattgccgctaacgaagtgaccaacttaggtgacgcatcaacactggccgatccagccgtgattgagaccttgattgaaactcgcttgaatcgtaacgagtaa

SEQ ID NO: 126692 - protein, 650 aa, Shewanella sp. MR-4
MSSQSLYKVSGNIAANALVNNDQYKKMYQESIVNPEGFWREHGKRIDWIKPYTKIKKTSFDDHNLSINWFYDGTLNASANCLDRHLAEHSDRVAIIWEGDNASEQRKITYGELHTQVCKFANALRSQGVRRGDIVTIYMPMVPEAAVAMLACARIGAVHSVVFGGFSPDSIASRVIDGKSKVVITADEGMRGGRAIPLKRNIDDALKHPDVTSVEKVIVLKRTGGKVDWIEGRDVWWHSLVETASEHCAVEEMGAEDPLFLLYTSGSTGNPKGVLHTTGGYMVYASMTHEYVFDYKPGEIYWCTADVGWITGHSYMVYGPLANGATVLIHEGIPNHPSPARLGEMIDRHKVNILYTAPTLIRALMAEGKQHFDKYDGSSLRIMGSVGEPINPEAWRWYHEVIGHEHCPIVDTWWQTETGGILITPLPGATDTKPGSATRPFFGVQPALVDNMGNILEGATEGNLVLLDSWPGQMRTVYGDHERFVLTYFKTFRGMYFTGDGARRDEDGYYWITGRVDDVINVSGHRLGTAEVESALVSHELVAEAAVVGYPHDIKGQGIYAYVTLTRGTEESEELRQELRQWVRKEIGALATPDLIQWATGLPKTRSGKIMRRFLRKIAANEVTNLGDASTLADPAVIETLIETRLNRNE

SEQ ID NO: 126693 - DNA, 1923 bp, Shewanella sp. MR-7
  CDS (1)..(1923): transl_table=11
atgatgggaggccttatgacagatgttggacaacaattacatcagacatctattacgaataaacaggcattttggcaacaagcggccaaggccttagactgggttacgccgagcaaacaaatattagatgaaagcgaggcaccgttttatcactggtttagcgatggcgagttaaacacttgctacaacgcggttgataggcatgtgttggcggggcgcggtgagcagattgctcttcattatgttagccctgtgactgaaaccgaatacagcattacttaccgtgagttactggctcaggtggcaaggcttgcgggctatttgcaaagcgttggcgtgactaagggagaccgcgtggtcatctacatgcccatggtgcccgagaccgcctatgccatgcttgcctgcgcgcgaattggtgccatccattctgtggtcttcggtggctttgcggccaatgagctggcgacccggatcaatgatgccaaaccgaagctcgtaatgtctgcctcctgcgggattgagccttcaggcgttgtgccctataaacccttactagataaagcattaaatgaagcaacgcacaaggtcgagcattgcttgattttaaatcgcccccaatatgaggcgcagatgcaagcggggcgcgataaggactggcaaacagccttaagcgctagcaacaatgccgattgtgtgacggtgaaagccaccgatcccctgtatgtgctttatacctcggggaccacgggtcaacccaaaggcgtggtgcgggataatggcggccatgcggtggcattggcttggtccatggccaatatttacgatattgcccaaggggatgtattttgggcggcatcggatgtgggctgggtggtgggacactcctatattgtctatggtccgctacttgtcggggcgacgaccttgttatatgaaggtaaacccgtaggtacgccagacccaggtgccttttggcgcacaattgcaaagtatcgagtcaaaagctttttcactgcgcccacggcgatccgcgccattaagcgcgaagatcccgacggcgaatttatccaaggtgtcgatttaagctgcttgaagaatgtctttttggctggggagcgctgcgatcccgataccttacattgggccgaagccaaactgaataaaccggttatcgaccattggtggcaaactgaaacgggctggccagtggcggcaaatttgatgggtgtggcacctattgccgttaaagcgggatcgccgggccgacctgtcccaggatatgaggttgatctagtcgatgagatgggcgccaaagtggcggcgaatgtatctggcaatgtggtcatcaaattaccactaccaccgggcacgctcactacgctctggcaaaataataaacgctatcaagacagttacttatctatgtatccaggctattaccttacaggggatgcgggttatatggatgaagatggctatctgtatatcatgagccgtatcgatgacattattaacgtagcgggccatcgactctccacagggcggtttgaagaggttttgtgtcagcatcccgatgtggccgaagcggccgtgattggtgtcgacgataaactcaaaggccaagtgcccttgggcttagtggtactaaaaaagggagtgaccattacggacgaggagctgcataagcagttaattgccctcgttcgccaagaaattggtcccgtcgcgtcctttaggttggtgagcgcgattcaaaagctgccgaaaactcgctcgggtaaaatcctgcgcggcactatgcgtaaaattgccgataatcagcaatatacggcgccagcgaccattgaagacccgcagaccctcgatttagtccgcacgaccttaacccgcatgggctatgccgatgctctcgtggggtaa

SEQ ID NO: 126694 - protein, 640 aa, Shewanella sp. MR-7
MMGGLMTDVGQQLHQTSITNKQAFWQQAAKALDWVTPSKQILDESEAPFYHWFSDGELNTCYNAVDRHVLAGRGEQIALHYVSPVTETEYSITYRELLAQVARLAGYLQSVGVTKGDRVVIYMPMVPETAYAMLACARIGAIHSVVFGGFAANELATRINDAKPKLVMSASCGIEPSGVVPYKPLLDKALNEATHKVEHCLILNRPQYEAQMQAGRDKDWQTALSASNNADCVTVKATDPLYVLYTSGTTGQPKGVVRDNGGHAVALAWSMANIYDIAQGDVFWAASDVGWVVGHSYIVYGPLLVGATTLLYEGKPVGTPDPGAFWRTIAKYRVKSFFTAPTAIRAIKREDPDGEFIQGVDLSCLKNVFLAGERCDPDTLHWAEAKLNKPVIDHWWQTETGWPVAANLMGVAPIAVKAGSPGRPVPGYEVDLVDEMGAKVAANVSGNVVIKLPLPPGTLTTLWQNNKRYQDSYLSMYPGYYLTGDAGYMDEDGYLYIMSRIDDIINVAGHRLSTGRFEEVLCQHPDVAEAAVIGVDDKLKGQVPLGLVVLKKGVTITDEELHKQLIALVRQEIGPVASFRLVSAIQKLPKTRSGKILRGTMRKIADNQQYTAPATIEDPQTLDLVRTTLTRMGYADALVG

SEQ ID NO: 126695 - DNA, 1953 bp, Shewanella sp. MR-7
  CDS (1)..(1953): transl_table=11
atgagctcgcagtctctctacaaagtctccggcaatatcgctgccaatgcacttgtaaataacgatcaatataaaaaaatgtaccaagagtcgattgtcaatccagagggtttctggagagagcacggcaaacgtatcgattggataaagccatacactaaaatcaaaaaaacctcttttgacgatcataacttatcgattaactggttctatgacggcaccctaaacgcctcggctaactgcttagatcgccatctagctgaacacagtgaccgcgtcgccatcatctgggaaggtgataacgccagcgagcaacgtaaaatcacctacggtgagctacacacccaagtgtgtaagtttgccaacgccctacgcagccaaggcgtacgccgtggggacattgtgaccatttatatgccaatggtgccagaagcggctgtggcaatgctggcctgtgcccgcataggtgccgtgcactcggttgtctttggtggcttctcacccgattctatcgcttcacgggtcatcgacggtaaatctaaagtggttatcaccgccgatgaaggtatgcgtggcggccgcgcgatcccactcaaacgcaacatcgacgatgcgctcaagcatcccgatgtcaccagcgtagagaaggtaatcgtacttaaacgtactggcggcaaggttgactgggttgaaggccgcgatgtgtggtggcactcactagttgaaaccgcatccgagcactgcgccattgaagaaatgggcgccgaagatccgctcttcttactttatacctcaggttcaaccggtaatcccaagggcgtattgcacaccaccggcggttatatggtgtatgcctctatgacccacgagtatgtgttcgattacaaacccggtgagatttactggtgtactgctgatgtgggttggatcactggtcactcctacatggtatatggcccgcttgccaacggtgcgaccgtgctcatccacgaaggtatccccaatcacccaagccctgcgcgtttaggcgagatgattgaccgccataaagtcaatattctctatactgcaccaacgcttattcgtgcactaatggccgaaggtaaacaacattttgataagtacgatggcagctcactgcgcatcatgggctcggtaggcgaacccatcaacccagaagcttggcgctggtaccacgaggtcatcggtcatgagcattgcccaattgtcgatacttggtggcaaaccgaaactggcggtattttgatcaccccactgccaggcgcaaccgataccaaacccggctcggcgactcgccctttctttggagtacaaccggcgctcgtagacaacatgggtaacattttagaaggcgcaaccgaaggtaacctagtactgctcgactcttggccaggccaaatgcgtaccgtgtatggcgatcatgaacgcttcgtactgacctacttcaaaaccttccgtggcatgtactttaccggtgacggcgcacgacgcgatgaagatggttactactggatcactggccgtgtggacgatgtgattaacgtctctggtcacagattaggtaccgcagaggtagaaagtgcactggtatcacatgaactggtcgctgaggccgcagttgtgggctatccccatgatatcaaaggccaaggtatttatgcctacgtgacgctaacccgcggcacagaagagagtgaagaacttcgccaagagctgcgccaatgggttcgtaaggaaattggtgccctagccacaccggatcttatccagtgggcaacggggttacctaagacccgttctggcaaaatcatgcgccgtttcctgcgtaagattgccgctaacgaagtgaccaacttaggtgacgcatcaacactggccgatccagccgtgattgagaccttgattgaaactcgcttgaatcgtaacgagtaa

SEQ ID NO: 126696 - protein, 650 aa, Shewanella sp. MR-7
MSSQSLYKVSGNIAANALVNNDQYKKMYQESIVNPEGFWREHGKRIDWIKPYTKIKKTSFDDHNLSINWFYDGTLNASANCLDRHLAEHSDRVAIIWEGDNASEQRKITYGELHTQVCKFANALRSQGVRRGDIVTIYMPMVPEAAVAMLACARIGAVHSVVFGGFSPDSIASRVIDGKSKVVITADEGMRGGRAIPLKRNIDDALKHPDVTSVEKVIVLKRTGGKVDWVEGRDVWWHSLVETASEHCAIEEMGAEDPLFLLYTSGSTGNPKGVLHTTGGYMVYASMTHEYVFDYKPGEIYWCTADVGWITGHSYMVYGPLANGATVLIHEGIPNHPSPARLGEMIDRHKVNILYTAPTLIRALMAEGKQHFDKYDGSSLRIMGSVGEPINPEAWRWYHEVIGHEHCPIVDTWWQTETGGILITPLPGATDTKPGSATRPFFGVQPALVDNMGNILEGATEGNLVLLDSWPGQMRTVYGDHERFVLTYFKTFRGMYFTGDGARRDEDGYYWITGRVDDVINVSGHRLGTAEVESALVSHELVAEAAVVGYPHDIKGQGIYAYVTLTRGTEESEELRQELRQWVRKEIGALATPDLIQWATGLPKTRSGKIMRRFLRKIAANEVTNLGDASTLADPAVIETLIETRLNRNE

SEQ ID NO: 126697 - DNA, 1938 bp, Alkalilimnicola ehrlichei MLHE-1; identical to SEQ ID NO: 122062
  CDS (1)..(1938): transl_table=11

SEQ ID NO: 126698 - protein, 645 aa, Alkalilimnicola ehrlichei MLHE-1; identical to SEQ ID NO: 122063

SEQ ID NO: 126699 - DNA, 1899 bp, Alkalilimnicola ehrlichei MLHE-1
  CDS (1)..(1899): transl_table=11
atgggctaccgcgagatccaccgtgaatccatcgaggcgccggagcgcttctggcgccgtgaggccgagaagctcgactggttcgagccaccgcaggagatcctcagtcaggacgagaagggcttctaccgctggtttaaggggggcaagctcaacatcagccacctggccctagactaccactgtgacaacggccgggccgatcagaccgccgtcatctacgactcaccggtcaccgacacccaacagaagttcacctacagcgagctgcgggaccgggtggcgcgggccgccggcgccctgcgcgagctgggcgtggagaagggcgaccgggtggtcatctacatgccgatgatccccgaggcactggaggcgatgctggcctgtgcccgcctgggtgccatccattcggtggtcttcggcggtttctcgcccaacgagctggcgatccgcatcgacgacgccaaaccgaaggccattatcacggccagctgcggtgtggagttcacacgggtcatcccctacctgcccctggtggacgaggccctcaagcgctcccagcatcccccggagaaaaccctggtagtgcaacgcgagcaggagaaggcggaactcaaaccgggccgcgaccatgactgggacgaactctgcagccgggtcagccctgccgacccggtgccggtggacgccacggatccgctctacgtgctctacacctccggcaccaccggcaagcccaagggcgtggtgcgggataccggcggctatgccaccgcgttgaacttcagcatggagaccatttacgacctgcatccgggcgaggtcttctggaccgcctccgacgtaggctgggtggtgggccactcctatatcgtctatgcgccgctgatccgcggctgcaccacgatcgtctacgagggcaaaccggtgcgcacccccgatgccggggccttctggcgggtgatctccgagcaccaggtcaagaccttcttcacggcgccgaccgctttccgtgcggtcaagaaggaggaccccgaggccaagctgatggccaattacgacatcagctgcctcaagaagctctttgtggccggtgagcggctcgatccccccacctacgaatggctgacccagatcctcgacgtgccggtgatcgaccactggtggcagaccgagaccggatggcccatcgtggccaaccccaccggggtggagctcttcccggtcaagtccgggtctgcctccctgcccgtgcccggctacaacgtcatggtgctggacgacagcggccagccgcttcctgccggcgaacagggcaacctggtggtcaaattgccgcttcctcccggctgcctacccaccctctggggcgacgatgagcgcttccgccgctcctacctggagcgtttccccggctattacgacacctcggatggcggctacatcgacgacgagggctacgtcttcatcatggggcgggtagacgatgtgatcaacgtggccggtcaccggctgtccaccggcgagatggaggaggtcatcggcagccactccgccatcgccgagtgtgccgtggtgggcatccacgacgagatgaagggcgaactgcccgtgggcttcgtggtgctcaaggacggtgtcgaggtcgacgaggccgaactggagaaggacctggtgcagctgatccgcaacgagatcggtgccatcgcctgcctcaagcaggtggctgtggtgcagaagttgcccaagacccgctcgggcaagatcctgcgcaagaccatccgccagttggccaaggaggatgacgtgccggtgccctccaccattgacgatcccaccagcctggaggagatcggtcgcgccatggaggtgcgcggtatcggccgccacacgggctaa

SEQ ID NO: 126700 - protein, 632 aa, Alkalilimnicola ehrlichei MLHE-1
MGYREIHRESIEAPERFWRREAEKLDWFEPPQEILSQDEKGFYRWFKGGKLNISHLALDYHCDNGRADQTAVIYDSPVTDTQQKFTYSELRDRVARAAGALRELGVEKGDRVVIYMPMIPEALEAMLACARLGAIHSVVFGGFSPNELAIRIDDAKPKAIITASCGVEFTRVIPYLPLVDEALKRSQHPPEKTLVVQREQEKAELKPGRDHDWDELCSRVSPADPVPVDATDPLYVLYTSGTTGKPKGVVRDTGGYATALNFSMETIYDLHPGEVFWTASDVGWVVGHSYIVYAPLIRGCTTIVYEGKPVRTPDAGAFWRVISEHQVKTFFTAPTAFRAVKKEDPEAKLMANYDISCLKKLFVAGERLDPPTYEWLTQILDVPVIDHWWQTETGWPIVANPTGVELFPVKSGSASLPVPGYNVMVLDDSGQPLPAGEQGNLVVKLPLPPGCLPTLWGDDERFRRSYLERFPGYYDTSDGGYIDDEGYVFIMGRVDDVINVAGHRLSTGEMEEVIGSHSAIAECAVVGIHDEMKGELPVGFVVLKDGVEVDEAELEKDLVQLIRNEIGAIACLKQVAVVQKLPKTRSGKILRKTIRQLAKEDDVPVPSTIDDPTSLEEIGRAMEVRGIGRHTG

SEQ ID NO: 126701 - DNA, 1947 bp, Hyphomonas neptunium ATCC 15444
  CDS (1)..(1947): transl_table=11
atgagcgacgattcaaaaacgtatccagttcctgaagcctttgcgagccaggcaaacctgaccccggagaaataccgggaaatgtatgccgcctccatcgccgaccccgccgctttctggggtgagcagggcaagcgtctggactggatgacgccctacaccgtcgtcaaggacgtctcctgggaaaccggagacctgcatgtccgctggtattctgacggcgtcctcaacgtcaccgccaactgcatcgaccgccatctggacacgcgcggcgacaaggccgctttcatctgggaaggcgacaagccgggcgagagccacaccgtcacctaccgccagcttcacgcctctgtcagcaaattcgccaacgtcctgaaggaactcggcgtcaagaagggcgaccgcgtcaccatctacatgccgatgatccttgaggccgcctacgccatgctcgcctgcgcgcgcatcggcgcggtccattcggtcgtcttcggcggcttctcgcctgaagcgctcgcggggcgcattgttgattgcggctccgaagttctcatcactgccgatgaaggcctgcgcgggggcaagagcgttccgctgaaagtgaacgcagacaaagccgcaggcattgccggcggtaccgttaaaaagatgcttgtcgtcaagcgcaccggcggcaacgtctccatgaccgaaggccgcgaccactggctgcacgaaatcggcgcgaccgtttcggcagattgcccgcccgagccgatgaacgcggaagacccgctgttcattctgtatacgtcgggttccacgggcaagcccaaaggcgtgctgcacacgaccggcggctatctcctctgggcctcgatgacgcatgaatacgtctttgatctcaaggaaaacgacatcttctggtgctcagccgatgtcggctgggtcaccggccacacctacatcatctatggcccgctcgcgaatggcgccaccagcgtgatgttcgaaggcgtgccgacctatccggacgccagccgcttctggcaggtgtgcgacaagcatcaggtcacgatcttctacaccgcgcccaccgccatccgcgccctgatgcgtgaaggcgaagggccggtgaacaagacctcccgcaaatccatccgcctcctcggcacggtgggcgagccgatcaacccggaagcctgggaatggtatttccatgtcgtcggcgaagcccgctgccccatcgtggatacctggtggcagaccgagaccggcggcacactgatcgtgcctctgccaaacaccacggatatgaaacccggcgcaggctctcaccccttcttcgggatcaagccgatcctcgtcgatgccgatggcagggagcttgaaggcgctgccgatggaaatcttctgatcaccgatagctggcccggccagatgcgcaccgtatacggagatcatcagcgcttcgtggaaacctatttcacggcctatcccggcaaatacttcaccggcgatggctgccgccgcgacgccgatggcttctactggatcacaggccgcgtagatgacgtgatcaacgtctcgggccaccggatgggcacggcggaagtggaaagcgccctcgtcagccatgatgccgtggccgaagccgccgtcgtcggctatccgcacgacatcaaggggcaggggatctatgcctatgtcaccctgcgggcaggctgcgaggccgatgatgccttgcgcaaaaacctcgtcgctcatgtgcgcaatgaaatcggcccgattgcctcgccggatctcatccagttcgcgccgggcctgccgaaaacccgttcgggcaagatcatgcgccgcattctgcgcaagatcgccgagaacgagttctccaatctgggcgatacctccaccctggctgaaccggaagtcgtgaaagacctgatcgacaaccgccagaaccgttga

SEQ ID NO: 126702 - protein, 648 aa, Hyphomonas neptunium ATCC 15444
MSDDSKTYPVPEAFASQANLTPEKYREMYAASIADPAAFWGEQGKRLDWMTPYTVVKDVSWETGDLHVRWYSDGVLNVTANCIDRHLDTRGDKAAFIWEGDKPGESHTVTYRQLHASVSKFANVLKELGVKKGDRVTIYMPMILEAAYAMLACARIGAVHSVVFGGFSPEALAGRIVDCGSEVLITADEGLRGGKSVPLKVNADKAAGIAGGTVKKMLVVKRTGGNVSMTEGRDHWLHEIGATVSADCPPEPMNAEDPLFILYTSGSTGKPKGVLHTTGGYLLWASMTHEYVFDLKENDIFWCSADVGWVTGHTYIIYGPLANGATSVMFEGVPTYPDASRFWQVCDKHQVTIFYTAPTAIRALMREGEGPVNKTSRKSIRLLGTVGEPINPEAWEWYFHVVGEARCPIVDTWWQTETGGTLIVPLPNTTDMKPGAGSHPFFGIKPILVDADGRELEGAADGNLLITDSWPGQMRTVYGDHQRFVETYFTAYPGKYFTGDGCRRDADGFYWITGRVDDVINVSGHRMGTAEVESALVSHDAVAEAAVVGYPHDIKGQGIYAYVTLRAGCEADDALRKNLVAHVRNEIGPIASPDLIQFAPGLPKTRSGKIMRRILRKIAENEFSNLGDTSTLAEPEVVKDLIDNRQNR

SEQ ID NO: 126703 - DNA, 1956 bp, Rhizobium leguminosarum bv. viciae 3841; identical to SEQ ID NO: 122064
  CDS (1)..(1956): transl_table=11

SEQ ID NO: 126704 - protein, 651 aa, Rhizobium leguminosarum bv. viciae 3841; identical to SEQ ID NO: 122065

SEQ ID NO: 126705 - DNA, 1965 bp, Rhizobium leguminosarum bv. viciae 3841
  CDS (1)..(1965): transl_table=11
atgaacggaaacaagcaggcggcgggcgtctattcagttccgaagcaatgggccgagcgcgcgttcatcgatgcgcagcgctacgaggcgatgtacgcggcctcgatcgccaacccggaagagttctggggcgaacacggcaagcgcatccactggatcaagccttacagcaccgtcaagaacacttcgttcgaatcgggcaaggtctcgatcaggtggttcgaggacggcaccaccaacgtctcctacaattgcatcgaccggcatctgaccgagcggggcgacaagttcgccatcatctcggtgggggacgacccgaaggatgacgcccgcattacctatcgcgaactgtacgcccatgtcatgaaatgggcgaatgttttgcggtcgcagggcatcgggaagggcgacaaggtcaccgtatacctgccgatgatccccgagctcacctatgcgatgctcgcctgcacgcgcatcggcgcgatccattcgacgctctccaccaattgcccgcccaaagtcctggcaagctgcatcgccgatgcggcgagcaccgtcgtggtcaccgccgactcgggcacgcgcggtgggcgcaagttggagctgaaggtcaaattggacgctgcgctggacaagcttcccgaggtggtgacaagcgtcatcgtggtcaagcacaccggcgcgccggtcagcatgctgaaaggtcgcgaccactattatgacgaactcgccgagaccgtccccgatcaatgcccgccagaggagatgaaggcggaagacccgctgttcgtcctctatacgtcaggttccaccggcaaaccgaagggggtggtgcataccacaggcggctatctcgtctataccgccatgacgcaccaatatgtcttcgactaccgcgacggcgacatccactggtgcactgccgaaattagttggatcaccggccacagctacactgtctacgggccgctcgccaacggtgcgacgaccctcatcttcgagggcaccccaacctacccgagcatgtcgcgatactgggacatcatcgacaagcacaaggtcagcctgttctacaccgcccccacggcgatccgctccttgatgggatcgggcgaggatgcggtgaaatcgaattcgctcgcctcgctccgcctcctcggttcagtcggcgagccgatcgacccgaaaacctgggactggtatcaccgcgtcgtcggcggcgggcgctgcccgatcgtcgacacctggtttcagaccgagaccggcggcatcctgatgacgccgcttcccggcgccaccgagctgaagccaggctccgtcggcacccccttcttcggcgtcaggcctgagctggtcgatgcggcgggcaacgtgctcgatggcgttgcaaacggaaacctggttatcgctgacagctggccgggccagatgcgcacgctttaccgcgaccacgagcgcttcgagcaggaatatttctccatctatccagacaaatattttaccggcgacggcgcccggcgcgatgcaggcggccattactcgatcacgggccgcatcgacgacgtcatcaacgtctccggccaccgcatcggcacggcggaagtcgaatccgccctggtcgcccacgctagcgtttcggaagccgcggtggtcggctatccgcacgagatcaaggggcagggcatctacgcttacgtaacccttatcgacggcgaggctgcctctgacgagctgcgcaaggaactcgtttcctgggtgcgcaaggagataggcccgatcttcacgatcgacaaggtccagttcgcgcagggcctgccgaaaacaacctcggggaaaatcattcgccgcatcctgcgcaagatcgctgaggacaaatgcaccgagttcggtgacacctcgacgctctctaaccccgccgtggtcgatcacctgatagacaaccggctgaaccggaaggctgcctga

SEQ ID NO: 126706 - protein, 654 aa, Rhizobium leguminosarum bv. viciae 3841
MNGNKQAAGVYSVPKQWAERAFIDAQRYEAMYAASIANPEEFWGEHGKRIHWIKPYSTVKNTSFESGKVSIRWFEDGTTNVSYNCIDRHLTERGDKFAIISVGDDPKDDARITYRELYAHVMKWANVLRSQGIGKGDKVTVYLPMIPELTYAMLACTRIGAIHSTLSTNCPPKVLASCIADAASTVVVTADSGTRGGRKLELKVKLDAALDKLPEVVTSVIVVKHTGAPVSMLKGRDHYYDELAETVPDQCPPEEMKAEDPLFVLYTSGSTGKPKGVVHTTGGYLVYTAMTHQYVFDYRDGDIHWCTAEISWITGHSYTVYGPLANGATTLIFEGTPTYPSMSRYWDIIDKHKVSLFYTAPTAIRSLMGSGEDAVKSNSLASLRLLGSVGEPIDPKTWDWYHRVVGGGRCPIVDTWFQTETGGILMTPLPGATELKPGSVGTPFFGVRPELVDAAGNVLDGVANGNLVIADSWPGQMRTLYRDHERFEQEYFSIYPDKYFTGDGARRDAGGHYSITGRIDDVINVSGHRIGTAEVESALVAHASVSEAAVVGYPHEIKGQGIYAYVTLIDGEAASDELRKELVSWVRKEIGPIFTIDKVQFAQGLPKTTSGKIIRRILRKIAEDKCTEFGDTSTLSNPAVVDHLIDNRLNRKAA

SEQ ID NO: 126707 - DNA, 1887 bp, Pseudomonas aeruginosa UCBPP-PA14
  CDS (1)..(1887): transl_table=11
atgacgtacctgcagcagcacgcccgctcgatcgccgagccggccgcgttctgggccgaacaggcccgttccctggcctggtaccaggcgcccgcgaatatcctcgaaagcctgcccgacggcacccatcgctggttcgccgatggccgcctgaacagcgcctacctggccctcgaccggcagatcgaggaggggcgcggcgaacagaccgcgctgatctacgactcgccggtgaccggcacccaggaccgctacagctacctgcggctgcgcgacgaagtggcgcgcctggccggcgccctgcgggccctcggggtcggcaagggcgaccgggtgatcatctacatgccgatggtgccgcaggcggccatggcgatgctcgcttgcgcgcgcctgggcgcggtgcattcggtggtgttcggtggcttcgctccctacgagctggccctgcgcatcgacgacgccacgccgaagctggtgctcaccgcttcctgcgggctggagttcgaccgggtgatcgaatacaagccgctggtggacaaggccctcgaactggcgatccaccagcctgcccacgtcatggtctggcaacgcccgcaggcgctcgcgcgcctgcacccgggccgcgacctggactggcaggactgcctcgccgccgccgagccggccgatccgctgccggtggccagcggcgatccgctgtacatcatgtacacctcgggcaccaccggtaagcccaagggcatcgtccgcgacaacggtggccacgcggtggcggtgcgctacgcggtccgcactatctacggcatgcaggccggcgacgtctggtgggggatctccgacgtcggctgggtggtcggccactcgctgatcgtctacggcccgctgatgtgcggctgtaccacagtgttctacgaaggcaagccggtgcgtacgccggacgccggcgcctactggcgggtgatcgaagagcacagggtgaacagcctgttctgcgcgccgacggcgatccgcgcgatccgcaaggaagacccgcatggcgaacgggtgaagcgctacgacctaagttcgctgcgccacctgttcctggccggcgagaagctcgacagcagcacccagcactggctggaagagcacaccgggcggccggtccacgaccattggtggcaaaccgagaccggctggccggtgaccgcgccctgcatcgggatcgccggccacgacctgcgggccggttcgaccaaccgcgcggtgcccggctaccacgtgcaggtgctggacgacgaaggccggccgctgggagcgaaccgccagggcacgatcgtcatcgccctgccgttgccgccgggctgcgcgcagaccctctggggcgaccacccgcgctacctgcaggcctacctgggcaactatcccggctactaccacaccggcgacggcggttatctcgacgaggacggcttcgtctacatcatggggcgcaccgacgacgtgataaacgtttccgggcatcgcctctccaccggcgagatggaggaacgcgtggcgcagcaccaggcggttgccgagtgcgcggtgatcggcgtgcgggacgaactcaagggccacgtgccgctgggcctggtggtgctcaaggacgatgccgggatcgccgccgagcaactgcagcgcgagctggtggcgctggtccgcgaacagatcggcgcgctggcctgcttccagcgggtggtggtggtcaagcggctgccgaagacccgctccgggaagatcctccgcgcggtgctgcgcaagatcgccgatggcgaggattacgcggcgccatcgaccatcgacgacccgacgatccttggcgagatcgaggctgcgctgagggtgcgcaaggcgggatag

SEQ ID NO: 126708 - protein, 628 aa, Pseudomonas aeruginosa UCBPP-PA14
MTYLQQHARSIAEPAAFWAEQARSLAWYQAPANILESLPDGTHRWFADGRLNSAYLALDRQIEEGRGEQTALIYDSPVTGTQDRYSYLRLRDEVARLAGALRALGVGKGDRVIIYMPMVPQAAMAMLACARLGAVHSVVFGGFAPYELALRIDDATPKLVLTASCGLEFDRVIEYKPLVDKALELAIHQPAHVMVWQRPQALARLHPGRDLDWQDCLAAAEPADPLPVASGDPLYIMYTSGTTGKPKGIVRDNGGHAVAVRYAVRTIYGMQAGDVWWGISDVGWVVGHSLIVYGPLMCGCTTVFYEGKPVRTPDAGAYWRVIEEHRVNSLFCAPTAIRAIRKEDPHGERVKRYDLSSLRHLFLAGEKLDSSTQHWLEEHTGRPVHDHWWQTETGWPVTAPCIGIAGHDLRAGSTNRAVPGYHVQVLDDEGRPLGANRQGTIVIALPLPPGCAQTLWGDHPRYLQAYLGNYPGYYHTGDGGYLDEDGFVYIMGRTDDVINVSGHRLSTGEMEERVAQHQAVAECAVIGVRDELKGHVPLGLVVLKDDAGIAAEQLQRELVALVREQIGALACFQRVVVVKRLPKTRSGKILRAVLRKIADGEDYAAPSTIDDPTILGEIEAALRVRKAG

SEQ ID NO: 126709 - DNA, 1938 bp, Pseudomonas aeruginosa UCBPP-PA14; identical to SEQ ID NO: 122068
  CDS (1)..(1938): transl_table=11

SEQ ID NO: 126710 - protein, 645 aa, Pseudomonas aeruginosa UCBPP-PA14; identical to SEQ ID NO: 122069

SEQ ID NO: 126711 - DNA, 1932 bp, Solibacter usitatus Ellin6076; identical to SEQ ID NO: 122070
  CDS (1)..(1932): transl_table=11

SEQ ID NO: 126712 - protein, 643 aa, Solibacter usitatus Ellin6076; identical to SEQ ID NO: 122071

SEQ ID NO: 126713 - DNA, 1935 bp, Magnetococcus sp. MC-1; identical to SEQ ID NO: 122072
  CDS (1)..(1935): transl_table=11

SEQ ID NO: 126714 - protein, 644 aa, Magnetococcus sp. MC-1; identical to SEQ ID NO: 122073

SEQ ID NO: 126715 - DNA, 2823 bp, Mycobacterium smegmatis str. MC2 155
  CDS (1)..(2823): transl_table=11
atgtgctgcgcgatctggagcgcctcacgcgctccggcgtgcagcgcctcgcagctgagcagcagccacgcggtcagaccgtcggtggtccccgacgcgaatccgcgggcggccccacggtactcgcccgacttgcgcatccagtgcacctcgggcacgccgagaccgtgcgggtccagcccgctcgcgatcgtcaccagccgcgagaccgcgcgcgccaccacaccgtcggccgtgccgaacggggccagcgtcagcaactcgccgtgcgcgacggcggccagcaccggggcgggcgccttggacccgccggtgagaagttcgatcagcaactccaggcgcggacccacctcggggtcggtgcgggggcggcccagatgctcgtcgtcggtgagatcggccgcggcgagcgcgtgcagtcgcgccagcgcctgcatcggcgcgcgctgccacacggtcaccaacgaggtcgcgccgccctcgagcgcctcggcgacgcggatcgcgcccgcggtcaccggatccgggtcgccgtcggccgacagttgcaccgcaccgccgtcgagcacggccgacgcgcgggcgccacgcagcgcggactcggccgcggtctgcggccagccccgcaggttgaccttgtgccggtgcgcgcgtccgagcgcgtcgcgcgcctcgtcgcaggccgcggcgacaccgggcagctctaacagcggcgcgagaggatcagggcgctcggtcataaccagccacgctagtcgaccgctgatcgcgtcttcgccgaccgttcagcgcaatcagaccaccgtccaccagcagacatgtgagggtccaacgtgtgtgcaacgttcggtgactaggctcacagccatgtcgaacccctcgcacgcagaagttccgtcagcctatccgccgccggccgattttgcggccaatgccaacgcgacgggtgagttgtacgccgaggccgagaaggatcggctggcgttctgggagaagcaggccaagcggttgtcctggcagaccccgttcaccgacgtactcgactggtcggacgccccattcgcgaagtggttcgtgggcggcaagatcaacgtcgcctacaactgcgtcgaccgtcacgtggaggccggcaacggcgaccgggtggccatccactgggaaggcgaaccggtcggcgacgcgcgcagcatcacctacgccgaactcaaggacgaggtgtgcaaggccgccaacgccctgaccgacctgggtctggtggccggcgaccgcgtcgcgatctacatgccgatgatccccgaggccatcgtcgcgatgctcgcgtgcgcccgcctgggtgtcatgcacagcgtcgtgttcgccggcttctcggcctcggcgctgcgcgcccgcatcgaggacgccgaggccaagctcgtcatcaccagcgacggccagtaccgccgcggcaaggccgcctcgctcaaggaggccgtcgacgaggccgtcgccgatcagccgtcggtgaagaacgtgctggtggtgcgtcgcaccggcatcgacgtcaagtggaccgacggccgcgacctgtggtgggacgagaccgtcgagcaggcgtcgaccgagcacattcccgcggccttcgactccgaacagccgctgttcttgctgtacacctccggcacgacgggtaagcccaagggcatcgtgcacacctcgggtggctacctgacgcagtcgtcgtacacgcactggaacgtcttcgacgtcaagcccgagagcgacgtgtactggtgcaccgccgacatcggctgggtgaccgggcacacctacatcgtgtacgggccgctgtccaacggcgtcacgcaggtggtctacgagggcacccccacctcgcccaccgagcaccggcacttcgaggtcatcgagaagtacggcgtcaccatctattacacggcgccgacgctcatccgcacgttcatgaagctgggtcatcagatcccggcctcgcacgatctgtcgagcctgcgcctgctcggctcggtgggcgagcccatcaaccccgaggcctggcgctggtaccgcgagcacatcggcggcggcaagaccccgatcgtcgacacctggtggcagaccgagaccggggccatcatgatctccccgctgcccggcgtgaccgcggccaagcccggttcggcgatgacgccgctgcccggcatctcggccaagatcgtcgacgacgagggcaaccaactggtgcccggtgccgacgaggccgagcacgtcaccggctacctggtgctcgaccagccgtggccggcgatgctgcgcggtatctggggcgacccgcaacggttcaaggacacctactggtcgcggttcgccgagcagggctggtacttcgccggtgacggcgcgcggtacgactccgacggccacatctgggtgctgggccgcatcgacgacgtcatgaacgtctcgggccaccgcatctcgaccgccgaggtcgagtccgcactcgtcggccatgccggtgtcgccgaggccgcggtcgtgggcgcctccgacgacacgaccggacaggcgatctgcgcgttcgtgatcctcaaggccagcgctcacggcgggcccgagaacatgatcgaggaactgcgcgccgaggtggcccgcgaaatctcgcccatcgccaaaccgcgcgagatccacatcgtgcccgagctgccgaagacccgcagcggcaagatcatgcgccggctgctgcgcgacgtggccgagggccgcgaactcggtgacacctcgaccctggtggatcccagcgtgttcgaggcgatccgcgcgagcaagtag

SEQ ID NO: 126716 - protein, 940 aa, Mycobacterium smegmatis str. MC2 155
MCCAIWSASRAPACSASQLSSSHAVRPSVVPDANPRAAPRYSPDLRIQCTSGTPRPCGSSPLAIVTSRETARATTPSAVPNGASVSNSPCATAASTGAGALDPPVRSSISNSRRGPTSGSVRGRPRCSSSVRSAAASACSRASACIGARCHTVTNEVAPPSSASATRIAPAVTGSGSPSADSCTAPPSSTADARAPRSADSAAVCGQPRRLTLCRCARPSASRASSQAAATPGSSNSGARGSGRSVITSHASRPLIASSPTVQRNQTTVHQQTCEGPTCVQRSVTRLTAMSNPSHAEVPSAYPPPADFAANANATGELYAEAEKDRLAFWEKQAKRLSWQTPFTDVLDWSDAPFAKWFVGGKINVAYNCVDRHVEAGNGDRVAIHWEGEPVGDARSITYAELKDEVCKAANALTDLGLVAGDRVAIYMPMIPEAIVAMLACARLGVMHSVVFAGFSASALRARIEDAEAKLVITSDGQYRRGKAASLKEAVDEAVADQPSVKNVLVVRRTGIDVKWTDGRDLWWDETVEQASTEHIPAAFDSEQPLFLLYTSGTTGKPKGIVHTSGGYLTQSSYTHWNVFDVKPESDVYWCTADIGWVTGHTYIVYGPLSNGVTQVVYEGTPTSPTEHRHFEVIEKYGVTIYYTAPTLIRTFMKLGHQIPASHDLSSLRLLGSVGEPINPEAWRWYREHIGGGKTPIVDTWWQTETGAIMISPLPGVTAAKPGSAMTPLPGISAKIVDDEGNQLVPGADEAEHVTGYLVLDQPWPAMLRGIWGDPQRFKDTYWSRFAEQGWYFAGDGARYDSDGHIWVLGRIDDVMNVSGHRISTAEVESALVGHAGVAEAAVVGASDDTTGQAICAFVILKASAHGGPENMIEELRAEVAREISPIAKPREIHIVPELPKTRSGKIMRRLLRDVAEGRELGDTSTLVDPSVFEAIRASK

SEQ ID NO: 126717 - DNA, 1995 bp, Nocardioides sp. JS614
  CDS (1)..(1995): transl_table=11
gtgagcgacgagaccctgtccaacctcctcaaggaggagcgccgtttcgagccgccggcggagatcgccgcgaaggcgaacctccaggcggacgcctacgaccgcgccgcggccgacccgcaggcgttctgggccgagcaggccgagcgcctggactgggaccagcggtgggaccgggtgctggactgggacgacccgccgttcgccaagtggttcgtgggcgggcggctcaacgcggcgtacaactgcgtcgaccggcacgtcgcggcgggccgcggcgacaaggtcgcgctgcactgggtcggggagcccctcgacgacacgcgtgacatcacctacgccgagctgcaggacgaggtctgccgggcggcgaacgcgctgaccgacctgggcgtccgcaccggcgaccgggtcgcgatctacctgccgatgatccccgaggccgtggtcgcgatgctcgcctgtgcccggatcggcgccccgcacaccgtggtcttcggcgggttctcggccgacgcgctggcctcgcggctcgaggactgccaggccaaggtcgtggtcacctccgacggcggctaccgccgcggctcggcctccgccctcaagccggccgtcgatgaggcccgcgcgaagaccgcggcccgcgggcacacggtcgagaaggtgctcgtcgtacgccgcaccggccaggacgtcgcctgggacgatgccgtcgacctgtggtggcacgacgcggtcggcggcgcctcgagcgagcacacgccggagttcttcgacgccgagcacccgctctacgtcatgtacacctcgggcaccaccggcaagccgaagggcatcctgcacacgaccggcggctacctggtcggctcggcgtacacccactgggcggtcttcgacctcaagcccgacaccgacgtctactggtgctcggccgacatcggctgggtcaccggccactcctacctcgtctacgggccgctggccaacggcgccacccaggtgatgtacgagggcacaccggacagcccggagcgcggccgctggtggaagatcatccaggactaccaggtcagcatcttctacaccgcgcccaccgcgatccgctcgttcatgaagcagggccgcgagatccccgacggcttcgacatgtcgtccctgcggatcctcgggtccgtcggcgagccgatcaaccccgaggcgtacatctggtaccgccacgtgatcggcgacgaccgcaccccggtggtcgacacctggtggcagaccgagaccggcgccatcatgatcagcccgctgcccggcgtcaccgccggcaagcccggctccgcgatgacgccgatcccgggcgtctcggcggaggtcgtcaacgacgagggcgacccggtccccaacggctcgggcggctacctggtgctcaccgcgccctggccggccatgctgcgcacgatctggggcgacgaccagcgctaccgggacacctactggtcccgcttcgccaagcagggctactacttcgccggcgacggggccaagaaggacgacgacggcgacatctgggtcctcggccgggtcgacgacgtcatgaacgtctcggggcaccgcctctccaccaccgagatcgagtccgcgctcgtctcccacccgaaggtcgccgaggccgccgtggtcggcgccaaggacgaggacaccggccaggcggtctgcgcgttcgtgatcctccgcgagtctgcatcggatcctggggcgagcgacggtggcgacgacatcgtcgccgagctgcgccagcacgtccgcaaggagatcgggccgatcgcgacgccgcggcagatcatgatcgtccccgagctgcccaagacccgctccggcaagatcatgcggcggctgctgcgcgacgtcgccgagcaccgcgaggtcggcgacgtcaccacgctcgccgactcctccgtgatggacctgatcgcgcagggcctcggctccggcaagtccgaggagtga

SEQ ID NO: 126718 - protein, 664 aa, Nocardioides sp. JS614
MSDETLSNLLKEERRFEPPAEIAAKANLQADAYDRAAADPQAFWAEQAERLDWDQRWDRVLDWDDPPFAKWFVGGRLNAAYNCVDRHVAAGRGDKVALHWVGEPLDDTRDITYAELQDEVCRAANALTDLGVRTGDRVAIYLPMIPEAVVAMLACARIGAPHTVVFGGFSADALASRLEDCQAKVVVTSDGGYRRGSASALKPAVDEARAKTAARGHTVEKVLVVRRTGQDVAWDDAVDLWWHDAVGGASSEHTPEFFDAEHPLYVMYTSGTTGKPKGILHTTGGYLVGSAYTHWAVFDLKPDTDVYWCSADIGWVTGHSYLVYGPLANGATQVMYEGTPDSPERGRWWKIIQDYQVSIFYTAPTAIRSFMKQGREIPDGFDMSSLRILGSVGEPINPEAYIWYRHVIGDDRTPVVDTWWQTETGAIMISPLPGVTAGKPGSAMTPIPGVSAEVVNDEGDPVPNGSGGYLVLTAPWPAMLRTIWGDDQRYRDTYWSRFAKQGYYFAGDGAKKDDDGDIWVLGRVDDVMNVSGHRLSTTEIESALVSHPKVAEAAVVGAKDEDTGQAVCAFVILRESASDPGASDGGDDIVAELRQHVRKEIGPIATPRQIMIVPELPKTRSGKIMRRLLRDVAEHREVGDVTTLADSSVMDLIAQGLGSGKSEE

SEQ ID NO: 126719 - DNA, 1965 bp, Azoarcus sp. BH72; identical to SEQ ID NO: 122074
  CDS (1)..(1965): transl_table=11

SEQ ID NO: 126720 - protein, 654 aa, Azoarcus sp. BH72; identical to SEQ ID NO: 122075

SEQ ID NO: 126721 - DNA, 1983 bp, Mycobacterium sp. KMS
  CDS (1)..(1983): transl_table=11
gtgactacgctcacacccatgtccgacgtgcacaccgaagtcccgtccagctacccgccgcccgccgaattcgccgagcaggcgaacgccaaagcggagatgtatcgagaagccgaggaggaccggctcgccttctgggccaagcaggccgagcgattgtcgtgggacaccccgttcaccgaggtgctggactggtcggacgccccgttcgcgaagtggttcgtcggcggcaagatcaacgtggcctacaactgcgtcgaccgccacgtcgaggccggcaacggtgaccgcgtggcgatccactgggagggcgaaccggtcggcgactcccgctcactgacctacgccgaactcaaagacgaagtgtgcaaggcggccaacgcgctgaccgacctcggtctgaccgccggcgaccgggccgcgatctacatgccgatggtgcccgaggcgatcgtggcgatgctggcgtgtgcgcgccttggcgtcctgcactcggtggtgttcgccgggttctcggcgtcggcgctcaaggcccgcatcgaggacgccgaagccaaactcgtcatcaccaccgacgggcagtaccggcgcggtaaggccgcctcgttgaaggacgcggtcgacgaggccgtcgacggtcaaccctcgatcgagcacgttctggtggtgcgccgcaccgggatcgacgtcaagtggaccgacggacgcgacctgtggtggcacgagacggtcgacggcgcgtccaccgagcacacccccgaggccttcgactccgagcatccgctgttcctgctctacacctcgggcacgacggggaagcccaagggaatcgtgcacacgaccggcggctacctcgtgcagtcgtcgtacacccaccacaacgtgttcgacgtcaaacccgacaccgacgtgtactggtgcaccgcggacatcggctgggtcaccggccacacctacatcacctacggcccgctgtcgaacggtgtcacccaggtggtctacgagggcaccccgacctcaccgagcgagcaccgccatttcgaggtcatcgagaagtacggcgtcaccatctactacaccgcgccgacgctggtccgcacgttcatgaagctcggccgcgcggtccccgacgcccacgatctgtcgagtctgcggctgctcggttcggtcggagagccgatcaaccccgaggcgtggcgttggtaccggaatgtgttcggcgacaacaatatcccggtcgtcgacacctggtggcagaccgagaccggcgcgatcatgatctccccgctcccgggtgtcacggcggccaaacccggttcggcgatgaccccgttgcccggcatctcggccaagatcgtcgacgacgacggcaaccaactcccgcccggcagcgaccacggtgagcaggccaacgggtacctggtactcgaccagccctggccggcgatgctgcgcggcatctggggcgatccgcagcgcttcaaggagacctactggtcccgattcgccgagcagggttggtacttcgccggtgacggcgcgcgttacgacgccgacggcaacatctgggtgctgggccgcatcgacgatgtgatgaacatatccggccaccggatctccaccgcggaggtggagtcggcgctcgtgggtcactcacacgtcgccgaggccgccgtcgtgggcgccaccgacgaccacaccggtcaggcgatctgcgcgttcgtcatcctcgagtcctccgcggccgacaagccgcacgagcacatggtcgaggagttgcgcgccgaagtggccaaggagatctccccgatcgcccgcccgcgcgagatccacgtggtgcccgaactccccaagacccgcagcggcaagatcatgcgacgactgctgcgcgacgtcgccgaaggccgcgaactcggcgacacctcgacgctcgtcgaccccggcgtgttcgaggcgatccgcgccagcaaggccgaggtttag

SEQ ID NO: 126722 - protein, 660 aa, Mycobacterium sp. KMS
MTTLTPMSDVHTEVPSSYPPPAEFAEQANAKAEMYREAEEDRLAFWAKQAERLSWDTPFTEVLDWSDAPFAKWFVGGKINVAYNCVDRHVEAGNGDRVAIHWEGEPVGDSRSLTYAELKDEVCKAANALTDLGLTAGDRAAIYMPMVPEAIVAMLACARLGVLHSVVFAGFSASALKARIEDAEAKLVITTDGQYRRGKAASLKDAVDEAVDGQPSIEHVLVVRRTGIDVKWTDGRDLWWHETVDGASTEHTPEAFDSEHPLFLLYTSGTTGKPKGIVHTTGGYLVQSSYTHHNVFDVKPDTDVYWCTADIGWVTGHTYITYGPLSNGVTQVVYEGTPTSPSEHRHFEVIEKYGVTIYYTAPTLVRTFMKLGRAVPDAHDLSSLRLLGSVGEPINPEAWRWYRNVFGDNNIPVVDTWWQTETGAIMISPLPGVTAAKPGSAMTPLPGISAKIVDDDGNQLPPGSDHGEQANGYLVLDQPWPAMLRGIWGDPQRFKETYWSRFAEQGWYFAGDGARYDADGNIWVLGRIDDVMNISGHRISTAEVESALVGHSHVAEAAVVGATDDHTGQAICAFVILESSAADKPHEHMVEELRAEVAKEISPIARPREIHVVPELPKTRSGKIMRRLLRDVAEGRELGDTSTLVDPGVFEAIRASKAEV

SEQ ID NO: 126723 - DNA, 1998 bp, Acidovorax sp. JS42
  CDS (1)..(1998): transl_table=11
atgagtgcatcgtccaatgccatcgaatccgtattggtggagaaccgcgtcttcccgcctgccgatagcgtggtgaaggcggcccgcgtgtcgggcatggccggctacgaggccctgtgcgccgaagccaacaaggatcccgagggcttctgggcgcgcttggcgcgcgagcacctgcaatggaccaagccgttcacgcagacgctggacgagtccaaggcgccgttctaccggtggtttgccgacggcgagctcaacgccagtgccaactgcctggacaagcacatgggcacgccggtcgagaacaaggccgccatcctcttcgaggccgacgacggcaccgtcacccaggtcacttaccggcaactgctggagcgcgtgagccagttcgccaatgccttgaaggcgcatggcgtgcagcagggcgaccgcgtgctcatctacatgccgatgggcgtggaaggcgtggtggccatgcaggcctgtgcgcgcatcggcgccacgcacagcgtggtgttcggcggtttctctgccaaggcgctgaacgagcgcatcatcgatgcgggcgccgtggcggtgatcacggccaactaccaattgcgcggcggcaaggaactgcccctgaaggccatcgtggacgagggtctgtccatgggcggctgcgacagcatcaagaatgtcttcgtataccagcgcacggccacggcctgcgacatggtggcggggcgtgacaagaccttctccgagatcctggccgggcagagcaccgaatgcccacccacgcccgtgggcgcggagcatccgctgttcatcctctacaccagcggctccacgggcaagcccaagggcgtgcagcacagcaccggcggctacctgctgtgggccaaggtgacgatggagtggaccttcgacattcgccccgacgacgtgttctggtgcacggccgatatcggctggatcacgggccacacctacgtggcctacggtccgctggctgcgggtgccacacaggtggtgttcgagggcgtacccacgtaccccaacgccgggcgcttctggcagatgatcgagcgccacaaggtcacggtgttctacacggcgcccactgccatccgctcgctcatcaaggcggccgactccgacgagagcgtgcaccccaagaactgggatctgtcgagcctgcgcatcctgggcagcgtgggcgagcccatcaaccccgaggcctggatgtggtactaccgccatgtgggcggcgagcgctgtcccatcgtggacacgttctggcagaccgaaaacggcggccacgtcatcaccccgctgccgggtgccacgccgctcgtgccgggttcgtgcaccttgccgctgccgggcatccaggccgccatcgtcgatgaaaccggcaaagacctgcccaacggcgcgggcggcatgctcgtgatcaagcggccctggccctcgatgatccgcaccatctggggcgaccccgagcgcttcaagaaaagctacttccccgaagagttggggggcaccacctacctggccggcgacggcgccgtgcgcagtgccgaccgtggctacttccgcatcacgggccgcatcgacgacgtgctgaacgtgtcgggccaccgcatgggcacgatggagatcgagtccgccctggtcgccaagacggacctcgtggccgaggccgccgtggtgggccgtcccgacgacctgacgggcgaggcgatttgcgccttcgtggtgctcaagcgctcgcgccccacgggcgaggaggccaagcagatcgccaccgaactgcgcaactgggtcgccaaggagatcggccccatcgccaagcccaaggacatccgcttcggtgacaacctgcccaagacccgcagcggcaagatcatgcgccgcctgctgcgctcgatcgccaagggcgaacccatcacccaggacaccagcaccctggaaaaccccgcaatcctggatcagttggcgcagtccaactga

SEQ ID NO: 126724 - protein, 665 aa, Acidovorax sp. JS42
MSASSNAIESVLVENRVFPPADSVVKAARVSGMAGYEALCAEANKDPEGFWARLAREHLQWTKPFTQTLDESKAPFYRWFADGELNASANCLDKHMGTPVENKAAILFEADDGTVTQVTYRQLLERVSQFANALKAHGVQQGDRVLIYMPMGVEGVVAMQACARIGATHSVVFGGFSAKALNERIIDAGAVAVITANYQLRGGKELPLKAIVDEGLSMGGCDSIKNVFVYQRTATACDMVAGRDKTFSEILAGQSTECPPTPVGAEHPLFILYTSGSTGKPKGVQHSTGGYLLWAKVTMEWTFDIRPDDVFWCTADIGWITGHTYVAYGPLAAGATQVVFEGVPTYPNAGRFWQMIERHKVTVFYTAPTAIRSLIKAADSDESVHPKNWDLSSLRILGSVGEPINPEAWMWYYRHVGGERCPIVDTFWQTENGGHVITPLPGATPLVPGSCTLPLPGIQAAIVDETGKDLPNGAGGMLVIKRPWPSMIRTIWGDPERFKKSYFPEELGGTTYLAGDGAVRSADRGYFRITGRIDDVLNVSGHRMGTMEIESALVAKTDLVAEAAVVGRPDDLTGEAICAFVVLKRSRPTGEEAKQIATELRNWVAKEIGPIAKPKDIRFGDNLPKTRSGKIMRRLLRSIAKGEPITQDTSTLENPAILDQLAQSN

SEQ ID NO: 126725 - DNA, 1938 bp, Magnetospirillum magnetotacticum MS-1
  CDS (1)..(1938): transl_table=11
atgtccgaggtctatcctgtgcccgctgagaccgcgaagaacgctctcatcgataatgataagtacaatgcatggtatgagcgctcggtgaaggaccctgacgggttctggggcgagcatggcaagcgcatcgactggatcaagccctacaccaaggtgaagaacgtctcctattccggcgacgtcagcatcaagtggttcgaggacggcaccctgaacgtgtcggccaactgcctggaccgccacctggccaagcgccgggaccagaccgccatcatctgggaaggcgacgaccccaacgagtccgcccacatcacctatggcgatctgcacgagcgcgtctgccgtctggccaatgccatgaccgatctgggcgtgaagaagggtgaccgcgtcaccatctatctgcccatgatccccgaagccgcggtggccatgctggcctgcgcccgcgtcggcgcggtccattccatcgtgttcggcggcttctcgcccgacgccctggccggccgcatccaggattgcgattcctcgctgctgatcaccgccgacgaaggtctgcgcggcggccgcaaggttccgctgaaggtcaatgccgacaaggcgctggagacctgctggtcgtgcaagtccgtcatcgtggtcaagcgtaccggtggcgacgtccacatggttacggggcgtgaccattggtaccacgacatcgtcgccaaggcctcgccgacccatacccccgtcgagatgagcgcggaagacccgctgttcctgctctacacctcgggctcgaccggcaagcccaagggcgtggttcacaccaccggcggctatctggtctatgcctccatgacccatcaatacgtcttcgactatcacgagggcgaggtctactggtgcaccgccgatgtgggctgggtcacgggtcactcctacatcgtctatggtccgctggccaacggcgccatcaccctgatgttcgagggcattcccaactacccgaccgtgtcgcgcttctgggatgtggtcgacaagcacaaggtcaacatcttctacaccgcgcccaccgccatccgctcgctgatgcgcgaaggcgaggagccggtcaagaagaccagccgcaagtccctgcgtctgctgggttcggtgggcgagcccatcaatccggaagcctggacctggtaccaccgcgtggtgggcgacaaccgctgccccatcgtggatacctggtggcagaccgagaccggcggcatcctgatcaccccgctgccgggcgccaccgcgctcaagcccggttcggcgacccgcccgttcttcggcgtcaagccggtgatggtcgatgccgagggcaagaccctggaaggcgccaccgagggcaacctctgcctggccgagcccggctggcccggccagatgcgcaccctgtggggcgatcacgaccgcttcatccagtcgtacttcgccacttataagggcatgtacttcaccggtgacggcgcgcgacgcgacgaggacggctattactggatcaccggccgcgtcgacgacgtgatcaacgtgtccggtcaccgcatgggcaccgccgaggtggaatccgccctggtcgcccatcccaaggtggccgaggccgccgtggtcggctatccgcacgacatcaagggccagggcatctatgcctatgtcaccctgattcagggcgaggagccgtccgaggatctgcgtaaggaactggtcaactgggtccgcaaggaaatcggccccatcgccagccccgacctgatccagtggtcgccgggcctgcccaagacccgttcgggcaagatcatgcgccgcatcctgcgcaagatcgccgagaacgatttcggctcgctgggcgacacctcgacgctggccgatccgacggtggtcgatgacctcatcgacagccgcatgaatcgcggctaa

SEQ ID NO: 126726 - protein, 645 aa, Magnetospirillum magnetotacticum MS-1
MSEVYPVPAETAKNALIDNDKYNAWYERSVKDPDGFWGEHGKRIDWIKPYTKVKNVSYSGDVSIKWFEDGTLNVSANCLDRHLAKRRDQTAIIWEGDDPNESAHITYGDLHERVCRLANAMTDLGVKKGDRVTIYLPMIPEAAVAMLACARVGAVHSIVFGGFSPDALAGRIQDCDSSLLITADEGLRGGRKVPLKVNADKALETCWSCKSVIVVKRTGGDVHMVTGRDHWYHDIVAKASPTHTPVEMSAEDPLFLLYTSGSTGKPKGVVHTTGGYLVYASMTHQYVFDYHEGEVYWCTADVGWVTGHSYIVYGPLANGAITLMFEGIPNYPTVSRFWDVVDKHKVNIFYTAPTAIRSLMREGEEPVKKTSRKSLRLLGSVGEPINPEAWTWYHRVVGDNRCPIVDTWWQTETGGILITPLPGATALKPGSATRPFFGVKPVMVDAEGKTLEGATEGNLCLAEPGWPGQMRTLWGDHDRFIQSYFATYKGMYFTGDGARRDEDGYYWITGRVDDVINVSGHRMGTAEVESALVAHPKVAEAAVVGYPHDIKGQGIYAYVTLIQGEEPSEDLRKELVNWVRKEIGPIASPDLIQWSPGLPKTRSGKIMRRILRKIAENDFGSLGDTSTLADPTVVDDLIDSRMNRG

SEQ ID NO: 126727 - DNA, 1974 bp, Nostoc punctiforme PCC 73102
  CDS (1)..(1974): transl_table=11
atgtcagaaccaaatatcgaatcaatcctccaagagaaccgccttttccatcctcctagtgaattctcgcagaacgcccacattaaaagcttggacgactacaagcgtctctatgaaaaagccaaagccgatccagagcaattttgggcagatttggctggaacagaattagaatggttccaaaaatgggacacggtgctagattggcaaccgccttttgcgaagtggttcgttggcggtaagatgaatatttcttacaactgccttgacagacacctcactacttggcgcaaaaataaagcagccttgatttgggaaggagagccaggtgattcgcgtaccctaacttacgcccaactacaccgggaagtctgccaattcgccaatgtattgaagcaactgggtgtacaaaaaggcgatcgcgttggaatctatatgccgatgattcctgaagctgcgatcgcaatgttagcctgtgccagaatcggcgcaccacacggcgtagtatttggtggttttagtgccgaagctttgcgcgatcgcttaattgatgccacagctaaattagtaatcacggctgatggtggttggcgcaaagatgcgatcgttcctctcaaagaacaagtagataaagccttagctgatggtgctgttcccagcgtcgaaaatgtcctagttgttaagcgcaccggacaagaaacttatatgcaattggggggacgcgatcattggtggcatgatttacaaaaaagtgcatcagcagattgtcccgccgaaccgatggatagtgaagatatgctatttgtcctctacacttctggtagcaccggcaaaccgaagggcgtagtgcatacaactgctggttataatctgtatacccacatcaccactaagtggatattcgacctgcaagacacagatgtatattggtgtaccgcagatgtaggctggattacgggacacagttacattgtctacggtcccctttccaacggtgcaacgactgtgatgtatgaaggtgcgccccgtgcttctaatcctggctgtttctgggatgtaattgaaaaatacggcgttaatattttttatactgcacctacggcaattcgggcatttattaagatgggtgaacaacatcctaatgcgcgaaacttgtcttcgttgcgtttgctgggaaccgtcggcgaacccattaacccagaagcttggatgtggtatcagaaagtaattggtggcgatcgctgtccaattgttgatacttggtggcaaacggaaactggcggtatcatgattacaccgctaccaggagcaatccctactaaaccaggttctgcaactcttcccttcccaggaattattgcagatgtcgtggatttagaaggaaacaccgtacccaataacgaaggcggttatctggcggtgcgccatccgtggccaggaatgatgcggacagtttacggcgatccagaacgcttccgccgcacttattgggaacacattccgccccaagatggtaaatatacttactttgctggtgatggcgctagacaagatgaagacggctacttttgggtaatgggtcgtgtggatgacgtactgaatgtatcaggacatcgccttggtacaatggaagtagaatcagctttagtttcgcatccagccgttgcagaagcggcggtagtaggtaagccggatgaactcaaaggtgaagaagtagttgcttttgtgactttagaaggcacttatcagggaagtgaggaactgagtaaagaactcaagcagcacgtcgtcaaagaaattggtgcgatcgcacgtccaggagaaattcgctttactgatgctttgcccaaaacgcgatcgggtaagattatgcggcgcttattgcggaatctagctgctgggcaagaggtatctggtgatacttcgacgttagaagatagaagcgtgttggataaattgcgggaaggtacgtaa

SEQ ID NO: 126728 - protein, 657 aa, Nostoc punctiforme PCC 73102
MSEPNIESILQENRLFHPPSEFSQNAHIKSLDDYKRLYEKAKADPEQFWADLAGTELEWFQKWDTVLDWQPPFAKWFVGGKMNISYNCLDRHLTTWRKNKAALIWEGEPGDSRTLTYAQLHREVCQFANVLKQLGVQKGDRVGIYMPMIPEAAIAMLACARIGAPHGVVFGGFSAEALRDRLIDATAKLVITADGGWRKDAIVPLKEQVDKALADGAVPSVENVLVVKRTGQETYMQLGGRDHWWHDLQKSASADCPAEPMDSEDMLFVLYTSGSTGKPKGVVHTTAGYNLYTHITTKWIFDLQDTDVYWCTADVGWITGHSYIVYGPLSNGATTVMYEGAPRASNPGCFWDVIEKYGVNIFYTAPTAIRAFIKMGEQHPNARNLSSLRLLGTVGEPINPEAWMWYQKVIGGDRCPIVDTWWQTETGGIMITPLPGAIPTKPGSATLPFPGIIADVVDLEGNTVPNNEGGYLAVRHPWPGMMRTVYGDPERFRRTYWEHIPPQDGKYTYFAGDGARQDEDGYFWVMGRVDDVLNVSGHRLGTMEVESALVSHPAVAEAAVVGKPDELKGEEVVAFVTLEGTYQGSEELSKELKQHVVKEIGAIARPGEIRFTDALPKTRSGKIMRRLLRNLAAGQEVSGDTSTLEDRSVLDKLREGT

SEQ ID NO: 126729 - DNA, 1941 bp, Bacillus cereus G9241
  CDS (1)..(1941): transl_table=11
ttgaaacaagcagtttggtttccaacagaagagtataaagaaaaaacgcgtttatatggttggatgaaatcattgggctatgaagattatgaaacgttttataaaaagtcaatcgaagaaacagcttggttttggggagaagctgagaaagcagttggctatcaatggatgaaaccttatacagaagtgctagatttagaaaatggtacgccgtttgcacagtggtataatggcggaacatgtaatgttgtagaatcggttttatcacgctggcttgcagacgatgaaacaagaacacaaccagcacttcagtatgaaggggaaaatggaacttcaaaatcatttacatatgaagagcttgatagctgggtaagtcgtgttgcaaacggtttgaaacatgcaggtattgaaaaaggtgaccgtgtcacaatttatatgccgatgattccagaaacagttgttgcgatgctagcggttatgaaaatcggagcaattatttcaccaatattctcaggatttgcgtctgatgcagtcatgacacgtgtgcaagcggcaggatctaaaatgatcattactgcagatggcttttcacgccgcggtaaaatagtttcattaaaagatgaagtagataaagcttgtgaacattgtccaactgttgaaaaagttgttatcgtgcgtcatgcaggaaatgattttacaccgcataattatgatttctcatggagtacgttagaaaaagaaaagccatttgtacatgctgaagaaatgcatagtgatgatccattaatgctcatttatacatcaggtacaactggaaaaccgaaagggacagtacatactcatgctggatttcccttaaaagcagcttttgatgcggggttcggaatgaatattaaacaaggtgaccgcgtattatgggtaactgatatgggatggatgatgggaccatttttactattcggttctcttattaatggggcaacaatggttatgtacgaaggcgttccggatttcccagaagcagatcgtttatgggagacagttgataaatatgaaattacacatctcggtatatcaccaacattaattcgtgcgttaatggcaaaaggtgatgagtatgtaaataaacattcgcttaagagtttagaagtattcgcctcaacaggcgagccttggaatccagatccttggatgtggctatttgaaacggttggaaaaagtaatgtaccaatttgtaactattcaggcgggactgaaatttctggtggaattttcggaaacgtccttattaaaccaattgcaccgattagctttaacgcttctttaccaggaatggcagcggttgtgctcgatgatcagggcaatccgattcgtgataaagttggagaattatgtttagagaaaccttgggttggtatgacgaaaagtttctgggaagacgatgagcgttatgtgaacacatattggtcacgttttgaaaataaatgggttcatggtgactgggtggtttatgatggtgaacaatatattattacaggacgctcagatgatacgttaaacattgctggaaaacgcattggacctgctgaatatgaatctattcttgtgaagcataatgatgtcatagaagctgctgcgattggtgtaccagatgatgtaaaaggtgaagtttgtcattgttttgtagtattaagagacaatgtaacattctcaggtgaattaaagaaagaattaatgagtttagtaaactctcatattggaaaagcattatgtccaaaagatattcacgttgtagaagatttaccgaaaacacgtaattctaaagtaatgcgacgcgtcattaaagccgcttatttaggaaaagaattaggcgatttatcatcacttgtgaatcctgaggtagttccgtttattcaggggttgcagtctagtaaattataa

SEQ ID NO: 126730 - protein, 646 aa, Bacillus cereus G9241
MKQAVWFPTEEYKEKTRLYGWMKSLGYEDYETFYKKSIEETAWFWGEAEKAVGYQWMKPYTEVLDLENGTPFAQWYNGGTCNVVESVLSRWLADDETRTQPALQYEGENGTSKSFTYEELDSWVSRVANGLKHAGIEKGDRVTIYMPMIPETVVAMLAVMKIGAIISPIFSGFASDAVMTRVQAAGSKMIITADGFSRRGKIVSLKDEVDKACEHCPTVEKVVIVRHAGNDFTPHNYDFSWSTLEKEKPFVHAEEMHSDDPLMLIYTSGTTGKPKGTVHTHAGFPLKAAFDAGFGMNIKQGDRVLWVTDMGWMMGPFLLFGSLINGATMVMYEGVPDFPEADRLWETVDKYEITHLGISPTLIRALMAKGDEYVNKHSLKSLEVFASTGEPWNPDPWMWLFETVGKSNVPICNYSGGTEISGGIFGNVLIKPIAPISFNASLPGMAAVVLDDQGNPIRDKVGELCLEKPWVGMTKSFWEDDERYVNTYWSRFENKWVHGDWVVYDGEQYIITGRSDDTLNIAGKRIGPAEYESILVKHNDVIEAAAIGVPDDVKGEVCHCFVVLRDNVTFSGELKKELMSLVNSHIGKALCPKDIHVVEDLPKTRNSKVMRRVIKAAYLGKELGDLSSLVNPEVVPFIQGLQSSKL

SEQ ID NO: 126731 - DNA, 1980 bp, Crocosphaera watsonii WH 8501
  CDS (1)..(1980): transl_table=11
atggtcgcatcctctgaaaaaaataccgttgaatcgatcttacatgaagaccgagtctttcctcctgctgcggacttttctaataacgcacatataaaaagtcttcaagactatgagcaactgtacgaaaaagccaaaagcgatcccgaaaccttttgggcagaactagcagaacaagaattacattggtttcaaaaatgggatcaagtgctagactggaagccaccctttgccaaatggtttgtcaacggcaaaatcaatatgtcctataactgcctcgatcgccatcttaccacttggcgacgtaacaaagcagctattatctgggaaggggaaccaggagactctcgtaccctaacctatggggaactccatcgggaagtttgtcagtttgccaatgtcctcaaagatatgggagtagaaaaaggcgatcgcgtgggtatttatatgcctatggttcccgaagcagcgatcgctatgttagcctgtactagaataggtgcgccccatagcgtcgtttttggggggtttagtgccgaagcattacgcgatcgcttagaagatgcagaggccaaagtcgtcgtcactgctgatggaggtttccgcaaagataagatcgttcccctaaaatcagaagtggataaagccctagaaaatggtgcttctagcgtccaaaaagtgattgtaatacaacggaccaaacaagacattaccatggtctcaggacgggactattggtggcacgatctccaaaaagatgcctcccctaagtgcgatgcagaagtaatggatagcgaagatcccctcttcatcctctataccagtggcagtacagggaaacctaaaggcgttgttcacaccaccggaggttataacctttacacccacatgaccacaaaatggatctttgatctcaaagacaacgatgtttactggtgtactgccgatgtaggttggatcacaggacacagttatattgtctatggtcccttatccaacggtgccacctccttgatgtacgaaggagttccccgtccctctaaccctggttgtttctgggatgtagtggaaaaatacggagtcaacgtcttttataccgcacccactgctattcgtgctttcatcaaaatgggagaagagttaccacaagcaagggatctctcctctttgcgtttattgggaacagtaggagaacccatcaaccccgaagcttggatctggtatcaccgcgttattggtggggaaaaatgccctattgtggatacttggtggcaaaccgaaaccggaggtgtaatgatcaccccgttacccggcgcaacacccacccaaccgggatcagctacacgaccattccctggcattatagccgatgtggtggaccaaaacggtaatgcagttcccgataacaccggaggatatttggttattaagcatccttggcccagtatgttacgcaccgtctataataaccccgaacgcttccagaagacctattgggaccctattcctgaagttgaaggtaaaccagtctatttcgctggtgatagcgcgcgacgggacgaaaaaggctatttttggattatgggccgggtagatgacgtgatgaatgtctctggacaccgtttgggatcgatggagttagagtctgctttagtgtctcatcctgcggttgctgaagcgtcggtggttggagttccccatgagatcaaaggggaagatatttatgcttttgttaccctagaagatcattacagtcccagtaatgagttaaataaggagttaaagcagcacgttgtcagtgagatcggtgcgatcgctcgtccgggtactattcagtttgctgaagcacttcccaagacgcgatcgggtaagattgtacgacgtttcttacgtcaaatagcagcggatcaagacattgttggtgataagtctacggtagttgatcctagtgttttagataagttgcgagagaaagtttaa

SEQ ID NO: 126732 - protein, 659 aa, Crocosphaera watsonii WH 8501
MVASSEKNTVESILHEDRVFPPAADFSNNAHIKSLQDYEQLYEKAKSDPETFWAELAEQELHWFQKWDQVLDWKPPFAKWFVNGKINMSYNCLDRHLTTWRRNKAAIIWEGEPGDSRTLTYGELHREVCQFANVLKDMGVEKGDRVGIYMPMVPEAAIAMLACTRIGAPHSVVFGGFSAEALRDRLEDAEAKVVVTADGGFRKDKIVPLKSEVDKALENGASSVQKVIVIQRTKQDITMVSGRDYWWHDLQKDASPKCDAEVMDSEDPLFILYTSGSTGKPKGVVHTTGGYNLYTHMTTKWIFDLKDNDVYWCTADVGWITGHSYIVYGPLSNGATSLMYEGVPRPSNPGCFWDVVEKYGVNVFYTAPTAIRAFIKMGEELPQARDLSSLRLLGTVGEPINPEAWIWYHRVIGGEKCPIVDTWWQTETGGVMITPLPGATPTQPGSATRPFPGIIADVVDQNGNAVPDNTGGYLVIKHPWPSMLRTVYNNPERFQKTYWDPIPEVEGKPVYFAGDSARRDEKGYFWIMGRVDDVMNVSGHRLGSMELESALVSHPAVAEASVVGVPHEIKGEDIYAFVTLEDHYSPSNELNKELKQHVVSEIGAIARPGTIQFAEALPKTRSGKIVRRFLRQIAADQDIVGDKSTVVDPSVLDKLREKV

SEQ ID NO: 126733 - DNA, 1704 bp, Exiguobacterium sibiricum 255-15
  CDS (1)..(1704): transl_table=11
atgaaagttttgaaagcgcttccgggggagcattggttatccgaatatgatggttcagattcatatgattggcaagaagcggaacagtatttttcgtggtcgacgacggggaaagtcaacatggcctacgaagcaatcgatcgtcatgcagaaggtgaacgtgccaataagacggcattgatttattttgacgggacaacggaacagacgtttacgtatgccgatatgaaaagactgacgaataaagcggcgaacgtcctgaaagacgcaggaatcgaagcgggagatcggattttcattttcatgccacgttcaccggaattgtattttgccttactcggtgcgttgaaagtcggcgcgattgtcggtccactattcgaagccttcatggagcaggcagtccgggatcgcctgctggattcggaagcaaaaatgctgattacgacaaaagccttattgccgcgtgttcctgttgatgagctgacatctctcgaacagattttcctggttgatgaagacgtcgaggaagacgataaaatcaaggacttccgacaagcgtttcaacaagcatctgaatcgtttgagcctgtctggctggaccgggaagatggtttgattcttcattatacatcgggttcgacgggtaaaccgaaaggcgttttacatgttcaaaatgccatgatccaacatatgatgacaggacgatgggtgcttgatctacaggaagacgacgtctactggtgtacggcagatccgggatgggtcacggggacaagctacggtatctttgcacctttcttaaacggtgcgacgaatgttgtcgtaggcggtcgctttaacccggacttctggtacagtgtcatcgagaaatataaagtaactgtgtggtacagcgcaccaactgctttccgaatgctgatgggagcaggggcggaagtcgccaatacacatgatttgtccagtttacggcatgtcctttccgtaggagaacctcttaatccggaagtcatccgctgggggaaagaagcttttgatcaacggattcatgatacgtggtggatgacggagacaggggccatgatgatctgtaactacaaatccatggatatcaaaccgggatcgatggggaaaccgattccgggaacaaaagcggctattgtagatgatcagggaaatgagttacctccgttccggatgggaaatttggcattaaaaacaccttggccgtcgatgatgcgccaaatttggaacaatccgcaaaagtacgagtcgtatttctttaaagggtggtatgtatcaggggactcggcctatatggacgatgaaggatacttctggttccagggtcgtgtcgatgatgtcatcatgactgccggagaacgtgttggaccattcgaagtggaaagccgcttagtcgagcatccggctgttgcagaagcgggtgtcatcgggaaaccggatccggttcgcggtgaaatcattaaagccttcatttcgctgagagacggttatgagccgacagaagagctcaaacaagaaattcaaaagtttgtcaaagaaggattagccgcacatgctgctccgcgtgaaattgatttccgcgataaattaccgaaaacacgtagtggtaaaatcatgcgtcgtgttttaaaggcgtgggagctgaatcttgaaacgggagatttgtcgacgatggaagactga

SEQ ID NO: 126734 - protein, 567 aa, Exiguobacterium sibiricum 255-15
MKVLKALPGEHWLSEYDGSDSYDWQEAEQYFSWSTTGKVNMAYEAIDRHAEGERANKTALIYFDGTTEQTFTYADMKRLTNKAANVLKDAGIEAGDRIFIFMPRSPELYFALLGALKVGAIVGPLFEAFMEQAVRDRLLDSEAKMLITTKALLPRVPVDELTSLEQIFLVDEDVEEDDKIKDFRQAFQQASESFEPVWLDREDGLILHYTSGSTGKPKGVLHVQNAMIQHMMTGRWVLDLQEDDVYWCTADPGWVTGTSYGIFAPFLNGATNVVVGGRFNPDFWYSVIEKYKVTVWYSAPTAFRMLMGAGAEVANTHDLSSLRHVLSVGEPLNPEVIRWGKEAFDQRIHDTWWMTETGAMMICNYKSMDIKPGSMGKPIPGTKAAIVDDQGNELPPFRMGNLALKTPWPSMMRQIWNNPQKYESYFFKGWYVSGDSAYMDDEGYFWFQGRVDDVIMTAGERVGPFEVESRLVEHPAVAEAGVIGKPDPVRGEIIKAFISLRDGYEPTEELKQEIQKFVKEGLAAHAAPREIDFRDKLPKTRSGKIMRRVLKAWELNLETGDLSTMED

SEQ ID NO: 126735 - DNA, 1995 bp, Prosthecochloris aestuarii DSM 271
  CDS (1)..(1995): transl_table=11
atggctacggacaaaaacacatcacatccgcaagaatcccccgaaaacgaatcgatcagttccgtcctgtctgaaaaacgcaagtttcctcccccgtccgagttctcagaaaacgctcatatatcctcaatggagcagtatgaacagctctatagccaagcagagaaagatcctgaagcttactgggcaggcgtagctgaggagttccattgggaaaaaaaatgggattcggtactcgaatggaattctccctatgccaagtggttccccggcgcaacaacaaacatctgctacaatgccgttgaccgtcatgtcaacagctggagaaaaaacaaggccgccattatctgggaaggtgaagagggtgaacagcgggttctcacctacggcgaactccacagacaggtcagcaagttcgccaacgtcctgaaaattgcgggcatcaagcctggtgacagagtagccatttatatggggatggtgcctgaactggtggtcgccgttcttgcatgcgcccgtgtcggagctgtccacaatgtcattttcgcagggttctccgcccacgccattaccgaaagggtcaacgactcaaaagcaaaactgatcatctgctccgacggaacccgccgacgcggcaatacgatcaatctgaaagacatcgttgacgatgcaattgtcaacactccctcggtccgtagcgtcattgtcctgaaagtcaccaatgaagaggttaccatgcatgacggtatggaccactggtggcatgacctcatggggctggccctcgatcataacgatcccgagttcgtcgatgcagagcatccgctcttcattctctataccagcggatcgactggaaaaccgaaaggaattctccatacaacgggcggttatatggttcatgcagccagctcgttcaggtatgtcttcgacatcaaggacgaagacatttactggtgtactgccgatgtgggctggattaccggtcacagctatctggtttacggtccgctgctcaacggtgcaaccctgatgatgtatgaaggcgcaccgaactacccgcagtgggaccgcttctgggatattatcaaccgccacaaaatcaccattctctatactgctccgacggcgatacgggcgtttatccgcgcaggtgacgagtgggtcaacaaacacgacctcagcacgctcagacttctcggcaccgttggtgaaccgatcaatccgaaagcatggatgtggtaccactccgttgtaggcaaagaaaagtgtccgatcgtcgacacctggtggcagacagaaaccggaggcatcctggtctcgccccttcctggagcgaccccgacaaaaccgggcacggcaacccgtccgcttcccggtatcctggtcgatgtcgttcgtaaggatggcacgccctgtaacgccaacgaaggcggctacctggtcatcaagaaaccatggccatcgatgcttcgcacgatttacggtgacaataaacgctatgaagagacctactggtctgaattcaaggatatgtatttcaccggtgatggcgcccgcaaagacgaagatggctatatctggatcatgggacgcgtcgacgatgttgtcaacgtctccggacaccgtcttggcaccagcgaagtagaaagcgctctcgttgcccacgaatctgtcgccgaagcagctgtcgtcagccgtccggatgagatcaagggcaacgctctgatcgcattcgtcacgctcaaggatgaatatcagggcgacatgaaacttcgcgaggagttgagagcccatgtttccaaagagatcggcccgatagccaaacccgacgaaatcagatgggcccagggccttcccaaaaccagaagcggcaaaatcatgcgccgacttctgcgcgaactggcctcaagcaaagagatcaagggcgatgttaccacgcttgaagatttcggcgtgctcgaacagttgcgcggacaggaagacgaagattaa

SEQ ID NO: 126736 - protein, 664 aa, Prosthecochloris aestuarii DSM 271
MATDKNTSHPQESPENESISSVLSEKRKFPPPSEFSENAHISSMEQYEQLYSQAEKDPEAYWAGVAEEFHWEKKWDSVLEWNSPYAKWFPGATTNICYNAVDRHVNSWRKNKAAIIWEGEEGEQRVLTYGELHRQVSKFANVLKIAGIKPGDRVAIYMGMVPELVVAVLACARVGAVHNVIFAGFSAHAITERVNDSKAKLIICSDGTRRRGNTINLKDIVDDAIVNTPSVRSVIVLKVTNEEVTMHDGMDHWWHDLMGLALDHNDPEFVDAEHPLFILYTSGSTGKPKGILHTTGGYMVHAASSFRYVFDIKDEDIYWCTADVGWITGHSYLVYGPLLNGATLMMYEGAPNYPQWDRFWDIINRHKITILYTAPTAIRAFIRAGDEWVNKHDLSTLRLLGTVGEPINPKAWMWYHSVVGKEKCPIVDTWWQTETGGILVSPLPGATPTKPGTATRPLPGILVDVVRKDGTPCNANEGGYLVIKKPWPSMLRTIYGDNKRYEETYWSEFKDMYFTGDGARKDEDGYIWIMGRVDDVVNVSGHRLGTSEVESALVAHESVAEAAVVSRPDEIKGNALIAFVTLKDEYQGDMKLREELRAHVSKEIGPIAKPDEIRWAQGLPKTRSGKIMRRLLRELASSKEIKGDVTTLEDFGVLEQLRGQEDED

SEQ ID NO: 126737 - DNA, 1971 bp, Kineococcus radiotolerans SRS30216
  CDS (1)..(1971): transl_table=11
atgaccagcacgccccccgcggaccccggcgccaccgcccaggacctcgtgttccccccctccgcggcgttcaccgcccaggccaacgtgggcgcggacgagcacgagcgcgcggccgccgaccccgaggcgttctgggccgagcaggcccgccggctgcagtgggacgagccgttcaccaccgtcttcgacggctcgacgctgccgacggcgcagtggttcaccggcggcaagctgaacgtggcggtgaactgcgtggaccgccacgtcgccgccgggcgcggggacaaggtcgccctgcactgggagggcgaacccggcgacgcgcgcaccatcacctacgcgcaactgcaggacgaggtctgccggctggcgaacgcgctggaggagctcggcgtcgggcacggcgaccgcgtcgtcctgtacctgccggtcctgcccgagaccatcgtcacgacgatggcctgcgcgcgcatcggggccgtcgtgagcctggtgttcgggggtttctccgccgaggcgctgcgcttccgggtcgaggacaccggggcgaagctcctggtctgcaccgacggtcagttccgccgcggcaccgccgtcgcggtgaaggccgccgccgacgccgcggtcgagggcctcgaccacgtcgagcacgtcctcgtcctgcgccgcaccggcgagcagaccccggacgtgccgtggaccgagggccgcgacgtgtggtggcacgacctcgtcgaccgtcagccgagcacgcacgtcgcgccgagcttcgacagcgagaacccgctgttcatcatctacacctcgggcaccaccgggaagcccaagggcctggtgcacaccagcggggggtacctcacccacacgtcctggtcgcactgggcggtcttcgacgtgaaggacgacgacgtctactggtgccaggccgacctcgcctgggtcaccgcgcacagctacgagatgtacggcccgctgtccaacggcgtcacccaggtcatctacgaggggtcgccgctgaccccgcacccgggccggcacttcgaggtgatcgagaagtacggggtgacgatctactacaccgctcccaccctggtgcggacgttcatgaagcacgggccggagctgcccgcgcgcttcgacctctcgtcgctgcggctgctggggtcggtgggcgaggccatcaaccccgaggcgtggtcgtggttgcaccgcgaggtcgggggcgggcgctgcccgatcgtcgacacctggtggcagtcggagacgggggcggccgtcgtcgctcccctgccgggggtcacgccgctgaagccgggctcggggacggtcccgctgccggggctgtcggcgaccgtggtcgacgacgaggggaacgagaccgcccccggtgagcagggcgtgctcgtcatcacgaagccctggccggggatggcgcggacggtgtggcgcgaccacgcgcggttcgtgaagagctactgggagccctacgcggcgcagggctactacctcgccggcgacgccgccacgaaggacgccgacggctacatctggatcggcggccgcatcgacgacgtgctcaacgtctccgggcaccggttgtccagcatcgagctggagtcggccctggtctcgcacccccgggtcgcggaggcggccgtcgtgggcgccccggacgacacgaccgggcagcggatcgtcgccttcgtcatcctgcgcggggccggtcccgaggacggggtggcggcggagctgcgcgagcacgtcgcccgcgagatcgggcccgtcgcccggccccgcgacgtggtcgtcgtcccggacctgcccaagacccggtcggggaagatcatgcgccggttgatggcggacctgaccgccgggcgcggcgggggggacgtgacctcgctgcaggacgagacggcgctcgccgccgtggagacggcctgggcgcagtacgtgcgctcgcgctga

SEQ ID NO: 126738 - protein, 656 aa, Kineococcus radiotolerans SRS30216
MTSTPPADPGATAQDLVFPPSAAFTAQANVGADEHERAAADPEAFWAEQARRLQWDEPFTTVFDGSTLPTAQWFTGGKLNVAVNCVDRHVAAGRGDKVALHWEGEPGDARTITYAQLQDEVCRLANALEELGVGHGDRVVLYLPVLPETIVTTMACARIGAVVSLVFGGFSAEALRFRVEDTGAKLLVCTDGQFRRGTAVAVKAAADAAVEGLDHVEHVLVLRRTGEQTPDVPWTEGRDVWWHDLVDRQPSTHVAPSFDSENPLFIIYTSGTTGKPKGLVHTSGGYLTHTSWSHWAVFDVKDDDVYWCQADLAWVTAHSYEMYGPLSNGVTQVIYEGSPLTPHPGRHFEVIEKYGVTIYYTAPTLVRTFMKHGPELPARFDLSSLRLLGSVGEAINPEAWSWLHREVGGGRCPIVDTWWQSETGAAVVAPLPGVTPLKPGSGTVPLPGLSATVVDDEGNETAPGEQGVLVITKPWPGMARTVWRDHARFVKSYWEPYAAQGYYLAGDAATKDADGYIWIGGRIDDVLNVSGHRLSSIELESALVSHPRVAEAAVVGAPDDTTGQRIVAFVILRGAGPEDGVAAELREHVAREIGPVARPRDVVVVPDLPKTRSGKIMRRLMADLTAGRGGGDVTSLQDETALAAVETAWAQYVRSR

SEQ ID NO: 126739 - DNA, 1965 bp, Kineococcus radiotolerans SRS30216
  CDS (1)..(1965): transl_table=11
gtgagcaccgacccgagcacccagcaggagcccaccaccggctccgggaccttcgccccggacccggagttcgcggccggggccgtcgcgcgggccgacctgtacgaccgggccgccgccgaccggctcgggttctgggcggaggtggcccgtgagcacgtcacctgggacaccgacttcgacgaggtcctggactggtcgaacccgccgttcgcgaagtggttcgtcggcgggaagctcaacgtcgcggtgaactgcgtcgaccgccacgtcgccgccgggaacggcgagcgcgtcgccctccacttcgagggcgaacccggcgacacccgggcggtcacctacgcgcagctgcacgagcaggtgcagcgggctgcgaacgtgctggccgggctgggggtgcgcgccggggaccgggtcgcgatctacctgccgatgctcgtggagtcggtggtggcgatgctggcgtgcgcgcgcctgggcgcggcgcactcggtggtgttcggcgggttctccgccgacgcgctgcactcccgcatcgacgacgcccaggccaaggtcgtcatcacctgcgacggttcctaccgccgcggcaagcccacgaccctcaagcccgccgtggacgcggcgctggccaagggcgccccgtcggtgaccggcgtcctcgtcgtgaagcgcaacggcgaggccgtggactgggtcgagggccgcgacgtgtggtgggacgaggcgctggccgcggccgcgcccgtgcacgaggcggaggccttcgacgcggagaacccgctgttcgtcctctacacctccggcaccacgggcaagcccaagggcatcctgcacacctccgggggctacctcgtccagaccgcgtacacgacgcgcaccgtcttcgacgtgcagcccgggcgcgacgtgtactggtgcaccgccgacgtcggctgggtcaccgggcacagctacgtcgtctacggcccgctggccaacggcctgacccaggtgatctacgaggggacccccgacacccccgacaaggaccgctggtggtcgctggtggagaagtacggcgtcaccgtcctctacaccgcgcccacggcgatccggacctgcatgaagtggggcgaggagtaccccgcccgccacgacctgtcctcgctgcgggtgctgggcagcgtgggggagaacatcaaccccgaggcgtggtcctggtaccgccgcgtcatcggcgccgaccgcaccccgatcgtcgacacctggtggcagaccgagaccggcgcgcagatgatcgccccgctgcccggggtcaccagcctcaagccgggttcggcgcaggtcccgctgccggggatcgtcgccgaggtcgtcgacgacgccggtgagcccgtcccgcacgggcaggccgggtacctcgtcctgagcgagccgtggccggcgatgacgcgcggcatctggggcgacgagcagcggttccgggacacctactgggcccgcttcccgggccggtacttcgccggcgacggcgccaagcgcgacgaggacggcgacatctggctgctgggccgcgtcgacgacgtcatgaacgtctccgggcaccgcctctccaccgccgagatcgagtcggccctggtcagccaccccgacgtcgccgaggccgccgtcgtgggggcgaccgacgagacgaccgggcaggccgtcgtggccttcgtcatcctccgcggcggccacgaggaggggccggggaccgtcgcggccctgcgcgaccacgtcgcgaaggagatcggccccatcgccaagccgaagtcgatcatggtggtggcggagctgccgaagacccgctcgggcaagatcatgcgccgcctgctgcgcgacgtcgccgagcaccgccccaccggcgacgtcacgaccctgaccgactccacggtcatggacgccatcaccgccgggatgaacgcccccgccggggactga

SEQ ID NO: 126740 - protein, 654 aa, Kineococcus radiotolerans SRS30216
MSTDPSTQQEPTTGSGTFAPDPEFAAGAVARADLYDRAAADRLGFWAEVAREHVTWDTDFDEVLDWSNPPFAKWFVGGKLNVAVNCVDRHVAAGNGERVALHFEGEPGDTRAVTYAQLHEQVQRAANVLAGLGVRAGDRVAIYLPMLVESVVAMLACARLGAAHSVVFGGFSADALHSRIDDAQAKVVITCDGSYRRGKPTTLKPAVDAALAKGAPSVTGVLVVKRNGEAVDWVEGRDVWWDEALAAAAPVHEAEAFDAENPLFVLYTSGTTGKPKGILHTSGGYLVQTAYTTRTVFDVQPGRDVYWCTADVGWVTGHSYVVYGPLANGLTQVIYEGTPDTPDKDRWWSLVEKYGVTVLYTAPTAIRTCMKWGEEYPARHDLSSLRVLGSVGENINPEAWSWYRRVIGADRTPIVDTWWQTETGAQMIAPLPGVTSLKPGSAQVPLPGIVAEVVDDAGEPVPHGQAGYLVLSEPWPAMTRGIWGDEQRFRDTYWARFPGRYFAGDGAKRDEDGDIWLLGRVDDVMNVSGHRLSTAEIESALVSHPDVAEAAVVGATDETTGQAVVAFVILRGGHEEGPGTVAALRDHVAKEIGPIAKPKSIMVVAELPKTRSGKIMRRLLRDVAEHRPTGDVTTLTDSTVMDAITAGMNAPAGD

SEQ ID NO: 126741 - DNA, 1944 bp, Xylella fastidiosa Dixon; identical to SEQ ID NO: 122080
  CDS (1)..(1944): transl_table=11

SEQ ID NO: 126742 - protein, 647 aa, Xylella fastidiosa Dixon; identical to SEQ ID NO: 122081

SEQ ID NO: 126743 - DNA, 1908 bp, Croceibacter atlanticus HTCC2559
  CDS (1)..(1908): transl_table=11
atgagccattacagcataaaacatattgaagagtattatcaagtatatagaaaatctgttagagatcccgagctgttttggggtgaaatagccgaagaacattttttatggcgaaaaaaatgggatcgcgttttaagttatgattttagcaaacctgagtttaaatggtttgagggtgcccaattaaatattacagaaaactgcttagacagacacttaaccacaagagcaaataaaacggcacttctttttgagccaaacaatcccgaagaaaaggcacaacatattacttacaaagagttgtatgagcgtgtttgtaagcttgcaaatgtcttaaaacaaaaaggggttaaaaaaggagatcgcgtttgtatttatttacctatgatacctgagctcaccgtatctgtattggcttgtgcaagaattggcgccatacactctgttgtttttgcagggttttcatctaaagctttagcaactcgaataaacgactgtgactgtgaaatggtcattacctcagatggatcttatagaggccacaaaacaatagatttaaaagcaattgtagatgaagcattagagcaatgtagtggcgttaaaaacgtattggtggttaaacgtattaattctgaggtctcaatgacacctaacagagatttctggatagaaccactgttgaaagaggctagtgcaaattgtcctgcagaaataatggatgcagaagatccattatttgttttgtatacatctggatctacaggtacgccaaaaggaatggtacacacttgtggaggttatatggtatatagcgcctatacatttaaaaatgtgtttagatatgaagaaaatgatgtgtattggtgtacagcagatattggctggattacaggacacagttatataatttacggtcctttagccaatggtgccacttccttaatgtttgaaggtgtccctagctacccagattttggaaggttttgggaaattgtagaaaagcatagagtaaatcagttttatactgcgccaacagcaattcgtgctttggcaaaagaaaaccttaaatttattgaaagtcacgacctgtcttccttaaaagtattaggtactgttggagaaccaattaatgaagaggcttggcattggtataatgttaatgtaggaaaaaaacgcagccctgttgcagattcgtggtttcaaacagaaactggtggtataatgatatctcctattccgtatgttacagcaacaaaacctacatatgcaacattacctttgcctggagtacagttagcgttaatggacgaaaatggagatgaaattaaaggcaaccaagtagatggccgtttgtgcataaaatatccttggcctggtatagctcgtactatatatggaaaccataaacggtataaggacacctatttttcagcatttaaaggtatgtattttacaggtgacggtgcattaagagatgaaactggatattatagaattacaggacgcgttgatgatgttgtaattgtttccgggcataatatgggtactgcacctattgaagatgctattaatgaacacccagctgtagctgaaagtgctatagtaggtttccctcacgatattaaaggaaatgcactgtatgggtttattactctaaaggaaactggagaaggaagagatcacaataatcttaggtcagaaataaatcaattaatcaccgaatatataggtccaatagccaagttagataagattcaatttacaaaagggcttcctaaaacccgttcagggaaaattatgcgccgtattttaagaaaaattgctagtaaagattctgaaaaccttggagacattagtaccttgctaaatcctgaagttgttcaagatataatagacacatctctataa

SEQ ID NO: 126744 - protein, 635 aa, Croceibacter atlanticus HTCC2559
MSHYSIKHIEEYYQVYRKSVRDPELFWGEIAEEHFLWRKKWDRVLSYDFSKPEFKWFEGAQLNITENCLDRHLTTRANKTALLFEPNNPEEKAQHITYKELYERVCKLANVLKQKGVKKGDRVCIYLPMIPELTVSVLACARIGAIHSVVFAGFSSKALATRINDCDCEMVITSDGSYRGHKTIDLKAIVDEALEQCSGVKNVLVVKRINSEVSMTPNRDFWIEPLLKEASANCPAEIMDAEDPLFVLYTSGSTGTPKGMVHTCGGYMVYSAYTFKNVFRYEENDVYWCTADIGWITGHSYIIYGPLANGATSLMFEGVPSYPDFGRFWEIVEKHRVNQFYTAPTAIRALAKENLKFIESHDLSSLKVLGTVGEPINEEAWHWYNVNVGKKRSPVADSWFQTETGGIMISPIPYVTATKPTYATLPLPGVQLALMDENGDEIKGNQVDGRLCIKYPWPGIARTIYGNHKRYKDTYFSAFKGMYFTGDGALRDETGYYRITGRVDDVVIVSGHNMGTAPIEDAINEHPAVAESAIVGFPHDIKGNALYGFITLKETGEGRDHNNLRSEINQLITEYIGPIAKLDKIQFTKGLPKTRSGKIMRRILRKIASKDSENLGDISTLLNPEVVQDIIDTSL

SEQ ID NO: 126745 - DNA, 1956 bp, Sulfitobacter sp. EE-36; identical to SEQ ID NO: 122084
  CDS (1)..(1956): transl_table=11

SEQ ID NO: 126746 - protein, 651 aa, Sulfitobacter sp. EE-36; identical to SEQ ID NO: 122085

SEQ ID NO: 126747 - DNA, 1950 bp, Roseovarius nubinhibens ISM; identical to SEQ ID NO: 122086
  CDS (1)..(1950): transl_table=11

SEQ ID NO: 126748 - protein, 649 aa, Roseovarius nubinhibens ISM; identical to SEQ ID NO: 122087

SEQ ID NO: 126749 - DNA, 1950 bp, Oceanicola batsensis HTCC2597; identical to SEQ ID NO: 122088
  CDS (1)..(1950): transl_table=11

SEQ ID NO: 126750 - protein, 649 aa, Oceanicola batsensis HTCC2597; identical to SEQ ID NO: 122089

SEQ ID NO: 126751 - DNA, 1977 bp, Prochlorococcus marinus str. MIT 9211; identical to SEQ ID NO: 122090
  CDS (1)..(1977): transl_table=11

SEQ ID NO: 126752 - protein, 658 aa, Prochlorococcus marinus str. MIT 9211; identical to SEQ ID NO: 122091

SEQ ID NO: 126753 - DNA, 1926 bp, Erythrobacter sp. NAP1
  CDS (1)..(1926): transl_table=11
atgatccacgccgtccaacgcccgctatcgagcaacgccacgcattgtgtgaccgagcaatatggcgagctctaccgccgttcggtggaaacgcccgatgcgttctggctcgaacaggcagagcggctcgactggttcaccaagccagccaagggcggcgagtggtcgtatgatccggtcgacattcagtggtttgccgatggaactctcaacctttgctacaatgcagtggaccgtcatctggagacgcgcggggacgacaccgcgatcatcttcgagccagacgatcccgcatccccctcgcgcacgctgacctatcgcgatttgcacggcgaggtcgtgcggatggcgaatgcgctgatggcgatgggcgtcaagaaaggcgaccgcgttacgctctacatgccgatggtagtcgaaggcgtgacggcaatgctcgcctgcgcccggatcggcgcgatccactcggtggtgtttggcggcttctcgcccgaagcgctcgcaggcaggatcgaggattgcggcagccgcttcgtcgttaccgccgaccaggggctgcgcggctcgaagcgcgtcccgctcaaagccaacgtcgatgccgcgctccagatcgaaggcgcagaggtcgacggcgttctggtcgtcgcgcataccggtgccgacgtcgctatgactgaaggccgcgatcactggtttagcgatctagcctccgatacggacgtgccatgcgaggtgatgcaggccgaagacccgctcttcatcctttacacctcaggatccaccggaaagcccaagggcgtgcttcatacgaccggcggatatggcgtgtggactgcgacgacgttcaactacgtcttcgattaccagccgggcgaggtttactggtgcactgccgatatcggctgggtcacggggcacagttatatcgtctacggccccctgatgaacggcgcgacgagcgtcgttttcgaaggcgtgcccaactatcccgatcatgggcgcttctgggacgtggtggacaagcaccaggtcaatatcctctacactgcccccaccgcaatccgcgccctcatgcgcgagggtgatgagttcgtgacgagccgggatcgctcgtcactgcgcctgctcgggtcggtcggcgaaccgatcaatccggaggcatggcgctggtatttcgacgttgtcggcgaagggcgctgcccgattgtcgacacatggtggcagaccgaaacgggcggcgtgatgatcactacgcttcctgccgcacacgacatgaagccgggcagcgcaggcctccccttcttcggcattcagccgcagttggtcgataatgatggcggcgttctcgacggagcggtcgaaggcaatctctgcatcaccgccagctggcccggccaggcgcgcagcgtctatggcgatcacgaacgcttcgagcagacgtatttctcgacctatcgtggcaagtatttcaccggcgacggctgccggcgcgacgaggacgggtactactggatcaccggccgcgttgacgacgtcatcaacgtctcgggccaccgcatgggcactgccgaggtcgaaagcgccttggtattgcacgacaaggtcgccgaggccgctgttgtcggatacccgcacgacatcaagggccagggcatctattgctacgtcaccctgaatgcaggcgaggaaggctccgaggaactgttcagggacctgcgcatgcatgtccgcaaagagatcggtccgatcgcaacgcccgatcatatccagttcacagatggactgcccaagacacgctcgggcaagattatgcgacgcatcctgcggaaggtcgcggagaacgactatggatcgcttggcgatacatccacactggcagatccatctctggttgatcgtttgatcgaaggtcggcagaatcgctga

SEQ ID NO: 126754 - protein, 641 aa, Erythrobacter sp. NAP1
MIHAVQRPLSSNATHCVTEQYGELYRRSVETPDAFWLEQAERLDWFTKPAKGGEWSYDPVDIQWFADGTLNLCYNAVDRHLETRGDDTAIIFEPDDPASPSRTLTYRDLHGEVVRMANALMAMGVKKGDRVTLYMPMVVEGVTAMLACARIGAIHSVVFGGFSPEALAGRIEDCGSRFVVTADQGLRGSKRVPLKANVDAALQIEGAEVDGVLVVAHTGADVAMTEGRDHWFSDLASDTDVPCEVMQAEDPLFILYTSGSTGKPKGVLHTTGGYGVWTATTFNYVFDYQPGEVYWCTADIGWVTGHSYIVYGPLMNGATSVVFEGVPNYPDHGRFWDVVDKHQVNILYTAPTAIRALMREGDEFVTSRDRSSLRLLGSVGEPINPEAWRWYFDVVGEGRCPIVDTWWQTETGGVMITTLPAAHDMKPGSAGLPFFGIQPQLVDNDGGVLDGAVEGNLCITASWPGQARSVYGDHERFEQTYFSTYRGKYFTGDGCRRDEDGYYWITGRVDDVINVSGHRMGTAEVESALVLHDKVAEAAVVGYPHDIKGQGIYCYVTLNAGEEGSEELFRDLRMHVRKEIGPIATPDHIQFTDGLPKTRSGKIMRRILRKVAENDYGSLGDTSTLADPSLVDRLIEGRQNR

SEQ ID NO: 126755 - DNA, 1941 bp, Pseudoalteromonas tunicata D2; identical to SEQ ID NO: 122096
  CDS (1)..(1941): transl_table=11

SEQ ID NO: 126756 - protein, 646 aa, Pseudoalteromonas tunicata D2; identical to SEQ ID NO: 122097

SEQ ID NO: 126757 - DNA, 1950 bp, Photobacterium sp. SKA34
  CDS (1)..(1950): transl_table=11
atgagtgaggttcacgtttatccggtcaatgagaccatcacaaaaacagctcatatcaatgaagagcaataccgtgaaatgtatcagcaatcagtaattaacccagaaggcttttggcgtgaacatggccaaatcgttgattggatgacaccatttactaaagttaaaaacacctcatttgataccggccacgtcagcattaaatggtttgaagacggtgagcttaatgtctctgctaactgtattgatcgccacctcgcgaccaaaggcgagcaagccgctattatttgggaaggtgatgatccaaatgatgatgccatcctaacctacaatgaattacatcaagaagtctgtcagtttgctaacgccctaaagagccaaggtgtgcgtaaaggtgatgtggtgtgtctttacatgccaatggttgccgaagcggcaattgcaatgctcgcttgtacccgtattggtgcagtgcacactatcgtctttggtggtttctctccagaagcattggctggacgcattatcgattcaaatgcaaaagtggttgttactgctgatgaaggtgtgcgtggtgggcgtgccgttccccttaagaaaaatgtagacgacgcactagtaaaccctgaagtaacgacggttgaaaaagtggttgtctttaaacgcaccggtggtgaagtcgcttggaatgatgaccgcgatgtatggtggcatgaagcaactgccgtggcttcgactcactgtgctcctgagccaatgaacgctgaagatcctctttttattctttacacatcaggctcaacgggtaagcctaaaggtgtacttcacaccacaggtggctatctagtttacgctacgatgacgtttaaatatgtatttgattaccaagacggtgatgtgtactggtgtaccgcagatgtgggctggatcacaggtcacagctacttggtatacggaccactagctaatggtgcaaccacagtattatttgaaggcgtgccaacatacccatcaaccagtcgcatgagcgaagtggtggataagcaccaagtcagtattttatacacagcgcctaccgctattcgtgctctgatggcgaaaggtgatgaagcgattcaaggaactaaccgctcctcactgcgtatcatgggctctgtcggcgaacccattaacccagaagcatgggagtggtatcaccgcacaattggcgacaaacgttgcccaatcgtagatacatggtggcaaacagaaacaggcgggatcttaattacaccactaccgggtgcaaccgcactaaaaccaggatctgcaacacgtcctttctttggtgtacaacctgcactcgttgataacgtcggtaatatccttgaaggcgccactgacggtaacttagtcatgaccgattcatggcctggtcaaatgcgtacgctttgcggcgatcacgaacgttttgaacagacttatttctctacctttaaaggcatgtatttcaccggtgacggtgcgcgtcgtgatgaagacggttattactggatcacaggtcgtgtcgatgacgtgttaaatatttcaggtcaccgtatggggacggctgaaattgaatcagcactcgttgctttcgataagattgcagaagcggcgattgtgggtgtaccacatgagataaaaggccaagcaatttatgcttacatcactctaaacgatggtgaaattccaagtgcagaactgcataaagaagtgaaaaactgggtacgtaaggaaattggtcctatcgccacaccagacttcttacattggacagatgcattaccaaaaacacgttcaggtaagatcatgcgtcgaattcttcgtaagatagcaactggagatacctcaaccttaggtgatacttcaacacttgcagatccaactgttgttgatcgactcattgaagaaaaacaaaaagtgatgtaa

SEQ ID NO: 126758 - protein, 649 aa, Photobacterium sp. SKA34
MSEVHVYPVNETITKTAHINEEQYREMYQQSVINPEGFWREHGQIVDWMTPFTKVKNTSFDTGHVSIKWFEDGELNVSANCIDRHLATKGEQAAIIWEGDDPNDDAILTYNELHQEVCQFANALKSQGVRKGDVVCLYMPMVAEAAIAMLACTRIGAVHTIVFGGFSPEALAGRIIDSNAKVVVTADEGVRGGRAVPLKKNVDDALVNPEVTTVEKVVVFKRTGGEVAWNDDRDVWWHEATAVASTHCAPEPMNAEDPLFILYTSGSTGKPKGVLHTTGGYLVYATMTFKYVFDYQDGDVYWCTADVGWITGHSYLVYGPLANGATTVLFEGVPTYPSTSRMSEVVDKHQVSILYTAPTAIRALMAKGDEAIQGTNRSSLRIMGSVGEPINPEAWEWYHRTIGDKRCPIVDTWWQTETGGILITPLPGATALKPGSATRPFFGVQPALVDNVGNILEGATDGNLVMTDSWPGQMRTLCGDHERFEQTYFSTFKGMYFTGDGARRDEDGYYWITGRVDDVLNISGHRMGTAEIESALVAFDKIAEAAIVGVPHEIKGQAIYAYITLNDGEIPSAELHKEVKNWVRKEIGPIATPDFLHWTDALPKTRSGKIMRRILRKIATGDTSTLGDTSTLADPTVVDRLIEEKQKVM

SEQ ID NO: 126759 - DNA, 1893 bp, Oceanospirillum sp. MED92
  CDS (1)..(1893): transl_table=11
atgtcctatcaagcagagtattcaaaatcgatcgaaacgccagagctattctggggtgaaaaagcacaagatcttgagtggtttaaaaaaccagagaccattctttctaaggatgagaacgggatcgatcgttggttcgccgatggtgaactgaatactgcatacttagcactcgattatcatgttgaaaatgggcgtgcagataatacagctattatctatgactcaccggtaacaggtcagaagcgcaagatctcttatcttgagttacgtgatgaagttgccaaatttgcaggcgtattgaaatcacagggcgtagagaagggcgaccgtgtagttatctacatgcctatgatccctgaagccgttattgcaatgctggcagtggctcgcctgggtgcaatccactcagttgtattcggtggctttgcaccacatgaattggctgtacgtattgatgatgctgaaccaaaggttattgtttctgcatcttgcggtatcgagattgctaaggtgattgaatacaagccgatgcttgatcaggctatcgaaaagtctgcacacaaaccatctgcttgtgttgttcttcagcggccagaagctgaagcatccatgatcgaagggcgcgacattgattggcaggaagcgatgaaaactgctgagcctgctgattgcgttccggttaaaggcacagatcctctatacattctgtatacctctggcacaaccggtaagcctaagggtgtagtacgtgataatggtggtcacgccgttgccatgaagtactccatgaaagcggtttataacgttgagccaggtgatgttttctgggcagcttcagatgtaggctgggttgttggtcactcgtatattgtttatgggccactactggctggttgtacaacaattgtttatgaaggtaagcctgttcgtaccccagatgcaggtgccttctggcgcgtctgcgaagagtataaggctaaggtcctgtttgctgcgccgactgcattccgcgcgattaagaaagaagatccggatgctaagctgcttgagaattacgacctgtcgaacctggatactattttcatggccggtgagcgcttagacccaccgacttaccactggactattgagaaaacggctaagccggttattgatcactggtggcagactgaaacaggctgggctatttgcggtaatatgacgggtatcgaaaccctcgaacctaaaccaggttctgcaacggtaccatctgcaggttataacgtgcagatccttgattccgaaggcaacgaacttccagcgggtgagcagggctctatcgccattaaactgcctttaccgccaagctgccttccaacagtttggggcgactttgagcgtttccgtacgggttacctatctgaatacccaggctactactgctcaggtgatggtggctacaaagatgaagatggctatgtattcatcatgggtcgtactgatgatgttatcaacgtagcgggccatcgcctttcaactggtgaaatggaagagattgtagcggaccatgaagcggttgcagaatgtgccgttatcggtatcaatgatccactgaaaggccagcagcctgttggcttcgttctacttaaagatggtgttgaaatcgaagatgatgcacttgaagcagaacttgtggggctggtacgtaaagagattggggctgttgcttgctttaagaaagcagtagtcgttcagcgcttgcctaagacgcgctcaggtaagatcctgcgtaaattgatgcgtcagattgctgatggtcaggactatagtattccatcgactatcgacgatcctgcgagtcttccggagcttgaagatgtaatgaaccgaaacggtatcgttacagagtaa

SEQ ID NO: 126760 - protein, 630 aa, Oceanospirillum sp. MED92
MSYQAEYSKSIETPELFWGEKAQDLEWFKKPETILSKDENGIDRWFADGELNTAYLALDYHVENGRADNTAIIYDSPVTGQKRKISYLELRDEVAKFAGVLKSQGVEKGDRVVIYMPMIPEAVIAMLAVARLGAIHSVVFGGFAPHELAVRIDDAEPKVIVSASCGIEIAKVIEYKPMLDQAIEKSAHKPSACVVLQRPEAEASMIEGRDIDWQEAMKTAEPADCVPVKGTDPLYILYTSGTTGKPKGVVRDNGGHAVAMKYSMKAVYNVEPGDVFWAASDVGWVVGHSYIVYGPLLAGCTTIVYEGKPVRTPDAGAFWRVCEEYKAKVLFAAPTAFRAIKKEDPDAKLLENYDLSNLDTIFMAGERLDPPTYHWTIEKTAKPVIDHWWQTETGWAICGNMTGIETLEPKPGSATVPSAGYNVQILDSEGNELPAGEQGSIAIKLPLPPSCLPTVWGDFERFRTGYLSEYPGYYCSGDGGYKDEDGYVFIMGRTDDVINVAGHRLSTGEMEEIVADHEAVAECAVIGINDPLKGQQPVGFVLLKDGVEIEDDALEAELVGLVRKEIGAVACFKKAVVVQRLPKTRSGKILRKLMRQIADGQDYSIPSTIDDPASLPELEDVMNRNGIVTE

SEQ ID NO: 126761 - DNA, 1956 bp, Xanthobacter autotrophicus Py2; identical to SEQ ID NO: 122098
  CDS (1)..(1956): transl_table=11

SEQ ID NO: 126762 - protein, 651 aa, Xanthobacter autotrophicus Py2; identical to SEQ ID NO: 122099

SEQ ID NO: 126763 - DNA, 1917 bp, Xanthobacter autotrophicus Py2
  CDS (1)..(1917): transl_table=11
atgtccgaagtcggaacgagcggatacgctgaagcctatgccagctggcgtgcggatccttccgctttctggggcgcggcggcgcagtcgctggagtggtccaaggcgccagagaagatgttcgatcccgaggccggcgtctatggtcgctggttccccgacgccgtgggcaatatctgccacaacgccctcgaccgccacgtggcggccggccgtggcgaccaggcggcgttgatctatgacagcccggtcaccggcgccaagcgcaccctcacctatgcgcaattgctcaaagaggtgagcacgctcggcgcggtgctgcaggatctcggcgtcggcaagggcgaccgggtgctgatctatatgcccatggtgcccgaggccatcggcgccatgctggcctgcgcccgcatcggcgccatccattcggtggtgttcggcgggttcgcggcgaaggaactggcgacccgcatcgaggatgccgagccgaaggtgatcctcgccgcctcctgcggcatcgagcccaaccgcgtggtggcctacaagccgctgcttgacctcgccatttccatgtcggcggtcaagccccagcgctgcctcgtgctccagcgtcccgaggggcccggcgccctgaccgagggtcgcgacctcgactgggcggtggcctgcgcggcagcggccgatgccggcaagagcgcgccctgcgcggacatggcggccaccgacccgctctacatcctctacacctccgggaccacgggcaagcccaagggcgtcgtgcgcgacgtgggcggctacatggtggcgctcgactggagcatgaagaacctctacggcatcgcccccggcgaggtgttctggaccgcctccgacatcggctgggtggtggggcattcctacatcgtctacggcccgctgatccatggcgcgaccactctcgtctacgagggcaagccggtgggtacgccggaccccggcgcgttctggcgggtgatcgaggagcacaaggtggtggcgctgttcaccgcgcccaccgccctgcgcgccatcaagaaggaggatcccgactgcctgctgaagcagggtcgcgacctctcccgtttccgcaccctgttcctcgccggcgagcgcgccgatcccgatacggtgatctgggcgcagcagcagctgaaggtcccggtggtggaccactggtggcagaccgagaccggctgggccatcgccgccaatccggtgggcctcggccttctgcccaccaagctcggctcgcccaccgtgcccatgccgggctatgacgtggagatcgtggacgaggccgccaagccggtgccggcgggcaccatgggctccatcgtggtgaagttgccgctgcctcccggctgcctgcccacactgtggcagcaggacgaccgcttcgccgagggctacctcgccgactatcccggctactacaagacctccgatgccggcttcctggacgatgacggctacgtcttcgtcatgggccgcaccgacgacatcatcaacgtcgccggccatcgtctgtccaccggcggcatggaggaggttctggcctcccatccggacgtggccgagtgcgcggtgatcggcgtcaaggacgagctgaagggcgaggtgccctgcggcttcgtggtgctgaaggccggtgaacggcgcgcgcccgacgtgatcgagaaggaactggtgggcctcgtgcgcgaccgcatcggcccggtggcagccttcaagctggcggtaactgtaaaccgcctgcccaagacccgctcgggcaagatcctgcgcggcaccatgaagaagatcgcggatcacgacgaatggtcggttccggccaccatcgatgacgccggcgtgctcgaggagatcgaggacgtgctgaaggcccgcggcatcgcctga

SEQ ID NO: 126764 - protein, 638 aa, Xanthobacter autotrophicus Py2
MSEVGTSGYAEAYASWRADPSAFWGAAAQSLEWSKAPEKMFDPEAGVYGRWFPDAVGNICHNALDRHVAAGRGDQAALIYDSPVTGAKRTLTYAQLLKEVSTLGAVLQDLGVGKGDRVLIYMPMVPEAIGAMLACARIGAIHSVVFGGFAAKELATRIEDAEPKVILAASCGIEPNRVVAYKPLLDLAISMSAVKPQRCLVLQRPEGPGALTEGRDLDWAVACAAAADAGKSAPCADMAATDPLYILYTSGTTGKPKGVVRDVGGYMVALDWSMKNLYGIAPGEVFWTASDIGWVVGHSYIVYGPLIHGATTLVYEGKPVGTPDPGAFWRVIEEHKVVALFTAPTALRAIKKEDPDCLLKQGRDLSRFRTLFLAGERADPDTVIWAQQQLKVPVVDHWWQTETGWAIAANPVGLGLLPTKLGSPTVPMPGYDVEIVDEAAKPVPAGTMGSIVVKLPLPPGCLPTLWQQDDRFAEGYLADYPGYYKTSDAGFLDDDGYVFVMGRTDDIINVAGHRLSTGGMEEVLASHPDVAECAVIGVKDELKGEVPCGFVVLKAGERRAPDVIEKELVGLVRDRIGPVAAFKLAVTVNRLPKTRSGKILRGTMKKIADHDEWSVPATIDDAGVLEEIEDVLKARGIA

SEQ ID NO: 126765 - DNA, 1911 bp, Flavobacteria bacterium BBFL7
  CDS (1)..(1911): transl_table=11
atgagtaattatcacataaaacacctcgaagaatattggcaagtctatagaaaatcagtacgcaatccagaaaatttctgggaagaaatagccgaagaacatttcctatggcgtaaaaaatgggataaagtcttaagctgggatttttcaaaaccagaagtaaagtggtttgaaggtgcaaaacttaatattacagagaattgtctggatagacacctagctactagagcagacaaaacagctattctatttgaacccaataatccagatgaagattcgcaacatatcacgtataaagaattgcatgagcgtgtctcaagatttgcaaatgttttaaagtctcaagggattgataaaggcgatcgtgtttgcgtttatttacctatgataccagagctagcggtcgctatattagcttgtgcaagaataggagcaatacactcagtagtgtttgcaggctttagttcaacggcactagctactcgcataaatgattgtgattgtgaaacgataatctgtagtgatggaagttaccgtggtaaaaaaacaatagatcttaaaagtattgtagacgaagctttagaaagttgtcctggtattaaaaagtcatttgtagttcaaagaactcatactgatgtggtgatgaaagaaggacgtgatatatggttgcagcctttgttagataatgcaagtccaacttgtaaagccacagtaatggatgccgaggatccattatttgttttatacacctctggatctacaggtaagcctaaaggaatggtgcataccacagctggttatatggtctatacagcctattcatttaaaaacgtattccagtatagagagaatgacatttattggtgtacggcagatataggttggatcactggtcatagttatatcgtatatgggcctttagcaaatggtgcaacatcagttatgtttgaaggtgtgccatcatatcctgactatggtagattctgggaaattgtagaaaaacataaggtaacacagttttatactgcgcctactgccattagagcattagcaaaagaaaatataagctatgttgataaatatgacttgagctctttaaaagttctaggaactgtaggtgaacctataaatgaagaggcatggcactggtataatgataatgttggaaagaaaaatagccctattgccgatacgtggttccaaacagaaactggcggaatcatgatctcgcctataccatattctacacctaccatacctacatatgctactttaccattgccaggtattcaactagctttaatggatgaaaacggtaaagaaataaaaggtaatcaggttgaaggaagattaactattaaatatccgtggccatctatggcacgttctatttatggtgaccatgaaaggtataaaaacacctattttaatagttttgaaaacatgtattttactggagatggagctttaagagatgctgtaggatactataggattaccggccgtgtagacgatgttattatcataagtggtcacaacttaggaacggcacctatagaagatgcgattaacgaacatcctgctgttgcagaaagtgcaatcgttggttttccacacgatattaaaggaaatgcgctttatgggtatattacattaaaagaagctggagaaggaagagatcacgataatttacgtaaagaaatcaatcaattgattgcagatcgtataggcgctatagcaaagctagataaaatccagtttactcaaggtttgccaaaaactcgtagcggtaaaattatgcgccgtatcttaagaaagatcgcgtgtaatgacacctctaaccttggtgatatcagcacgctattaaatcccgaggtagttaaagatgttatggcaaaagcaattatttaa

SEQ ID NO: 126766 - protein, 636 aa, Flavobacteria bacterium BBFL7
MSNYHIKHLEEYWQVYRKSVRNPENFWEEIAEEHFLWRKKWDKVLSWDFSKPEVKWFEGAKLNITENCLDRHLATRADKTAILFEPNNPDEDSQHITYKELHERVSRFANVLKSQGIDKGDRVCVYLPMIPELAVAILACARIGAIHSVVFAGFSSTALATRINDCDCETIICSDGSYRGKKTIDLKSIVDEALESCPGIKKSFVVQRTHTDVVMKEGRDIWLQPLLDNASPTCKATVMDAEDPLFVLYTSGSTGKPKGMVHTTAGYMVYTAYSFKNVFQYRENDIYWCTADIGWITGHSYIVYGPLANGATSVMFEGVPSYPDYGRFWEIVEKHKVTQFYTAPTAIRALAKENISYVDKYDLSSLKVLGTVGEPINEEAWHWYNDNVGKKNSPIADTWFQTETGGIMISPIPYSTPTIPTYATLPLPGIQLALMDENGKEIKGNQVEGRLTIKYPWPSMARSIYGDHERYKNTYFNSFENMYFTGDGALRDAVGYYRITGRVDDVIIISGHNLGTAPIEDAINEHPAVAESAIVGFPHDIKGNALYGYITLKEAGEGRDHDNLRKEINQLIADRIGAIAKLDKIQFTQGLPKTRSGKIMRRILRKIACNDTSNLGDISTLLNPEVVKDVMAKAII

SEQ ID NO: 126767 - DNA, 1938 bp, marine gamma proteobacterium HTCC2207; identical to SEQ ID NO: 122100
  CDS (1)..(1938): transl_table=11

SEQ ID NO: 126768 - protein, 645 aa, marine gamma proteobacterium HTCC2207; identical to SEQ ID NO: 122101

SEQ ID NO: 126769 - DNA, 2154 bp, delta proteobacterium MLMS-1
  CDS (1)..(2154): transl_table=11
atgcttttacggttttttcttgacctctgctgtctgcgtgctaaatatacccagttcaatcgccctgtcatctccgggcgtcgcacggaaggggaatccgtggttccggcaacaccgtctcatatcatccacctcaaaacttgcaaaggagaattacacatgagtggacaggacagcagaatcgagagcatgttgcaggaaaagcgtctttttaagcccgctgccgccccggccgacaccgtttcggctaaatccatggacgaataccgtcaactctatcagcgttccatggatgaccccgaaggcttttgggccgaacgggccgaggcgatgctgaattgggataagaagtgggacaaagttctcgaagccgatatgcacaagccggaaatcaagtggtttaagggcggcaaactgaacgtttcggtcaactgcctggaccgtcacctggaaaacggtcgccgcgacaaaccggctctgatctggcaaggggagcccgaagacgacagcagggtttacacctaccagcagctccacgaggaggtctgccgttttgccaatgtcctgaaaaaaatgggggtgggccggggtgaccgggtatcggtctacctgccgatgatccccgaactggccatcaccctgctggcctgcacccggatcggcgccatccacagcgtggttttcgccggtttttccgcccagagcctgaaaagccggacccaggattgtcaggccaaagtgctggtcaccgccgatgccgtgctgcgggccggcaagaccatcccgctcaagcccaacgccgatgaggccctggccgagtgccccagcgtcagtaactgcgtggtggtcaaacggggcggcaacgaagtgcagatgcaggaaggtcgtgactcctggtggcacgaagagatcaccgccggcgggctcagcgccgattgtccccccgagagcatggatgccgaggataccatgttcatcctctacacctccggctccaccggcaagcccaaaggggtggtgcacagcaccggcggttatctgacctttgcggcccagacctgccagtgggtttttgatctcaaggataacgacatttactggtgtaccgccgatatcggctggatcaccggccacagttacatcctctacgggccgctggccctgggcgccaccaccctgatgtttgaaggggtaccgagctggcccggccccgaccgcttctggcagatttgcgccaagtacaaagtcagcatcttttacaccgcccccaccgtgatccgggctctgatgcgggaaggcaccgagtggcccggcaagcatgatctctcttccctgcgtctgctgggttcggtgggtgagcccatcaaccccgaggcctggatgtggtatcatgagtacatcggcggcggcaagctgccggtggtggatacctggtggcagaccgaaaccggcggcatcatgatttcggccatgccgcatgccaccccccttaaaccgggctcggccaccctgccgctgcccggggtggacgccacggtgctgcgcgaggatggcagcgaggccggtcccaacgagggcggtcacctggtgatccggcgtccctggccggggatgttgcgcggcgtttttggcgatcctgaacgctataaaaagacctacttctcccgccatgaaggcttttacgaccccgaagacggggctcgtaaggatgaggatggctatttctggatcatgggccggctggatgacgtgatcaacgtctccggccatcgcctgggtaccgccgagatcgaatcggccctggtggcccaccctgaagtatccgaagcggcggtggtcggcgctccccacgaaatcaaggggcagaccatctacgcctatgtttcgctgcgctccggggttcaaccctccgacgaattgcgggccgccctgcgggctcatgtccgcaaggagatcggccccattgccacgccggaatttattcagtttaccgaggggttgcccaagacccgcagcggcaagatcatgcgccggatcctgcgcaagatctccgccggtcagaccggggagcacgattttggtgatacctccaccctggccgatcccgcagtggtcgattccctggtggccggcagtaaagaatacgttaagtag

SEQ ID NO: 126770 - protein, 717 aa, delta proteobacterium MLMS-1
MLLRFFLDLCCLRAKYTQFNRPVISGRRTEGESVVPATPSHIIHLKTCKGELHMSGQDSRIESMLQEKRLFKPAAAPADTVSAKSMDEYRQLYQRSMDDPEGFWAERAEAMLNWDKKWDKVLEADMHKPEIKWFKGGKLNVSVNCLDRHLENGRRDKPALIWQGEPEDDSRVYTYQQLHEEVCRFANVLKKMGVGRGDRVSVYLPMIPELAITLLACTRIGAIHSVVFAGFSAQSLKSRTQDCQAKVLVTADAVLRAGKTIPLKPNADEALAECPSVSNCVVVKRGGNEVQMQEGRDSWWHEEITAGGLSADCPPESMDAEDTMFILYTSGSTGKPKGVVHSTGGYLTFAAQTCQWVFDLKDNDIYWCTADIGWITGHSYILYGPLALGATTLMFEGVPSWPGPDRFWQICAKYKVSIFYTAPTVIRALMREGTEWPGKHDLSSLRLLGSVGEPINPEAWMWYHEYIGGGKLPVVDTWWQTETGGIMISAMPHATPLKPGSATLPLPGVDATVLREDGSEAGPNEGGHLVIRRPWPGMLRGVFGDPERYKKTYFSRHEGFYDPEDGARKDEDGYFWIMGRLDDVINVSGHRLGTAEIESALVAHPEVSEAAVVGAPHEIKGQTIYAYVSLRSGVQPSDELRAALRAHVRKEIGPIATPEFIQFTEGLPKTRSGKIMRRILRKISAGQTGEHDFGDTSTLADPAVVDSLVAGSKEYVK

SEQ ID NO: 126771 - DNA, 1947 bp, Oceanobacter sp. RED65
  CDS (1)..(1947): transl_table=11
atgtccgaagtgaagctacatcccgtgatgtccggttggtcagatcgcgctcatcttgataaagaagattacgaggccatgtatcaggcttccatcaatgacccggaaggattctggcgtgagcatggccaacgcctgcattggtccaagccctacactcaagtaaaagacgttagttacgacgaaaaagatctacacattaaatggttccacgatggcgagttaaacgtctgctataactgcgtagaccgtcaccttgccgataaagcggaacaaaccgccattatttgggaaggggatgatccgaaagacgacaaaaccctcagctatgcggacctgcatttagccgtaagtcgcttcgccaatgttttaaaagatatgggcgtaaaaaagggcgatgtggttacgctttatatgccgatggtggttgaagcttcattagccatgttggcctgcgcgcggatcggcgccatacatagtgtggtctttggtggcttcagtcctgacgccttggcgggtcgcatcgaagactgtaatagtaaattcctaattaccgccgatgaaggtattcgcggtggcaaaaccattccactcaaagccagcgtggacgaagcattaggtaaagccggtaccgagtgtatggaaaaagtactcgtcgttactcgtaccggagctaacgtaaactgggtagaagggcgcgatgtaaaatacgaagatgcgctgaagaatgtaaaagacgaatgcccagtggaagccatgaatgcagaggatccattgtttattctttacacctctggcagtaccggaaaacccaaaggcgtcttgcataccacgggtggctatttggtgtatgccgcctttactcaccaatacgtgtttgactataagcccggtgatatatattggtgtactgctgacgtaggttggattacaggtcatagctatatgatttatggtccactagccaatgctgccaccaccgtcttatttgagggggtacctaattatcccggtgttaaccgcatggcccaagtggtggataaacaccaaatcaatattctttataccgcacctaccgccattcgtgcgctgatggcccatggcgataaagctgtcgaaggtacaagccgtaaaagcctgcaccttttgggtaccgtgggtgaacccatcaacccagaagcgtgggaatggtattttaaaaccatgggtgacgaacgttgtcctatcgttgatacttggtggcaaacggaaaccggcggtattctgatcagcccgttaccgggagcgaccgatttaaaacccggttctgcgacgaaacctatgccgggcgtacaaccggcggtcgtggataacgaaggcaatatactagaaggcgccactgatggtgctctgtgtattctggatagctggcctggacaaatgcgcacggtctatggcgatcatcagcgctttatcgatacctacttcaaaactttcccgggtaaatatttttctggtgatggtgtgcgccgcgatgaagacggttactactggataactggtcgagtagacgacgtactgaatgtatcaggccaccgcatggggactgccgagatcgaaagttcgttagtggcgcaccctaaagtatccgaagccgccgtggtcggttaccctcatgacatcaaaggccaagggatttatgtgtacgtcacgccaatggtcggaacgtcacctagcgaagagctaaatcaagagttaaaagactgggtgcgttcggatattggcgcaatagcgacgcccgacttgattcaatttgcaccgggcttacctaaaacccgaagcggtaaaatcatgcgccgtatcttgcgtaaattagccgccaatgaatgcgacaatttaggcgatacctccacgctggcggatcctagcgtggttgatactttgatgaaagagcgcttaaataaatag

SEQ ID NO: 126772 - protein, 648 aa, Oceanobacter sp. RED65
MSEVKLHPVMSGWSDRAHLDKEDYEAMYQASINDPEGFWREHGQRLHWSKPYTQVKDVSYDEKDLHIKWFHDGELNVCYNCVDRHLADKAEQTAIIWEGDDPKDDKTLSYADLHLAVSRFANVLKDMGVKKGDVVTLYMPMVVEASLAMLACARIGAIHSVVFGGFSPDALAGRIEDCNSKFLITADEGIRGGKTIPLKASVDEALGKAGTECMEKVLVVTRTGANVNWVEGRDVKYEDALKNVKDECPVEAMNAEDPLFILYTSGSTGKPKGVLHTTGGYLVYAAFTHQYVFDYKPGDIYWCTADVGWITGHSYMIYGPLANAATTVLFEGVPNYPGVNRMAQVVDKHQINILYTAPTAIRALMAHGDKAVEGTSRKSLHLLGTVGEPINPEAWEWYFKTMGDERCPIVDTWWQTETGGILISPLPGATDLKPGSATKPMPGVQPAVVDNEGNILEGATDGALCILDSWPGQMRTVYGDHQRFIDTYFKTFPGKYFSGDGVRRDEDGYYWITGRVDDVLNVSGHRMGTAEIESSLVAHPKVSEAAVVGYPHDIKGQGIYVYVTPMVGTSPSEELNQELKDWVRSDIGAIATPDLIQFAPGLPKTRSGKIMRRILRKLAANECDNLGDTSTLADPSVVDTLMKERLNK

SEQ ID NO: 126773 - DNA, 1959 bp, Oceanobacter sp. RED65
  CDS (1)..(1959): transl_table=11
atgaccgaacaagtaatttatccggtgcagccgggtcaaaaaaccaaactcaacaatgcgcaataccaagcgatgtacgcagaatctttgcgtgatcctgaaggattttggcagcagcaagcacagcgtattgaatggaaaaaaccatttagtaaagtaaaagacgtttcatttgcaaaagaagatttgcacattcgttggtttgaagacggcgaactgaatgtcactgagtcgtgcttggatcgtcatttagacaagcacggtgatgatgttgctatcatctgggagccagatgatgaatcgcaagttgctcgccgcattacatatcgagagctttcaaaagaagtcaatcagctcgctaatggtctaagagacttaggtgtgaaaaaaggtgatgtggtgaccatctatatgccaatggtgccagaagcatccatggccatgttagcatgcgctcgtattggtgcgatccatagcgttgtgttcggtggtttctcaccagaagccttggcgggtcgcattgaagatggtaattgtcactatgtgattacggccaatgaaggtgtgcgtgcaggtaaaattgttcctttaaaagagaatgtggatgcggcgattaatctttgtaaaagcgatcaagtaaaaaaagttgtggtgctcaatcacacaggaaacgcatgcactatggaagttggtcgtgatgaggactatcgacagctagtagataaacaagattcagaatgccaagcggaagttatgaatgccgaggatccgttatttattctgtatacatccggtagtactggcaaacccaaaggcgtgctacatacctgtggtggttatcttgtctatgcaagtatgacccatgaatatattttcgattatgagcgcggcgatgtgtattggtgtgcggccgacgtgggttggattaccggacacagttatattgtctatggaccatttgccaatggcgcaactgtggtgatgtacgaaggtgttccgacccatcctgattgtggtcgcgttgctcgcattgtggataaacatcagattaatattttatacatcgctcctaccgcaattcgcgcactaatgagtgatggcgatgaaccagtggaaggggcaagcttagaaagtttgcgtttacttggcacggtaggcgaacccattaacccagaagcttggcgctggtattaccgcacctttggtcgcagccaatgcccgatagtagatacatggtggcagacggaaaccggtgcggcattgatcacaccattgcccggtgccacggatttaaaaccgggttctgccacgcgtcctttctttggtattgaacctgcgctggtggatgagaaaggtaatgaattatccggtgcaaccagtggtaacttgatcatcaaagacagttggccaggacaaatgcgcacagtgtttggtgatcatcagcgctttattgatacttacttctccacattcgaaggtacgtattttactggcgatggtgccaagcgtgacgaagacggttatttctggataaccggtcgtgtcgatgatgtgttgaatgtatctggccaccgtatgggtacggctgaaattgaaagcgctcttgtcgctcacgaagccgtaagcgaagctgcggttgtaggttttcctcatgatgtgaaaggccaaggcatttatgtgtatgtaaccttgaatcatgatgtgcaagccagtcctgccatccgtaacgatttgattaactgggtgcgaaaagaaattggccccatcgcttctcctgatattattcagtgggcaccgggattacctaaaacacgcagtggtaaaattatgcgacgtatattgcgcaagattgccactgatgaatacgatcaattaggtgatatttctacgttggccgatcccagtgttgttgagagtctgattcaagagcatcaagcgttaacagagtctgttgcataa

SEQ ID NO: 126774 - protein, 652 aa, Oceanobacter sp. RED65
MTEQVIYPVQPGQKTKLNNAQYQAMYAESLRDPEGFWQQQAQRIEWKKPFSKVKDVSFAKEDLHIRWFEDGELNVTESCLDRHLDKHGDDVAIIWEPDDESQVARRITYRELSKEVNQLANGLRDLGVKKGDVVTIYMPMVPEASMAMLACARIGAIHSVVFGGFSPEALAGRIEDGNCHYVITANEGVRAGKIVPLKENVDAAINLCKSDQVKKVVVLNHTGNACTMEVGRDEDYRQLVDKQDSECQAEVMNAEDPLFILYTSGSTGKPKGVLHTCGGYLVYASMTHEYIFDYERGDVYWCAADVGWITGHSYIVYGPFANGATVVMYEGVPTHPDCGRVARIVDKHQINILYIAPTAIRALMSDGDEPVEGASLESLRLLGTVGEPINPEAWRWYYRTFGRSQCPIVDTWWQTETGAALITPLPGATDLKPGSATRPFFGIEPALVDEKGNELSGATSGNLIIKDSWPGQMRTVFGDHQRFIDTYFSTFEGTYFTGDGAKRDEDGYFWITGRVDDVLNVSGHRMGTAEIESALVAHEAVSEAAVVGFPHDVKGQGIYVYVTLNHDVQASPAIRNDLINWVRKEIGPIASPDIIQWAPGLPKTRSGKIMRRILRKIATDEYDQLGDISTLADPSVVESLIQEHQALTESVA

SEQ ID NO: 126775 - DNA, 1953 bp, Vibrio sp. Ex25; identical to SEQ ID NO: 122104
  CDS (1)..(1953): transl_table=11

SEQ ID NO: 126776 - protein, 650 aa, Vibrio sp. Ex25; identical to SEQ ID NO: 122105

SEQ ID NO: 126777 - DNA, 1941 bp, Alteromonadales bacterium TW-7
  CDS (1)..(1941): transl_table=11
atgtcacaaagtatctatcctgttcctaatcatataaaagacacaacactcgttgataaaaataaatataattcgatgtaccagcagtcaattaatgaccccgaaagcttctggcgagagcatgggcaacgcctcgattggtctactccttatactaaagttaaaaacacctcttttgataaagggcacatcagtatcaaatggtatgaagatggatttttaaatgcctcttataattgtattgatcgtcatttaaaaaccaaagccgataaaattgcacttatttgggaaggtgatgacccgtcacaaagcgaaaacattacgtatcagcaattacacgacgaagtggccaaatttgctaatggtttaaaaaagctaggtgtgcaaaaaggtgaccgagttgctatttacatgccaatgaccccgcaggctatttacgctatgcaggcgtgtgctcgcattggtgcaattcactcagttgtatttggtggcttttcaccttcggcaatcgctgaccgtattaaagactctggtgctaaagtggtcattacatcagatgaaggccgacgtgcaggtaactgcgtgccattaaaagcgaatgttgatgaagccgtattacaagattctgtaaccactattgagcacgtgattgtacatcagttaacaggtggtgaagttgattggcacgatcacgatatttggtggcacgacttagtcgctgacttaccagcacagtgtgaaccagagccaatgaacgcagaagatccgctatttattttgtatacatcaggttcaacaggccaacctaaaggggttgtacacacaactggcggttacttagtttatgcgtcaatgactcacgaatacgtatttgatttacaagatgatgatgtgtattggtgtagtgccgatgtaggttggatcactgggcacagttatattgcatacggaccgctggtgaatgggtgtacacaagttgtatttgaaggcgtacctacatacccaagcgcaggaagaatgggtgaggtggttgataagcatggtgtcactattttatatactgcgcctacagcgattcgagcattaatggccaaaggtgatgagcctaccgcaacttcacatcgtgatagtttacgtattttggggtccgtaggtgagccaattaacccagaagcatggaactggtactacgagagtataggtaaatctaattgtccaattgtggatacctggtggcaaacagaaacaggtggcattatgatcacgccactacctggtgctacagacacgaaaccgggttctgcaacccatccattttttggtattgctccggcactttatgatgcagagggaaatacactagagggcgcggttgacggtaatttagttattttagatagctggccatcacaagcgcgtaccgtttatggcgaccatgagcgttttgaacaaacttactttagtgcataccctggcgtttactttaccggtgatggttgtcgtcgtgatgaagatagctattactggataacagggcgtgttgatgatgtactcaatgtatcggggcaccgtttgggcactgctgaaatagaaagcgcattagttgcccatgaagctgtggcagaggctgcagtagtaggttacccgcataatatcaaaggccaaggcatttatgtttatattacgcctaacgaaggggtgacggtgagtgatgagcttacaacggcggttcgtaattgggttcgtaaagagctcagcccaatagcctctccagatatgattcaatggtctccgggtttacctaaaacacgctcaggtaaaataatgcgtcgaattttgcgcaaaattgctgccaatgagcacgagcaattgggtgatacgtcaacccttgctgatccgtcggtagtggatgaacttatcgataatcgattaaatcgataa

SEQ ID NO: 126778 - protein, 646 aa, Alteromonadales bacterium TW-7
MSQSIYPVPNHIKDTTLVDKNKYNSMYQQSINDPESFWREHGQRLDWSTPYTKVKNTSFDKGHISIKWYEDGFLNASYNCIDRHLKTKADKIALIWEGDDPSQSENITYQQLHDEVAKFANGLKKLGVQKGDRVAIYMPMTPQAIYAMQACARIGAIHSVVFGGFSPSAIADRIKDSGAKVVITSDEGRRAGNCVPLKANVDEAVLQDSVTTIEHVIVHQLTGGEVDWHDHDIWWHDLVADLPAQCEPEPMNAEDPLFILYTSGSTGQPKGVVHTTGGYLVYASMTHEYVFDLQDDDVYWCSADVGWITGHSYIAYGPLVNGCTQVVFEGVPTYPSAGRMGEVVDKHGVTILYTAPTAIRALMAKGDEPTATSHRDSLRILGSVGEPINPEAWNWYYESIGKSNCPIVDTWWQTETGGIMITPLPGATDTKPGSATHPFFGIAPALYDAEGNTLEGAVDGNLVILDSWPSQARTVYGDHERFEQTYFSAYPGVYFTGDGCRRDEDSYYWITGRVDDVLNVSGHRLGTAEIESALVAHEAVAEAAVVGYPHNIKGQGIYVYITPNEGVTVSDELTTAVRNWVRKELSPIASPDMIQWSPGLPKTRSGKIMRRILRKIAANEHEQLGDTSTLADPSVVDELIDNRLNR

SEQ ID NO: 126779 - DNA, 1938 bp, marine gamma proteobacterium HTCC2143; identical to SEQ ID NO: 122106
  CDS (1)..(1938): transl_table=11

SEQ ID NO: 126780 - protein, 645 aa, marine gamma proteobacterium HTCC2143; identical to SEQ ID NO: 122107

SEQ ID NO: 126781 - DNA, 1860 bp, marine gamma proteobacterium HTCC2080
  CDS (1)..(1860): transl_table=11
atgagcgaccaaccctcacacgatgatctgtggactgatgcagcccgtgcaatcgactggttcacgccctattcatctattctggacgactcaagacaaccgttgtatcgctggtttccagatgccacctgcaacacttcgtacaactgccttgaccgtcacgtagccaatggccggggtgagcagaccgcaatcatttacgacagcccggttactgatacggtacagcacattagctaccgcgagttgctagatcgagtatcccgcatggctggcgcactcgataagttgggcatcagcaaaggcgaccgggttgttatctacatgcccatggtaccggaggccgcagtggccatgcaggcctgcgcccgcctaggcgccgtccactcagtggtattcggcggtttcgccgccaatgaactggcctcaagaattgatgattgcgccccaaaactgatcgtctctgcctcctgtggcatcgagccgagcggtctggtgccctacaaacctttgctcgaccaggcactagagctttcccaacacaaacctaagcacaccatcattctgcagcgccaacaactcaccgcagagctgctccccgggcgggacctggactggacagagatggagaccttcgcagaaccggtcaacgccacggcagtcgcgtcgaccgaccccctttacatcatttacacatccggcacgacaggccagccaaaaggtgttgtgcgagataacggcggacatctggttgctctcaactggagcatgggaaacatctacgatatcaatcccggcgacgtattttgggcggcatcagacatcggctgggttgttgggcattcatatatcgtctacggcccgctgatacggggagcgacggcagtgatgtttgagggcaagcccgtgggtaccccagatgccgccacctattggcgcttgatcgagcgccacaaggtcaaggctatgttcaccgcacccacggccattcgcgccattaagcgggaggaccctgacggcaaactcctcaaggactacgatttgaccagcctcgagaccctgttcctcgctggcgaaagagccgaccccgacaccatccagtgggcagaaaatcatttgcagcgcccgataatcgaccattggtggcaaaccgaactaggctggcctgcagtggctaactgtgccggcaccggcctttttacagttaaatacggctcgtcggggaaggccgtgcgcgggttccagatcgaagtattggacgagagcggtcagccactaccccgagatactctgggcgcccttgcactgaaactaccgctacctccgggcacgctaccgaccctttggaacaatgatgaaggttttgtcgaaaagtatctcaccgagttccccgagtattacagcaccggcgatgccggcttcatcgacggggaggactatgtgcatattatgagtcgaaccgacgatgtcataaacgtagccggccaccgtctgtctaccggacaaatggaagaggtcattaccgaccatccggatgtagcagagtgtgcggttttcgggattaacgacgagctcaagggtcaggtaccactggctttgctgatcctcaatcagggcactgccaagaaggccacacaaattgaaagcgaagttatcgcctcggtgcgtgaggtgatcggacctgtggcagccctgaagcgcgtttacacagtgaatcgtctgccgaagacccgctccggaaaaatcctccgagcgacattgcagaaaatagccaatggcgaaccctataagacacccgccactattgatgatccagttattctcgatgagattcagtctgaaatcgaagtgcgaggctga

SEQ ID NO: 126782 - protein, 619 aa, marine gamma proteobacterium HTCC2080
MSDQPSHDDLWTDAARAIDWFTPYSSILDDSRQPLYRWFPDATCNTSYNCLDRHVANGRGEQTAIIYDSPVTDTVQHISYRELLDRVSRMAGALDKLGISKGDRVVIYMPMVPEAAVAMQACARLGAVHSVVFGGFAANELASRIDDCAPKLIVSASCGIEPSGLVPYKPLLDQALELSQHKPKHTIILQRQQLTAELLPGRDLDWTEMETFAEPVNATAVASTDPLYIIYTSGTTGQPKGVVRDNGGHLVALNWSMGNIYDINPGDVFWAASDIGWVVGHSYIVYGPLIRGATAVMFEGKPVGTPDAATYWRLIERHKVKAMFTAPTAIRAIKREDPDGKLLKDYDLTSLETLFLAGERADPDTIQWAENHLQRPIIDHWWQTELGWPAVANCAGTGLFTVKYGSSGKAVRGFQIEVLDESGQPLPRDTLGALALKLPLPPGTLPTLWNNDEGFVEKYLTEFPEYYSTGDAGFIDGEDYVHIMSRTDDVINVAGHRLSTGQMEEVITDHPDVAECAVFGINDELKGQVPLALLILNQGTAKKATQIESEVIASVREVIGPVAALKRVYTVNRLPKTRSGKILRATLQKIANGEPYKTPATIDDPVILDEIQSEIEVRG

SEQ ID NO: 126783 - DNA, 2034 bp, marine gamma proteobacterium HTCC2080; identical to SEQ ID NO: 122108
  CDS (1)..(2034): transl_table=11

SEQ ID NO: 126784 - protein, 677 aa, marine gamma proteobacterium HTCC2080; identical to SEQ ID NO: 122109

SEQ ID NO: 126785 - DNA, 1965 bp, Candidatus Desulfococcus oleovorans Hxd3
  CDS (1)..(1965): transl_table=11
atgaccgagtttaaaaaagcctatgacgcccatctggaagagtttcaaaaaaacgcccatatcaagggcatggaggcgtatcagcggctctacagggaatccctggaaagtcccgataccttctgggcacgccaggccgaccattacctcacctggtataaaaagtgggacaccgtgctggactatgatttttccgaggcccggattcagtggttcggcggtggccggctgaatgcctcattcaactgcctggaccgtcacctggaaaccagggaagaggcggtggcttactactgggagggggatgatacggcccgggctcaggcctatacctacggcgagctctatcgccgggtcaaccggtttgccgcggccctgcgccacaagggggttaaaaagggggaccgggtcattatttatctgcccatgatcatcgagctgcctgtggccatgctggcctgcgcccgcatcggcgccgttcacagcgtggtgttcggcggtttcagcgccgaggccattgccaaccgcatcaacgactgcggagccaaagtggtgattacggccgacggcggtttccggtcgggcaaacccgtggccctgaaaaagaacgtggacgaggcgttgaaaaagtgcccggcggtaaaaaccgtgattgtggtcaaccatgtggactccgggatttttcttacgcccgggctggagcactggtggcatgaactgatcgcgctccccggcctggccgacgaggtggagccggagcccatggacgccgaggacccgctgtttatcctttacaccagcggcagcaccggcaagcccaagggcgtggtccacacccacggcggatatcttctttacgcggccatgaccatggagtacgtgtttgacctgcacccgggcgatatcttctggtgcaccgccgacatcgggtggatcaccggccacagctatattctttacggcgccctggtcaacggcgccaccagcgtgatgttcgagggcgttcccagctatcccgattttgaccggttctgggccattgtggaaaaataccgggtcaacaaattttataccgcgcccacggccatccgatccctggccagggagggcgaggcccatgtgaagaagcacgatctttccagcctgatgctgctgggcacggtgggcgagcccatcaaccccgaggcctggcgctggtatcaccaccatatcggcagggactggtgccccgttatcgacacctggtggcagaccgagacagggggccacatgctcacgcccctgcccggcgtagcgcctgtcaagcccggttcatgcgcctttccctttttcggtatcgacccggtgatcatagacgatgccggagagccggtcaaacatccggatgaagaagggcttctgtgcattcgcaagccctggcccggcatggcccgcacggttttcggtgatcatgagcggtttatctccacctatttcagccaggctccgggcatgtatttcaccggcgacgcggcccgaaaagatgaggacggctacttctggatcatcggccgcattgatgacgtgatcaatgtatccggccaccgcctgggcacggccgaactggagtcggccctggtgctgcacccccacgttgccgaggccgcagtggtgggctttccccacgccatcaaagggcagggcatctatgcctttgtgattctcaagacaggcagggagccgtccgatgcgctgaaaaaggagctggtggcccaggtgcgccgggagatcggccccattgccaccatcgacgtggtgcagtgggccgaaggcctgcccaagacccgcagcggaaagatcatgcgccgcattctcaaaaagatcgcggccaataagctcgatgaactgggcgatacctccactattgccgatgaatcggtgattgaaaaactgattaaggataaggtggacgtttccaaattatga

SEQ ID NO: 126786 - protein, 654 aa, Candidatus Desulfococcus oleovorans Hxd3
MTEFKKAYDAHLEEFQKNAHIKGMEAYQRLYRESLESPDTFWARQADHYLTWYKKWDTVLDYDFSEARIQWFGGGRLNASFNCLDRHLETREEAVAYYWEGDDTARAQAYTYGELYRRVNRFAAALRHKGVKKGDRVIIYLPMIIELPVAMLACARIGAVHSVVFGGFSAEAIANRINDCGAKVVITADGGFRSGKPVALKKNVDEALKKCPAVKTVIVVNHVDSGIFLTPGLEHWWHELIALPGLADEVEPEPMDAEDPLFILYTSGSTGKPKGVVHTHGGYLLYAAMTMEYVFDLHPGDIFWCTADIGWITGHSYILYGALVNGATSVMFEGVPSYPDFDRFWAIVEKYRVNKFYTAPTAIRSLAREGEAHVKKHDLSSLMLLGTVGEPINPEAWRWYHHHIGRDWCPVIDTWWQTETGGHMLTPLPGVAPVKPGSCAFPFFGIDPVIIDDAGEPVKHPDEEGLLCIRKPWPGMARTVFGDHERFISTYFSQAPGMYFTGDAARKDEDGYFWIIGRIDDVINVSGHRLGTAELESALVLHPHVAEAAVVGFPHAIKGQGIYAFVILKTGREPSDALKKELVAQVRREIGPIATIDVVQWAEGLPKTRSGKIMRRILKKIAANKLDELGDTSTIADESVIEKLIKDKVDVSKL

SEQ ID NO: 126787 - DNA, 2091 bp, Pseudomonas putida GB-1
  CDS (1)..(2091): transl_table=11
atgcccgcgccagagcgctctgccggaacgggcgtaccaaattactaccaacgtcgaatggcttttgtcgctctggtacagttacaaacggttccatacaaaaacaactattacaccgaggtaacacagatgagtgcggctccactgtatcccgttcgtcccgaggttgcggccactaccctgaccgacgaggccacctacaaggccatgtaccagcagtcggtgatcaacccggacggcttctggcgcgagcaggcccagcgcatcgactggatcaagccgttcaccaaggtcaagcagacctccttcgacgaccaccatgtcgatatcaaatggttcgccgacggcactctgaacgtttcctccaactgcctggaccgccaccttgaagagcgcggcgaccagttggccatcatctgggaaggcgacgacccttccgaacaccgcaacatcacctaccgcgaactgcacgagcaggtctgcaagttcgccaacgccctgcgcggccaggacgtgcaccggggtgacgtagtcaccatctatatgccaatgatccccgaggctgtggttgccatgctggcctgtgcccgtatcggtgcgattcattcggtggtgtttggcggtttctcgcccgaggcgctggccggccgtatcatcgactgcaagtccaaggtggtgatcaccgccgatgaaggcgtgcgtggcggccgtcgtaccccgctcaaggctaacgtcgacctggcactgaccaaccctgaaaccagcagtgtgcagaaaatcatcgtgtgcaagcgcaccggtggcgacattgcctggcaccaacaccgcgacatctggtacgaagacctgatgaaagtggcctccagccactgcgcgccgaaagagatgggtgccgaagaagcgctgttcatcctttatacctccggctccaccggcaaaccgaagggcgtgctgcacaccaccggcggttacctggtgtacgcggcactgacccatgagcgcgttttcgactaccgcccgggcgaggtgtactggtgcaccgccgacgtcggttgggtcaccggccacagctacatcgtctacggcccgctggccaacggcgccactaccttgctgttcgagggcgtgcctaactacccggacatcacccgcgtgtcgaagatcgtcgacaaacacaaggtcaacatcctctacaccgcgccaactgccatccgcgccatgatggccgaagggcaagcggctgtagagggagcagacggctccagcctgcgccttctgggttcggtgggtgagccgatcaacccagaagcctggaactggtactacaagaccgtaggcaaggagcgttgcccgatcgtcgacacctggtggcagactgaaaccggcggcattttgatcagcccgctgcctggcgccaccggcttgaaaccggggtcggcaacccgtccgttctttggtgtggtgccggcattggtcgataacctgggcaacctgatcgaaggtgccaccgaaggtaacctggtaattctggactcctggccgggccagtcgcgttcgctgtacggcgaccacgaccgcttcgtcgacacctacttcaagaccttccgtggcatgtacttcaccggcgacggtgcgcgccgtgacgaggatggctactactggatcaccggccgtgtggacgacgtgctcaacgtctccggccaccgcatgggcactgccgagatcgaaagtgcgatggtcgcgcatacgaaggttgccgaggccgcagtggttggcgtgccgcacgacatcaaggggcagggcatctatgtctatgtcaccctcaatgccggtatcgaggccagcgagcaattgcgtctggagctgaagaactgggtgcgcaaggaaatcggcccgatcgcttcgccggatgtgatccagtgggcgcctgggttaccgaagactcgctcgggcaagatcatgcgtcggatcctgcgcaagatcgccaccggtgagtacgatgccctgggcgatatctcgaccttggccgaccctggcgtggtgcagcacctgatcgacactcataaggcgatgaacctggcttctgcctga

SEQ ID NO: 126788 - protein, 696 aa, Pseudomonas putida GB-1
MPAPERSAGTGVPNYYQRRMAFVALVQLQTVPYKNNYYTEVTQMSAAPLYPVRPEVAATTLTDEATYKAMYQQSVINPDGFWREQAQRIDWIKPFTKVKQTSFDDHHVDIKWFADGTLNVSSNCLDRHLEERGDQLAIIWEGDDPSEHRNITYRELHEQVCKFANALRGQDVHRGDVVTIYMPMIPEAVVAMLACARIGAIHSVVFGGFSPEALAGRIIDCKSKVVITADEGVRGGRRTPLKANVDLALTNPETSSVQKIIVCKRTGGDIAWHQHRDIWYEDLMKVASSHCAPKEMGAEEALFILYTSGSTGKPKGVLHTTGGYLVYAALTHERVFDYRPGEVYWCTADVGWVTGHSYIVYGPLANGATTLLFEGVPNYPDITRVSKIVDKHKVNILYTAPTAIRAMMAEGQAAVEGADGSSLRLLGSVGEPINPEAWNWYYKTVGKERCPIVDTWWQTETGGILISPLPGATGLKPGSATRPFFGVVPALVDNLGNLIEGATEGNLVILDSWPGQSRSLYGDHDRFVDTYFKTFRGMYFTGDGARRDEDGYYWITGRVDDVLNVSGHRMGTAEIESAMVAHTKVAEAAVVGVPHDIKGQGIYVYVTLNAGIEASEQLRLELKNWVRKEIGPIASPDVIQWAPGLPKTRSGKIMRRILRKIATGEYDALGDISTLADPGVVQHLIDTHKAMNLASA

SEQ ID NO: 126789 - DNA, 1890 bp, Pseudomonas putida GB-1
  CDS (1)..(1890): transl_table=11
atgagctaccagcacagctacgcccattccatttccgaccctgccgctttctgggcggaacaggccgcacacctggcctggcaccgcaagcctgccctgactttgcaagaccacgccgacggtacccatagttggttcgcagacggccgccttaacagctgctacctggccctcgattaccagatcgagcaaggccgtggcgagcaattggcgctgatctacgattcgccggtgacgggcgtgcagcaggcgtatacctataaccagttgcgcgatgaagtggcgcgcctggctggcttgctgcgccagctgggggtgagcaagggcgatggcgtgatcatctacatgcccatggtgccgcaggcagccatggccatgctggcctgtgcgcggattggcgcggtgcattcggtggtgttcggtggctttgccgccaacgaactggctttgcgcatcgatgatgcccggcccacgctgctgctgacggcctcctgcgggctggagttcgatcgcgtgattgcgtacaagccgctggtcgaccgcgccctgcaactggcccggcaccaaccgcgcaatgtgctggtgctgcagcggccacaggtgcaggccgacctgcagccaggccgcgacctggactggcaggcggccttgaccggcgccgagccggtggccccagtcgagttggatgccggcgacccgctgtacatcatgtatacctcgggtaccaccggcaaacccaaaggcatcgtgcgggagaacggtggcaatgccgtggcgctgtgctatgccatgcgccatatctatggcatgcaggccggcgatgtgtggtggggcatatctgatgtgggctgggtggtcggccattcgctgatcgtttacgggccgttgatgagcggctgtaccactgtgttctacgaaggcaagccgatccgcaccccggatgcctcggcctactggcgggtggtggagcaatacaaggtcaatgcgttgttctgtgcgcccaccgccatgcgtgccatccgcaaggaagacccggaaggcgagctgatccgcaaacatgacctcagctcgctgcgccaattgttcctggcgggtgagaagctcgattccagcacccacgaatggctggaacgggtcagtggcaagcctgtgcacgaccactggtggcagaccgagaccggctggccggtcactgcgccgtgtgtcgggctggaggggagcgccgcgaagccgggatcgagcaaccgggcggtacccggctacaacgttcgcgtgctggacgacgaaggccgcttgctcgggcccaaccatcagggttcgatcgtgatcgccctgccattgccacctggttgtagccagacactgtggggcgaccacgagcgctacctgcaggcgtacctgcgcacctacccggggtattaccacaccggtgacggcggctacctggacgatgacggtttcgtctacatcatggggcgcaccgatgacgtgatcaatgtgtcggggcaccggttgtctaccggcgaaatggaggacctggtggcctgccacccggcggtggccgagtgtgcggtggttggcgtgcacgatgaaatcaaggggcaagtgccgttggcacttgttgtgctcaaggacggcgagggcattgccgaggcgcaactgctggtggacctggtgggcagtgtgcgcgaggcgattggcccgctggcctgtttcaaccgggttcggttggtgaagcggctccccaagacccgctcggggaaaattttgcgtgcggtgctgcgcaagatcgccgacgggcaggactatgcgccgccttcgaccctggatgacccggcggtgctgggggagatcgaggcggtgctggcggatttacccagagccggttga

SEQ ID NO: 126790 - protein, 629 aa, Pseudomonas putida GB-1
MSYQHSYAHSISDPAAFWAEQAAHLAWHRKPALTLQDHADGTHSWFADGRLNSCYLALDYQIEQGRGEQLALIYDSPVTGVQQAYTYNQLRDEVARLAGLLRQLGVSKGDGVIIYMPMVPQAAMAMLACARIGAVHSVVFGGFAANELALRIDDARPTLLLTASCGLEFDRVIAYKPLVDRALQLARHQPRNVLVLQRPQVQADLQPGRDLDWQAALTGAEPVAPVELDAGDPLYIMYTSGTTGKPKGIVRENGGNAVALCYAMRHIYGMQAGDVWWGISDVGWVVGHSLIVYGPLMSGCTTVFYEGKPIRTPDASAYWRVVEQYKVNALFCAPTAMRAIRKEDPEGELIRKHDLSSLRQLFLAGEKLDSSTHEWLERVSGKPVHDHWWQTETGWPVTAPCVGLEGSAAKPGSSNRAVPGYNVRVLDDEGRLLGPNHQGSIVIALPLPPGCSQTLWGDHERYLQAYLRTYPGYYHTGDGGYLDDDGFVYIMGRTDDVINVSGHRLSTGEMEDLVACHPAVAECAVVGVHDEIKGQVPLALVVLKDGEGIAEAQLLVDLVGSVREAIGPLACFNRVRLVKRLPKTRSGKILRAVLRKIADGQDYAPPSTLDDPAVLGEIEAVLADLPRAG

SEQ ID NO: 126791 - DNA, 1926 bp, Pseudomonas putida GB-1
  CDS (1)..(1926): transl_table=11
atgactagctacctgcaggcctatgcccacgctgccgacgaccccgaaggtttctggcgcgaacaggccgccgcactggactggcatcgctttccgcaacagatcttcactgcccaggctgatggcagcggccgctggttcgccgatggccaactgaacacctgccacttggccgtggaccgccacgtcgcggatggcgcaggcgagcgctgcgccatcctttacgactcacccgccacaggcgtgcaggagcgcatcagctaccagcagctgcaagcgcgcgtggcccggtgcgccggtatgctgcgcgcccttggggtggggcgtggtgaccgagtgatcatctacatgccgatgatcccccaggcgctcgtcggcatgctggcctgtgcgcggttgggtgccgtgcattcggtggtgtttggcggtttctccgccgccgagctggcggtgcgaatccgcgatgcccagcccaaggtgctgctcagcgccagctgcggcatcgagtacgaccgggtggtgccctacaagccgctgctcgaccaggccctgcaactggccaacgggcatagcccgcacctggtgatcgagcaacgcgaacaggccctggccccgttgcacggcccccgcgagcacgactggcaacaactgcaggcccaagccgaagccgtacctgcggtgccagtgaatgccactgacccgctgtacatcctctatacctcgggcaccacgggtaaacccaaaggagtagtgcgtgaccacggcgggcatgccgtggcgctcaacttcagcatgcaggccctgtacgacgcacaccccggcgaggtgttctgggccgcctcggacatcggctgggtcgtgggccattcgtacatcgtctatgccccgctgatccgtggctgcaccaccttgctgtacgagggcaagccggtgcgcacgcccgacgccggggcgttctggcgggtgatcgccgaacaccaggtgaatgtgttcttcactgcccccactgccttccgcgccatcaagcgcgaagacccgcaggtacagctggccgccggtcgcgacttgtcctgcctgaaggccgtgtacgtggccggcgagcgcctggacccgccaaccagccaatggctgcaggggtttctgccctgcccggttgtcgaccactggtggcagaccgagaccggctgggcgattgccggcaacccgcgcgggctggatgacttgccgatgaagaccggctcggccagcgtaccgatgccgggctaccggctggacattctggacgacgaaggccagcctgtcccctgcaaccagccgggcaacatcgccctgcgcctgccattgccgcccggcaccctgaccaccctgtggggcgacccgcagcgctttgccgacagctacctgagcagcttccccggctactattgcagcggcgacggcggctacctggacgaagacggctacctgttcgtcatgggccgggtggacgatgtgatcaacgtggccgggcaccggctgtccagcggtagcctggaagaagccctgggcgagcacccggccgttgccgagtgcgcggtggtggcactggccgaggagctcaagggcgaggtgccggtggggttcgtggtgctcaagcacggccagcagcccgacccggcgctgctggaacgcgaactggtcgccagggtgcgcgatgcggtcggcgctgtcgcttcgctacggcgggtgttcatcctcaagcgcctgcccaagacccgctctggcaagattctgcgcaagaccctgcgcagcctggccgccaaccccgaagtggccatgcctgcgaccatcgaagacccggccgtgctggatgaagtgcgcgcggtgttcgaacaggcaggttgctatgacgccgcccagggacgcaagactgccaccgggcactga

SEQ ID NO: 126792 - protein, 641 aa, Pseudomonas putida GB-1
MTSYLQAYAHAADDPEGFWREQAAALDWHRFPQQIFTAQADGSGRWFADGQLNTCHLAVDRHVADGAGERCAILYDSPATGVQERISYQQLQARVARCAGMLRALGVGRGDRVIIYMPMIPQALVGMLACARLGAVHSVVFGGFSAAELAVRIRDAQPKVLLSASCGIEYDRVVPYKPLLDQALQLANGHSPHLVIEQREQALAPLHGPREHDWQQLQAQAEAVPAVPVNATDPLYILYTSGTTGKPKGVVRDHGGHAVALNFSMQALYDAHPGEVFWAASDIGWVVGHSYIVYAPLIRGCTTLLYEGKPVRTPDAGAFWRVIAEHQVNVFFTAPTAFRAIKREDPQVQLAAGRDLSCLKAVYVAGERLDPPTSQWLQGFLPCPVVDHWWQTETGWAIAGNPRGLDDLPMKTGSASVPMPGYRLDILDDEGQPVPCNQPGNIALRLPLPPGTLTTLWGDPQRFADSYLSSFPGYYCSGDGGYLDEDGYLFVMGRVDDVINVAGHRLSSGSLEEALGEHPAVAECAVVALAEELKGEVPVGFVVLKHGQQPDPALLERELVARVRDAVGAVASLRRVFILKRLPKTRSGKILRKTLRSLAANPEVAMPATIEDPAVLDEVRAVFEQAGCYDAAQGRKTATGH

SEQ ID NO: 126793 - DNA, 1935 bp, Pseudomonas putida GB-1
  CDS (1)..(1935): transl_table=11
atgttcgatatccgcaactatccccaggctctggccgtcagccaatccgccacccccacccccgacgaataccatcgcctgtaccgccagtcggtcgacgatcctgacaccttctgggccgagcaggccaaacgcctggactggatcaagccctggtcgagcgtgcagcaatgcgacctgaataccggcaaggcccgctggttcgacggtgcacagctcaacgtcagctataactgcatcgaccgccatctagcccagcgcggcgagcagacggccctgctgtgggaaggtgacgacccaaaagactccaaggccatcacttaccgcgagctgcaccgccaggtctgccgcctggccaatgcaatgaaggcgcgcggggtcaagaaaggcgaccgggtgtgcatctacatgccgatgatccccgaagccgccttcgccatgctcgcctgcacccgcatcggggccatacattcggtagtgttcggcggtttttcccccgacgccctgcgcgaccgcatcctcgacgccgactgccgcaccgtgatcaccgccgatgagggcgtgcgtggcggcaagcgtgtcccgctgaaacagaacgtcgacaaggccttggccagctgcccagcggtcagcagcgtgttggtggtgcgccgcaccggcggcgatgtcgcctgggccgaaggccgcgacctctggtaccacgaagtaacggaaaaggccggcgacgactgcccccccgagccgatggcggccgaagaccccctgttcatcctctatacctccggcagcaccggcaaaccaaaaggcgtgctgcacaccaccggcggctacctgctgcaagcgacaatgaccttcaaggtagtgttcgactaccgtgacggcgaggttttctggtgcactgccgatgtcggctgggttaccggccacagctacatcgtctatggcccgctggccaatggcgccatctcgctgatgttcgaaggcgtacccaactacccggacacttcacgcttctggcaggtggtggacaagcaccaggtaaacattttctacaccgccccgaccgccctgcgcgcattgatgcgcgagggctccgcgccgctgcagggcacctcgcgcaagagcctgcgcttgttgggcagcgtcggcgagccgatcaaccctgaagcctgggaatggtatttcgaggcggtcgggcagaagcgctgccccattgtcgatacctggtggcagaccgaaaccggcggcatcatgctcaccccgctgcccggctcgcaggcactcaaacccggttgcgccacacagcccatgtttggcgtgcaaccggcgctactggacgaaaaaggcaaactgatcgaaggccccggcgctggccttctggtcatcaaggccagctggcccgggcagatccgtagcgtctatggcgaccatcagcgcatggtcgacacctacttcaaacccatgcccggctactacttcaccggcgacggtgcccgccgcgacgccgatggcgactactggatcaccgggcgcatcgacgatgtgatcaacgtgtccgggcaccgcataggcaccgccgaagtagaaagcgcactggtgctgcatgacagcgtcgccgaggcagccgtggtcggttacccccacgacctcaagggccagggcgtctacgccttcgtcacgaccatgaatggcgtgacgccagacgacacgctaaaggccgagctgctggcactggtaagcaaggaaatcggcagtttcgccaaacccgagctgattcagtgggcgccggcgctacccaagacgcgctcaggcaagatcatgcggcgtatactgcgcaaaatcgcctgcaacgagctggacaacctgggcgatacctcgacccttgccgaccccagcgtggtacagggcctgatcgacaaacgccttaaccagtaa

SEQ ID NO: 126794 - protein, 644 aa, Pseudomonas putida GB-1
MFDIRNYPQALAVSQSATPTPDEYHRLYRQSVDDPDTFWAEQAKRLDWIKPWSSVQQCDLNTGKARWFDGAQLNVSYNCIDRHLAQRGEQTALLWEGDDPKDSKAITYRELHRQVCRLANAMKARGVKKGDRVCIYMPMIPEAAFAMLACTRIGAIHSVVFGGFSPDALRDRILDADCRTVITADEGVRGGKRVPLKQNVDKALASCPAVSSVLVVRRTGGDVAWAEGRDLWYHEVTEKAGDDCPPEPMAAEDPLFILYTSGSTGKPKGVLHTTGGYLLQATMTFKVVFDYRDGEVFWCTADVGWVTGHSYIVYGPLANGAISLMFEGVPNYPDTSRFWQVVDKHQVNIFYTAPTALRALMREGSAPLQGTSRKSLRLLGSVGEPINPEAWEWYFEAVGQKRCPIVDTWWQTETGGIMLTPLPGSQALKPGCATQPMFGVQPALLDEKGKLIEGPGAGLLVIKASWPGQIRSVYGDHQRMVDTYFKPMPGYYFTGDGARRDADGDYWITGRIDDVINVSGHRIGTAEVESALVLHDSVAEAAVVGYPHDLKGQGVYAFVTTMNGVTPDDTLKAELLALVSKEIGSFAKPELIQWAPALPKTRSGKIMRRILRKIACNELDNLGDTSTLADPSVVQGLIDKRLNQ

SEQ ID NO: 126795 - DNA, 1947 bp, Marinobacter sp. ELB17
  CDS (1)..(1947): transl_table=11
atgactgataagcaggtgtatccggtaaccccggaagtggcaaaacacgcgctgattaataaagaccagtaccaggcgatgtacaagcagtccatcgaaaacccagatcagttctgggccgagcatggcaagcgcgtagactggatcaagccgtttaccaaggtcaaaaacaccacttatgattacgatgcgttgtccatcaaatggtttgaagatggcgagctgaacgcttctgtcaactgcctggaccgccatctggaaagccgtggtgaccagaccgccatcatttttgaaggcgatgacccgtcggactcccgcaacgtcagctaccgcgaactgcacgagcaagtgtgcaaatttgccaacgtgctgagaagccagggggttaaaaaaggcgatgttgtcaccatttacatgccgatgatcgtcgaaaccgccgtggttatgttggcgtgtacccgtattggcgctatccattcggtggtctttggcggcttttcaccagaagcacttggctcccgagtggttaacggcaaatccaacatcgtgattaccgccgatgaaggccttcgcgccggccgcaaaattccgcttaaaaagaacgtcgacgcggcgcttaaaaacgacgatcaccacacggtaaaaaccgttattgtggtcactcgtaccggcggcgatattgcttggacagaaagccgcgaccagcgctacgaagacctgatggccaatgcttcggcagactgcgagcccgagcccatgaacgccgaagacccgctgttcatgctgtacacctccggttctaccggcgagcccaagggtgtgttgcacaccaccggtggctacttggtgtacgcctccatgacccaccaatacatttttgattatcacgatggtgatgtgtactggtgcaccgccgacttcggttgggttaccgggcacagttatattctgtatggccccttggtcaacggcgccactacgctgctgtttgaaggtgtgcccaactacccggacagctcgcgcatgggccaggtggtcgacaagcaccaggtgaacatcctgtacaccgcgcccacagccattcgagcactgatggcccaaggcgaaagttgcatggatggcaccaaccgcagcagcctgagaattttgggttcggtaggtgaacccatcaaccctgaagcctggaagtggtaccaccgggtcatgggcaatggcgaatgcccgattgttgatacctggtggcaaaccgaaaccggcggtatcctgatctcccctctgccgggcgctaccgatttgaaaccgggctctgcgaccgtgccattcttcggtgttcagccggccctggtagacgccgaaggcacgttgctggaaggcgaagccgaaggcaatctggtgattatggacagctggcccgggcagatgcgaaccatttatggcgaccatgaacgtttcattcagacctacttcagcgcttacaaaggcatgtactttaccggtgacggtgcccgccgtgacgccgatggtgactactggattaccggcagggttgacgacgtgctgaacgtatctggccaccgccttgggaccgctgaggtggaaagtgccatggtgtcccatccgaaagtagcggaagcggcggtggtaggttatccccatgacatcaaagggcaaggcatctacgtgtatgttacgttgatgcagggcgaagagccgaccgacgagttgaaaaaagagctggtacaatgggtgcgcaaagaaattggccctattgcctccccggacgttattcagtgggcaacgggcttgccaaaaacccgttcaggcaagattatgcgccgcattttgcgtaaaattgctgccaacgagtacgatcagttgggagacacgtctacactggccgacccgggcgtcgtcgatgatctgatcagcagccgtcagtcaaagtag

SEQ ID NO: 126796 - protein, 648 aa, Marinobacter sp. ELB17
MTDKQVYPVTPEVAKHALINKDQYQAMYKQSIENPDQFWAEHGKRVDWIKPFTKVKNTTYDYDALSIKWFEDGELNASVNCLDRHLESRGDQTAIIFEGDDPSDSRNVSYRELHEQVCKFANVLRSQGVKKGDVVTIYMPMIVETAVVMLACTRIGAIHSVVFGGFSPEALGSRVVNGKSNIVITADEGLRAGRKIPLKKNVDAALKNDDHHTVKTVIVVTRTGGDIAWTESRDQRYEDLMANASADCEPEPMNAEDPLFMLYTSGSTGEPKGVLHTTGGYLVYASMTHQYIFDYHDGDVYWCTADFGWVTGHSYILYGPLVNGATTLLFEGVPNYPDSSRMGQVVDKHQVNILYTAPTAIRALMAQGESCMDGTNRSSLRILGSVGEPINPEAWKWYHRVMGNGECPIVDTWWQTETGGILISPLPGATDLKPGSATVPFFGVQPALVDAEGTLLEGEAEGNLVIMDSWPGQMRTIYGDHERFIQTYFSAYKGMYFTGDGARRDADGDYWITGRVDDVLNVSGHRLGTAEVESAMVSHPKVAEAAVVGYPHDIKGQGIYVYVTLMQGEEPTDELKKELVQWVRKEIGPIASPDVIQWATGLPKTRSGKIMRRILRKIAANEYDQLGDTSTLADPGVVDDLISSRQSK

SEQ ID NO: 126797 - DNA, 1932 bp, Sphingomonas yanoikuyae
  CDS (1)..(1932): transl_table=11
atgagtgatgagaccggggcgatggcctacgatggcgcagtgcggtgggctgcaaaccgccctgaccaattctggctcgaggccgcaaaggcgatcgactgggtcgaaaatccgccgcgcgcccacgaccaaagcatgggctggtttcccgaaggcatcctgaacacatgccacaattgcctcgaccggcatgtccaggccggacgcggcgatgcgctggcgcttgcctatgacagcccggtaaccggaaccatccgccattacacctaccgcgaactgctgcatgaaaccgaacgtacggcggcgatgctggcgagcctcggcgcgaaaaaaggggatcgggtaatcctctacatgccgatgatccccgagacggttttcgcgatgctggcttgcgcgcggctcggtgtgatccattccgttgtgttcggcgggttcgccccacccgaactggccaagcggatcgacgatgccacccccaaactggtgctcaccgcttcgtgcggaatcgagggcagccgcaccattgcctacaagccgttggtcgacgaagcgctggtccttgccgcccactcggtcgagcatgtcgtcctggtccagcgcgaacagctaaccgcggacttgatgcccgtccgagacattgactggcacgatctgcggcggaggaccgccgatatgccggtgcctccatgcgttcctctcgcctccggcgatccgctctacatcctctacacttcgggcaccacaggaactcccaagggtgtggtgcgcgacaatggcggacatgccgtggccctgtcgtggtcgatggccaacatctatggcatcggggcaggggacacgttctgggctgcctcggacgtcggttgggtggtggggcatagctacatcgtctatgccccgctgctggttggggccacgaccgtcctgttcgaaggcaagcctgtcggcacacccgatcccggcacgttctggcggaccatagcgcgccataatgtcaagagtttcttcactgcgccgaccgccatccgggcgatccgcaaggaagatcccgatgcccggttcctgaaggagattggcaccggagcgtgccgcgcggtgtttctggccggagaacgcgcggacccggaaacgatcgcgtggctggagcggttaagcggtttgccggtgatcgatcactggtggcagaccgagcttggctggccggccatcgcttcatgcttcgcgatgggggacctgcgccgcaagcctggcagcgctggctttccggtgcccggttaccagttcgccatcctcgatgacgatggacttgctctgcccgacggggcaagcggcaatgtcgttatcgaaaccccgctgccgcccggcaccttccgttcgctgtggaacaacaacgccacgtttgtccgaaatttcgagacgttccctgggtactacgaaaccggtgatgcaggctttcgcgacagtgagggcttcatgcacatcatgggacgaaccgacgacatcatcaacatcgccggtcatcggctgtcgaccggacagatggaagagatcgtgtcgcggcaaccaggtgtcgctgaatgcgccgtcgtcggtgcggacgataacctcaaaggtatggtaccgattgctttcgtcaccccgcaagccggctatgcgacggacaagagccttgtcgagcgctcagtcctttccgtgcgcagcgaactgggggctatcgcggcgctgaaggcagttctggtcgttgagcaattgcccaagacccgttctggcaagatcttgcgtagcctgctccgtaagatcgtgaaccgcgaacccttcgatatccccgcgacaattgacgagccggaaacgccagccaagcttgcggcggtttttgcggaagaagcgggacttaacgaccctcattcgctgaagcgggtaagtgattga

SEQ ID NO: 126798 - protein, 643 aa, Sphingomonas yanoikuyae
MSDETGAMAYDGAVRWAANRPDQFWLEAAKAIDWVENPPRAHDQSMGWFPEGILNTCHNCLDRHVQAGRGDALALAYDSPVTGTIRHYTYRELLHETERTAAMLASLGAKKGDRVILYMPMIPETVFAMLACARLGVIHSVVFGGFAPPELAKRIDDATPKLVLTASCGIEGSRTIAYKPLVDEALVLAAHSVEHVVLVQREQLTADLMPVRDIDWHDLRRRTADMPVPPCVPLASGDPLYILYTSGTTGTPKGVVRDNGGHAVALSWSMANIYGIGAGDTFWAASDVGWVVGHSYIVYAPLLVGATTVLFEGKPVGTPDPGTFWRTIARHNVKSFFTAPTAIRAIRKEDPDARFLKEIGTGACRAVFLAGERADPETIAWLERLSGLPVIDHWWQTELGWPAIASCFAMGDLRRKPGSAGFPVPGYQFAILDDDGLALPDGASGNVVIETPLPPGTFRSLWNNNATFVRNFETFPGYYETGDAGFRDSEGFMHIMGRTDDIINIAGHRLSTGQMEEIVSRQPGVAECAVVGADDNLKGMVPIAFVTPQAGYATDKSLVERSVLSVRSELGAIAALKAVLVVEQLPKTRSGKILRSLLRKIVNREPFDIPATIDEPETPAKLAAVFAEEAGLNDPHSLKRVSD

SEQ ID NO: 126799 - DNA, 2316 bp, Oryza sativa subsp
  CDS (1)..(2316)
atggcccagctgcatatatacgccagctgcggctgcgcacgcgcccgcgctgcgatcccgcttcccgcgcaggctcaggcatccgctgcggctctaccttgggtgatgtccgtgacttcgccgccgctgctccggcgaggagggtgggcgatgggcgcgagcgatcacgccgcggtggcggcggcggcgagcggtaacggcaagccgcgggcgaggaggccctccgccgccgcggcggccgtgctgggcgagccggtggcggcgtccgacgaccacggcctcgtccaccccagcgcggacttcgcctcccaggccctcgtctcctccacgcagcaggtgatcgccgatacacgcctctctgcttttcttactgctttgccgatttcctctcggttgctgtcaattcgctctccccctcgaactggcggcgcatcgcgcgttcaaaggccgtaccttcaatttgaggcgcgcagcgatccatccatcgctggccgcagaggcgcagataaggcaagagtggcagacagcgacggcgcagtcgtataccaagaaatgtaccgacgttcgatcgacgatccggccgggttctggtcggagatcgcggagacgttctactggaagcacaagtggaaccctgacgaggtctgcaccgagaatctggatgtcaccaaggggccgatcaagatcgaatggttcaaagggggcaagaccaacatatgctacaatgcggtggaccgcaacgtggaggctggcgacggcgagaagatagcgatgtactgggaagggaacgagcccggccaggacgcgaagctcacctactccgagctcctgaacaaggtttgccagctggcaaattacctgaagagcgtcggcgtcgggaagggtgatgccgtggtgatctacctgccgatgctgatggagctgcccattgcgatgctcgcgtgtgctcggattggcgctgttcattcggttgtgtttgctggcttctctgctgacgcactagcacaaagaatcattgactgcaagcctaaggttgtgattacgtgcaacgcggtgaaaaggggaaagaaactcatagctctcaaagatatagtagatgtgtcgctggctgacagtgcgaagaatggagtcgatgtaggcatttctttgacatacgaaaatcagtcggcaatgaagagagaagacacaaaatggacgtcaggcagagacgtttggtggcaggatgttgtgcccaattttccaacaaaatgtgatgtggaatgggtagatgcagaggatccattgtttcttctatatacaagtggtagcacaggaaagccaaaggctccaaactatcctgatcctggtcgttgttgggacgttgttgacaaatacggggtgacgatattttatactgcaccaacacttattcgtgcactcatgcgtgatggtaccgagtatgttactcggtattctcgtaaatctcttcgagttctaggaagcgtaggcgagccaatcaatcccactgcttggagatggttctatgatattattggtgatgcaagatgcccaatatcagacacttggtggcagactgaaactggtggttttatgatcactcctttacctggcgcttggcctctgaaacccggatctgcgacatttcctttcttcggtgtacagccagtaatagtagatgagaaagggaaggaaatggaaggagaatgcagcggatacctttgcataaagaagtcatggcctggggctttccggacactttatggagacaaggacagatatgaaaccacatacttcaagccatttgctggctattacttctccggtgatggttgcagcagaattaccggatgtttacacactggcaaatgtaatttgaatgccagggacaaagatggataccattttctgactggacgggttgacgatgttatcaatgtcagcggccaccggattgggacagcagaggttgagtctgctctggtttcacatccaaaatgcgccgaggccgctgttgttggaattgaccatgaggttaaaggccagggaatttacgctttcgtgacattggtggacggtgttccttacagcgatgagctacggaaaagcctcgttatgactgttcgcaaccagattggggcgttcgcggcgccggacaagatccactgggcgccggggctcccgaagacgcggagcggcaagatcatgcggaggatcctgcggaagatcgcgtccaggcagctggacgagctcggcgacaccagcacgctcgccgaaccaggagtcgtcgaccagctcatcgcgctcgccgatagctag

SEQ ID NO: 126800 - protein, 771 aa, Oryza sativa subsp
MAQLHIYASCGCARARAAIPLPAQAQASAAALPWVMSVTSPPLLRRGGWAMGASDHAAVAAAASGNGKPRARRPSAAAAAVLGEPVAASDDHGLVHPSADFASQALVSSTQQVIADTRLSAFLTALPISSRLLSIRSPPRTGGASRVQRPYLQFEARSDPSIAGRRGADKARVADSDGAVVYQEMYRRSIDDPAGFWSEIAETFYWKHKWNPDEVCTENLDVTKGPIKIEWFKGGKTNICYNAVDRNVEAGDGEKIAMYWEGNEPGQDAKLTYSELLNKVCQLANYLKSVGVGKGDAVVIYLPMLMELPIAMLACARIGAVHSVVFAGFSADALAQRIIDCKPKVVITCNAVKRGKKLIALKDIVDVSLADSAKNGVDVGISLTYENQSAMKREDTKWTSGRDVWWQDVVPNFPTKCDVEWVDAEDPLFLLYTSGSTGKPKAPNYPDPGRCWDVVDKYGVTIFYTAPTLIRALMRDGTEYVTRYSRKSLRVLGSVGEPINPTAWRWFYDIIGDARCPISDTWWQTETGGFMITPLPGAWPLKPGSATFPFFGVQPVIVDEKGKEMEGECSGYLCIKKSWPGAFRTLYGDKDRYETTYFKPFAGYYFSGDGCSRITGCLHTGKCNLNARDKDGYHFLTGRVDDVINVSGHRIGTAEVESALVSHPKCAEAAVVGIDHEVKGQGIYAFVTLVDGVPYSDELRKSLVMTVRNQIGAFAAPDKIHWAPGLPKTRSGKIMRRILRKIASRQLDELGDTSTLAEPGVVDQLIALADS

SEQ ID NO: 126801 - DNA, 1959 bp, Oryza sativa subsp
  CDS (1)..(1959)
atgggcgcgagcgatcacgccgcggtggcggcggcggcgagcggtaacggcaagccgcgggcgaggaggccctccgccgccgcggcggccgtgctgggcgagccggtggcggcgtccgacgaccacggcctcgtccaccccagcacggacttcgcctcccaggccctcgtctcctccacgcagcagtaccaagaaatgtaccgacgttcgatcgacgatccggccgggttctggtcggagatcgcggagacgttctactggaagcacaagtggaaccctgacgaggtctgcaccgagaatctggatgtcaccaaggggccgatcaagatcgaatggttcaaagggggcaagaccaatatatgctacaatgcggtggaccgcaacgtggaggctggcgacggcgagaagatagcgatgtactgggaagggaacgagcccggccaggacgcgaagctcacctactccgagctcctgaacaaggtttgccagctggcaaattacctgaagagcgtcggcgtcgggaagggtgatgccgtggtgatctacctgccgatgctgatggagctgcccattgcgatgctcgcgtgtgctcggattggcgctgttcattcggttgtgtttgctggcttctctgctgacgcactagcacaaagaatcattgactgcaagcctaaggttgtgattacgtgcaacgcggtgaaaaggggaaagaaactcatagctctcaaagatatagtagatgtgtcgctggctgacagtgcgaagaatggagtcgatgtaggcatttctttgacatacgaaaatcagtcggcaatgaagagagaagacacaaaatggacgtcaggcagagacgtttggtggcaggatgttgtgcccaattttccaacaaaatgtgatgtggaatgggtagatgcagaggatccattgtttcttctatatacaagtggtagcacaggaaagccaaaggctccaaactatcctgatcctagtcgttgttgggacgttgttgacaaatacggggtgacgatattttatactgcaccaacacttattcgtgcactcatgcgtgatggtaccgagtatgttactcggtattctcgtaaatctcttcgagttctaggaagcgtaggcgagccaatcaatcccactgcttggagatggttctatgatattattggtgatgcaagatgcccaatatcagacacttggtggcagactgaaactggtggttttatgatcactcctttacctggcgcttggcctctgaaacccggatctgcgacatttcctttcttcggtgtacagccagtaatagtagatgagaaagggaaggaaatggaaggagaatgcagcggatacctttgcataaagaagtcatggcctggggctttccggacactttatggagacaaggacagatatgaaaccacatacttcaagccatttgctggctattacttctccggtgatggttgcagcagaattaccggatgtttacacactggcaaatgtaatttgaatgccagggacaaagatggataccattttctgactggacgggttgacgatgttatcaatgtcagcggccaccggattgggacagcagaggttgagtctgctctggtttcacatccaaaatgcgccgaggccgctgttgttggaattgaccatgaggttaaaggccagggaatttacgctttcgtgacattggtggacggtgttccttacagcgatgagctacggaaaagcctcgttatgactgttcgcagccagattggggcgttcgcggcgccggacaagatccactgggcgccggggctcccgaagacgcggagcggcaagatcatgcggaggatcctgcggaagatcgcgtccaggcagctggacgagctcggcgacaccagcacgctcgccgaaccaggcgtcgtcgaccagctcatcgcgctcgccgatagctag

SEQ ID NO: 126802 - protein, 652 aa, Oryza sativa subsp
MGASDHAAVAAAASGNGKPRARRPSAAAAAVLGEPVAASDDHGLVHPSTDFASQALVSSTQQYQEMYRRSIDDPAGFWSEIAETFYWKHKWNPDEVCTENLDVTKGPIKIEWFKGGKTNICYNAVDRNVEAGDGEKIAMYWEGNEPGQDAKLTYSELLNKVCQLANYLKSVGVGKGDAVVIYLPMLMELPIAMLACARIGAVHSVVFAGFSADALAQRIIDCKPKVVITCNAVKRGKKLIALKDIVDVSLADSAKNGVDVGISLTYENQSAMKREDTKWTSGRDVWWQDVVPNFPTKCDVEWVDAEDPLFLLYTSGSTGKPKAPNYPDPSRCWDVVDKYGVTIFYTAPTLIRALMRDGTEYVTRYSRKSLRVLGSVGEPINPTAWRWFYDIIGDARCPISDTWWQTETGGFMITPLPGAWPLKPGSATFPFFGVQPVIVDEKGKEMEGECSGYLCIKKSWPGAFRTLYGDKDRYETTYFKPFAGYYFSGDGCSRITGCLHTGKCNLNARDKDGYHFLTGRVDDVINVSGHRIGTAEVESALVSHPKCAEAAVVGIDHEVKGQGIYAFVTLVDGVPYSDELRKSLVMTVRSQIGAFAAPDKIHWAPGLPKTRSGKIMRRILRKIASRQLDELGDTSTLAEPGVVDQLIALADS

SEQ ID NO: 126803 - DNA, 1938 bp, Magnetospirillum gryphiswaldense
  CDS (1)..(1938): transl_table=11
atgaccgaactctttcccgttcccgccgaattcgccaagcaagccctgatcgacgagaagacctaccaggaatggtatgcgcgctcggtcaacgatccggatggcttctggggcgaacacggcaagcgcctggattggatcaagccctacaccaaggtcaaggaagtctcctacaccggcgacgtctccatcaactggttcgccgacggcaccttgaacgtggctgccaattgcctggaccgtcacttggccaagcgcggcgaccagaccgccatcatctgggaaggcgacgacccgaacgattccaagcacgtcacctatcgtgagctgcacgagcaggtttgccgcctgtccaacgtgatgaccgatctgggcgtcaagaagggcgatcgcgtcaccatctatctgccgatgatcgtggaagccgccgtcgccatgctggcctgcgcccgcgtcggcgccatccattccatcgttttcggcggtttctcgcccgacgccctggccggccgtatccaggattgcgacagctcgctggtcatcaccgccgacgaaggtctgcgcggcggccgtaaggtgccgctgaaggccaatgtcgacaaggcgctggaaacctgctggtcggtcaagaacgtcctggtggtcaagcgcaccggcggcaacatccacatggtcaccggtcgtgaccattggtacgaagagctgaccgccaaggccggcgctacccacaccgccgtggaaatgaacgcggaagacccgctgttcatcctttacacctcgggctcgaccggcaagcccaagggcgtgctgcacaccaccggcggctatctgtgctatgcctccatgacccatcagtacgtcttcgactatcatgaaggcgacgtctattggtgcaccgccgacgtgggttgggtcaccggccactcctacatcgtctatggtccgctggccaatggcgccatcaccttgatgttcgaaggcatcccgacctatcccgacgcctcgcgcttctggcaggtggtcgacaagcacaaggtcaacatcttctacaccgcgccgaccgccatccgttcgctgatgcgcgaaggcgaggaaatggtcaagaagaccagccggtccagcctgcgtctcttgggttcggtgggcgagcccatcaacccggaagcttggctgtggtaccaccgcgtcgtcggcgacaaccgttgcccgatcgtcgacacctggtggcagaccgaaaccggcggcatcctgatcacgccgttgccgggtgccaccgcgctgaagcccggctcggccacccgtccgttcttcggcgtcaagccggtgatggtcgatgccgaaggcaaggtgctggaaggcgccgtcgaaggcaatctgtgcttggccgaacccggttggcccggccagatgcgcaccattttcggtgaccacaagcgcttcggcgaaacctacttctccacctatcccggctactacttcaccggtgacggcgcccgtcgcgatgaggacggctattactggatcaccggtcgcgtcgatgacgtgatcaacgtgtccggccaccgcatgggcaccgccgaggtggaatccgccctggtcgcccatcccaaggtggccgaggccgccgtggtcggttacccgcacgagatcaagggccagggcatctatgcctatgtcaccctgatccagggcgaagagccgaccgaggaactgcgcaaggaactggtggcctgggtccgtaaggaaatcggcccgatcgccagccccgacctgatccagtggtcgccgggcctgcccaagacccgttcgggcaagatcatgcgccgcattctgcgcaagatcgccgagaacgagttcggcgcgctgggcgacacctcgaccctggccgatccgaccgtggtcgaagacctgatcgaaaaccgcatgaatcgcggttaa

SEQ ID NO: 126804 - protein, 645 aa, Magnetospirillum gryphiswaldense
MTELFPVPAEFAKQALIDEKTYQEWYARSVNDPDGFWGEHGKRLDWIKPYTKVKEVSYTGDVSINWFADGTLNVAANCLDRHLAKRGDQTAIIWEGDDPNDSKHVTYRELHEQVCRLSNVMTDLGVKKGDRVTIYLPMIVEAAVAMLACARVGAIHSIVFGGFSPDALAGRIQDCDSSLVITADEGLRGGRKVPLKANVDKALETCWSVKNVLVVKRTGGNIHMVTGRDHWYEELTAKAGATHTAVEMNAEDPLFILYTSGSTGKPKGVLHTTGGYLCYASMTHQYVFDYHEGDVYWCTADVGWVTGHSYIVYGPLANGAITLMFEGIPTYPDASRFWQVVDKHKVNIFYTAPTAIRSLMREGEEMVKKTSRSSLRLLGSVGEPINPEAWLWYHRVVGDNRCPIVDTWWQTETGGILITPLPGATALKPGSATRPFFGVKPVMVDAEGKVLEGAVEGNLCLAEPGWPGQMRTIFGDHKRFGETYFSTYPGYYFTGDGARRDEDGYYWITGRVDDVINVSGHRMGTAEVESALVAHPKVAEAAVVGYPHEIKGQGIYAYVTLIQGEEPTEELRKELVAWVRKEIGPIASPDLIQWSPGLPKTRSGKIMRRILRKIAENEFGALGDTSTLADPTVVEDLIENRMNRG

SEQ ID NO: 126805 - DNA, 2382 bp, Arabidopsis thaliana; identical to SEQ ID NO: 122114
  CDS (44)..(2125)
  misc_feature (422)..(422): n is a, g, c or t

SEQ ID NO: 126806 - protein, 693 aa, Arabidopsis thaliana; identical to SEQ ID NO: 122115
  misc_feature (127)..(127): The Xaa at location 127 stands for Ala, Pro, Ser, or Thr.

SEQ ID NO: 126807 - DNA, 2235 bp, Ostreococcus tauri
  CDS (1)..(2235)
atgcgcgcgacgacgacgacgacgcgcgcggtgacgacgacgcggcgacgcgggaaaacgagcgggaacgtcgtgacgcgagcgacgggaggggacgacgggggggcgaagtcgaggtcgtcgtcgatcgacgtgccgcggaatcacgcggtgagcccgggacggagagggcgcgcgcgcgggacgaatggagacgcgatcgaaccgccgatggaattggcggctcgtgcgcacgttggatcgatggaacagtatcgatcgatgtataatcggtcgatcaaggagccggagatgttctggagcgagatcgcgggggagcttcgttgggaaaccgcgtttgacggcgtcgataagcccgaggaagtcttagagtggaatttcgatccgagcaaaggggaggtttacgtcaagtggttcgcgggtgggcgaaccaacatgtcgttcaattgcttagacctccagatcgaacgaggtctgggggattctccggctttaatctttgaggctaacgacgccgtcaactcgagaatctttacctttaacgagctccgcgaagaggtctcaactttcagcaaatttttagtcgctcagggcatcggaaaaggcgatagggtcatcatgtatcttccgatgatcccgatgatgccgatcgccatgcttgcgtgcgcgaggatcggtgccgttcattcaatcgttttcgcgggttactctgccaaatcactcgcccaacgcgtcgtcgattgccaagcgaaaatgatcatcaccgcgagcgcttctcgccgtggaaaaaagataatacctctaaaaaagatcgtggacgaagcgctcgagatttgcatgcaaaatgatgggttctctcccgatcgagttgtggtgaaaggtaacgccgacaccagaattgatgatactccgtttctcaacattgatgacgtgccgttcaatccacagcgcgatttgtggtgggacgatgatatctcgcagtatcgaatggatgaaaaaccggatcccatggagttcatcgacagtctcgatcccgctttcattctgtacacgtcaggctccaccggaaagccgaaaggagttgtacatgcgctcggcgggtatcttgtctatgcgtacgcgacgagcaaattcgtcttcgatcttcatcctggggaagacatcgtgttctgcaccgccgatctcggttggataacgggtcattcgtacacactttatggacctctcttgaatggctgcgccactgtgttgttcgagggaacgccaacgtatccaaacgccgagatatggtggaacatcgtggacaaacatcgcgtgacgatcttctacacgtctcccacagctcttagaactttacagggcttcggtgacgctccggtgcacaaaagctctcgtgcgacgttgagaatcctaggcactgtaggcgagccgatcgcgaaagaaacgtggctgtggtatcatgaaatcatcggcgacaaaaagcttccgatagtcgacacgtggtggcaaaccgaaaccggtggacatatcatcacgccgcttcccggtgcgacgccgctcaagccatcgagcgcgacgtttccgttcttcggcgtcgagcccgttttgctcgatcctgtcgacgggcatgaaatcgatggggaaggtgaaggttcgctttgcatcaaacgtccgtggcccgggattttcatggacgtgcacggcgcgcacgaacgatacgagaactcttacttcaaagtcttcgagggcggttactatgcgtcgggcgatggcgcgcgtcgagacgctgacggctacttgtacgtcaccggtcgattggacgacgtcatgaacgtgagtggacatcgaatagggaccgcagaagtcgagtcagctttggttcaacacccactctgcatcgaagccgccgtggtatcgatcggacacgagatcaagggcgaaacgatagtcgcgttcgtgattttagatcctctgcgcaagaaggaggcgacgcaatatcccgagcaagaactcgtcttcaaggttcgcgctgaaatcggccctttcgccgcccccgaacgagtcatagtcgtcaaaaacctcccgaaaacgcgaagcggaaagatcatgcgccgaatcttgaagaaaatagccgccggaaacatcgaggatttgggcgacgtctccgcgctcgccgacccgggctcaatcgaacactgcatccaagccgagcagcgagcgcgcggcacgcgatga

SEQ ID NO: 126808 - protein, 744 aa, Ostreococcus tauri
MRATTTTTRAVTTTRRRGKTSGNVVTRATGGDDGGAKSRSSSIDVPRNHAVSPGRRGRARGTNGDAIEPPMELAARAHVGSMEQYRSMYNRSIKEPEMFWSEIAGELRWETAFDGVDKPEEVLEWNFDPSKGEVYVKWFAGGRTNMSFNCLDLQIERGLGDSPALIFEANDAVNSRIFTFNELREEVSTFSKFLVAQGIGKGDRVIMYLPMIPMMPIAMLACARIGAVHSIVFAGYSAKSLAQRVVDCQAKMIITASASRRGKKIIPLKKIVDEALEICMQNDGFSPDRVVVKGNADTRIDDTPFLNIDDVPFNPQRDLWWDDDISQYRMDEKPDPMEFIDSLDPAFILYTSGSTGKPKGVVHALGGYLVYAYATSKFVFDLHPGEDIVFCTADLGWITGHSYTLYGPLLNGCATVLFEGTPTYPNAEIWWNIVDKHRVTIFYTSPTALRTLQGFGDAPVHKSSRATLRILGTVGEPIAKETWLWYHEIIGDKKLPIVDTWWQTETGGHIITPLPGATPLKPSSATFPFFGVEPVLLDPVDGHEIDGEGEGSLCIKRPWPGIFMDVHGAHERYENSYFKVFEGGYYASGDGARRDADGYLYVTGRLDDVMNVSGHRIGTAEVESALVQHPLCIEAAVVSIGHEIKGETIVAFVILDPLRKKEATQYPEQELVFKVRAEIGPFAAPERVIVVKNLPKTRSGKIMRRILKKIAAGNIEDLGDVSALADPGSIEHCIQAEQRARGTR

SEQ ID NO: 126809 - DNA, 2244 bp, Oryza sativa; identical to SEQ ID NO: 122116
  CDS (1)..(2244)

SEQ ID NO: 126810 - protein, 747 aa, Oryza sativa; identical to SEQ ID NO: 122117

SEQ ID NO: 126811 - DNA, 2013 bp, Phaeosphaeria nodorum
  CDS (1)..(2013)
atgtctgagggcaacacgaagccatccgtgcccgttgtggccgaggcgcacgatgtcgacactttccatgtgcccaaggcattcctcgagaaacacccgcattcaaaaccgcacatcaacggcctcgaagagtaccagaaactgtacaaggaatccatcacagagcccaagcagttctggggccgtctggcgcgcgaactcctcacgtgggaccgcgatttccaaacagtgcactctggcagcttccagggcggcgacaatgcgtggttcctcgagggcaggctgaatgccagttataattgtgtcgaccgccatgcgttcaagaacccggataagccggccatcatctacgaggctgacgacaccgaggatggccgcatcatttcgtacggcgagctactgcgccaggtctcgaagctggcgtacacgctgaaggagatgggtgtgcgcaagggagacactgttgcgctgtacctgcccatgattcccgaggctgtgatttcgttcctggcgtgctcacgtatcggtgcggtgcactctgtcgtgtttgctggtttctcgtccgactcgctgcgcgaccgtatcattgatgcggagtgcaaggttgtcattaccacggacgagggcaagcgtggcggcaaggtcatcagcacgaagaagattgtcgacgaggcgctgaagcaatgccccggcatcagccactgtctcgtgtacaagcgcactggcgccgagatcccatggaccaagggacgagactggtggtggcacgaggaggtcgagaagtaccccaactacattgctcccgagccgatgaactcggaagacccgctgttcttgctgtacacatctgggtcgacgggtaagccaaagggagtgatgcacaccacaggtggttatctcctgggagccgcggcgactggaaagtacgtctttgacattcatgacaacgacactttcttctgtggtggtgatgttggctggatcactggacacacatatgtcgtatatgcccctctgctgctcggtgtggcgaccgtcgtcttcgagggcacacctgcttaccccaacttctcgcggtactgggatattgtcgacaagtacaacgtcactcagttctatgttgcccccactgcgctgcgactgctcaagcgcgccggtgacgagcacgtcaagcaccaaatgaagcatctcaggattctcggatccgtcggcgagcccatcgctgctgaggtgtggaagtggtactttgagactgttggaaaggaggaggcacacgtaatcgacacttactggcagacggagaccggctcgcatgtcatcacaccgctcggtggtgtcacacccacaaagcctggttctgcatcacttcccttcttcggcatcgagcctgctattatcgatcctgtttcgggcgaggagatccacggaaacgatgtcgagggcgtgttggcgttcaagcagccatggccaagtctggctcgcacagtctggggcgcacaccagagatacatggacacatatctgaacgtgtacaagggctactacttcactggagacggtgccggacgtgaccacgagggttactactggatccgaggccgcgtcgacgatgtcgtcaacgtctcaggccacagattatcaaccgctgaaatcgaggcagcactcatcgagcaccattctgtggctgaggccgcggtggtgggtatcaatgacgaattgacaggccaggctgtgaacgcctttgtggcactcaaagacggcaccgagtcaagtgaccaggtgaagaaagacttgatcttgcaagtgcgcaagtcgattggaccctttgcggcacccaaggcgatctttgtagttccagatctgccaaagacccggtcgggcaagattatgcgtcgcatcatgcggaagatcttggcgggagaggaggaccagctgggcgacacatctacgctctcggacccttcggtagtggacaagattatcgaaatcgtccaccagtctaagaagaaatag

SEQ ID NO: 126812 - protein, 670 aa, Phaeosphaeria nodorum
MSEGNTKPSVPVVAEAHDVDTFHVPKAFLEKHPHSKPHINGLEEYQKLYKESITEPKQFWGRLARELLTWDRDFQTVHSGSFQGGDNAWFLEGRLNASYNCVDRHAFKNPDKPAIIYEADDTEDGRIISYGELLRQVSKLAYTLKEMGVRKGDTVALYLPMIPEAVISFLACSRIGAVHSVVFAGFSSDSLRDRIIDAECKVVITTDEGKRGGKVISTKKIVDEALKQCPGISHCLVYKRTGAEIPWTKGRDWWWHEEVEKYPNYIAPEPMNSEDPLFLLYTSGSTGKPKGVMHTTGGYLLGAAATGKYVFDIHDNDTFFCGGDVGWITGHTYVVYAPLLLGVATVVFEGTPAYPNFSRYWDIVDKYNVTQFYVAPTALRLLKRAGDEHVKHQMKHLRILGSVGEPIAAEVWKWYFETVGKEEAHVIDTYWQTETGSHVITPLGGVTPTKPGSASLPFFGIEPAIIDPVSGEEIHGNDVEGVLAFKQPWPSLARTVWGAHQRYMDTYLNVYKGYYFTGDGAGRDHEGYYWIRGRVDDVVNVSGHRLSTAEIEAALIEHHSVAEAAVVGINDELTGQAVNAFVALKDGTESSDQVKKDLILQVRKSIGPFAAPKAIFVVPDLPKTRSGKIMRRIMRKILAGEEDQLGDTSTLSDPSVVDKIIEIVHQSKKK

SEQ ID NO: 126813 - DNA, 2031 bp, Phaeosphaeria nodorum
  CDS (1)..(2031)
atgcctcgagaacacatgcaagatcaagtatacaaggcgtctatatcggacccggaaacattctggaaccgccaagcacaaaacgtccactggcacaagaaaccatccaaggcgtttcaaaggtccactaaacacctgaagaagagcaatgtttcgcacgagcactggagctggtttgcggatggcgagatatcaaccacatataattgtgttgatcggcatgtggcaagcggcaatggcgaaaatatcgcaatctactgggacagtccagtgacgcaacagaaagagaaatatacatacaaccagttgcttagcgaagttgaaacgctcgctggggtactgagagaggagggagtgaagaagggcgaagtcgtgctgatatacatgcccatgataccagccgccctattcgcaatgctcgcaattgcgcgcttaggtgccatacatgcggttgtatttgggggcttctctgcggctgctttggcacaaagaatcgacgcgagtcggcctactgctatcatgactgcatcatgtggtatcgaaggcaacaagaagcccacaggctacaagactatgatcgaggaagcggtccagaagagcagccataagcccgacagaacgatcatctggcaaagagaacagctaagatgggatccagtgcggaaggaggatggtcaacgcaactggcaacggttgacgaaaagcgcaaggaacaggggactgaaagctgatgcagtctccatcaagagcggagatggtctttacatcatctacacatcaggaaccacgggtctccctaaaggagttgtgcgctctgctggtggccatgcagttggtctaaacttttccatgaagtaccttttcggtatccacggccccggagacgttcagttcacagcaagcgatatcggatgggtggtcgggcactcgtacatagtgtatgcaccgcttctggtaggcgctaccacggtgttgttcgagggcaagccaatcgggacgcctgatgcgagcacattctggcgcatcatcgaagagtataaggtcacaaccatgttcactgctccaaccgcattaagagctatccgcagagaagatggagagaacaaattcttcgaaagcagagggaagcggggcgcgctgaagacgcttcgtgctctgttcttagcaggcgagaggagcgagccgagtatcgtagagatgtaccagaagctgctcacaaagcactgtgcgccaggtgctatggttgtcgacaactggtggtcctcagaaagtggatctccaatctctggggtagccctaagtgccaccgcagggttcaatttttcttcacaggatagacccaaaccgctcccaatcaaacccggctctgcaggcaaggccatgccgggttttgacgtccgtattgtggatgacgaaggcaaggaagtgagccgaggtgtcatgggaaacatagtgatgggcattccgcttgctcccaccgcattcacgacactctgggaagatgaagagcgcttttacaagggatatatgaagaggtttgacggaaaatggatcgatacaggcgatgcgggcatgatagaccacgagggctacatctccatcatgtctagggcggacgatgtgatcaacgtggccgcacaccgattctctactggtgccatcgaacaagcaatcacgtcacacccatctattgccgaagcagcagtgatcggaatcccagacgccctcaagggccaccttcctttcgcattcatcactctctcaacgtctgaccaccccgatggcgcaattccagatgaaaagtttgcaagcgaagtacagaagcttaccagaagcggcaagacactgcgacgcgtacttcgagacttgattgagaatgcaacgcacgatgactttgacaaagaagtcaatgttccaagcacgatcgaggatcaagaggctgttaacgtggcgcgagagaaagtgagggagtatttcaaggtaaagggcaaggacctgcacaaggcgacggaggcgcgtgcgaagctctag

SEQ ID NO: 126814 - protein, 676 aa, Phaeosphaeria nodorum
MPREHMQDQVYKASISDPETFWNRQAQNVHWHKKPSKAFQRSTKHLKKSNVSHEHWSWFADGEISTTYNCVDRHVASGNGENIAIYWDSPVTQQKEKYTYNQLLSEVETLAGVLREEGVKKGEVVLIYMPMIPAALFAMLAIARLGAIHAVVFGGFSAAALAQRIDASRPTAIMTASCGIEGNKKPTGYKTMIEEAVQKSSHKPDRTIIWQREQLRWDPVRKEDGQRNWQRLTKSARNRGLKADAVSIKSGDGLYIIYTSGTTGLPKGVVRSAGGHAVGLNFSMKYLFGIHGPGDVQFTASDIGWVVGHSYIVYAPLLVGATTVLFEGKPIGTPDASTFWRIIEEYKVTTMFTAPTALRAIRREDGENKFFESRGKRGALKTLRALFLAGERSEPSIVEMYQKLLTKHCAPGAMVVDNWWSSESGSPISGVALSATAGFNFSSQDRPKPLPIKPGSAGKAMPGFDVRIVDDEGKEVSRGVMGNIVMGIPLAPTAFTTLWEDEERFYKGYMKRFDGKWIDTGDAGMIDHEGYISIMSRADDVINVAAHRFSTGAIEQAITSHPSIAEAAVIGIPDALKGHLPFAFITLSTSDHPDGAIPDEKFASEVQKLTRSGKTLRRVLRDLIENATHDDFDKEVNVPSTIEDQEAVNVAREKVREYFKVKGKDLHKATEARAKL

SEQ ID NO: 126815 - DNA, 2007 bp, Aedes aegypti
  CDS (1)..(2007)
atgccctcggaaccgaaggttttcaacccgcaccccgatgtcgccgacaaggcgtacattaacagcatggaacagtaccaggaattttatcggcagtccatcgaaaatccggggcagttctggagcaatgtagcgaagcagttccactgggagactccttatgatccgaagaacttcttctcgtacaacttcgatatctccaagggcccaatctttgtgaagtggatggaaggtgcctcgaccaatatctgctacaacttgctggatcgaaatgttaagaatggcctgggtgatactgtggcctattactgggaaggaaaccacccggatgactacagtcgcctcacgtaccgcaagctgctcgaagaggtatgccgctttgccaacgtcctgaaggcccatggcgtccagaagggcgatcgcgtgtcgatctacatgcccatgacgatggaactgccggttgcgatgttggcctgcgctcggatcggtgccgtgcactcgattgtgtttgcaggtttctcatcggattcgttagctgagcggatgcacgattgccaagcgaaggtactgatcaccgccgatggagcctggcgtggggagaaaatccttcatctgaaggatttgtgcgatcaggcgctgatcaaggccgatgaaatgggacaccatgttgagacctgtatcgttgtggcgcacattaatcgagtaactcccggtaaacctgactgggatggagtgttcgatactccgtggacggacgatcgcgattattggtggcatcaagaaatggaagatgctgaaccggcctgctatcccgagtggatggcagcggaggatccgctgttcatgttgtataccagtggatcaacgggcaagccgaagggcgttctacacactacagctggatatctgatgtacgcggcgacgaccttcaaaattgtgttcgactacaagccccatgacgtgtattggtgcactgctgatattggttggatcaccggccatacctacgtgctgtatggaccgctggcaaacggtgcaacgtcggtgatgttcgagggtactccgttctttccggataacgatcgctactgggaagtggtggacaagtacaaggttacgcagttctacacggcaccgacggcgatacgatcgctgatgaagtacggcgacgagcctgtgatgaaacatgatctttcttcgttgagggtactcggaagtgtcggtgaaccgatcaaccccgaagcgtggatgtggtactacaaagtagtaggcaaggagaagtgtgctattgtggatacgttctggcagacggaaactggaggacatgtgataactccgctaccgggagctactccaatgaagccaggatcagcttctttcccattcttcggagtgaaaccgactcttctagacgaaagtggcaacgaaatcaagggcgaaggagaaggttatctggttttctcgcagccatggcccggaatgatgcgaacactgttcaacaaccacccacgatatgagtccacgtatttctccaagttcaatggcttttattgcactggagatggtgctcgacgagatgccgacggatactactggatcacaggccgcgtggacgacatgctcaacgtttccggccatctgatgtctaccgctgaagttgaatccgtactaaccgagcattctcgcgtatcggaagctgctgttgtgtcacgacctcaccccgttaaaggcgagtgcctgtactgtttcatcacccccaaccagaacgaagccttcgacaagacgcttatcaacgaattgaagatattggttagggaacgcattggcccatttgcccagccggacgtaatccagcatgccccaggactcccaaagacacgatccggcaagatcatgcgacgtgtgctgcgaaaagttgcgatcaacgatcgggaggtcggagacacttcaacacttgccgacgaagcgatcattgagcagctcttcgccaaccgaccggtagcttaa

SEQ ID NO: 126816 - protein, 668 aa, Aedes aegypti
MPSEPKVFNPHPDVADKAYINSMEQYQEFYRQSIENPGQFWSNVAKQFHWETPYDPKNFFSYNFDISKGPIFVKWMEGASTNICYNLLDRNVKNGLGDTVAYYWEGNHPDDYSRLTYRKLLEEVCRFANVLKAHGVQKGDRVSIYMPMTMELPVAMLACARIGAVHSIVFAGFSSDSLAERMHDCQAKVLITADGAWRGEKILHLKDLCDQALIKADEMGHHVETCIVVAHINRVTPGKPDWDGVFDTPWTDDRDYWWHQEMEDAEPACYPEWMAAEDPLFMLYTSGSTGKPKGVLHTTAGYLMYAATTFKIVFDYKPHDVYWCTADIGWITGHTYVLYGPLANGATSVMFEGTPFFPDNDRYWEVVDKYKVTQFYTAPTAIRSLMKYGDEPVMKHDLSSLRVLGSVGEPINPEAWMWYYKVVGKEKCAIVDTFWQTETGGHVITPLPGATPMKPGSASFPFFGVKPTLLDESGNEIKGEGEGYLVFSQPWPGMMRTLFNNHPRYESTYFSKFNGFYCTGDGARRDADGYYWITGRVDDMLNVSGHLMSTAEVESVLTEHSRVSEAAVVSRPHPVKGECLYCFITPNQNEAFDKTLINELKILVRERIGPFAQPDVIQHAPGLPKTRSGKIMRRVLRKVAINDREVGDTSTLADEAIIEQLFANRPVA

SEQ ID NO: 126817 - DNA, 1977 bp, Aedes aegypti
  CDS (1)..(1977)
atggttccacatccgagttctccagtatgcatcgacagtggcaatccattgtatcatgacgtgtaccgccggtcgatagaagagcctcaggccttttggggagagcttgcggagcaactaatcgattgggacaaaccgtgggatactgtggtcgatgacagtaatcgaccattcacaaaatggtacgttggtggcgagctcaacgcatgctacaacactttggatcgacatgtacagaacaacaagggcaacaaggtagcgctcattcacgatagtcccatgacgaatactatacgccgagtaacttacaatgaactttatgaaaaggtctcacggctagccggcggtttgaaaaagttgggcgtcaagaaaggcgatagagtcgtcatctatatgcctttgattccagaagcgattatggctatgttagctacagtcaggcttggggctatacattcggtggtgtttggagggttcgccgccagtgagctttgcacgcgtatcgagcatgctgaaccaaaggttatcatagcagcaaactgtggaatagaaccgaacaaaataatccattatctggatatactccatgaagctgttgaaatgtcaaaatggaaacctcgcaccaatgtcatattccaacgaagcaacattttgatttccgacttggataaacgaatggacgtaacatgggaatctacgttggacgaacctacggggtgtgtaccagtagaggccaatgacccgttgtatatattgtacacttctggaacaactgataaaccgaagggaattacacgtccaactggaggtcatctagtaacgctaatgtatactatggatacgatatatggagtacaaccagacgatgtgtggtggaatgcatccgatttggggtgggtagttggtcactcttacatatgctatggaccattgctgtacggtgctactagtgtcatgtatgaagggaagcccgatcggacaccagaccccggtcaatattttcgtcttattgatcagcacaaagttacggcacttttctcggttccgacgtcttttcgagtattacgaagaactgatccggacgtcaagtatgggaaaaagtatagcatgaaatctcttcgcacaatcttcatcgctggggagcattgtgattccgaaacgaagatgtggattgaaaagacctttagggtaccagtgctgaacaattggtggcaaactgaaacaggatcagctatgacagctacatgtgttggtcttgcacaaaaccttaatccacccaactttacaacaggtctaccgttttgtggatacgatattagagttttacatccagacggaactgaagccgatcccaatgaattaggacgcctggtggtaaagcttccccttccgcctggaacaatgtctacgctgtacaggaacgctgagttgttcgaaaacctttacttccataaatatccgggttactatgacactatggatgctggatataaggacgagaaaggatatgtttatgttaccgctcgagatgatgatgttattaacgttgctggtcatagaatttcaacatcgagcttagaagatgcagtattgaggcatcctgatatagctgacgctgccgtctttggggtaccagagccaacgaaaggtcaaatcccgctatgtctttatgtaattaaagaaggagtgagtaaagctactgccaaattatcagtagagctaatttcactgattcgagaggttattggccctatagcagcattccgactggttggtagggtggacggtcttccaagaacaagatcaggaaaaacaatgcgaaaggcaatggcagatttcgccgctaataaaacggtaattttaccggcaacaattgaggacgttgaagtttttgacgacattagacgagcactgcaagagctaggttacgccatgaacgctccgatgccaattttatacttttctgaacaagtgtag

SEQ ID NO: 126818 - protein, 658 aa, Aedes aegypti
MVPHPSSPVCIDSGNPLYHDVYRRSIEEPQAFWGELAEQLIDWDKPWDTVVDDSNRPFTKWYVGGELNACYNTLDRHVQNNKGNKVALIHDSPMTNTIRRVTYNELYEKVSRLAGGLKKLGVKKGDRVVIYMPLIPEAIMAMLATVRLGAIHSVVFGGFAASELCTRIEHAEPKVIIAANCGIEPNKIIHYLDILHEAVEMSKWKPRTNVIFQRSNILISDLDKRMDVTWESTLDEPTGCVPVEANDPLYILYTSGTTDKPKGITRPTGGHLVTLMYTMDTIYGVQPDDVWWNASDLGWVVGHSYICYGPLLYGATSVMYEGKPDRTPDPGQYFRLIDQHKVTALFSVPTSFRVLRRTDPDVKYGKKYSMKSLRTIFIAGEHCDSETKMWIEKTFRVPVLNNWWQTETGSAMTATCVGLAQNLNPPNFTTGLPFCGYDIRVLHPDGTEADPNELGRLVVKLPLPPGTMSTLYRNAELFENLYFHKYPGYYDTMDAGYKDEKGYVYVTARDDDVINVAGHRISTSSLEDAVLRHPDIADAAVFGVPEPTKGQIPLCLYVIKEGVSKATAKLSVELISLIREVIGPIAAFRLVGRVDGLPRTRSGKTMRKAMADFAANKTVILPATIEDVEVFDDIRRALQELGYAMNAPMPILYFSEQV

SEQ ID NO: 126819 - DNA, 1770 bp, Candidatus Kuenenia stuttgartiensis
  CDS (1)..(1770): transl_table=11
ttgtttggttctggctatgccattttagtttgttacgctatgaataagactgaaataataaataaacaccctgaagcatttaatctcatttgttatgaagaccagcataagaatttctcatgggagacggtaaagaaagaactaggtgtcggcggtaacaaggtaaatattgcttacgaggccatagataaacacgccacaacatggagaaaaaacaaagttgcgctgtattgggaaggttctgatggcacacacttaaagtatacctttcaggaattgaaaatcctttccgataaatgtgccaatatgttgcaatcattaggtgtaggcaaaggagaccgcgtttttttattcttgccgcgtttgccggagctttttataaatatgattgcaattgcaaaactcggcgccatttcaggcccgatgttttccgcatttgggcctgatgcggtgcgggacaggttgcagaacagtgaggcgaaagtccttatcactacacctgaattaaaagagcgtgttgatgccgtgctatgggaattgcctaaattggaacggattgtactggtgagtgttaaggaagattatgaattagaagagggaaatgtatgttataaaacattgatgaaagacgcacctgaacggtttgaaatggaatggatggatatggaagatcctttgtatctcttatatacttccggaactaccggaaagccgaagggcataacacatgtgcataacgacatgatttcatactatattaccacaaaatggtcgctggatcttagagatgacgacatttattggtgtacggcagaccccgggtgggtgacgggaatggtatatggcatgtgggggccatggttaaacggcgtctcaatgtatatatatgatggcagatttgatgtaaataagtggtatgaagccatacaatcatataagattacggtatggtataccgctcccaccgctttacgcatgttaatgaaatccggcgattaccttgttgctcaatatgatttggaaagtttgaggtatatttgcagcgtgggagaaccccttaaccctgaagtcatcaagtggggcatgaatgtatacaatcttccaatccatgatacatggtggcagacagagacaggttccatcatgatagctaattatccgtgcataccgataaaacccggttctatgggaaagccgtttcctggcatcaaggctgcaattattgatagtgagggaaatgaactcccggatggacatcacggtattctggcattaaaaccaggctggccctctatgttgagaaaagtatggggagacgaaggccgttttaatgaatatttcaatataacgggttggtataccaccggggataccgcatataaagacgaagaaggttatttctggtttgttggaagagccgatgacgttattaacacgtcaggccatagggtagggccttttgaagtggaaagtgccctgcttgaacatcgggcggttgctgaagcaggggtcataggcaaacctgaccctgaaaggggtgagatcatcaaggcatttatcgcccttaaagagggatttaaaccttccagtgaattgggggaggagattaaaaaattcataaaacatcatctcgcggcacacgcttatccccgcgaaatagaattttgtgaaaatctgccaaaaacccgaagcggcaaaattatgcgcagacttttaaaggcgaaagacctaggactgcctaccggagatatttctacacttgaagattaa

SEQ ID NO: 126820 - protein, 589 aa, Candidatus Kuenenia stuttgartiensis
MFGSGYAILVCYAMNKTEIINKHPEAFNLICYEDQHKNFSWETVKKELGVGGNKVNIAYEAIDKHATTWRKNKVALYWEGSDGTHLKYTFQELKILSDKCANMLQSLGVGKGDRVFLFLPRLPELFINMIAIAKLGAISGPMFSAFGPDAVRDRLQNSEAKVLITTPELKERVDAVLWELPKLERIVLVSVKEDYELEEGNVCYKTLMKDAPERFEMEWMDMEDPLYLLYTSGTTGKPKGITHVHNDMISYYITTKWSLDLRDDDIYWCTADPGWVTGMVYGMWGPWLNGVSMYIYDGRFDVNKWYEAIQSYKITVWYTAPTALRMLMKSGDYLVAQYDLESLRYICSVGEPLNPEVIKWGMNVYNLPIHDTWWQTETGSIMIANYPCIPIKPGSMGKPFPGIKAAIIDSEGNELPDGHHGILALKPGWPSMLRKVWGDEGRFNEYFNITGWYTTGDTAYKDEEGYFWFVGRADDVINTSGHRVGPFEVESALLEHRAVAEAGVIGKPDPERGEIIKAFIALKEGFKPSSELGEEIKKFIKHHLAAHAYPREIEFCENLPKTRSGKIMRRLLKAKDLGLPTGDISTLED

SEQ ID NO: 126821 - DNA, 2073 bp, Aspergillus oryzae; identical to SEQ ID NO: 122118
  CDS (1)..(2073)

SEQ ID NO: 126822 - protein, 690 aa, Aspergillus oryzae; identical to SEQ ID NO: 122119

SEQ ID NO: 126823 - DNA, 2013 bp, Aspergillus oryzae; identical to SEQ ID NO: 122120
  CDS (1)..(2013)

SEQ ID NO: 126824 - protein, 670 aa, Aspergillus oryzae; identical to SEQ ID NO: 122121

SEQ ID NO: 126825 - DNA, 1722 bp, uncultured archaeon GZfos35D7
  CDS (1)..(1722): transl_table=11
atggcgatggcaaatataatcgaaaaaccgaagacgatcaccccgcgcccgaatctgccggactatgacgagacttacaggacgtttgagtggaagaatgcatacgaccgggttgcatgggacgaccgcggcaggctgaatgcggcagagagcgcagtggaccgacatgccagatcatcgctgaagcacaaggttgcgctgtactggcagggggcggacagaaatgagaaatacacgtttcttgaactctccaatctctcaaacaggttcgcaaacgtcttaatgtcagccgggatcgagaagcgtgaccgtgtattcatattcctgccacggattccggagctctacgtaagttttcttggcatcctaaaaaccggagcgatcgctggcaccatgttctctgcattcggaccggaaggactgtatgaccgcctgcatgacagcggtgcacgatacttgatcaccaattcgagtctcaaggagcgggtatatgagataaaagacgatctcccggatcttgagcggatcatcgtggtggacgaaaccgatgtcgcggagggcgagatcagttaccctgaagcgatgaagaaagcatctgatgcgttcgatgttgcgatgatgtcgcccgatgatcctgcattcatgttgtacacgtccggaaccacgggaaagccgaaaggcgtggttcacaggcatcttgcgatcgtgcagcagcatctgaccactgaatgggtgctggacctccgcgacgacgacatctactggtgcaccgcagaccctggctgggtcaccgggatctcttatggcatactcggtccgttctcgtgcggcgcatcggtcgtggtccacgacggcaggttcgatcctgatgtctggtactcggtgatcgagcagtaccgtgtgacggtctggtacagcgcgccaaccgcattcaggatgcttgcgcaagcccatgacgcgcacaagaaccacgatctcagcagcctcaggcacatctgcagcgttggtgagccgcttaacgccgagatcgtgcactgggggatgcggacgttcgggttgccaattcatgacaacttctggcagaccgagactggaggtatcctgattgccaattatccgtcgatgccggtgaaacccggatggatggggaagccaacaccgggaatcaaggctgcaatcatcgacgacgacggaatggaggtccggcgcggtgtcgaggggaatctcgcgctgaaacccgattttccgtcgctcatgcttgatatatggaagaatccctcgaaatacgcggagtatttcatgggtggctggtatctcacgggcgaccgggctgtgcagcacgaggatgattatttccttttcatcgggaggtctgatgacgtgatcaacacatccggcgagcgtgtgggaccgtttgaggttgaatcagtgctgatcgagcatccggcgatcatggaggctggcgtgatcggaaaaccggacacgttgcgtggcgagatcatcaaggcgttcgtcgtacttggtgacggttatgaggcgtctgacgagcttgagtctgaggtgagacggtttgtgaaggcgcggcttgcgggtcatgcgtatccgcgggagtttgagattgtggatgcgcttccaaagacccggagcggcaagatcgtcaggaggatgcttcgggcaaaggaactcgggcttccgattggcgatgtctcgacgcttgaatag

SEQ ID NO: 126826 - protein, 573 aa, uncultured archaeon GZfos35D7
MAMANIIEKPKTITPRPNLPDYDETYRTFEWKNAYDRVAWDDRGRLNAAESAVDRHARSSLKHKVALYWQGADRNEKYTFLELSNLSNRFANVLMSAGIEKRDRVFIFLPRIPELYVSFLGILKTGAIAGTMFSAFGPEGLYDRLHDSGARYLITNSSLKERVYEIKDDLPDLERIIVVDETDVAEGEISYPEAMKKASDAFDVAMMSPDDPAFMLYTSGTTGKPKGVVHRHLAIVQQHLTTEWVLDLRDDDIYWCTADPGWVTGISYGILGPFSCGASVVVHDGRFDPDVWYSVIEQYRVTVWYSAPTAFRMLAQAHDAHKNHDLSSLRHICSVGEPLNAEIVHWGMRTFGLPIHDNFWQTETGGILIANYPSMPVKPGWMGKPTPGIKAAIIDDDGMEVRRGVEGNLALKPDFPSLMLDIWKNPSKYAEYFMGGWYLTGDRAVQHEDDYFLFIGRSDDVINTSGERVGPFEVESVLIEHPAIMEAGVIGKPDTLRGEIIKAFVVLGDGYEASDELESEVRRFVKARLAGHAYPREFEIVDALPKTRSGKIVRRMLRAKELGLPIGDVSTLE

SEQ ID NO: 126827 - DNA, 2142 bp, Saccharomyces cerevisiae
  CDS (1)..(2142)
atgtcgccctctgccgtacaatcatcaaaactagaagaacagtcaagtgaaattgacaagttgaaagcaaaaatgtcccagtctgccgccactgcgcagcagaagaaggaacatgagtatgaacatttgacttcggtcaagatcgtgccacaacggcccatctcagatagactgcagcccgcaattgctacccactattctccacacttggacgggttgcaggactatcagcgcttgcacaaggagtctattgaagaccctgctaagttcttcggttctaaagctacccaatttttaaactggtctaagccattcgataaggtgttcatcccagaccctaaaacgggcaggccctccttccagaacaatgcatggttcctcaacggccaattaaacgcctgttacaactgtgttgacagacatgccttgaagactcctaacaagaaagccattattttcgaaggtgacgagcctggccaaggctattccattacctacaaggaactacttgaagaagtttgtcaagtggcacaagtgctgacttactctatgggcgttcgcaagggcgatactgttgccgtgtacatgcctatggtcccagaagcaatcataaccttgttggccatttcccgtatcggtgccattcactccgtagtctttgccgggttttcttccaactccttgagagatcgtatcaacgatggggactctaaagttgtcatcactacagatgaatccaacagaggtggtaaagtcattgagactaaaagaattgttgatgacgcgctaagagagaccccaggcgtgagacacgtcttggtttatagaaagaccaacaatccatctgttgctttccatgcccccagagatttggattgggcaacagaaaagaagaaatacaagacctactatccatgcacacccgttgattctgaggatccattattcttgttgtatacgtctggttctactggtgcccccgagggtgttcaacattctaccgcaggttacttgctgggagctttgttgaccatgcgctacacttttgacactcaccaagaagacgttttcttcacagctggagacattggctggattacaggccacacttatgtggtttatggtcccttactatatggttgtgccactttggtctttgaagggactcctgcgtacccaaattactcccgttattgggatattattgatgaacacaaagtcacccaattttatgttgcgccaactgctttgcgtttgttgaaaagagctggtgattcctacatcgaaaatcattccttaaaatctttgcgttgcttgggttcggtcggtgagccaattgctgctgaagtttgggagtggtactctgaaaaaataggtaaaaatgaaatccccattgtagacacctactggcaaacagaatctggttcgcatctggtcaccccgctggctggtggtgttacaccaatgaaaccgggttctgcctcattccccttcttcggtattgatgcagttgttcttgaccctaacactggtgaagaacttaacaccagccacgcagagggtgtccttgccgtcaaagctgcatggccatcatttgcaagaactatttggaaaaatcatgataggtatctagacacttatttgaacccttaccctggctactatttcactggtgatggtgctgcaaaggataaggatggttatatctggattttgggtcgtgtagacgatgtggtgaacgtctctggtcaccgtctgtctaccgctgaaattgaggctgctattatcgaagatccaattgtggccgagtgtgctgttgtcggattcaacgatgacttgactggtcaagcagttgctgcatttgtggtgttgaaaaacaaatctagttggtccaccgcaacagatgatgaattacaagatatcaagaagcatttggtctttactgttagaaaagacatcgggccatttgccgcaccaaaattgatcattttagtggatgacttgcccaagacaagatccggcaaaattatgagacgtattttaagaaaaatcctagcaggagaaagtgaccaactaggcgacgtttctacattgtcaaaccctggcattgttagacatctaattgattcggtcaagttgtaa

SEQ ID NO: 126828 - protein, 713 aa, Saccharomyces cerevisiae
MSPSAVQSSKLEEQSSEIDKLKAKMSQSAATAQQKKEHEYEHLTSVKIVPQRPISDRLQPAIATHYSPHLDGLQDYQRLHKESIEDPAKFFGSKATQFLNWSKPFDKVFIPDPKTGRPSFQNNAWFLNGQLNACYNCVDRHALKTPNKKAIIFEGDEPGQGYSITYKELLEEVCQVAQVLTYSMGVRKGDTVAVYMPMVPEAIITLLAISRIGAIHSVVFAGFSSNSLRDRINDGDSKVVITTDESNRGGKVIETKRIVDDALRETPGVRHVLVYRKTNNPSVAFHAPRDLDWATEKKKYKTYYPCTPVDSEDPLFLLYTSGSTGAPEGVQHSTAGYLLGALLTMRYTFDTHQEDVFFTAGDIGWITGHTYVVYGPLLYGCATLVFEGTPAYPNYSRYWDIIDEHKVTQFYVAPTALRLLKRAGDSYIENHSLKSLRCLGSVGEPIAAEVWEWYSEKIGKNEIPIVDTYWQTESGSHLVTPLAGGVTPMKPGSASFPFFGIDAVVLDPNTGEELNTSHAEGVLAVKAAWPSFARTIWKNHDRYLDTYLNPYPGYYFTGDGAAKDKDGYIWILGRVDDVVNVSGHRLSTAEIEAAIIEDPIVAECAVVGFNDDLTGQAVAAFVVLKNKSSWSTATDDELQDIKKHLVFTVRKDIGPFAAPKLIILVDDLPKTRSGKIMRRILRKILAGESDQLGDVSTLSNPGIVRHLIDSVKL

SEQ ID NO: 126829 - DNA, 1938 bp, uncultured bacterium 311
  CDS (1)..(1938): transl_table=11
atggcaaaagaaatcttgtatcaagttcccgatctcataaagaaaaatgctttattgaacgaagaagaatacgaactgctttatagagaatctttagaccattcagaagacttttggtctaagcaagctaaagaatacttagattggatattaccttgggaaaaagtttctgaaagcgaccttaccaagggcgaggtctcttggtttagtggaggaaaaattaatgcttcagaaaattgcatcgacaggcatctagaagaaaggtctagccaaattgctattatttgggagggagatgatccctctgtctccaaatctataacctatcaggaattatacgaatcggtttgtagatttgccaacgctcttaaagagagaggaataaagaaaggagacagagtttgtatttacatgcccatgattcctgaagcagcttatgccatgctagcttgtgccaggataggagctattcattcagtggtattcggaggtttttctcctgagtcgctgaaagacaggattttagattcagattgccagactgtgataacagcagatgaaggactaaggggagccaaaaaaatcccgctcaaacaaaatgtcgatgaagctttagttaactgtcctagcgttgatacagtattcgttgtaaagagaactggagctgaaataaattgggttgatgaaagagatgtctcttatgaagagattgttagttcaatgagttcagattgtccgccagaggtaatggattctgaagaccctctttttattttatacacatcaggttctacaggaaaaccaaaaggggtcttgcacacaactgcaggttatcttcttcaaactacaatgagccataaattaatctttgattaccatgagggagaggttttctggtgtactgcagatgtcggttgggttacaggtcactcatatattgtttacggacctttatcgaatggagctacaaccctaatgtttgaagggatacctacctaccccagcccatcaagattttgggaggtggttgataagcatcaagtgaatatattttatactgctcctacggccctaagggctctgatggctcaaggcaatgagcctttggagtctacttctagagagtctttaagagttctaggtacagttggtgagcccatcaatcctgaagcttgggaatggtattaccgagtagtgggcgataagagatgtccgatagtggatacttggtggcagactgaaaccggatcggccatgatcagccctttggctggttcaacccctcaaaaacctggaagcgctactaaacccttttttggaattgaaccagctctgttagacgaaaatggacaagaaattgagggagaaggttcaggcaatctagtcattaaaagaagttggccttctcaaattagaactgtgtatggtgatcataaaaggtgtgtggaaacttattactccctttaccctggttactacaccacgggggatggagcaagaagagataaagatggctattattggatcactggaagagtcgatgatgttctgaatgtatcaggacatagattaggaaccgccgaggtagagagtgctctggtattacacgaaactgtcgctgaagcagcagttgtgggttatgagcatgacatcaaaggtcaaggaatatactgttatgtaaccctgatgaacggcatagaacccagcgatgaacttaaaagtgatttagttgggctggtagctaaagaaattggagctattgccaaacctgatattattcaatgggcccctggtcttccaaaaactagatccggtaaaattatgcgaagaattttacgaaaaattgcaggaaatgagattaaggatcttggagatactactactttagccgagcctagtgtggtagaacagattatagaaaatagagaaaatcgataa

SEQ ID NO: 126830 - protein, 645 aa, uncultured bacterium 311
MAKEILYQVPDLIKKNALLNEEEYELLYRESLDHSEDFWSKQAKEYLDWILPWEKVSESDLTKGEVSWFSGGKINASENCIDRHLEERSSQIAIIWEGDDPSVSKSITYQELYESVCRFANALKERGIKKGDRVCIYMPMIPEAAYAMLACARIGAIHSVVFGGFSPESLKDRILDSDCQTVITADEGLRGAKKIPLKQNVDEALVNCPSVDTVFVVKRTGAEINWVDERDVSYEEIVSSMSSDCPPEVMDSEDPLFILYTSGSTGKPKGVLHTTAGYLLQTTMSHKLIFDYHEGEVFWCTADVGWVTGHSYIVYGPLSNGATTLMFEGIPTYPSPSRFWEVVDKHQVNIFYTAPTALRALMAQGNEPLESTSRESLRVLGTVGEPINPEAWEWYYRVVGDKRCPIVDTWWQTETGSAMISPLAGSTPQKPGSATKPFFGIEPALLDENGQEIEGEGSGNLVIKRSWPSQIRTVYGDHKRCVETYYSLYPGYYTTGDGARRDKDGYYWITGRVDDVLNVSGHRLGTAEVESALVLHETVAEAAVVGYEHDIKGQGIYCYVTLMNGIEPSDELKSDLVGLVAKEIGAIAKPDIIQWAPGLPKTRSGKIMRRILRKIAGNEIKDLGDTTTLAEPSVVEQIIENRENR

SEQ ID NO: 126831 - DNA, 2316 bp, Oryza sativa subsp
  CDS (1)..(2316)
atggcccagctgcatatatacgccagctgcggctgcgcacgcgcccgcgctgcgatcccgcttcccgcgcaggctcaggcatccgctgcggctctaccttgggtgatgtccgtgacttcgccgccgctgctccggcgaggagggtgggcgatgggcgcgagcgatcacgccgcggtggcggcggcggcgagcggtaacggcaagccgcgggcgaggaggccctccgccgccgcggcggccgtgctgggcgagccggtggcggcgtccgacgaccacggcctcgtccaccccagcacggacttcgcctcccaggccctcgtctcctccacgcagcaggtgatcgccgatacacgcctctctgcttttcttactgctttgccgatttcctctcggttgctgtcaattcgctctccccctcgaactggcggcgcatcgcgcgttcaaaggccgtaccttcaatttgaggcgcgcagcgatccatccatcgctggccgcagaggcgcagataaggcaagagtggcagacagcgacggcgcagtcgtataccaagaaatgtaccgacgttcgatcgacgatccggccgggttctggtcggagatcgcggagacgttctactggaagcacaagtggaaccctgacgaggtctgcaccgagaatctggatgtcaccaaggggccgatcaagatcgaatggttcaaagggggcaagaccaatatatgctacaatgcggtggaccgcaacgtggaggctggcgacggcgagaagatagcgatgtactgggaagggaacgagcccggccaggacgcgaagctcacctactccgagctcctgaacaaggtttgccagctggcaaattacctgaagagcgtcggcgtcgggaagggtgatgccgtggtgatctacctgccgatgctgatggagctgcccattgcgatgctcgcgtgtgctcggattggcgctgttcattcggttgtgtttgctggcttctctgctgacgcactagcacaaagaatcattgactgcaagcctaaggttgtgattacgtgcaacgcggtgaaaaggggaaagaaactcatagctctcaaagatatagtagatgtgtcgctggctgacagtgcgaagaatggagtcgatgtaggcatttctttgacatacgaaaatcagtcggcaatgaagagagaagacacaaaatggacgtcaggcagagacgtttggtggcaggatgttgtgcccaattttccaacaaaatgtgatgtggaatgggtagatgcagaggatccattgtttcttctatatacaagtggtagcacaggaaagccaaaggctccaaactatcctgatcctagtcgttgttgggacgttgttgacaaatacggggtgacgatattttatactgcaccaacacttattcgtgcactcatgcgtgatggtaccgagtatgttactcggtattctcgtaaatctcttcgagttctaggaagcgtaggcgagccaatcaatcccactgcttggagatggttctatgatattattggtgatgcaagatgcccaatatcagacacttggtggcagactgaaactggtggttttatgatcactcctttacctggcgcttggcctctgaaacccggatctgcgacatttcctttcttcggtgtacagccagtaatagtagatgagaaagggaaggaaatggaaggagaatgcagcggatacctttgcataaagaagtcatggcctggggctttccggacactttatggagacaaggacagatatgaaaccacatacttcaagccatttgctggctattacttctccggtgatggttgcagcagaattaccggatgtttacacactggcaaatgtaatttgaatgccagggacaaagatggataccattttctgactggacgggttgacgatgttatcaatgtcagcggccaccggattgggacagcagaggttgagtctgctctggtttcacatccaaaatgcgccgaggccgctgttgttggaattgaccatgaggttaaaggccagggaatttacgctttcgtgacattggtggacggtgttccttacagcgatgagctacggaaaagcctcgttatgactgttcgcagccagattggggcgttcgcggcgccggacaagatccactgggcgccggggctcccgaagacgcggagcggcaagatcatgcggaggatcctgcggaagatcgcgtccaggcagctggacgagctcggcgacaccagcacgctcgccgaaccaggcgtcgtcgaccagctcatcgcgctcgccgatagctag

SEQ ID NO: 126832 - protein, 771 aa, Oryza sativa subsp
MAQLHIYASCGCARARAAIPLPAQAQASAAALPWVMSVTSPPLLRRGGWAMGASDHAAVAAAASGNGKPRARRPSAAAAAVLGEPVAASDDHGLVHPSTDFASQALVSSTQQVIADTRLSAFLTALPISSRLLSIRSPPRTGGASRVQRPYLQFEARSDPSIAGRRGADKARVADSDGAVVYQEMYRRSIDDPAGFWSEIAETFYWKHKWNPDEVCTENLDVTKGPIKIEWFKGGKTNICYNAVDRNVEAGDGEKIAMYWEGNEPGQDAKLTYSELLNKVCQLANYLKSVGVGKGDAVVIYLPMLMELPIAMLACARIGAVHSVVFAGFSADALAQRIIDCKPKVVITCNAVKRGKKLIALKDIVDVSLADSAKNGVDVGISLTYENQSAMKREDTKWTSGRDVWWQDVVPNFPTKCDVEWVDAEDPLFLLYTSGSTGKPKAPNYPDPSRCWDVVDKYGVTIFYTAPTLIRALMRDGTEYVTRYSRKSLRVLGSVGEPINPTAWRWFYDIIGDARCPISDTWWQTETGGFMITPLPGAWPLKPGSATFPFFGVQPVIVDEKGKEMEGECSGYLCIKKSWPGAFRTLYGDKDRYETTYFKPFAGYYFSGDGCSRITGCLHTGKCNLNARDKDGYHFLTGRVDDVINVSGHRIGTAEVESALVSHPKCAEAAVVGIDHEVKGQGIYAFVTLVDGVPYSDELRKSLVMTVRSQIGAFAAPDKIHWAPGLPKTRSGKIMRRILRKIASRQLDELGDTSTLAEPGVVDQLIALADS

SEQ ID NO: 126833 - DNA, 1899 bp, Oryza sativa subsp; identical to SEQ ID NO: 122124
  CDS (1)..(1899)

SEQ ID NO: 126834 - protein, 632 aa, Oryza sativa subsp; identical to SEQ ID NO: 122125

SEQ ID NO: 126835 - DNA, 2085 bp, Neurospora crassa; identical to SEQ ID NO: 122126
  CDS (1)..(2085)

SEQ ID NO: 126836 - protein, 694 aa, Neurospora crassa; identical to SEQ ID NO: 122127

SEQ ID NO: 126837 - DNA, 1926 bp, Thermoplasma volcanium
  CDS (1)..(1926): transl_table=11
atgacatatgatctaccgaattttgttttaaatagtaaggagatccttagaatagacgagaagaaaagggatgaatttaagcgtttgcttgaattctcgaagaacgatccaaatggcttttgggagagtattgcttctgatctagtttggagaaagaaatgggataccgtaatggaaggcagacttcctgaattttcctttttcaagggaggctatttaaacgttgctgaaaacctcatagatagacatatagaagctggggaagctaatagagctgctttgatatttgagagcgaaacagggcgaagcgctgtatatacatacgcaatgctgcaatctattgtaaacaaactttcaaatgctctaagaagcctaggcgtaaagaaaggtgacagagtctctatatttctgccaaacatacctgaaacattattcagtgtgctcgcgtgctacagggttggtgctgttttcaatacaatattttctggtttctctacgcaggcattggagaacaggttaaagcattttaaccctatgataataataactgcagacggaacatacagaagaggcaaactagtggagttaaagaaaaaagtggatgagattcgagattctaattttgaaaagatcatcgtagtaaaaaatgtagggctcaatctgaattttacagaaagagatttagacttttacagcctaatagcgaagtttaacgataaagacaaagggggagatgtcgaggcaaacgagcctggcatagtcttttatacatcaggtacaacaggtaagccaaaaggagtggtgctttcgggtgccggatttctggtgaacaactacgtgtatgcaaagcaccacctcgatttgagtaaatctgatgtactttggtgcacagctgacataggatggcttactatgcatatatggggtataattggggctcttgctaatggctctacgactctattttatgaaggggcaatcgattacccttctcaagatcgtttctacgaaatagtgcaaaaatacaaagtaacaaaaattttcacagctccaactttgataaggatgctgatgaagtacggctttccagagggcaagtatgatgtttcatccgttcgtgtaataggactagtgggcgagccgttgaatccagaagcgtggcactggatgaataaacacttcagatctgcatacattaataatacgtgggggcaaaccgaaactgctggaactccgcttgcaggatctgcctttgctactggcatgaagccaggatctagcggcatcgagttcctgggagcatccttggatgttgttgacgatgagggtaatccagtgcttgaacgtccaggaaatttagtaataaagaaaccgttccctatgatgatccgcgatctatggaacgaacacgaacgtttcttaaaagaatactatggaaagttagaaggattgtatttcacctatgatgttgctgtaaaggataaagatggccacttttgggttctcgggaggaatgatgatgtaatcaacgtttccggccatagactgagcacgatggagatggagagccttgtagctagcgtaaacggaatagctgaatgtgcagttgtaggaatccctgatgaaatcagaggtctcactcccgttgtattcgtttcattgaagaatgatatatcagcgacaggcattgaagaaactatatcaaagatgattgaggagggcattgggaagtttgcagcaccgtccgatgtaatcgttgttgaagagatgccgaagaccccaagtggaaaaatactcagaaggttccttagggagatctatgtttatggagacattgtcggagaccgtaccggccttgaaaatccggcgtctatagaaaaattgaaatcagtattgcgaaatagaatagaaagtaggaataagtga

SEQ ID NO: 126838 - protein, 641 aa, Thermoplasma volcanium
MTYDLPNFVLNSKEILRIDEKKRDEFKRLLEFSKNDPNGFWESIASDLVWRKKWDTVMEGRLPEFSFFKGGYLNVAENLIDRHIEAGEANRAALIFESETGRSAVYTYAMLQSIVNKLSNALRSLGVKKGDRVSIFLPNIPETLFSVLACYRVGAVFNTIFSGFSTQALENRLKHFNPMIIITADGTYRRGKLVELKKKVDEIRDSNFEKIIVVKNVGLNLNFTERDLDFYSLIAKFNDKDKGGDVEANEPGIVFYTSGTTGKPKGVVLSGAGFLVNNYVYAKHHLDLSKSDVLWCTADIGWLTMHIWGIIGALANGSTTLFYEGAIDYPSQDRFYEIVQKYKVTKIFTAPTLIRMLMKYGFPEGKYDVSSVRVIGLVGEPLNPEAWHWMNKHFRSAYINNTWGQTETAGTPLAGSAFATGMKPGSSGIEFLGASLDVVDDEGNPVLERPGNLVIKKPFPMMIRDLWNEHERFLKEYYGKLEGLYFTYDVAVKDKDGHFWVLGRNDDVINVSGHRLSTMEMESLVASVNGIAECAVVGIPDEIRGLTPVVFVSLKNDISATGIEETISKMIEEGIGKFAAPSDVIVVEEMPKTPSGKILRRFLREIYVYGDIVGDRTGLENPASIEKLKSVLRNRIESRNK

SEQ ID NO: 126839 - DNA, 2383 bp, Solanum tuberosum; identical to SEQ ID NO: 122128
  CDS (271)..(2166)

SEQ ID NO: 126840 - protein, 631 aa, Solanum tuberosum; identical to SEQ ID NO: 122129

SEQ ID NO: 126841 - DNA, 2085 bp, Ashbya gossypii; identical to SEQ ID NO: 122130
  CDS (1)..(2085)

SEQ ID NO: 126842 - protein, 694 aa, Ashbya gossypii; identical to SEQ ID NO: 122131

SEQ ID NO: 126843 - DNA, 2028 bp, Candida albicans; identical to SEQ ID NO: 28600
  CDS (1)..(2028): transl_table=12

SEQ ID NO: 126844 - protein, 675 aa, Candida albicans [sequence omitted]

SEQ ID NO: 126845 - DNA, 2115 bp, Candida glabrata; identical to SEQ ID NO: 28602
  CDS (1)..(2115)

SEQ ID NO: 126846 - protein, 704 aa, Candida glabrata; identical to SEQ ID NO: 28603

SEQ ID NO: 126847 - DNA, 2016 bp, Debaryomyces hansenii; identical to SEQ ID NO: 122136
  CDS (1)..(2016)

SEQ ID NO: 126848 - protein, 671 aa, Debaryomyces hansenii; identical to SEQ ID NO: 122137

SEQ ID NO: 126849 - DNA, 2124 bp, Kluyveromyces lactis; identical to SEQ ID NO: 122138
  CDS (1)..(2124)

SEQ ID NO: 126850 - protein, 707 aa, Kluyveromyces lactis; identical to SEQ ID NO: 122139

SEQ ID NO: 126851 - DNA, 2142 bp, Saccharomyces cerevisiae
  CDS (1)..(2142)
atgtcgccctctgccgtacaatcatcaaaactagaagaacagtcaagtgaaattgacaagttgaaagcaaaaatgtcccagtctgccgccactgcgcagcgaaagaaggaacatgagtatgaacatttgacttcggtcaagatcgtgccacaacggcccatctcagatagactgcagcccgcaattgctacccactattctccacacttggacgggttgcaggactatcagcgcttgcacaaggagtctattgaagaccctgctaagttcttcggttctaaagctacccaatttttaaactggtctaagccattcgataaggtgttcatcccagaccctaaaacgggcaggccctccttccagaacaatgcatggttcctcaacggccaattaaacgcctgttacaactgtgttgacagacatgccttgaagactcctaacaagaaagccattattttcgaaggtgacgagcctggccaaggctattccattacctacaaggaactacttgaagaagtttgtcaagtggcacaagtgctgacttactctatgggcgttcgcaagggcgatactgttgccgtgtacatgcctatggtcccagaagcaatcataaccttgttggccatttcccgtatcggtgccattcactccgtagtctttgccgggttttcttccaactccttgagagatcgtatcaacgatggggactctaaagttgtcatcactacagatgaatccaacagaggtggtaaagtcattgagactaaaagaattgttgatgacgcgctaagagagaccccaggcgtgagacacgtcttggtttatagaaagaccaacaatccatctgttgctttccatgcccccagagatttggattgggcaacagaaaagaagaaatacaagacctactatccatgcacacccgttgattctgaggatccattattcttgttgtatacgtctggttctactggtgcccccaagggtgttcaacattctaccgcaggttacttgctgggagctttgttgaccatgcgctacacttttgacactcaccaagaagacgttttcttcacagctggagacattggctggattacaggccacacttatgtggtttatggtcccttactatatggttgtgccactttggtctttgaagggactcctgcgtacccaaattactcccgttattgggatattattgatgaacacaaagtcacccaattttatgttgcgccaactgctttgcgtttgttgaaaagagctggtgattcctacatcgaaaatcattccttaaaatctttgcgttgcttgggttcggtcggtgagccaattgctgctgaagtttgggagtggtactctgaaaaaataggtaaaaatgaaatccccattgtagacacctactggcaaacagaatctggttcgcatctggtcaccccgctggctggtggtgttacaccaatgaaaccgggttctgcctcattccccttcttcggtattgatgcagttgttcttgaccctaacactggtgaagaacttaacaccagccacgcagagggtgtccttgccgtcaaagctgcatggccatcatttgcaagaactatttggaaaaatcatgataggtatctagacacttatttgaacccttaccctggctactatttcactggtgatggtgctgcaaaggataaggatggttatatctggattttgggtcgtgtagacgatgtggtgaacgtctctggtcaccgtctgtctaccgctgaaattgaggctgctattatcgaagatccaattgtggccgagtgtgctgttgtcggattcaacgatgacttgactggtcaagcagttgctgcatttgtggtgttgaaaaacaaatctagttggtccaccgcaacagatgatgaattacaagatatcaagaagcatttggtctttactgttagaaaagacatcgggccatttgccgcaccaaaattgatcattttagtggatgacttgcccaagacaagatccggcaaaattatgagacgtattttaagaaaaatcctagcaggagaaagtgaccaactaggcgacgtttctacattgtcaaaccctggcattgttagacatctaattgattcggtcaagttgtaa

SEQ ID NO: 126852 - protein, 713 aa, Saccharomyces cerevisiae [sequence omitted]

SEQ ID NO: 126853 - DNA, 2064 bp, Ashbya gossypii; identical to SEQ ID NO: 28604
  CDS (1)..(2064)

SEQ ID NO: 126854 - protein, 687 aa, Ashbya gossypii; identical to SEQ ID NO: 28605

SEQ ID NO: 126855 - DNA, 2052 bp, Candida glabrata; identical to SEQ ID NO: 122142
  CDS (1)..(2052)

SEQ ID NO: 126856 - protein, 683 aa, Candida glabrata; identical to SEQ ID NO: 122143

SEQ ID NO: 126857 - DNA, 2040 bp, Debaryomyces hansenii; identical to SEQ ID NO: 28606
  CDS (1)..(2040)

SEQ ID NO: 126858 - protein, 679 aa, Debaryomyces hansenii; identical to SEQ ID NO: 28607

SEQ ID NO: 126859 - DNA, 2055 bp, Kluyveromyces lactis; identical to SEQ ID NO: 28608
  CDS (1)..(2055)

SEQ ID NO: 126860 - protein, 684 aa, Kluyveromyces lactis; identical to SEQ ID NO: 28609

SEQ ID NO: 126861 - DNA, 2052 bp, Saccharomyces cerevisiae; identical to SEQ ID NO: 28610
  CDS (1)..(2052)

SEQ ID NO: 126862 - protein, 683 aa, Saccharomyces cerevisiae; identical to SEQ ID NO: 28611

SEQ ID NO: 126863 - DNA, 2028 bp, Zygosaccharomyces bailii; identical to SEQ ID NO: 28612
  CDS (1)..(2028)

SEQ ID NO: 126864 - protein, 675 aa, Zygosaccharomyces bailii; identical to SEQ ID NO: 28613

SEQ ID NO: 126865 - DNA, 1956 bp, Pseudomonas aeruginosa; identical to SEQ ID NO: 122152
  CDS (1)..(1956): transl_table=11

SEQ ID NO: 126866 - protein, 651 aa, Pseudomonas aeruginosa [sequence omitted]

SEQ ID NO: 126867 - DNA, 1962 bp, Pseudomonas putida; identical to SEQ ID NO: 122154
  CDS (1)..(1962): transl_table=11

SEQ ID NO: 126868 - protein, 653 aa, Pseudomonas putida; identical to SEQ ID NO: 122155

SEQ ID NO: 126869 - DNA, 1950 bp, Rhizobium meliloti
  CDS (1)..(1950): transl_table=11
atggacgtcaagacctacccggtcctggaagcggccaagaaccgcacgctgctcgacaatgcgacctatctcgaatggtatcgcgagagcgttgccgatccggagaagttctggggcgagcacggcaagcggatcgaatggttcgagccctataccaaggtcaagaacacgtccttcgagggcgatgtctcgatcaagtggttcgaagacggactgaccaacgtctcctacaattgcatcgaccgccacctgaagacgcacggcgaaaagacggcgatcatctgggagggagacaatccctatctcgacaagaagatcacctataacgagctctacgacaaggtttgccgtcttgccaacgtcttgaaggagcagggcgtaaagaagggggaccgcgtcaccatctacatgccgatgatcccggaagcagcctatgcgatgctcgcctgtgcccgcatcggcgcgatccattcggtcgttttcggcggcttttcgcccgaggcgctcgccggccgcatcgtcgattgcgagtccaccttcgtgatcacctgcgacgagggcgtgcgcggcggcaagccggttgcgctcaaggagaacaccgataccgcgatcgacatcgctgccagacagcacgtcacggtcagcaaggtcctcgtcgtgcgccgcaccggcggcaaggtcggctgggcaccgggccgcgatctctggtatcaccaggagaccgcggcggcagagccgcattgcccgccggaaaagatgaatgcggaggacccgctcttcattctctatacttcgggttcgaccgggaagccgaaaggcgtgctgcacacgaccggcggctatctcgtctatgcttcgatgacgcatcaatacgtgttcgactaccaggacggcgacatctactggtgcacggccgatgtcggctgggtcaccggtcactcctacatcgtctacgggccgctcgccaatgcggcgacgacgctgatgttcgagggcgtgccgaacttccccgacgcgggacggttctgggaagtagtcgacaagcacaaggtcaacatcttctataccgcgccgaccgcgatccgctcgctgatgggagcgggcgacgatttcgtcaagcgctcctcgcgttcttcgctgcgcctgctcggaacggtcggcgagccgatcaatccggaagcctgggagtggtactatcacgtcgtcggcgacgagcgctgccctgtcgtcgatacctggtggcagaccgaaaccggcggcatactgatcacgccgctgccgggggctaccgatctcaaacccggctccgcgacgcggcccttcttcggcgtccagccgcagatcgtcgacagcgacggcaaggtcgtagatggcgcggccgacggcaacctttgcatcaccgatagctggcccggacagatgcggacggtctatggcgatcacgaacgcttcatccagacctacttctccacctacaagggcaagtatttcacgggcgacggctgccgccgcgacgaggacggctactattggatcaccggccgcgtcgacgacgtcctgaacgtttccggccaccggctcggcacggcggaggtggaatcggcgctcgtctcgcacaacctcgtttccgaggcggcggtcgtcggctacccgcatccgatcaagggtcagggcatctattgctacgtttcgctgatggccggcgaggtcggagacgacgaactgcgccaggcgctcgtcaagcacgtccgctcggaaatcggaccgatcgcgacaccggacaagatccagttcgcgcccggcctgccgaaaacacgctcaggcaagatcatgcgccggattctccgcaagatcgccgaggacgatttcggttcgctcggcgacacttcgacgctcgccgatccgggcgtcgtcgacgacctgatcgccaatcgtcagaaccgcgcttga

SEQ ID NO: 126870 - protein, 649 aa, Rhizobium meliloti [sequence omitted]

SEQ ID NO: 126871 - DNA, 1959 bp, Agrobacterium rhizogenes; identical to SEQ ID NO: 122160
  CDS (1)..(1959): transl_table=11

SEQ ID NO: 126872 - protein, 652 aa, Agrobacterium rhizogenes; identical to SEQ ID NO: 122161

SEQ ID NO: 126873 - DNA, 1719 bp, Bacillus subtilis
  CDS (1)..(1719): transl_table=11
atgaacttgaaagcgttaccagcaatagagggggatcataacttaaaaaactatgaagaaacgtaccggcattttgattgggccgaggcagagaaacatttctcttggcatgagacagggaaactgaatgcggcgtatgaagcgattgaccgccatgccgaatcgtttcgaaaaaacaaagtagcgctttattataaagacgcaaaaagggatgaaaaatacacatttaaagaaatgaaggaagaatcaaacagagccgggaatgtgctgagacggtatggaaatgtggaaaaaggggaccgcgtttttatttttatgccgagatcacccgagctttattttattatgcttggcgcaatcaaaattggcgccatcgccgggccgctgttcgaagcatttatggagggagcggtgaaagaccggcttgaaaacagtgaggcaaaggttgttgtcacaacgcctgagctgctggagagaataccggtagacaaactgcctcacttgcagcatgtcttcgtagtcgggggagaggctgagagcggcacgaatatcatcaattatgatgaagcagcgaaacaggaaagcacaagattggatatcgaatggatggataaaaaagacggctttctgcttcactatacatcaggttccactggtacgccaaagggcgtgttgcatgtccatgaagcgatgattcagcaatatcaaacaggaaagtgggtccttgatttaaaggaagaagacatttattggtgcacggctgatccaggctgggtgacaggtacggtatacggcatttttgcaccgtggctgaacggagcgacaaatgtcatcgtcggcggacgtttcagcccggaaagctggtatggaacgattgaacagcttggcgtcaatgtctggtacagcgcgccgacagcttttcggatgctgatgggagcgggagatgaaatggctgcgaaatatgatctaacttcactccggcatgtgctcagtgtcggtgagccgctaaatccggaagtcatcagatggggacataaagtttttaacaaacgaatccatgatacctggtggatgaccgaaacgggcagtcagctcatctgcaactatccttgcatggatattaaaccgggttcaatgggtaagccgattccaggagtggaggcagcgatcgttgacaatcaaggcaacgagctaccgccgtaccgaatgggcaatctcgccatcaaaaagggctggccttccatgatgcataccatttggaataaccctgaaaagtatgaatcgtatttcatgccgggcggctggtatgtgtctggggattctgcttacatggatgaagagggatacttttggttccaaggcagagttgatgacgtcatcatgacctccggtgagcgcgtcggcccatttgaagtggaaagcaagcttgtcgaacatccggctattgcagaagcaggcgttatcggaaagcctgacccggtgcgtggagaaatcattaaagcctttattgcactcagggaaggatttgagccgtctgataaactgaaagaagagatccgcctatttgtaaagcagggtcttgcagcccatgcggctccgcgtgagatcgaatttaaagataagcttccgaaaaccagaagcggaaagatcatgaggcgcgtgctgaaggcatgggagcttaatctgccggctggagatctgtcaacaatggaggattaa

SEQ ID NO: 126874 - protein, 572 aa, Bacillus subtilis
MNLKALPAIEGDHNLKNYEETYRHFDWAEAEKHFSWHETGKLNAAYEAIDRHAESFRKNKVALYYKDAKRDEKYTFKEMKEESNRAGNVLRRYGNVEKGDRVFIFMPRSPELYFIMLGAIKIGAIAGPLFEAFMEGAVKDRLENSEAKVVVTTPELLERIPVDKLPHLQHVFVVGGEAESGTNIINYDEAAKQESTRLDIEWMDKKDGFLLHYTSGSTGTPKGVLHVHEAMIQQYQTGKWVLDLKEEDIYWCTADPGWVTGTVYGIFAPWLNGATNVIVGGRFSPESWYGTIEQLGVNVWYSAPTAFRMLMGAGDEMAAKYDLTSLRHVLSVGEPLNPEVIRWGHKVFNKRIHDTWWMTETGSQLICNYPCMDIKPGSMGKPIPGVEAAIVDNQGNELPPYRMGNLAIKKGWPSMMHTIWNNPEKYESYFMPGGWYVSGDSAYMDEEGYFWFQGRVDDVIMTSGERVGPFEVESKLVEHPAIAEAGVIGKPDPVRGEIIKAFIALREGFEPSDKLKEEIRLFVKQGLAAHAAPREIEFKDKLPKTRSGKIMRRVLKAWELNLPAGDLSTMED

SEQ ID NO: 126875 - DNA, 1959 bp, Bradyrhizobium japonicum; identical to SEQ ID NO: 121936
  CDS (13)..(1959): transl_table=11

SEQ ID NO: 126876 - protein, 648 aa, Bradyrhizobium japonicum [sequence omitted]

SEQ ID NO: 126877 - DNA, 2013 bp, Brucella melitensis; identical to SEQ ID NO: 121928
  CDS (58)..(2013): transl_table=11

SEQ ID NO: 126878 - protein, 651 aa, Brucella melitensis; identical to SEQ ID NO: 122167

SEQ ID NO: 126879 - DNA, 1956 bp, Brucella suis; identical to SEQ ID NO: 122168
  CDS (1)..(1956): transl_table=11

SEQ ID NO: 126880 - protein, 651 aa, Brucella suis; identical to SEQ ID NO: 122169

SEQ ID NO: 126881 - DNA, 2041 bp, Coprinus cinereus; identical to SEQ ID NO: 122172
  CDS (20)..(2005)

SEQ ID NO: 126882 - protein, 661 aa, Coprinus cinereus [sequence omitted]

SEQ ID NO: 126883 - DNA, 1950 bp, Deinococcus radiodurans
  CDS (1)..(1950): transl_table=11
atgacccatcccaacgaccacattgacgcgatgctgcacgaaacgcgcgtcatccaccccagcgccgaatttcaggccgggacgcgggtcagccgcgcagagtacgagcgccgctaccgccagagcctcgaccagcccgacgacttctggtcagaggtggcccatgacctccactggatgaaggactgggaccgggtgctcgactggcaggagccgcacgcgcagtggttcgtgggggggcagacgaacatcgcctacaacgcgctcgaccgcaacgtgcagcgcggcctcggcgacaagcgggccatcatctgggaaggcgaggacggcgaggtgcggacctacacctacgccgaactgctgcgcgaggtttgcaaggcggcgaacgccctggaagaactcggcgtggtggccggcgaccgagtgaccctctacatgcccctgattcccgaggccgccatcgccatgctcgcctgcgcccgcatcggcgcggtgcattccatcgtgttcggcggcttctcggtctcggcgctggccgaccgcatcaacaacgcgcagagcaagctgctcatcaccgccgacgccggctatcgccggggcaagccggtcacgctcaaaatcaacgccgacgaggcggccaagctcgccccctgcctggaacacgtcctggtggtcaagcgcgccggcattccgctggagtggtggaccgaaggccgcgacctgtggtggcacgacgtagtggaccgccagagcgatcagcacgaggccaccgcgctcgacagcgagcacccactgttcatcctctacacctccggcagcaccggcgcccccaaaggcgtgcagcacacgaccggcggctacatggtgggcacttacctcaccacccagacggtcttcgacctgcgtgacgacgacatttactggtgcaccgccgacatcggctggattaccggccacagctacagcgtgtacggcccgctgctcaacggcgcgacggtggtgatgtatgagggcgctcccaaccagcccgactggggccgcttctgggacatcgtgcaaaagcaccgggtcaccatcctgtacaccgcgccgaccgccattcgctcctttatgcagcacggcgacgagattccgggccgctacgacctcgccagtttgcgcctgctggggtcggtgggcgaacccatcaaccccgaggcgtggatgtggtactaccgcgtcatcggcggcgagcgctgcccggtcgtggacacctggtggcagaccgaaaccggctccatcatgctgaccacactgccgggcgcctttcccagcaagccgggcagcgcggggctgccgatgttcggcgtggagcccgcgctgatgacccgtgacggcgaagagatcggcgacgacgacggcggcctgctcgtcatcaagcggccctggccctccatgctccgcacggtctacggcgacgacgaacgctaccgcaagagctactggggcgagattccgcacgtgtacttcgctggcgacggcgcccgccgcgaccacgacgggtactacacgattgtcgggcgggtcgatgacgtgctcaacgtctccggacaccgactgggcaccatggaaatcgaatcggcgctggtggcgcaccctgacgtgtccgaagccgcagttgtcggcagacccgacccagtgaagggggagagtgtggtggcctacgtgctgctgcaagacgggcacaccgccgaccccgccgccctacgcgcccacgtcagcagcgaaatcggcgccctggcccggcccgacgccatctacattgccgacgccctccccaagacccgcagcggcaaaatcatgcgccgcttcctgaggcaacttgccgccggacagccggtgcagggcgacaccagcaccctggaagaccccaccgttctggaacgactgcaagcctcccctgccctttga

SEQ ID NO: 126884 - protein, 649 aa, Deinococcus radiodurans [sequence omitted]

SEQ ID NO: 126885 - DNA, 2013 bp, Drosophila melanogaster; identical to SEQ ID NO: 122174
  CDS (1)..(2013)

SEQ ID NO: 126886 - protein, 670 aa, Drosophila melanogaster [sequence omitted]

SEQ ID NO: 126887 - DNA, 1959 bp, Escherichia coli O157
  CDS (1)..(1959): transl_table=11
atgagtcaaattcacaaacacaccattcctgccaacatcgcagaccgttgcctgataaaccctcagcagtacgaggcgatgtatcaacaatctattaacgcacctgataccttctggggcgaacagggaaaaattctcgactggatcaaaccgtaccagaaggtgaaaaacacctcctttgcccccggtaatgtgtccattaaatggtacgaggacggcacgctgaatctggcggcaaactgccttgaccgccatctgcaagaaaacggcgatcgtaccgccatcatctgggaaggcgacgacgccagccagagcaaacatatcagctataaagagctgcaccgcgacgtctgccgcttcgccaataccctgctcaagctgggcattaaaaaaggtgatgtggtggcgatttatatgccgatggtgccggaagccgcggttgcgatgctggcctgcgcccgtattggcgcggtgcattcggtaattttcggtggcttctcgccggaagcggttgccgggcgcattatcgattccaactcacgactggtgatcacttccgacgaaggcgtgcgcgccgggcgtagtattccgctgaagaaaaacgttgatgacgcactaaaaaacccgaacgtcaccagcgtagagcatgtggtggtactgaagcgtactggcgggaaaattgactggcaggaagggcgcgacctgtggtggcacgaccaggttgagcaagccagcgatcagcaccaggcggaagagatgaacgccgaagatccgctgtttattctctatacctccggttctaccggaaaaccaaaaggcgtactgcacactaccggcggttatctggtgtacgcggcgctgacctttaaatatgtctttgattatcatccgggcgatatctactggtgcaccgccgatgtgggctgggtgaccggacacagttatttgctgtacggcccgctggcctgcggcgcgaccacgctgatgtttgaaggcgtaccgaactggccgacgcctgcccgtatggcacaggtggtggacaagcatcaggtcaatattctctataccgcgcccacggcgattcgcgcgctgatggcggaaggcgataaagcgatcgaaggcaccgaccgttcgtcgctgcgcattctcggttccgtgggcgagccaattaacccggaagcgtgggagtggtactggaaaaaaatcggcaacgagaaatgtccggtggtcgatacctggtggcagaccgaaaccggcggtttcatgatcaccccgctgcctggcgctaccgagctgaaagccggttcggcaacacgtccgttcttcggcgtgcaaccggcgctggtcgataacgaaggtaacccgctggaaggggctaccgaaggtagcctggtgatcaccgactcctggccgggtcaggcgcgtacgctgtttggcgatcacgaacgttttgagcagacctatttttccaccttcaaaaatatgtatttcagcggcgacggcgcgcgtcgtgatgaagatagctattactggatcaccgggcgtgtggacgatgtgctgaacgtctccggtcaccgtctgggaacggcggagattgagtcggcgctggtggcgcatccgaaaatcgccgaagccgctgtcgtcggtattccgcacaatattaaaggtcaggcgatctacgcctacgtcacgcttaatcacggggaggaaccgtcaccagaactgtacgcagaagtccgcaactgggtgcgtaaagagattggcccgctggcgacgccagacgtgctgcactggaccgactccctgcctaaaacccgctccggcaaaattatgcgccgtattctgcgcaaaattgcggcgggcgataccagcaacctgggcgatacctcgacgcttgccgatcctggcgtagtcgagaagctgcttgaagagaagcaggctatcgcgatgccatcgtaa

SEQ ID NO: 126888 - protein, 652 aa, Escherichia coli O157
MSQIHKHTIPANIADRCLINPQQYEAMYQQSINAPDTFWGEQGKILDWIKPYQKVKNTSFAPGNVSIKWYEDGTLNLAANCLDRHLQENGDRTAIIWEGDDASQSKHISYKELHRDVCRFANTLLKLGIKKGDVVAIYMPMVPEAAVAMLACARIGAVHSVIFGGFSPEAVAGRIIDSNSRLVITSDEGVRAGRSIPLKKNVDDALKNPNVTSVEHVVVLKRTGGKIDWQEGRDLWWHDQVEQASDQHQAEEMNAEDPLFILYTSGSTGKPKGVLHTTGGYLVYAALTFKYVFDYHPGDIYWCTADVGWVTGHSYLLYGPLACGATTLMFEGVPNWPTPARMAQVVDKHQVNILYTAPTAIRALMAEGDKAIEGTDRSSLRILGSVGEPINPEAWEWYWKKIGNEKCPVVDTWWQTETGGFMITPLPGATELKAGSATRPFFGVQPALVDNEGNPLEGATEGSLVITDSWPGQARTLFGDHERFEQTYFSTFKNMYFSGDGARRDEDSYYWITGRVDDVLNVSGHRLGTAEIESALVAHPKIAEAAVVGIPHNIKGQAIYAYVTLNHGEEPSPELYAEVRNWVRKEIGPLATPDVLHWTDSLPKTRSGKIMRRILRKIAAGDTSNLGDTSTLADPGVVEKLLEEKQAIAMPS

SEQ ID NO: 126889 - DNA, 2013 bp, Emericella nidulans; identical to SEQ ID NO: 28616
  CDS (1)..(2013)

SEQ ID NO: 126890 - protein, 670 aa, Emericella nidulans; identical to SEQ ID NO: 28617

SEQ ID NO: 126891 - DNA, 1989 bp, Helicobacter pylori
  CDS (1)..(1989): transl_table=11
atgcaattagacgaagatttagaattcgctaaaaaaatctttaaccctaacagagcgtttgccaagcaagccaggattaaaaacatgtgcgaatataaagatttagtgcatgaagccaatgaagattatgaacatttttggggcgatttagccaagcagaaactcacatggtttaaaccttttgataaggttttaaacagcgataacgccccttttttcaaatggtttgaaaacggcaaaatcaatgtttcttacaattgcatagacaggcatttaaaagacaaaaaaaataaagtggcgatcatttttgaaggggaaatgggggattataatgtcatcacttacagaaaactccactctgaagtcaataaaacagccaaccttttaaaaaacgaattcaatgtcaaaaaaggcgatagggtcattatctatatgcccatgattgtagaaagcgtttatatgatgctcgcatgcactaggattggagcgatccatagcatcgtttttgctgggtttagccctgaagccttaagggataggatcaacgacgctcaagctaaattagttatcacagcggatgggacttttagaaaaggcaaaccttacatgctcaagccagcccttgacaaggctctagaaaataacgcctgccctagcgtggaaaaagcgctcattgtgatacgaaacgccaaagagattgactatgtgagagggcgcgattttgtctataatgaaatggtcaattaccaatccgacaaatgcgaacctgaaatgatggactctgaagatcctttattcttgctctatacaagcggatcaaccggaaagcctaaaggcgttcaacacagcagtgcggggtatttgttatgggcgcaaatgacgatggagtgggtttttgatattagagataacgataatttttggtgcaccgccgatattggctggatcacagggcacacttatgtggtttatggacctttagcttgtggggcgacgactttgatactagaaggcacgatgtcttatccggattatgggagatggtggaggatgatagaagaataccgtgtggataaattctacacttcccctaccgctataagaatgttgcatgccaaaggtgaaaacgaaccctcaaagtataatttagagtcgctcaaagttttaggaacggtgggagagcccattaaccctacagcatggaaatggttttatgaaaaaatcggcaactcaaaatgcagcatcgtggatacttggtggcagacagaaacaggcgggcacatcatcagccctttaccgggagctacgcctataagggccagttgcgcgactttacctttgcctggaatccatgcggaagttttaaacgaagacggcactaaaacaaagcctggagagcaagggtttttatgcatcactaagccatggccttctatgataagaaacatttggggcgatgaaaaacgatacattgatagctatttttctcagatcaagttgaatggggaatatgtctacctctctggagatggcgctatcgtggatgaaaacggatacattactattattgggcgcacagatgatattgtgaatgtgagtgggcataggattggcacggctgaagtggagagcgctatttccaagcatgaaatggtggctgaatgcgcggtggtgggtatccctgatgcgattaaaggagagggcttgtttgcgtttgtggtgctgtgcgatggggctaaatgcaatcttggcgagagtttagaattgctaaaagaaatgaaccatatcttatccattgagattggaaagatcgcgaaattagacaatgtcatgtatgtgccaggtttgcctaaaaccaggagcgggaaaatcatgagaaggcttttgaaatccatcgccaaaaaagagcctatcactcaagatttaagcacgctagaagatgtgaatgtggttaaagaaataatgagcatcgctcaaatggaggagtaa

SEQ ID NO: 126892 - protein, 662 aa, Helicobacter pylori [sequence omitted]

SEQ ID NO: 126893 - DNA, 1986 bp, Leptospira interrogans
  CDS (1)..(1986): transl_table=11
ttgccgaattcggaggaagttatggcaaaagaacgagtcgtttcaccgtccgcagaatttaaaaagaatgcgaacattagtcttaagaattataaatctctttataaagaatccatagaaaacccgaacaagttttgggcaagagaagccaaccgcttgatttggtttaaaaaatggactaaagttttaagccacgattttaaaaacgcaaaagtagaatggtttaaaggtggcaaactcaatgtttcttacaactgtttagatcgtcatatcagcactcccttaaaaaacaaagccgctttaatttgggaaggtgataatcccacagaatctagagtgcttacctattatgatgtttacagagaagtaaatcgttttgcgaacattcttaaaaaatttggagtaaaaaaaggggatcgggttttggtttatctacctatgattccagaattagctattacaattcttgcatgtactcgaatcggtgcgatccattctgtcgtgttcggaggattttccccggaagcccttcaaagtagaatcgacgattgtaaaccaaagttagttgtcactgcggacggaggttttagaggtggaaagccaatcgagttgaaaaaaaacgtggaccttgctctcgaaaagtccaaagaaaaagtaaaaaccgtaatcgtagttcgtcgtactggaaacgagtccggtcttacttggaaagacggtcaagactactggtatcattttttgatgaacgatccggaactttctgcatattgtaagccggaagagatggatgctgaagatcctctttttatcctttatacttccggttcgactggaaaaccaaagggagttttacatactaccggaggttatctcttaggagctaatttaacatttcattatgtatttgatattaaacccgaagacacgtattggtgtaccgctgatattggttgggtaactggtcattcttatttagtttatggcccgttgtccaacggagcttcttccgtaatgtttgaaggggttccttcttatccggacgctgggagattttgggacgttatcgataaatacggtgtaaatatattttatacggcaccgactgcaattcgagctttgatgagagagggactaaatcatattcaaaaaagagatttaagttctcttcgtcttttgggttctgttggagaaccgatcaatccagaagcttgggaatggtattttaaaaatataggaaaaggaaaatgtcctatcgtggatacttggtggcagacagaaacaggatcgattatgattacagctcttccgggagcgattcctcagaagccaggttctgcgacgttgccattttttggagtacagcctgttttagtggataacgatggtaaggagattactgataagggagaagtttctggaaatctatgtatcaaaggtccttggccttcaatgatgcgcggagtttacggagatcctaaacgattttttgaaacttacttttctcagtttaaaggatattattttacaggagacggagcgcgtagagataaagacggatatttttggatcactggaagagtggacgatgtgattaacgtttccggtcataggatcggaagcgcagaagtggaaagtgcactcgttgaaaataaatctgttgccgaagccgctgtagtaggttttccacacgacatcaaaggtcagggaatttacgcctacgttacggttaaagaaggtgttacgactaacgatgttttgaaaaaagagcttatctcaactgtggaaaaaatgatcggtaaaattgcaaggccggacgtgattcattgggctccaggtcttccaaaaacgcgttctggaaaaattatgagaaggattttaagaaaaattgtttctggagaatttgaaggtttaggagatacttctactcttgcagatccatctgtggttcaaaaattgatcgaagataaaaagaaatttcacagttaa

SEQ ID NO: 126894 - protein, 661 aa, Leptospira interrogans [sequence omitted]

SEQ ID NO: 126895 - DNA, 2019 bp, Methanothrix soehngenii
  CDS (1)..(2019): transl_table=11
gtgttgaaattggctggcaaagaagacaagaagttgaagacgacagtatttcaggacgagaccagaatctttaatccgccaaaagagttggtagaaaagtcaatcgtgatgcagtggatgaagaagaaagggttcaagactgagaaggagatgcgtgcttggtgctcctctgatgagcattacctcgagttctgggacgagatggcaaagacgtacgttgactggcacaagccctatactaaggtgatggacgactcggagatgccctacttccactggttcactggaggtgagatcaacatcacatacaacgccgtggacaggcacgccaagggcgcaaagaaggacaaagttgcatacatatggataccagagcctacagaccagccagtccagaagatcacctacggcgacctctataaggaggtcaataagttcgcaaacggcctcaagagcctcggcttgaagaagggggatcgggtcagcatctacatgcccatgataccccagcttcccatcgccatgctcgcctgcgccaagctcggcgtcagccacatcgtggttttctccggattcagctccaaaggcctgatggacagggctgctcactgcggttccagagccatcatcaccgtggatggattctacaggcgcggaaagccggtgcctctgaagccgaacgccgacgaggcagctggcggcgctccgtcagttgagaagattatcgtctacaagcgtgcgggcgttgacgtttccatgaaagagggcagggacgtctggtggcatgatctggtcaagggccagtccgaagagtgtgagccggtatgggttgacccggagcacaggctgtatatcctctacacctccggcacaaccggcaagcccaagggtatcgagcacgcaacgggcggaaacgccgtcggaccggctcagacgcttcactgggtcttcgacttgaaggacgacgatgtctggtggtgtaccgccgatattggatgggtcaccggtcactcctacatcgtctacgctccgctcattctgggcatgaccagcctcatgtacgagggcgctgcagactatccagacttcggtaggtggtggaagaacatccaggaccacaaggtcaccgtcctttacactgcccccacggcggtaaggatgttcatgaagcagggcgcagaatggcctgataagtacgacctctcaagcctgaggctactgggatctgtgggcgagccgatcaatccggaggcctggatgtggtatcgtgagcacattggacgaggcgagctccagatcatggacacctggtggcagaccgagaccggaaccttcctcaactctccgctgcccatcacgccactgaagcccggatcgtgcacattcccgctccccggatatgacatatccatcctggatgaggaagggaatgaggttcctctgggatccggaggcaacatagtggcattgaagccctatccttcgatgctcagggcgttctggggcgacaaagagaggttcatgaaggagtactggcagttctactgggatgttcccggccgccgcggcgtctatctcgctggagacaaggcgcagagggacaaggacggctacttcttcatccagggcagaatcgatgatgttctcagcgtcgcaggccacaggatagccaacgccgaggtcgagtctgccctggtggctcaccccaagatagccgaggcggcagtagttggaaagcccgacgaggttaagggcgagtcgatcgtcgccttcgtcattctgagggtcggaaatgaaccgtcccctgagctggcaaaggatgcgatcgctttcgtcaggaagacccttgggccggtggctgcgcccacggaggtccacttcgtcaacgacctcccgaagacgaggagcggcaagataatgcgccgtgtcgtcaaggcgagggcccttggaaacccggttggggacatatcgaccctgatgaatccagaagcagtggatgggatccccaagatcgtctga

SEQ ID NO: 126896 - protein, 672 aa, Methanothrix soehngenii [sequence omitted]

SEQ ID NO: 126897 - DNA, 1956 bp, Mycobacterium bovis
  CDS (1)..(1956): transl_table=11
gtgagtgagtccacccccgaagtctcctcgtcatacccgccgccagcgcacttcgccgagcacgcgaacgcccgcgccgagctttaccgcgaggccgaggaagaccggctggctttttgggccaagcaggccaaccgactgtcctggacgacgccgttcaccgaggtgttggactggtcggaggcgccgttcgccaagtggttcgtgggcggcgagctcaacgtcgcctacaactgtgtggatcgtcacgtcgaggccggccatggagatcgggtcgccatccactgggaaggcgagccggtcggcgaccggcgcacgctgacctattccgatctgcttgccgaggtatccaaagccgcgaacgcgctcaccgacctcggtctggtggccggtgaccgcgtcgccatctacctgccgttgatccctgaggccgtgatcgccatgctggcctgtgcccggctaggcatcatgcatagcgttgttttcggcgggttcaccgctgcggccttgcaggcccggatcgtcgacgcccaagccaagctgctgatcaccgcggacgggcagtttcggcgcggcaagccatcgcccctcaaggcggccgctgacgaggcccttgcagcgatccccgactgctcggtcgagcacgttctggtggtgcggcgcacgggaattgagatggcctggagcgagggccgcgacctgtggtggcaccatgtcgtcggctcagcttcaccggcacacaccccggagcctttcgattccgagcacccgctgttcctgctgtacacgtcaggcaccaccggcaagcccaaaggcattatgcacaccagcggcggctatctcactcagtgttgctacacgatgcgcaccattttcgatgtcaagccggacagcgacgtgttctggtgcaccgccgacatcggctgggtcaccggccacacctacggcgtctacggcccgctgtgcaacggagtcaccgaggttctctacgagggcacgccggatacccccgaccgacaccggcatttccagatcatcgaaaaatacggcgtgacaatctattacaccgcccccaccctcatccggatgtttatgaagtggggccgtgagatccccgacagccacgacctgtccagcctgcggctgctggggtcggtcggcgaaccgatcaaccccgaggcttggcgttggtaccgcgatgtcatcggcggcggacgcaccccgctggtagacacctggtggcagaccgagaccggctccgcgatgatctccccgctgcccggaatcgctgcggccaaaccgggttcagcgatgacgccgctgcccgggatctcggccaagatcgtcgacgatcacggtgatccgttgccaccgcacaccgagggcgcccagcatgttaccgggtacctcgtcctagaccagccgtggccgtcgatgttgcgcggcatctggggcgaccccgcgcggtattggcactcttactggtccaaattttccgacaagggctactacttcgccggggacggcgctcgcatagaccccgacggcgcgatctgggtactaggccgcatcgacgacgtgatgaacgtgtccgggcaccggatctcgaccgccgaggtggaatcggcgctggtcgctcactctggcgtggccgaggcggcggtggtcggggttaccgacgagaccacgacccaggccatctgtgcgttcgtcgtgctacgcgccaactacgccccccatgaccgcacagccgaagagttgcgcaccgaagtggctcgagtgatctcgcccatcgcacggccacgcgacgtccacgtagtgcccgaactacccaagactcgtagcggcaaaatcatgcgtcgactgctgcgcgacgtcgcggaaaaccgtgagcttggcgacacgtcgacgctgctcgatcccaccgtattcgacgcgatccgggccgccaagtag

SEQ ID NO: 126898 - protein, 651 aa, Mycobacterium bovis [sequence omitted]

SEQ ID NO: 126899 - DNA, 2004 bp, Neurospora crassa; identical to SEQ ID NO: 28618
  CDS (1)..(2004)

SEQ ID NO: 126900 - protein, 667 aa, Neurospora crassa; identical to SEQ ID NO: 28619

SEQ ID NO: 126901 - DNA, 1968 bp, Nitrosomonas europaea
  CDS (1)..(1968): transl_table=11
atggccacgatcgaatcaattttgcacgaaaaccggatattcccccctgccagtgaatttgtcaggaacgccaatctatccggaagggaagcctatgaaactctgcgccaggaagccgagcatgactataccggcttctgggcgaaactcgcacaacagtacattgcctggcacaaacctttcacacgggttctcaatgacgccaacccacccttttataaatggttcgacgatggcgaactgaatatctcgtggaattgtctggatcgacacctggcaacccaggctgacaaaactgccatcatctttgaatctgacgcaggagaagtgaatcactgcagttatcgtgagttacaccgccaggtctgtcattttgccaatggactgaaatcacttggaatccgtcagggtgaccgtgtcgtcatctatatgcccatgcggattgaagctgtagttgcgatgcaggcatgtgcacgcattggtgccatccattcggtagtgttcggcggtttttcagcaaaaagtgtatacgagcgcatcatcgatgccggtgcatccgctgtaatcactgcagatgaacagatccgcggaggcaggtaccatccactgaaagcaaccgtagacgaagcactggcgatgggtgacacagccacggtccacagtgtcatcgttttccggcacaccggtaccggaattacctggcagccggaacgagaccactggtggcatgatctcattgccggacaaccggatgaatgcgagccagcatggatcaatgctgaacaccccctgtttacactgtatacctcgggctctaccgggaaaccaaaaggcgtgcagcattcctcggccggttatctgctcggggcagtgaccagcatgcagtgggtattcgactatcatgcagatgatgtattctggtgtactgcggatgtaggctgggttaccggacacagctatgtcgcctatggcccgcttgccatcggtgcaactcaggtgatttttgaaggaactccgactcatccacatgccgggcgattctgggaaatcatccagaaacacaggatcacgactttttatactgcccccactgccatccgctcactgatcaaactgggatccgatctgcccgcaaaatatgatctttcttcattgcgcctgcttggatcagtaggtgaaccgatcaacccggaagcatggatgtggtattacacggtcgtcggccagtcacgctgcccggtagtcgatacctggtggcaaaccgaaaccggttgtcacatgatcgctcctgctcccggtgccatatcgaccaaacccggttcctgcactctcccgctacccggtatcgatgccgcagtggtagatgaaactggccacccggtagaacagggaaaaggtggatttctggtgatcaagcgtcccttcccttcgatgttacgcaccttgtggaatgatcctgaacgattcagaaaaacttactttccaacagatattgccggtggtcgttattatcttgccggcgattcagctcatcgggatcaggatggttatttctggatcatgggacgagttgatgacgttctgaatgtctccggccatcgtctgggtaccatggaaatcgaatctgcactggtggcgcatcctctggttgccgaagcagctgttgtagggaaaccgcacgaaatcaagggagaagtggtcgtagcatttgtcacactgagagaaaaactgcctgatgaccaacgggctgctgaaattgctgcaactttacgtgaatgggttgccagcgagattggtgcaattgctcgccccgaagaaatccggtttggtgaaaacctgcccaaaacgcgttccggcaaaattatgcgacgcctcctgcgcgccctggcaagaggtgagaccattactcaagatgtctcaacactggaaaatccggtgatcctcgaacaactcagccagacggtatga

SEQ ID NO: 126902 - protein, 655 aa, Nitrosomonas europaea [sequence omitted]

SEQ ID NO: 126903 - DNA, 1962 bp, Pasteurella multocida
  CDS (1)..(1962): transl_table=11
atgccgcataattcgatgttaaaagaaaatcgtcttttcaaaccaacagatgaatttcgtcgccaagccaatatttcgggcttagaaacctatcaagcgctttgggaatttgctgacaaagattatctcacctattggagtgatctggcgcgtgaattaatcacttggaaaaagccttttatgcacatctttgatgattcagaagcgcctttctataaatggttttccgatggcactttaaatgtgtcctataactgtttagatcgccacttaccagacaaagcagataaaaccgcgctgatttttgaatcagattttggtcaagtccaactctatacttatgccaaattacataatcgcgtttgccgttttgctaatgcattgcgtgaattagggatcaaaaaaggggatcgggtcattatttatttacccatgctcgtggaagctgtgattgcgatgcaagcctgtgcccgtatcggtgcggttcattcagtggtatttggtggtttttctgccagcgcactacgtgatcggattgaagatgctgaagccaaattagtgattaccgcgaatgctggattacgtggtggtaaaattattccacttaaagagaccgtggatgaagctttagaaatgggctgtaaaacaattgaaaatgttatcgtctttcaccgagtgaatattgataccccgtggaaaaaagggcgtgatctctggtggaatgaacttactgcaaaccaacccgctttctgtgagccagaatggatgaatgcggaagacccgctatttattttatacacctcgggatcaacgggtaaaccgaaaggcattgtacacagtaccggtggttatttattaggtgcattaaattcgtttcgcaatgtgtttgataataagccaaatgatattttctggtgtacggcagatgttggctggatcacgggacattcttatgtctgctatggtccgctcgccaatggcgcaacacaggtaatttttgaaggcgtaccgacttatccagatccgggacggatttggcgaatgatacaacgtcacaaaattaatgtattttacacttcaccgactttaattcgttcattgacacgcttaggcgaccatatccccaataagtatgatttatcttcactacgcttacttggcagcgtgggcgaaccaattaacccatcggcttggatgtggttttatgaagtggttggtaaaagtcgctgtccaattgttgatacctggtggcaaacagaaaccggctcgattatgctcgcaccgatacccggcgtaaccgcaaccaaaccaggttcttgtaccctaccattaccgggtattatggctgaggtgttagatgaaaatggtcaaaaatgtgcggtagaacaaggcggtgcgctcgctattaaacgtccattcccatcgatgttacgcacaatttggaatgatcctgaacgttataaatctacctatttccctgcggaatatggcggcaaatactacatcgcaggcgataatgcccatcgcgataaagacgggtatttttggattcttggacgcacagatgatgtgcttaatgtctcaggacatcgacttggtaccatggaaattgaatctgcgctcgtcgccagtccaaaagtggctgaagcggcagtggtcggtaagccagatgagatcaaaggggaagcaattgttgctttcgtagtgctgaatgatttccgtccagaaggtgaagaagcacgtcagctggcagaagaactcaaagcctgggtatccaatgaaattggtaaaattgcccgtcctgaagatatccgctttgccgataacttaccaaaaacacgctcaggcaagattatgcgtcgtttattgcgatctatcgccaaaaacgaaatgatcacacaagatatttccaccttagaaaatccacagatcatcggtcaattacaacaacaatggctttaa

SEQ ID NO: 126904 - protein, 653 aa, Pasteurella multocida [sequence omitted]

SEQ ID NO: 126905 - DNA, 2010 bp, Penicillium chrysogenum; identical to SEQ ID NO: 122180
  CDS (1)..(2010)

SEQ ID NO: 126906 - protein, 669 aa, Penicillium chrysogenum; identical to SEQ ID NO: 122181

SEQ ID NO: 126907 - DNA, 2013 bp, Pyrobaculum aerophilum
  CDS (1)..(2013): transl_table=11
atgtccttagaattaaaagaaaaggaaagcgaactgccctttgatgaacaaattataaacgataagtggaggagtaaatatacgcctatagacgcctactttaaattccacaggcagacagtcgagaacttagagagtttctgggaaagcgtagccaaggagttggagtggtttaagccgtgggacaaggtgttagacgcctctaatccgccgttttacaagtggtttgtaggagggaggcttaatctgtcatacctggcagtagacagacatgtaaagacgtggaggaagaacaaactcgccattgagtgggagggagagcccgtagatgaaaacggctaccccacagacaggaggaaactgacgtattacgacctataccgcgaggtaaaccgcgttgcatatatgttaaaacagaacttcggcgttaagaagggcgataaaataacgctgtatctacccatggtgcccgagctcccaataaccatgttagccgcgtggagaattggcgcaattaccagcgttgttttctccgggttctcggccgacgcgctggcagagcgtataaacgactcccagtcgcgtattgtcataaccgcagacggcttctggcgcagggggagggtggtcagacttaaagaagtggtagacgccgcgttggagaaggccacaggagttgagagtgtaatcgtcttgcctagactcggcttaaaagacgtcccaatgaccgaggggcgcgactactggtggaataagttaatgcaggggattccgcctaatgcctacatcgagcccgagcctgtggagagcgagcacccctcctttattctatacacctcgggcactacggggaagcccaagggcattgtgcacgacacaggcggctgggccgtgcacgtatatgctacaatgaagtgggtttttgacataagagacgacgacatattctggtgcactgcggatataggctgggtcaccggccactcctacgttgtgctagggcctttgttaatgggagccactgaggtgatctacgagggcgcccccgactacccgcagccagataggtggtggtctataattgagcgctacggcgtcactatattctacacgtcgcctaccgccatacgcatgttcatgcgctacggcgaggagtggccaagaaagcacgacctctccactttgcgcataatccactcagtgggcgagccgataaaccccgaggcctggaggtgggcatacagagtcctcggcaatgagaaagtcgcctttggctccacttggtggatgacggagactggaggcattgtgataagccatgccccaggcctctacttagtgcccatgaagcccggcactaacggcccgccgctgcctgggtttgaagttgacgtggtggacgaaaacggcaacccggccccgccaggcgtaaagggctatcttgtcattaaaaagccgtggcccggcatgctccacggcatttggggcgatcccgagcgttatataaagacctactggtccagattccccggcatgttctacgccggcgactacgctattaaggataaggacgggtacatatgggtgttgggacgcgccgacgaggtgatcaaggtggctgggcacaggctgggcacatacgagctggagtcagccctaatttcacacccagctgtcgccgagtcggcggtggtaggcgtgcccgacgccatcaaaggagaggttcccatagccttcgtggtgctgaaacaaggcgtggcgccaagcgacgagttgcgcaaagagttgagggagcatgtaaggagaactataggccccatagcagagccagcccagatatttttcgttacaaagttgcccaagacacgctccggcaagataatgcgccgcctgctgaaggccgtggccacgggggcgccgctgggagatgtaacgacgctagaggacgagacctccgtggaggaagctaagagggcatacgaggagataaaggctgagatggcgagaacatga

SEQ ID NO: 126908 - protein, 670 aa, Pyrobaculum aerophilum [sequence omitted]

SEQ ID NO: 126909 - DNA, 1983 bp, Ralstonia solanacearum; identical to SEQ ID NO: 122182
  CDS (1)..(1983): transl_table=11

SEQ ID NO: 126910 - protein, 660 aa, Ralstonia solanacearum; identical to SEQ ID NO: 122183

SEQ ID NO: 126911 - DNA, 1956 bp, Rhizobium loti; identical to SEQ ID NO: 122184
  CDS (1)..(1956): transl_table=11

SEQ ID NO: 126912 - protein, 651 aa, Rhizobium loti; identical to SEQ ID NO: 122185

SEQ ID NO: 126913 - DNA, 2016 bp, Rhodopirellula baltica
  CDS (1)..(2016): transl_table=11
atgcccaccgcgtccgcgtctgaatccagttccaaccaacccgaatcctcaaatgcgtcgggatcaatcgatcacgtgttggtggaagaccgtctgtttcacccgtcggccgagtttacgtccaaggcggtgatctcgacggaagaacagtacgaaaagctggccaccgcagctcgcgaaaatccagatgagttctggcgggcggaggctctggaacatctgcattggttcgaaccgtttggcaccgtatgcgattggcagccgcctcacgcgaaatggtttgtgaacggcaaaaccaacgcgtgctacaacagcgtcgacgctcacgtggcagccggtcgtggtgatcggaccgcgattatttgggaaggcgaaccggtcgaagacggtcagccacgcgaccagcggacgttgacgtatgccgaattgcaaaccgaagtcgccaagtgtgccgaaggattgacgcagttgggcattggtgtcggcgacgtcgtgagcatctacatgccgatgacacctgaactcgccgtcgcgatgctggcgtgtgctcgaatcggtgcgattcactcggtgattttcgcgggattcagcgcagaatcgattgcggagcggaacaatgacgcatcggccaagttggtcatcacttccgacggtctgtatcgccgcggcaaagtgctgccgttgaaagcgaccgtggacgaagcactcgaaaagtcaccaacggttgaaaagtgcttggtgcttcgccgaaccggggatgatgcaccgatgcaggaaggtcgcgacgtttggtggcatgatgtcgttgaaaaccaacctggcgagatggcggccaagccactcgacagtgaaacgccgttgttcatcctctacacctccggcagcaccggcaaaccaaagggcattctgcacaccaccgcgggatacaacttgtgggctaaacggacctttgagtgggtgttcgatcatcgcgaaggcgatgtttattggtgcacggcagattgcggttggatcaccggtcacagctatgttgtgtacggacctttgtcggctggcgcgacgtgtttgatgtacgaaggggcgccgaacttccccgccgaagatcgtttttgggacatcgtcgagcgtcacaaggtcagcattctttacaccgctccgaccgccgttcgagcgttcatcaaatggggcgacgaacatgtcgacaagcatgatttgtcgagtctgcgattgctaggaagtgtcggcgaaggcatcaatccagaagcttggatgtggtaccacaaaaagatcggtggcgagaaatgtccgatcgtcgacacgtggtggcaaaccgaaacgggcggcatcatgatgagtcccctgccagggatcacgcctacgaaaccgggatcttgcacccgtccattgcctggcgtggtgcccagcattgtcgacgaacttggcaactcggtggacagtgagcacggcggaaaactttgtatttcgcaaccctggcccggaatgttacgtgggatctacggcgatgaagaacgcttcgttgaacagtattggtctgacgtgccggacaagtatctgacgggtgacaacgctcgctgcgataccgatggctattactggatcatgggacgcatcgacgatgtgatcaatgtttccggccaccgcttgagcacgatcgaggtggagtccgcgttggtttctcaccccgatgtatgcgaagccgccgttgtgggacgtccgcatgatttgaagggacaagccatcgcggcatttgtcacttccaatgaccgcgggcacgacgacgaattccgaaacgagttgaagcagcacgtgcgaaagcagatcggcgcgttggctcagcccgatgacattcgcttcacggcggcgcttcccaagacccgaagtggcaaaatcatgcggcgattgctgcgagatgttgccgcgggacgcgaattggtgggcgacacatcgacgctggaagacctttcctcgctcgcgaaactgcgtgaggaagactag

SEQ ID NO: 126914 - protein, 671 aa, Rhodopirellula baltica [sequence omitted]

SEQ ID NO: 126915 - DNA, 1971 bp, Rhodobacter capsulatus; identical to SEQ ID NO: 122186
  CDS (1)..(1971): transl_table=11

SEQ ID NO: 126916 - protein, 656 aa, Rhodobacter capsulatus [sequence omitted]

SEQ ID NO: 126917 - DNA, 1959 bp, Salmonella typhimurium; identical to SEQ ID NO: 122188
  CDS (1)..(1959): transl_table=11

SEQ ID NO: 126918 - protein, 652 aa, Salmonella typhimurium; identical to SEQ ID NO: 122189

SEQ ID NO: 126919 - DNA, 1989 bp, Schizosaccharomyces pombe; identical to SEQ ID NO: 28622
  CDS (1)..(1989)

SEQ ID NO: 126920 - protein, 662 aa, Schizosaccharomyces pombe [sequence omitted]

SEQ ID NO: 126921 - DNA, 1953 bp, Shewanella oneidensis
  CDS (1)..(1953): transl_table=11
atgagctcgcagtctctctacaaagtctccggcaatatcgctgccaatgcacttgtaaataacgatcaatataaaacaatgtaccaagagtcgattgtcaatccagagggtttctggagagagcacggcaaacggatcgattggataaagccatacactaaaatcaaaaaaaccacttttgacgatcataacttatcgattaactggttctatgacggcaccctaaacgcctcagctaactgcttagatcgccatctagctgcgcacagcgatcgcgtcgccattatttgggaaggcgataacgccaacgaacaacgtaaaattacctacggtgagctgcacactcaagtatgtaagtttgccaacgcgttacgcagccaaggcgtacgccgtggcgatatcgtcacgatttatatgccgatggtgccagaagccgccgtcgcgatgctggcctgtgctcgcattggtgctgtgcattccgttgtttttggtggtttctcacccgattctatcgcctcacgggttatcgatggtaaatccaaaatcgtcatcacctccgatgaaggtatgcgtggtggccgcgccattccgctcaaacgcaacatcgacgatgcgttaaaacatcccgatgtaaccagtgttgagaaagtcattgtacttaaacgtactggcggcaagattgactgggtagaaggtcgggatgtgtggtggcattcactggttgaaaccgcatccgaacattgcgctgtcgaagaaatgggcgccgaagatccgctgttcttactctatacctcaggttcaacgggtaatccaaagggcgtattgcacactactggcggttatatggtgtatgcctccatgacccacgaatatgtgttcgattacaaacccggtgagatttactggtgtacggccgatgtaggttggatcaccggtcactcttacatggtttatggtcctcttgcgaacggcgcaactgtgcttatccacgaaggggtacccaatcacccaagcccagcgcgtttaggcgagatgattgaccgccataaagtcaatattctctatactgcacctacgcttattcgcgcactgatggccgaaggtaagcaacattttgataagtacaatggcagctcactgcgcatcatgggctctgtaggtgaaccaatcaacccagaagcttggcgttggtaccatgaagtcatcggccacgagcattgcccgattgtcgatacttggtggcaaaccgaaactggcggtattttgatcaccccactgccaggcgcaaccgataccaaaccaggctcggcgactcgccccttctttggcgtgcaacccgcgcttgtggacaacatgggtaacattttagaaggtgcaaccgaaggtaacttagtgctgctcgactcatggccaggccaaatgcgtaccgtgtatggcgaccatgaaagattcgtactcacctattttaaaaccttccgcggcatgtatttcactggtgacggcgctcgccgcgatgaagatggttattactggatcacaggccgtgtggacgatgtgattaacgtctctggccacagattaggtaccgccgaagtcgaaagtgcgctggtttcacacgagctggtcgctgaggccgcagttgtgggctatccccatgatattaaaggccaagggatttatgcctatgtcaccttaacccgcggcacagaagaaagtgaagaacttcgccaagaactgcgccaatgggttcgtaaggaaattggcgccttagccacaccggatcttatccagtgggcgacaggattgcctaagacccgttctggcaaaatcatgcgccgcttcctgcgtaagattgccgctaacgaagtgaccaatttaggggatgcatcaacactggcagacccagccgtgattgaaaccttgattgagactcgcttaaatcgcaacgagtaa

SEQ ID NO: 126922 - protein, 650 aa, Shewanella oneidensis [sequence omitted]

SEQ ID NO: 126923 - DNA, 1959 bp, Streptomyces avermitilis
  CDS (1)..(1959): transl_table=11
gtgagcaacgaaagcctggccaacctgctgaaggaagagcgcaggttcgcgccgcccgccgacctggcggcgaacgccaatgtcaccgcggaggcgtatgagcaggccaaggctgacaggctcggcttctgggccgagcaggcccgccggctgacctgggccaccgagccgaccgaaacgctggactggtcgaacccgccgttcgccaagtggttcaaggacggcaagctcaatgtcgcgtacaactgcgtcgaccgccacgtcgaggcgggccacggcgaccgcgtcgcgatccacttcgagggcgaacccggcgacagccgtgccatcacctacgccgagctcaaggacgaggtctccaaggccgccaacgccctgaccgagctgggagttcagaagggcgaccgggtcgccgtctacctcccgatgatccccgaggcggtcgtcgcgatgctcgcgtgcgcccgcatcggcgccgcgcactccgtcgtcttcggcggattctcggccgacgcgatcgcggcccgtatcaaggacgccgacgccaagctggtcatcaccgccgacggtggctaccggcgcggcaagccctccgcgctcaagcccgccgtcgacgacgccgtcagccgcggggacggggtcgagaaggtgctcgtcgtgcggcgtacgggccaggaagtcgcctggaccgagggccgcgacgtctggtggcacgagatcacggccaagcagtccgccgaacacacgcccgaggccttcgacgccgagcaccccctgttcatcctctacacgtccgggaccacgggtaagccgaagggcatcctgcacacctccggcggctacctcacccagacgtcgtacacccaccacgccgtcttcgacctcaagccggagaccgacgtctactggtgcacggccgacatcggctgggtgaccggccactcgtacatcacgtacgggccgctctcgaacggcgcgacgcaggtcatgtacgagggcacgcccgacaccccgcaccagggccgcttctgggagatcgtccagaagtacggcgtcaccatcctctacaccgcgcccaccgcgatccgtacgttcatgaagtggggcgacgacatccccgcgaagttcgatctgtcctccctccgggttctggggtccgtcggcgagcccatcaaccccgaggcgtggatctggtatcgcaagcacatcggcggcgaccgcacgccgatcgtggacacctggtggcagaccgagaccggcgcgatgatgatctcgccgctgccgggcgtcaccgagaccaagccgggctccgcccagcgcccgctgccgggcatctcggcgacggtggtggacgacgaggcccgggaagtacccaacgggggcggtggctatctcgtcctcaccgaaccgtggccgtcgatgctgcgcaccatctggggcgacgaccagcggttcctcgacacgtactggtcgcgcttcgagggcaagtacttcgccggtgacggcgcgaagaaggacgaggacggcgacatctggctgctcggccgcgtcgacgacgtcatgctcgtgtccgggcacaacatctcgacgaccgaggtcgagtcggcgctcgtctcccacccgtcggtcgccgaggcggccgtggtcggtgccgccgacgagacgaccgggcaggccatcgtcgccttcgtgatcctgcgcgggacggcgaacgccgaggacgacaacctggtcgccgacctgcgcaaccacgtcggcaccacgctcggcccgatcgccaagcccaagcggatcctcccggtggccgagctgccgaagacccgctccggcaagatcatgcggcgcctgctgcgcgacgtcgccgagaaccgggccctcggagacgtcaccaccctgaccgattcctcggtgatggatctgatccagtccaagctcccggcggcgccgagcgaggactga

SEQ ID NO: 126924 - protein, 652 aa, Streptomyces avermitilis [sequence omitted]

SEQ ID NO: 126925 - DNA, 1956 bp, Streptomyces coelicolor
  CDS (1)..(1956): transl_table=11
gtgagcaacgaatccttggccaacctgctcaaggaagaacgcaggttcgcaccccccgccgacctggccgcgaacgccaacgtcacggcggaggcgtacgaacaggccaaggctgacaggctcggcttctgggccgagcaggcccgccggctgacctgggcgaaggagccgaccgagacgctcgactggtcgaacccgccgttcgccaagtggttcaaggacggcacgctgaacgtcgcctacaactgcgtggaccgccacgtggaggccggcaacggcgaccgcgtcgccatccacttcgagggcgagtccggcgacagccgcgccctcacctacgcccagctcaaggacgaggtctccaaggccgccaacgccctgctggagctgggcgtgcagaagggcgaccgggtcgccatctacatgccgatgatccccgagaccgcgatcgcgatgctggcctgcgcccgcatcggcgccgcgcactcggtggtcttcggcggcttctcctcggacgcgctggccacccgcatccaggacgccgacgcccgcgtcgtcatcaccgccgacggcggctaccggcgcggcaagccgtccgcgctcaagccggccgtcgacgaggccgtcgagcgcgcggggatcgtcgagcacgtgctcgtcgtccgccgcaccggccaggacgtcgcctgggacgactcccgggacaagtggtggcacgagaccgtcgacgggcagtccgccgagcacacgcccgaggcgttcgacgccgagcacccgctgttcatcctgtacacgtccggcacgacggggaagcccaagggcatcctgcacacctccggcggctacctcacacagacggcgtacacccactgggcggtcttcgacctcaagccggagaccgacgtcttctggtgcaccgccgacgtcggctgggtcaccggacactcgtacatcgtctacggcccgctcgccaacggcgccacccaggtcatgtacgagggcaccccggacaccccgcaccagggccgcttctgggagatcgtgcagaagtacggcgtgacgatcctctacacggcgcccaccgcgatccggacgttcatgaagtggggcgacgacatccccgcgaagttcgacctgtcctccctgcgcgtcctcggctcggtcggcgagccgatcaaccccgaggcgtggatctggtaccgcaagaacatcggcgcggacgccaccccggtggtcgacacctggtggcagaccgagaccggcgcgatgatgatcaccccgctgccgggcgtcacccacgccaagccgggctccgcccagcgcccgctgcccggcatctccgccaccgtcgtcgacgacgaggccaacgaggtgccgaacggtggaggcggctacctggtgctcaccgagccgtggccgtcgatgctgcgcaccatctggggcgacgaccagcggttcatcgacacctactggtcgcgcttcgagggcaagtacttcgcgggcgacggcgccaagaaggacgacgacggcgacatctggctgctcggccgcgtcgacgacgtgatgctcgtctccggccacaacatctccaccaccgaggtggagtcggccctcgtctcccacccctcggtcgccgaggcggccgtggtcggcgcgacggacgagacgaccgggcaggccatcgtggccttcgtgatcctgcgcggcaccaccgcggagagcgaggacctggtcgccgagctgcgcaaccacgtcggtgccacgctcggcccgatcgccaagcccaagcggatcctgccggtctcggagctgccgaagacccgctccggcaagatcatgcggcgcctgctgcgagacgtcgcggagaaccggcaggtcggcgacgtcacgacgctggcggactcgacggtcatggacctcatccagacgaagctcccggccgcccccagcgaggactga

SEQ ID NO: 126926 - protein, 651 aa, Streptomyces coelicolor
MSNESLANLLKEERRFAPPADLAANANVTAEAYEQAKADRLGFWAEQARRLTWAKEPTETLDWSNPPFAKWFKDGTLNVAYNCVDRHVEAGNGDRVAIHFEGESGDSRALTYAQLKDEVSKAANALLELGVQKGDRVAIYMPMIPETAIAMLACARIGAAHSVVFGGFSSDALATRIQDADARVVITADGGYRRGKPSALKPAVDEAVERAGIVEHVLVVRRTGQDVAWDDSRDKWWHETVDGQSAEHTPEAFDAEHPLFILYTSGTTGKPKGILHTSGGYLTQTAYTHWAVFDLKPETDVFWCTADVGWVTGHSYIVYGPLANGATQVMYEGTPDTPHQGRFWEIVQKYGVTILYTAPTAIRTFMKWGDDIPAKFDLSSLRVLGSVGEPINPEAWIWYRKNIGADATPVVDTWWQTETGAMMITPLPGVTHAKPGSAQRPLPGISATVVDDEANEVPNGGGGYLVLTEPWPSMLRTIWGDDQRFIDTYWSRFEGKYFAGDGAKKDDDGDIWLLGRVDDVMLVSGHNISTTEVESALVSHPSVAEAAVVGATDETTGQAIVAFVILRGTTAESEDLVAELRNHVGATLGPIAKPKRILPVSELPKTRSGKIMRRLLRDVAENRQVGDVTTLADSTVMDLIQTKLPAAPSED

SEQ ID NO: 126927 - DNA, 1971 bp, Synechococcus elongatus
  CDS (1)..(1971): transl_table=11
atgagtcatcccacgattgagtcgattcttcaggaaaaccgccttttttatccccccgatgattttgtggccaaggcgcggattcattcccttgaggcctacaatgccctctacgaaaaggcaaaagctgatcccgccgctttttggggagagcttgcccagcaggagctagagtggtttcaaccttgggagcaagtactggattggcagccgcccaatgccaagtggtttgtcaatggcaaaatcaacatcacctacaactgcttggatcgccacctcaaaacatggcgcaagaataaagccgccttaatctgggaaggcgaacccggtgatagccgcactctcacctatgcccaactgcaccgtgaggtgtgccaatttgccaatgttctcaagcaactaggggtgaaaaagggcgatcgcgttggtatttatatgccgatgattccagaggcagccattgccatgttggcctgtgcgcgcattggtgcgccccactcagtggtctttggcggttttagtgctgaagccttgcgcgatcgcctcattgatgcccaagccaaactggttgttaccgctgacggtggctggcgtaaagatgccattgtacccctgaaagatcaggtggataaagcccttgcccatcaaggcgttcccagcgttgaaaatgtcttggtggtgcagcgcacccagcagccagtaaccatggtgcccggtcgcgatcactggtggcacgatttgcaaaagggagtcagtgccgactgtcctgccgaacctatggacagcgaggatttactctttatcctttacacctccggctccaccggcaaacccaagggtgttgtccacaccaccgcaggatacaacctctacacccatatcaccactcaatgggtctttgacctccaagataccgatgtctattggtgtaccgccgatgttggctggattacgggtcacagctatattgtctatgggccgctgtccaatggtgccaccaccctcatgtatgaaggggcaccccgcccctccaaccccggttgcttctgggatgtgattgagaagtatggggtgacgattttttacacggctcccactgctattcgtgccttcatcaaaatgggtgaacacttgccgcgggcgcgcgacctctcctccctacgccttttgggaaccgtgggtgaacccatcaaccccgaagcatggatgtggtactaccgcgtcatcggcggtgagcgctgcccgattgtggatacctggtggcaaacggaaaccgggggtcacatgatcacctcactgccgggggcacttcctatgaagcccggctctgctagcaagccctttccggggattctcgccgatgtcgtggaccttgagggcaacccggtcggcgtcaatgagggtggctatctggtcattcgtcatccttggccggggatgatgcgcacggtgtatggggatcccgatcgcttccgccgcacctattgggagcacattccccctcgcgatggtcagtatttttactttgccggcgatggtgcccgcagggatgaagatggctacttttgggtgatgggacgggttgacgatgtgatcaatgtctcgggccaccgcctgggcaccatggaaattgaatcggcattggtctcccaccctgccgttgctgaagccgccgttgtgggtaaacccgacgaggtcaaaggggaagagatcgttgcttttgtgattcttgaaggatcggcgacccccagtgatgccctccaacaggaattaaagcaacacgttgtcaatgaaattggtgccttggcacgtccagcggagattcgctttaccgatgccctacccaagacacggtcaggcaaaatcatgcggcggctgctccgttccctagccgcaggtcaagaggtagttggcgatacttcaaccttggaggatcgctcagtcctcgataggctgcgccaagggagttga

SEQ ID NO: 126928 - protein, 656 aa, Synechococcus elongatus [sequence omitted]

SEQ ID NO: 126929 - DNA, 1962 bp, Synechocystis sp
  CDS (1)..(1962): transl_table=11
atgtcagataccattgaatccatcctgcaggaagagcgactgtttgatccccctacagaatttagtgagcgggcttacgtgcgtagtgggcgggagtatgagcaactgtacagccgggcggccagcaatccggagaagttttggggtgagctggcggagcaggaattacattggtttaaaaaatgggaccaggttttggattggcaacctccctttgcgaaatggtttgtggggggtcagttaaatatttcccataactgtttggatcggcacttaaccacctggcggcgcaataaggcggccattatttgggagggggaaccgggagattcccggataattacctatgcccaactccatcgggaagtgtgtcagtttgccaatgccctgaaaagtttaggcgtgcaaaaaggtgatcgggtagcaatttatctgcccatgattcccgaagcggcgatcaccatgttggcctgttcccgtatcggtgcgccccatagtgttgtgtttggtgggtttagtgcggaagccctgcgggatcgattagtggatgctgaagccaaattggtcataactgccgacggtggttttcgtaaagataaggcgatcgccctgaagcaggaagtggataaggccctggaacacggtgcccccagcgtggaaaacgtcatcgtcgtgcaaagaactaaagccgatgtgaccatgacggcgggacgggaccactggtggcacgaactccaacctcaacagtcggcccattgcccagcggaacccatagacagtgaagatatgctgtttattctctacacctctggcagtactggcaaaccaaaaggcgtggtccacaccaccgggggttacaacctttacacccacatgaccaccaaatggatctttgacctcaaagatacggacgtttattggtgtaccgctgatgtgggttggattacgggccacagctacattgtttacggccccctgtccaacggtgcaacaacggtaatgtatgaaggggtgccccgcccctccaaccccggttgtttttgggacgtaattgaaaggtatggggtgaatattttctacaccgcccccaccgccatccgagcctttattcgcatgggggaagccgtacccaacgccagggatttatcctctctccgtttactgggcactgtgggggaacccattaaccccgaagcttggatgtggtaccaccgggtcattggcggcggtaaatgccccattgtcgatacctggtggcaaacggaaaccggcggcattatgctcactcccctacctggagctatccctaccaaacccggttcttgtaccaaaccttttcccggcattgtggcggaaattgttgatttagatggcaatcccgtcgagtcagaccaagggggctttttagtgattaaacaaccttggcccagcatgattcgggatgtgtacggcgacaccgatcgcttccgccatacctattgggaacatattcaacccaaggagggacaatatctctactttgctggggacggggcccgccgggataaagacggttatttttgggtcatgggccgggtggatgatgtgattaatgtctctggtcaccgtttaggcactatggaaattgaatcggctttggtttcccatcccctcgtagcggaagcggcggtggtgggtcgccccgatgaattgactggggaagccattttcgcctttgtttctctggagggtaacgctgaacccagtgaagagttgaaaaaagatttggtcaagcacgtcactgaagaaattggggcgatcgccaggccagcggaaatccgtttcaccgatgtgttacccaaaacccgttccggcaaaattatgcgtcgtctgttgcggagtttagcctccgggcaggaaatttccggggacacttccaccctggaggaccggacagtgctggacaaattacgggagggctaa

SEQ ID NO: 126930 - protein, 653 aa, Synechocystis sp [sequence omitted]

SEQ ID NO: 126931 - DNA, 2001 bp, Vibrio cholerae; identical to SEQ ID NO: 121924
  CDS (52)..(2001): transl_table=11

SEQ ID NO: 126932 - protein, 649 aa, Vibrio cholerae [sequence omitted]

SEQ ID NO: 126933 - DNA, 1953 bp, Vibrio parahaemolyticus; identical to SEQ ID NO: 122194
  CDS (1)..(1953): transl_table=11

SEQ ID NO: 126934 - protein, 650 aa, Vibrio parahaemolyticus; identical to SEQ ID NO: 122195

SEQ ID NO: 126935 - DNA, 1944 bp, Xanthomonas axonopodis pv
  CDS (1)..(1944): transl_table=11
atggctgatgtttatcccgtcgatcccgcgttcgccgccgatgcgcgcgtgacgcgcgagcagtacgccgcgctgtaccgcgaatcgatccaacaccccgagcagttctggggcaaggccgcgcagcggctcgagtggttcaagcaacccacccagatcaaggacgtcagctacgcgctggacgacttccatatccgctggttcggcgatggcgagctcaatgccagcgtcaactgcctggaccgccagctggccacgcgcggcgacaagaccgcgctgctgttcgaacccgacagcccggacgcagcgtcgtacccggtgacctaccgcgagttgtacgagcgcgtctgcaagctgggcaatgcgctgcgcaacctgggcgtcaagaagggcgaccgggtcaccatctatctgccgatgatcgtcgatgctgccgtggccatgctcgcctgcgcgcgcatcggtgcggtgcactcggtggtgttcggcggctttgccgccaactcgatcgccgaccgcgtgatcgattgccagagcaagctgatcatcaccgccgacgaaggcctgcgtggcggcaagaagattccgctcaaggccaatgtcgatgcagcgctgaagattcccggcaccaatacggtggaaaccgtgctggtggtgcgtcataccggcggcgcagtggagatgcaggcaccgcgcgaccgctggttccatgatgtggtcgacggccagccggccgcgtgcgaacccgagcgcatgaacgccgaagacccgctcttcatcctctacacctccggctccaccggcaaacccaagggcgtgctgcacaccaccgccggctatctgttgtttgccagttacacgcatgaagtagtgttcgacctgcgcgaggacgacatctattggtgcactgcggacgtgggctgggtcactggccacagctacatcgtctacggcccgctcgccaatggcgccaccgcggtgatgttcgaaggtgtgcccaattacccgaacgtgtcgcgcttctgggaagtgatcgacaagcatcaggtcaccatcttctacaccgcacctactgcgattcgcgcgttgatgcgcgacggtgcggacccggtcaaaaagacctcgcgcaagagcctgcgcctgctcggcagcgtcggcgagccgatcaatccggaagcctggcgctggtattacgaggtggtcggcgacagccgttgcccgatcgtggacacgtggtggcagaccgaaaccggcggcatcctgatctcgccgctggccggcgcggtcgatctcaagccgggctcggccaccttgccgttcttcggcgtgcagccggcgctggtcgatgccgaaggcaagattctggaaggcgccaccgaaggcaacctggtgctgctcgattcctggccgggccagatgcgtagcgtgtatggcgaccaccagcgtttcatcgacacctacttccgcacctatccgggcagctacttcaccggcgacggctgccgccgcgatgccgacggctactactggatcaccggccgcgtggacgatgtgatcaacgtctccgggcaccgcatcggcaccgccgaagtggaaagcgcgctggtctcgcaccccaaggtcgccgaagcggccgtggtgggcttcccgcatgacgtcaagggccagggcatctatgcctacgtcaccctgatcgcggggcagaccccgagcgaggacctgcacaaggaattggtcagctgggtgcgcaaggagatcggcccgatcgcctcgcccgatcacctgcagtgggcgcccggcctgcccaagacccgctcgggcaagatcatgcgccgcatcctgcgcaagatcgccgaaaacgcccctgaccagttgggcgatacctccacgctggcagatccgtcggtggtggattcgctggtcaatgagcgtctggcgcgctga

SEQ ID NO: 126936 - protein, 647 aa, Xanthomonas axonopodis pv [sequence omitted]

SEQ ID NO: 126937 - DNA, 1887 bp, Salmonella typhimurium
  CDS (1)..(1887): transl_table=11
atgtcttttagcgaattttatcagcgttccattaacgaaccggaggcgttctgggccgagcaggcccggcgtatcgactggcgacagccgtttacgcagacgctggatcatagccgtccaccgtttgcccgctggttttgcggcggcaccactaacttatgtcataacgccgtcgaccgctggcgggataaacagccggaggcgctggcgctgattgccgtctcatcagagaccgatgaagagcgcacatttaccttcagccagttgcatgatgaagtcaacattgtggccgccatgttgctgtcgctgggcgtgcagcgtggcgatcgcgtattggtctatatgccgatgattgccgaagcgcagataaccctgctggcctgcgcgcgcattggcgcgatccattcggtggtctttggcggttttgcctcgcacagcgtggcggcgcgcattgacgatgccagaccggcgctgattgtgtcggcggatgccggagcgcggggcggtaaaatcctgccgtataaaaagctgctcgatgacgctattgcgcaggcgcagcatcagccgaaacacgttctgctggtggacagagggctggcgaaaatggcatgggtggatgggcgcgatctggattttgccacgttgcgccagcagcatctcggcgcgagcgtgccggtggcgtggctggaatccaacgaaacctcgtgcattctttacacctccggcactaccggcaaaccgaaaggcgtccagcgcgacgtcggcggttatgcggtggcgctggcaacctcgatggacaccatttttggcggcaaggcgggcggcgtattcttttgcgcatcggatatcggctgggtcgtcggccactcctatatcgtttacgcgccgttgctggcaggcatggcgactattgtttacgaaggactgccgacgtacccggactgcggggtctggtggaaaattgtcgagaaataccaggttaaccggatgttttccgccccgaccgcgattcgcgtgctgaaaaaattcccgacggcgcaaatccgcaatcacgatctctcctcgctggaggcgctttatctggccggtgagccgctggacgagccgacggccagttgggtaacggagacgctgggcgtaccggtcatcgacaattattggcagacggagtccggctggccgatcatggcgctggcccgcgcgctggacgacaggccgtcgcgtctgggaagtcccggcgtgccgatgtacggttataacgtccagctactcaatgaagtcaccggcgaaccttgcggcataaatgaaaaggggatgctggtgatcgaagggccgctgccgccgggctgtattcagactatttggggcgacgatgcgcgttttgtgaagacttactggtcgctgtttaaccgtcaggtttatgccactttcgactggggaatccgcgacgccgaggggtattactttattctgggccgtaccgatgatgtgattaatattgcgggtcatcggctggggacgcgagaaatagaagaaagtatctccagctacccgaacgtagcggaagtggcggtagtggggataaaagacgctctgaaagggcaggtagcggtggcgtttgtcattccgaagcagagcgatacgctggcggatcgcgaggcggcgcgcgacgaggaaaacgcgattatggcgctggtggacaaccagatcggtcactttggtcgtccggcgcatgtctggtttgtttcgcagctccccaaaacgcgttccggaaagatgcttcgccgcacgatccaggcgatctgcgaaggccgcgatccgggcgatctgacaaccattgacgatcccgcgtcgttgcagcaaattcgccaggcgatcgaagaatag

SEQ ID NO: 126938 - protein, 628 aa, Salmonella typhimurium
MSFSEFYQRSINEPEAFWAEQARRIDWRQPFTQTLDHSRPPFARWFCGGTTNLCHNAVDRWRDKQPEALALIAVSSETDEERTFTFSQLHDEVNIVAAMLLSLGVQRGDRVLVYMPMIAEAQITLLACARIGAIHSVVFGGFASHSVAARIDDARPALIVSADAGARGGKILPYKKLLDDAIAQAQHQPKHVLLVDRGLAKMAWVDGRDLDFATLRQQHLGASVPVAWLESNETSCILYTSGTTGKPKGVQRDVGGYAVALATSMDTIFGGKAGGVFFCASDIGWVVGHSYIVYAPLLAGMATIVYEGLPTYPDCGVWWKIVEKYQVNRMFSAPTAIRVLKKFPTAQIRNHDLSSLEALYLAGEPLDEPTASWVTETLGVPVIDNYWQTESGWPIMALARALDDRPSRLGSPGVPMYGYNVQLLNEVTGEPCGINEKGMLVIEGPLPPGCIQTIWGDDARFVKTYWSLFNRQVYATFDWGIRDAEGYYFILGRTDDVINIAGHRLGTREIEESISSYPNVAEVAVVGIKDALKGQVAVAFVIPKQSDTLADREAARDEENAIMALVDNQIGHFGRPAHVWFVSQLPKTRSGKMLRRTIQAICEGRDPGDLTTIDDPASLQQIRQAIEE

SEQ ID NO: 126939 - DNA, 2244 bp, Oryza sativa; identical to SEQ ID NO: 122204
  CDS (1)..(2244)

SEQ ID NO: 126940 - protein, 747 aa, Oryza sativa; identical to SEQ ID NO: 122205

SEQ ID NO: 126941 - DNA, 2196 bp, Oryza sativa
  CDS (1)..(2196)
atgggccacgccgccgcagccgccgcggcggcgcacgtgccgctgggcgcgatcaccgtcgacgacctcctcgccgcgggggtggcgggtggtgcggcggcggagctgcacgaggcggtccggcgcgcggtgggcgcgcgcggcggggacggggatgcggcggcggtgtggggggagctctgcagggccgcgctccgcccgggcgtgccgttcgcggtgcaccggatgctctactacggatgcttcgccgggttcccctccgccacgccgccggcctggacccccgacccggaggaggccgtattgaccaatgtcggccgcgtcctcgaggcgcgagggagggagttcctcggcgacaagtacaaggatccaatcgctagcttcaccgacttccacaagttctccattgagaatccagaggcgtactggaagatggtgtttgaggagatggggattactttcagtgtggagccatcttgcatcctgagggagaacgatgcttaccccggcggcgagtggttgcccggcgccgtgctgaatgctgctgcgaattgcctgaccgcgaagcccggaaggagttccgacgacgttgctatcgtgtggagggatgaggggaaggattctgagcccctcaactttgttactcttgaggaactgaggaaaaaagtttgcctggtggcaaatgcgcttgatgcactcaacctggctaagggatccgcgattgccattgacatgcccatgaatgtgaatgctgttgtgatctacctggcaattgtgttggcaggctatgtggttgtctcaatcgcggacagctttgctgctcccgcaatatcaatgaggctaaagatatcagaagcaaaagcaattttcacccaggattacatccttcgagatgacaaggaattgcctttgtacagtagagttgtggaagctaaggcccctatgacaattgtgatccctgtaaggggatcaacaccaataaaaggactgcgtgctgatgatctgtcctgggaagattttcttgcaaaagttaaccatgccaaggctgataattataccgctgttgagcaacctgcctatgccttcaccaatatcttgttttcgtcagggactacaggggagccaaaagcaattccatggacacacttaacacctctgaagtcagctgctgatggatggtgtcacatggatattcgcagaggtgatgttgttgcatggcctactaacctcggttggatgatgggcccatggcttgtttatgcctctttactgaatggagcttccatggctctttataatggctccctgaatagttcaggctttgcaaagtttgtacaggatgcaaaggtgactatgcttgggttggtacccagcattgctcgttcatggaaaagtacagattgtacagctgggtttgattggtcaaccattagatgttttagctcatccggggaggcatccagtgtggatgattatttatggttgatgggaagagtttgctacaaaccagttatagagtactgtggaggcacagaaattggtggtggatttgttgctggatcattgctgcaacctcaagcattatctgcattcagtacacctgcaatgggttgtaacctgtttattcttgacaacaatggaaatccattaccacaagattctgttggtactggagaacttgcgcttgatccaaccttcctgggagcttcaacaacattgctgaatgctgatcatcatgaggtgtacttcagtggaatgccagaatggaacgggaaagtccttcggaggcatggggatgaatttgagcgtactccagatgggtattatagggctcatgggcgcgcagatgacacaatgaaccttggtggaattaaggtgagttccatcgagatagagcggatctgcaacagggtaaacgacgccatccttgaaacagcagctattggggttccacctctagggggtggccctgaacagctgaccatagccgtcgtcttcaaagaccaaagctcacaaacagaggatttgaatcagctgaaactggcattcaacactgctctgaagaaacttaaccctcttttcaaggtttcttcagttgtggtagtcccttcgctccctagaacagcctcaaacaaggtcatgaggagagtcctccgcaaggagttcacccagcagccaaagcactccaaaatctag

SEQ ID NO: 126942 - protein, 731 aa, Oryza sativa
MGHAAAAAAAAHVPLGAITVDDLLAAGVAGGAAAELHEAVRRAVGARGGDGDAAAVWGELCRAALRPGVPFAVHRMLYYGCFAGFPSATPPAWTPDPEEAVLTNVGRVLEARGREFLGDKYKDPIASFTDFHKFSIENPEAYWKMVFEEMGITFSVEPSCILRENDAYPGGEWLPGAVLNAAANCLTAKPGRSSDDVAIVWRDEGKDSEPLNFVTLEELRKKVCLVANALDALNLAKGSAIAIDMPMNVNAVVIYLAIVLAGYVVVSIADSFAAPAISMRLKISEAKAIFTQDYILRDDKELPLYSRVVEAKAPMTIVIPVRGSTPIKGLRADDLSWEDFLAKVNHAKADNYTAVEQPAYAFTNILFSSGTTGEPKAIPWTHLTPLKSAADGWCHMDIRRGDVVAWPTNLGWMMGPWLVYASLLNGASMALYNGSLNSSGFAKFVQDAKVTMLGLVPSIARSWKSTDCTAGFDWSTIRCFSSSGEASSVDDYLWLMGRVCYKPVIEYCGGTEIGGGFVAGSLLQPQALSAFSTPAMGCNLFILDNNGNPLPQDSVGTGELALDPTFLGASTTLLNADHHEVYFSGMPEWNGKVLRRHGDEFERTPDGYYRAHGRADDTMNLGGIKVSSIEIERICNRVNDAILETAAIGVPPLGGGPEQLTIAVVFKDQSSQTEDLNQLKLAFNTALKKLNPLFKVSSVVVVPSLPRTASNKVMRRVLRKEFTQQPKHSKI

SEQ ID NO: 126943 - DNA, 1644 bp, Glycine max; identical to SEQ ID NO: 28516
  CDS (1)..(1644)

SEQ ID NO: 126944 - protein, 547 aa, Glycine max; identical to SEQ ID NO: 28517

SEQ ID NO: 126945 - DNA, 2121 bp, Zea mays; identical to SEQ ID NO: 122206
  CDS (1)..(2121)

SEQ ID NO: 126946 - protein, 706 aa, Zea mays; identical to SEQ ID NO: 122207

SEQ ID NO: 126947 - DNA, 1656 bp, Brassica napus; identical to SEQ ID NO: 28700
  CDS (1)..(1656)

SEQ ID NO: 126948 - protein, 551 aa, Brassica napus; identical to SEQ ID NO: 28701

SEQ ID NO: 126949 - DNA, 1695 bp, Glycine max
  CDS (1)..(1695)
atggctacccaaacccaaacacagtcacatccaaacaccaccactatcgacccaaacagcggcttctgttctcattccagaaccttccattccctccgtccaaacgttcctctccctccgccctcccaccccctctccctcaccgactacgtcttctccctcctaccctccgccgccaccgccaccgcctcctcatccatcacctccgccatcatcgacgccgccaccgaccgccacctgtcctactccctcctcctccgccaagtcaaatcccttacctcctcccttcaatccctcacacctctctccaaaggccacgtggcactcatcctcaccccttcctcccttcacgtccccgtactctatttttccctcctctccctcggcgtcaccatcgcccccgcgaatccactcagttcccaatccgagttgactcacctggtcaaactcgcgaaacctgtcatcgcgttttccacctcgaacgccgcgaaaaacattccctcctccctcaaattcggcacaatcctcctcgattcccctctcttcctttccatgctcaacaacaacgaatacgtcaacgccgattcacgaactcgccgagtcgaagtgagtcagtctgactcggcggcgattctgttctcctcgggaaccacggggcgcgtgaagggcgtgctccttacgcaccgcaacttcatcgcgctgattggagggttctatcaccttagaatggtggtggatgatgatccgcacccggtgtcgttgttcacgctcccgctgttccacgtgttcgggttctttatgctggttagggccatcgccgtcggagagacgcttgtgttcatgcataggtttgatttcgaagggatgctgaaagctgtggagaggtatagaatcacctacatgccggtgtcgccgccgctcgtggtggcgctggcgaagtcggaactcgtgaagaagtatgatatgagttcgctacggtatttgggcagcggcggcgcgccgctcgggaaggaggtcgccgaggactttagagcccaattccccaacgtggaaattgggcagggctatggtttgactgaaagtggaggaggggcagctagagtgttggggcctgatgagtctaagcgccatggttctgtgggtcgactatcagaaaatatggaggccaagatagtggaccctgttactggagaagcattatctcctggccaaaaaggggagctctggttgcgaggtccaacaatcatgaaaggttatgtaggagatgagaaggccacagctgaaacattggattcagaaggatggctgaagactggtgatctttgttattttgactctgatggtttcctctacattgtagatagactgaaggaattgatcaaatacaaagcttatcaggttccccctgctgaattggaacatatacttcacaccaatcctgaaattgctgatgctgcagtagttccgtatcctgatgaagaggcaggacagattccaattgcctttgtagtaagaaagtctggaagcaacatcactgcagatcaggtcatggagtttgtggcaaagcaggtttcaccatacaagaagatacggcgagtttctttcatcaaatctatcccaaaatctccggctggcaaaattttgagaagagaattagttgattatgctctatcctgtggttcatccaaattgtga

SEQ ID NO: 126950 - protein, 564 aa, Glycine max
MATQTQTQSHPNTTTIDPNSGFCSHSRTFHSLRPNVPLPPPSHPLSLTDYVFSLLPSAATATASSSITSAIIDAATDRHLSYSLLLRQVKSLTSSLQSLTPLSKGHVALILTPSSLHVPVLYFSLLSLGVTIAPANPLSSQSELTHLVKLAKPVIAFSTSNAAKNIPSSLKFGTILLDSPLFLSMLNNNEYVNADSRTRRVEVSQSDSAAILFSSGTTGRVKGVLLTHRNFIALIGGFYHLRMVVDDDPHPVSLFTLPLFHVFGFFMLVRAIAVGETLVFMHRFDFEGMLKAVERYRITYMPVSPPLVVALAKSELVKKYDMSSLRYLGSGGAPLGKEVAEDFRAQFPNVEIGQGYGLTESGGGAARVLGPDESKRHGSVGRLSENMEAKIVDPVTGEALSPGQKGELWLRGPTIMKGYVGDEKATAETLDSEGWLKTGDLCYFDSDGFLYIVDRLKELIKYKAYQVPPAELEHILHTNPEIADAAVVPYPDEEAGQIPIAFVVRKSGSNITADQVMEFVAKQVSPYKKIRRVSFIKSIPKSPAGKILRRELVDYALSCGSSKL

SEQ ID NO: 126951 - DNA, 1647 bp, Glycine max; identical to SEQ ID NO: 28706
  CDS (1)..(1647)

SEQ ID NO: 126952 - protein, 548 aa, Glycine max; identical to SEQ ID NO: 28707

SEQ ID NO: 126953 - DNA, 2097 bp, Glycine max; identical to SEQ ID NO: 122208
  CDS (1)..(2097)

SEQ ID NO: 126954 - protein, 698 aa, Glycine max; identical to SEQ ID NO: 122209

SEQ ID NO: 126955 - DNA, 2259 bp, Glycine max; identical to SEQ ID NO: 122210
  CDS (1)..(2259)

SEQ ID NO: 126956 - protein, 752 aa, Glycine max; identical to SEQ ID NO: 122211

SEQ ID NO: 126957 - DNA, 1677 bp, Zea mays; identical to SEQ ID NO: 28716
  CDS (1)..(1677)

SEQ ID NO: 126958 - protein, 558 aa, Zea mays; identical to SEQ ID NO: 28717

SEQ ID NO: 126959 - DNA, 1653 bp, Zea mays; identical to SEQ ID NO: 28722
  CDS (1)..(1653)

SEQ ID NO: 126960 - protein, 550 aa, Zea mays; identical to SEQ ID NO: 28723

SEQ ID NO: 126961 - DNA, 1668 bp, Zea mays; identical to SEQ ID NO: 28724
  CDS (1)..(1668)

SEQ ID NO: 126962 - protein, 555 aa, Zea mays; identical to SEQ ID NO: 28725

SEQ ID NO: 126963 - DNA, 1671 bp, Zea mays; identical to SEQ ID NO: 28726
  CDS (1)..(1671)

SEQ ID NO: 126964 - protein, 556 aa, Zea mays; identical to SEQ ID NO: 28727

SEQ ID NO: 126965 - DNA, 1668 bp, Zea mays; identical to SEQ ID NO: 28732
  CDS (1)..(1668)

SEQ ID NO: 126966 - protein, 555 aa, Zea mays; identical to SEQ ID NO: 28733

SEQ ID NO: 126967 - DNA, 23 bp, Artificial sequence
  primer
atgagccaaattcacaaacacac

SEQ ID NO: 126968 - DNA, 21 bp, Artificial sequence
  primer
ttacgatggcatcgcgatagc

SEQ ID NO: 126969 - protein, 767 aa, Artificial sequence
  consensus sequence
  Variant (3)..(10): Xaa in position 3 to 10 is any amino acid
  Variant (11)..(11): Xaa in position 11 is any or no amino acid
  Variant (13)..(13): Xaa in position 13 is any amino acid
  Variant (14)..(57): Xaa in position 14 to 57 is any or no amino acid
  Variant (60)..(61): Xaa in position 60 to 61 is any amino acid
  Variant (63)..(64): Xaa in position 63 to 64 is any amino acid
  Variant (66)..(68): Xaa in position 66 to 68 is any amino acid
  Variant (70)..(71): Xaa in position 70 to 71 is any amino acid
  Variant (74)..(77): Xaa in position 74 to 77 is any amino acid
  Variant (78)..(84): Xaa in position 78 to 84 is any or no amino acid
  Variant (86)..(96): Xaa in position 86 to 96 is any amino acid
  Variant (97)..(105): Xaa in position 97 to 105 is any or no amino acid
  Variant (108)..(109): Xaa in position 108 to 109 is any amino acid
  Variant (111)..(113): Xaa in position 111 to 113 is any amino acid
  Variant (115)..(117): Xaa in position 115 to 117 is any amino acid
  Variant (119)..(120): Xaa in position 119 to 120 is any amino acid
  Variant (122)..(124): Xaa in position 122 to 124 is any amino acid
  Variant (125)..(126): Xaa in position 125 to 126 is any or no amino acid
  Variant (128)..(130): Xaa in position 128 to 130 is any amino acid
  Variant (133)..(133): Xaa in position 133 is any amino acid
  Variant (135)..(136): Xaa in position 135 to 136 is any amino acid
  Variant (138)..(138): Xaa in position 138 is any amino acid
  Variant (141)..(142): Xaa in position 141 to 142 is any amino acid
  Variant (144)..(148): Xaa in position 144 to 148 is any amino acid
  Variant (151)..(152): Xaa in position 151 to 152 is any amino acid
  Variant (154)..(154): Xaa in position 154 is any amino acid
  Variant (157)..(157): Xaa in position 157 is any amino acid
  Variant (160)..(161): Xaa in position 160 to 161 is any amino acid
  Variant (163)..(163): Xaa in position 163 is any amino acid
  Variant (166)..(172): Xaa in position 166 to 172 is any amino acid
  Variant (174)..(175): Xaa in position 174 to 175 is any amino acid
  Variant (177)..(183): Xaa in position 177 to 183 is any amino acid
  Variant (184)..(187): Xaa in position 184 to 187 is any or no amino acid
  Variant (189)..(191): Xaa in position 189 to 191 is any amino acid
  Variant (192)..(193): Xaa in position 192 to 193 is any or no amino acid
  Variant (195)..(198): Xaa in position 195 to 198 is any amino acid
  Variant (199)..(206): Xaa in position 199 to 206 is any or no amino acid
  Variant (208)..(208): Xaa in position 208 is any amino acid
  Variant (209)..(210): Xaa in position 209 to 210 is any or no amino acid
  Variant (212)..(212): Xaa in position 212 is any amino acid
  Variant (214)..(219): Xaa in position 214 to 219 is any amino acid
  Variant (220)..(269): Xaa in position 220 to 269 is any or no amino acid
  Variant (271)..(278): Xaa in position 271 to 278 is any amino acid
  Variant (279)..(297): Xaa in position 279 to 297 is any or no amino acid
  Variant (300)..(301): Xaa in position 300 to 301 is any amino acid
  Variant (307)..(307): Xaa in position 307 is any amino acid
  Variant (310)..(310): Xaa in position 310 is any amino acid
  Variant (314)..(315): Xaa in position 314 to 315 is any amino acid
  Variant (317)..(319): Xaa in position 317 to 319 is any amino acid
  Variant (321)..(331): Xaa in position 321 to 331 is any amino acid
  Variant (332)..(333): Xaa in position 332 to 333 is any or no amino acid
  Variant (335)..(344): Xaa in position 335 to 344 is any amino acid
  Variant (345)..(356): Xaa in position 345 to 356 is any or no amino acid
  Variant (358)..(358): Xaa in position 358 is any amino acid
  Variant (361)..(362): Xaa in position 361 to 362 is any amino acid
  Variant (365)..(365): Xaa in position 365 is any amino acid
  Variant (367)..(368): Xaa in position 367 to 368 is any amino acid
  Variant (373)..(374): Xaa in position 373 to 374 is any amino acid
  Variant (376)..(381): Xaa in position 376 to 381 is any amino acid
  Variant (384)..(384): Xaa in position 384 is any amino acid
  Variant (386)..(397): Xaa in position 386 to 397 is any amino acid
  Variant (398)..(402): Xaa in position 398 to 402 is any or no amino acid
  Variant (404)..(408): Xaa in position 404 to 408 is any amino acid
  Variant (412)..(413): Xaa in position 412 to 413 is any amino acid
  Variant (415)..(426): Xaa in position 415 to 426 is any amino acid
  Variant (427)..(436): Xaa in position 427 to 436 is any or no amino acid
  Variant (440)..(443): Xaa in position 440 to 443 is any amino acid
  Variant (448)..(449): Xaa in position 448 to 449 is any amino acid
  Variant (451)..(454): Xaa in position 451 to 454 is any amino acid
  Variant (456)..(459): Xaa in position 456 to 459 is any amino acid
  Variant (460)..(460): Xaa in position 460 is any or no amino acid
  Variant (462)..(462): Xaa in position 462 is any amino acid
  Variant (463)..(471): Xaa in position 463 to 471 is any or no amino acid
  Variant (473)..(474): Xaa in position 473 to 474 is any amino acid
  Variant (481)..(489): Xaa in position 481 to 489 is any amino acid
  Variant (490)..(510): Xaa in position 490 to 510 is any or no amino acid
  Variant (515)..(516): Xaa in position 515 to 516 is any amino acid
  Variant (517)..(517): Xaa in position 517 is any or no amino acid
  Variant (519)..(520): Xaa in position 519 to 520 is any amino acid
  Variant (522)..(527): Xaa in position 522 to 527 is any amino acid
  Variant (529)..(538): Xaa in position 529 to 538 is any amino acid
  Variant (539)..(545): Xaa in position 539 to 545 is any or no amino acid
  Variant (547)..(547): Xaa in position 547 is any amino acid
  Variant (549)..(553): Xaa in position 549 to 553 is any amino acid
  Variant (554)..(555): Xaa in position 554 to 555 is any or no amino acid
  Variant (557)..(566): Xaa in position 557 to 566 is any amino acid
  Variant (567)..(569): Xaa in position 567 to 569 is any or no amino acid
  Variant (571)..(573): Xaa in position 571 to 573 is any amino acid
  Variant (574)..(574): Xaa in position 574 is any or no amino acid
  Variant (576)..(577): Xaa in position 576 to 577 is any amino acid
  Variant (578)..(588): Xaa in position 578 to 588 is any or no amino acid
  Variant (590)..(590): Xaa in position 590 is any amino acid
  Variant (591)..(591): Xaa in position 591 is any or no amino acid
  Variant (594)..(597): Xaa in position 594 to 597 is any amino acid
  Variant (598)..(612): Xaa in position 598 to 612 is any or no amino acid
  Variant (614)..(614): Xaa in position 614 is any amino acid
  Variant (615)..(615): Xaa in position 615 is any or no amino acid
  Variant (617)..(620): Xaa in position 617 to 620 is any amino acid
  Variant (621)..(621): Xaa in position 621 is any or no amino acid
  Variant (624)..(624): Xaa in position 624 is any amino acid
  Variant (628)..(628): Xaa in position 628 is any amino acid
  Variant (631)..(631): Xaa in position 631 is any amino acid
  Variant (635)..(636): Xaa in position 635 to 636 is any amino acid
  Variant (638)..(638): Xaa in position 638 is any amino acid
  Variant (639)..(640): Xaa in position 639 to 640 is any or no amino acid
  Variant (642)..(642): Xaa in position 642 is any amino acid
  Variant (644)..(645): Xaa in position 644 to 645 is any amino acid
  Variant (647)..(648): Xaa in position 647 to 648 is any amino acid
  Variant (650)..(653): Xaa in position 650 to 653 is any amino acid
  Variant (654)..(654): Xaa in position 654 is any or no amino acid
  Variant (656)..(656): Xaa in position 656 is any amino acid
  Variant (661)..(666): Xaa in position 661 to 666 is any amino acid
  Variant (668)..(673): Xaa in position 668 to 673 is any amino acid
  Variant (675)..(690): Xaa in position 675 to 690 is any amino acid
  Variant (691)..(710): Xaa in position 691 to 710 is any or no amino acid
  Variant (712)..(715): Xaa in position 712 to 715 is any amino acid
  Variant (717)..(718): Xaa in position 717 to 718 is any amino acid
  Variant (719)..(721): Xaa in position 719 to 721 is any or no amino acid
  Variant (723)..(731): Xaa in position 723 to 731 is any amino acid
  Variant (732)..(732): Xaa in position 732 is any or no amino acid
  Variant (745)..(745): Xaa in position 745 is any amino acid
  Variant (748)..(751): Xaa in position 748 to 751 is any amino acid
  Variant (752)..(763): Xaa in position 752 to 763 is any or no amino acid
  Variant (765)..(766): Xaa in position 765 to 766 is any amino acid
FWXXXXXXXXXWXXXXXXXXXXXXXXXXXXXXXXXXXXXXXXXXXXXXXXXXXXXXXWFXXGXXNXXXNXXDRXXXXXXXXXXXAXXXXXXXXXXXXXXXXXXXXTYXXLXXXVXXXAXXLXXXXXGXXXGDXVXXYXPMXXEXXXXXLAXXRXGAXHSXXFXGFXXXXXXXRXXDXXXXXXXXXXXTXXXXXRXXXXXXXXXXXXKXXXDXAXXXXXXXXXXXXXXXXXXXXXXXXXXXXXXXXXXXXXXXXXXXXXXXXXXXXXXXXDXXXXXXXXXXXXXXXXXXXXXXXXXXXPLXXLYTSGXTGXPKGXXHXXXGXXXXXXXXXXXXXDXXXXXXXXXXXXXXXXXXXXXXDXGWXXGHXYXXYGPLXXGXXXXXXEGXPXXXXXXXXXXXXXXXXXVXXXXXAPTXXRXXXXXXXXXXXXXXXXXXXXXXSLRXXXXVGEPXXPXXXXWXXXXXGXXXXXXXXXXDXXWQTETGXXXXXXXXXXXXXXXXXXXXXXXXXXXXXXKPGSXXXPXXGXXXXXXDXXXXXXXXXXXXXXXXXGXLXXXXXXXPXXXXXXXXXXXXXRXXXXYXXXXXXXXXXXXXYXXGDXXXXXXXXXXXXXXXXXXXDXXGXXXXXGRXDDVXNVXGHRXXTXXXEXEXXLXXHXXXXXEXAVVGXXXXXXGXXXXXXVXXXXXXXXXXXXXXXXXXXXXXXXXXXXXXXXXXXXVXXXXGXXXXXAXXXXXXXXXXLPKTRSGKIMRRXLRXXXXXXXXXXXXXXXXDXXT

SEQ ID NO: 126970 - protein, 20 aa, Artificial sequence
  protein pattern
  Variant (2)..(2): Xaa in position 2 is any amino acid
  Variant (3)..(3): Xaa in position 3 is Ile, Leu, Met or Val
  Variant (4)..(4): Xaa in position 4 is any amino acid
  Variant (9)..(9): Xaa in position 9 is Ser or Thr
  Variant (12)..(13): Xaa in position 12 to 13 is any or no amino acid
  Variant (15)..(16): Xaa in position 15 to 16 is any or no amino acid
  Variant (18)..(19): Xaa in position 18 to 19 is any amino acid
  Variant (20)..(20): Xaa in position 20 is His or Arg
LXXXYTSGXTGXXKXXGXXX

SEQ ID NO: 126971 - protein, 26 aa, Artificial sequence
  protein pattern
  Variant (2)..(4): Xaa in position 2 to 4 is any amino acid
  Variant (5)..(6): Xaa in position 5 to 6 is any or no amino acid
  Variant (9)..(9): Xaa in position 9 is any amino acid
  Variant (12)..(12): Xaa in position 12 is Ile, Met or Val
  Variant (13)..(13): Xaa in position 13 is Ile, Leu, Met or Val
  Variant (14)..(15): Xaa in position 14 to 15 is any amino acid
  Variant (16)..(16): Xaa in position 16 is Ala or Ser
  Variant (18)..(19): Xaa in position 18 to 19 is any amino acid
  Variant (20)..(20): Xaa in position 20 is Ile, Leu, Met or Val
  Variant (21)..(21): Xaa in position 21 is Ala, Gly or Ser
  Variant (22)..(22): Xaa in position 22 is Asn, Pro, Ser or Thr
  Variant (23)..(23): Xaa in position 23 is any amino acid
  Variant (25)..(25): Xaa in position 25 is Ile, Leu, Met or Val
GXXXXXGRXDDXXXXXGXXXXXXEXE

SEQ ID NO: 126972 - protein, 17 aa, Artificial sequence
  protein pattern
  Variant (2)..(2): Xaa in position 2 is any amino acid
  Variant (3)..(3): Xaa in position 3 is Ala, Ser, Thr or Val
  Variant (4)..(4): Xaa in position 4 is Lys or Arg
  Variant (5)..(5): Xaa in position 5 is Ile, Leu or Val
  Variant (7)..(7): Xaa in position 7 is Ala, Ile, Leu or Val
  Variant (8)..(8): Xaa in position 8 is any amino acid
  Variant (10)..(10): Xaa in position 10 is any amino acid
  Variant (11)..(11): Xaa in position 11 is any or no amino acid
  Variant (13)..(13): Xaa in position 13 is any or no amino acid
  Variant (15)..(15): Xaa in position 15 is any or no amino acid
  Variant (17)..(17): Xaa in position 17 is Phe or Tyr
AXXXXGXXHXXVXFXGX

SEQ ID NO: 126973 - protein, 15 aa, Artificial sequence
  protein pattern
  Variant (10)..(10): Xaa in position 10 is Leu or Met
  Variant (12)..(14): Xaa in position 12 to 14 is any or no amino acid
LPKTRSGKIXRXXXR

SEQ ID NO: 126974 - protein, 10 aa, Artificial sequence
  protein pattern
  Variant (3)..(3): Xaa in position 3 is Ser or Thr
  Variant (5)..(6): Xaa in position 5 to 6 is any amino acid
  Variant (8)..(8): Xaa in position 8 is Ala or Gly
  Variant (9)..(9): Xaa in position 9 is Ala or Pro
  Variant (10)..(10): Xaa in position 10 is Phe, Leu or Met
GHXYXXYXXX

SEQ ID NO: 126975 - DNA, 327 bp, Escherichia coli
  CDS (1)..(327): transl_table=11
atgcatagtgaaaatcaaagtaaaggtgtgcattatgcaaaatcacagcgtctcttagaaattaaccatgcgcacttgcagttaatggaatccttattggatgaagggaagaaacacaatatttttaagccagatatcgacccattgcaggtgaatattaatattgctgcgcttggcggatattatttgatcaaccagcatacgcttggcctggtttatcacatcagtatggtttcaccccaggcactggaagccagacgtaaggtcatcaaagagacaatccttagctggcttttggttgacccttcatctaccgcgcacgaataa

SEQ ID NO: 126976 - protein, 108 aa, Escherichia coli
MHSENQSKGVHYAKSQRLLEINHAHLQLMESLLDEGKKHNIFKPDIDPLQVNINIAALGGYYLINQHTLGLVYHISMVSPQALEARRKVIKETILSWLLVDPSSTAHE

SEQ ID NO: 126977 - DNA, 660 bp, Sinorhizobium meliloti 1021
  CDS (1)..(660): transl_table=11
ttgagaacgacgagtgcacagaaagcgaaatcagccgggaagccgcggctacgcgatgccgaagcaaccaaggcgcgcatcctcgaggccgcgaagaaagaattcgcaaaaaacggattggggggcgccagggtggacgtgatcgccgagaaggcgaacgccaacaagcggatgatttaccactacttcgacggcaaggaccacctcttccagaccgttctcgaagacgcctataacgggatacggaccgcggaacaaaagctcaacctcaatgaccttgaacccaaggctgccctcgagaagctcgtacgtttcacctgggaatactatctgaagcacccggagttcataacgctggtcaacagcgagaaccttcatcgcgccaagcacttgaagaagtcccaggtggtccgtgcaaccagtcgaaaattcgtcggcatggtcaaggaactgctggagcggggcgtttccgaaggggttttccggccgggaatcgacccggtccaactgaacctcaccatcgcggccatcggctattactacatcaccaaccgcttcaccggttcgatcgttttcgagcgtgacctgatggcgaaagacgcgctcgaagagcgcgttcaattcaacatagagaccatcatgcgcatggtttgcgcttag

SEQ ID NO: 126978 - protein, 219 aa, Sinorhizobium meliloti 1021
MRTTSAQKAKSAGKPRLRDAEATKARILEAAKKEFAKNGLGGARVDVIAEKANANKRMIYHYFDGKDHLFQTVLEDAYNGIRTAEQKLNLNDLEPKAALEKLVRFTWEYYLKHPEFITLVNSENLHRAKHLKKSQVVRATSRKFVGMVKELLERGVSEGVFRPGIDPVQLNLTIAAIGYYYITNRFTGSIVFERDLMAKDALEERVQFNIETIMRMVCA

SEQ ID NO: 126979 - DNA, 327 bp, Shigella flexneri 2a str. 301
  CDS (1)..(327): transl_table=11
gtgcatagtgaaaatcaaagtaaaggtgtgcattatgcaaaatcacagcgtctcttagaaattaaccatgctcacttgcagttaatggaatccttattggatgaagggaagaaatacaatatttttaagccaggtatcgacccattgcaggtgaatattaatattgctgcgcttgggggatattatttgatcaaccagcatacgcttggcctagtttatcatatcagtatggtttccccccaggcactggaagccagacgtaaggtcatcaaagagacaatccttagctggcttttggttgacccttcatctaccgcgcacgaataa

SEQ ID NO: 126980 - protein, 108 aa, Shigella flexneri 2a str. 301
MHSENQSKGVHYAKSQRLLEINHAHLQLMESLLDEGKKYNIFKPGIDPLQVNINIAALGGYYLINQHTLGLVYHISMVSPQALEARRKVIKETILSWLLVDPSSTAHE

SEQ ID NO: 126981 - DNA, 738 bp, Ralstonia eutropha JMP134
  CDS (1)..(738): transl_table=11
atgaccatcaagaccgcaacccagcgcgcggcagtcggaacgcgcgcccggcaggcgcaggacagccgtgaccggatcctgaaggcggccatcaaggtctttgcgcagcgcggttacgacggcggacgcatcgaacgcatttcctcgctcgccaagacctacgaccggatgatctattactacttcggcagcaaggaaaagctgttcgtcgaagtgctcgagaccatctacctgcagctcaacgaagccgagcagaaactcgaaggcgaactcgacgctgccgatccggtgcgcgccctgtcgcaactgatcgacttcatctggcactactacctggagcatccggagttcgtcgcgatcctgaccagcgagaacatcagccagggcaagcacgcgcgcaagtcggtgcggttgcgcgagatctccagctacgcgttgtccgtgctcgacggcattctgtcgcgcggcaaggcggcgggactgttccggcccgacgccgggccgcgagacgtctacatggtcatcgcctcgctcggctacttctacaactcgaaccatcatacgctcagcgccttcctgggcgagccgatgatgggcgcgcccgcgctcgcgcattggcgcgatgtgatccagcagacagtgctgcgcgcggtggcagtgccgggcgccgttcccgacgccccgcccgcgccgcctgccggcaaaccggcgaaggccaggcgcgccgccgcaggctga

SEQ ID NO: 126982 - protein, 245 aa, Ralstonia eutropha JMP134
MTIKTATQRAAVGTRARQAQDSRDRILKAAIKVFAQRGYDGGRIERISSLAKTYDRMIYYYFGSKEKLFVEVLETIYLQLNEAEQKLEGELDAADPVRALSQLIDFIWHYYLEHPEFVAILTSENISQGKHARKSVRLREISSYALSVLDGILSRGKAAGLFRPDAGPRDVYMVIASLGYFYNSNHHTLSAFLGEPMMGAPALAHWRDVIQQTVLRAVAVPGAVPDAPPAPPAGKPAKARRAAAG

SEQ ID NO: 126983 - DNA, 678 bp, Rhizobium leguminosarum bv. viciae 3841; identical to SEQ ID NO: 88780
  CDS (1)..(678): transl_table=11

SEQ ID NO: 126984 - protein, 225 aa, Rhizobium leguminosarum bv. viciae 3841; identical to SEQ ID NO: 88781

SEQ ID NO: 126985 - DNA, 27 bp, Artificial sequence
  primer
atgcatagtgaaaatcaaagtaaaggt

SEQ ID NO: 126986 - DNA, 23 bp, Artificial sequence
  primer
ttattcgtgcgcggtagatgaag

SEQ ID NO: 126987 - protein, 93 aa, Artificial sequence
  consensus sequence
  Variant (4)..(8): Xaa in position 4 to 8 is any amino acid
  Variant (10)..(11): Xaa in position 10 to 11 is any amino acid
  Variant (14)..(14): Xaa in position 14 is any amino acid
  Variant (17)..(17): Xaa in position 17 is any amino acid
  Variant (19)..(30): Xaa in position 19 to 30 is any amino acid
  Variant (32)..(33): Xaa in position 32 to 33 is any amino acid
  Variant (36)..(39): Xaa in position 36 to 39 is any amino acid
  Variant (41)..(41): Xaa in position 41 is any amino acid
  Variant (43)..(44): Xaa in position 43 to 44 is any amino acid
  Variant (47)..(48): Xaa in position 47 to 48 is any amino acid
  Variant (50)..(52): Xaa in position 50 to 52 is any amino acid
  Variant (55)..(55): Xaa in position 55 is any amino acid
  Variant (58)..(59): Xaa in position 58 to 59 is any amino acid
  Variant (61)..(62): Xaa in position 61 to 62 is any amino acid
  Variant (64)..(65): Xaa in position 64 to 65 is any amino acid
  Variant (68)..(79): Xaa in position 68 to 79 is any amino acid
  Variant (82)..(87): Xaa in position 82 to 87 is any amino acid
  Variant (89)..(90): Xaa in position 89 to 90 is any amino acid
  Variant (92)..(92): Xaa in position 92 is any amino acid
SENXXXXXHXXKSXRLXEXXXXXXXXXXXXLXXGKXXXXFXPXXDPXXVXXXIAXLGXXYXXNXXTLXXXXXXXXXXXXALXXXXXXIXXTXL

SEQ ID NO: 126988 - protein, 60 aa, Artificial sequence
  protein pattern
  Variant (3)..(4): Xaa in position 3 to 4 is any amino acid
  Variant (5)..(5): Xaa in position 5 is Gly or Asn
  Variant (6)..(6): Xaa in position 6 is Ile, Leu or Val
  Variant (8)..(8): Xaa in position 8 is any amino acid
  Variant (9)..(9): Xaa in position 9 is Glu or Pro
  Variant (10)..(10): Xaa in position 10 is Asp, Gly or Thr
  Variant (11)..(11): Xaa in position 11 is Ala or Ile
  Variant (12)..(12): Xaa in position 12 is Asp or Gly
  Variant (14)..(15): Xaa in position 14 to 15 is any amino acid
  Variant (17)..(17): Xaa in position 17 is any amino acid
  Variant (18)..(18): Xaa in position 18 is Ile, Leu or Met
  Variant (19)..(19): Xaa in position 19 is Asn, Thr or Val
  Variant (22)..(22): Xaa in position 22 is Ala or Ser
  Variant (25)..(25): Xaa in position 25 is any amino acid
  Variant (26)..(26): Xaa in position 26 is Phe or Tyr
  Variant (28)..(29): Xaa in position 28 to 29 is any amino acid
  Variant (31)..(31): Xaa in position 31 is any amino acid
  Variant (32)..(32): Xaa in position 32 is His or Tyr
  Variant (35)..(35): Xaa in position 35 is Gly or Ser
  Variant (36)..(36): Xaa in position 36 is any amino acid
  Variant (37)..(37): Xaa in position 37 is Phe, Ile or Val
  Variant (38)..(40): Xaa in position 38 to 40 is any amino acid
  Variant (41)..(41): Xaa in position 41 is Asp, Pro or Ser
  Variant (42)..(42): Xaa in position 42 is Leu or Met
  Variant (43)..(43): Xaa in position 43 is Met or Val
  Variant (44)..(44): Xaa in position 44 is Glu, Gly or Ser
  Variant (45)..(45): Xaa in position 45 is Ala or Pro
  Variant (46)..(46): Xaa in position 46 is Pro, Gln or Thr
  Variant (47)..(47): Xaa in position 47 is any amino acid
  Variant (49)..(49): Xaa in position 49 is Ala, Glu or Asn
  Variant (50)..(51): Xaa in position 50 to 51 is any amino acid
  Variant (52)..(52): Xaa in position 52 is Glu or Arg
  Variant (53)..(53): Xaa in position 53 is Asp, Lys or Arg
  Variant (54)..(54): Xaa in position 54 is any amino acid
  Variant (56)..(57): Xaa in position 56 to 57 is any amino acid
  Variant (58)..(58): Xaa in position 58 is Thr or Val
  Variant (59)..(59): Xaa in position 59 is any amino acid
GKXXXXFXXXXXPXXVXXXIAXLGXXYXXNXXTLXXXXXXXXXXXXXLXXXXXXIXXXXL

SEQ ID NO: 126989 - protein, 20 aa, Artificial sequence
  protein pattern
  Variant (4)..(6): Xaa in position 4 to 6 is any amino acid
  Variant (7)..(7): Xaa in position 7 is Ala or Gly
  Variant (8)..(8): Xaa in position 8 is any amino acid
  Variant (10)..(11): Xaa in position 10 to 11 is any amino acid
  Variant (14)..(15): Xaa in position 14 to 15 is any amino acid
  Variant (16)..(16): Xaa in position 16 is Leu or Val
  Variant (17)..(17): Xaa in position 17 is any amino acid
  Variant (18)..(18): Xaa in position 18 is Ala or Glu
  Variant (19)..(19): Xaa in position 19 is any amino acid
  Variant (20)..(20): Xaa in position 20 is Asn or Ser
SENXXXXXHXXKSXXXXXXX

SEQ ID NO: 126990 - protein, 25 aa, Artificial sequence
  protein pattern
  Variant (2)..(2): Xaa in position 2 is Gly or Gln
  Variant (3)..(4): Xaa in position 3 to 4 is any amino acid
  Variant (6)..(8): Xaa in position 6 to 8 is any or no amino acid
  Variant (10)..(10): Xaa in position 10 is Lys or Arg
  Variant (11)..(11): Xaa in position 11 is Ser or Val
  Variant (12)..(12): Xaa in position 12 is Asp or Gln
  Variant (13)..(13): Xaa in position 13 is any amino acid
  Variant (14)..(14): Xaa in position 14 is Ile or Leu
  Variant (15)..(15): Xaa in position 15 is Ala or Leu
  Variant (17)..(23): Xaa in position 17 to 23 is any amino acid
  Variant (24)..(24): Xaa in position 24 is any or no amino acid
NXXXGXXXAXXXXXXEXXXXXXXXM

SEQ ID NO: 126991 - DNA, 597 bp, Physcomitrella patens
  CDS (1)..(597)
atggagtctggaaggggagcgctgttggtcctcttggttgctctttgtgcagcaagtgcgttgggtcggacgccttcgtgggatggcaagattgagatgccaaccgaagaggacgctgagaagggcactcgctgggctatccttattgctggatcgtctgggtactggaactaccgtcatcaggctgatgtatgccatgcataccaaatcctcaaacgtggaggcttgaaggaagagaacatcgtcgtattcatgtacgatgatattgcatacagtactgagaatccacatccaggaaaaattatcaacaaacccgatggacctgatgtgtaccaaggcgttcccaaggattacacaggtgctgacgtgactgtgagcaatttctatgccgcactcttgggtgacaaggatgccatcaaaggcggtacgagggaaaggtggttaacagtggacctaacgatcacatcttcatctactacaccgaccacggtggtgctggtgtcttgggtatgcccacctcgcccaacctgtacgcagatgactttgtggacacactcaaaaagaaggctgcagccggaacttttaaggagttggtaa

SEQ ID NO: 126992 - protein, 198 aa, Physcomitrella patens
MESGRGALLVLLVALCAASALGRTPSWDGKIEMPTEEDAEKGTRWAILIAGSSGYWNYRHQADVCHAYQILKRGGLKEENIVVFMYDDIAYSTENPHPGKIINKPDGPDVYQGVPKDYTGADVTVSNFYAALLGDKDAIKGGTRERWLTVDLTITSSSTTPTTVVLVSWVCPPRPTCTQMTLWTHSKRRLQPELLRSW

SEQ ID NO: 126993 - DNA, 1839 bp, Triticum aestivum
  CDS (56)..(1537)
cctccttcctcctccccctcgcttcttcacggaatccaaaccccaaacaccagccatggcgatggcgtcctttcgcccccttcctctcgcgctcctgctcgccgcgtgcctctccgcgctcgtgctggccgtggcgcacgcgcggaccccacggctggagcccaccatccggctgccgtcgcagcgcgccggcgggcaggaggacgatggctccatcgggaccaggtgggccgtcctcatcgccggctccaacggctactacaactaccgccaccaggcggatatctgccacgcctaccagatcatgaagaagggtggtctcaaggatgagaacatcatcgtattcatgtacgatgacattgcgcacaacccggagaacccgaggccgggcgtcatcatcaaccacccccagggtggagatgtctatgctggggtccctaaggactacactggaaaggaggttaatgtcaagaacttctttgctgtcctgctcggtaataaaaccgcggtgagtggtgggaacggcaaagttgtggacagtggccctaatgatcacatttttgtgttttacagtgaccatgggggtcctggggtccttgggatgcctacctatccatacctttacggtgacgatcttgtagatgtcctgaagaaaaagcacgctgctggaacctacaaaagcctggtattttaccttgaagcctgcgaatctgggagcatctttgagggacttctgccaaatgacatcggtgtctatgcgaccaccgcttcgaatgcagaggaaagcagttggggaacgtattgccccggcgagtacccgagccctccgccggaatatgacacttgcttgggcgacctgtacagcatttcttggatggaagacagtgatgtccacaacctgagaactgaatctctcaagcagcagtataacctggtcaagaagagaacggcagctcaggactcatacagctatggttcccatgtgatgcaatacggttctttggacctgaatgctgaacatttgttctcgtacattgggtcaaaccctgctaacgagaacactacatttgttgaagataacgcactgccatcattctcaagagctgttaatcagagggatgctgatcttgtttatttctggcagaagtaccggaaattggccgagagctcccctgagaaaaacgatgctcggaagcaattgcttgaaatgatgggtcatagatctcatattgacaacagcatcgagctgattggaaaccttctgtttggttctgcgggtggtccgatggttctaaaggctgttcgcccagctggtgagcctcttgttgatgactggagttgtctcaagtctacggtgcgcacttttgaatcacaatgtggctcactggcgcagtatggaatgaagcacatgcggccctttgcaaacatctgcaatgccggcattgttcctgaagcgacggcaaaggttgctgctcaggcatgcacgagcatcccaaccaacccctggagtgccacacacaagggttttagtgcttaaaccagaggtgaagcaacttggtccctatctcagctattgtaccatataccaaagtccccttcctattcacacagggttagtagtgcttgaacggacgaaccttagatgaataaataagaattatggcattacttcagctattccaccacaccaaattaccttggttgtgtccaacttatagtgtacatatacccgtagtagaaaggtgatttcctgtgattactgtacatactcgtgatagtttgtgatcagatgtgtagctcgcaattccatatatgaagaatgcaatcgctgctatttgc

SEQ ID NO: 126994 - protein, 493 aa, Triticum aestivum
MAMASFRPLPLALLLAACLSALVLAVAHARTPRLEPTIRLPSQRAGGQEDDGSIGTRWAVLIAGSNGYYNYRHQADICHAYQIMKKGGLKDENIIVFMYDDIAHNPENPRPGVIINHPQGGDVYAGVPKDYTGKEVNVKNFFAVLLGNKTAVSGGNGKVVDSGPNDHIFVFYSDHGGPGVLGMPTYPYLYGDDLVDVLKKKHAAGTYKSLVFYLEACESGSIFEGLLPNDIGVYATTASNAEESSWGTYCPGEYPSPPPEYDTCLGDLYSISWMEDSDVHNLRTESLKQQYNLVKKRTAAQDSYSYGSHVMQYGSLDLNAEHLFSYIGSNPANENTTFVEDNALPSFSRAVNQRDADLVYFWQKYRKLAESSPEKNDARKQLLEMMGHRSHIDNSIELIGNLLFGSAGGPMVLKAVRPAGEPLVDDWSCLKSTVRTFESQCGSLAQYGMKHMRPFANICNAGIVPEATAKVAAQACTSIPTNPWSATHKGFSA

SEQ ID NO: 126995 - DNA, 1839 bp, Triticum aestivum; identical to SEQ ID NO: 126993
  CDS (62)..(1537)

SEQ ID NO: 126996 - protein, 491 aa, Triticum aestivum
MASFRPLPLALLLAACLSALVLAVAHARTPRLEPTIRLPSQRAGGQEDDGSIGTRWAVLIAGSNGYYNYRHQADICHAYQIMKKGGLKDENIIVFMYDDIAHNPENPRPGVIINHPQGGDVYAGVPKDYTGKEVNVKNFFAVLLGNKTAVSGGNGKVVDSGPNDHIFVFYSDHGGPGVLGMPTYPYLYGDDLVDVLKKKHAAGTYKSLVFYLEACESGSIFEGLLPNDIGVYATTASNAEESSWGTYCPGEYPSPPPEYDTCLGDLYSISWMEDSDVHNLRTESLKQQYNLVKKRTAAQDSYSYGSHVMQYGSLDLNAEHLFSYIGSNPANENTTFVEDNALPSFSRAVNQRDADLVYFWQKYRKLAESSPEKNDARKQLLEMMGHRSHIDNSIELIGNLLFGSAGGPMVLKAVRPAGEPLVDDWSCLKSTVRTFESQCGSLAQYGMKHMRPFANICNAGIVPEATAKVAAQACTSIPTNPWSATHKGFSA

SEQ ID NO: 126997 - DNA, 1497 bp, Zea mays
  CDS (1)..(1497)
atggcgagtcgtcgcctcctctttgccgtgcagctcctcgtactgatcgccgcagtggccggcacacggtggcaggacttcctccgcctgccgtcggagtcggagtcggtggggaccaggtgggccgtcctcatcgccggctccaatggctactacaactaccgtcatcaggtagtaatttcatccattacgttatcattatgctttgcgaccactcttgttgagcagatcctgctacatgcctacatccatatccatggacaggcggacgtgtgccacgcgtaccaggtcttgaagaagggcgggctcaaggacgagaacatcgtcgtcttcatgtacgacgacatcgccgacagccccgacaaccccaggccgggcgtcatcatcaaccacccatccggcggagacgtgtacgcgggggtccccaaggactacacgggcaaggacgtgaacgccaacaacttcctcgccgccttgctgggcaacaggtccgccgtcaccggcggcggcagcggcaaggtggtcgccagcgggccggccgaccacgtcttcgtctactacagcgaccacggcgggcctggggtgctcgggatgccgtcgtcggacgactacctgtacgccaaggacctggtggacgctctcaggaagaagcacgccgcggggggctaccggagcctggtgttctacctggaggcgtgcgagtccgggagcatcttcgaggggctcctgccgcccgacatcgccgtgtacgccaccacggcggcgaacgcggaggagagcagctggggcacctactgccccggcgacgacccgggcccgccgcccgagttcgacacctgcctcggggacctctacagcgtcgcgtggatggaggacagcgacgcgcgccgcgaccgccgcgccgagacgctgaggcagcagtacctggcggtgaaggaccggacgtcggcgcacggcacctacagcctcggctcccacgccatggagtacggcgacgtgcagggcctcggcgcgcagagcctgtacacgttcatgggcagcgacgacgccaccgccgcgagcttatccggccgtggccgtgggcagccagccgtgagccagcgcgacgctgacctcgtctacttctggcggaggtaccgcagggcggcggagaggacgcccgagaaggccgaggcccggacgcggctgctgcgggcggtgtcccgccggtcccgcgtcgacagcatcatggagctcatcggaggcctcctgttcggctcggagggaggtcccagggtgctcggtgccgtgcggccggcgggacagcccctggccgacgactgggactgcctcaagtccttggtgcgtgcgtacgagcgcagctgcgggccgctcgggcagtacgggatgaagcacatgcgtggcttcgccaacatctgcaatgccggcgtcggggaggacggcatggccaaggtggcgtccgaggcctgcgccgccgtcgcccgttctgacgactga

SEQ ID NO: 126998 - protein, 498 aa, Zea mays
MASRRLLFAVQLLVLIAAVAGTRWQDFLRLPSESESVGTRWAVLIAGSNGYYNYRHQVVISSITLSLCFATTLVEQILLHAYIHIHGQADVCHAYQVLKKGGLKDENIVVFMYDDIADSPDNPRPGVIINHPSGGDVYAGVPKDYTGKDVNANNFLAALLGNRSAVTGGGSGKVVASGPADHVFVYYSDHGGPGVLGMPSSDDYLYAKDLVDALRKKHAAGGYRSLVFYLEACESGSIFEGLLPPDIAVYATTAANAEESSWGTYCPGDDPGPPPEFDTCLGDLYSVAWMEDSDARRDRRAETLRQQYLAVKDRTSAHGTYSLGSHAMEYGDVQGLGAQSLYTFMGSDDATAASLSGRGRGQPAVSQRDADLVYFWRRYRRAAERTPEKAEARTRLLRAVSRRSRVDSIMELIGGLLFGSEGGPRVLGAVRPAGQPLADDWDCLKSLVRAYERSCGPLGQYGMKHMRGFANICNAGVGEDGMAKVASEACAAVARSDD

SEQ ID NO: 126999 - DNA, 1488 bp, Glycine max
  CDS (1)..(1488)
atggcggttgatcgctcccttacgaggtgctgtagcctcgtactgtggtcgtggatgttgctgaggatgatgatggcgcagggtgcagccgcgagggccaaccggaaggagtgggactcggtcataaagttaccggctgaaccggtcgatgctgactcggatcatgaagtgggaacacgatgggcggttcttgtggctggttcaaacggctatggaaactacaggcatcaagcagatgtgtgccatgcgtaccagttgctgataaaaggtgggctaaaagaagagaacatagtggtgtttatgtacgatgacatagctacagacgagttaaatcccagacctggagtcatcatcaaccaccctgagggacaagatgtgtatgctggtgttcctaaggattacaccggtgagaatgtgacggcccagaacctctttgccgttattcttggagacaagaataaagtgaagggaggaagtggcaaagtgatcaatagcaaacctgaggacagaatatttatatactactctgatcatggaggtccgggagttcttgggatgccaaacatgccatacctttatgctatggactttattgaagtcttgaagaagaaacatgcatctggaggttacaagaagatggtcatatacgtggaagcttgtgaaagtgggagcatgtttgagggtataatgcctaaggatctgcagatttatgtcacaactgcatccaatgcacaagagaatagttggggaacttattgtcctggaatggatccttctccacctccagagtacatcacttgcctaggggatttgtacagtgttgcttggatggaagatagtgagactcataatctaaaaagggagtccgtgaaacaacaatacaaatcggtaaagcaacggacttcaaatttcaacaactatgcgatgggttctcatgtgatgcaatacggtgacacaaacatcacagctgaaaagctttatttataccaaggttttgatcctgccgctgtgaacttccctccacagaacggaaggctagaaactaaaatggaagttgttaaccaaagagatgcagaacttttcttcatgtggcaaatgtatcagagatcaaaccatcagccagaaaagaagacagacatcctcaaacagatagcggagacagtgaagcataggaaacacatagatggtagcgtggaattgattggagttttattgtatggaccaggaaaaggttcttctgttctacaatccatgagggctcctggtcttgcccttgttgatgactggacatgcctaaaatcaatggttcgggtgtttgagactcactgtgggacactgactcagtatggcatgaaacacatgcgagcatttgccaacatttgcaacagcggtgtttctgaggcctccatggaagaggtttgtgtggcagcttgtgaaggctacgattctgggctattacatccatcaaacaaaggctatagtgcttga

SEQ ID NO: 127000 - protein, 495 aa, Glycine max
MAVDRSLTRCCSLVLWSWMLLRMMMAQGAAARANRKEWDSVIKLPAEPVDADSDHEVGTRWAVLVAGSNGYGNYRHQADVCHAYQLLIKGGLKEENIVVFMYDDIATDELNPRPGVIINHPEGQDVYAGVPKDYTGENVTAQNLFAVILGDKNKVKGGSGKVINSKPEDRIFIYYSDHGGPGVLGMPNMPYLYAMDFIEVLKKKHASGGYKKMVIYVEACESGSMFEGIMPKDLQIYVTTASNAQENSWGTYCPGMDPSPPPEYITCLGDLYSVAWMEDSETHNLKRESVKQQYKSVKQRTSNFNNYAMGSHVMQYGDTNITAEKLYLYQGFDPAAVNFPPQNGRLETKMEVVNQRDAELFFMWQMYQRSNHQPEKKTDILKQIAETVKHRKHIDGSVELIGVLLYGPGKGSSVLQSMRAPGLALVDDWTCLKSMVRVFETHCGTLTQYGMKHMRAFANICNSGVSEASMEEVCVAACEGYDSGLLHPSNKGYSA

SEQ ID NO: 127001 - DNA, 1284 bp, Glycine max
  CDS (1)..(1284)
atgcccactttttttcttccaacgctcctcctccttctcatagccttcgccacctctgtctccggccgccgtgacctcgtcggagactttctccggctgccctccgaaactgataacgacgacaacttcaagggcacccggtgggccgtcctcctcgccggttccaatggttactggaattacagacatcaggctgatgtttgtcacgcctatcaaatattgaggaaaggtggtctgaaagaagaaaatattattgtttttatgtatgatgacattgcattcaatggggaaaacccaaggcctggagtcatcattaacaaaccagatggaggtgatgtttataaaggagttccaaaggattacaccggcgaagatgttactgttgataacttttttgctgctttacttggaaataagtcagcactgactggtggcagtgggaaggttgtggacagtggtcctgatgatcatatatttgtatactatactgaccatggaggtcctggggtgctcgggatgcctgctggtccttacttatacgcggatgatctgattgaagtcttgaagaaaaagcatgcttctggaacatataaaaacctagtattttatctggaggcatgtgaatctgggagtatctttgaaggtcttcttcctgaagatatcaatatttatgcaaccactgcttccaatgcagaagaaagtagttggggaacatattgccccggggagtatcctagtcctcccccagaatatacaacctgtttgggtgacttgtacagtgttgcttggatggaagacagtgacagacacaatttgcgaacagaaactctgcaccaacaatataaattggttaaagagaggactatatctggagattcatactatggctctcacgtgatgcagtatggtgatgtagggcttagcagagatgttctcttccattatttgggtacagatcctgctaatgataatttcacttttgtggatgaaaactccttatggtcaccttcaaaaccagtcaaccaacgtgatgctgatctcatccatttttgggataagttccgcaaagctcctgagggttctctcaggaaaaatacagctcagaaacaagttttggaagcaatgtctcacagaatgcatgtagacaacagtgtaaaactgattgggaagcttttatttggcattgaaaagggtccagaagtactcaacgctgttagaccggctggatcggcacttgttgatgactggcactgcctgaaaaccatggtatcatttttgttctga

SEQ ID NO: 127002 - protein, 427 aa, Glycine max
MPTFFLPTLLLLLIAFATSVSGRRDLVGDFLRLPSETDNDDNFKGTRWAVLLAGSNGYWNYRHQADVCHAYQILRKGGLKEENIIVFMYDDIAFNGENPRPGVIINKPDGGDVYKGVPKDYTGEDVTVDNFFAALLGNKSALTGGSGKVVDSGPDDHIFVYYTDHGGPGVLGMPAGPYLYADDLIEVLKKKHASGTYKNLVFYLEACESGSIFEGLLPEDINIYATTASNAEESSWGTYCPGEYPSPPPEYTTCLGDLYSVAWMEDSDRHNLRTETLHQQYKLVKERTISGDSYYGSHVMQYGDVGLSRDVLFHYLGTDPANDNFTFVDENSLWSPSKPVNQRDADLIHFWDKFRKAPEGSLRKNTAQKQVLEAMSHRMHVDNSVKLIGKLLFGIEKGPEVLNAVRPAGSALVDDWHCLKTMVSFLF

SEQ ID NO: 127003 - DNA, 1113 bp, Glycine max
  CDS (1)..(1113)
atgcccactttttttcttccaacgctcctcctccttctcatagccttcgccacctctgtctccggccgccgtgacctcgtcggagactttctccggctgccctccgaaactgataacgacgacaacttcaagggcacccggtgggccgtcctcctcgccggttccaatggttactggaattacagacatcaggctgatgtttgtcacgcctatcaaatattgaggaaaggtggtctgaaagaagaaaatattattgtttttatgtatgatgacattgcattcaatggggaaaacccaaggcctggagtcatcattaacaaaccagatggaggtgatgtttataaaggagttccaaaggattacaccggcgaagatgttactgttgataacttttttgctgctttacttggaaataagtcagcactgactggtggcagtgggaaggttgtggacagtggtcctgatgatcatatatttgtatactatactgaccatggaggtcctggggtgctcgggatgcctgctggtccttacttatacgcggatgatctgattgaagtcttgaagaaaaagcatgcttctggaacatataaaaacctagtattttatctggaggcatgtgaatctgggagtatctttgaaggtcttcttcctgaagatatcaatatttatgcaaccactgcttccaatgcagaagaaagtagttggggaacatattgccccggggagtatcctagtcctcccccagaatatacaacctgtttgggtgacttgtacagtgttgcttggatggaagacagtgacagacacaatttgcgaacagaaactctgcaccaacaatataaattggttaaagagaggactatatctggagattcatactatggctctcacgtgatgcagtatggtgatgtagggcttagcagagatgttctcttccattatttgggtacagatcctgctaatgataatttcacttttgtggatgaaaactccttatggtcaccttcaaaaccagtcaaccaacgtgatgctgatctcatccatttttgggataaggtatcctatttgtgcaatattttttattctttatgttatgaattaatttcttga

SEQ ID NO: 127004 - protein, 370 aa, Glycine max
MPTFFLPTLLLLLIAFATSVSGRRDLVGDFLRLPSETDNDDNFKGTRWAVLLAGSNGYWNYRHQADVCHAYQILRKGGLKEENIIVFMYDDIAFNGENPRPGVIINKPDGGDVYKGVPKDYTGEDVTVDNFFAALLGNKSALTGGSGKVVDSGPDDHIFVYYTDHGGPGVLGMPAGPYLYADDLIEVLKKKHASGTYKNLVFYLEACESGSIFEGLLPEDINIYATTASNAEESSWGTYCPGEYPSPPPEYTTCLGDLYSVAWMEDSDRHNLRTETLHQQYKLVKERTISGDSYYGSHVMQYGDVGLSRDVLFHYLGTDPANDNFTFVDENSLWSPSKPVNQRDADLIHFWDKVSYLCNIFYSLCYELIS

SEQ ID NO: 127005 - DNA, 1888 bp, Oryza sativa
  CDS (211)..(1701)
gggcgggcggcggttgccgtggctgcagaagacgacgaagcggcggcggcgccacctgtccacctcacgccccacgcgtccgcgccgcaggctaccctccttgcatggcggcatggcgcggcgcctacttcggtgcttcccttcaaccacctcggtgtcccgtagagtcgtaggcgtggtattgtcgcgcgcggagaagaggggagggatatggcggcgcggtggtgcttcgcgttgctcttggcgctgtcggcggccgcggcgggggccggagccaagcggacgtgggagccggtgattcggatgccgggggaggtggtggaggaggaggtggccaccgtgccgcgcggcagcgagggcaccgaggaggaggagaaggacggcgtcgggacgaggtgggcggtgctcgtcgcgggctcctccggctacggtaactacaggcaccaggctgatgtatgccatgcataccagatattacggaagggagggctaaaggaggagaacattgtcgtgtttatgtatgacgacattgccaataatatacttaacccgagaccaggggttattgtcaatcatccacagggtgaagatgtttatgcaggagttccgaaggattacactggagacgaagtcactgaaaaaaacttttacgcggttctcttgggcaataaaactgcagttactgggggtagtaggaaggtcatagatagcaaaccaaatgaccacatatttatcttctactctgatcatgggggtcctggagttcttggtatgcccaatctgccatatctttatgctgctgacttcatgaaggtgttacaagaaaaacatgcctccaatacttacgctaaaatggttatatatgtagaagcgtgtgaaagtggcagtattttcgaaggtttgatgccagaggaccttaatatttatgtcacaacagcgtctaatgcagaagagagtagttgggggacgtactgcccaggaatggaaccatcgcctccttccgagtacatcacctgcttaggtgacctatacagcgtttcttggatggaagacagtgagactcacaatctgaaggaggaatcaattaagaagcagtacgaaatggttaagaagcgtacctctgacatgaacagctacggtgctggctctcatgttatggagtacggggacaggacattcaaggatgacaagctttacctataccaaggtttcgaccctgcaaatgccgaagttaagaacaagctatcatgggaaggcccaaaggctgcagtcaaccaaagagatgcagatcttcttttcctctggagaaggtatgagctgttacatgacaagtccgaagagaagctgaaagctctgagggagatcagtgacactgttatgcataggaagcttcttgacagcagtgttgatcttgtcggaaaacttctctttggatttggaaatgggccttctgtgcttcaagctgttagaccttctggtcagccactcgttgatgattgggattgtttgaagagaatggtacggatctttgagtcgcattgcggaccgctcactcagtacggtatgaagcacatgagggcgtttgctaatatttgcaacaacggtatctctggcgcttcaatgaaggaagcaagcatcgctacttgcagcagtcacaactcgggtagatggagctcgctggtgcaggggtacagtgcttgatctgccgcaacacgtgatatagcctcaaaacttatgccttgtactcgtacttcctcaaaacaataccttcaggactgcaaataaccgtccaaggatgtaccgctgtatgctactgtacctctatgtgtgcaatatagatgccctgtatatacgagtatatgaatgaatcgtgtgcttttacatgccc

SEQ ID NO: 127006 - protein, 496 aa, Oryza sativa
MAARWCFALLLALSAAAAGAGAKRTWEPVIRMPGEVVEEEVATVPRGSEGTEEEEKDGVGTRWAVLVAGSSGYGNYRHQADVCHAYQILRKGGLKEENIVVFMYDDIANNILNPRPGVIVNHPQGEDVYAGVPKDYTGDEVTEKNFYAVLLGNKTAVTGGSRKVIDSKPNDHIFIFYSDHGGPGVLGMPNLPYLYAADFMKVLQEKHASNTYAKMVIYVEACESGSIFEGLMPEDLNIYVTTASNAEESSWGTYCPGMEPSPPSEYITCLGDLYSVSWMEDSETHNLKEESIKKQYEMVKKRTSDMNSYGAGSHVMEYGDRTFKDDKLYLYQGFDPANAEVKNKLSWEGPKAAVNQRDADLLFLWRRYELLHDKSEEKLKALREISDTVMHRKLLDSSVDLVGKLLFGFGNGPSVLQAVRPSGQPLVDDWDCLKRMVRIFESHCGPLTQYGMKHMRAFANICNNGISGASMKEASIATCSSHNSGRWSSLVQGYSA

SEQ ID NO: 127007 - DNA, 1449 bp, Glycine max
  CDS (1)..(1449)
atgcccactttttttcttccaacgctcctcctccttctcatagccttcgccacctctgtctccggccgccgtgacctcgtcggagactttctccggctgccctccgaaactgataacgacgacaacttcaagggcacccggtgggccgtcctcctcgccggttccaatggttactggaattacagacatcaggctgatgtttgtcacgcctatcaaatattgaggaaaggtggtctgaaagaagaaaatattattgtttttatgtatgatgacattgcattcaatggggaaaacccaaggcctggagtcatcattaacaaaccagatggaggtgatgtttataaaggagttccaaaggattacaccggcgaagatgttactgttgataacttttttgctgctttacttggaaataagtcagcactgactggtggcagtgggaaggttgtggacagtggtcctgatgatcatatatttgtatactatactgaccatggaggtcctggggtgctcgggatgcctgctggtccttacttatacgcggatgatctgattgaagtcttgaagaaaaagcatgcttctggaacatataaaaacctagtattttatctggaggcatgtgaatctgggagtatctttgaaggtcttcttcctgaagatatcaatatttatgcaaccactgcttccaatgcagaagaaagtagttggggaacatattgccccggggagtatcctagtcctcccccagaatatacaacctgtttgggtgacttgtacagtgttgcttggatggaagacagtgacagacacaatttgcgaacagaaactctgcaccaacaatataaattggttaaagagaggactatatctggagattcatactatggctctcacgtgatgcagtatggtgatgtacggcttagcagtgatgttctcttccattatttgggtacagatcctgctaatgataatttcacttttgtggatgaaaactccttatggtcaccttcaaaaccagtcaaccaacgtgatgctgatctcatccatttttgggataagttccgcaaagctcctgagggttctctcaggaaaaatacagctcagaaacaagttttggaagcaatgtctcacagaatgcatgtagacaacagtgtaaaactgattgggaagcttttatttggcattgaaaagggtccagaagtactcaacgctgttagaccggctggatcggcacttgttgatgactggcactgcctgaaaaccatggtgaggacttttgagacacattgtggatccttgtctcaatatggcatgaaacacatgaggtcctttgcaaacatctgcaatgtagggataaagaatgagcaaatggctgaggcctctgcacaagcttgtgtctctattccttccaatccttggagttctctgcaaaggggtttcagtgcataa

SEQ ID NO: 127008 - protein, 482 aa, Glycine max
MPTFFLPTLLLLLIAFATSVSGRRDLVGDFLRLPSETDNDDNFKGTRWAVLLAGSNGYWNYRHQADVCHAYQILRKGGLKEENIIVFMYDDIAFNGENPRPGVIINKPDGGDVYKGVPKDYTGEDVTVDNFFAALLGNKSALTGGSGKVVDSGPDDHIFVYYTDHGGPGVLGMPAGPYLYADDLIEVLKKKHASGTYKNLVFYLEACESGSIFEGLLPEDINIYATTASNAEESSWGTYCPGEYPSPPPEYTTCLGDLYSVAWMEDSDRHNLRTETLHQQYKLVKERTISGDSYYGSHVMQYGDVRLSSDVLFHYLGTDPANDNFTFVDENSLWSPSKPVNQRDADLIHFWDKFRKAPEGSLRKNTAQKQVLEAMSHRMHVDNSVKLIGKLLFGIEKGPEVLNAVRPAGSALVDDWHCLKTMVRTFETHCGSLSQYGMKHMRSFANICNVGIKNEQMAEASAQACVSIPSNPWSSLQRGFSA

SEQ ID NO: 127009 - DNA, 1756 bp, Brassica napus
  CDS (122)..(1585)
tcatcaccttattgattggttgacaaaaaacaaacagataagaaaagaaaagattcattatttaatagttcccccgccgattaaaagattcgtatccacgtcaccatacgcctctccaacgatgacacctgtcgccgtcgccgttctcgtcctctccttgatcgccgtctccgccgcaagacaaaaccccgacgacgacgtcatcaaactcccctcgcaagcttccaggttcttccgccccaacaacgacgacgaatcttcatcgtccggcaccaggtgggccgttctggtcgccggatcgagcggttattggaactacagacatcaggctgatgtttgtcatgcttatcaactactgaggaaaggaggattgaaagaggagaatattgtggttttcatgtatgatgatattgctgataatgaagagaatccgaggaaagggatcattatcaatagccctcatgggagtgatgtctatgaaggagttcccaaggattacactggagatgatgttactgttgataatctgtttgctgtgatccttggagataaaactgctgttaagggagggagtgggaaggttgtggatagtggtcctaatgatcatatttttatattctatagtgaccatggtggtcctggagttcttgggatgccgacttctccttacttatatgctgatgacttgaatgatgtcttgaagaaaaaacatgcttccggaacctacaaaagcatggtgttctatcttgaagcttgtgagtctggaagtatctttgaagggcttcttgaagagggtttaaacatctacgccacaactgcatcaaacgcagtggaaagcagttggggtacctattgccctggggaggagcctagccctccaccggagtatgaaacttgcttaggtgacttatacagtgttgcatggatggaagacagcggtgtgcacaatctacaaactgagactctacgccaacaatatgagctagtgaagaggaggactgctggtggtgcgtcggcttacggttctcatgtgatgcaatatggagatgtaggacttaacaaggataagctcgacctttacatgggaacaaaccctgccaatgacaacttcacttttgtggatgctaattcactgactccaccttcaggagttactaaccagcgtgatgcagatcttgtccatttctgggataagtaccgaaaggcaccagaaggttccacaaggaaaacagaagctcagaagcaagtccttgaagccatgtctcacagacttcatgttgacaacagtgtgaaactcgtcggcaaactcttgtttggtatctcagaaggttctgaagtgctaaacaaagtaaggcctgctggacaacctctggccgatgactggacttgccttaaaaacacggtgagagcttttgagagacactgtgggtcgctgtcacagtacggtatcaagcacatgaggtcatttgcaaacatctgcaacgcagggatccaaatggagcaaatggaagaggcagcttcacaggcttgcacctcaatcccatctggtccttggagctctcttcaccgtggattcagtgcttaaaacccctaaatccctctttgcatttgtttaatactagtaccaatacccaaatattcctatttcgattcccctgtatatctcattatcatttccctcttgattatctaattacagattatacatatgctttgtacaaaatgcttgtagaaactcaagttaatgtaaacaacg

SEQ ID NO: 127010 - protein, 487 aa, Brassica napus
MTPVAVAVLVLSLIAVSAARQNPDDDVIKLPSQASRFFRPNNDDESSSSGTRWAVLVAGSSGYWNYRHQADVCHAYQLLRKGGLKEENIVVFMYDDIADNEENPRKGIIINSPHGSDVYEGVPKDYTGDDVTVDNLFAVILGDKTAVKGGSGKVVDSGPNDHIFIFYSDHGGPGVLGMPTSPYLYADDLNDVLKKKHASGTYKSMVFYLEACESGSIFEGLLEEGLNIYATTASNAVESSWGTYCPGEEPSPPPEYETCLGDLYSVAWMEDSGVHNLQTETLRQQYELVKRRTAGGASAYGSHVMQYGDVGLNKDKLDLYMGTNPANDNFTFVDANSLTPPSGVTNQRDADLVHFWDKYRKAPEGSTRKTEAQKQVLEAMSHRLHVDNSVKLVGKLLFGISEGSEVLNKVRPAGQPLADDWTCLKNTVRAFERHCGSLSQYGIKHMRSFANICNAGIQMEQMEEAASQACTSIPSGPWSSLHRGFSA

SEQ ID NO: 127011 - DNA, 1461 bp, Zea mays
  CDS (1)..(1461)
atggtggccgctcgcctccgcctcgcgctgctactctccgtctgcctctgctccgcgtgggcgcgcccacgcctcgagacggccatccgcctgccgtcgcagcgcgcggcggcggccgacgaaacggacgacggcgccgtcgggacccgctgggctgtgctcatcgcaggctccagcggctactacaactaccgccaccaggcggacatctgccatgcataccagatcatgaagaagggcggactcaaggatgagaacatcattgtcttcatgtacgatgacatcgcgcatagcccggagaatccgaggcctggtgtcatcatcaaccatccccagggtggcgacgtctatgctggggtgccaaaggattacacggggcgagatgtcaacgtcgacaatttcttcgctgttctgcttggcaacaaaactgctctcaggggtgggagcggcaaggttgtggacagtggccccgatgatcatatctttgttttctacagtgaccatgggggtcctggtgtccttggaatgcctacgtatccatatctctatggtgatgacctcgtagatgtcctgaagaagaagcatgctgccgggacctacaaaagcctggtcttttaccttgaagcatgcgaatctgggagcatctttgagggcctcctgccgaatgacatcaatgtgtatgcgaccaccgcgtcaaatgcagaggagagcagctgggggacatactgccctggcgagttcccgagccctccaccggagtatgacacctgcttgggtgacctgtacagtgttgcttggatggaagacagtgatttccacaatctgcgaactgaatctctcaagcagcagtacaagttggtcaaggataggacagcggttcatgacacgttcagctatggttcccatgtgatgcaatatggcgcactggagttgaatgttcagcatttgttttcgtacattggcacagaccctgctaacgatggcaacacgtttatagaagataactcactgccatcgttctcaaaagccgtcaatcagcgcgacgctgaccttgtctacttctggcagaagtaccggaaatttgctgatagcccgcctgcgaaaagcgaggctcggaaggaactgcttgaagtgatggcccacaggtctcatgttgacagcagcgttgagctcatcggaagccttctctttggctctgaggacggtccaagggttctgaaagccgtccgtgcacctggtgaacctctggttgatgattggagctgcctcaagtccatagttcgcacttttgaggcgcgatgcgggtccttggcgcagtatgggatgaagcacatgcgatccttcgcgaacatgtgcaacgctggcatccttcctgaagcagtgtcgaaggtggccgctcaggcctgcagcagcattccgtccaacccctggagctctatccacaagggttttagcgcttaa

SEQ ID NO: 127012 - protein, 486 aa, Zea mays
MVAARLRLALLLSVCLCSAWARPRLETAIRLPSQRAAAADETDDGAVGTRWAVLIAGSSGYYNYRHQADICHAYQIMKKGGLKDENIIVFMYDDIAHSPENPRPGVIINHPQGGDVYAGVPKDYTGRDVNVDNFFAVLLGNKTALRGGSGKVVDSGPDDHIFVFYSDHGGPGVLGMPTYPYLYGDDLVDVLKKKHAAGTYKSLVFYLEACESGSIFEGLLPNDINVYATTASNAEESSWGTYCPGEFPSPPPEYDTCLGDLYSVAWMEDSDFHNLRTESLKQQYKLVKDRTAVHDTFSYGSHVMQYGALELNVQHLFSYIGTDPANDGNTFIEDNSLPSFSKAVNQRDADLVYFWQKYRKFADSPPAKSEARKELLEVMAHRSHVDSSVELIGSLLFGSEDGPRVLKAVRAPGEPLVDDWSCLKSIVRTFEARCGSLAQYGMKHMRSFANMCNAGILPEAVSKVAAQACSSIPSNPWSSIHKGFSA

SEQ ID NO: 127013 - DNA, 1311 bp, Trichoplax adhaerens
  CDS (1)..(1311)
atgtggaaattaacagtcatcgttgttatgacctgtttaacggggctcttgctagctctaccatcgttgcattctcgtgaagatgacggcaaaaattgggcagtcctcgtagctggctccaatggttgggacaattacagacatcaagccgatatatgccatgcttatcagatccttcataaaaatggattccctgatgagcgtattgtggtcatgatgtacgatgacattgccgaaaacgaaaacaacccaacccctggaaagattatcaataggccttatggtcctaacgtatacgccaacgttctaaaagattacaccaaaaatcatgtcaatccaacaaatttcatcaacgttttactgggtaatgcagacaaagtcaccggtggcagtggaaaagtactgaagagtgggccaaatgatcgtgttttcatcaattttgtcgatcatggtgcgcaaggtcttgtggcctttcctgaggacattttaaccgctaagatgcttaaccagaccatcaaccaaatgtacatgaagaaaatgttcaaacagttggttatttacgttgaagcttgtgaggcaggatcaatgtttcataatgtcttagccgataacaaaaatgtttatgttactactgcttccgatccgactcattcctcgtacgcctgctattatgataggaaaaggggcacatatcttggtgatgtatacagcataaattggatgcaaaattccgatcaggctgacatgcaaacagaaaccttaattcaacagtttgataccgttcgaagaaagaccaatactagtaaagtctgcaaatatggtgatatgtcattcgacgaggaagatctagataattttcaaggcgatccaaaatccaatactccatcaaaactattcgatccttatccgttacctccgatggacactgtcgcagctccagatgtaccagtagttattttaagtaaccgtattactgatgccacatcaaagactgagcgacaacactatataggacagttagagaagctaattgagcatcgcgaaaaaattgataagacgatacgatccattctcatagaagctgttgaaaacaattttgaacttgctcatcatattatgcatcaccaaaagcatgatattaagaattttgattgtttacatgttatgactaaatcgttctcagagaaatgttataaccttggcaagaatgactatgccatgcgtatggtttatgttctggttaacctgtgtgaaacggagcgaatgaccgaatcaatgattctgtcagcaattaacaagatttgccactaa

SEQ ID NO: 127014 - protein, 436 aa, Trichoplax adhaerens
MWKLTVIVVMTCLTGLLLALPSLHSREDDGKNWAVLVAGSNGWDNYRHQADICHAYQILHKNGFPDERIVVMMYDDIAENENNPTPGKIINRPYGPNVYANVLKDYTKNHVNPTNFINVLLGNADKVTGGSGKVLKSGPNDRVFINFVDHGAQGLVAFPEDILTAKMLNQTINQMYMKKMFKQLVIYVEACEAGSMFHNVLADNKNVYVTTASDPTHSSYACYYDRKRGTYLGDVYSINWMQNSDQADMQTETLIQQFDTVRRKTNTSKVCKYGDMSFDEEDLDNFQGDPKSNTPSKLFDPYPLPPMDTVAAPDVPVVILSNRITDATSKTERQHYIGQLEKLIEHREKIDKTIRSILIEAVENNFELAHHIMHHQKHDIKNFDCLHVMTKSFSEKCYNLGKNDYAMRMVYVLVNLCETERMTESMILSAINKICH

SEQ ID NO: 127015 - DNA, 1251 bp, Branchiostoma floridae
  CDS (1)..(1251)
atgatcgccgtacttgtgctgtcgctgctcggggccaccctcgccctgcccccgaaggaaggagggaaccactgggcggtggtggtggcggggtctaacggctggggcaactacagacaccaggccgatgcctgccacgcctaccagatcctgcaccgtaacgggatccctgacgaccggatcatcgtcatgatgtacgacgacatcgcaaacaacgaggaaaacccgacccccggaatcatcatcaacaggcccaatggcacagacatgtacaagggagtccccaaggactacaacagcgaggatgtgactcccgagaacttcctgaatgtgctgaagggaaacaaggaggccatggctgggattgggagtgggaaggtgctacagagcggcccagaagacaacgtgtttgtgttcttcaccgaccacggagcgcccaacctcatcgcttttcctgagtcagagctccatgcgaaggacatgatggacgctctccagtacatgcacgacaacaacatgtacaagaatctggtgttttacctggaagcttgtgagtctggctccatgtttcacagacacctgcccgacaacatcaacattttcgccaccagtgcggccaacccccacgagtcgtcctacgcctgctattttgacgagaagcgagagacgtacctgggcgacttgtacagcgtcaggtggatggaggactcagacacggaggaccttaagaaggagacactgcagcggcagttcaagatcgtgcggcgcgagacgaacaccagccatgtgcgcgagtacggagacatgagcatgaagaacatgacgctgctgcagttccagggaggccgggtcgacgttcccctcacccccctcccaccctaccctcaatttgatgctgttcccgcacccgaggtgaaactcgctgtccttaagcaccgtatgaaggtcgctaggacggacgaagagaggtcagaggtcaccgacctgatcaaacaggagtttgctgatcgccagatgatccgtgacacagtggagaccatcgtgcagaaggcggtgcaggaccaggaccaggcggaccgcgtgctgagggaccgcacccgggacctgaccgcccacgactgctacaagcgcgccgtctcgcacttccgccggcgctgcttcctcttcaatgtggtacgttacgagcacgccctgcgccacctatacaccctggtcaacctgtgtgaggagggcgtgtctgtggacaggtga

SEQ ID NO: 127016 - protein, 416 aa, Branchiostoma floridae
MIAVLVLSLLGATLALPPKEGGNHWAVVVAGSNGWGNYRHQADACHAYQILHRNGIPDDRIIVMMYDDIANNEENPTPGIIINRPNGTDMYKGVPKDYNSEDVTPENFLNVLKGNKEAMAGIGSGKVLQSGPEDNVFVFFTDHGAPNLIAFPESELHAKDMMDALQYMHDNNMYKNLVFYLEACESGSMFHRHLPDNINIFATSAANPHESSYACYFDEKRETYLGDLYSVRWMEDSDTEDLKKETLQRQFKIVRRETNTSHVREYGDMSMKNMTLLQFQGGRVDVPLTPLPPYPQFDAVPAPEVKLAVLKHRMKVARTDEERSEVTDLIKQEFADRQMIRDTVETIVQKAVQDQDQADRVLRDRTRDLTAHDCYKRAVSHFRRRCFLFNVVRYEHALRHLYTLVNLCEEGVSVDR

SEQ ID NO: 127017 - DNA, 1275 bp, Branchiostoma floridae
  CDS (1)..(1275)
atgatcgccgtacttgtgctgtcgctgctcggggccaccctcgccctgcccccgaaggaaggagggaaccactgggcggttgtggtggcggggtccaacggctggggcaactacagacaccaggccgatgcctgccacgcctaccagattctgcaccgtaacgggatccctgacgaccggatcatcgtcatgatgtacgacgacatcgcaaacaacgaggaaaacccgacccccggaatcatcatcaacaggcccaacggcacagatgtgtacaagggggttcccaaggactacaacagtgaggatgtgactcccgagaacttcctgaatgtgctgaagggaaacaaggaggccatggcggggatcgggagtggaaaggtgctacagagcggcccagaagacaatgtgtttgtgttcttcaccgaccatggagcgccaaacctcatcgcttttcctgagtcagagctccatgcgaaggacatgatggaggctctgcagtacatgcacgacaacaacatgtacaagaacctggtgttttacctggaagcttgtgagtctggctccatgttccacagacacctgcccgacaacatcaacattttcgccaccagcgcggccaacccccacgagtcgtcctacgcctgctattttgacgagaagcgggagacgtacctgggcgatctgtacagcgtcaggtggatggaggactcagacacggaggaccttaagaaggagactctgcagcgtcagtttaagatcgttcggcgcgagacgaacaccagccacgtgcgcgagtacggagacatgagcatgaagaacatgacactgctgcagttccagggaggccgattcgaccggggcgtttctgtaagtagtttactgtcctccatctgtccccagtttgatgctgttcctgcacccgaggtgaaactcgccgtccttcagcaccgcatgaaggtcgccaggacggacgaagagaggtcagagttacattattcacaaaggattatcgtttaccctcatctccaggatcggcagatgatccgtgacacggtggagaccatcgtgcggaaggtggcgcaggaccaggaccaggcggatcgcgtgctgagagaccgcacccgggacctgaccgcccacgactgctacaagcgcgccgtctcgcacttccgccgccgctgcttcctcttcaatgtggtacgttacgagcacgccctgcgccacctatacaccctggtcaacctgtgtgaggagggcgtgtctgtggacaggtga

SEQ ID NO: 127018 - protein, 424 aa, Branchiostoma floridae
MIAVLVLSLLGATLALPPKEGGNHWAVVVAGSNGWGNYRHQADACHAYQILHRNGIPDDRIIVMMYDDIANNEENPTPGIIINRPNGTDVYKGVPKDYNSEDVTPENFLNVLKGNKEAMAGIGSGKVLQSGPEDNVFVFFTDHGAPNLIAFPESELHAKDMMEALQYMHDNNMYKNLVFYLEACESGSMFHRHLPDNINIFATSAANPHESSYACYFDEKRETYLGDLYSVRWMEDSDTEDLKKETLQRQFKIVRRETNTSHVREYGDMSMKNMTLLQFQGGRFDRGVSVSSLLSSICPQFDAVPAPEVKLAVLQHRMKVARTDEERSELHYSQRIIVYPHLQDRQMIRDTVETIVRKVAQDQDQADRVLRDRTRDLTAHDCYKRAVSHFRRRCFLFNVVRYEHALRHLYTLVNLCEEGVSVDR

SEQ ID NO: 127019 - DNA, 1401 bp, Arabidopsis thaliana
  CDS (1)..(1401)
atgtctagtcctcttggtcactttcagattcttgtttttcttcatgctttgcttatcttctcagctgagtcccgcaaaacccaattgctgaacgataatgatgttgaatctagcgacaagagtgcaaaaggcacacgatgggctgttttagttgctggatcaaatgaatattataactacaggcatcaggctgacatatgccacgcgtatcagatactccgaaaaggcggtttaaaagatgaaaacatcattgtgtttatgtatgatgatatcgcgttttcctcggagaatcctaggcctggagttatcattaataaaccagatggagaagatgtttataaaggagttcctaaggactacactaaagaagctgttaatgttcaaaacttctacaatgtgttacttggaaatgaaagtggcgtcacaggaggaaatggcaaagttgtgaaaagtggtcctaatgataatatcttcatctattatgctgaccatggagctcctggcttaatagcgatgcccactggtgatgaagttatggcaaaagatttcaatgaagtcttggagaagatgcataagagaaaaaaatacaacaagatggtgatctatgttgaagcatgtgaatcaggaagtatgtttgaagggattttaaagaaaaatctcaacatatacgcagtgactgctgctaattctaaagagagcagctggggagtttactgtcctgagtcatatcctcctcctccttctgagattggaacttgtctcggcgatacatttagcatctcttggcttgaggacagtgaccttcatgacatgagcaaagagactttggagcaacaataccacgttgtaaagagaagagtaggatctgatgtaccagagacttctcatgtatgccgtttcggaacagagaagatgcttaaagattatctttcctcttacattggaagaaatcctgaaaacgataacttcactttcacggaatccttttcctcaccaatctctaattctggcttggtcaatccgcgcgatattcctctgctatacctccagagaaagattcaaaaagctccaatgggatcacttgaaagcaaagaagctcagaagaaattgcttgacgaaaagaatcataggaaacaaatcgatcagagcattacagacattctgcggctttcagttaaacaaaccaatgtcttaaatctcttaacttccacaagaacaacaggacagcctcttgtagacgattgggattgcttcaagactctagttaatagcttcaagaatcactgcggtgcaacggtgcattacggattgaagtatacaggagcgcttgccaatatctgcaatatgggagtggatgtgaagcaaactgtttcagccattgaacaagcttgttcgatgtaa

SEQ ID NO: 127020 - protein, 466 aa, Arabidopsis thaliana
MSSPLGHFQILVFLHALLIFSAESRKTQLLNDNDVESSDKSAKGTRWAVLVAGSNEYYNYRHQADICHAYQILRKGGLKDENIIVFMYDDIAFSSENPRPGVIINKPDGEDVYKGVPKDYTKEAVNVQNFYNVLLGNESGVTGGNGKVVKSGPNDNIFIYYADHGAPGLIAMPTGDEVMAKDFNEVLEKMHKRKKYNKMVIYVEACESGSMFEGILKKNLNIYAVTAANSKESSWGVYCPESYPPPPSEIGTCLGDTFSISWLEDSDLHDMSKETLEQQYHVVKRRVGSDVPETSHVCRFGTEKMLKDYLSSYIGRNPENDNFTFTESFSSPISNSGLVNPRDIPLLYLQRKIQKAPMGSLESKEAQKKLLDEKNHRKQIDQSITDILRLSVKQTNVLNLLTSTRTTGQPLVDDWDCFKTLVNSFKNHCGATVHYGLKYTGALANICNMGVDVKQTVSAIEQACSM

SEQ ID NO: 127021 - DNA, 795 bp, Oryza sativa subsp
  CDS (1)..(795)
atggccatgggtgtcctcctgctgatgcatctgcaagttgggctgggcctcggcaacggcgggctgtggctgccgacggagaatggggggacgaagtgggcgttgctcatcgcggggtcgaaggggtacgaaaactaccgtcaccaggcagacgtgtgccacgcgtaccagataatgaagaagggaggactcaaggaccagaacatcgtggttatgatgtacgacgacatcgcctataaccccgagaatcctcacaagggcgtcatcatcaacaaacccaacggtccgaacgtctacaccggagtcccaaaggattacaatgggaatgacgtgaataagaacaacttcctggccgtgttgttgggcaagaagtcggctctcaccggcgccggcagcggccccaacgaccatatcttcgtctattactcagatcatggcagccccggatacgtctgcatgccatcgggggggaacctgcacgcgaacgatctttctcaagcactgaagaataagaacgcggccggcgcgtacaagaacctggtggtgtacgtggaggcgtgcgagtcgggtagcatgttcgagggccagcttcttccgtccaacatcggcgtgtacgcgatgacggcgtcgaacgcgacggagaacagctgggccacctactgcgacacgccggagtacaacacctgcctcggcgacctcttcagcgtggcctggatggaggacgccgacgcgcgccgccccggcgatcccgagacgctcggccagctgtacgacatcgtcgcgaagcgcacctaa

SEQ ID NO: 127022 - protein, 264 aa, Oryza sativa subsp
MAMGVLLLMHLQVGLGLGNGGLWLPTENGGTKWALLIAGSKGYENYRHQADVCHAYQIMKKGGLKDQNIVVMMYDDIAYNPENPHKGVIINKPNGPNVYTGVPKDYNGNDVNKNNFLAVLLGKKSALTGAGSGPNDHIFVYYSDHGSPGYVCMPSGGNLHANDLSQALKNKNAAGAYKNLVVYVEACESGSMFEGQLLPSNIGVYAMTASNATENSWATYCDTPEYNTCLGDLFSVAWMEDADARRPGDPETLGQLYDIVAKRT

SEQ ID NO: 127023 - DNA, 1329 bp, Haemaphysalis longicornis
  CDS (1)..(1329)
atgtcagcaagggagtcaatgatcaccgcagcgttgctgcttgtggggctcgccgctgcctcagcggcgggaaagtcggccgtcgcaagcaatggccaggacgacgaaccgaagctctgggcactgctagtcgctggctccaacgggtacttcaactacagacaccaggcagatatatgccacgcgtaccatgttctccgcaaccacggcatccccgacgagcaaatcgtagtcatgatgtatgacgacatcgccaacaacccgcaaaacccaacacccggtgtcatcatcaaccaccctaacggaagcaacgtgtatccaggagtgcccaaggactacaccggaaagctggtaacgccgaagaacttcctcagcatccttcaaggaaagaaggtaaatggaggaagcggaaaagttattgcaagcggtcccaacgaccatgtttttgtcaacttcgccgaccacggtgctcctggcctaattgcattcccggatgaagagctgcacgccaaaccgttcgtgaacgtcataaagaagatgcataagcaaaagaagttcgcaaaaatggtcatctacatcgaagcttgtgagtcgggttccatgtttgacggcctgctccccgaaaatgtcaacgtgtacgctacaacggcagcaaatccagatgagtcgtcttatgcctgctacatggatgactatcgccagacctacctcggcgatgtctacagcgtgaagtggatggaggactccgacagagaagacctgcgcaaggaaacgcttatcgaccagttcaagcttgtcaaaaaggagacgaccaccagtcacgtgatggaatatggagacatgagcctcgggaagcttccagtaggcgaatttcagggagagaaaggagcacagccaattgtggttccagaggcacctcttgatgctgtctcgagccgtgacgtgcccatcgcgatcttgcagcacaagctaagaaaggcttccagccctgcagccaagctttctattaggcgtaaactgcagctagctcttcgtaagcggtctttcctcgataacaaagtcgctgagattgccagcataatctccgaaaacaacgaagaaagtacaaaggcactcctgagtgagaaacgtcccttgagggatttcgattgctacgaacgcgctgtacgccacttcagcgaaaactgcttcaatctctccaagaacccctacgccctcggccgccttcgtgtgctggtgaacatgtgcgaagtggagtacgacattaacgacattaccgatgctatggacttggcttgcacgcacaaaactgttgtgggcattgtataa

SEQ ID NO: 127024 - protein, 442 aa, Haemaphysalis longicornis
MSARESMITAALLLVGLAAASAAGKSAVASNGQDDEPKLWALLVAGSNGYFNYRHQADICHAYHVLRNHGIPDEQIVVMMYDDIANNPQNPTPGVIINHPNGSNVYPGVPKDYTGKLVTPKNFLSILQGKKVNGGSGKVIASGPNDHVFVNFADHGAPGLIAFPDEELHAKPFVNVIKKMHKQKKFAKMVIYIEACESGSMFDGLLPENVNVYATTAANPDESSYACYMDDYRQTYLGDVYSVKWMEDSDREDLRKETLIDQFKLVKKETTTSHVMEYGDMSLGKLPVGEFQGEKGAQPIVVPEAPLDAVSSRDVPIAILQHKLRKASSPAAKLSIRRKLQLALRKRSFLDNKVAEIASIISENNEESTKALLSEKRPLRDFDCYERAVRHFSENCFNLSKNPYALGRLRVLVNMCEVEYDINDITDAMDLACTHKTVVGIV

SEQ ID NO: 127025 - DNA, 1482 bp, Vitis vinifera
  CDS (1)..(1482)
atgactatctttccggccgccgtcgccgcacttctagcgctttccaccttggtcgctggaggccgtcacttcgccggagataatggcctccttctaccctccgaagcttctaggttcttccgcccgggtggtgctgccgacgatgataccggcggcgaatctgccgggaccagatgggcggttctgatagctggatctaacggttactggaattataggcaccaggctgatatttgccatgcctatcaactcttgaagaaaggtggattgaaagatgaaaacatcattgttttcatgtatgatgacatctctttcaatgaagagaaccctaggcctggaatcatcataaacagcccacatggtgaagatgtttatgaaggtgtaccaaaggactatactggagaagatgttactgttgataacttttttgctgttatccttggcaacaaaacagctctttcagggggtagtgggaaggttctggacagtggtccgaatgatcatattttcatatactattctgatcatggaggtcctggggtgctcggtatgccaactagtccttacctttatgctaatgatctgattgaagtcttaaagaagaagcatgcttctggtacctataatagcttggtattttatcttgaagcttgtgaatctggaagtatattcgagggccttcttcctgaaggtctgaatatctatgccaccacagccgcaaatgcagaagaaagcagttggggaacctattgcccaggagaggatcctagtcctcccccagaatatgaaacctgcttgggtgacttgtatagtgttgcttggatggaggacagtgacgtgcacaacctgcggactgaaacgttgaggcagcagtatgaactggttaagaagaggactgcaaatgacaattctgtttatggctcccatgtcatgcaatatggtgatctaggtctcaacaaggaagaccttgttctgtatatgggtacaaatcctgcaaatgataactacacttttgtggacaacaactccttgaggttaccttcaaaggctgttaaccagcgtgatgccgatcttgttcatttctgggacaagttccgcaaggctcccgaaggctctccaaggaaagctgaagctcagaagcagtttcttgaagcaatgtctcacagaacacatatagaccatgccataaaactcgttgggagacttctgtttggaatgaaaaaaggttctgaggttctgaagactgtccggcctgcagggcagcctcttgttgacgactggcactgccttaaaacactggtgagaacttttgaggcacactgtggatccctatcccagtatgggatgaagcacatgcgctccatcgccaacatctgcaatgctggcatcgaaaaggaacagatggccgaggcatcggcacaagcctgtgtcaccattcctcctggtccatggagctctcttgacaagggattcagtgcctga

SEQ ID NO: 127026 - protein, 493 aa, Vitis vinifera
MTIFPAAVAALLALSTLVAGGRHFAGDNGLLLPSEASRFFRPGGAADDDTGGESAGTRWAVLIAGSNGYWNYRHQADICHAYQLLKKGGLKDENIIVFMYDDISFNEENPRPGIIINSPHGEDVYEGVPKDYTGEDVTVDNFFAVILGNKTALSGGSGKVLDSGPNDHIFIYYSDHGGPGVLGMPTSPYLYANDLIEVLKKKHASGTYNSLVFYLEACESGSIFEGLLPEGLNIYATTAANAEESSWGTYCPGEDPSPPPEYETCLGDLYSVAWMEDSDVHNLRTETLRQQYELVKKRTANDNSVYGSHVMQYGDLGLNKEDLVLYMGTNPANDNYTFVDNNSLRLPSKAVNQRDADLVHFWDKFRKAPEGSPRKAEAQKQFLEAMSHRTHIDHAIKLVGRLLFGMKKGSEVLKTVRPAGQPLVDDWHCLKTLVRTFEAHCGSLSQYGMKHMRSIANICNAGIEKEQMAEASAQACVTIPPGPWSSLDKGFSA

SEQ ID NO: 127027 - DNA, 1329 bp, Haemaphysalis longicornis
  CDS (1)..(1329)
atgaacgcccaaaagtccacagtcatcctcatcctgctggccttcaggctggcaaccggagctgggcaggaaagatcagcgcgattgtcagaactgcgagcagaggaaccgaagctttgggccctgctagtcgctggctcccacatctacgacaactacaggcaccaggctgatgtgtgccatgcgtaccacttgctccgtaaccatggaattcccgacgaacgaatagtggttatgatgtatgatgacattgccaacagcacctacaacccaacgccaggtgtcatcatcaaccacccgaacggaagcaacgtctatccaggagtacccaaggactacaccagaaagctggtgacatcgcagaacttcctcgacgtccttcaaggaaagaaggtaaaggggggaagcggaaaagtgatcgctagtggacccaatgaccatgtgttcgtgaacttcgccgatcatggtgctccggggctaatagcgttcccacacgatgagctgcacgccaggccatttgtcaacgttatcaagaagatgcacgaggaaaagaagttcgctaagatggtcatttacattgaggcctgtgaatcgggttctatgtttgacggccttctccccaataacgtgaacgtttatgcaaccacggcagccaatccgcacgagtcttcctatgcctgttactacgataagctcagggaaacgtatctgggcgacttctacagcgtcagatggatggaggactcggaccgagaggacttgcataaggaaacccttctcgaccagttccagattgtcaaaaatgagacgacaactagtcacgttatggaatacggtgacttgagtattgggaagctttcgttgagcgaattccaaggagccaaaaatgcaaagccaattgttctcccagaggtaccttgtgatcccgtgtcgagccgtgatgtacccatcgccgtccttcgcaacaagctaaaggacgcttccaaccctgctgcaaggcgatctattaagcataggttgcagtctgccttacgaaagcgatatatactgcagaagaaagtcgctgagattgtcagaatagtctctgaaaacaataaagaaagcaccgaaggacttctgagtgagaagcggcccctacgagactttgactgctacgaacttgctgtacgacacttcaacgacaactgcttcaatctctccaggaacccatacgcacttggatatctctatgtcctggtgaacatgtgtgaagccggttatgacgttggggacattactggcgctatgaacgtgacctgcacgcacaaagccgttgtcgatattgtataa

SEQ ID NO: 127028 - protein, 442 aa, Haemaphysalis longicornis
MNAQKSTVILILLAFRLATGAGQERSARLSELRAEEPKLWALLVAGSHIYDNYRHQADVCHAYHLLRNHGIPDERIVVMMYDDIANSTYNPTPGVIINHPNGSNVYPGVPKDYTRKLVTSQNFLDVLQGKKVKGGSGKVIASGPNDHVFVNFADHGAPGLIAFPHDELHARPFVNVIKKMHEEKKFAKMVIYIEACESGSMFDGLLPNNVNVYATTAANPHESSYACYYDKLRETYLGDFYSVRWMEDSDREDLHKETLLDQFQIVKNETTTSHVMEYGDLSIGKLSLSEFQGAKNAKPIVLPEVPCDPVSSRDVPIAVLRNKLKDASNPAARRSIKHRLQSALRKRYILQKKVAEIVRIVSENNKESTEGLLSEKRPLRDFDCYELAVRHFNDNCFNLSRNPYALGYLYVLVNMCEAGYDVGDITGAMNVTCTHKAVVDIV

SEQ ID NO: 127029 - DNA, 1467 bp, Vicia narbonensis
  CDS (1)..(1467)
atgttttccgatgttctagcatcatggctggtgttgttgttgctgtcgagtttgcacggttcggtcgccgcgagaccgaaccggttggagtgggagccggtgattagattaccgggtgaaccggtcgatgctgacgtggaggatgaaatgggaacccgatgggcggttcttgtggctggttcgaatggttacggaaactacaggcaccaagcagatgtgtgtcatgcataccagttgctaataaaaggaggagtaaaagaagaaaatattgtggtgtttatgtatgatgatattgcttacaacgagatgaatcctaggcctggggttatcatcaaccatccacaaggacccaatgtttatgatggagttcctaaggattacaatggtgacttcgtaacagctgagaacttctatgctgttattcttggggacaagagtaaagttaggggtggaagtggcaaggtcatcaacagcaaagcagaggatagaatatttatatattgctctgatcatggaggccctggagttcttgggatgccaaatatgccatatgtatatgctatggattttattgatgttttgaagaagaaacatgcatctggaggttacaaaaagatggttatatatgtagaagcttgcgaaagtggtagcatttttgagggtataatgccgaaagatataaatgtttatgtgacaactgcgtccaatgcacaagagaacagttggggcacttactgtcctggtgtggatcctgctcctcctccagagtacatcacttgccttggcgatttgtatagcgttgcttggatggaagatagtgagacgcacaatcttaaaagggaaacggtgaaacaacaatacatgtcggtgagggaaaggacttcaaattacaagaactacccattaggttctcatgtgatgcagtatggcgataccaatatcacggatgaaaagctttatttataccatggttttgatcctgcggacggtgaaccttcctcaaacaatgacattttagaagctaaaatggaagttgtaaaccaaagagatgcagagattctcttcatgtggcatatgtatcagagattagaccatcaaaccgaaaagaagaaagacactctcgagaagatttccgagacagtgaaacataggaatcatttagatggcagtgtggaattgattggagttttattgtttggtccaacaaaaggctcttcagttctacaatccgttcgagcttcgggcttgcctcttgttgacgactgggaatgcttaaaatcaagggttcgggtgttcgaaactcattgcggctcactgacccagtatgggatgaaacacatgcgggcatttgcgaacatttgcaacagcggtatttctgaggattcgatggaggaggcatgtatggcagcatgtggtggttatgatgtagggctattacatccatcaaacaaaggttatagtgcttga

SEQ ID NO: 127030 - protein, 488 aa, Vicia narbonensis
MFSDVLASWLVLLLLSSLHGSVAARPNRLEWEPVIRLPGEPVDADVEDEMGTRWAVLVAGSNGYGNYRHQADVCHAYQLLIKGGVKEENIVVFMYDDIAYNEMNPRPGVIINHPQGPNVYDGVPKDYNGDFVTAENFYAVILGDKSKVRGGSGKVINSKAEDRIFIYCSDHGGPGVLGMPNMPYVYAMDFIDVLKKKHASGGYKKMVIYVEACESGSIFEGIMPKDINVYVTTASNAQENSWGTYCPGVDPAPPPEYITCLGDLYSVAWMEDSETHNLKRETVKQQYMSVRERTSNYKNYPLGSHVMQYGDTNITDEKLYLYHGFDPADGEPSSNNDILEAKMEVVNQRDAEILFMWHMYQRLDHQTEKKKDTLEKISETVKHRNHLDGSVELIGVLLFGPTKGSSVLQSVRASGLPLVDDWECLKSRVRVFETHCGSLTQYGMKHMRAFANICNSGISEDSMEEACMAACGGYDVGLLHPSNKGYSA

SEQ ID NO: 127031 - DNA, 1512 bp, Vicia sativa
  CDS (1)..(1512)
atgtcggtttatcgttgtcactctgtttttctcagcaaaaacatgttttccgatgttctagcatcatggctggtgttgttgttgtttctgtcgagtttgcacggttcagttgcaagaccgaaccggttggagtgggagccggtgattagattaccgggtgaaccggtcgatgctgatgtggaggatgaaattggaacccgatgggcggttcttgtggctggttcgaatggttatggaaactacaggcatcaagcagatgtgtgccatgcataccagttgctaataaaaggtggagtaaaagaagaaaatattgtggtgtttatgtatgatgatattgcttacagtgagtttaatcctaggcctggggttatcatcaaccatccacaaggtcccaatgtttatgatggagttcctaaggattacactggtgacttcgtgacagctgataacctctatgctgttattcttggggacaagagtaaagttaggggtggaagtggcaaggtcatcaacagcaaagcagaggatagaatatttatatattactctgatcatggaggccccggagttcttgggatgccaaatatgccatatgtatatgctatggatttcatcgatgttttgaagaagaaacatgcatctagaggttaccaacagatggttatatatgtggaagcttgtgaaagtggtagcgtttttcaaggtataatgccaaaggatatagatgtttatgtgacaactgcgtccaacgcggaagagagcagttggggaacttacctggttcctggtgtttatcctgcttcgcctccagagtacatcacttgcctcggtgatttgtatagcgttgcttggatggaagatagtgagacgcacaatctaaaaagggaaacattgaaacaacaattcgcgtcggtgaaggaacggactttaaataataacaactacggattaggttctcatgtgacggaatatggcgataccaatataaccgatgaaaagctttatttataccatggttttgatcctgcatcggtgaaccttccaccaaacaatggcagactagaatctaaaatggaagttgtaaaccaaagagatgcagagattctcttcatgtggcaaatgtatcagagattagaccatcaaagcgaaaagaagagagacattctcaagaagatttccgagacagtgaaacataggaatcatttagatggtagtgtggaattgattggagttttactgtttggtccaacaagaggctcttcagttctacaatccgttagagcttctggtttgcctcttgtcgatgactgggaatgcttaaaatcaagggttcgggtgttcgaaactcattgtggttcactgactcagtatgggatgaaacacatgcgggcatttgccaacatttgcaaccgtggtatttcggaggatttgatggaggagacatgtatggtagcatgtggtggttatgatgtagggctattacatccatcaaacaaaggttatagtgcttga

SEQ ID NO: 127032 - protein, 503 aa, Vicia sativa
MSVYRCHSVFLSKNMFSDVLASWLVLLLFLSSLHGSVARPNRLEWEPVIRLPGEPVDADVEDEIGTRWAVLVAGSNGYGNYRHQADVCHAYQLLIKGGVKEENIVVFMYDDIAYSEFNPRPGVIINHPQGPNVYDGVPKDYTGDFVTADNLYAVILGDKSKVRGGSGKVINSKAEDRIFIYYSDHGGPGVLGMPNMPYVYAMDFIDVLKKKHASRGYQQMVIYVEACESGSVFQGIMPKDIDVYVTTASNAEESSWGTYLVPGVYPASPPEYITCLGDLYSVAWMEDSETHNLKRETLKQQFASVKERTLNNNNYGLGSHVTEYGDTNITDEKLYLYHGFDPASVNLPPNNGRLESKMEVVNQRDAEILFMWQMYQRLDHQSEKKRDILKKISETVKHRNHLDGSVELIGVLLFGPTRGSSVLQSVRASGLPLVDDWECLKSRVRVFETHCGSLTQYGMKHMRAFANICNRGISEDLMEETCMVACGGYDVGLLHPSNKGYSA

SEQ ID NO: 127033 - DNA, 1467 bp, Saccharum officinarum
  CDS (1)..(1467)
atggtgaccgctcgcctccgcctcgcgctgctactactctccgtgttcctctgctccgcgtgggcgcgcccacgcctcgagccgaccatccgcctgccgtccgagcgcgccgcggcggcggccggcgacgaaacggacgacgccgtcgggacacggtgggccgtgctcgtcgccggctccagcggctactacaactaccgccaccaggcagacatctgccatgcgtaccagattatgaagaagggaggactcaaggacgagaacataattgtcttcatgtacgatgacatcgcgcatagcgcagagaatccgaggcccggtgtcgtcatcaaccatccccagggtggcgatgtctatgctggggttccaaaggattacactgggcgacaggtcagtgtcaacaatttcttcgctgttctgcttggcaacaaaactgctctgacaggtgggagcggcaaggttgtggacagtggccccaatgatcatatctttgttttctacagtgaccatggaggtcctggtgtccttggaatgcctacgtatccatatctctacggtgatgacctcgtagatgtcctgaagaagaagcatgctgctgggtcctacaaaagcctggtcttttaccttgaagcatgcgaatctgggagcatctttgagggcctcctgccagatgacatcaatgtgtatgcgaccaccgcgtcaaatgcagaggagagcagctgggggacgtactgccctggcgagttcccaagccctccaccggagtatgacacttgcttgggagacctgtatagtgtttcttggatggaagacagtgatttccacaatctgcgaactgaatctctcaagcagcagtacaagttggtcaaggataggacagcggctcaggatacattcagctatggttcccatgtgatgcaatatggttcattggagttgaatgttcagaaattgttttcgtacattggcacaaaccctgctaacgatggcaacacatttgtagaagataactcattgccatcattttcaaaagctgttaatcagcgtgatgctgatcttgtctacttctggcagaagtaccggaaattggctgatggctcatctaagaaaaatgaagctcggaaggaattgcttgaagtgatgtcccaccggtctcatgttgacaacagtgttgaactcattggaagccttctctttggctctgaggacggtccaagggttctgaaagccgtccgtgcagctggtgaacctctggttgatgattggagttgcctcaagtccatggttcgtacttttgaggcgcaatgtgggtcgttggcgcagtatgggatgaagcacatgagaaccttcgcaaacatctgcaacgctggcatccttcctgaagcagtgtcaaaggttgccgctcaggcttgcaccagcattccttccaacccctggagctctatcgacaagggttttagcgcctaa

SEQ ID NO: 127034 - protein, 488 aa, Saccharum officinarum
MVTARLRLALLLLSVFLCSAWARPRLEPTIRLPSERAAAAAGDETDDAVGTRWAVLVAGSSGYYNYRHQADICHAYQIMKKGGLKDENIIVFMYDDIAHSAENPRPGVVINHPQGGDVYAGVPKDYTGRQVSVNNFFAVLLGNKTALTGGSGKVVDSGPNDHIFVFYSDHGGPGVLGMPTYPYLYGDDLVDVLKKKHAAGSYKSLVFYLEACESGSIFEGLLPDDINVYATTASNAEESSWGTYCPGEFPSPPPEYDTCLGDLYSVSWMEDSDFHNLRTESLKQQYKLVKDRTAAQDTFSYGSHVMQYGSLELNVQKLFSYIGTNPANDGNTFVEDNSLPSFSKAVNQRDADLVYFWQKYRKLADGSSKKNEARKELLEVMSHRSHVDNSVELIGSLLFGSEDGPRVLKAVRAAGEPLVDDWSCLKSMVRTFEAQCGSLAQYGMKHMRTFANICNAGILPEAVSKVAAQACTSIPSNPWSSIDKGFSA

SEQ ID NO: 127035 - DNA, 1485 bp, Medicago truncatula
  CDS (1)..(1485)
atggcggttcatagcaaaaacatgttttccattgttctatctttgtggtcatggttgttgttgctgctcactctggacggtttagttgcaagaccgaaccatctagagtgggaccctgtgattagattgccgggtgaggtggtggatgatgctgaggtggatgaagttggaacacgatgggctgttcttgtggctggttcaagtggttacggcaattacagacatcaagcagatgtttgtcatgcataccagttgttgataaaaggtggagtgaaagaagaaaacatagttgtgtttatgtatgatgatatagctaacaacgagttgaatcctaggcctggagttatcatcaaccatccacagggacccaatgtttatgtcggcgttcctaaggattacactggcgacaacgtgacagctgagaacctatacgctgttattcttggagacaagagtaaagtaaagggtggaagtggcaaggtcatcaacagcaaatccgaagataggatattcatatattactccgaccatggaggccctggagttcttgggatgccaaatatgccgtatgtatatgctatggattttatcgacgttttgaagaagaaacatgcatctgggggttacaaaaagatggttgtatacattgaagcttgtgaaagtggtagcatgtttgagggtgtcatgccaaaggatcttaatgtttatgtgacaactgcatccaatgcacaagagagtagttggggaacatactgtcctggggtggaacctgccccacctccagagtacatcacttgccttggggatttgtatagtgttgcttggatggaagacagtgagtcgcacaatctaaaaagggaaacggtgaaacaacaatacaagtcggttaaagaacggacttcaaattacaacaactatgcattaggctctcatgtgatgcaatatggtgataccaacattacagatgaaaagctatatttgtaccaaggttttgatcctgcaacggtgaaccttcctccacacaatgacaaattagaatctaaaatggaagttgtaaaccaaagagatgcagagattttattcatgtgggaaatgtataagagattagatcatcaaacggaaaagaaaagagaaatccttgagaagattgcggagacggtgaaacataggaatcatttagatggtagtgtggaattgattggagttttactgtttggtccaacaaaaggttcttcagttctacaggccgtaagagcgactggcctacctcttgttgatgattgggaatgcttaaaatcaagggttcggttgtttgaaactcattgtgggtcactgacccagtatgggatgaaacacatgcgagcatttgcaaacatttgcaacagtggtatttccgaggattctatggagaaggcatgcatggtagcatgtggtgggtataaattagagctattacatccatcaaacagagtttatagtgcttga

SEQ ID NO: 127036 - protein, 494 aa, Medicago truncatula
MAVHSKNMFSIVLSLWSWLLLLLTLDGLVARPNHLEWDPVIRLPGEVVDDAEVDEVGTRWAVLVAGSSGYGNYRHQADVCHAYQLLIKGGVKEENIVVFMYDDIANNELNPRPGVIINHPQGPNVYVGVPKDYTGDNVTAENLYAVILGDKSKVKGGSGKVINSKSEDRIFIYYSDHGGPGVLGMPNMPYVYAMDFIDVLKKKHASGGYKKMVVYIEACESGSMFEGVMPKDLNVYVTTASNAQESSWGTYCPGVEPAPPPEYITCLGDLYSVAWMEDSESHNLKRETVKQQYKSVKERTSNYNNYALGSHVMQYGDTNITDEKLYLYQGFDPATVNLPPHNDKLESKMEVVNQRDAEILFMWEMYKRLDHQTEKKREILEKIAETVKHRNHLDGSVELIGVLLFGPTKGSSVLQAVRATGLPLVDDWECLKSRVRLFETHCGSLTQYGMKHMRAFANICNSGISEDSMEKACMVACGGYKLELLHPSNRVYSA

SEQ ID NO: 127037 - DNA, 1485 bp, Zea mays
  CDS (1)..(1485)
atggctgtgcggtggtgcctcctcctgctcgtgttagtgttggctgcggccgcggcttgcgcggagaagggggagtgggacccggtgattcggatgcctggggagaaggagcctgcagggtcgcactcgcacagcggcgagggattcgatggggaggtggatgacgccgtcgggacgaggtgggcagtgctcgttgccgggtcctccggctacggcaactacaggcaccaggctgatatatgtcatgcgtaccagatactgcaaaaaggaggcataaaagaggagaacattgtggtgtttatgtatgatgacattgccaatagcgcactcaacccaaggcagggggttatcatcaaccacccagagggcgaagatgtttatgctggtgttccaaaggactacactggggaccaagtcactactaagaacttctatgcagttctcttgggcaacaaaactgcagtcactggaggcagcaggaaggtcatcaatagcaaaccagatgaccatatttttatctattactcagatcacgggggccctggtgttcttggtatgcccaatctaccatatctttatgctggtgacttcatgaaggtgttaagagaaaaacatgcttcaaacagctatgccaaaatggttatatatattgaagcatgtgaaagtggcagtatatttgagggattaatgccagaagaccttaatatttatgtcacgacggcatccaatgcagaagaaagtagctggggtacatactgtccaggaatggaaccaccgcctccttctgagtacattacctgcctaggtgatctatatagtgtctcttggatggaagacagtgagactaacaatctgaaggaggaaacagtaaaggaacaatatgaagtggtgaagaagcgtacttcagacttcaatagctatggtgcaggctctcacgtcatggaatatggtgacaagaccttcaaggaagagaagctttacctttatcaaggttttgatcctgcaaatgccaatgtcacaaataagctgctttggtcaggccaagaggctgtggtcaaccaaagggatgcagatattctcttcctatggaagaggtatgagctcttacatgagaagtctgaagagaagcaggaagttctgagggagatcaccggaacagtaaggcataggaagcatctggacaacagcatcaacttcatcggaaagcttctcttcggggctgagaaagggccttccacacttgaggccgtcagacctcccggccagccactcgtcgatgattgggactgcttgaagcaaatggtacggatcttcgaatcccattgcggatcgctcactcagtacggtatgaggcatatgagggcgttcgcaaatatatgcaacagtggcacgcctggcgcttcgatgaagcgagcgagcatgggtgcttgtggcggctacaactcggcgagatggagcccgttggctcagggctacagcgcttga

SEQ ID NO: 127038 - protein, 494 aa, Zea mays
MAVRWCLLLLVLVLAAAAACAEKGEWDPVIRMPGEKEPAGSHSHSGEGFDGEVDDAVGTRWAVLVAGSSGYGNYRHQADICHAYQILQKGGIKEENIVVFMYDDIANSALNPRQGVIINHPEGEDVYAGVPKDYTGDQVTTKNFYAVLLGNKTAVTGGSRKVINSKPDDHIFIYYSDHGGPGVLGMPNLPYLYAGDFMKVLREKHASNSYAKMVIYIEACESGSIFEGLMPEDLNIYVTTASNAEESSWGTYCPGMEPPPPSEYITCLGDLYSVSWMEDSETNNLKEETVKEQYEVVKKRTSDFNSYGAGSHVMEYGDKTFKEEKLYLYQGFDPANANVTNKLLWSGQEAVVNQRDADILFLWKRYELLHEKSEEKQEVLREITGTVRHRKHLDNSINFIGKLLFGAEKGPSTLEAVRPPGQPLVDDWDCLKQMVRIFESHCGSLTQYGMRHMRAFANICNSGTPGASMKRASMGACGGYNSARWSPLAQGYSA

SEQ ID NO: 127039 - DNA, 1449 bp, Glycine max
  CDS (1)..(1449)
atgcccactttttttcttccaacgctcctcctccttctcatagccttcgccacctctgtctccggccgccgtgacctcgtcggagactttctccggctgccctccgaaactgataacgacgacaacttcaagggcacccggtgggccgtcctcctcgccggttccaatggttactggaattacagacatcaggctgatgtttgtcacgcctatcaaatattgaggaaaggtggtctgaaagaagaaaatattattgtttttatgtatgatgacattgcattcaatggggaaaacccaaggcctggagtcatcattaacaaaccagatggaggtgatgtttataaaggagttccaaaggattacaccggcgaagatgttactgttgataacttttttgctgctttacttggaaataagtcagcactgactggtggcagtgggaaggttgtggacagtggtcctgatgatcatatatttgtatactatactgaccatggaggtcctggggtgctcgggatgcctgctggtccttacttatacgcggatgatctgattgaagtcttgaagaaaaagcatgcttctggaacatataaaaacctagtattttatctggaggcatgtgaatctgggagtatctttgaaggtcttcttcctgaagatatcaatatttatgcaaccactgcttccaatgcagaagaaagtagttggggaacatattgccccggggagtatcctagtcctcccccagaatatacaacctgtttgggtgacttgtacagtgttgcttggatggaagacagtgacagacacaatttgcgaacagaaactctgcaccaacaatataaattggttaaagagaggactatatctggagattcatactatggctctcacgtgatgcagtatggtgatgtagggcttagcagagatgttctcttccattatttgggtacagatcctgctaatgataatttcacttttgtggatgaaaactccttatggtcaccttcaaaaccagtcaaccaacgtgatgctgatctcatccatttttgggataagttccgcaaagctcctgagggttctctcaggaaaaatacagctcagaaacaagttttggaagcaatgtctcacagaatgcatgtagacaacagtgtaaaactgattgggaagcttttatttggcattgaaaagggtccagaagtactcaacgctgttagaccggctggatcggcacttgttgatgactggcactgcctgaaaaccatggtgaggacttttgagacacattgtggatccttgtctcaatacgggatgaaacacatgaggtcctttgcaaacatctgcaatgtagggataaagaatgaacaaatggctgaggcttcagcacaagcttgtgtcagtattccttccaatccctggagttctctgcaaaggggtttcagtgcataa

SEQ ID NO: 127040 - protein, 482 aa, Glycine max
MPTFFLPTLLLLLIAFATSVSGRRDLVGDFLRLPSETDNDDNFKGTRWAVLLAGSNGYWNYRHQADVCHAYQILRKGGLKEENIIVFMYDDIAFNGENPRPGVIINKPDGGDVYKGVPKDYTGEDVTVDNFFAALLGNKSALTGGSGKVVDSGPDDHIFVYYTDHGGPGVLGMPAGPYLYADDLIEVLKKKHASGTYKNLVFYLEACESGSIFEGLLPEDINIYATTASNAEESSWGTYCPGEYPSPPPEYTTCLGDLYSVAWMEDSDRHNLRTETLHQQYKLVKERTISGDSYYGSHVMQYGDVGLSRDVLFHYLGTDPANDNFTFVDENSLWSPSKPVNQRDADLIHFWDKFRKAPEGSLRKNTAQKQVLEAMSHRMHVDNSVKLIGKLLFGIEKGPEVLNAVRPAGSALVDDWHCLKTMVRTFETHCGSLSQYGMKHMRSFANICNVGIKNEQMAEASAQACVSIPSNPWSSLQRGFSA

SEQ ID NO: 127041 - DNA, 1455 bp, Nicotiana tabacum
  CDS (1)..(1455)
atgattgttcgctacgttgtgagtgctatcttgatcattggactgtcagttgtcgccgccgttgacggcagggatgtgctgaaattaccatcggaagcatcaacgtttttcagtggtaattatgatgatgattcaattggtactaaatgggctgtgttggttgctggatcaagaggctactggaattacaggcaccaggcagatgtttgtcacgcatatcagctgttgaagaaaggtggcctcaaggatgagaatattattgtgtttatgtatgatgacattgctcataattttgaaaatcctaggccaggagtcatcataaatagccctaatggtgacgatgtctataaaggagttccaaaggattatacagggcatcatgttacagccaacaactttcttgctgttatccttgggaacaaagccgctcttagtggaggcagtgggaaggtggtggaaagtggtccaaatgatcatatcttcatcttctacagtgatcatggtggtcctggagtgcttgggatgcctagtggcccttatctctatgctgatgatttaattgatgtcttgaaaaggaagcatgcttcagggacatacaaaagcttagtcttttacattgaggcttgtgaatctgggagtatatttgagggccttctacctgaaggtcttaatatctatgcaacaacagcatcaaatgctgaagaggacagttggggaacctactgtccaggagactatccaggtcctcctccagaataccagacctgcttgggtgacttgtacgctgtatcttggatggaagatagtgaaaaacacaatctccgaagagaaactttaggaatgcaatatgagctggttaaaaggagaactgctaactcatttccctatgcaagttcgcatgtcatgcaatatggtgatctgaagctaatggatgatcctctttccctttatatgggcaccaatcccgcaaatgataattacacttttctggacgagaattcctcactgctctccgcaaagcctgttaaccaacgtgatgcagatcttttgcatttctgggacaagttcctcaaggctcctcaaggttctgttaggaaagttgaagcccagaagcagctgagtgaagctatgtcacacagaatgcacatagatgacagcattgctcttgttgggaggcttctattcggaattgagaaaggtcctgacgtgctgattagagtccgacctactggcgagcctcttgttgatgattggaattgtcttaaatcctttgtaagaacatttgagacacgttgtggatcattgtcccagtatggaatgaaacatatgcgtgctgttgctaacatatgcaactcttgtataacaatggagcagatagccaaagcatcagcacaagcttgtgtgagtattccttccaactcttggagttcgctcgacgagggatttagtgcatag

SEQ ID NO: 127042 - protein, 484 aa, Nicotiana tabacum
MIVRYVVSAILIIGLSVVAAVDGRDVLKLPSEASTFFSGNYDDDSIGTKWAVLVAGSRGYWNYRHQADVCHAYQLLKKGGLKDENIIVFMYDDIAHNFENPRPGVIINSPNGDDVYKGVPKDYTGHHVTANNFLAVILGNKAALSGGSGKVVESGPNDHIFIFYSDHGGPGVLGMPSGPYLYADDLIDVLKRKHASGTYKSLVFYIEACESGSIFEGLLPEGLNIYATTASNAEEDSWGTYCPGDYPGPPPEYQTCLGDLYAVSWMEDSEKHNLRRETLGMQYELVKRRTANSFPYASSHVMQYGDLKLMDDPLSLYMGTNPANDNYTFLDENSSLLSAKPVNQRDADLLHFWDKFLKAPQGSVRKVEAQKQLSEAMSHRMHIDDSIALVGRLLFGIEKGPDVLIRVRPTGEPLVDDWNCLKSFVRTFETRCGSLSQYGMKHMRAVANICNSCITMEQIAKASAQACVSIPSNSWSSLDEGFSA

SEQ ID NO: 127043 - DNA, 1461 bp, Beta vulgaris
  CDS (1)..(1461)
atgatgatccgctacacctccggtgtactgatagtgttatgcgttttgatgagctcggtcgttgatagccgtctgatggtggataacctcatcagatggccgtctgatcatccttctatctttgagagcgatgatgattcagtagggactagatgggcggttctgattgccggatctagtggctactggaattacaggcatcaggcagatgtttgtcatgcttaccaagtgctaaaaaaaggaggtctaaaggatgaaaacatcattgttttcatgtatgatgacattgcttatgacgaagagaatccaagacctggagttctcattaatagtccttatggacatgatgtttatgcaggagtaccaaaggattatacaggggaagatgtgactgtcaataacttcttcgcagctatacttggaaacaaagatgccattactggtggcagcggaaaggtggtgaatagcggacctaatgatcacatcttcatcttttactcagaccatggtggtgctggtgtgctcggtatgcctacctatccatacctttacgctgatgagctcattgaaactttgaaggaaaaacatgcgtctggaacctataaaagcctggtagtctatattgaagcctgtgaatctgggagcatctttgagggtattcttcctgaaggacttaatatatatgctaccactgcttcaaatgctgtagagagtagttggggaacctattgtcctggacaggatcctaatgttcctccagagtatgatacctgtttgggtgatttgtacagcgtgtcttggatcgaagatagtgagaggcacaacttgcacacggaatctttgaagcagcaatacgaagtggttaagacgaagacagcagaaaagcctttctacggctcacatgtcatgcagtatggtgataaagagcttacgcaggacatgctttacttgtacatgggtacaaatcctaataatgaaaattacacatatgtggatgataattcgttgcatcctacatcttctaatgctgttaatcaacgagatgccgatcttatccatttctggaacaagtttcgcaaggcttctgaaggatctcaaagaaagataaatgcccagaagcagtttatggaggtgatgtcacacagagtgcacttggatgacagcatcaaactcattggaaagcttctatttggaatcgagaagggcttaggtgtgctacaaactgtccgacctacaggacaacccctcgtcgatgactggaactgcctgaaaacattggtaaggacatttgaaaagcattgtggatctctatctcaatacggaatgaaacacatgcgttcgattgcaaacatatgcaatgccgggatcacaactaatcaaatggccgaggcttcagcacaagcttgcccgagctttccttctggcccttggagctctctgcataggggatttagcgcctga

SEQ ID NO: 127044 - protein, 486 aa, Beta vulgaris
MMIRYTSGVLIVLCVLMSSVVDSRLMVDNLIRWPSDHPSIFESDDDSVGTRWAVLIAGSSGYWNYRHQADVCHAYQVLKKGGLKDENIIVFMYDDIAYDEENPRPGVLINSPYGHDVYAGVPKDYTGEDVTVNNFFAAILGNKDAITGGSGKVVNSGPNDHIFIFYSDHGGAGVLGMPTYPYLYADELIETLKEKHASGTYKSLVVYIEACESGSIFEGILPEGLNIYATTASNAVESSWGTYCPGQDPNVPPEYDTCLGDLYSVSWIEDSERHNLHTESLKQQYEVVKTKTAEKPFYGSHVMQYGDKELTQDMLYLYMGTNPNNENYTYVDDNSLHPTSSNAVNQRDADLIHFWNKFRKASEGSQRKINAQKQFMEVMSHRVHLDDSIKLIGKLLFGIEKGLGVLQTVRPTGQPLVDDWNCLKTLVRTFEKHCGSLSQYGMKHMRSIANICNAGITTNQMAEASAQACPSFPSGPWSSLHRGFSA

SEQ ID NO: 127045 - DNA, 1452 bp, Phaseolus aureus
  CDS (1)..(1452)
atggccaccaccaccacttctctttccacgctcttccttctcttcctcgcaaccgtcgctcttgttgccgctggccgtgacctcgtcggagacttcctccggctgccgtctgattccggtaacgatgacaacgtcaaggggacgcgctgggccatcctcttcgccggttcgaacggctattggaactacagacatcaggccgatatttgtcatgcctatcaaatactgaggaaaggtggcctgaaagaagaaaatatcattgtttttatgtatgatgacattgcattcaattgggacaatccaaggcctggagtcatcattaacaaaccagacggggatgatgtttatgaaggagttccaaaggattacactggcgaagatgctactgctcataacttttattctgctttacttggagataagtcggcgcttaccggtggcagtgggaaggttgtgaacagtgggcccgatgaccgcatatttatattctactctgatcatggtggtccaggggttctcgggacgcctgctggtccttacatatatgcatctgatttggttgaagtattgaagaaaaagcacgcttctggaacgtataaaaacctagtattttatttggaggcatgtgaagctggaagtatttttgaaggtcttcttcctgaagatatcaatatttatgcaacaacggcttcgaatgccgaagaaagtagttggggaacatattgtcctggggaatatcctagtcctcccccagaatattcaacctgcttgggtgacctgtacagtgttgcttggatggaagacagtgatagacacaatttgcgaacagaatctttacaccaacaatataaagtggttaaggataggactctatctggaggttggtatggctctcacgtgatgcagtatggtgatgtagagtttagcaaggatactctcttcctgtatttgggtacagatcctgcaaatgataatttgacttttgtggatgaaaactccttatggtcatcttcaacagcagtcaaccaaagggatgctgatctcgtccatttttggcataagttccgcaaagctccggagggttctcctaagaaaaatgaagctcggaaacaagttctggaagtaatgtctcacagaatgcatatagacgacagtgtgaaacttgttggaaagcttttatttggatttgaaaaggctcctgaagtactgaatgctgttagaccggctggatcggcacttgttgatgactgggcctgcctgaaaaccatggtaaggacttttgagacacattgcggatccttgtctcagtatgggatgaaacacatgaggtcctttgcaaacatctgcaatgtaggaataaagaaagagcaaatggctgaagcctcagcacaagcttgtgtcactgttcctgccagttcctggagttctctgcaaagaggtttcagtgcataa

SEQ ID NO: 127046 - protein, 483 aa, Phaseolus aureus
MATTTTSLSTLFLLFLATVALVAAGRDLVGDFLRLPSDSGNDDNVKGTRWAILFAGSNGYWNYRHQADICHAYQILRKGGLKEENIIVFMYDDIAFNWDNPRPGVIINKPDGDDVYEGVPKDYTGEDATAHNFYSALLGDKSALTGGSGKVVNSGPDDRIFIFYSDHGGPGVLGTPAGPYIYASDLVEVLKKKHASGTYKNLVFYLEACEAGSIFEGLLPEDINIYATTASNAEESSWGTYCPGEYPSPPPEYSTCLGDLYSVAWMEDSDRHNLRTESLHQQYKVVKDRTLSGGWYGSHVMQYGDVEFSKDTLFLYLGTDPANDNLTFVDENSLWSSSTAVNQRDADLVHFWHKFRKAPEGSPKKNEARKQVLEVMSHRMHIDDSVKLVGKLLFGFEKAPEVLNAVRPAGSALVDDWACLKTMVRTFETHCGSLSQYGMKHMRSFANICNVGIKKEQMAEASAQACVTVPASSWSSLQRGFSA

SEQ ID NO: 127047 - DNA, 1458 bp, Zea mays
  CDS (1)..(1458)
atggtggccgatcgcctccgcctcgcgctgctgctctccgcgtgcctctgctccgcgtgggcgcgcccacgcctcgagccgaccatccgcctgccgtccgagcgcgcggcggccgacgaaacggatgacgacgccgtcgggacccggtgggccgtgctcatcgccggctccaacggctactacaactaccgccaccaggcggacatctgccatgcataccagatcatgaagaagggcggacttaaggacgagaacatcgttgtcttcatgtacgatgacatcgcgcatagcccggaaaatccgaggcctggtgtcatcataaatcatccccagggtggcgacgtctatgctggggtgccaaaggattacactgggcgagaggtcaacgtcgacaatttcttcgctgttctgcttggcaacaaaactgctctcaggggtgggagcggcaaggttgtggacagtggccccaatgatcatatatttgttttctacagtgaccatgggggtcctggcgtccttggaatgcctacgtatccatatctctatggtgatgacctcgtagatgtcctgaagaagaagcatgctgccgggacctacaaaagcctggtcttttaccttgaagcatgcgaatctgggagcatctttgagggcctcctgccgaatgacataaatgtgtatgcgaccaccgcgtcaaatgcagaggagagtagctgggggacgtactgccctggcgagttcccgagccctccaccggagtatgacacttgcttgggagacctgtatagtgttgcttggatggaagacagtgatttccacaatctgcgaactgaatctctcaagcagcaatacaacttggtcaaggataggacagcggttcaggatacattcagctatggctcccatgtgatgcaatatggttcattggagttgaatgttaagcatctgttttcgtacattggcacaaaccctgctaacgatgacaacacgtccatagaagacaactcgttgccatcattctcaaaggctgttaatcagcgcgacgctgaccttgtctacttctggcagaagtaccggaaattggcagacagctcacatgagaaaaatgaagctcggagggagttgcttgaagtgatggcccacaggtctcatgttgacagcagtgttgagctcattggaagccttctctttggctctgaggacggtccaagggttctgaaagccgtccgtgcagctggtgagcctctcgtcgatgattggagctgtctcaagtccacggttcgtacttttgaggcgcaatgtgggtcgttggcgcactatgggatgaagcacatgcggtccttcccaaacatctgcaacgctggcatccttcctgaagcagtgtcgaaggtcgctgctcaggcttgcaccagcattccttccaacccctggagttctatccacaagggttttagcgcctaa

SEQ ID NO: 127048 - protein, 485 aa, Zea mays
MVADRLRLALLLSACLCSAWARPRLEPTIRLPSERAAADETDDDAVGTRWAVLIAGSNGYYNYRHQADICHAYQIMKKGGLKDENIVVFMYDDIAHSPENPRPGVIINHPQGGDVYAGVPKDYTGREVNVDNFFAVLLGNKTALRGGSGKVVDSGPNDHIFVFYSDHGGPGVLGMPTYPYLYGDDLVDVLKKKHAAGTYKSLVFYLEACESGSIFEGLLPNDINVYATTASNAEESSWGTYCPGEFPSPPPEYDTCLGDLYSVAWMEDSDFHNLRTESLKQQYNLVKDRTAVQDTFSYGSHVMQYGSLELNVKHLFSYIGTNPANDDNTSIEDNSLPSFSKAVNQRDADLVYFWQKYRKLADSSHEKNEARRELLEVMAHRSHVDSSVELIGSLLFGSEDGPRVLKAVRAAGEPLVDDWSCLKSTVRTFEAQCGSLAHYGMKHMRSFPNICNAGILPEAVSKVAAQACTSIPSNPWSSIHKGFSA

SEQ ID NO: 127049 - DNA, 1461 bp, Zea mays
  CDS (1)..(1461)
atggtggccgctcgcctccgcctctcgctgctactctccgtctgcctctcctccgcgtgggcgcgcccacgcctcgagccggccatccgcctgccgtcgcagcgcgccgcggcggccgacgaaacggacgacggcgacgtcgggacccgctgggctgtgctcatcgccggctccagcggctactacaactaccgccaccaggcggacatctgccatgcataccagatcatgaagaagggcggactcaaggatgagaacatcattgtctttatgtacgatgacatcgcgcatagcccggagaatccgaggcctggtgtcatcatcaaccatccccagggtggcgacgtctatgctggggtgccaaaggattacactggtcgagatgtcaacgtcgacaatttcttcgctgttctgcttggcaacaaaactgcactcaggggtgggagcggcaaggttgtggacagtggccccaatgatcatatctttgttttctacagtgaccatgggggtcctggtgtccttggaatgcctacgtatccatatctctatggtgatgacctcgtagatgtcctgaagaagaagcatgctgccgggacctacaaaagcctggtcttttaccttgaagcatgcgaatctgggagcatctttgagggcctcctgccgaatgacatcaatgtgtatgcgaccaccgcgtcaaatgcagacgagagcagctgggggacgtactgccctggcgagttcccgagccctccaccggagtatgacacttgtttgggagacctgtacagtgttgcttggatggaagacagtgatttccacaatctgcgaactgaatccctcaagcagcagtacaagttggtcaaggataggacagcggttcatgacacgttcagctatggttcccatgtgatgcaatatggcgcattggagctgaatgttcagcgtttgttttcgtacattggcacagaccctgctaacgatggcaacacttttatagaagataactcactgccatcgttctcaaaagccgttaatcagcgcgacgctgaccttgtctacttctggcagaagtaccgcaaattggctgatagctcgcatgcgaaaaatgaggctcggaaggaactgcttgaagtgatggcccacaggtctcatgttgacagcagcgttgagctcattggaagccttctctttggctccgaggacggtccaagggttctgaaagccgtccgtgcacctggtgaacctctggttgatgattggagctgcctcaagtccatagttcgcacttttgaggcgcgatgcgggtccttggcgcagtatgggatgaagcacatgcgatccttcgcgaacatgtgcaacgctggcatccttcctgaagcagtgtcgaaggtggccgctcaggcctgcagcagcattccgtccaacccctggagctctatccacaagggttttagcgcttaa

SEQ ID NO: 127050 - protein, 486 aa, Zea mays
MVAARLRLSLLLSVCLSSAWARPRLEPAIRLPSQRAAAADETDDGDVGTRWAVLIAGSSGYYNYRHQADICHAYQIMKKGGLKDENIIVFMYDDIAHSPENPRPGVIINHPQGGDVYAGVPKDYTGRDVNVDNFFAVLLGNKTALRGGSGKVVDSGPNDHIFVFYSDHGGPGVLGMPTYPYLYGDDLVDVLKKKHAAGTYKSLVFYLEACESGSIFEGLLPNDINVYATTASNADESSWGTYCPGEFPSPPPEYDTCLGDLYSVAWMEDSDFHNLRTESLKQQYKLVKDRTAVHDTFSYGSHVMQYGALELNVQRLFSYIGTDPANDGNTFIEDNSLPSFSKAVNQRDADLVYFWQKYRKLADSSHAKNEARKELLEVMAHRSHVDSSVELIGSLLFGSEDGPRVLKAVRAPGEPLVDDWSCLKSIVRTFEARCGSLAQYGMKHMRSFANMCNAGILPEAVSKVAAQACSSIPSNPWSSIHKGFSA

SEQ ID NO: 127051 - DNA, 1470 bp, Sesamum indicum
  CDS (1)..(1470)
atggccttttcttgtttcgcgggccggctgatgatcttggttctctgtgtagttgtggcgctgccttttgcggccgccggaggaggaaggcggagcggcccttgggatccgataatccggtggccgctggaccgccgtgaaacggaggataacgccaccagatgggcggtgctggtggcgggctcaaatgggtttgggaattatcggcatcaggctgatgtttgccatgcataccaaatacttaaaaagggagggctgagagatgagaacattatagttttcatgtacgatgacattgcgatgaatgagctaaatccaagaaaaggagttataatcaaccatccgacaggtggggatgtctatgctggtgttccgaaggactacacaggtgagcaagtgacggccgagaacctttatgctgtaatcctaggtgacaaaagtgccatcaaaggtggaagtggaaaagttgttgacagtaagcccaatgacaggatcttcatatactattccgatcacggtggaccgggagtgctcgggatgccaaacatgccttacctttatgcgaacgactttattgaagttctgaaaaagaagcatgcatctggcacctacaaagagatggtcatatacgttgaagcctgtgaaagcggaagtgtattcgagggtttgatgcctgatgatctagacatttatgtgacgacggcatcaaatgcagaagagagtagctggggaacgtactgcccggggatggaccctccaccaccgccagagtacataacatgtcttggagatttgtatagcgtagcttggatggaagacagcgagtcacacaacctcaaaagagaaactgtagagcaacaatatcaacaggtcaaggaacgtacttccaacttcaatacttacaatgcaggatctcatgtaatggaatatgggaacaagagcatcaaatctgaaaagctctatttgtaccaaggtttcgacccggcaactgaaaacatgcctccgagcgagaaccacttgaaacctcacatggatgtagtcaaccagagggatgcagatcttctcttcctatgggaaaggtacaagagactggatggtggggcaaaaaagaaatcagaactcttcaagctgataactgatacgatgctgcatagaaaacatatggatgatagcatagacattatcggtgcattcttattcggccctgaaaatggtccttctatactcaaatctgttagagacaggggcttgcccttggccgacgactgggattgcttgaaatctatggttcggttatttgaggcacattgtggttcattgactcaatatggcatgaaacacacgagggcattcgcaaatatatgcaacagccgcgtctcatcggccgatatggaggatgcgtgtatggcggcctgccgtgggcatgactttgctgggtggagtcctttgaatagaggctacagtgcctag

SEQ ID NO: 127052 - protein, 489 aa, Sesamum indicum
MAFSCFAGRLMILVLCVVVALPFAAAGGGRRSGPWDPIIRWPLDRRETEDNATRWAVLVAGSNGFGNYRHQADVCHAYQILKKGGLRDENIIVFMYDDIAMNELNPRKGVIINHPTGGDVYAGVPKDYTGEQVTAENLYAVILGDKSAIKGGSGKVVDSKPNDRIFIYYSDHGGPGVLGMPNMPYLYANDFIEVLKKKHASGTYKEMVIYVEACESGSVFEGLMPDDLDIYVTTASNAEESSWGTYCPGMDPPPPPEYITCLGDLYSVAWMEDSESHNLKRETVEQQYQQVKERTSNFNTYNAGSHVMEYGNKSIKSEKLYLYQGFDPATENMPPSENHLKPHMDVVNQRDADLLFLWERYKRLDGGAKKKSELFKLITDTMLHRKHMDDSIDIIGAFLFGPENGPSILKSVRDRGLPLADDWDCLKSMVRLFEAHCGSLTQYGMKHTRAFANICNSRVSSADMEDACMAACRGHDFAGWSPLNRGYSA

SEQ ID NO: 127053 - DNA, 1491 bp, Glycine max
  CDS (1)..(1491)
atggcggttgatcgctcccttacgaggtgctgtagcctcgtactgtggtcgtggatgttgctgaggatgatgatggcgcagggtgcagccgcgagggccaaccggaaggagtgggactcggtcataaagttaccggctgaaccggtcgatgctgactcggatcatgaagtgggaacacgatgggcggttcttgtggctggttcaaacggctatggaaactacaggcatcaagcagatgtgtgccatgcgtaccagttgctgataaaaggtgggctaaaagaagagaacatagtggtgtttatgtacgatgacatagctacagacgagttaaatcccagacctggagtcatcatcaaccaccctgagggacaagatgtgtatgctggtgttcctaaggattacaccggtgagaatgtgacggcccagaacctctttgccgttattcttggagacaagaataaagtgaagggaggaagtggcaaagtgatcaatagcaaacctgaggacagaatatttatatactactctgatcatggaggtccgggagttcttgggatgccaaacatgccatacctttatgctatggactttattgaagtcttgaagaagaaacatgcatctggaggttacaagaagatggtcatatacgtggaagcttgtgaaagtgggaaccatgttttgaagggtataatgcctaaggatctgcagatttatgtcacaactgcatcaaatgcacaagagaatagttggggaacttattgtcctggaatggatccttctccacctccagagtacatcacttgcctaggggatttgtacagtgttgcttggatggaagatagtgagactcataatctaaaaagggagtccgtgaaacaacaatacaaatcggtaaagcaacggacttcaaatttcaacaactatgcgatgggttctcatgtgatgcaatacggtgacacaaacatcacagctgaaaagctttatttataccaaggttttgatcctgccgctgtgaacttccctccacagaacggaaggctagaaactaaaatggaagttgttaaccaaagagatgcagaacttttcttcatgtggcaaatgtatcagagatcaaaccatcagccagaaaagaagacagacatcctcaaacagatagcggagacagtgaagcataggaaacacatagatggtagcgtggaattgattggagttttattgtatggaccaggaaaaggttcttctgttctacaatccatgagggctcctggtcttgcccttgttgatgactggacatgcctaaaatcaatggttcgggtgtttgagactcactgtgggacactgactcagtatggcatgaaacacatgcgagcatttgccaacatttgcaacagcggtgtttctgaggcctccatggaagaggtttgtgtggcagcttgtgaaggctacgattctgggctattacatccatcaaacaaaggctatagtgcttga

SEQ ID NO: 127054 - protein, 496 aa, Glycine max
MAVDRSLTRCCSLVLWSWMLLRMMMAQGAAARANRKEWDSVIKLPAEPVDADSDHEVGTRWAVLVAGSNGYGNYRHQADVCHAYQLLIKGGLKEENIVVFMYDDIATDELNPRPGVIINHPEGQDVYAGVPKDYTGENVTAQNLFAVILGDKNKVKGGSGKVINSKPEDRIFIYYSDHGGPGVLGMPNMPYLYAMDFIEVLKKKHASGGYKKMVIYVEACESGNHVLKGIMPKDLQIYVTTASNAQENSWGTYCPGMDPSPPPEYITCLGDLYSVAWMEDSETHNLKRESVKQQYKSVKQRTSNFNNYAMGSHVMQYGDTNITAEKLYLYQGFDPAAVNFPPQNGRLETKMEVVNQRDAELFFMWQMYQRSNHQPEKKTDILKQIAETVKHRKHIDGSVELIGVLLYGPGKGSSVLQSMRAPGLALVDDWTCLKSMVRVFETHCGTLTQYGMKHMRAFANICNSGVSEASMEEVCVAACEGYDSGLLHPSNKGYSA

SEQ ID NO: 127055 - DNA, 1479 bp, Ipomoea batatas
  CDS (1)..(1479)
atgattcgctccgtcgtcgcttctcttctccttctgaccgtctcgatcgtcgccgtagccgatggccgtggcttcctgaaactaccgtctgaagctcgcagattcttccggccggcggaggaggagaacagagaagccgatggcgatgactccgtcggcactcgttgggccgttctgatcgccggatccaatggatattggaattaccgacatcaggctgatatatgccatgcctatcagatattaaaggcaggcggtctcaaggatgaaaacattgttgtatttatgtatgatgacattgcttacaatgaagagaaccctaggaaagggattatcatcaatagccctcatggtgaagatgtttatcatggagttcctaaggactacacaggggatgatgttactgctaacaaccttcttgctgttatcctcggggacaaatctgcagttaagggtggcagcgggaaggttgtggatagcggtccaaatgatcacatctttatttactactctgatcatggtggtcctggtgtgctcggtatgcctaccagtccttatctctatgctgatgagctgaatgctgccttgaaaaagaagcatgctgctggggcatataaaagcttggtattttatctagaagcttgcgagtctgggagtatatttgagggtattctccctaaagatataaatatctatgcaacaacagcttcaaatgctatagagagtagctggggaacatactgtccaggagagtatcctagtcctcctcctgaatatgagacctgcttgggtgatttgtatagtattgcctggatggaagacagtgacatacacaatctgaggactgaaagtctgaagcagcaatataacctggttaaggacagaactctcaacggaaacacagcctatggttcccatgttatgcaatatggtgatttagagctgaatgcggactccctttttatgtatatgggtacaaatccagcaaatgaaaatttcacttttgtggatgaaaaatcactgaaattatcagcgccaagaagggctgtgaaccagcgtgatgcagatctcttgcatttctgggacaagttccgcaatgctccagaaggctcagcaaggaaatccgaagctcagaagcagtttactgaagccattacacacagaacgcacctagacaacagcattgcacttgttggaaagctcctctttggaatggagaaaggtcccgaggtgctgagcagcgtccgtgctactggcctaccccttgttgatgactggagctgcctcaagtcctacgtgagagcttttgagacacactgcggttcattgtcacagtacgggatgaaacacatgcgctccattgccaacatctgcaatgccgggatttcagaggagcggatggccgaggcatcggctcaagcttgcccaaccttcccttcctattcctggagctctctccgtggaggattcagtgcataa

SEQ ID NO: 127056 - protein, 492 aa, Ipomoea batatas
MIRSVVASLLLLTVSIVAVADGRGFLKLPSEARRFFRPAEEENREADGDDSVGTRWAVLIAGSNGYWNYRHQADICHAYQILKAGGLKDENIVVFMYDDIAYNEENPRKGIIINSPHGEDVYHGVPKDYTGDDVTANNLLAVILGDKSAVKGGSGKVVDSGPNDHIFIYYSDHGGPGVLGMPTSPYLYADELNAALKKKHAAGAYKSLVFYLEACESGSIFEGILPKDINIYATTASNAIESSWGTYCPGEYPSPPPEYETCLGDLYSIAWMEDSDIHNLRTESLKQQYNLVKDRTLNGNTAYGSHVMQYGDLELNADSLFMYMGTNPANENFTFVDEKSLKLSAPRRAVNQRDADLLHFWDKFRNAPEGSARKSEAQKQFTEAITHRTHLDNSIALVGKLLFGMEKGPEVLSSVRATGLPLVDDWSCLKSYVRAFETHCGSLSQYGMKHMRSIANICNAGISEERMAEASAQACPTFPSYSWSSLRGGFSA

SEQ ID NO: 127057 - DNA, 1446 bp, Zea mays
  CDS (1)..(1446)
atggtggccgatcgcctccgcctcgcgctgctgctctccgcgtgcctctgctccgcgtgggcgcgcccacgcctcgagccgaccatccgcctgccgtccgaccgcgcggcggccgacgacgccgtcgggacccggtgggccgtgctcatcgccggctccaacggctactacaactaccgccaccaggcggacatctgccatgcataccagatcatgaagaagggcggacttaaggacgagaacatcgttgtcttcatgtacgatgacatcgcgcatagcccggaaaatccgaggcctggtgtcatcataaatcatccccagggtggcgacgtctatgctggggtgccaaaggattacactgggcgagatgtcaacgtcgacaatttcttcgctgttctgcttggcaacaaaactgctctcaggggtgggagcggcaaggttgtggacagtggccccaatgatcatatatctgttttctacagtgaccatgggggtcctggcgtccttggaatgcctacgtatccatatctctatggtgatgacctcgtagatgtcctgaagaagaagcatgctgccgggacctacaaaagcctggtcttttaccttgaagcatgcgaatctgggagcatctttgagggcctcctgccgaatgacataaatgtgtatgcgaccaccgcgtcaaatgcagaggagagtagctgggggacgtactgccctggcgagttcccgagccctccgccggagtatgacacttgcttgggagacctgtatagtgttgcttggatggaagacagtgatttccacaatctgcgaactgaatctctcaagcagcaatacaacttggtcaaggataggacagcggttcaggatacattcagctatggctcccatgtgatgcaatatggttcattggggttgaatgttaagcatctgttttcgtacattggcacaaaccctgctaacgatgacaacacgttcatagaagacaactcgttgccatcattctcaaaggctgttaatcagcgcgacgctgaccttgtctacttctggcagaagtaccggaaattggcagacagctcacctgagaaaaatgaagctcggagggagttgcttgaagtgatggcccacaggtctcatgttgacagcagcgttgagctcattggaagccttctctttggctctgaggacggtccaagggttctgaaagccgtccgtgcagctggtgagcctctggtcgatgattggagctgtctcaagtccacggttcgtacttttgaggcgcaatgtgggtcgttggcgcagtatgggatgaagcacatgcggtccttcgcaaacatctgcaacgctggcatccttcctgaagcagtgtcgaaggtcgctgctcaggcttgcaccagcattccttccaacccctggagttctatccacaagggttttagcgcctaa

SEQ ID NO: 127058 - protein, 481 aa, Zea mays
MVADRLRLALLLSACLCSAWARPRLEPTIRLPSDRAAADDAVGTRWAVLIAGSNGYYNYRHQADICHAYQIMKKGGLKDENIVVFMYDDIAHSPENPRPGVIINHPQGGDVYAGVPKDYTGRDVNVDNFFAVLLGNKTALRGGSGKVVDSGPNDHISVFYSDHGGPGVLGMPTYPYLYGDDLVDVLKKKHAAGTYKSLVFYLEACESGSIFEGLLPNDINVYATTASNAEESSWGTYCPGEFPSPPPEYDTCLGDLYSVAWMEDSDFHNLRTESLKQQYNLVKDRTAVQDTFSYGSHVMQYGSLGLNVKHLFSYIGTNPANDDNTFIEDNSLPSFSKAVNQRDADLVYFWQKYRKLADSSPEKNEARRELLEVMAHRSHVDSSVELIGSLLFGSEDGPRVLKAVRAAGEPLVDDWSCLKSTVRTFEAQCGSLAQYGMKHMRSFANICNAGILPEAVSKVAAQACTSIPSNPWSSIHKGFSA

SEQ ID NO: 127059 - DNA, 1449 bp, Vigna mungo
  CDS (1)..(1449)
atggccaccacaacttctctttccacactctttcttctcttcctcgcaaccgtcgctcttgttgctgctcgccgtgaccacgtcggagacttcctccggctgccgtccgattccggtaacgatgacaacgtccaggggacgcgctgggccatcctcttcgccggttcgaacggctattggaactacagacaccaggccgatatttgtcatgcctatcaaatactgaggaaaggtggcctgaaagaagaaaatatcattgtttttatgtatgatgacattgcattcaattgggacaatccaaggcctggagtcatcattaacaaaccagacggggatgatgtttatgaaggagttccaaaggattacactggcgaagatgctactgctcataacttttactctgctttacttggagataagtcggcgcttaccggtggcagtgggaaggttgtgagcagtgggcccgatgatcgcatatttatattctactctgatcatggtggtccaggggttctcgggacgcctgctggtccttacatatatgcatctgatttggttgaagtactgaagaaaaagcatgcttctggaacgtataaaaacctagtattttatttggaggcatgtgaagctggaagtatcttcgaaggtcttcttcctgaagatatcaatatttatgcaacaacggcttcgaatgccgaagaaagtagttggggaacatattgtcctggggagtatcctagtcctcccccagaatattcaacctgcttgggtgacctgtacagtgttgcttggatggaagacagtgatagacacaacttgcgaacagaatctttacaccaacaatataaagtggttaaggataggactctatctggaggttggtatggctctcacgtgatgcagtatggtgatgtagagtttagcaaggatgctctcttcctgtatttgggtacagatcctgcaaatgataatttgactttcgtggatgaaaactccttatggtcatcttcaactgcagtcaaccaaagggatgcagatctcgtccatttttggcataagttccgcaaagctccggagggttctcctaagaaaaatgaagctcggaaacaagttctggaagtaatgtctcacagaatgcatatagacgacagtgtgaaacttgttggaaagcttttatttggatttgaaaaggctcctgaagtactgaatgctgttagaccggctggatcggcacttgttgatgactgggcctgcctgaaaaccatggtaaggacttttgagacacattgtggatccttgtctcagtatgggatgaaacacatgagtccctttgcaaatatctgcaatgtaggaataaagaaagagcaaatggctgaagcctcagcacaagcttgtgtcactgttcctgccagttcctggagttctctgcaaagaggtttcagtgcataa

SEQ ID NO: 127060 - protein, 482 aa, Vigna mungo
MATTTSLSTLFLLFLATVALVAARRDHVGDFLRLPSDSGNDDNVQGTRWAILFAGSNGYWNYRHQADICHAYQILRKGGLKEENIIVFMYDDIAFNWDNPRPGVIINKPDGDDVYEGVPKDYTGEDATAHNFYSALLGDKSALTGGSGKVVSSGPDDRIFIFYSDHGGPGVLGTPAGPYIYASDLVEVLKKKHASGTYKNLVFYLEACEAGSIFEGLLPEDINIYATTASNAEESSWGTYCPGEYPSPPPEYSTCLGDLYSVAWMEDSDRHNLRTESLHQQYKVVKDRTLSGGWYGSHVMQYGDVEFSKDALFLYLGTDPANDNLTFVDENSLWSSSTAVNQRDADLVHFWHKFRKAPEGSPKKNEARKQVLEVMSHRMHIDDSVKLVGKLLFGFEKAPEVLNAVRPAGSALVDDWACLKTMVRTFETHCGSLSQYGMKHMSPFANICNVGIKKEQMAEASAQACVTVPASSWSSLQRGFSA

SEQ ID NO: 127061 - DNA, 1368 bp, Nicotiana tabacum
  CDS (1)..(1368)
atgattcgaaaaaatggtgttgtgccattcctagttgcactttttgtcctagtttgtactgctgagggtcgtaacttgctggagagtattgttgaagatgataatccgactggaactaaatgggctgtgttggtagctggatcaaatgagtgggataattacagacaccaggcggatgtatgtcatgcatatcaactactgaagaaaggaggtctaaaagatgaaaacatcatcgtattcatgtacgacgatattgcttataataaaaacaaccccagacctggaattatcatcaatagcccccacggccatgatgtttataaaggagtacccaaggattacacaggaaaagattgtaatgctgacaattttttcgctgttatccttggaaataagagtgctctcactgggggcagtgggaaggttgtggaaaatggtccaaatgattatatctttatctactacgctgatcatggtgctcctggccttattggtatgcctagtggagatgttgtctatgccgacgatctgaacagagtcctgattaaaaaacacacttttggaacatattcaaaattggtattttacatggaagcttgtgaatctggaagtatgtttgatggtttactcccgaaaggtttaaacatatacgtaacagcagcatcaaagcctgatgagagcagttgggctacctactgtattcgtttaggtgatgaagatcaatgcttaggagacttgtacagtgtttcttggttggaggatagtgatttgcacgatcggcaagttgaaactttggagaagcagtatcagctggttcgtaagagaactctaaacaatggtacagaagaaggctcccatgtcatgcaatatggtgatttacatattagtgaggatcctcttttcagatatatgggttctaattctgcaaaaaatagttataatacttctaacaacgacgagtcatggctaccctcaaggactgttaaccagcgcgatgttcatctcatgcatttatggtctaagttccggtctgcgcctgaaggctctgctagaaaagctgaagctcatcggcaactaagtgaagccttatcacagagagaagatgtagataacagtgtgagacatattggagaagttctgtttggagttgagaaaagtcacaagttgctgaacactgttcgacctgctggacaaccccttgttgatgattgggactgccttaaatcctttgtcaagatatttgagtcacaatgtggaacgttaactccctacggaaggaaacacgttcgtggctttgctaacttgtgcaatgctggaattcgaagggagcaaatggctgcagcagctaaacaagcatgtcctccttaa

SEQ ID NO: 127062 - protein, 455 aa, Nicotiana tabacum
MIRKNGVVPFLVALFVLVCTAEGRNLLESIVEDDNPTGTKWAVLVAGSNEWDNYRHQADVCHAYQLLKKGGLKDENIIVFMYDDIAYNKNNPRPGIIINSPHGHDVYKGVPKDYTGKDCNADNFFAVILGNKSALTGGSGKVVENGPNDYIFIYYADHGAPGLIGMPSGDVVYADDLNRVLIKKHTFGTYSKLVFYMEACESGSMFDGLLPKGLNIYVTAASKPDESSWATYCIRLGDEDQCLGDLYSVSWLEDSDLHDRQVETLEKQYQLVRKRTLNNGTEEGSHVMQYGDLHISEDPLFRYMGSNSAKNSYNTSNNDESWLPSRTVNQRDVHLMHLWSKFRSAPEGSARKAEAHRQLSEALSQREDVDNSVRHIGEVLFGVEKSHKLLNTVRPAGQPLVDDWDCLKSFVKIFESQCGTLTPYGRKHVRGFANLCNAGIRREQMAAAAKQACPP

SEQ ID NO: 127063 - DNA, 1485 bp, Nicotiana tabacum
  CDS (1)..(1485)
atggggtcctttagttttgcagtatgtgtaagcttaatgttgctggttatggtcgttgctattccttttgaattacccaaaaatggcagaaggatagggcggctgcaccgctggtgggaccccttaatacgatcgccggtagatcgtgatgatgagtctgaagacaaggacggtgttcgttgggcagttctcgtggctggttctaatggatacggaaattatcggcatcaggcagatgtatgtcatgcttaccagattttgaaaagaggaggattgaaagatgagaacatagttgtattcatgtatgatgacattgccaagagtgagctaaatccaagacccggagtcataatcaaccatccaaacggtagtgatgtctatgctggtgtgccgaaggattacactggcgagcatgtcactgcggcgaacttgtatgccgtgcttcttggtgataagagtgctgtgaaaggtggaagtgggaagatcgtcgatagtaaaccaaatgacagaatatttctctattactctgatcatggtggtccaggggtgctcgggatgccgaacatgccttttctttatgccaaagattttattgaggtcttgaaaaagaaacatgcagcagggacctacaaagaaatggtcctctacattgaagcttgtgagagcgggagtgtttttgagggtatgatgcctgaagacttgaacatttatgtgacaacagcatcaaatgccgaagagagcagctgggggacgtattgcccaggaatggatcctccacctccaccggaatatatcacatgtttgggagacttatatagtgttgcatggatggaggatagtgagtctcataacctgaagaaggaaacaataaaacaacagtacgagaaggtgaaggaaagaacttccaacttcaacaactataatgctggatctcatgttatggaatatggaagcaaagaaattaagccagaaaaagtttatttgtaccaaggatttgatcctgccaccgcgaatctttctgcaaacaagattgcttttgcgcacgtggaggttgtcaaccagagggatgctgatcttctcttcttatgggagagatacaaggagctagcagacaattcattggagaaggccaagcttcggaaagagataacggacacaatgctgcatagaaaacatctagacgggagcgtagatgcaattggagtctttcttttcggcccaacaaagggttcttctgttctcaactctgttagagaacctggtttacctctcgttgatgattgggattgcctaaaatcgacggttcgccttttcgagctacattgtggttctctaacacaatacgggatgaagcacatgagagcatttgcaaacatttgcaacaatggagtgtcgagagatgctatggaggaagcttttatggctgcttgcaatgagcgtaagagagaggagtataccgctgccaaccggggcttcagtgcttga

SEQ ID NO: 127064 - protein, 494 aa, Nicotiana tabacum
MGSFSFAVCVSLMLLVMVVAIPFELPKNGRRIGRLHRWWDPLIRSPVDRDDESEDKDGVRWAVLVAGSNGYGNYRHQADVCHAYQILKRGGLKDENIVVFMYDDIAKSELNPRPGVIINHPNGSDVYAGVPKDYTGEHVTAANLYAVLLGDKSAVKGGSGKIVDSKPNDRIFLYYSDHGGPGVLGMPNMPFLYAKDFIEVLKKKHAAGTYKEMVLYIEACESGSVFEGMMPEDLNIYVTTASNAEESSWGTYCPGMDPPPPPEYITCLGDLYSVAWMEDSESHNLKKETIKQQYEKVKERTSNFNNYNAGSHVMEYGSKEIKPEKVYLYQGFDPATANLSANKIAFAHVEVVNQRDADLLFLWERYKELADNSLEKAKLRKEITDTMLHRKHLDGSVDAIGVFLFGPTKGSSVLNSVREPGLPLVDDWDCLKSTVRLFELHCGSLTQYGMKHMRAFANICNNGVSRDAMEEAFMAACNERKREEYTAANRGFSA

SEQ ID NO: 127065 - DNA, 1458 bp, Zea mays
  CDS (1)..(1458)
atggtggccgatcgcctccgcctcgcgctgctgctctccgcgtgcctctgctccgcgtgggcgcgcccacgcctcgagccgaccatccgcctgccgtccgagcgcgcggcggccgacgaaacggacgacgacgccgtcgggacccggtgggccgtgctcatcgccggctccaacggctactataactaccgccaccaggcggacatctgccatgcataccagatcatgaagaagggcggacttaaggacgagaacatcgttgtcttcatgtacgatgacatcgcgcatagcccggaaaatccgaggcctggtgtcatcataaatcatccccagggtggcgacgtctatgctggggtgccaaaggattacactgggcgagatgtcaacgtcgacaatttcttcgctgttctgcttggcaacaaaactgctctcaggggtgggagcggcaaggttgtggacagtggccccaatgatcatatatttgttttctacagtgaccatgggggtcctggcgtccttggaatgcctacgtatccatatctctatggtgatgacctcgtagatgtcctgaagaagaagcatgctgccgggacctacaaaagcctggtcttttaccttgaagcatgcgaatctgggagcatctttgagggcctcctgccgaatgacataaatgtgtatgcgaccaccgcgtcaaatgcagaggagagtagctgggggacgtactgccctggcgagttcccgagccctccaccggagtatgacacttgcttgggagacctgtatagtgttgcttggatggaagacagtgatttccacaatctgcgaactgaatctctcaagcagcaatacaacttggtcaaagataggacagcggttcaggatacattcagctatggctcccatgtgatgcaatatggttcattggagttgaatgttaagcatctgttttcgtacattggcacaaaccctgctaacgatgacaacacgtttatagaagacaactcgttgccatcattgtcaaaggctgttaatcagcgcgacgctgaccttgtctacttctggcagaagtaccggaaattggcagacagctcacctgagaaaaatgaagctcggagggagttgcttgaagtgatggcccacaggtctcatgttgacagcagtgttgagctcattggaagccttctctttggctctgaggacggtccaagggttctgaaagccgtccgtgcagctggtgagcctctggtcgatgattggagctgtctcaagtccacggttcgtacttttgaggcgcaatgtgggtcgttggcgcagtatgggatgaagcacatgcggtccttcgcaaacatctgcaacgctggcatccttcctgaagcagtgtcgaaggtcgctgctcaggcttgcaccagcattccttccaacccctggagttctatccacaagggttttagcgcctaa

SEQ ID NO: 127066 - protein, 485 aa, Zea mays
MVADRLRLALLLSACLCSAWARPRLEPTIRLPSERAAADETDDDAVGTRWAVLIAGSNGYYNYRHQADICHAYQIMKKGGLKDENIVVFMYDDIAHSPENPRPGVIINHPQGGDVYAGVPKDYTGRDVNVDNFFAVLLGNKTALRGGSGKVVDSGPNDHIFVFYSDHGGPGVLGMPTYPYLYGDDLVDVLKKKHAAGTYKSLVFYLEACESGSIFEGLLPNDINVYATTASNAEESSWGTYCPGEFPSPPPEYDTCLGDLYSVAWMEDSDFHNLRTESLKQQYNLVKDRTAVQDTFSYGSHVMQYGSLELNVKHLFSYIGTNPANDDNTFIEDNSLPSLSKAVNQRDADLVYFWQKYRKLADSSPEKNEARRELLEVMAHRSHVDSSVELIGSLLFGSEDGPRVLKAVRAAGEPLVDDWSCLKSTVRTFEAQCGSLAQYGMKHMRSFANICNAGILPEAVSKVAAQACTSIPSNPWSSIHKGFSA

SEQ ID NO: 127067 - DNA, 1428 bp, Canavalia ensiformis
  CDS (1)..(1428)
atggtcatgatgttggtgatgctgagtttgcacggtactgcagcgaggttgaaccggagggagtgggactcggtcattcagttaccgaccgaaccggtggatgatgaagtgggaacccggtgggcggttctcgtggctggttcaaacggttatggaaattataggcatcaagcggatgtgtgccatgcttaccagttgctgataaaaggtggagtcaaagaagaaaacattgtggtgtttatgtatgatgatatagcttataacgccatgaatcccagacccggagtcatcatcaaccatcctcaggggccagacgtgtatgctggtgtacctaaggattacaccggtgaggacgtaacacctgagaacctatatgctgtcattcttggggacaagagtaaagttaaaggtggaagtggcaaggtgatcaacagcaatccggaggataggatatttatattctactccgatcatggaggtcccggagttcttgggatgccaaacgcaccattcgtttatgccatggattttattgatgttttgaagaagaaacatgcaagtggaggctacaaggagatggttatatacatagaagcttgtgagagtgggagcatatttgagggtataatgcccaaggatctgaatatttatgtgacaactgcgtcaaatgcacaagagaacagttttggaacttattgtcctgggatgaatcctcctccaccagaagagtacgtaacttgcctgggggatttatacagcgtttcttggatggaagatagtgagactcacaatctaaaaagggaaacggtacaacagcaataccagtcggtaaggaaacggacttcaaattctaacagctataggtttggttctcatgtgatgcaatacggtgacactaacattactgctgaaaagctttacttgtaccatggttttgatcctgccaccgtgaactttcctccacacaacggcaacctagaagctaaaatggaagttgttaaccagagagatgcagagcttttgttcatgtggcaaatgtatcagagatcaaaccatcaaccggaaaagaagactcacatcctggaacagattacagagacagtgaagcataggaatcatttggatggcagtgtggaattgattggagttttgttgtatggaccaggaaaaagttcttcggttctacattccgtgagggctcctggtctgcccctagttgatgattggacatgcttgaaatctatggttagagtgttcgaaactcactgtgggtcactgactcagtatggcatgaaacacatgcgggcattcggcaacgtttgcaacagcggcgtttctaaggcctccatggaggaggcttgtaaggcagcttgcggtggctatgacgctgggttattatatccatcaaacacaggatatagtgcttga

SEQ ID NO: 127068 - protein, 475 aa, Canavalia ensiformis
MVMMLVMLSLHGTAARLNRREWDSVIQLPTEPVDDEVGTRWAVLVAGSNGYGNYRHQADVCHAYQLLIKGGVKEENIVVFMYDDIAYNAMNPRPGVIINHPQGPDVYAGVPKDYTGEDVTPENLYAVILGDKSKVKGGSGKVINSNPEDRIFIFYSDHGGPGVLGMPNAPFVYAMDFIDVLKKKHASGGYKEMVIYIEACESGSIFEGIMPKDLNIYVTTASNAQENSFGTYCPGMNPPPPEEYVTCLGDLYSVSWMEDSETHNLKRETVQQQYQSVRKRTSNSNSYRFGSHVMQYGDTNITAEKLYLYHGFDPATVNFPPHNGNLEAKMEVVNQRDAELLFMWQMYQRSNHQPEKKTHILEQITETVKHRNHLDGSVELIGVLLYGPGKSSSVLHSVRAPGLPLVDDWTCLKSMVRVFETHCGSLTQYGMKHMRAFGNVCNSGVSKASMEEACKAACGGYDAGLLYPSNTGYSA

SEQ ID NO: 127069 - DNA, 1455 bp, Phaseolus vulgaris
  CDS (1)..(1455)
atggccaccaccaccgccaccacttctcttctcgctctcctccttctcttccttgtcgctctcgtctctgctggccgtgacctcgtcggagacttcctccgactgccgtctgattccggtaacggcgacaacgtccatggaacgcgctgggccatcctcttcgctggttcgagcggctattggaattacagacatcaggccgatatttgtcatgcctatcaattactgaggaaaggtggcctgaaagatgaaaatatcattgtttttatgtatgatgacattgcattcaattcggaaaatccaaggcgtggagtcatcattaacagtccaaatggagatgaagtttataaaggagttccaaaggattacactggtgaagatgttactgctcataacttttatgctgctttacttggagataagtcgaaacttactggtggcagtgggaaagttgtgaatagtgggcccaatgatcacatatttatattctactctgatcatggtggtccaggggtgctcgggtcgcctgctggtccttacatttatgcatctgatctgaatgaagtattgaagaaaaaacatgcttctggaacgtataaaaacctagtattttatttggaggcatgtgaatctggaagtatctttgaaggtcttcttcctgaagatatcaatgtttatgcaacaacagcttcgaatgccgatgaaagtagttggggaacatattgtcctggggaggatcctagtcctcccccagaatattcaacctgcttgggtgacctgtacagtgttgcttggatggaagacagtgatagacacaatttgcgaacagaaactttgcaccaacaatataaattggttaaagagaggactatatctggaggtttatactatggctctcacgtgatgcagtatggtgatgtagggcttagcaaggatattctcttccattatttgggtacagatcctgcaaatgagaatttgactttcgtggatgaaaactccttatggtcatcttcaaaagcagtcaaccaaagggatgctgatctcgtccatttttgggataagttccgcaaagctcctgagggttctcctaagaaaaatgaagctcggaaacaagttctggaagtaatgtctcacagaatgcatatagacgacagtgtggaacttgttggaaagcttttatttggcattgaaaaggctcctgaattactgaatgctgtaagaccggctggatccgcacttgttgatgactgggactgcctgaaaaccatggtaaggacttttgagacacattgtggatcgttgtctcagtatgggatgaaacacatgaggtcctttgcgaacatgtgcaatgtaggaataaagaaggagcaaatgcgtgaagcctcagcacaagcttgtgtcactattcctgccaatccctggagttctctgcaaaggggtttcagtgcgtaa

SEQ ID NO: 127070 - protein, 484 aa, Phaseolus vulgaris
MATTTATTSLLALLLLFLVALVSAGRDLVGDFLRLPSDSGNGDNVHGTRWAILFAGSSGYWNYRHQADICHAYQLLRKGGLKDENIIVFMYDDIAFNSENPRRGVIINSPNGDEVYKGVPKDYTGEDVTAHNFYAALLGDKSKLTGGSGKVVNSGPNDHIFIFYSDHGGPGVLGSPAGPYIYASDLNEVLKKKHASGTYKNLVFYLEACESGSIFEGLLPEDINVYATTASNADESSWGTYCPGEDPSPPPEYSTCLGDLYSVAWMEDSDRHNLRTETLHQQYKLVKERTISGGLYYGSHVMQYGDVGLSKDILFHYLGTDPANENLTFVDENSLWSSSKAVNQRDADLVHFWDKFRKAPEGSPKKNEARKQVLEVMSHRMHIDDSVELVGKLLFGIEKAPELLNAVRPAGSALVDDWDCLKTMVRTFETHCGSLSQYGMKHMRSFANMCNVGIKKEQMREASAQACVTIPANPWSSLQRGFSA

SEQ ID NO: 127071 - DNA, 1437 bp, Arabidopsis thaliana
  CDS (1)..(1437)
atgaccaccgtcgtttcctttctcgccctcttcctctttctagtcgccgccgtttctggtgacgtcatcaaacttccttctctagcttctaagttcttccgcccaactgaaaacgacgatgattctactaagtgggctgttctcgtcgccggatccagcggatactggaattatcgtcatcaggcggatgtttgtcatgcttatcagcttttgaagaaaggtggagtgaaagaggagaatattgtggtgtttatgtatgatgacattgcgaagaacgaggagaatccaagacctggagttattatcaatagtcctaatggagaggatgtctataatggagttcccaaggattacactggagatgaagttaatgttgataacttattagctgtgattcttggaaacaaaacggctcttaaaggaggaagtgggaaagttgtagatagcggtccaaacgatcatatctttatatactatagtgatcacggtggtccgggagtgctcgggatgccaacttctccaaacctatatgcaaatgatctcaatgatgtcttgaagaaaaaatatgcttcaggaacatataagagcttggtgttttatttggaggcttgtgaatctggaagtatttttgaaggtcttttaccagagggtttaaatatttacgcgacaactgcatcgaatgcagaagaaagtagctggggtacttactgtcctggagaggatcctagtcctccttctgagtatgagacctgtttgggtgacttatacagtgttgcttggatagaagatagtgaaaaacacaatttacaaacagagactttgcacgagcaatatgaattggtgaaaaagagaactgcaggttctggtaagtcttatggttctcatgttatggaatttggagatataggactcagcaaggagaagcttgtcctttttatgggtacaaatccagcagatgaaaacttcacctttgtgaatgagaattcaataaggccgccttcaagagttacaaaccagcgtgatgcggatcttgtccatttctggcataagtatcaaaaggcaccggaagggtcagcaagaaaagttgaagctcagaagcaagtccttgaagcaatgtctcacagacttcatgttgataatagcattctgttgattgggattcttttgtttggtttggaaggtcatgcggtgttaaataaagtccggccttctggagaaccgcttgttgacgattgggactgccttaaatctctggtgagagctttcgagaggcactgtggatcgttgtctcagtacggaataaagcacatgaggtcgattgcaaacatgtgcaacgcagggattcagatgaggcaaatggaggaggcagcaatgcaggcttgtcccaccatccctaccagtccttggagctctcttgaccgtggattcagtgcttga

SEQ ID NO: 127072 - protein, 478 aa, Arabidopsis thaliana
MTTVVSFLALFLFLVAAVSGDVIKLPSLASKFFRPTENDDDSTKWAVLVAGSSGYWNYRHQADVCHAYQLLKKGGVKEENIVVFMYDDIAKNEENPRPGVIINSPNGEDVYNGVPKDYTGDEVNVDNLLAVILGNKTALKGGSGKVVDSGPNDHIFIYYSDHGGPGVLGMPTSPNLYANDLNDVLKKKYASGTYKSLVFYLEACESGSIFEGLLPEGLNIYATTASNAEESSWGTYCPGEDPSPPSEYETCLGDLYSVAWIEDSEKHNLQTETLHEQYELVKKRTAGSGKSYGSHVMEFGDIGLSKEKLVLFMGTNPADENFTFVNENSIRPPSRVTNQRDADLVHFWHKYQKAPEGSARKVEAQKQVLEAMSHRLHVDNSILLIGILLFGLEGHAVLNKVRPSGEPLVDDWDCLKSLVRAFERHCGSLSQYGIKHMRSIANMCNAGIQMRQMEEAAMQACPTIPTSPWSSLDRGFSA

SEQ ID NO: 127073 - DNA, 1461 bp, Arabidopsis thaliana
  CDS (1)..(1461)
atggctaagtcttgctatttcagaccagctcttcttcttctgttagttcttttggttcatgccgagtcacgcggtcggttcgagccaaagattcttatgccgacagaggaagctaacccggctgaccaagacgaagatggtgtcggtacaagatgggcggttctcgtcgctggttcttctggatatggaaactacagacaccaggctgacgtgtgtcacgcatatcaaatactaagaaaaggaggtttaaaggaagaaaacatagtcgttttgatgtatgatgatatcgcaaaccacccacttaatcctcgtccgggtactctcatcaaccatcctgacggtgacgatgtttacgccggagtccctaaggactatactggtagtagcgttacggctgcaaacttctacgctgtactcctaggcgaccagaaggctgttaaaggtggaagcggtaaggtcatcgctagcaagcccaacgatcacattttcgtatattatgcggatcatggtggtcccggagttcttgggatgccaaatacgcctcacatatatgcagctgattttattgaaacgcttaagaagaagcatgcttccggaacatacaaagagatggttatatacgtagaagcgtgtgaaagtgggagtattttcgaagggataatgccaaaggacttgaacatttacgtaacaacggcttcaaatgcacaagagagtagttatggaacatattgtcctggcatgaatccgtcacccccatctgaatatatcacttgcttaggggatttatatagtgttgcttggatggaagatagtgagactcacaatttaaagaaagagaccataaagcaacaataccacacggtgaagatgaggacatcaaactacaatacctactcaggtggctctcatgtgatggaatacggtaacaatagtattaagtcggagaagctttatctttaccaagggtttgatccagccaccgttaatctcccactaaacgaattaccggtcaagtcaaaaataggagtcgttaaccaacgcgacgcggaccttctcttcctttggcatatgtatcggacatcggaagatgggtcaaggaagaaggatgacacattgaaggaattaactgagacaacaaggcataggaaacatttagatgcaagcgtcgaattgatagccacaattttgtttggtccgacgatgaatgttcttaacttggttagagaacccggtttgcctttggttgacgattgggaatgtcttaaatcgatggtacgtgtatttgaagagcattgtggatcactaacgcaatatgggatgaaacatatgcgagcgtttgcaaacgtttgtaacaacggtgtgtccaaagagctgatggaggaagcttctactgcggcatgcggtggttatagtgaggctcgctacacggtgcatccatcaatcttaggctatagcgcctga

SEQ ID NO: 127074 - protein, 486 aa, Arabidopsis thaliana
MAKSCYFRPALLLLLVLLVHAESRGRFEPKILMPTEEANPADQDEDGVGTRWAVLVAGSSGYGNYRHQADVCHAYQILRKGGLKEENIVVLMYDDIANHPLNPRPGTLINHPDGDDVYAGVPKDYTGSSVTAANFYAVLLGDQKAVKGGSGKVIASKPNDHIFVYYADHGGPGVLGMPNTPHIYAADFIETLKKKHASGTYKEMVIYVEACESGSIFEGIMPKDLNIYVTTASNAQESSYGTYCPGMNPSPPSEYITCLGDLYSVAWMEDSETHNLKKETIKQQYHTVKMRTSNYNTYSGGSHVMEYGNNSIKSEKLYLYQGFDPATVNLPLNELPVKSKIGVVNQRDADLLFLWHMYRTSEDGSRKKDDTLKELTETTRHRKHLDASVELIATILFGPTMNVLNLVREPGLPLVDDWECLKSMVRVFEEHCGSLTQYGMKHMRAFANVCNNGVSKELMEEASTAACGGYSEARYTVHPSILGYSA

SEQ ID NO: 127075 - DNA, 1485 bp, Arabidopsis thaliana
  CDS (1)..(1485)
atggccacaacgatgacacgtgtctccgtcggcgtcgtcctctttgttctcttagtctcgctggttgccgtctccgccgcgagaagcggtcctgatgatgttatcaaactcccttcgcaggcttctcgcttcttccgtcctgctgaaaacgacgacgattctaactccggtactaggtgggctgttctagtcgccggatctagcggatattggaattacaggcatcaggctgatatatgccatgcctatcaacttctgaggaaaggtggattgaaagaggagaatattgtggtattcatgtatgatgatattgctaacaattacgagaatccaaggcctggaaccattatcaacagccctcatggaaaagatgtctatcaaggagttcccaaggattatactggagatgatgtcaatgttgataatctatttgctgtgatccttggagacaaaactgctgttaaagggggaagtgggaaggttgtggatagtggtcctaatgatcatatcttcatattctacagtgaccatggtggtcctggagttcttgggatgccaacttctccttacctatatgcaaatgatctcaatgatgtcttgaagaagaaacatgctttaggaacatataaaagcttggtgttttatctcgaagcttgcgaatctggaagtatctttgaagggcttcttcctgagggtttgaacatctatgccacaactgcatcaaacgccgaagaaagcagttggggtacctattgccctggagaggaacccagtcctccaccggagtatgaaacttgtttaggtgacttgtacagtgttgcttggatggaagatagtggtatgcacaatttacagactgagactctgcaccagcaatatgaacttgtgaaaaggaggactgcacctgttgggtactcttatggttctcatgtcatgcaatatggcgatgtaggaattagcaaggataatctcgatctttatatgggaacaaaccctgccaatgacaattttacctttgcggatgcgaattcactaaagccaccttcaagagttacaaaccagcgtgatgcagatcttgttcatttttgggaaaagtaccgaaaagcaccagaaggttcagcaagaaaaacagaagctcagaagcaagtacttgaagccatgtctcacagacttcatattgacaatagcgtgatactcgtcggaaaaatcttgtttggcatttcgagaggtcctgaagtgctaaacaaagtacggtctgctgggcaacctctagtcgatgactggaactgccttaaaaatcaggtgagagctttcgagaggcactgtggatcgctgtctcagtacggtatcaagcacatgaggtcttttgcaaacatctgcaatgcagggattcaaatggagcaaatggaggaggcagcttcacaggcttgtaccacactgccaactggtccttggagctcgcttaaccgtggattcagtgcatag

SEQ ID NO: 127076 - protein, 494 aa, Arabidopsis thaliana
MATTMTRVSVGVVLFVLLVSLVAVSAARSGPDDVIKLPSQASRFFRPAENDDDSNSGTRWAVLVAGSSGYWNYRHQADICHAYQLLRKGGLKEENIVVFMYDDIANNYENPRPGTIINSPHGKDVYQGVPKDYTGDDVNVDNLFAVILGDKTAVKGGSGKVVDSGPNDHIFIFYSDHGGPGVLGMPTSPYLYANDLNDVLKKKHALGTYKSLVFYLEACESGSIFEGLLPEGLNIYATTASNAEESSWGTYCPGEEPSPPPEYETCLGDLYSVAWMEDSGMHNLQTETLHQQYELVKRRTAPVGYSYGSHVMQYGDVGISKDNLDLYMGTNPANDNFTFADANSLKPPSRVTNQRDADLVHFWEKYRKAPEGSARKTEAQKQVLEAMSHRLHIDNSVILVGKILFGISRGPEVLNKVRSAGQPLVDDWNCLKNQVRAFERHCGSLSQYGIKHMRSFANICNAGIQMEQMEEAASQACTTLPTGPWSSLNRGFSA

SEQ ID NO: 127077 - DNA, 1485 bp, Citrus sinensis
  CDS (1)..(1485)
atgacgcgccttgcctccggcgtgctaatcacgctcctagtcgctcttgcaggaatcgccgatggaagcagagacatagcaggtgacattctgaagctaccatcggaagcctataggttcttccataatggtgggggaggggcaaaggtcaacgatgatgatgattctgtcggcacgagatgggccgtcctgcttgccggatctaatggcttctggaattacaggcatcaggctgatatttgtcatgcttatcaactcttgaggaaaggtgggctgaaggatgaaaatattattgttttcatgtatgatgacatcgctttcaatgaagagaacccaaggcctggagtcatcattaaccacccccatggcgatgatgtttacaaaggagttccaaaggattacacgggggaagatgttactgttgaaaagttttttgctgttgtcctgggaaataaaacagctcttacagggggcagtgggaaggttgtggatagcggccccaatgatcatattttcatattctactcagatcatggtggccctggggtgctagggatgcccaccagtcgatacatatatgctgatgaactgatcgatgtcttaaaaaagaagcatgcttctgggaactacaaaagcttggtattttatctcgaagcctgtgaatctggaagtatctttgagggtcttcttcttgagggcttaaatatctatgcaaccacagcttcaaatgctgaagagagcagttgggggacctattgtcctggagagattcctggtcctccccctgaatatagcacttgtttgggtgacttgtatagtattgcttggatggaggacagtgacatacacaacttgcggacagaaactcttcaccagcagtatgaactggttaaaacaaggactgctagttacaattcgtatggctctcatgtcatgcaatatggtgatatcggtcttagcaagaacaatctcttcacgtacttgggtacaaatcctgcaaatgataactacacttttgtggatgagaactccttaaggccagcatctaaagctgttaaccagcgagatgccgatctcttgcatttctgggacaagtaccgcaaggcacctgagggcactcctaggaaggctgaagctcagaagcagttttttgaagcaatgtctcatagaatgcatgtagaccacagcatcaaacttattggaaagctcttatttggaattgagaaaggtccagagatcttgaacactgttcgacctgctggtcagcctcttgttgatgactggggctgcctcaaatcactggtgaggacttttgagtcgcactgtggagctctatcgcaatatggaatgaagcacatgcgttctcttgcaaacatctgtaatacaggaattgggaaagagaagatggctgaagcatcagcacaagcctgtgaaaatattccttctggtccttggagttctctcgacaaaggattcagtgcataa

SEQ ID NO: 127078 - protein, 494 aa, Citrus sinensis
MTRLASGVLITLLVALAGIADGSRDIAGDILKLPSEAYRFFHNGGGGAKVNDDDDSVGTRWAVLLAGSNGFWNYRHQADICHAYQLLRKGGLKDENIIVFMYDDIAFNEENPRPGVIINHPHGDDVYKGVPKDYTGEDVTVEKFFAVVLGNKTALTGGSGKVVDSGPNDHIFIFYSDHGGPGVLGMPTSRYIYADELIDVLKKKHASGNYKSLVFYLEACESGSIFEGLLLEGLNIYATTASNAEESSWGTYCPGEIPGPPPEYSTCLGDLYSIAWMEDSDIHNLRTETLHQQYELVKTRTASYNSYGSHVMQYGDIGLSKNNLFTYLGTNPANDNYTFVDENSLRPASKAVNQRDADLLHFWDKYRKAPEGTPRKAEAQKQFFEAMSHRMHVDHSIKLIGKLLFGIEKGPEILNTVRPAGQPLVDDWGCLKSLVRTFESHCGALSQYGMKHMRSLANICNTGIGKEKMAEASAQACENIPSGPWSSLDKGFSA

SEQ ID NO: 127079 - DNA, 1488 bp, Glycine max
  CDS (1)..(1488)
atggcgcttgatcgctccattataagcaaaacgacgtggtacagcgtcgtattatggatgatggtggtgctggtgagagtgcacggtgcagccgcgaggccgaaccggaaggagtgggactcagtcataaagttaccgactgaaccggtggatgctgactcggatgaagtgggaacacgatgggcggttctcgtggctggttcaaacggctacggaaactacaggcatcaagcagatgtgtgccatgcgtaccagttgctgataaaaggtggactaaaagaagagaacatagtggtgtttatgtacgatgacatagctaccaacgagttgaatcctagacatggagtcatcatcaaccaccctgagggagaagatctgtatgctggtgttcctaaggattacaccggtgataatgtgacgacggagaacctctttgctgttattcttggagacaagagtaaattgaagggaggaagtggcaaagtgatcaacagcaaacccgaggacagaatatttatatactactctgatcatggaggtcctggaatacttgggatgccaaacatgccatacctttatgccatggattttattgatgtcttgaagaagaaacatgcatctggaagttacaaggagatggttatatacgtggaagcttgtgaaagtgggagcgtgtttgagggtataatgcctaaggatctgaatatttatgtcacaactgcatcaaatgcacaagagaatagttgggggacttattgtcctggaatggatccttctccacctccagagtacatcacttgcctaggggatttgtacagcgttgcttggatggaagatagtgaggctcacaatctaaaaagggaatccgtgaaacaacaatacaaatcggtaaagcaacggacttcaaatttcaacaactatgcgatgggttctcatgtgatgcaatatggtgataccaacatcacagctgaaaagctttatttataccaaggttttgatcctgccactgtgaacttccctccacaaaacggcaggctagaaactaaaatggaagttgttaaccaaagagatgcagaacttttcttattgtggcaaatgtatcagagatcaaaccatcagtcagaaaataagacagacatcctcaaacaaattgcggagacagtgaagcataggaaacacatagatggtagcgtggaattgattggagttttactgtatggaccaggaaaaggttcttctgttctacaatccgtgagggctcctggttcgtcccttgttgatgactggacatgcctaaaatcaatggttcgggtgtttgaaactcactgtgggacactgactcagtatggcatgaaacacatgcgagcattcgccaacatttgcaacagtggcgtttctgaggcctccatggaagaggcttgtttggcagcctgtgaaggctacaatgctgggctattccatccatcaaacagaggctacagtgcttga

SEQ ID NO: 127080 - protein, 495 aa, Glycine max
MALDRSIISKTTWYSVVLWMMVVLVRVHGAAARPNRKEWDSVIKLPTEPVDADSDEVGTRWAVLVAGSNGYGNYRHQADVCHAYQLLIKGGLKEENIVVFMYDDIATNELNPRHGVIINHPEGEDLYAGVPKDYTGDNVTTENLFAVILGDKSKLKGGSGKVINSKPEDRIFIYYSDHGGPGILGMPNMPYLYAMDFIDVLKKKHASGSYKEMVIYVEACESGSVFEGIMPKDLNIYVTTASNAQENSWGTYCPGMDPSPPPEYITCLGDLYSVAWMEDSEAHNLKRESVKQQYKSVKQRTSNFNNYAMGSHVMQYGDTNITAEKLYLYQGFDPATVNFPPQNGRLETKMEVVNQRDAELFLLWQMYQRSNHQSENKTDILKQIAETVKHRKHIDGSVELIGVLLYGPGKGSSVLQSVRAPGSSLVDDWTCLKSMVRVFETHCGTLTQYGMKHMRAFANICNSGVSEASMEEACLAACEGYNAGLFHPSNRGYSA

SEQ ID NO: 127081 - DNA, 1506 bp, Oryza sativa
  CDS (1)..(1506)
atggcggcgcgcgctcgcctccgcctcgtcctgcccccgctcgcggcgctgctcctcttcgcgcacctcgccgccgtcgcggtggcgcggccgcggtgggaggaggagggcagcaacctccgcctgccgtcggagcgcgccgtggcggctggcgcggcggcggacgacgctgccgaggccgccgagggcaccaggtgggccgtcctcatcgccggctccaacggctactacaactaccgccaccaggcggatgtctgccatgcctaccagatcatgaagaggggcgggctcaaggacgagaacatcatcgtcttcatgtacgatgacatcgcgcacaacccggagaatccgaggcctggtgtcatcatcaaccatccccagggtggcgatgtctatgctggggtcccgaaggattacactgggaaggaggttaatgtcaaaaacttgtttgctgttctgctcggtaacaaaactgctgtcaaaggtgggagtggcaaagtcctggacagtggccccaacgatcatattttcattttttacagtgaccatgggggtcctggtgtccttgggatgccaacctatccatacctctacggtgatgatcttgtagatgttctgaagaagaagcatgctgctgggacgtacaaaagcctggtcttttaccttgaagcctgtgaatctggaagcatctttgagggtctattgccaaatggcatcaatgtttatgccaccactgcatcaaacgctgatgagagcagctggggaacatactgccctggggagtacccgagcccacctccggagtacgacacatgcctaggggacttgtacagcgttgcttggatggaagacagcgatgtccacaacctgagaactgaatcactcaagcagcagtacaatctcgtcaaggaaaggacatctgtgcagcacacatattactctgggtcacatgtgatggaatacggttctttagagctgaatgcccatcatgtgttcatgtacatgggttccaatccggctaacgacaatgctacatttgtggaagataactcgttgccatcgttctcaagggctgttaatcagcgggatgctgacctggtttacttctggcagaagtaccgcaaattgcctgagagttctcctgagaaaaacgaagctcggaagcaattgcttgaaatgatggcacacagatctcatgttgacaacagtgttgagctgatcggaaaccttctctttggctctgaggaaggcccaagggttctaaaggctgttcgtgcaactggcgaacctcttgttgatgactggagttgtctcaagtctatggtacgcactttcgaagcacaatgcggctcgctagcgcagtatggaatgaagcatatgcgttcctttgcaaacatctgcaatgctggcatctctgctgaagcgatggcaaaggttgctgcgcaggcttgcaccagcattccctccaacccctggagttccacccataggggttttagtgcttaa

SEQ ID NO: 127082 - protein, 501 aa, Oryza sativa
MAARARLRLVLPPLAALLLFAHLAAVAVARPRWEEEGSNLRLPSERAVAAGAAADDAAEAAEGTRWAVLIAGSNGYYNYRHQADVCHAYQIMKRGGLKDENIIVFMYDDIAHNPENPRPGVIINHPQGGDVYAGVPKDYTGKEVNVKNLFAVLLGNKTAVKGGSGKVLDSGPNDHIFIFYSDHGGPGVLGMPTYPYLYGDDLVDVLKKKHAAGTYKSLVFYLEACESGSIFEGLLPNGINVYATTASNADESSWGTYCPGEYPSPPPEYDTCLGDLYSVAWMEDSDVHNLRTESLKQQYNLVKERTSVQHTYYSGSHVMEYGSLELNAHHVFMYMGSNPANDNATFVEDNSLPSFSRAVNQRDADLVYFWQKYRKLPESSPEKNEARKQLLEMMAHRSHVDNSVELIGNLLFGSEEGPRVLKAVRATGEPLVDDWSCLKSMVRTFEAQCGSLAQYGMKHMRSFANICNAGISAEAMAKVAAQACTSIPSNPWSSTHRGFSA

SEQ ID NO: 127083 - DNA, 1491 bp, Oryza sativa
  CDS (1)..(1491)
atggcggcgcggtggtgcttcgcgttgctcttggcgctgtcggcggccgcggcgggggccggagccaagcggacgtgggagccggtgattcggatgccgggggaggtggtggaggaggaggtggccaccgtgccgcgcggcagcgagggcaccgaggaggaggagaaggacggcgtcgggacgaggtgggcggtgctcgtcgcgggctcctccggctacggtaactacaggcaccaggctgatgtatgccatgcataccagatattacggaagggagggctaaaggaggagaacattgtcgtgtttatgtatgacgacattgccaataatatacttaacccgagaccaggggttattgtcaatcatccacagggtgaagatgtttatgcaggagttccgaaggattacactggagacgaagtcactgcaaaaaacttttacgcggttctcttgggcaataaaactgcagttactgggggtagtaggaaggtcatagatagcaaaccaaatgaccacatatttatcttctactctgatcatgggggtcctggagttcttggtatgcccaatctgccatatctttatgctgctgacttcatgaaggtgttacaagaaaaacatgcctccaatacttacgctaaaatggttatatatgtagaagcgtgtgaaagtggcagtattttcgaaggtttgatgccagaggaccttaatatttatgtcacaacagcgtctaatgcagaagagagtagttgggggacgtactgcccaggaatggaaccatcgcctccttccgagtacatcacctgcttaggtgacctatacagcgtttcttggatggaagacagtgagactcacaatctgaaggaggaatcaattaagaagcagtacgaagtggttaagaagcgtacctctgacatgaacagctacggtgctggctctcatgttatggagtacggggacaggacattcaaggatgacaagctttacctataccaaggtttcgaccctgcaaatgccgaagttaagaacaagctatcatgggaaggcccaaaggctgcagtcaaccaaagagatgcagatcttcttttcctctggagaaggtatgagctgttacatgacaagtccgaagagaagctgaaagctctgagggagatcagtgacactgttatgcataggaagcttcttgacagcagtgttgatcttgtcggaaaacttctctttggatttggaaatgggccttctgtgcttcaagctgttagaccttctggtcagccactcgttgatgattgggattgtttgaagagaatggtacggatctttgagtcgcattgcggaccgctcactcagtacggtatgaagcacatgagggcgtttgctaatatttgcaacaacggtatctctggcgcttcaatgaaggaagcaagcatcgctacttgcagcagtcacaactcgggtagatggagctcgctggtgcaggggtacagtgcttga

SEQ ID NO: 127084 - protein, 496 aa, Oryza sativa
MAARWCFALLLALSAAAAGAGAKRTWEPVIRMPGEVVEEEVATVPRGSEGTEEEEKDGVGTRWAVLVAGSSGYGNYRHQADVCHAYQILRKGGLKEENIVVFMYDDIANNILNPRPGVIVNHPQGEDVYAGVPKDYTGDEVTAKNFYAVLLGNKTAVTGGSRKVIDSKPNDHIFIFYSDHGGPGVLGMPNLPYLYAADFMKVLQEKHASNTYAKMVIYVEACESGSIFEGLMPEDLNIYVTTASNAEESSWGTYCPGMEPSPPSEYITCLGDLYSVSWMEDSETHNLKEESIKKQYEVVKKRTSDMNSYGAGSHVMEYGDRTFKDDKLYLYQGFDPANAEVKNKLSWEGPKAAVNQRDADLLFLWRRYELLHDKSEEKLKALREISDTVMHRKLLDSSVDLVGKLLFGFGNGPSVLQAVRPSGQPLVDDWDCLKRMVRIFESHCGPLTQYGMKHMRAFANICNNGISGASMKEASIATCSSHNSGRWSSLVQGYSA

SEQ ID NO: 127085 - DNA, 1344 bp, Oryza sativa
  CDS (1)..(1344)
atggcggcgcggtggtgcttcgcgttgctcttggcgctgtcggcggccgcggcgggggccggagccaagcggacgtgggagccggtgattcggatgccgggggaggtggtggaggaggaggtggccaccgtgccgcgcggcagcgagggcaccgaggaggaggagaaggacggcgtcgggacgaggtgggcggtgctcgtcgcgggctcctccggctacggtaactacaggcaccaggctgatgtatgccatgcataccagatattacggaagggagggctaaaggaggagaacattgtcgtgtttatgtatgacgacattgccaataatatacttaacccgagaccaggggttattgtcaatcatccacagggtgaagatgtttatgcaggagttccgaaggattacactggagacgaagtcactgcaaaaaacttttacgcggttctcttgggcaataaaactgcagttactgggggtagtaggaaggtcatagatagcaaaccaaatgaccacatatttatcttctactctgatcatgggggtcctggagttcttggtatgcccaatctgccatatctttatgctgctgacttcatgaaggtgttacaagaaaaacatgcctccaatacttacgctaaaatggttatatatgtagaagcgtgtgaaagtggcagtattttcgaaggtttgatgccagaggaccttaatatttatgtcacaacagcgtctaatgcagaagagagtagttgggggacgtactgcccaggaatggaaccatcgcctccttccgagtacatcacctgcttaggtgacctatacagcgtttcttggatggaagacagtgagactcacaatctgaaggaggaatcaattaagaagcagtacgaagtggttaagaagcgtacctctgacatgaacagctacggtgctggctctcatgttatggagtacggggacaggacattcaaggatgacaagctttacctataccaaggtttcgaccctgcaaatgccgaagttaagaacaagctatcatgggaaggcccaaaggctgcagtcaaccaaagagatgcagatcttcttttcctctggagaaggtatgagctgttacatgacaagtccgaagagaagctgaaagctctgagggagatcagtgacactgttatgcataggaagcttcttgacagcagtgttgatcttgtcggaaaacttctctttggatttggaaatgggccttctgtgcttcaagctgttagaccttctggtcagccactcgttgatgattgggattgtttgaagagaatggtaaagttggaaacttctttatactcggcttactga

SEQ ID NO: 127086 - protein, 447 aa, Oryza sativa
MAARWCFALLLALSAAAAGAGAKRTWEPVIRMPGEVVEEEVATVPRGSEGTEEEEKDGVGTRWAVLVAGSSGYGNYRHQADVCHAYQILRKGGLKEENIVVFMYDDIANNILNPRPGVIVNHPQGEDVYAGVPKDYTGDEVTAKNFYAVLLGNKTAVTGGSRKVIDSKPNDHIFIFYSDHGGPGVLGMPNLPYLYAADFMKVLQEKHASNTYAKMVIYVEACESGSIFEGLMPEDLNIYVTTASNAEESSWGTYCPGMEPSPPSEYITCLGDLYSVSWMEDSETHNLKEESIKKQYEVVKKRTSDMNSYGAGSHVMEYGDRTFKDDKLYLYQGFDPANAEVKNKLSWEGPKAAVNQRDADLLFLWRRYELLHDKSEEKLKALREISDTVMHRKLLDSSVDLVGKLLFGFGNGPSVLQAVRPSGQPLVDDWDCLKRMVKLETSLYSAY

SEQ ID NO: 127087 - DNA, 1494 bp, Oryza sativa
  CDS (1)..(1494)
atggctgcgcggtgctgggtatggggcttcgtcgtcgcgctcctggctgtggcggcggcggcggatggggaggaggaggaggggaagtgggagccgctgattcggatgccgacggaggaaggggacgacgctgaggctgctgctcccgctcctgctcctgcggcggcggattacggggggacgaggtgggcggtgctcgtcgccggctcctccggctacgggaactaccggcaccaggccgatgtgtgccatgcgtaccagattctgcagaagggaggagtgaaggaggagaacattgtggtgtttatgtatgatgacattgcccataacattctcaatccaaggcctgggaccatcatcaaccatcctaaaggtggagatgtttatgctggtgttccaaaggactacactggtcaccaggtcaccactgagaacttctttgctgttctcttgggcaataaaaccgcagttactggagggagtgggaaggttatagacagcaaaccagaggatcacatcttcatctattactcagatcatgggggtcctggagttcttggtatgcctaacctgccgtatctttatgctggtgattttattaaagtgttacaaaagaaacatgcttccaacagctactcgaaaatggttatatatgtcgaagcatgtgaaagtggcagtatcttcgagggcttaatgccagaaaatcttaatatttatgtcacaacagcatccaatgcagttgagaatagttggggaacatactgccctggggaggaaccatcacctcctcctgaatatattacatgtctaggtgacatgtacagtgttgcttggatggaggacagtgagactcataatctaaagaaggaaactatcgaggatcagtatgagctggttaaaaaaagaacatcaaatgcaaataagttaaatgagggctctcatgtcatggaatatggtgacaagacattcaaggatgagaagctcttcctctatcaaggttttaatcctgcaaatggcaacatcacaaatgaattgatttggccagtaccaaaggctacagtcaatcaaagagatgccgatcttcttttcatgtggaagaggtatgagcagttgaatggggtgtctgaagacaagctgagggctcttagggagatagaagacaccatagcacacaggaagcatcttgacagcagtatcgatttcatcgggaagcttgtgtttggttttgaaaatgggcctttagcccttgaggctgcaagaagctctggtcaaccattagtcgacaactgggattgtttgaagaagatggtgcgaatttttgaatctcaatgtggatcactcactcagtatggcatgaaatacatgagagcatttgcaaacatatgcaacaacggtgtctctgaggccaaaatgatggaagcaagtatcaacgcttgcggccgttacaactcggcgagatggagcccaatgactgaaggaggacacagtgcttga

SEQ ID NO: 127088 - protein, 497 aa, Oryza sativa
MAARCWVWGFVVALLAVAAAADGEEEEGKWEPLIRMPTEEGDDAEAAAPAPAPAAADYGGTRWAVLVAGSSGYGNYRHQADVCHAYQILQKGGVKEENIVVFMYDDIAHNILNPRPGTIINHPKGGDVYAGVPKDYTGHQVTTENFFAVLLGNKTAVTGGSGKVIDSKPEDHIFIYYSDHGGPGVLGMPNLPYLYAGDFIKVLQKKHASNSYSKMVIYVEACESGSIFEGLMPENLNIYVTTASNAVENSWGTYCPGEEPSPPPEYITCLGDMYSVAWMEDSETHNLKKETIEDQYELVKKRTSNANKLNEGSHVMEYGDKTFKDEKLFLYQGFNPANGNITNELIWPVPKATVNQRDADLLFMWKRYEQLNGVSEDKLRALREIEDTIAHRKHLDSSIDFIGKLVFGFENGPLALEAARSSGQPLVDNWDCLKKMVRIFESQCGSLTQYGMKYMRAFANICNNGVSEAKMMEASINACGRYNSARWSPMTEGGHSA

SEQ ID NO: 127089 - DNA, 1425 bp, Oryza sativa
  CDS (1)..(1425)
atggggcgcggtctcctctgcctgctgctgctgcagctcgtcggcctcgtcgtcgccggcggtgggcggtggcggtggcaggaggagttcctccggctgccgtcgtcggatgagacgacgaggtgggcggtgctgatcgcggggtcgaatgggttctataactaccggcaccaggcggacgtgtgccacgcgtaccagatcatgaggaagggaggcgtggaggagcaaaacatcgtggtgatgatgtacgacgacatcgcccacaaccccgacaaccccaggcctgggctcatcttcaaccacccttccggccccgacgtctacgccggcgtccccaaggattacaccggcgacgacgtcaacgtcaacaacttcctcgccgtcctcctcggcaaccgctccgccctcaccggctccggcagcggcaaggtcgtcgccagcggccccaacgaccacgtcttcgtctactacgccgaccacggcggccccggcgtcctgagcatgccagccgacggcgagtacctgtacgccgacgacctggtcaaggcgctcaagaagaagcacgccggcggcgggtacaagagcctggtcgtgtacgtggaggcgtgcgagtccggcagcatcttcgagggcctcctgccttccgacatctccgtgtacgccaccacggcctccaacgcggaggagagcagctggggcacctactgccccggcgacgaccacgacgccccggcggcggagttcgacacctgcctcggggacctctacagcgtggcgtggatggaggacgcggaggcgcaccaggaggggcgcctcgccgagacgctgcggcagcagtacaggacggtgaagaaccggacgtccgacgagggcacctacacgctcggctcccacgtcatgcagtacggcgacatggcgctcgcaccgcagagcctggacctctactacatggatacatcacctgcgacggcgaacgaccacaaattagctgctgctggcgccaaaggcagccactcctacactgtgtctgtgaatcagcgcgacgccgatctgctctacttgtggcgcaagtaccggagagccggcgaggggacggcagagaaggtggaggctcgggagcggcttgtgcaggagatgggacggcgatcgcgcgtggacagaagcgtggagatgatcgggggcctcctcttgggcggcgccaagcacaagcagcaggttgtgcgggagcgggctgcgctggttgaggactgggagtgcctcaggtcgatggtgcggacgttcgaggatcagtgtgggtcgctgggacagtacgggataaagcacatgcgctccttcgccaacatctgcaacgccggcgtcccccaccacgccatggccaaggccgcctccctggcctgtccatcccctcctccgttacacttatga

SEQ ID NO: 127090 - protein, 474 aa, Oryza sativa
MGRGLLCLLLLQLVGLVVAGGGRWRWQEEFLRLPSSDETTRWAVLIAGSNGFYNYRHQADVCHAYQIMRKGGVEEQNIVVMMYDDIAHNPDNPRPGLIFNHPSGPDVYAGVPKDYTGDDVNVNNFLAVLLGNRSALTGSGSGKVVASGPNDHVFVYYADHGGPGVLSMPADGEYLYADDLVKALKKKHAGGGYKSLVVYVEACESGSIFEGLLPSDISVYATTASNAEESSWGTYCPGDDHDAPAAEFDTCLGDLYSVAWMEDAEAHQEGRLAETLRQQYRTVKNRTSDEGTYTLGSHVMQYGDMALAPQSLDLYYMDTSPATANDHKLAAAGAKGSHSYTVSVNQRDADLLYLWRKYRRAGEGTAEKVEARERLVQEMGRRSRVDRSVEMIGGLLLGGAKHKQQVVRERAALVEDWECLRSMVRTFEDQCGSLGQYGIKHMRSFANICNAGVPHHAMAKAASLACPSPPPLHL

SEQ ID NO: 127091 - DNA, 1359 bp, Oryza sativa
  CDS (1)..(1359)
atggccatgggtgtcctcctgctgatgctgatgctgatgcatctgcaagttgggctgggcctcggcaacggcgggctgtggcaggagttcctccggctgccgacggagaatggggggacgaagtgggcgttgctcatcgcggggtcgaaggggtacgaaaactaccgtcaccaggcagacgtgtgccacgcgtaccagataatgaagaagggaggactcaaggaccagaacatcgtggttatgatgtacgacgacatcgcctataaccccgagaatcctcacaagggtgtcatcatcaacaaacccaacggtccgaacgtctacgctggagtcccaaaggattacaatgggaatgacgtgaataagaacaacttcctggccgtgttgctgggcaagaagtcggctctcaccggcgccggcagcggcaaggtcatcagcagcggccccaacgaccatatcttcgtctattactcagatcatggcagccccggatacgtctgcatgccatcgggggggaacctgcacgcgaacgatctttctcaagcactgaagaataagaacgcggccggcgcgtacaagaacctggtggtgtacgtggaggcgtgcgagtcgggtagcatgttcgagggccagcttcttccgtccaacatcggcgtgtacgcgatgacggcgtcgaacgcgacggagaacagctgggccacctactgcgacacgccggagtacaacacctgcctcggcgacctcttcagcgtggcctggatggaggacgccgacgcgcgccgccccggcgatcccgagacgctcggccagctgtacgacatcgtcgcgaagcgcaccaacctgtcacacgtcagtcggtacggcgacctaagcctctcctcccaacccgtcagcctctactacttgccccccggccccggcacctcaacagctagtgccgtcatcgatgacgaaggccgcgtcggcggcgtgaaccaacgggatgcgggactcgtctacctgtggcgtaagtactacgaggagaaatcggtggaggcatgggagcgccttctccgagaaatggagaggcgatcacgcgtcgacagcagcgtcgacctcatcggagacatcctcttgggcgactcctccaagaagaagctcctgcacatccggcgtccggcggggcagccgctggttgacgactgggattgcctcaagtccatggtgcgcacgttcgaggctcactgtggcccgctggggcagtatgggatgaagcacacacgcgccttcgccaacatgtgcaacgccgccctcgaccacaaccacatggcaaaggccgcctccaaggcctgcatgcacccccctgtcattacttattaa

SEQ ID NO: 127092 - protein, 452 aa, Oryza sativa
MAMGVLLLMLMLMHLQVGLGLGNGGLWQEFLRLPTENGGTKWALLIAGSKGYENYRHQADVCHAYQIMKKGGLKDQNIVVMMYDDIAYNPENPHKGVIINKPNGPNVYAGVPKDYNGNDVNKNNFLAVLLGKKSALTGAGSGKVISSGPNDHIFVYYSDHGSPGYVCMPSGGNLHANDLSQALKNKNAAGAYKNLVVYVEACESGSMFEGQLLPSNIGVYAMTASNATENSWATYCDTPEYNTCLGDLFSVAWMEDADARRPGDPETLGQLYDIVAKRTNLSHVSRYGDLSLSSQPVSLYYLPPGPGTSTASAVIDDEGRVGGVNQRDAGLVYLWRKYYEEKSVEAWERLLREMERRSRVDSSVDLIGDILLGDSSKKKLLHIRRPAGQPLVDDWDCLKSMVRTFEAHCGPLGQYGMKHTRAFANMCNAALDHNHMAKAASKACMHPPVITY

SEQ ID NO: 127093 - DNA, 1401 bp, Brassica napus
  CDS (1)..(1401)
atgtcttctcttggtcatttacttgttcttgtgtttctctatgttctgcttttttactcagctgattctcgcaaaccccaagtccttcatgacactggatctagcgaagatggtgcaaaaggcacaagatgggctgttctaattgctggatcaagttattattataactacaggcatcaggctgacatatgccatgcatatcaagttctgcgaaaagggggtctaaaagatgaaaacattattgtgtttatgtatgatgatatcgcgtttaaccctgagaatcccaggcctggagttatcatcaatagacctgatggtggagatgtttatgaaggcgttcctaaggactacactaaagaggctgttaatgtgaagaacttttataatgtgatacttggaaacgaaagtggcatcacaggaggaagtggcaaagttgtgaaaagtggtcctaatgatagtatattcatctactatgctgaccatggagctcctggtttactatcgatgcctgatggtgaagatatccatgcaaaagatttcattaaagtcttggagaagatgcataagcttaaaagatacaagaagatggtgatttatgttgaagcatgtgagtctggaagtatgtttgaagggattttaaagaccaatctaaacatacttgcagtaactgcttctaatgcgacagagagcagttttggaatctactgtcctggtgaatatcctcctcctcctcctgaatataatggtgtttgtctcggcgatacatttagcgtctcttggcttgaggacagtgagcttcatgacatgagtaaagagacattgaagcagcaataccaagctgtaaagagaagaacaggtcctgatgctgaaccagggacgagttctcatgtaagccgtttcggatcaaaggcgcttcttaaagactatcttgtctcttacattggaaccaatcctgaaaacgaaaacttcacttctgctggattcactgcttcaccaatctctaattcaagctcggtcaatactcgcgatatccctttgttatatctcaagagcaagattcaaagatctccaatggagtcacctgaaagacaagaacttcagaagaagctgtttgaagaaatgaatcataggagacaaatcgatcagaacattgtggagattcttaaactttcacttaagcaaaccaatgtctcaaatctcttaatttccacaagaacaacaggacaacctcttgtagacgactgggattgcttcaagactctggttaatagcttcaagaatcactgtggagcaacgatggattacggattgaagtatacaggagcgcttgccaatatctgcaatatgggagtggatgtgaagcaaactgtttcagctattgaacacgcttgtgcacattaa

SEQ ID NO: 127094 - protein, 466 aa, Brassica napus
MSSLGHLLVLVFLYVLLFYSADSRKPQVLHDTGSSEDGAKGTRWAVLIAGSSYYYNYRHQADICHAYQVLRKGGLKDENIIVFMYDDIAFNPENPRPGVIINRPDGGDVYEGVPKDYTKEAVNVKNFYNVILGNESGITGGSGKVVKSGPNDSIFIYYADHGAPGLLSMPDGEDIHAKDFIKVLEKMHKLKRYKKMVIYVEACESGSMFEGILKTNLNILAVTASNATESSFGIYCPGEYPPPPPEYNGVCLGDTFSVSWLEDSELHDMSKETLKQQYQAVKRRTGPDAEPGTSSHVSRFGSKALLKDYLVSYIGTNPENENFTSAGFTASPISNSSSVNTRDIPLLYLKSKIQRSPMESPERQELQKKLFEEMNHRRQIDQNIVEILKLSLKQTNVSNLLISTRTTGQPLVDDWDCFKTLVNSFKNHCGATMDYGLKYTGALANICNMGVDVKQTVSAIEHACAH

SEQ ID NO: 127095 - DNA, 1482 bp, Zea mays
  CDS (1)..(1482)
atgatggcagctgcggcgtggttgtgtggactcctctcgctcctggccctcgccggcgctgcgtcggctgcggatggggcggagggtgagtgggagccgctgatacggatgccgacggcgaaggggagtgacgctgcttctgctccggctgctgaggatgatgaagtggggacgaggtgggccgtgctcgtcgccggatccttcggttatgggaactaccggcaccaggccgatgtgtgccatgcgtaccagatactgcagaagggaggagtgaagaaggagaacattgtggtgttcatgtatgatgatattgcccacaacattctgaaccctaggcctggagttatcattaaccatcctaaaggagcaaatgtttatgatggtgttccaaaggattacacaggtgatcaggtcactactgaaaacttctttgctgtcctcttgggcaatagaagtgctaccactggagggagtaagaaggtgatagacagcaaacctaatgaccacatcttcatctattactcagatcatgggggtcctggagttcttggtatgccgaacctgccatatctgtatgctggtgacttcatcaaggtcttgaaaaagaagcatgcttccaatagctactcaaaaatggttatatatgttgaagcatgtgaaagtggcagtatctttgaggggttaatgcctgaagatctaaatatttatgtcacaacagcctcaaatccagttgaaaatagttggggaacttactgccctgggatggaaccatcaccccctcctgagtacattacctgtttaggtgatttgtacagtgtttcttggatggaagacagtgaaacccacaatctaaagaaggaaaccatcaaggatcagtatgaagtggtgaaaacaagaacctcaaactcaaataagtacaaagagggttctcatgttatggagtatggtgataagaccttcaaggatgagaagctttccttttatcaaggttttgatcctgctaatgccaacattgcaaacatgctgctttggccaggcccaaagggtgcagtcaatcaaagagatgctgatcttctcttcatgtggaagaggtacgagcagttaaatggggggaccgaagagaagctgagggctctcatagagattaaagaaactgttcagcacaggaagcatcttgacagcagtatcgatttcgttgggaggctcgtcttcggatttgagaaagggccttcgatgcttgaggctgttagaacctctggtcaaccattagtcgatgactgggactgtttgaagaggatggtgcggattttcgagtcccagtgtggttcacttactcagtacggcatgaagtacatgagagcgtttgcaaacatctgcaacagtggtatatctgagatgaaaatgagggagtcgagcatcagcgcttgcagcagctacaactcggcgaggtggagcccgatggctcggggacacagtgcttga

SEQ ID NO: 127096 - protein, 493 aa, Zea mays
MMAAAAWLCGLLSLLALAGAASAADGAEGEWEPLIRMPTAKGSDAASAPAAEDDEVGTRWAVLVAGSFGYGNYRHQADVCHAYQILQKGGVKKENIVVFMYDDIAHNILNPRPGVIINHPKGANVYDGVPKDYTGDQVTTENFFAVLLGNRSATTGGSKKVIDSKPNDHIFIYYSDHGGPGVLGMPNLPYLYAGDFIKVLKKKHASNSYSKMVIYVEACESGSIFEGLMPEDLNIYVTTASNPVENSWGTYCPGMEPSPPPEYITCLGDLYSVSWMEDSETHNLKKETIKDQYEVVKTRTSNSNKYKEGSHVMEYGDKTFKDEKLSFYQGFDPANANIANMLLWPGPKGAVNQRDADLLFMWKRYEQLNGGTEEKLRALIEIKETVQHRKHLDSSIDFVGRLVFGFEKGPSMLEAVRTSGQPLVDDWDCLKRMVRIFESQCGSLTQYGMKYMRAFANICNSGISEMKMRESSISACSSYNSARWSPMARGHSA

SEQ ID NO: 127097 - DNA, 20 bp, Artificial sequence
  primer
atggagtctggaaggggagc

SEQ ID NO: 127098 - DNA, 23 bp, Artificial sequence
  primer
ttaccaactccttaaaagttccg

SEQ ID NO: 127099 - protein, 500 aa, Artificial sequence
  consensus sequence
  Variant (2)..(5): Xaa in position 2 to 5 is any amino acid
  Variant (6)..(27): Xaa in position 6 to 27 is any or no amino acid
  Variant (35)..(35): Xaa in position 35 is any amino acid
  Variant (39)..(39): Xaa in position 39 is any amino acid
  Variant (42)..(42): Xaa in position 42 is any amino acid
  Variant (47)..(77): Xaa in position 47 to 77 is any amino acid
  Variant (81)..(81): Xaa in position 81 is any amino acid
  Variant (87)..(89): Xaa in position 87 to 89 is any amino acid
  Variant (93)..(93): Xaa in position 93 is any amino acid
  Variant (95)..(95): Xaa in position 95 is any amino acid
  Variant (99)..(99): Xaa in position 99 is any amino acid
  Variant (108)..(111): Xaa in position 108 to 111 is any amino acid
  Variant (117)..(117): Xaa in position 117 is any amino acid
  Variant (121)..(121): Xaa in position 121 is any amino acid
  Variant (123)..(123): Xaa in position 123 is any amino acid
  Variant (125)..(125): Xaa in position 125 is any amino acid
  Variant (129)..(129): Xaa in position 129 is any amino acid
  Variant (138)..(139): Xaa in position 138 to 139 is any amino acid
  Variant (141)..(143): Xaa in position 141 to 143 is any amino acid
  Variant (145)..(146): Xaa in position 145 to 146 is any amino acid
  Variant (148)..(149): Xaa in position 148 to 149 is any amino acid
  Variant (152)..(152): Xaa in position 152 is any amino acid
  Variant (154)..(155): Xaa in position 154 to 155 is any amino acid
  Variant (156)..(157): Xaa in position 156 to 157 is any or no amino acid
  Variant (159)..(159): Xaa in position 159 is any amino acid
  Variant (165)..(166): Xaa in position 165 to 166 is any amino acid
  Variant (168)..(168): Xaa in position 168 is any amino acid
  Variant (170)..(170): Xaa in position 170 is any amino acid
  Variant (172)..(172): Xaa in position 172 is any amino acid
  Variant (175)..(176): Xaa in position 175 to 176 is any amino acid
  Variant (178)..(178): Xaa in position 178 is any amino acid
  Variant (182)..(182): Xaa in position 182 is any amino acid
  Variant (185)..(185): Xaa in position 185 is any amino acid
  Variant (187)..(187): Xaa in position 187 is any amino acid
  Variant (190)..(193): Xaa in position 190 to 193 is any amino acid
  Variant (194)..(195): Xaa in position 194 to 195 is any or no amino acid
  Variant (198)..(198): Xaa in position 198 is any amino acid
  Variant (200)..(203): Xaa in position 200 to 203 is any amino acid
  Variant (205)..(206): Xaa in position 205 to 206 is any amino acid
  Variant (210)..(212): Xaa in position 210 to 212 is any amino acid
  Variant (214)..(216): Xaa in position 214 to 216 is any amino acid
  Variant (218)..(218): Xaa in position 218 is any amino acid
  Variant (220)..(220): Xaa in position 220 is any amino acid
  Variant (227)..(227): Xaa in position 227 is any amino acid
  Variant (229)..(229): Xaa in position 229 is any amino acid
  Variant (233)..(234): Xaa in position 233 to 234 is any amino acid
  Variant (235)..(235): Xaa in position 235 is any or no amino acid
  Variant (237)..(241): Xaa in position 237 to 241 is any amino acid
  Variant (243)..(243): Xaa in position 243 is any amino acid
  Variant (250)..(250): Xaa in position 250 is any amino acid
  Variant (252)..(252): Xaa in position 252 is any amino acid
  Variant (258)..(258): Xaa in position 258 is any amino acid
  Variant (262)..(263): Xaa in position 262 to 263 is any amino acid
  Variant (264)..(264): Xaa in position 264 is any or no amino acid
  Variant (266)..(267): Xaa in position 266 to 267 is any amino acid
  Variant (268)..(269): Xaa in position 268 to 269 is any or no amino acid
  Variant (271)..(272): Xaa in position 271 to 272 is any amino acid
  Variant (282)..(282): Xaa in position 282 is any amino acid
  Variant (288)..(289): Xaa in position 288 to 289 is any amino acid
  Variant (291)..(291): Xaa in position 291 is any amino acid
  Variant (293)..(293): Xaa in position 293 is any amino acid
  Variant (294)..(296): Xaa in position 294 to 296 is any or no amino acid
  Variant (298)..(299): Xaa in position 298 to 299 is any amino acid
  Variant (300)..(301): Xaa in position 300 to 301 is any or no amino acid
  Variant (304)..(305): Xaa in position 304 to 305 is any amino acid
  Variant (308)..(308): Xaa in position 308 is any amino acid
  Variant (311)..(312): Xaa in position 311 to 312 is any amino acid
  Variant (313)..(319): Xaa in position 313 to 319 is any or no amino acid
  Variant (324)..(324): Xaa in position 324 is any amino acid
  Variant (327)..(334): Xaa in position 327 to 334 is any amino acid
  Variant (335)..(335): Xaa in position 335 is any or no amino acid
  Variant (337)..(338): Xaa in position 337 to 338 is any amino acid
  Variant (340)..(340): Xaa in position 340 is any amino acid
  Variant (342)..(357): Xaa in position 342 to 357 is any amino acid
  Variant (358)..(367): Xaa in position 358 to 367 is any or no amino acid
  Variant (374)..(374): Xaa in position 374 is any amino acid
  Variant (376)..(378): Xaa in position 376 to 378 is any amino acid
  Variant (380)..(398): Xaa in position 380 to 398 is any amino acid
  Variant (399)..(408): Xaa in position 399 to 408 is any or no amino acid
  Variant (410)..(412): Xaa in position 410 to 412 is any amino acid
  Variant (414)..(422): Xaa in position 414 to 422 is any amino acid
  Variant (423)..(424): Xaa in position 423 to 424 is any or no amino acid
  Variant (426)..(430): Xaa in position 426 to 430 is any amino acid
  Variant (431)..(432): Xaa in position 431 to 432 is any or no amino acid
  Variant (434)..(436): Xaa in position 434 to 436 is any amino acid
  Variant (438)..(439): Xaa in position 438 to 439 is any amino acid
  Variant (441)..(442): Xaa in position 441 to 442 is any amino acid
  Variant (444)..(444): Xaa in position 444 is any amino acid
  Variant (448)..(448): Xaa in position 448 is any amino acid
  Variant (452)..(453): Xaa in position 452 to 453 is any amino acid
  Variant (455)..(456): Xaa in position 455 to 456 is any amino acid
  Variant (458)..(458): Xaa in position 458 is any amino acid
  Variant (459)..(460): Xaa in position 459 to 460 is any or no amino acid
  Variant (463)..(464): Xaa in position 463 to 464 is any amino acid
  Variant (465)..(470): Xaa in position 465 to 470 is any or no amino acid
  Variant (473)..(480): Xaa in position 473 to 480 is any amino acid
  Variant (482)..(482): Xaa in position 482 is any amino acid
  Variant (485)..(485): Xaa in position 485 is any amino acid
  Variant (487)..(499): Xaa in position 487 to 499 is any amino acid
PXXXXXXXXXXXXXXXXXXXXXXXXXXGTRWAVLXAGSXGYXNYRHXXXXXXXXXXXXXXXXXXXXXXXXXXXXXXXQADXCHAYQXXXKGGXKXENIXVFMYDDIAXXXXNPRPGXIINXPXGXDVYXGVPKDYTGXXVXXXNXXAXXLGXKXXXXGXGSGKVXXSXPXDXIFXXYXDHGXPGXLXMPXXXXXXYAXDXXXXLXXKHAXXXYXXXVXYXEACESGXSXFEGXXXPXXXXXYXTTASNAXEXSWGTYXCPGXXXPXXXXEXXTCLGDLYSVXWMEDSXXHXLXXXXEXXXXQYXXVKXRTXXXXXXXXXSHVMXYGXXXXXXXXXLXXYXGXXXXXXXXXXXXXXXXXXXXXXXXXXVNQRDAXLXXXWXXXXXXXXXXXXXXXXXXXXXXXXXXXXXRXXXDXXXXXXXXXXXGXXXXXXXLXXXRXXGXXLXDDWXCLKXXVXXFXXXCGXXXXXXXXYGXXXXXXXXNXCNXGXXXXXXXXXXXXXC

SEQ ID NO: 127100 - protein, 51 aa, Artificial sequence
  protein pattern
  Variant (2)..(2): Xaa in position 2 is any amino acid
  Variant (3)..(3): Xaa in position 3 is any or no amino acid
  Variant (11)..(11): Xaa in position 11 is Ile or Val
  Variant (17)..(18): Xaa in position 17 to 18 is any amino acid
  Variant (19)..(19): Xaa in position 19 is any or no amino acid
  Variant (21)..(21): Xaa in position 21 is any or no amino acid
  Variant (24)..(24): Xaa in position 24 is Ile, Leu or Val
  Variant (26)..(26): Xaa in position 26 is Asp, Glu or Lys
  Variant (27)..(27): Xaa in position 27 is Glu or Gln
  Variant (30)..(30): Xaa in position 30 is Ile or Val
  Variant (32)..(32): Xaa in position 32 is Phe, Leu or Met
  Variant (38)..(38): Xaa in position 38 is Ala or Ser
  Variant (39)..(42): Xaa in position 39 to 42 is any amino acid
  Variant (45)..(45): Xaa in position 45 is His or Arg
  Variant (46)..(46): Xaa in position 46 is any amino acid
  Variant (48)..(48): Xaa in position 48 is any amino acid
  Variant (49)..(49): Xaa in position 49 is Ile, Leu or Val
  Variant (50)..(50): Xaa in position 50 is Ile or Val
YXXNYRHQADXCHAYQXXXKXGGXKXXNIXVXMYDDIXXXXXNPXXGXXXN

SEQ ID NO: 127101 - protein, 31 aa, Artificial sequence
  protein pattern
  Variant (2)..(2): Xaa in position 2 is any amino acid
  Variant (4)..(4): Xaa in position 4 is any amino acid
  Variant (5)..(5): Xaa in position 5 is Asp, Glu or Asn
  Variant (6)..(6): Xaa in position 6 is Leu or Val
  Variant (8)..(8): Xaa in position 8 is any amino acid
  Variant (17)..(18): Xaa in position 17 to 18 is any amino acid
  Variant (19)..(19): Xaa in position 19 is Ala, Cys or Val
  Variant (20)..(20): Xaa in position 20 is Asn, Ser or Thr
  Variant (21)..(22): Xaa in position 21 to 22 is any amino acid
  Variant (24)..(27): Xaa in position 24 to 27 is any amino acid
  Variant (28)..(28): Xaa in position 28 is any or no amino acid
  Variant (30)..(30): Xaa in position 30 is any or no amino acid
PXGXXXYXGVPKDYTGXXXXXXNXXXXXLXG

SEQ ID NO: 127102 - protein, 11 aa, Artificial sequence
  protein pattern
  Variant (2)..(2): Xaa in position 2 is Thr or Val
  Variant (3)..(3): Xaa in position 3 is Lys or Arg
  Variant (6)..(6): Xaa in position 6 is Ile, Leu or Val
  Variant (8)..(8): Xaa in position 8 is Phe, Ile, Leu or Val
GXXWAXLXAGS

SEQ ID NO: 127103 - DNA, 486 bp, Synechocystis sp.
  CDS (1)..(486): transl_table=11
atgagtattatttgtcttgatacaaatattgtcgtgtggggcattcaaaggcaatcatcctccgaccgtcaagaaaacatcccaaaggcagaagctctaatgaatcagctggaagccaaccgcaaccatatcattataccggctcccgtttttgccgagttactgatgggatgcaatcctcaagacaacccaagagtcatggaagagatttctcgaaggaccaaaatagtaccatttgacgttccagcgagtattgaatacggcaaaatccatatcaataagtgggggctgagggaagaattaggcatccagcgggaaaagatgaaaattgacatgatggtcttagctgttgccctagcccagaaagcatcatgcatctactcggaagacgatgacatacacaagttgggcaaggaaatcatcgaggtccgcagaatgcccagcatagcccttcagggaaatctccttgatgcccaaaatacctaa

SEQ ID NO: 127104 - protein, 161 aa, Synechocystis sp.
MSIICLDTNIVVWGIQRQSSSDRQENIPKAEALMNQLEANRNHIIIPAPVFAELLMGCNPQDNPRVMEEISRRTKIVPFDVPASIEYGKIHINKWGLREELGIQREKMKIDMMVLAVALAQKASCIYSEDDDIHKLGKEIIEVRRMPSIALQGNLLDAQNT

SEQ ID NO: 127105 - DNA, 495 bp, Burkholderia xenovorans LB400
  CDS (1)..(495): transl_table=11
atgataatttttgatgcaaacgtacttatctcattgtccaccggggacgaaaacgacgagacgttcgaacgcctttccggactaattcaagatatcgttgcagcgaaaacagttattggcgttccggctccagcatgggccgaatttctctgtggtacgggattgggaacgtccagcgtaatccaggcgctcaagaagcgcagtgcaatcagaatccttccattcgacgagattgcggcgacggaactcgcggccatcgacgaggtgacgcgcgcgaaaggtggaaagaaaggcgcttccaaatctcattggcagaaaatcaaggtagatcgtcagatcctggctatcgcgcgcgtgcttcaggttacggcgatctacacagaggactcagacctgatcgctgaggcgacccgtttgggtatagccgtgtgtcgagttagagatatcccactgaagccaaagcaaagcacactcgacctgcccgacccagagtag

SEQ ID NO: 127106 - protein, 164 aa, Burkholderia xenovorans LB400
MIIFDANVLISLSTGDENDETFERLSGLIQDIVAAKTVIGVPAPAWAEFLCGTGLGTSSVIQALKKRSAIRILPFDEIAATELAAIDEVTRAKGGKKGASKSHWQKIKVDRQILAIARVLQVTAIYTEDSDLIAEATRLGIAVCRVRDIPLKPKQSTLDLPDPE

SEQ ID NO: 127107 - DNA, 23 bp, Artificial sequence
  primer
atgagtattatttgtcttgatac

SEQ ID NO: 127108 - DNA, 21 bp, Artificial sequence
  primer
ttaggtattttgggcatcaag

SEQ ID NO: 127109 - DNA, 876 bp, Synechocystis sp.
  CDS (1)..(876): transl_table=11
atggtcataagcgagcttttacccaacctagattccggcttaactactctccgcaccgccggctggggcgcaatggaaattcttcagtcctactacagtggccagaatcagaccaatttaaatgccaacgaagataaacaggatggccccgtaacagcggcggatttggcggccaatcaatatattttggctactttgcaagctacctttaacccggaagaatttggctatctaagcgaagaaacccaccagggcaacgaaccattaccccaggattgggtttggattattgaccccctcgatggcaccagggacttcattgataaaaccggggaatatgccctgcatattgctttgacctatcgccagcggccggtgttggccctagtgggcatgccggaagcccaaaagctttactatgccatccaaggtcagggctgttttcgagaaaccaaagccggggcaataaccccagtgaaggtgaagcctaaaactgaattagaatctttaaccctagtagtgagccgtagccatcgggaccaacgtttccaagatttgattgaccgtttaccctttggcgatcgccattatgtgggcagtgtgggctgtaaaatcgtcacgattttggagggacagagcgatgtgtacatttccctctccggtaaatccgccgctaaggattgggactttgcggccccggagttgattctcaccgaagcggggggagagtttacctattttgaccagacccctgtgttgtataaccggggcgacgtgcggcaatggggcggtatcctggctagcaatggttcccaccatggagctttgtgtgagcaagccgtggaaattttagctgaactagatcaaaataattaa

SEQ ID NO: 127110 - protein, 291 aa, Synechocystis sp.
MVISELLPNLDSGLTTLRTAGWGAMEILQSYYSGQNQTNLNANEDKQDGPVTAADLAANQYILATLQATFNPEEFGYLSEETHQGNEPLPQDWVWIIDPLDGTRDFIDKTGEYALHIALTYRQRPVLALVGMPEAQKLYYAIQGQGCFRETKAGAITPVKVKPKTELESLTLVVSRSHRDQRFQDLIDRLPFGDRHYVGSVGCKIVTILEGQSDVYISLSGKSAAKDWDFAAPELILTEAGGEFTYFDQTPVLYNRGDVRQWGGILASNGSHHGALCEQAVEILAELDQNN

SEQ ID NO: 127111 - DNA, 873 bp, Nostoc sp. PCC 7120
  CDS (1)..(873): transl_table=11
atgaaagacttacaagagatattagcgatcgctcgtgctgtaggttggggtgcagccgaaatattacaatcctattatcacggcacagccaaagactcaaatctcaacgtccagtataaacagaatgagcctgtcaccgttgccgatatcactgtcagtcaatatattttacaaaagctacaagctgctttaggacaagaagattttgtctacgtcagcgaagaaacctataaatcagaattatcggaaaatacaaagactacaactgattgggtgtggatcattgaccccttagacggaacccgtggttttattgaaaaaactggagattacgcagttcatattgctttagttaaagaacatcgaccagttttagcggtggtagcgataccggaagcagaaaaattatatttcgcgctcaaaaatagtggtacatttgtagaaacacgcaacaactccgaccttttacaactatctttaaaaaacacaaacaagtcattagaggatctcacgatagttgtcagccgttctcaccgtaatcaaaagttagactacttactagaaaggttgccttgtcagcagcaaaaatccgtgggtagcgttggttgcaagatagccactattctagaacagcaagcagacctttacatttccctatccggtaaatctgcacctaaagactgggacatagccgctccagagttaattttgacagaagctggtggtaagtttactcattttgacggcacgaacttacaatacagtaccggagacattaatcaatggggtggcttactggctagtaacggccaatatcatacagaactctgccagaaaatagaaaaaatattgatgcagttcgacgagatgtaa

SEQ ID NO: 127112 - protein, 290 aa, Nostoc sp. PCC 7120
MKDLQEILAIARAVGWGAAEILQSYYHGTAKDSNLNVQYKQNEPVTVADITVSQYILQKLQAALGQEDFVYVSEETYKSELSENTKTTTDWVWIIDPLDGTRGFIEKTGDYAVHIALVKEHRPVLAVVAIPEAEKLYFALKNSGTFVETRNNSDLLQLSLKNTNKSLEDLTIVVSRSHRNQKLDYLLERLPCQQQKSVGSVGCKIATILEQQADLYISLSGKSAPKDWDIAAPELILTEAGGKFTHFDGTNLQYSTGDINQWGGLLASNGQYHTELCQKIEKILMQFDEM

SEQ ID NO: 127113 - DNA, 921 bp, Drosophila melanogaster
  CDS (1)..(921)
atggctgcaactgctccggtaattatgcgcgtcatggcgtcctcgatcagcaccgccaagcgggctggcggcatcatacgcgacgtgctcaagaagggtgacctgggcatagtggacaagggcaagaacgatccgcagacggaggcagatcgctctgcccagcgttgcattatcgcctccttggccaaaaagttccccaccgtcaagatcattggcgaggagggtggatccgatctgaatgtctgcgacgactggctggtgaacgagttggatgaggaattcctgcagcacagttgccccgctgagtggaaggatgtcaagcccgaggactttgtcatatgggtagatcccctagacggcacagcggagtatacacagggacacgttgaacacgtgaccgtcctgatcggcatagccgtgaaggatgctgctgtgggcggcatcattcatcagccattctaccaacagcccgatggcgaaatgggtcgcaccatttggggcctgaagggtctgggcacgggaggattcacggcagtccccgcgccagccggccagttcatcataaccaccactcgctcgcattccaatgccctgcatcagcaagccctcaacgcattcgcatccacagaagttctgaaagtcggaggcgctgggttcaaagtgctccagctgctggagggaaaggcccacgcgtacgtcttcgccacgccgggctgcaagaagtgggacacctgcgcacccgaggccgttctagaggcccagggcggctgcctcaccaacatcaacggcgagcactacgcctacaatgcggatgtggagcacgtgaatcgacagggagtgctggccagcctgggacaggaccatgccgcgctggtggaaaagattcccgccgaggtgcgggcagcagtgggagccaagtga

SEQ ID NO: 127114 - protein, 306 aa, Drosophila melanogaster
MAATAPVIMRVMASSISTAKRAGGIIRDVLKKGDLGIVDKGKNDPQTEADRSAQRCIIASLAKKFPTVKIIGEEGGSDLNVCDDWLVNELDEEFLQHSCPAEWKDVKPEDFVIWVDPLDGTAEYTQGHVEHVTVLIGIAVKDAAVGGIIHQPFYQQPDGEMGRTIWGLKGLGTGGFTAVPAPAGQFIITTTRSHSNALHQQALNAFASTEVLKVGGAGFKVLQLLEGKAHAYVFATPGCKKWDTCAPEAVLEAQGGCLTNINGEHYAYNADVEHVNRQGVLASLGQDHAALVEKIPAEVRAAVGAK

SEQ ID NO: 127115 - DNA, 861 bp, Thermosynechococcus elongatus BP-1
  CDS (1)..(861): transl_table=11
atgttctcctcccttgatcttaagaagacccttgccaccctgcgccccattctttggcaggcccttgagcaactgcgccagttttaccgccaggtgaaggatctaacggtgcaggataaaggcggtgatcccgtcaccctagcggatcagcaaattgatgcctttttgcgccatgccctccaagagcattttccggcctcggagtttggctatctcacagaagaaacctacacagccggtcagtccctatcgcagccctatgtgtggatcattgatcctttggacggcacctccgactttctgcaacagacgggggagtacgcaattcacgttgcccttgtccgtgaacaccgcccctgtttagctgctgtggtctggcccgaacaggaggtgatctacaccgccattgccggtggtggcacctatcgagaaacccgccaccgttcaacacgcctgcaagttcagccccccacccctgaccagcccctgcgggtggtgatgagccgtagccatgggggcgatcgcctcgaggcctttttaagcagcttaggatcagtacagctaatgccgatggggagtatgggctgtaaaacggctagcatttgccaaggggatgcccatctgtacgttagccttgcagggcgcactgccccaaaagactgggacttggcagcaccggatttgatcatgcaggaggcagggggcgcctttacctatgccaatggcaagttaccccactacaatcgcactgatgtgcagcactgggaaccgttggtggtgtgtcatcctgccttgagtcgcagggtgggcgatcgcctgcaagcctttttacaggaaaatcaaggctattctggaaaatag

SEQ ID NO: 127116 - protein, 286 aa, Thermosynechococcus elongatus BP-1
MFSSLDLKKTLATLRPILWQALEQLRQFYRQVKDLTVQDKGGDPVTLADQQIDAFLRHALQEHFPASEFGYLTEETYTAGQSLSQPYVWIIDPLDGTSDFLQQTGEYAIHVALVREHRPCLAAVVWPEQEVIYTAIAGGGTYRETRHRSTRLQVQPPTPDQPLRVVMSRSHGGDRLEAFLSSLGSVQLMPMGSMGCKTASICQGDAHLYVSLAGRTAPKDWDLAAPDLIMQEAGGAFTYANGKLPHYNRTDVQHWEPLVVCHPALSRRVGDRLQAFLQENQGYSGK

SEQ ID NO: 127117 - DNA, 915 bp, Prochlorococcus marinus subsp. marinus str. CCMP1375
  CDS (1)..(915): transl_table=11
atgaaaaaagaggttgaacttcctaatggagttaatttgaataatttgttggagaaacttagagagttgagttggggcgctgcagatattctgaaggcatatgcaagaggagaaaagcctccttatgatttccctgaagttttgagtgttcaagaaggaggagatggacctgtatctgctgcagaccttgcagttaatagctggctaattgaaggcttgaaggcaagtttcgcatctgtaaaatgggcgttaattagtgaggaaacggctaaggaacagcttgtgataggggagcctttgaacaatcaatgggtgtggatattagatcctttagatggaaccaaagatttcctacaaggcaccggagaatatgcagtgcatttggctttagttaatggtaataatcctgttttaggagtggttttgatacctgaattagaagaactttggattggattggtaggctcaggatcatggtgcgaggaccgttttgggaataaaaaacctgctgtttttagtagtcgaaaagaaattagtgaaatgactcttgtagcaagcagaagtcacagagacgaaaagctagagaagttgattaactcacttccttttgctcagaagcaaatagtaggaagtgtcggttgtaaagttgccaaaattcttaaaggggaagcggatttctatatatctttatcagctaaaacagctcctaaagattgggatatggctgctcctgaagctgttttaaaagctgctggaggtagtttcacccacgcaaataacaaacctttgaaatacaacactggagaaataaatcaatgggggtgtttgatagcaagccatggtagaaatcatgacttgttatgtagtgttattcaaaatgaattgttatctattgacccttctttttcagtatga

SEQ ID NO: 127118 - protein, 304 aa, Prochlorococcus marinus subsp. marinus str. CCMP1375
MKKEVELPNGVNLNNLLEKLRELSWGAADILKAYARGEKPPYDFPEVLSVQEGGDGPVSAADLAVNSWLIEGLKASFASVKWALISEETAKEQLVIGEPLNNQWVWILDPLDGTKDFLQGTGEYAVHLALVNGNNPVLGVVLIPELEELWIGLVGSGSWCEDRFGNKKPAVFSSRKEISEMTLVASRSHRDEKLEKLINSLPFAQKQIVGSVGCKVAKILKGEADFYISLSAKTAPKDWDMAAPEAVLKAAGGSFTHANNKPLKYNTGEINQWGCLIASHGRNHDLLCSVIQNELLSIDPSFSV

SEQ ID NO: 127119 - DNA, 942 bp, Prochlorococcus marinus subsp. pastoris str. CCMP1986
  CDS (1)..(942): transl_table=11
atgagaagatggttgtttaatattcatttagtgattaaattaccctctggtgtttatcttgaaaatcttatcgatgatttacgggcttttagctgggaagcttatgaaaccttaatttattactctaaaatagtaaaagattcaaacaacaaaagcaatatactaaaaaatgataatttagatgatccagtaacaaaggcagatttaaaagttaatgaggtaatcattaaaagaattaatgaaaaatataaagacattaattgggaaattttaagtgaggaaaacgtaaaattaacctctgaaagttgtaataataatgctgattggatttgggttcttgaccctcttgatgggactaaggattttattcaagggacagggaactatgcaatgcatctagctttaaattataagaataagccatatattggaattgttttaataccagataaagatgaattatggattacggatggagaaaaagtttggggagaaaaaaaagatggatcaaaaattaaacccaatttatctacaaacaaaagtcttaaagatatgagtttagtaacaagtaaaaatcatagaaatgaaataataaaaaaattaattcaaaaaattgatttttataaagtaattacaatgggaagtataggctgtaagatcgcatcaatcatcagaggagaaagcgatatttatataagtttgagcctaatggggaaaagctcccctaaagattgggattttgctgcaccagaagctattttaaaaacagcaggaggagtaattacaaatttagataatcaagaacttatttacgggaaatcaaatttcgagcaagggggtatcatcgttgcatccagtaatatcaatactcataaagatatatgtactgaaattaaggaaattatcaaaaaatacgatatataccctttaagaattaattaa

SEQ ID NO: 127120 - protein, 313 aa, Prochlorococcus marinus subsp. pastoris str. CCMP1986
MRRWLFNIHLVIKLPSGVYLENLIDDLRAFSWEAYETLIYYSKIVKDSNNKSNILKNDNLDDPVTKADLKVNEVIIKRINEKYKDINWEILSEENVKLTSESCNNNADWIWVLDPLDGTKDFIQGTGNYAMHLALNYKNKPYIGIVLIPDKDELWITDGEKVWGEKKDGSKIKPNLSTNKSLKDMSLVTSKNHRNEIIKKLIQKIDFYKVITMGSIGCKIASIIRGESDIYISLSLMGKSSPKDWDFAAPEAILKTAGGVITNLDNQELIYGKSNFEQGGIIVASSNINTHKDICTEIKEIIKKYDIYPLRIN

SEQ ID NO: 127121 - DNA, 918 bp, Prochlorococcus marinus str. MIT 9313
  CDS (1)..(918): transl_table=11
atgatgccgaacgcacctgttctgcctgatggtgtgaacctggagattttgttgcagcacttgaggcgattgagctggggtgctgcagacatcctgctggcctatgcccggggagaacagccaccgcatggattttctaaggctctgagtgttgaggatggtggtgaggggcctgtttctgccgctgaccttgcggtgaatcgctggcttctggatggcttagaagcgaatttccccttggcagattggactctattgagtgaggagacagcaaaggagcaactcactgcaggcgaacccttagcggcggaatggttgtggatccttgatcccttggatggcacaaaggatttcttgcagggcacaggtgaatacgccgtgcatctcgctttggtgcgtggtcaacgcccagtgcttggagtggtactcctgccagaagccgaggagctttggttcggtgtgatcggttctggggcttggtgcgaagaccggcggggaaaacgttcgccggtgcgttttagtcagcgccaggctgtttgtgagttgatgctggtagcgagtcgcaaccaccgcgacaacaggcttgaacagctgctagagagtcttgctcttggtggtagcaaggctgtgggcagtgtgggttgcaaggtgaccacgattttgcgcggagaaacagatttgtatgtctctctttcaggccgtagtgctccaaaagattgggatatggcggctccagaggcggtgctgatggcggcagggggatgtttcactcatgctgatggacgccagcttgcttataacagcggtgatgtacgtcaggctggatgtttaatcgccagccatgggctcgcccacgcccagctttgtgaagcagcggcgcgggctatgaaagagatcgacccaggctttcaggtttga

SEQ ID NO: 127122 - protein, 305 aa, Prochlorococcus marinus str. MIT 9313
MMPNAPVLPDGVNLEILLQHLRRLSWGAADILLAYARGEQPPHGFSKALSVEDGGEGPVSAADLAVNRWLLDGLEANFPLADWTLLSEETAKEQLTAGEPLAAEWLWILDPLDGTKDFLQGTGEYAVHLALVRGQRPVLGVVLLPEAEELWFGVIGSGAWCEDRRGKRSPVRFSQRQAVCELMLVASRNHRDNRLEQLLESLALGGSKAVGSVGCKVTTILRGETDLYVSLSGRSAPKDWDMAAPEAVLMAAGGCFTHADGRQLAYNSGDVRQAGCLIASHGLAHAQLCEAAARAMKEIDPGFQV

SEQ ID NO: 127123 - DNA, 918 bp, Synechococcus sp. WH 8102
  CDS (1)..(918): transl_table=11
atgatgccaagccctgccgtcctgcctgccggcgtcaaccaggacgttctgttgtcagaactccgtcgcctcagctggggggctgccgacatcctcagggcctatgcccgcggcgagcaaccgccccatggcttccccaaggctctcagcgtcgacgatggcggtgaaggccctgtttctgctgctgatctggccgtgaaccaatggctgctggatggcttgtcagctgcgtttcccaaggctgactggaccctgctcagtgaagaaacggccaaggagcagctcacggaaggccaaccgctgcaggcggagtggctctggatcctggatcccttggacggcaccaaggatttcctccagggcactggcgaatacgccgttcatctggcactggtgcgggggcaacgtcccgtgctaggggtggtgctgctgccggaagccgacgaactctggatcggcatcgtcggcgagggcgcctggtgcgaggaccgtcagggtgagcgctcgcccgttcgcttcagcgatagaaccgctgtttcggatctgatcctggtggccagtcgcagccaccgcgacgaccgtctggtgaagctgattgacgctctcgcgcttggaggttccaaggcggtgggcagcgttggctacaaggtcgccaccatcctgcggggcgaaactgatctctacgtctccctgtccggacgcagtgcccccaaggattgggacatggcggcccctgaggccgtgttgctggcggccggtggacgcttcacgcatgctgatcagacggacctcgcttacaacactggcgatgtgcgtcaggccggttgcctgatcgccagccatggaaaagcccacgccgagctcggagagcgtgcgacgcgggcgatggccgagatcgatcccggctttcaggtttga

SEQ ID NO: 127124 - protein, 305 aa, Synechococcus sp. WH 8102
MMPSPAVLPAGVNQDVLLSELRRLSWGAADILRAYARGEQPPHGFPKALSVDDGGEGPVSAADLAVNQWLLDGLSAAFPKADWTLLSEETAKEQLTEGQPLQAEWLWILDPLDGTKDFLQGTGEYAVHLALVRGQRPVLGVVLLPEADELWIGIVGEGAWCEDRQGERSPVRFSDRTAVSDLILVASRSHRDDRLVKLIDALALGGSKAVGSVGYKVATILRGETDLYVSLSGRSAPKDWDMAAPEAVLLAAGGRFTHADQTDLAYNTGDVRQAGCLIASHGKAHAELGERATRAMAEIDPGFQV

SEQ ID NO: 127125 - DNA, 855 bp, Gloeobacter violaceus PCC 7421
  CDS (1)..(855): transl_table=11
atggctcccgtgcaaaggtcacccgaatatctgcttgaagtggcccggcgcacggcttggggggcggcggatattttgttggactattacaggcgaccgctcaagattcgccagaaaaacggcggcccagtcaccgacgcggatctggccgccgaccgctttattttgagtgagttgcgctctgcctgcggcaacgaagcgtttgcgtatttgagtgaggagacgatcggtggtctggagcgcttcgagcgcccctttttgtgggtagtggatccgctcgacgggacgcgcgattttatcgaccacacgggcgaatttgctgtgcacatcgcgctggtggaatcgggccggccggtcctggcggcggtggcctggccggtgcgcgagcgcgtctactttgcccgcaaagggtgcggggcttactctgagaaccgcgccggggtgcgcgaacgcctacaggtcagccagatcagccagctcgaccagtgccggattatcgtgagccgcgtccaccgcgactggcggctcgacgcgctgttggcgcggttgccgaaaagggagcgcatcgtccacggtggcttgggctgcaagctgtgcgccatcgccgcaggtgaggcggagatgtacgtggggctttcggggcgcagcgccccatgcgactgggatctggcagcaccgcagatcgtcttgaccgaggcgggcggtgcgatgagccgtttcgacggcggcgatttgctctacaaccagccggacttgcacctgtggggcggtctgattgccgacaacggtgttacccacggcagttggtgcaagctgttgccggatgtgctctcccaggtcgaacaactagattga

SEQ ID NO: 127126 - protein, 284 aa, Gloeobacter violaceus PCC 7421
MAPVQRSPEYLLEVARRTAWGAADILLDYYRRPLKIRQKNGGPVTDADLAADRFILSELRSACGNEAFAYLSEETIGGLERFERPFLWVVDPLDGTRDFIDHTGEFAVHIALVESGRPVLAAVAWPVRERVYFARKGCGAYSENRAGVRERLQVSQISQLDQCRIIVSRVHRDWRLDALLARLPKRERIVHGGLGCKLCAIAAGEAEMYVGLSGRSAPCDWDLAAPQIVLTEAGGAMSRFDGGDLLYNQPDLHLWGGLIADNGVTHGSWCKLLPDVLSQVEQLD

SEQ ID NO: 127127 - DNA, 828 bp, Vibrio vulnificus YJ016
  CDS (1)..(828): transl_table=11
atgcctacctcacaggatttatcggcactgttgccgcaagttatcgatattgctcgcaccgcggggcaattgattctggatatctaccaaagtaagcagtaccaagaatacaccaaaagcgatgagacgccggtcaccagcgccgatctcgccgcgcacaaattgatcacccaacgactgagtgagttaaccccagacattccagtgttgtctgaagaagcagcggatatcagcttggaacaacgcgcgcaatggaaccgttactggttggtggaccctcttgatgggacgcaggaatttatcgcccgcagtggcgattttgccaccatcatcgccttagtggagaacaacaagccggtaatgggcgtggtgtatggtccggtttcaggcgtgacttactatgcgtatcaaggtaaaggcgcatggaagatccctgagatgaacgaaagcttgaaaattcaaacccacaaacatgaactgcccggacaaaacatcgcgattgccatcagccgccgtcaagacatcaatcgcatcaccagccgtatgagcagcagttggaattacgatttggtgccgttaggctctgcggcattgaaagcgtgcttggtcgcggaaggggcggtggattgctatttgcgccttggcccgactggggaatgggataccgcggcgacacaatgcatcgtggaagaggccggtgggcgtatcctaagcacctacttggaaccgctttcttataacgaacgagacaccttggaaaatccgaacttcatcgtattaggcgatgccgatttgccgtggaacgacattttgcaggtcaaaggctag

SEQ ID NO: 127128 - protein, 275 aa, Vibrio vulnificus YJ016
MPTSQDLSALLPQVIDIARTAGQLILDIYQSKQYQEYTKSDETPVTSADLAAHKLITQRLSELTPDIPVLSEEAADISLEQRAQWNRYWLVDPLDGTQEFIARSGDFATIIALVENNKPVMGVVYGPVSGVTYYAYQGKGAWKIPEMNESLKIQTHKHELPGQNIAIAISRRQDINRITSRMSSSWNYDLVPLGSAALKACLVAEGAVDCYLRLGPTGEWDTAATQCIVEEAGGRILSTYLEPLSYNERDTLENPNFIVLGDADLPWNDILQVKG

SEQ ID NO: 127129 - DNA, 921 bp, Nasonia vitripennis
  CDS (1)..(921)
atggcacaaagcggagccctgataacacgtctagtggcgtcttctgtaacagcagcaacaagagctggtaaaataatcagagatgtaatgagtcaaggagaactgaatattgtggataaagggacaaatgatctacaaactgaagcagacaggtcagctcaaagatgtatcgtcacttctttaagtcaacaattcccaggtgttactatcattggtgaagaagaaccctcaaactgtgaagtaccatctgactgggtcgtcactgatatggatcaagaagttttaaaagtaactcttcctcaacacttggaaaatgctaaagctgaggatctttgtgtttgggtagatcctttagatggaacttctgaatatactcaaggccttgtggagcatgtgactgttttggttggtgttgctcttggggataaagcgattggaggagtgatacatcaaccgtattttaaaaattctgagaatggtacctggggtagaacaatatggggaatcgatggagtaggaatcggaggttttaaaccaattccacctcctgaaggaaaacgaatcataactacaacacgttcacattgtgatagtactgtacaaggtgctttagatgctttgcagtctgacgaaatattgagagttggtggagctggtcataaagtcatgcttttattggagggaaaagctcatgcatatgtttttgctagtaaaggttgcaaaagatgggacacttgtgctcctgaggctgtgttgcattcagtgggtggtactttaactgaccttcatggtgaaaggtatgtttataactccaagacaagttatcccaatgtgggaggcgtcttggctacagctccaggccaacaacatcagtggtaccttgcacgcattccaaatgaaataaagcagagactagtgtaa

SEQ ID NO: 127130 - protein, 306 aa, Nasonia vitripennis
MAQSGALITRLVASSVTAATRAGKIIRDVMSQGELNIVDKGTNDLQTEADRSAQRCIVTSLSQQFPGVTIIGEEEPSNCEVPSDWVVTDMDQEVLKVTLPQHLENAKAEDLCVWVDPLDGTSEYTQGLVEHVTVLVGVALGDKAIGGVIHQPYFKNSENGTWGRTIWGIDGVGIGGFKPIPPPEGKRIITTTRSHCDSTVQGALDALQSDEILRVGGAGHKVMLLLEGKAHAYVFASKGCKRWDTCAPEAVLHSVGGTLTDLHGERYVYNSKTSYPNVGGVLATAPGQQHQWYLARIPNEIKQRLV

SEQ ID NO: 127131 - DNA, 1059 bp, Gibberella zeae PH-1
  CDS (1)..(1059)
atggcctcttacactcgtgaacgtcaaatcgcagagctcgccgtcttgcgggcctcaatccttaccaagagggtgcagtcaaccgtcagcggaatctcaaaagccgacgactcaccagtcactgctgctgattttgccgctcaggcggttctcatcagtgctcttcgcaaggccttccccggtgatgcctttgttggagaagaggattccagcgctctgagggaagatgacgccctgaagcagcgtgtctgggaactggcttccaatgctcacctggagaacccagacgacgaagctctgctcgccagccccgagaatgtagacgagcttcttgaggtgattgatcttggaggtcgtggccagggtggcaaaaaggggcggttctgggtcatggatcccatcgacggaacggctacattcctcaagggtgaacagtatgctgtatccctggccttggtagaggacggtcgagaagttgtcggtgttctgggctgtgcaaacctgaagccagtagatggaaaagttgcagagtcaactattgacaaggacggcttgggtctcatgctcaccgcagttcgcggacaaggcacaacgatccgcaaaatggagttcaacggtctccaacccgcccagcctctcgacagcatcgccaaagcttctagccttgctgattcccaaatcatcaactactccagcggctctacctcgcgccacgacctcattaccaagcttgccgactcatttggtgccaagttccccaacattgaactgtactcgtctcatatccgttacgcagcgctcctagttggtggtggtgactttcagcttcgtgtaccttcgtctagcagtgtacgaatgtacatttgggaccatgccggtgcgcaactcatcttgactgaggctggtggtaaagtaacagatctcgatggtaaggaaatggactttgcagctggaagggatttgaaccagaacaacggcctgctcgcagccagagaagggattcacggcgcagttctagagggcatgggaaagatcctggctgaagatgcttcgcgttga

SEQ ID NO: 127132 - protein, 352 aa, Gibberella zeae PH-1
MASYTRERQIAELAVLRASILTKRVQSTVSGISKADDSPVTAADFAAQAVLISALRKAFPGDAFVGEEDSSALREDDALKQRVWELASNAHLENPDDEALLASPENVDELLEVIDLGGRGQGGKKGRFWVMDPIDGTATFLKGEQYAVSLALVEDGREVVGVLGCANLKPVDGKVAESTIDKDGLGLMLTAVRGQGTTIRKMEFNGLQPAQPLDSIAKASSLADSQIINYSSGSTSRHDLITKLADSFGAKFPNIELYSSHIRYAALLVGGGDFQLRVPSSSSVRMYIWDHAGAQLILTEAGGKVTDLDGKEMDFAAGRDLNQNNGLLAAREGIHGAVLEGMGKILAEDASR

SEQ ID NO: 127133 - DNA, 903 bp, Prochlorococcus marinus str. AS9601
  CDS (1)..(903): transl_table=11
atgattgaattaccgtctggtgttgatattaataatcttatcgatgatataagaattttcagctggcaagcagcagatgttttgctttattactctagattgttagaaaattcagatgataaaagaaatatagtcaaaaataataatgaagacgatcctgttactttggctgatttaaaagttaatgaattaattattgaaagaataaatgaaaaatataaaaatattaactgggatattttgagcgaagaaaatgtaaaaaattcttcagaaatttttgataataagactgactggatctgggttcttgatcctctcgatggaacgaaggatttcatccagggaacaggtaactatgcaatgcatttggcattgaactttaaacaaaaaccatatatcgggtttgttctgattccagataaaaatcaattatggattacagatggaaaaaaaacatggtgtgaaaaaagagatggtaaaaaatataaactaagtctctcaaataaaaaaaatcttcaagagatgactgtagtaacaagtaaaaatcatggaaatgagattttgagaaatttaattcaaaaaatcaattttcgcaaagtagaaattatgggaagcattggctgcaaaattgcatctatagtcagaggggacagtgatatttatatttgtcttagcttaccgggtaaaagctcaccaaaagattgggattttgctgcgccagaaactatcctgaaagcagctggtggggcaattacaaatttagataatcaagaactatcctacgggaaaagtagtttcgagcaaggaggaattataattgctacaaatgacaagaaaactcacggaaatatttgcttagaaataaagaaaattattgaggattatggaatctatcctctttag

SEQ ID NO: 127134 - protein, 300 aa, Prochlorococcus marinus str. AS9601
MIELPSGVDINNLIDDIRIFSWQAADVLLYYSRLLENSDDKRNIVKNNNEDDPVTLADLKVNELIIERINEKYKNINWDILSEENVKNSSEIFDNKTDWIWVLDPLDGTKDFIQGTGNYAMHLALNFKQKPYIGFVLIPDKNQLWITDGKKTWCEKRDGKKYKLSLSNKKNLQEMTVVTSKNHGNEILRNLIQKINFRKVEIMGSIGCKIASIVRGDSDIYICLSLPGKSSPKDWDFAAPETILKAAGGAITNLDNQELSYGKSSFEQGGIIIATNDKKTHGNICLEIKKIIEDYGIYPL

SEQ ID NO: 127135 - DNA, 909 bp, Prochlorococcus marinus str. MIT 9515
  CDS (1)..(909): transl_table=11
gtggttaaattaccagaaggtgttgatattaataatcttatcgatgatctgagaattttcagctgggaggctgcagatattttgcttcaatattcgcaaattcttaagaaatcagactacaagaagaatatccttaaaaatggaaacgagaaagatcctgtaacaaaagctgatttagacgtaaatgatttaattcttaaaagaatgcaatctaaatatccaagtatcggttggaaatatttaagtgaagaaaatgcaaaggctgatcctaataattgcgatatcaattctgactgggtttggatacttgatccgctagatggtacaaaagactttctacaaggaacagataattatgcaatgcactttgcccttaactttaaaaataaaccttttctgggagttgtcctaattccagaaagagacgaattatggatatcaaatggtgtgaatgtttggtgcgatagaagacagcatataaatctaaaactaaattcatttcccaataaaagtctttgtgagatgactttggtaacaagtaaaaatcatagtaatccaaccctgatgaatttaattgataaaatttgctttaagaatgttgtaactatgggaagcattggttgcaaaattgcttcaataattagaggtgaaagtgatatttatatctctttaagcttgccagacaaaagttccccaaaggattgggattttgccgctccagaggtcattttaaaaacagctggtggagctgttacgaacttagaaaatgaggaactttgttatgaaaaagcaaattttgatcaggcaggtataattattgcctcaaataataaaaatatgcactcaaaaatttgttttcagataaaagaaataattaaaaaatatgatatttacccttttataacttag

SEQ ID NO: 127136 - protein, 302 aa, Prochlorococcus marinus str. MIT 9515
MVKLPEGVDINNLIDDLRIFSWEAADILLQYSQILKKSDYKKNILKNGNEKDPVTKADLDVNDLILKRMQSKYPSIGWKYLSEENAKADPNNCDINSDWVWILDPLDGTKDFLQGTDNYAMHFALNFKNKPFLGVVLIPERDELWISNGVNVWCDRRQHINLKLNSFPNKSLCEMTLVTSKNHSNPTLMNLIDKICFKNVVTMGSIGCKIASIIRGESDIYISLSLPDKSSPKDWDFAAPEVILKTAGGAVTNLENEELCYEKANFDQAGIIIASNNKNMHSKICFQIKEIIKKYDIYPFIT

SEQ ID NO: 127137 - DNA, 915 bp, Prochlorococcus marinus str. NATL1A
  CDS (1)..(915): transl_table=11
atgtctattgatcttgttgtgccaaaagaggtcgaattaccgactttattggatgtgcttagaaagcttagctgggcttccgctgatgttttgatggcatatgcaagaggtgatgaacctccatatggcttccctaaatcattaactgtagaggaaggcggtgacggcccagtatctgcagctgacatggcagtgaatgaattattgatctctggattgaaggataatctcgctttcaaagaatgggatattttaagcgaagaaacttctaaggagaaaacttttcagcaagataattataaaaaagattggtgttggattcttgatccattagatgggacaaaggattttcttcaaggatctgaaaactatgcagttcatattgctttggcgtacaaaaaaaagccaaaaattgggatagttttgatacctgaaaagaatgaattatggtttggaattgttggaattggtgcatggtttgaaaatcgtgatggctctaaaaaccacttttcttttagtgatagattggatatttcgaaattgatactagtttcaagtaaaaatcatcaacaatcaaaacttaataaccttctgtcaactctgtgctttggtgagacaaaaaaaataggcagtgtcggttgtaaagttgtctcaattttgaggggagaagcagatgtttatatctctctatctggaaaaacttcacccaaggattgggatatggctgctccgcatgctcttattgaggcggctggtggtatgttctctcatgcagatggaaaaaatttaatttaccaagaaacaaactattctcaatctggttgtttaattgcaagccatgggaaatctcatcaaaagatttgccaaaaagctatggattttttctctctggaagaacctaaatacttcgtctaa

SEQ ID NO: 127138 - protein, 304 aa, Prochlorococcus marinus str. NATL1A
MSIDLVVPKEVELPTLLDVLRKLSWASADVLMAYARGDEPPYGFPKSLTVEEGGDGPVSAADMAVNELLISGLKDNLAFKEWDILSEETSKEKTFQQDNYKKDWCWILDPLDGTKDFLQGSENYAVHIALAYKKKPKIGIVLIPEKNELWFGIVGIGAWFENRDGSKNHFSFSDRLDISKLILVSSKNHQQSKLNNLLSTLCFGETKKIGSVGCKVVSILRGEADVYISLSGKTSPKDWDMAAPHALIEAAGGMFSHADGKNLIYQETNYSQSGCLIASHGKSHQKICQKAMDFFSLEEPKYFV

SEQ ID NO: 127139 - DNA, 1005 bp, Prochlorococcus marinus str. MIT 9303
  CDS (1)..(1005): transl_table=11
gtgaccaatgggcgtcccaaccacatagagcacccctggtgctggttcctctcgctggctcaaaatgaggcttgcacgtgtctattcatgatgccgaatgcacctcttctccctgttggtgtggacctggaggttttgttgcagcaattgaggcgattgagctggggtgctgcagacatcctgctggcctatgcccggggagaacagccaccgcatggattttctaaggctctgagtgttgacgatggtggtgaggggcctgtctctgccgctgaccttgcggtgaaccgttggcttctggatggcttagaagcgaatttccccttggcagattggactctattgagtgaggagacggcaaaggagcaactcactgaaggcgaacccttagcggcggaatggttgtggatccttgaccccttggatggcacaaaggacttcttgcagggcacaggtgaatacgccgtgcatcttgccttggtgcatggtcaacgaccagtgcttggcgtggtactcctgccagaagccgaggagctttggttcggtgtgatcggttctggtgcctggtgcgaagaccggcagggacaacgttcgccggtgcgttttagtcagcgcaaggcttttggtgagttgatgctggtagcgagtcgcaaccaccgcgacaacaggcttgaacagctgctagagagtcttgctcttggtggtagcaaggctgtgggcagtgttggttgcaaggtaaccacgattctgcgcggagaaacagatctgtatgtctctctttcaggccgtagtgctccaaaagactgggatatggctgctccagaggcggtgctgatggctgcagggggatgtttcactcatgctgatggacgccagcttgcttacaacagcggtgatgtgcgtcaggccggatgtttgatcgccagccatggcctcgcccacgcccagctttgtgaagcagcggcgcgggctatggaagagatcgacccaggctttcaggtttga

SEQ ID NO: 127140 - protein, 334 aa, Prochlorococcus marinus str. MIT 9303
MTNGRPNHIEHPWCWFLSLAQNEACTCLFMMPNAPLLPVGVDLEVLLQQLRRLSWGAADILLAYARGEQPPHGFSKALSVDDGGEGPVSAADLAVNRWLLDGLEANFPLADWTLLSEETAKEQLTEGEPLAAEWLWILDPLDGTKDFLQGTGEYAVHLALVHGQRPVLGVVLLPEAEELWFGVIGSGAWCEDRQGQRSPVRFSQRKAFGELMLVASRNHRDNRLEQLLESLALGGSKAVGSVGCKVTTILRGETDLYVSLSGRSAPKDWDMAAPEAVLMAAGGCFTHADGRQLAYNSGDVRQAGCLIASHGLAHAQLCEAAARAMEEIDPGFQV

SEQ ID NO: 127141 - DNA, 861 bp, Acinetobacter sp. ADP1
  CDS (1)..(861): transl_table=11
atgtttattcagactgatcaatcaataacaggtaatttaattaatcaattattgccgattttagagcaagcttctaatttgttaaataacgagtatgaaaattatatttcaggaaatcagttagatatccaaaaaaaaacagatgaatctcctgtaacgcaagctgatcttaaaataaatcattttctagtaacagagttggccagaataacacctgattaccctgtattatctgaggaaggtgacaatactcagcgatgttcatggaatatttgctggatgttggatcctttagatgggacaaaagagtttattcagcaaagagatgagttcactatcaatctgagtttaatcgaagattcatatacttcattttctgtgattgttgttccgcgtgagcaacagatgtatataggatatacacatgaattgccgtataaatatcagtttaattctaaacaatggtggcgatatcatcattcaattgagagcctgaataatacgattcaagttggactaagccatcgaagtaagagtagtaaatatcaaaaatttatagagtacttagagagtgactataagattgtttgtcgtgaggctgggagtgcttataaattttgtatgatgctagaaggtaaaattgatttctatccgagatttcatccaacatctgaatgggatacaagtgctggacaggcattgctggaaagtattgggggaggcttagtctctttaaacggtattccatttaaatataatgtacgtaccaccgttttaaaccaaggcttcattgcgtattcaaaatctgagtataggcatttggtattggagctattacaacaaatagatttttcaaattga

SEQ ID NO: 127142 - protein, 286 aa, Acinetobacter sp. ADP1
MFIQTDQSITGNLINQLLPILEQASNLLNNEYENYISGNQLDIQKKTDESPVTQADLKINHFLVTELARITPDYPVLSEEGDNTQRCSWNICWMLDPLDGTKEFIQQRDEFTINLSLIEDSYTSFSVIVVPREQQMYIGYTHELPYKYQFNSKQWWRYHHSIESLNNTIQVGLSHRSKSSKYQKFIEYLESDYKIVCREAGSAYKFCMMLEGKIDFYPRFHPTSEWDTSAGQALLESIGGGLVSLNGIPFKYNVRTTVLNQGFIAYSKSEYRHLVLELLQQIDFSN

SEQ ID NO: 127143 - DNA, 915 bp, Prochlorococcus marinus str. NATL2A
  CDS (1)..(915): transl_table=11
atgtctattgatcttgttgtgccaaaagaggtcgaattaccgactttattggatgagcttagaaagcttagctgggcttccgctgatgttttgatggcatatgcaagaggtggtgaacctccatatggcttccctaaatcattaaatgtagaggaaggcggggatggcccagtatctgcagctgacatggcagtgaatgaattattgatctctggattgaaggataatctcgctttcaaagaatgggatattttaagcgaagaaacttctaaggagaaaacttttcagcaagataattataaaaaagattggtgttggattcttgatccattagatgggacaaaggattttcttcaaggatctgaaaactatgcagttcatattgctttggcgtacaaaaaaaagccaaaaatcgggatagttttgatacctgaaaagaatgaattatggtttggaattgttgggattggtgcatggtttgaagatcgtgatggctctaaaaaccacttttcttttagtgatagattggatatttcgaaattgatactagtttcaagtaaaaatcatcaacaatcaaaacttaataaccttctgtcaactctgtgctttggtgagacaaaaaaaataggcagtgtcggttgtaaagttgcttcaatcttgaggggagaagcagatgtttatatctctctatctggaaaaacttcacccaaggattgggatatggctgctccacatgctcttattgaggcggctggtggtatgttctctcatgcagatggaaaaaatttagtttaccaagaaaaaaactattctcaatctggttgtttaattgcaagccatggaaaatctcatcaaaagatttgccaaaaagctatggattttttctctctggaagaacctaaatacttcgtctaa

SEQ ID NO: 127144 - protein, 304 aa, Prochlorococcus marinus str. NATL2A
MSIDLVVPKEVELPTLLDELRKLSWASADVLMAYARGGEPPYGFPKSLNVEEGGDGPVSAADMAVNELLISGLKDNLAFKEWDILSEETSKEKTFQQDNYKKDWCWILDPLDGTKDFLQGSENYAVHIALAYKKKPKIGIVLIPEKNELWFGIVGIGAWFEDRDGSKNHFSFSDRLDISKLILVSSKNHQQSKLNNLLSTLCFGETKKIGSVGCKVASILRGEADVYISLSGKTSPKDWDMAAPHALIEAAGGMFSHADGKNLVYQEKNYSQSGCLIASHGKSHQKICQKAMDFFSLEEPKYFV

SEQ ID NO: 127145 - DNA, 873 bp, Anabaena variabilis ATCC 29413
  CDS (1)..(873): transl_table=11
atgaaagacttacaagagatattagcgatcgcccgtgctgtgggttggggtgctgccgaaatattacaatcctattatcacggcacagccacagactcaaatctcaacgtgcagtataagcagaatgagcctgtcaccattgccgatatcaccgtcagtcaatatattttacaaaagctacaggctgctttaggacaggaagattttgcctacgtcagtgaagaaacctataaatcagaattatctgaagatacaaaaactaaaactgactgggtgtggattattgaccccttagatggaacccgtggttttattgaaaaaacaggtgattacgcagtccatattgctttagtcaaagaacatcgaccagttttagcggtggtagcaataccggaagcagaaaaattatatttcgctatcaaagatagtggtacatttgtggaaacacgcaacaattccaacgttttacaactatcactcaacaacacaaccaagtcattagaggatctcaagatagttgtcagccgttctcaccgcaatcaaaagttaaactacctactagaaaaattaccctgtcagcagcaaaaatctgtgggtagcgtaggttgtaagatagccactattttagaacagcaagcagacctttacatttccctgtctggcacatctgctcccaaagactgggacatagccgcaccagagttaattctgaccgaagctggaggtcagtttactcattttgacggctcgcctttacagtacaacaccggagatatcaatcaatggggtggtttactggctagtaacggccattatcatacagaactttgccagaaaatagcaaaaatattggtgcagttcgacgagatgtaa

SEQ ID NO: 127146 - protein, 290 aa, Anabaena variabilis ATCC 29413
MKDLQEILAIARAVGWGAAEILQSYYHGTATDSNLNVQYKQNEPVTIADITVSQYILQKLQAALGQEDFAYVSEETYKSELSEDTKTKTDWVWIIDPLDGTRGFIEKTGDYAVHIALVKEHRPVLAVVAIPEAEKLYFAIKDSGTFVETRNNSNVLQLSLNNTTKSLEDLKIVVSRSHRNQKLNYLLEKLPCQQQKSVGSVGCKIATILEQQADLYISLSGTSAPKDWDIAAPELILTEAGGQFTHFDGSPLQYNTGDINQWGGLLASNGHYHTELCQKIAKILVQFDEM

SEQ ID NO: 127147 - DNA, 918 bp, Synechococcus sp. CC9605
  CDS (1)..(918): transl_table=11
atgatgcccagctctgccgtcctccccgctggcgtgaacaaggaggctctgctgactgaactgcgtcgcctcagttgggtagccgccgacatcctgcgggcctatgcccgcggcgagcagcccccgcatggtttccccaaggccttgagtgttgatgaaggcggagagggcccggtgtctgcggctgatctggctgtgaacaagtggttgctggatggtctgtccgccgcgttccccaaggccaactggactctgctgagcgaggagaccgccaaggagcagctcacggaaggtcaaccgctgtcggcggagtggctgtggattctcgatcccctggatggcaccaaggattttctgcagggcacaggcgaatacgccgttcatctggccctcgtgcgcgacaagcggccggtgatcggtgttgtgctcctgccggaagccgatgaactttggatcggcatcgttggcgagggtgcctggtgtgaagaccgtcagggtgagcggtcgccggttcgcttcagcgacagaactgaggtttcagacctgatcctggtggccagccgtagccaccgcgacgaccgtttggtcaagctcattgatgcccttgacctcggcggttccaaagccgtcggcagcgttggcttcaaggtggccacgatcctgaggggcgaaaccgacctttacgtctccctctccggcaagagcgctcccaaggattgggacatggctgctccggaggcggtgctgctcgcggccggtggtcgtttcacccatgcggatcaggccgacctcacctacaacaccggcgatgtacgtcaggccggctgtctgatcgccagccacggaaaagcccacgccgagctcggagagcgtgcgacgcgggccatggccgagatagatcccggctttcaggtctga

SEQ ID NO: 127148 - protein, 305 aa, Synechococcus sp. CC9605
MMPSSAVLPAGVNKEALLTELRRLSWVAADILRAYARGEQPPHGFPKALSVDEGGEGPVSAADLAVNKWLLDGLSAAFPKANWTLLSEETAKEQLTEGQPLSAEWLWILDPLDGTKDFLQGTGEYAVHLALVRDKRPVIGVVLLPEADELWIGIVGEGAWCEDRQGERSPVRFSDRTEVSDLILVASRSHRDDRLVKLIDALDLGGSKAVGSVGFKVATILRGETDLYVSLSGKSAPKDWDMAAPEAVLLAAGGRFTHADQADLTYNTGDVRQAGCLIASHGKAHAELGERATRAMAEIDPGFQV

SEQ ID NO: 127149 - DNA, 897 bp, Prochlorococcus marinus str. MIT 9312
  CDS (1)..(897): transl_table=11
gtgattaaattacctttcggagtagaaattaataatctaatagataatctgaagagtttgagttgggaagctgcagatatcttgttgtactatgccaatattattaaaaaattagagcaaaaaaatgaaattcttaagaataaaaataataatgaccctgtaacattagctgatttagaagtaaacgaattaattattaacagaataaatcaaaaatatcaagatactaattgggagatcttgagcgaagaaaatttcaaaatagaatccaattattttaataatgttgactggctttgggttcttgatcctctagacggaactaaagattttattcaaggaacacaaaattatgctatgcatttagccttgaactataaaagaaggccatttattggggttgtgcttatccccgaaaaagatgaattatggatttcttatgcagaaaaactttggtgtgagaaaagagatggaagtattcgaaaacaaaatttgtctgaaacagatattctcaaagatatgaccatagttaccagtaagaaccacaggaatgaaaaattaaaggatttaattgaaaagattaattttaagaaaactattgtaatgggtagtattggttgcaaagttgcttcaattattagaggagatagtgatatttatattgcattgagtttgccaggcaaaagtgcgccaaaagattgggattttgctgcaccagaagctattttaaaagcggctgggggatcaataacaaatattgataatgaggatttggtttatggtagtactgatcttaagcattcaggtattataattgcctctaataacaagaagaatcataaaagaatctgctcgcaagtaaaagaaattattgaggaatataaaatttatccttag

SEQ ID NO: 127150 - protein, 298 aa, Prochlorococcus marinus str. MIT 9312
MIKLPFGVEINNLIDNLKSLSWEAADILLYYANIIKKLEQKNEILKNKNNNDPVTLADLEVNELIINRINQKYQDTNWEILSEENFKIESNYFNNVDWLWVLDPLDGTKDFIQGTQNYAMHLALNYKRRPFIGVVLIPEKDELWISYAEKLWCEKRDGSIRKQNLSETDILKDMTIVTSKNHRNEKLKDLIEKINFKKTIVMGSIGCKVASIIRGDSDIYIALSLPGKSAPKDWDFAAPEAILKAAGGSITNIDNEDLVYGSTDLKHSGIIIASNNKKNHKRICSQVKEIIEEYKIYP

SEQ ID NO: 127151 - DNA, 870 bp, Synechococcus elongatus PCC 7942
  CDS (1)..(870): transl_table=11
atgtcccctctccagtcgatcgccggtcaacccgtcgagtcagttctcgcgatcgcccgtcaagtcggctgggaagcggcagacattgcactgcagttctacaccgctcagtctgaagcagcaccgaagctgtggcaggagggggatgaccccgtcacggcagcggatttggcaattcatcgccacgttctggaacggctacaaaccgcttttgccgatcagcccttcggctacctcagcgaagagagcgatcgcaccgcgctgactttgccactgccggaagagtgggtttggatcatcgaccccttggatggcacccgcgatttcatcgatcacaccggcgaatttgcggtgcagattgccctgacctaccaacagcgcccggtcttggcggtcgtcgcaatacccgctcagcagttgctttattgggcggtacaaggccagggctgctaccgcgaaacgcaagacggcactcagacgaaattgacggtttccgatcgccaagaggatctgattctggttgccagccgaacccatcggggcgatcgcttccagcaattgctcgatcgcctttctttgccgcagcagatttatgtgggcagtgtcggcgtcaaaattgtcgcgatcgcagaacaacgcgccgatgtttacctctctctctcgggtaaatcagccccgaaagattgggacatggccgcccccgagctactcctgctcgaagccggtgggcgcttcagccatgccgatggttctgctcttcgctacaacaccggcgatatcagccagtggggttgcttgattgccagcaacggtcccgcccacgatcgcctctgtcaagaagccaccgcactccttgccagcttggactag

SEQ ID NO: 127152 - protein, 289 aa, Synechococcus elongatus PCC 7942
MSPLQSIAGQPVESVLAIARQVGWEAADIALQFYTAQSEAAPKLWQEGDDPVTAADLAIHRHVLERLQTAFADQPFGYLSEESDRTALTLPLPEEWVWIIDPLDGTRDFIDHTGEFAVQIALTYQQRPVLAVVAIPAQQLLYWAVQGQGCYRETQDGTQTKLTVSDRQEDLILVASRTHRGDRFQQLLDRLSLPQQIYVGSVGVKIVAIAEQRADVYLSLSGKSAPKDWDMAAPELLLLEAGGRFSHADGSALRYNTGDISQWGCLIASNGPAHDRLCQEATALLASLD

SEQ ID NO: 127153 - DNA, 786 bp, Cytophaga hutchinsonii ATCC 33406
  CDS (1)..(786): transl_table=11
ttgaaatttaaaaccgatttgatgaataatttacttgaaaatgcaattgtagcgagtatggtggcgggaaaagcaatcatggaggtctatgcaatacccgattttacggatctgatcgaaatcaaaaacgataaatccccccttacggtcgcagataaaaatgcacatcaagtgatttatacccttttgagaggtgaattccctgagattccgatgatctcggaagaaggaaaaggtactccgtacgaagaacgtaaagactggaaacggtactggctggttgatccgctggatggaacaaaggaattcatcaaacgcaacggagagtttaccgtaaacattgccttgatcgaaaataaccgtccggtgatgggcgtggtatacattcccgtaacagacaccttgtatgccgggatcgtggggcaaggtgccttcaaaattgtgaacggcgaagaaacgccgattaccgtacgcaaggcaccggatacaggccggacagccgtgggatcgcgttcacacagtacggaagaagaagcaaaattattggccgattataacgtaaccgattttatcacaacgggaagctcgatcaaattctgtttggtagcggaaggtacagcggacctgtattaccgcgccggacctacaatggagtgggacactgccgccgggcaagctgtattagaagccgcaggcggaacattgacaaatcccgatggatcgatgtttttatacaacaaagaaaatttattgaacggcggatttttgtgcaagggagatatttaa

SEQ ID NO: 127154 - protein, 261 aa, Cytophaga hutchinsonii ATCC 33406
MKFKTDLMNNLLENAIVASMVAGKAIMEVYAIPDFTDLIEIKNDKSPLTVADKNAHQVIYTLLRGEFPEIPMISEEGKGTPYEERKDWKRYWLVDPLDGTKEFIKRNGEFTVNIALIENNRPVMGVVYIPVTDTLYAGIVGQGAFKIVNGEETPITVRKAPDTGRTAVGSRSHSTEEEAKLLADYNVTDFITTGSSIKFCLVAEGTADLYYRAGPTMEWDTAAGQAVLEAAGGTLTNPDGSMFLYNKENLLNGGFLCKGDI

SEQ ID NO: 127155 - DNA, 918 bp, Synechococcus sp. CC9311
  CDS (1)..(918): transl_table=11
atgatgccgagctcgccaacccttcttgccggtatcaacctgcaagatgttttaaaggttcttcgccctctcagctggggagccgcagacatcctgcgcgcctatgcccgtggagaacagccacctcacggtttttcgaaggccctgagcgttgacaacggaggcgaaggtccagtttccgcagctgatctagcggttaatcaatggctcctggatggcttgaaacaatccttccccaccgctgattggactcttctcagtgaagaaaccgccaaagagcaactaacggaagggcaacccttggctgctgagtggttatggattttggatccactcgatggcaccaaagatttcctgcaaggcacaggcgaatacgccgtgcatcttgcgttagtgcatcagcaacgaccggtccttggggtggtgctagtaccagagcgagaagagctttggattggtgtggtgggtgacggcacctggtgcgagaaccgctcaggagaacgcacgccagttcgtttcagtgagcgaaaggccaccaaccaactcaccttggtggcaagccgcagtcacagagatcagcgacttgaacagttgatcaccgccctagaactcggggattcccatgcggtgggcagtgttggctgcaaagtggccacgatccttcgcggcgaaaccgatttgtacatctccctgtctgggaaaagtgctccgaaagattgggatatggccgctccagaagccgtactactcgcagctggtggtgccttcacccatgcagatggcagagagctcatctacaacaccggcgatgttcgccaggccggctgtttgatcgctagccatggaaaagcccatgccactttgtgtaggaaagcggcacaggcgatgggattgatcgatcccggttttcaggtttag

SEQ ID NO: 127156 - protein, 305 aa, Synechococcus sp. CC9311
MMPSSPTLLAGINLQDVLKVLRPLSWGAADILRAYARGEQPPHGFSKALSVDNGGEGPVSAADLAVNQWLLDGLKQSFPTADWTLLSEETAKEQLTEGQPLAAEWLWILDPLDGTKDFLQGTGEYAVHLALVHQQRPVLGVVLVPEREELWIGVVGDGTWCENRSGERTPVRFSERKATNQLTLVASRSHRDQRLEQLITALELGDSHAVGSVGCKVATILRGETDLYISLSGKSAPKDWDMAAPEAVLLAAGGAFTHADGRELIYNTGDVRQAGCLIASHGKAHATLCRKAAQAMGLIDPGFQV

SEQ ID NO: 127157 - DNA, 861 bp, Nostoc punctiforme PCC 73102
  CDS (1)..(861): transl_table=11
atgaaagacttacaagaaatattagcgatcgctcgtgagatagcttggggtgcagcagatatactgcgatcgtattaccacggtaccgcaaaagaccctaacttagatgtgcaatataaacagaacgagcctgttaccgttgccgatgtagctgtgagtcaatatatcttacagaagctacaagcaactttgggtaacgaagattttgcttacatcagcgaagaaacctatcagtcaccaactacaggcacacacccttccgccccttgggtatggataattgaccctttggatggcacacgagactttattgaaaaaactggggactatgcagttcacattgctttagttaaggaaacacgcccgattttagcagtggtagcagtaccagaagcagaaaagttatattacgctaccaaaggtggggggacatttgtagaaaccagtgatggctctgttcctttacaagtgtcgtcaggtaaaccaattgaggatttaaccttagtggttagtcgctctcaccgcaaccagcgcttagattacttgctacaaaatttaccctgtcaaaatcagaaatctgtgggtagtgtaggctgcaaaatcgccactattgtcgagcaacaagcagatatctacatttccctttctggtaagtctgcgcccaaagattgggatatggcagcaccagaactgattttaacagaagctggtggtaagtttacccactttgacggcgctccgttgcagtataacactggtgatatcaatcaatggggaggtttgctggcgagtaatggtgaatatcacgaagcactgtgccagcaagcagaaaagattttagcgcagttcgaccatagctaa

SEQ ID NO: 127158 - protein, 286 aa, Nostoc punctiforme PCC 73102
MKDLQEILAIAREIAWGAADILRSYYHGTAKDPNLDVQYKQNEPVTVADVAVSQYILQKLQATLGNEDFAYISEETYQSPTTGTHPSAPWVWIIDPLDGTRDFIEKTGDYAVHIALVKETRPILAVVAVPEAEKLYYATKGGGTFVETSDGSVPLQVSSGKPIEDLTLVVSRSHRNQRLDYLLQNLPCQNQKSVGSVGCKIATIVEQQADIYISLSGKSAPKDWDMAAPELILTEAGGKFTHFDGAPLQYNTGDINQWGGLLASNGEYHEALCQQAEKILAQFDHS

SEQ ID NO: 127159 - DNA, 858 bp, Crocosphaera watsonii WH 8501
  CDS (1)..(858): transl_table=11
atgacagaaatccaaaaattagaagaaatcgaagccatcacccgttcagtgggttggggtgcagcaaaaattctcagcgaatattatcgcggagaaggggatttaaatgttaatgaagataaaaaagatggtcccgtcactgcggctgatcttgctgctaaccgttacattttagagaaattacaagctgttttccctgaagatacctttggttatttgagtgaagaaacccatgaaggaacagaacctattaataaagagtgggtttggatcattgatcctctggatgggactcgggattttattgataaaactggtgaatatgctttacatatcgccttagcttatcaaggtcgtcccatggtgtctgtagttgccattcccgaagctcaaaaaatctattatgccagtaaaggcaacggtacttttgtggaaacgcccgatgggacaattaccccgatcaaagtatcggaacgaaatcaacttgaagacttatatttagtcgttagtcgtacccatagagacgatcgctttcaagctttaattgaggctttacccttaaaagatcgcatttatatgggtagtgtcgggggaaaaatttcaactttattagaaaaaacctctgatatttatatctctttgtccggtaaatctgcggccaaagattgggacttcgctgcaccggaattaattttaaccgaagcagggggacaatttacccatgaaaacggtgatcccttaatttataaccgaggggatgtgcgtcaatggggttgtttaatcgctagtaatggtcattgtcatgaagctttatgtgcagaagccacgcaaattctagccaaaattgataataaataa

SEQ ID NO: 127160 - protein, 285 aa, Crocosphaera watsonii WH 8501
MTEIQKLEEIEAITRSVGWGAAKILSEYYRGEGDLNVNEDKKDGPVTAADLAANRYILEKLQAVFPEDTFGYLSEETHEGTEPINKEWVWIIDPLDGTRDFIDKTGEYALHIALAYQGRPMVSVVAIPEAQKIYYASKGNGTFVETPDGTITPIKVSERNQLEDLYLVVSRTHRDDRFQALIEALPLKDRIYMGSVGGKISTLLEKTSDIYISLSGKSAAKDWDFAAPELILTEAGGQFTHENGDPLIYNRGDVRQWGCLIASNGHCHEALCAEATQILAKIDNK

SEQ ID NO: 127161 - DNA, 918 bp, Prochlorococcus marinus str. MIT 9211
  CDS (1)..(918): transl_table=11
atgagttctactgattgttttcttccgaatggggtcaatcttgaagatctattagaaggtcttagaagtttgagttggggagctgctgatattttgatggcatatgccaggggaagtaagcctccttatggttttccaatggaattggagatcgaagataatcctggaggaccggtctctgcagctgacttggccgttaatagttggttgcttgatggtattaactctaagtttcctactgcaacttggaagttattgagtgaagagaatgcaaaagaagaatttgttgaaggactttcagcttgtaatggttggatctggatcttagaccctcttgacgggactaaggattttattaaaggaacgggagaatacgccgtgcatttggcacttgtgaatgatcatcatttaaaaatgggggtcgttttgattccagagaaggaagaattatggttcggagttttaggggaaggcgcgtggtgtgagaatcggttgggagaaaaaaggaatgtgaaatttagtaatagaacgcaaatttcggaaatgattcttgtagcaagtaaaagtcatagagataaaacactgtctcaattaatggaaaggatctctcctggagagactaaaggtattggaagtgttggatgcaaagtagggaccatacttagaggagaagcagatttctatatatctttgtcaggcaaaacagctcctaaagattgggatatggcagcacctgaggcagtcctaagggctgcaggaggaggatttacacacgccgatggtagacccctttcatacaacaaagataactatgagcaacgaggatgcttgattgttagccatggtaaaaaccatgaccttatatgtaaactagctgaagatgaaataaaaaaattagaccctttttttgaaatttaa

SEQ ID NO: 127162 - protein, 305 aa, Prochlorococcus marinus str. MIT 9211
MSSTDCFLPNGVNLEDLLEGLRSLSWGAADILMAYARGSKPPYGFPMELEIEDNPGGPVSAADLAVNSWLLDGINSKFPTATWKLLSEENAKEEFVEGLSACNGWIWILDPLDGTKDFIKGTGEYAVHLALVNDHHLKMGVVLIPEKEELWFGVLGEGAWCENRLGEKRNVKFSNRTQISEMILVASKSHRDKTLSQLMERISPGETKGIGSVGCKVGTILRGEADFYISLSGKTAPKDWDMAAPEAVLRAAGGGFTHADGRPLSYNKDNYEQRGCLIVSHGKNHDLICKLAEDEIKKLDPFFEI

SEQ ID NO: 127163 - DNA, 918 bp, Synechococcus sp. RS9917
  CDS (1)..(918): transl_table=11
atgatgccgaccccacagatcctgcctgccgggatcgatcaggaggccttgctggcggcgctccgtcccctgtgttggggcgcggccgacatcttgcgcgcctatgcccggggcgagcagccgccccatggcttcccgcgggctctgagggtggatgatggtggcgagggcccggtctcggcagccgatctggccgtgaatcaatggttgttggatggcctggccgcggcgttcccctccgccgactggaccctgttgagcgaagagaccgccaaagagcagcttcgtgagggcgagcccctggaggcggaatggctctggatcctcgatccgctcgatggcaccaaggattttctgcaaggcaccggtgagtacgccgtgcacctggcgctcgtgcggggccagcgtccgctgctcggcgtggtgctgcttcctgaagcggaggagctctggtttggtgtggtgggcgatggcagctggtgtgaagaccgccgtggcgagcgcagtcctgtgcgtttcagcgagcgttccgctctctctgagctgatcctggtggccagccgcagccatcgcgacgaccggctcgagcagctgattggtgccctggcgctcgggggctcccatgccgtgggcagcgtgggctgcaaggtggcaacgattctgcgcggtgaaaccgatctctacatgtccctctccggtctgagtgctcccaaggattgggacatggcagcgcccgaagcggtgttgctggcggcgggcggcgctttcacccacgccgatggccaccccctcacctacaacaccggcgatgtgcgtcaggccggttgcctgatcgccagtcatggaaaagcccatgccgcgctttgtgagcaggcggcacgggcgatggcctcgattgaccctgggtttcaggtttga

SEQ ID NO: 127164 - protein, 305 aa, Synechococcus sp. RS9917
MMPTPQILPAGIDQEALLAALRPLCWGAADILRAYARGEQPPHGFPRALRVDDGGEGPVSAADLAVNQWLLDGLAAAFPSADWTLLSEETAKEQLREGEPLEAEWLWILDPLDGTKDFLQGTGEYAVHLALVRGQRPLLGVVLLPEAEELWFGVVGDGSWCEDRRGERSPVRFSERSALSELILVASRSHRDDRLEQLIGALALGGSHAVGSVGCKVATILRGETDLYMSLSGLSAPKDWDMAAPEAVLLAAGGAFTHADGHPLTYNTGDVRQAGCLIASHGKAHAALCEQAARAMASIDPGFQV

SEQ ID NO: 127165 - DNA, 936 bp, Synechococcus sp. WH 5701
  CDS (1)..(936): transl_table=11
atgatggctgccccctgcctgcccgccggcctcgatctcgaggagctgctggtgctcttgcggcgcctgtgctgggagtcggggtcgattctgcgggcctacgcccgcggcgagcagcccccctttggctatggcgcggccctgagcgtcgatgaaggcggcgaggggccagtgacggcggctgatctggcggtgaaccagcacctgctcgagggcctcgctcaggcttttcccgatgccccctggaccctgctgagcgaggagaccgccaaggagcaactcagcgccggcgtgcccctcgaggccgactggctctggatcctcgatcccctggatggcaccaaggatttcctccagggcaccggcgaatatgcggtgcatctggcgctggtgcatcagggccagccggtgctcggggtggtgctgctgcctgagaaggaggagctctggttcggtctggtgggcgcggcggctgaggagttgatcggtggcgcctggcgggagaatccggccggcgagcacttcgcgccccagctcagtgaacgccgtgagccgggagagctggtgctggtggccagccgtaaccaccgggatcagcgcctggagcagctggtgcaggcgctggagctgggctcctcgctggcggtgggcagcgtgggttgcaaggtggccacgatcctacgcggcgaaaccgacctttacctctcactttcaggccgcagcgccccgaaggactgggacatggcggcgccggaagcggtgctgcgggcggcgggcggggccttcagccacgccgatggccgccctcttcactacaacaagggtgacggattgcaggccggttgcctgatcgccagccatggtctggcccatgccgaactgtgtgagcgggccgccgccgccatggcgcgaatcgatccgggtttcgagctctga

SEQ ID NO: 127166 - protein, 311 aa, Synechococcus sp. WH 5701
MMAAPCLPAGLDLEELLVLLRRLCWESGSILRAYARGEQPPFGYGAALSVDEGGEGPVTAADLAVNQHLLEGLAQAFPDAPWTLLSEETAKEQLSAGVPLEADWLWILDPLDGTKDFLQGTGEYAVHLALVHQGQPVLGVVLLPEKEELWFGLVGAAAEELIGGAWRENPAGEHFAPQLSERREPGELVLVASRNHRDQRLEQLVQALELGSSLAVGSVGCKVATILRGETDLYLSLSGRSAPKDWDMAAPEAVLRAAGGAFSHADGRPLHYNKGDGLQAGCLIASHGLAHAELCERAAAAMARIDPGFEL

SEQ ID NO: 127167 - DNA, 912 bp, Synechococcus sp. WH 7805
  CDS (1)..(912): transl_table=11
atgatgccgaccgtcccaagccttccagccggtattaatcaggagcagcttcttgaagcgctacgtccgctctgctggggtgctgctgacatcctcagggcctatgcccgtggtgagcagcccccccatggctttgctcgggcgttgagtgtggacgatggcggggaagggccggtgtctgcagctgatctggcggtgaatcaatggctgctggatgggttacgtgctgcattcccggatgccggctggactctgctcagcgaggagaccgcgaaggaacagctgaccgagggcaagcccctggccgccgagtggctctggatcctcgatccccttgatggaaccaaggattttctgcaaggcaccggcgaatacgccgttcatctggcgctggtgcagggggagcgccccgcgttgggggtggtgctgctgccggaggccgacgagctctggttcggagttgtaggccagggcagctggtgcgagaaccgtgcagctgagcgcagccccgtgcgcttcagtgagcgcacatctgacctggtgctggtggcgagccgcagccatcgggatgatcgcctcgaacgcttaatcgcggcgttgcccctcggaggctccatggccgtcggcagcgtgggctgcaaagttgccaccatcctgcgcggggaggctgatgtgtacatctctctctctggaaagagtgctccgaaagactgggacatggcggctccggaagcggtgctgctagctgccggtggggccttcacgcacgccgatggccagcctcttgcttacaacacgggtgatgtgcgtcaggccggttgcctgatcgccagccatggaaaagcccataccacccttgaagaacaggcggcacgggcgatggctgagattgatccaggtttttctctgtga

SEQ ID NO: 127168 - protein, 303 aa, Synechococcus sp. WH 7805
MMPTVPSLPAGINQEQLLEALRPLCWGAADILRAYARGEQPPHGFARALSVDDGGEGPVSAADLAVNQWLLDGLRAAFPDAGWTLLSEETAKEQLTEGKPLAAEWLWILDPLDGTKDFLQGTGEYAVHLALVQGERPALGVVLLPEADELWFGVVGQGSWCENRAAERSPVRFSERTSDLVLVASRSHRDDRLERLIAALPLGGSMAVGSVGCKVATILRGEADVYISLSGKSAPKDWDMAAPEAVLLAAGGAFTHADGQPLAYNTGDVRQAGCLIASHGKAHTTLEEQAARAMAEIDPGFSL

SEQ ID NO: 127169 - DNA, 834 bp, Photobacterium sp. SKA34
  CDS (1)..(834): transl_table=11
atggcctattcgcatttactgcctgatgtggttgagatcgctcgagcatcaggtcaattgattttagatatctatcaacgtggtcagtttgagaaacagatcaaagatgataatacgccggtgacaagtgctgatcttgcggctcataagttagtgatggagcgactgacacaactaacgcctgatattcccgtgttgtcggaagaagatgctagcgtaccattaacagagcgtagccaatggaaacgttattggttagttgacccattagatggtacgcaagaatttattgcaggtagtggtgattttgcgacaatcattgcgttagttgaaggtaaccgcccgatcatgggggttgtttatgcgcctgtctctggggtgtcttattatgcttatgctggtaaaggtgcgtataaaattaccgctgaaggtgaaagtgttaaaattgcaactcatcatcatgaagagaataccaagtcgattgttgttgcgatcagtcgtcgtcaagatattagctcaatcacatcgcgtttagatccgagttataactatgaacttgtgcctttaggctctgcggcattaaaatcatgtttggtggcagaaggcgcggtagattgttacttacgcttaggacctacgggtgaatgggatactgcagcaactcagtgtattgttgaagaggcgggtggccgtattcttaatactcatttaacgccgctgtcttataacgaacgtaatacattagagaatccaaattttattaccttaggtgatgaaggactgccttgggcggatattttagagccggatgatcggatgatgaatgctgactga

SEQ ID NO: 127170 - protein, 277 aa, Photobacterium sp. SKA34
MAYSHLLPDVVEIARASGQLILDIYQRGQFEKQIKDDNTPVTSADLAAHKLVMERLTQLTPDIPVLSEEDASVPLTERSQWKRYWLVDPLDGTQEFIAGSGDFATIIALVEGNRPIMGVVYAPVSGVSYYAYAGKGAYKITAEGESVKIATHHHEENTKSIVVAISRRQDISSITSRLDPSYNYELVPLGSAALKSCLVAEGAVDCYLRLGPTGEWDTAATQCIVEEAGGRILNTHLTPLSYNERNTLENPNFITLGDEGLPWADILEPDDRMMNAD

SEQ ID NO: 127171 - DNA, 837 bp, Xanthobacter autotrophicus Py2
  CDS (1)..(837): transl_table=11
atgagcgtcgagcccacgcgcggccccgacgggcctgcccccgcccccctggcgcgccagctcaccgaaacggtgacggcggcgggcgggatcgcgctcgccatgttccaggccggcgtgaaatcctggaccaaggacaacaactcccccgtcaccgaggcggacatggcggtggatgccttcctccaccgccacctcaccgcgctggatgccggcatcggctggctttccgaggaatccgccgacggcccggcccgcctcggcacccgccggctgtgggtggtggaccccatcgacggcacccgcggcttcatggccggcggccatgactgggcggtctcggtggcgctggtggaagagggccggccggtcctcgccgccctgttcgcgcccgccaccggggagctgttcaccgccgaggccggccgtggcgccatgctcaatggcgcccccctcaaggtggcgccgcgccacaccctcgacggcgcccgggtggccggcccccctgccgatctggacgccctcgcccgccgtgcggcggtggagcgcctgccgcgcgtgcgctcgctggcattgcgcctcgcccgcgtcgccaccggcgagatcgatgtcgccttcgccgccggcaacagcaatgactgggatctggccgccgccgacctcatcgtgcacgaggcccacggcctcctgaccacccgcgacggcaccccgctcacctacaacgcgccggagccgcgccaccccgcgctgctctgcgccggccccacgcttcacgccgccctggtggagaccgcgccgcagcccccgtttttcaacgccactttagatcagcgctag

SEQ ID NO: 127172 - protein, 278 aa, Xanthobacter autotrophicus Py2
MSVEPTRGPDGPAPAPLARQLTETVTAAGGIALAMFQAGVKSWTKDNNSPVTEADMAVDAFLHRHLTALDAGIGWLSEESADGPARLGTRRLWVVDPIDGTRGFMAGGHDWAVSVALVEEGRPVLAALFAPATGELFTAEAGRGAMLNGAPLKVAPRHTLDGARVAGPPADLDALARRAAVERLPRVRSLALRLARVATGEIDVAFAAGNSNDWDLAAADLIVHEAHGLLTTRDGTPLTYNAPEPRHPALLCAGPTLHAALVETAPQPPFFNATLDQR

SEQ ID NO: 127173 - DNA, 927 bp, Synechococcus sp. RS9916
  CDS (1)..(927): transl_table=11
gtgagcaccctgatgtccccttccgttgcgttacccgacggcatcagccaggaggcgttggtcgcgtccttgcgcccgttgtgctggggagcggcggacatcctgcgggcctacgcccgtggcgatcagccgccccatggttttcccaaggccttgagcgtggatgatggcggtgagggccctgtatctgccgctgatctggcggtgaaccagtggttgttggatggtcttcaatcggcgttcccatccgcaggctggacgctgctgagtgaggaaacagcgaaggagcagctcacagacggcgagcctctggctgccgattggctgtggatcctcgatcctctcgatggcaccaaggatttccttcagggcaccggtgaatacgcggtgcatctggccttggtgcatcagcaacgccccgtggtgggagtggtgttgctgccggaagtggacgagctctggttcggcgtggtgggcgatggcacctggtgtgaaaaccgtcagggtgagcggtcaccggtgcgcttcagtgacagaaccgcggtttcggatctgatcctggtggccagccgcagccaccgtgacgaccgactggtgaagctgattgacaccctcgcgctcggcggttccaaagcggtgggcagcgttggctacaaggtcgccacgatcctgcgcggggaaactgacctctacgtctccctctccggcaagagtgctcctaaggactgggacatggctgctccggaagcggtgctgctggctgcaggtggtgccttcacccatgccgacggtcagctcttgacctacaacaccggcgatgtgcgtcaggcgggctgcctgatcgccagccatggccaagcccatgctgagctgtgcgctcagtcggcgaaggcgatggccacgattgatcctggttttcaggtctga

SEQ ID NO: 127174 - protein, 308 aa, Synechococcus sp. RS9916
MSTLMSPSVALPDGISQEALVASLRPLCWGAADILRAYARGDQPPHGFPKALSVDDGGEGPVSAADLAVNQWLLDGLQSAFPSAGWTLLSEETAKEQLTDGEPLAADWLWILDPLDGTKDFLQGTGEYAVHLALVHQQRPVVGVVLLPEVDELWFGVVGDGTWCENRQGERSPVRFSDRTAVSDLILVASRSHRDDRLVKLIDTLALGGSKAVGSVGYKVATILRGETDLYVSLSGKSAPKDWDMAAPEAVLLAAGGAFTHADGQLLTYNTGDVRQAGCLIASHGQAHAELCAQSAKAMATIDPGFQV

SEQ ID NO: 127175 - DNA, 771 bp, Alteromonadales bacterium TW-7
  CDS (1)..(771): transl_table=11
atgaaccaaaccgaactgctagaagaaaccctcatccttgcccgcaccgcaggcaaagccattatggggatttacgaaaaggactttaacgttgaatacaaagccgatgaaagcccagtaaccgacgccgacttagcagctcataaggtcattgtagcggggctacttcagcttacgcccgacatcccaatccttagcgaagaaaacgccgacataagctgggctattcgccaaacgtggaaaagctactggttagtcgatccaatcgacggaaccaaagagttcattaaaaagaacggcgaatttaccgtaaacattgccctaatagaaaacggaaaaccggtactcgcggttgttgatgcccctgcacttggtgtatcgtacctagcaagtgacgccattggcgcgtttaaagacacgggcgatgagcgtatagaacttaaagtaaccaccaagcctaacaaagggttaatacgtgttgtaggcagccgctcgcacccatcccccgatttagccgaatttgtaaagcgctttgacgacgtagaaatggtctcaaaaggcagctcactaaaactgtgtttagttgccgaaggcagcgccgatatttacccgcgcttaggcccaacctgtgaatgggataccggcgcaggccatgcaatcgccgaaatagccggtgcaaaagtcactaaacttgatggcagcccgcttatttataacaccaaagatgagtacttaaatccgtattttattgtaagtgcgatagaagaataa

SEQ ID NO: 127176 - protein, 256 aa, Alteromonadales bacterium TW-7
MNQTELLEETLILARTAGKAIMGIYEKDFNVEYKADESPVTDADLAAHKVIVAGLLQLTPDIPILSEENADISWAIRQTWKSYWLVDPIDGTKEFIKKNGEFTVNIALIENGKPVLAVVDAPALGVSYLASDAIGAFKDTGDERIELKVTTKPNKGLIRVVGSRSHPSPDLAEFVKRFDDVEMVSKGSSLKLCLVAEGSADIYPRLGPTCEWDTGAGHAIAEIAGAKVTKLDGSPLIYNTKDEYLNPYFIVSAIEE

SEQ ID NO: 127177 - DNA, 22 bp, Artificial sequence
  primer
atggtcataagcgagcttttac

SEQ ID NO: 127178 - DNA, 21 bp, Artificial sequence
  primer
ttaattattttgatctagttc

SEQ ID NO: 127179 - protein, 310 aa, Artificial sequence
  consensus sequence
  Variant (2)..(21): Xaa in position 2 to 21 is any amino acid
  Variant (22)..(30): Xaa in position 22 to 30 is any or no amino acid
  Variant (33)..(34): Xaa in position 33 to 34 is any amino acid
  Variant (37)..(46): Xaa in position 37 to 46 is any amino acid
  Variant (48)..(57): Xaa in position 48 to 57 is any amino acid
  Variant (58)..(59): Xaa in position 58 to 59 is any or no amino acid
  Variant (63)..(74): Xaa in position 63 to 74 is any amino acid
  Variant (75)..(100): Xaa in position 75 to 100 is any or no amino acid
  Variant (102)..(103): Xaa in position 102 to 103 is any amino acid
  Variant (110)..(111): Xaa in position 110 to 111 is any amino acid
  Variant (113)..(118): Xaa in position 113 to 118 is any amino acid
  Variant (119)..(120): Xaa in position 119 to 120 is any or no amino acid
  Variant (122)..(124): Xaa in position 122 to 124 is any amino acid
  Variant (127)..(131): Xaa in position 127 to 131 is any amino acid
  Variant (133)..(136): Xaa in position 133 to 136 is any amino acid
  Variant (138)..(139): Xaa in position 138 to 139 is any amino acid
  Variant (141)..(174): Xaa in position 141 to 174 is any amino acid
  Variant (175)..(209): Xaa in position 175 to 209 is any or no amino acid
  Variant (211)..(229): Xaa in position 211 to 229 is any amino acid
  Variant (230)..(231): Xaa in position 230 to 231 is any or no amino acid
  Variant (234)..(235): Xaa in position 234 to 235 is any amino acid
  Variant (236)..(236): Xaa in position 236 is any or no amino acid
  Variant (238)..(243): Xaa in position 238 to 243 is any amino acid
  Variant (245)..(246): Xaa in position 245 to 246 is any amino acid
  Variant (248)..(248): Xaa in position 248 is any amino acid
  Variant (250)..(251): Xaa in position 250 to 251 is any amino acid
  Variant (253)..(257): Xaa in position 253 to 257 is any amino acid
  Variant (258)..(262): Xaa in position 258 to 262 is any or no amino acid
  Variant (265)..(265): Xaa in position 265 is any amino acid
  Variant (268)..(274): Xaa in position 268 to 274 is any amino acid
  Variant (278)..(288): Xaa in position 278 to 288 is any amino acid
  Variant (290)..(306): Xaa in position 290 to 306 is any amino acid
  Variant (307)..(309): Xaa in position 307 to 309 is any or no amino acid
AXXXXXXXXXXXXXXXXXXXXXXXXXXXXXPVXXADXXXXXXXXXXLXXXXXXXXXXXXSEEXXXXXXXXXXXXXXXXXXXXXXXXXXXXXXXXXXXXXXWXXDPLDGTXXFXXXXXXXXAXXXALXXXXXPXXXXVXXPXXXXXXXXXXXXXXXXXXXXXXXXXXXXXXXXXXXXXXXXXXXXXXXXXXXXXXXXXXXXXXXXXXXXXHXXXXXXXXXXXXXXXXXXXXXGSXXXKXXXXXXGXXDXYXXLXXXXXXXXXXWDXAAXXXXXXXAGGXXXXXXXXXXXYXXXXXXXXXXXXXXXXXXXXH

SEQ ID NO: 127180 - protein, 17 aa, Artificial sequence
  protein pattern
  Variant (2)..(4): Xaa in position 2 to 4 is any or no amino acid
  Variant (8)..(8): Xaa in position 8 is any amino acid
  Variant (9)..(9): Xaa in position 9 is Asp, Glu or Gly
  Variant (11)..(11): Xaa in position 11 is Ile or Leu
  Variant (12)..(13): Xaa in position 12 to 13 is any amino acid
  Variant (14)..(14): Xaa in position 14 is Asn, Ser or Thr
  Variant (15)..(15): Xaa in position 15 is Asp, Glu, Gly or Gln
  Variant (16)..(16): Xaa in position 16 is Asp, Glu or Asn
  Variant (17)..(17): Xaa in position 17 is Phe or Tyr
LXXXDGTXXFXXXXXXX

SEQ ID NO: 127181 - protein, 27 aa, Artificial sequence
  protein pattern
  Variant (2)..(8): Xaa in position 2 to 8 is any amino acid
  Variant (9)..(10): Xaa in position 9 to 10 is any or no amino acid
  Variant (13)..(13): Xaa in position 13 is any amino acid
  Variant (16)..(16): Xaa in position 16 is Gly, Pro or Thr
  Variant (17)..(18): Xaa in position 17 to 18 is any amino acid
  Variant (19)..(19): Xaa in position 19 is Ile, Leu or Val
  Variant (20)..(20): Xaa in position 20 is Ile, Leu, Met or Val
  Variant (21)..(21): Xaa in position 21 is any amino acid
  Variant (22)..(22): Xaa in position 22 is Ala, Glu or Thr
  Variant (26)..(26): Xaa in position 26 is any amino acid
  Variant (27)..(27): Xaa in position 27 is Phe, Ile, Leu, Met or Val
LXXXXXXXXXWDXAAXXXXXXXAGGXX

SEQ ID NO: 127182 - protein, 28 aa, Artificial sequence
  protein pattern
  Variant (2)..(3): Xaa in position 2 to 3 is any amino acid
  Variant (4)..(4): Xaa in position 4 is Phe, Ile, Leu or Val
  Variant (7)..(7): Xaa in position 7 is Ala, Asn, Thr or Val
  Variant (8)..(11): Xaa in position 8 to 11 is any amino acid
  Variant (12)..(12): Xaa in position 12 is Leu or Pro
  Variant (13)..(13): Xaa in position 13 is any amino acid
  Variant (14)..(14): Xaa in position 14 is Ile, Leu, Met or Val
  Variant (15)..(15): Xaa in position 15 is Ala, Gly or Ser
  Variant (16)..(16): Xaa in position 16 is any amino acid
  Variant (17)..(17): Xaa in position 17 is Leu or Val
  Variant (18)..(19): Xaa in position 18 to 19 is any amino acid
  Variant (21)..(22): Xaa in position 21 to 22 is any amino acid
  Variant (23)..(23): Xaa in position 23 is Asp, Glu, Gly, Asn or Gln
  Variant (24)..(25): Xaa in position 24 to 25 is any amino acid
  Variant (26)..(26): Xaa in position 26 is Phe, Trp or Tyr
  Variant (27)..(27): Xaa in position 27 is any amino acid
  Variant (28)..(28): Xaa in position 28 is Ala, Gly, Ser or Thr
AXXXALXXXXXXXXXXXXXPXXXXXXXX

SEQ ID NO: 127183 - DNA, 399 bp, Synechocystis sp.
  CDS (1)..(399): transl_table=11
atggaactggaacatcctgacgatctctattatttggattcccacgagtacgtccgctttgatggggaaacggccaccattggcctgagtgcctttgccgtggatgagctgggggatattgtctttgtggagttacccgaagaaggggacaaagtggaatttgagcagtccatgggggcagtggaatcggtcaaggccgcctcggatttatattcccctgtgacgggcactgtgatcgaaaaaaactcagctttggaagatcagccggagttgctcaatcaagacccctacggggaagaaggttggttgatcaaggtgcgcctagatgatgtggaagatgccaaagaaggattgatggccgccggagactaccgcgccaccctagagacgggagattaa

SEQ ID NO: 127184 - protein, 132 aa, Synechocystis sp.; identical to SEQ ID NO: 117269

SEQ ID NO: 127185 - DNA, 483 bp, Oryza sativa (japonica cultivar-group); identical to SEQ ID NO: 117284
  CDS (1)..(483)

SEQ ID NO: 127186 - protein, 160 aa, Oryza sativa (japonica cultivar-group); identical to SEQ ID NO: 117285

SEQ ID NO: 127187 - DNA, 471 bp, Arabidopsis thaliana; identical to SEQ ID NO: 116958
  CDS (1)..(471)

SEQ ID NO: 127188 - protein, 156 aa, Arabidopsis thaliana; identical to SEQ ID NO: 116959

SEQ ID NO: 127189 - DNA, 435 bp, Xylella fastidiosa 9a5c; identical to SEQ ID NO: 116960
  CDS (1)..(435): transl_table=11

SEQ ID NO: 127190 - protein, 144 aa, Xylella fastidiosa 9a5c; identical to SEQ ID NO: 116961

SEQ ID NO: 127191 - DNA, 510 bp, Schizosaccharomyces pombe 972h-; identical to SEQ ID NO: 116964
  CDS (1)..(510)

SEQ ID NO: 127192 - protein, 169 aa, Schizosaccharomyces pombe 972h-; identical to SEQ ID NO: 116965

SEQ ID NO: 127193 - DNA, 420 bp, Thermosynechococcus elongatus BP-1
  CDS (1)..(420): transl_table=11
gtgccagcgatcgcccctgatggattggaatctactatgacactcacctatcctgaggacctgcaatatcttgacagccatgagtacctgcgccttgagggcgacacggctaccctcggcattagtgcctttgctgtggatcaactgggggatatcgtctttgtcgagttgcctgccgttggcgatgccctagaacccggcgaacgctttggcacaattgaatcggtcaaggccgttgaggatctctatgcgccccttgggggaaccgtcattgccgttaatcaagccgtcattgacaaccctgagcaaattgccgcagatccctatggtgaggggtggttggtgaaggtgcaagtcagtaccctccctacgggactcctctcagcagcggattatcgtgccctagtggaaggatcgtag

SEQ ID NO: 127194 - protein, 139 aa, Thermosynechococcus elongatus BP-1
MPAIAPDGLESTMTLTYPEDLQYLDSHEYLRLEGDTATLGISAFAVDQLGDIVFVELPAVGDALEPGERFGTIESVKAVEDLYAPLGGTVIAVNQAVIDNPEQIAADPYGEGWLVKVQVSTLPTGLLSAADYRALVEGS

SEQ ID NO: 127195 - DNA, 393 bp, Escherichia coli CFT073; identical to SEQ ID NO: 117212
  CDS (1)..(393): transl_table=11

SEQ ID NO: 127196 - protein, 130 aa, Escherichia coli CFT073
MMSNIPAELKYSKEHEWLRKEADGTYTVGITEHAQELLGDMVFVDLPEVGATVSAGDDCAVAESVKAASDIYAPVSGEIVAVNDALSDSPELVNSEPYAGGWIFKIKASDESELESLLDATAYEALLEDE

SEQ ID NO: 127197 - DNA, 393 bp, Salmonella enterica subsp. enterica serovar Typhi Ty2; identical to SEQ ID NO: 116968
  CDS (1)..(393): transl_table=11

SEQ ID NO: 127198 - protein, 130 aa, Salmonella enterica subsp. enterica serovar Typhi Ty2; identical to SEQ ID NO: 116969

SEQ ID NO: 127199 - DNA, 375 bp, Bordetella pertussis Tohama I
  CDS (1)..(375): transl_table=11
atgagcctgcccaccgatcgcaagtacaccgagtcccacgaatgggtccaagccgaaggcgatgtgttcgtcgtcggcatcaccgacaacgcccaggagcagctgggcgatctggtcttcgtcggcgacgtcaaggtcggcgccacgctgaaggccggcgaaaccgccggcgtggtcgagtcggtcaaggccgcctcggacatttatgcgccggtcgacggcgagatcgtcgcgttcaacgacgaactcgaagccaaccccagcctgatcaacgaatcggcctataccgcctggatcttcaagatcaagccggccaacgcggccgacctggacaagctgcttgacgcggccggctaccaggccgtcgccggctga

SEQ ID NO: 127200 - protein, 124 aa, Bordetella pertussis Tohama I
MSLPTDRKYTESHEWVQAEGDVFVVGITDNAQEQLGDLVFVGDVKVGATLKAGETAGVVESVKAASDIYAPVDGEIVAFNDELEANPSLINESAYTAWIFKIKPANAADLDKLLDAAGYQAVAG

SEQ ID NO: 127201 - DNA, 399 bp, Prochlorococcus marinus str. MIT 9313; identical to SEQ ID NO: 116976
  CDS (1)..(399): transl_table=11

SEQ ID NO: 127202 - protein, 132 aa, Prochlorococcus marinus str. MIT 9313; identical to SEQ ID NO: 116977

SEQ ID NO: 127203 - DNA, 387 bp, Chromobacterium violaceum ATCC 12472; identical to SEQ ID NO: 116980
  CDS (1)..(387): transl_table=11

SEQ ID NO: 127204 - protein, 128 aa, Chromobacterium violaceum ATCC 12472; identical to SEQ ID NO: 116981

SEQ ID NO: 127205 - DNA, 390 bp, Gloeobacter violaceus PCC 7421; identical to SEQ ID NO: 116984
  CDS (1)..(390): transl_table=11

SEQ ID NO: 127206 - protein, 129 aa, Gloeobacter violaceus PCC 7421; identical to SEQ ID NO: 116985

SEQ ID NO: 127207 - DNA, 393 bp, Photorhabdus luminescens subsp. laumondii TTO1
  CDS (1)..(393): transl_table=11
atgagtaatgtacccgcagagttaaaatatgttgaatcacatgagtgggttcgtgcagaaggtaatgatgaatacacggtaggtattaccgagcatgcacaggagctgctcggtgatatggtttttgttgatttgccggaagtaggtgatcaaatcaatcttggtgatgattgtgcggttgttgaatcagtaaaagcggcttctgatatctatgcaccactgagtggtaaaattattgccgttaatgacgcgctaaatgacgcgcctgaactggttaacagtgagccttatcatgaaggctggctgttccgtattaaagcctctgataaaagtgaactttcgagtttgctgaatgccgaaggatatcaggcacttctggacgaagaagaataa

SEQ ID NO: 127208 - protein, 130 aa, Photorhabdus luminescens subsp. laumondii TTO1
MSNVPAELKYVESHEWVRAEGNDEYTVGITEHAQELLGDMVFVDLPEVGDQINLGDDCAVVESVKAASDIYAPLSGKIIAVNDALNDAPELVNSEPYHEGWLFRIKASDKSELSSLLNAEGYQALLDEEE

SEQ ID NO: 127209 - DNA, 390 bp, Bdellovibrio bacteriovorus HD100; identical to SEQ ID NO: 116990
  CDS (1)..(390): transl_table=11

SEQ ID NO: 127210 - protein, 129 aa, Bdellovibrio bacteriovorus HD100; identical to SEQ ID NO: 116991

SEQ ID NO: 127211 - DNA, 369 bp, Treponema denticola ATCC 35405
  CDS (1)..(369): transl_table=11
atggaaattaaagaagatgtaaaatacttggaatcacacgaatggttcaagaaagaaggaaacatcggtattatcggtatcagtgattatgcccaaagcgaaatgggagatgtcgtattcatcgagcttcctgaagtaggggatgaagttacagctgacaaggcctgtgctacggtagaatccgtaaaggcagttttcgaaatcatcagccccatgacaggaaaggttgttgaaataaacgaagagcttttagatgctcccgaaaaaatcaatgaagatgccttcggttcttggttctttaaggtagaacttaagggagaatcttcaaaattaatggatgcaggtaaatacaaaggtctctgcaaataa

SEQ ID NO: 127212 - protein, 122 aa, Treponema denticola ATCC 35405
MEIKEDVKYLESHEWFKKEGNIGIIGISDYAQSEMGDVVFIELPEVGDEVTADKACATVESVKAVFEIISPMTGKVVEINEELLDAPEKINEDAFGSWFFKVELKGESSKLMDAGKYKGLCK

SEQ ID NO: 127213 - DNA, 513 bp, Nasonia vitripennis; identical to SEQ ID NO: 116992
  CDS (1)..(513)

SEQ ID NO: 127214 - protein, 170 aa, Nasonia vitripennis; identical to SEQ ID NO: 116993

SEQ ID NO: 127215 - DNA, 537 bp, Magnaporthe grisea 70-15; identical to SEQ ID NO: 116994
  CDS (1)..(537)

SEQ ID NO: 127216 - protein, 178 aa, Magnaporthe grisea 70-15; identical to SEQ ID NO: 116995

SEQ ID NO: 127217 - DNA, 522 bp, Gibberella zeae PH-1; identical to SEQ ID NO: 116996
  CDS (1)..(522)

SEQ ID NO: 127218 - protein, 173 aa, Gibberella zeae PH-1; identical to SEQ ID NO: 116997

SEQ ID NO: 127219 - DNA, 507 bp, Gibberella zeae PH-1; identical to SEQ ID NO: 116998
  CDS (1)..(507)

SEQ ID NO: 127220 - protein, 168 aa, Gibberella zeae PH-1; identical to SEQ ID NO: 116999

SEQ ID NO: 127221 - DNA, 519 bp, Candida glabrata CBS 138; identical to SEQ ID NO: 117000
  CDS (1)..(519)

SEQ ID NO: 127222 - protein, 172 aa, Candida glabrata CBS 138; identical to SEQ ID NO: 117001

SEQ ID NO: 127223 - DNA, 528 bp, Kluyveromyces lactis NRRL Y-1140; identical to SEQ ID NO: 117002
  CDS (1)..(528)

SEQ ID NO: 127224 - protein, 175 aa, Kluyveromyces lactis NRRL Y-1140; identical to SEQ ID NO: 117003

SEQ ID NO: 127225 - DNA, 573 bp, Debaryomyces hansenii CBS767; identical to SEQ ID NO: 117004
  CDS (1)..(573)

SEQ ID NO: 127226 - protein, 190 aa, Debaryomyces hansenii CBS767; identical to SEQ ID NO: 117005

SEQ ID NO: 127227 - DNA, 519 bp, Yarrowia lipolytica CLIB122; identical to SEQ ID NO: 117006
  CDS (1)..(519)

SEQ ID NO: 127228 - protein, 172 aa, Yarrowia lipolytica CLIB122; identical to SEQ ID NO: 117007

SEQ ID NO: 127229 - DNA, 522 bp, Aspergillus nidulans FGSC A4; identical to SEQ ID NO: 117008
  CDS (1)..(522)

SEQ ID NO: 127230 - protein, 173 aa, Aspergillus nidulans FGSC A4; identical to SEQ ID NO: 117009

SEQ ID NO: 127231 - DNA, 534 bp, Candida albicans SC5314; identical to SEQ ID NO: 117010
  CDS (1)..(534): transl_table=12

SEQ ID NO: 127232 - protein, 177 aa, Candida albicans SC5314; identical to SEQ ID NO: 117011

SEQ ID NO: 127233 - DNA, 495 bp, Tribolium castaneum; identical to SEQ ID NO: 117012
  CDS (1)..(495)

SEQ ID NO: 127234 - protein, 164 aa, Tribolium castaneum; identical to SEQ ID NO: 117013

SEQ ID NO: 127235 - DNA, 378 bp, Clostridium difficile 630
  CDS (1)..(378): transl_table=11
atgaaattattaccagaattaaaatactctaaagatcatgagtgggtaaaagtaattgatggagatgttgtatatataggtataacagactatgctcaagatcaattaggagaaatattgtttgttgaaacaccagaagtagaagatactgtaactaagggagtagattttggagtagttgagtcttctaaagtagcttctgatttaatatctcctgttaatggtgaggtattggaagttaatgaaaaattagaagatgagccagaatgtataaatgaagacccatatgaaaactggatattaaaagtaaaactagctgatgtggctgaacttgatacgttattaagtgataaagaatacgaggctggattagaataa

SEQ ID NO: 127236 - protein, 125 aa, Clostridium difficile 630
MKLLPELKYSKDHEWVKVIDGDVVYIGITDYAQDQLGEILFVETPEVEDTVTKGVDFGVVESSKVASDLISPVNGEVLEVNEKLEDEPECINEDPYENWILKVKLADVAELDTLLSDKEYEAGLE

SEQ ID NO: 127237 - DNA, 381 bp, Burkholderia vietnamiensis G4
  CDS (1)..(381): transl_table=11
atgagcaacgtcccggccgatctgaagtacaccgacgaacacgagtgggtccgcaccgaggcagacggcacgctgacggtcggcatcaccgatcacgcgcagagcacgctcggcgacatcgtcttcctcgagctgccgcaagtcggcaagtcggtgaatgcgggcgacgcggtgggcgtcgtcgaatcggtgaaggcggcatccgacatctactcgccggtgtccggcgaagtcgtcgcgatcaacgaagaagcgaccgattcgccggaaggcgtgaacggcgacgcatacggcgtgtggctgttcaagctgaagctcgccgacggcgcatcgaccgacaagctgatcgacgccgccgcgtacagcaagctgatcgactaa

SEQ ID NO: 127238 - protein, 126 aa, Burkholderia vietnamiensis G4
MSNVPADLKYTDEHEWVRTEADGTLTVGITDHAQSTLGDIVFLELPQVGKSVNAGDAVGVVESVKAASDIYSPVSGEVVAINEEATDSPEGVNGDAYGVWLFKLKLADGASTDKLIDAAAYSKLID

SEQ ID NO: 127239 - DNA, 387 bp, Thermus thermophilus HB27; identical to SEQ ID NO: 117016
  CDS (1)..(387): transl_table=11

SEQ ID NO: 127240 - protein, 128 aa, Thermus thermophilus HB27; identical to SEQ ID NO: 117017

SEQ ID NO: 127241 - DNA, 369 bp, Candidatus Protochlamydia amoebophila UWE25
  CDS (1)..(369): transl_table=11
atgaaatatacagattctcatgaatgggttgttttagaatcgactgatgtagctcgtattggtgtgacgcagtttgcgcaaaaagaactcggtgatattgtttatgttgaactgccaactctacataaaaaagttactgctggacaggaggtggtggttttagagtctactaaagcggccgctgatgtttattctcctgttagtggagaaatcgttgaagtgaatcaaagtttatctactcagcctgaactcattaatcagtcttccgaaaaagaaggatggttatttaaacttcgtttatctaattcctcagaattagacttattaatggatgaaaaggattatcgtgcgatgttaaacggagcataa

SEQ ID NO: 127242 - protein, 122 aa, Candidatus Protochlamydia amoebophila UWE25
MKYTDSHEWVVLESTDVARIGVTQFAQKELGDIVYVELPTLHKKVTAGQEVVVLESTKAAADVYSPVSGEIVEVNQSLSTQPELINQSSEKEGWLFKLRLSNSSELDLLMDEKDYRAMLNGA

SEQ ID NO: 127243 - DNA, 384 bp, Desulfovibrio vulgaris subsp. vulgaris str. Hildenborough
  CDS (1)..(384): transl_table=11
atgagcatccccgccgaactcaagtacagcaagacccacgaatggattcgcatcgaaggcgacgaagccgtcatcggcatcacccatttcgcacaggaacagcttggcgacctgaccttcgtcgaccttcccggtgtgggcgacaccctcgacgtggaacaggagatgggctccgtcgaatccgtcaaggctgccagcgagctctacgcacctgtcgccggagaggtcatcgccgtcaatgacgccctcgcatcggctcccgaactggtcaaccagtcgccctacaccgaaggctggatgctgcgtgtgaagcttgccgcaacccctgaagacctgctcgacgccaccgcctacggtgaactcgtcgccagcgaagcccactag

SEQ ID NO: 127244 - protein, 127 aa, Desulfovibrio vulgaris subsp. vulgaris str. Hildenborough
MSIPAELKYSKTHEWIRIEGDEAVIGITHFAQEQLGDLTFVDLPGVGDTLDVEQEMGSVESVKAASELYAPVAGEVIAVNDALASAPELVNQSPYTEGWMLRVKLAATPEDLLDATAYGELVASEAH

SEQ ID NO: 127245 - DNA, 369 bp, Bartonella quintana str. Toulouse; identical to SEQ ID NO: 117018
  CDS (1)..(369): transl_table=11

SEQ ID NO: 127246 - protein, 122 aa, Bartonella quintana str. Toulouse; identical to SEQ ID NO: 117019

SEQ ID NO: 127247 - DNA, 375 bp, Acinetobacter sp. ADP1; identical to SEQ ID NO: 117020
  CDS (1)..(375): transl_table=11

SEQ ID NO: 127248 - protein, 124 aa, Acinetobacter sp. ADP1; identical to SEQ ID NO: 117021

SEQ ID NO: 127249 - DNA, 372 bp, Propionibacterium acnes KPA171202
  CDS (1)..(372): transl_table=11
atggaactgtccgaacttaagtactccgccgagcatgagtgggtcgccgttgatggtgacaccgtgaccgtaggaatcaccgactacgccgcagaggccctgggggacgtcgtctttgtcgacgtcccccaggtcggcagcgatgtttctgccggatccgccattggcgaggtcgaatcgactaaatcggtctccgacctctttagccccgtgacgggcaccgtctcggaagttaataaggccatcaccgagtctcccgagcttgtcaactccgatccgttcggacagggatggttgttcaaggtttccggtggtcagctgggtgacgacctcatggaccgtgacgcctacctcaagctcaccgccgagtga

SEQ ID NO: 127250 - protein, 123 aa, Propionibacterium acnes KPA171202
MELSELKYSAEHEWVAVDGDTVTVGITDYAAEALGDVVFVDVPQVGSDVSAGSAIGEVESTKSVSDLFSPVTGTVSEVNKAITESPELVNSDPFGQGWLFKVSGGQLGDDLMDRDAYLKLTAE

SEQ ID NO: 127251 - DNA, 387 bp, Symbiobacterium thermophilum IAM 14863; identical to SEQ ID NO: 117024
  CDS (1)..(387): transl_table=11

SEQ ID NO: 127252 - protein, 128 aa, Symbiobacterium thermophilum IAM 14863; identical to SEQ ID NO: 117025

SEQ ID NO: 127253 - DNA, 387 bp, Neisseria gonorrhoeae FA 1090
  CDS (1)..(387): transl_table=11
atgagcaacaacatcccaacagaactgaaatacgttgccagccatgaatggctgcgccttgaagaagacggtaccattaccgtcggtattacccatcacgcgcaagagctgttgggcgacatcgtgtttgtcgagctgcccgaagtcggtgcgaacctcgccgccgaagaacagtccggtgtggttgagtctgtaaaagccgcatccgacgtgtatgcgccgattgcgggcgaagtcgttgccgtcaacgatgacttgccaggcgcgccggaaaccgccaacagcgacccttacggcgcaggctggttcttcaaaatcaaacctgccaatcctgccgattacgacggcctgctgactgccgaacaatacgcgggcgaagtggattaa

SEQ ID NO: 127254 - protein, 128 aa, Neisseria gonorrhoeae FA 1090
MSNNIPTELKYVASHEWLRLEEDGTITVGITHHAQELLGDIVFVELPEVGANLAAEEQSGVVESVKAASDVYAPIAGEVVAVNDDLPGAPETANSDPYGAGWFFKIKPANPADYDGLLTAEQYAGEVD

SEQ ID NO: 127255 - DNA, 381 bp, Bacteroides fragilis NCTC 9343; identical to SEQ ID NO: 117038
  CDS (1)..(381): transl_table=11

SEQ ID NO: 127256 - protein, 126 aa, Bacteroides fragilis NCTC 9343; identical to SEQ ID NO: 117039

SEQ ID NO: 127257 - DNA, 387 bp, Pseudomonas syringae pv. syringae B728a
  CDS (1)..(387): transl_table=11
atgagcaatattcccgccgagctgcgtttcgccgaaagtcatgaatgggcacgtctggagtcagacggtaccgtgaccgtcggcatctcggaccatgcacaggaagcactgggcgatgtggtcttcgtcgaactgccggaaatcggcacagcgttcgctgccggtgacaccgccggtgttgtcgagtcggtcaaggccgcttcggatatctactcgccggttgcgggcgaggtgatcgaagtcaacacagcgttgggcgatgcccccgagtcgctcaacagtgattcgtacggtgcctggatcttcaagctcaagccaagcgacgccagcggtgatctggccaagctgctggatgcagccgggtacaagagcgctatcggcgaataa

SEQ ID NO: 127258 - protein, 128 aa, Pseudomonas syringae pv. syringae B728a
MSNIPAELRFAESHEWARLESDGTVTVGISDHAQEALGDVVFVELPEIGTAFAAGDTAGVVESVKAASDIYSPVAGEVIEVNTALGDAPESLNSDSYGAWIFKLKPSDASGDLAKLLDAAGYKSAIGE

SEQ ID NO: 127259 - DNA, 390 bp, Colwellia psychrerythraea 34H; identical to SEQ ID NO: 117040
  CDS (1)..(390): transl_table=11

SEQ ID NO: 127260 - protein, 129 aa, Colwellia psychrerythraea 34H; identical to SEQ ID NO: 117041

SEQ ID NO: 127261 - DNA, 387 bp, Dechloromonas aromatica RCB
  CDS (1)..(387): transl_table=11
atgtcgaacgttccttccaacctcaagtacaccgcctcccacgaatggatgctgctcaacgctgacggctcggtcactgtcggcattaccgaccacgcccaggaagccctcggcgacctcgttttcgtcgaactgccggaagtcggcgcccatttcgatgccgaaaaggaaattgctgtcgtcgaatcggtcaaggctgcggctgacgtgtacgccccgatcgccggcaccgtgaccgaagtcaatcaggccgctgccgatgccccggaatcggtcaatcaggacgcctacgccgcctggctgttcaagatgaccccggacaatgtcgccgacctcgacaagatgcttgacgccgctgcctaccaggccgttgctgacgccgcctaa

SEQ ID NO: 127262 - protein, 128 aa, Dechloromonas aromatica RCB
MSNVPSNLKYTASHEWMLLNADGSVTVGITDHAQEALGDLVFVELPEVGAHFDAEKEIAVVESVKAAADVYAPIAGTVTEVNQAAADAPESVNQDAYAAWLFKMTPDNVADLDKMLDAAAYQAVADAA

SEQ ID NO: 127263 - DNA, 381 bp, Thermobifida fusca YX; identical to SEQ ID NO: 117044
  CDS (1)..(381): transl_table=11

SEQ ID NO: 127264 - protein, 126 aa, Thermobifida fusca YX; identical to SEQ ID NO: 117045

SEQ ID NO: 127265 - DNA, 381 bp, Ralstonia eutropha JMP134; identical to SEQ ID NO: 117046
  CDS (1)..(381): transl_table=11

SEQ ID NO: 127266 - protein, 126 aa, Ralstonia eutropha JMP134; identical to SEQ ID NO: 117047

SEQ ID NO: 127267 - DNA, 393 bp, Anabaena variabilis ATCC 29413; identical to SEQ ID NO: 117050
  CDS (1)..(393): transl_table=11

SEQ ID NO: 127268 - protein, 130 aa, Anabaena variabilis ATCC 29413; identical to SEQ ID NO: 117051

SEQ ID NO: 127269 - DNA, 393 bp, Carboxydothermus hydrogenoformans Z-2901; identical to SEQ ID NO: 117056
  CDS (1)..(393): transl_table=11

SEQ ID NO: 127270 - protein, 130 aa, Carboxydothermus hydrogenoformans Z-2901; identical to SEQ ID NO: 117057

SEQ ID NO: 127271 - DNA, 399 bp, Geobacter metallireducens GS-15; identical to SEQ ID NO: 117060
  CDS (1)..(399): transl_table=11

SEQ ID NO: 127272 - protein, 132 aa, Geobacter metallireducens GS-15; identical to SEQ ID NO: 117061

SEQ ID NO: 127273 - DNA, 390 bp, Synechococcus elongatus PCC 7942
  CDS (1)..(390): transl_table=11
atggcgctgatctaccctgacaaccttcgctacttcgacagtcacgagtacgtccgccttgatggtgatattgccgtcattggcatcagcgcctacgccatcgaccagttgggcgacatcgtttttctcgagcttcctgaggttggcagcacgatcgcgatcggagccagttttggcaccgtcgagtcggtcaaagcagtagaggaagtctacgcgccggtgaccggcgagatcatcgagcgcaacgaagccgcactagaagccccagaaattctcaacagcgatccctacgaacaggggtggttgctcaaggtgcagttgacgggcaagccggatttgtcagactcctacgatgcagcccagtatcaagctctggttgagggtcagtag

SEQ ID NO: 127274 - protein, 129 aa, Synechococcus elongatus PCC 7942
MALIYPDNLRYFDSHEYVRLDGDIAVIGISAYAIDQLGDIVFLELPEVGSTIAIGASFGTVESVKAVEEVYAPVTGEIIERNEAALEAPEILNSDPYEQGWLLKVQLTGKPDLSDSYDAAQYQALVEGQ

SEQ ID NO: 127275 - DNA, 381 bp, Rhodospirillum rubrum ATCC 11170; identical to SEQ ID NO: 117064
  CDS (1)..(381): transl_table=11

SEQ ID NO: 127276 - protein, 126 aa, Rhodospirillum rubrum ATCC 11170; identical to SEQ ID NO: 117065

SEQ ID NO: 127277 - DNA, 393 bp, Moorella thermoacetica ATCC 39073; identical to SEQ ID NO: 117068
  CDS (1)..(393): transl_table=11

SEQ ID NO: 127278 - protein, 130 aa, Moorella thermoacetica ATCC 39073; identical to SEQ ID NO: 117069

SEQ ID NO: 127279 - DNA, 390 bp, Syntrophus aciditrophicus SB
  CDS (1)..(390): transl_table=11
atgaaaatatttccagatgatcttctttacagtcgtgaacacatttgggttgccgttgacggtaatatggccacgctgggcattacggattacgcccaggaaaaacttggagacgtggacgaggtcgatctgcccaaagtggactcctttgtcgagagggacgaaccttttggaacgcttgagtctgcaaatgacgtatttgaactggtttcgcctttatcgggagaaatcgtcaatgtcaacgaagacatcatggaggatgtgactatcctgaacagtgatccctatgatgcgggttggattgtggtcatcgaaatgaaagatccggaggaactggatgatcttttggaaatccaggggtatcaggattacattgccgaggaagaatag

SEQ ID NO: 127280 - protein, 129 aa, Syntrophus aciditrophicus SB
MKIFPDDLLYSREHIWVAVDGNMATLGITDYAQEKLGDVDEVDLPKVDSFVERDEPFGTLESANDVFELVSPLSGEIVNVNEDIMEDVTILNSDPYDAGWIVVIEMKDPEELDDLLEIQGYQDYIAEEE

SEQ ID NO: 127281 - DNA, 381 bp, Frankia sp. CcI3; identical to SEQ ID NO: 117072
  CDS (1)..(381): transl_table=11

SEQ ID NO: 127282 - protein, 126 aa, Frankia sp. CcI3; identical to SEQ ID NO: 117073

SEQ ID NO: 127283 - DNA, 372 bp, Novosphingobium aromaticivorans DSM 12444; identical to SEQ ID NO: 117074
  CDS (1)..(372): transl_table=11

SEQ ID NO: 127284 - protein, 123 aa, Novosphingobium aromaticivorans DSM 12444; identical to SEQ ID NO: 117075

SEQ ID NO: 127285 - DNA, 384 bp, Francisella tularensis subsp. holarctica
  CDS (1)..(384): transl_table=11
atgtcaaatattcctaaagaattaaagtatacaaagtcgcatgagtgggtcaaaatagatggtgatgaagtcactgtaggtattacagcacatgcacaatctttattgggcgatttagtctatgttgaattaccagaaataggcgaagagttcgcagctggtgatgattcttgtgtggttgagtctgtcaaagcagcctctgatgtatacgctcctgttgatggtgaggtgattgaaattaatgaagctttggttgatgacccttcacgagtcaatcatacaccatataaagatggctggctatttaaacttaaaatctctgatgaatctcagttagctgatttgctaacagctgatgcttatgcaaaaactcttgaggattaa

SEQ ID NO: 127286 - protein, 127 aa, Francisella tularensis subsp. holarctica
MSNIPKELKYTKSHEWVKIDGDEVTVGITAHAQSLLGDLVYVELPEIGEEFAAGDDSCVVESVKAASDVYAPVDGEVIEINEALVDDPSRVNHTPYKDGWLFKLKISDESQLADLLTADAYAKTLED

SEQ ID NO: 127287 - DNA, 393 bp, Saccharophagus degradans 2-40; identical to SEQ ID NO: 117076
  CDS (1)..(393): transl_table=11

SEQ ID NO: 127288 - protein, 130 aa, Saccharophagus degradans 2-40; identical to SEQ ID NO: 117077

SEQ ID NO: 127289 - DNA, 381 bp, Acidobacteria bacterium Ellin345; identical to SEQ ID NO: 117078
  CDS (1)..(381): transl_table=11

SEQ ID NO: 127290 - protein, 126 aa, Acidobacteria bacterium Ellin345; identical to SEQ ID NO: 117079

SEQ ID NO: 127291 - DNA, 381 bp, Rubrobacter xylanophilus DSM 9941; identical to SEQ ID NO: 117086
  CDS (1)..(381): transl_table=11

SEQ ID NO: 127292 - protein, 126 aa, Rubrobacter xylanophilus DSM 9941; identical to SEQ ID NO: 117087

SEQ ID NO: 127293 - DNA, 369 bp, Mesorhizobium sp. BNC1; identical to SEQ ID NO: 117088
  CDS (1)..(369): transl_table=11

SEQ ID NO: 127294 - protein, 122 aa, Mesorhizobium sp. BNC1; identical to SEQ ID NO: 117089

SEQ ID NO: 127295 - DNA, 381 bp, Cytophaga hutchinsonii ATCC 33406; identical to SEQ ID NO: 117090
  CDS (1)..(381): transl_table=11

SEQ ID NO: 127296 - protein, 126 aa, Cytophaga hutchinsonii ATCC 33406; identical to SEQ ID NO: 117091

SEQ ID NO: 127297 - DNA, 405 bp, Rhodococcus sp. RHA1
  CDS (1)..(405): transl_table=11
atgtcttcgcacgccttccccgacgaccgcagctacaccgacgaccacgagtgggtcctgatcgagccgggcgccgccctccccgacgaaccggtccgcgtcggcatcacgtccgtcgccgtcaactcgctcggcgagctggtcttcgtcgacctgccggaggtcggcgcgaccatcgtcgccggcgaatcgtgcggcgaggtcgagtccacgaagaccgtgtccgagctgtacccgccggtgagcggccgggtcaccctgatcaacaccgccgccgtcgacgaccccggactggtcacctccgacccctacggggagggctggctgttcgccgtccagccgtccgccgccggcgagctgctcaccgcggccgagtatgccgagaagaacggggtgcaggcatga

SEQ ID NO: 127298 - protein, 134 aa, Rhodococcus sp. RHA1
MSSHAFPDDRSYTDDHEWVLIEPGAALPDEPVRVGITSVAVNSLGELVFVDLPEVGATIVAGESCGEVESTKTVSELYPPVSGRVTLINTAAVDDPGLVTSDPYGEGWLFAVQPSAAGELLTAAEYAEKNGVQA

SEQ ID NO: 127299 - DNA, 396 bp, Trichodesmium erythraeum IMS101; identical to SEQ ID NO: 117092
  CDS (1)..(396): transl_table=11

SEQ ID NO: 127300 - protein, 131 aa, Trichodesmium erythraeum IMS101; identical to SEQ ID NO: 117093

SEQ ID NO: 127301 - DNA, 390 bp, Shewanella sp. MR-7
  CDS (1)..(390): transl_table=11
atgagcaatattccgacagaactgaaatacgcctcttcacacgaatggatccgcaaggaagaagacggtagctacactgtgggtatcactgagcatgctcaagagctgttaggtgacatggttttcgttgagctgccagaagtgggcgacactgtcacggcgggcaacgactgtgcagtggctgaatcagtgaaagcggcttctgacatctacgcgccaatctctggtgaagtgattgccgtcaacgaagcactggaagattctccagagctcgtaaacagcgacgcttacggcgaaggctggttcttccgcgttatgccttctgatgaatcagaagttgacgctctgctcgatgcagaaggttaccaagctgtaatcgacgaggaataa

SEQ ID NO: 127302 - protein, 129 aa, Shewanella sp. MR-7
MSNIPTELKYASSHEWIRKEEDGSYTVGITEHAQELLGDMVFVELPEVGDTVTAGNDCAVAESVKAASDIYAPISGEVIAVNEALEDSPELVNSDAYGEGWFFRVMPSDESEVDALLDAEGYQAVIDEE

SEQ ID NO: 127303 - DNA, 393 bp, Alkalilimnicola ehrlichei MLHE-1; identical to SEQ ID NO: 117094
  CDS (1)..(393): transl_table=11

SEQ ID NO: 127304 - protein, 130 aa, Alkalilimnicola ehrlichei MLHE-1; identical to SEQ ID NO: 117095

SEQ ID NO: 127305 - DNA, 372 bp, Hyphomonas neptunium ATCC 15444; identical to SEQ ID NO: 117096
  CDS (1)..(372): transl_table=11

SEQ ID NO: 127306 - protein, 123 aa, Hyphomonas neptunium ATCC 15444; identical to SEQ ID NO: 117097

SEQ ID NO: 127307 - DNA, 384 bp, Solibacter usitatus Ellin6076; identical to SEQ ID NO: 117098
  CDS (1)..(384): transl_table=11

SEQ ID NO: 127308 - protein, 127 aa, Solibacter usitatus Ellin6076; identical to SEQ ID NO: 117099

SEQ ID NO: 127309 - DNA, 423 bp, Magnetococcus sp. MC-1
  CDS (1)..(423): transl_table=11
atgtccattccgcaggaactatactataccaaagaccatgagtggctacgtaaagaaggggatgaggtggtgatcggcattacccgctttgccgccgatcaattgggcgatgtggtgtttgtggagctcccccaggtagaagataccctgcaaatggggggtaccttcggtgtggttgaatcggttaaagccgcatcggacctcttttcacccatcaccgggcaggtgatcgcaaccaatccagacctcgcagaagccccagagttggttaacgaagatccctatggtaaagggtggatgttacgcttgaaacccgaagatcctgcacaaatggatgcattgcttaccgcccaagcgtataccgcttggcttgaaacctgctcaagtttcgcagttcgtttcggccagaatttgacgttgtga

SEQ ID NO: 127310 - protein, 140 aa, Magnetococcus sp. MC-1
MSIPQELYYTKDHEWLRKEGDEVVIGITRFAADQLGDVVFVELPQVEDTLQMGGTFGVVESVKAASDLFSPITGQVIATNPDLAEAPELVNEDPYGKGWMLRLKPEDPAQMDALLTAQAYTAWLETCSSFAVRFGQNLTL

SEQ ID NO: 127311 - DNA, 399 bp, Mycobacterium avium 104; identical to SEQ ID NO: 117100
  CDS (1)..(399): transl_table=11

SEQ ID NO: 127312 - protein, 132 aa, Mycobacterium avium 104; identical to SEQ ID NO: 117101

SEQ ID NO: 127313 - DNA, 387 bp, Nocardioides sp. JS614; identical to SEQ ID NO: 117104
  CDS (1)..(387): transl_table=11

SEQ ID NO: 127314 - protein, 128 aa, Nocardioides sp. JS614; identical to SEQ ID NO: 117105

SEQ ID NO: 127315 - DNA, 384 bp, Azoarcus sp. BH72
  CDS (1)..(384): transl_table=11
atgagcaccatccccaacgatctcaagtacaccaagtctcacgagtggatccgcctggaggcggatggcaccctcaccgtgggtgtcaccgaccacgcgcaagccgcgctgggtgacgtcgtgtttctcgaactgccggaggccggccgggttgtcagcgcaggtgaagcctgcgccgtgatcgagtccgtcaaggcggcttccgacatctacgcccccgtggccggcgaagtcatcgcgcgcaacgacagcgttaccgatgccccggagagcgtgaatgccgacgcctacgccgcgtggctgttcaagctcaagcccgccaacgccggcgacacctcggcgctgctcgacgcagccggctacgcgaccgaaatcgccgactga

SEQ ID NO: 127316 - protein, 127 aa, Azoarcus sp. BH72
MSTIPNDLKYTKSHEWIRLEADGTLTVGVTDHAQAALGDVVFLELPEAGRVVSAGEACAVIESVKAASDIYAPVAGEVIARNDSVTDAPESVNADAYAAWLFKLKPANAGDTSALLDAAGYATEIAD

SEQ ID NO: 127317 - DNA, 375 bp, Acidovorax sp. JS42
  CDS (1)..(375): transl_table=11
atgagcatccagttttccaaagaccatgaatggatcaacgcagccgacccggccgcggccgtcgtcggcatcaccgtccacgcgcaggatgcgttgggcgatgtggtgttcgtggacctgcccgcggtgggcaccacctttgcccagggcgacgtggccggtgtggtcgagtccgtcaaggccgctgccgatgtctacatgcccgtgtccggcgaaatcgtcgaggtcaacgaggccttgcgcgccgacccgtccctggccaactccgacccgctgggcgccggctggttcttcaaggtcaagctcagcgacgccggccagctcgccggcctgatggacgaaacggcctataccgccttcgcccagaacgcctga

SEQ ID NO: 127318 - protein, 124 aa, Acidovorax sp. JS42
MSIQFSKDHEWINAADPAAAVVGITVHAQDALGDVVFVDLPAVGTTFAQGDVAGVVESVKAAADVYMPVSGEIVEVNEALRADPSLANSDPLGAGWFFKVKLSDAGQLAGLMDETAYTAFAQNA

SEQ ID NO: 127319 - DNA, 390 bp, Nostoc punctiforme PCC 73102; identical to SEQ ID NO: 117108
  CDS (1)..(390): transl_table=11

SEQ ID NO: 127320 - protein, 129 aa, Nostoc punctiforme PCC 73102; identical to SEQ ID NO: 117109

SEQ ID NO: 127321 - DNA, 408 bp, Bifidobacterium longum DJO10A; identical to SEQ ID NO: 117110
  CDS (1)..(408): transl_table=11

SEQ ID NO: 127322 - protein, 135 aa, Bifidobacterium longum DJO10A; identical to SEQ ID NO: 117111

SEQ ID NO: 127323 - DNA, 399 bp, Crocosphaera watsonii WH 8501; identical to SEQ ID NO: 117112
  CDS (1)..(399): transl_table=11

SEQ ID NO: 127324 - protein, 132 aa, Crocosphaera watsonii WH 8501; identical to SEQ ID NO: 117113

SEQ ID NO: 127325 - DNA, 384 bp, Prosthecochloris aestuarii DSM 271; identical to SEQ ID NO: 117114
  CDS (1)..(384): transl_table=11

SEQ ID NO: 127326 - protein, 127 aa, Prosthecochloris aestuarii DSM 271; identical to SEQ ID NO: 117115

SEQ ID NO: 127327 - DNA, 396 bp, Xylella fastidiosa Dixon; identical to SEQ ID NO: 117118
  CDS (1)..(396): transl_table=11

SEQ ID NO: 127328 - protein, 131 aa, Xylella fastidiosa Dixon; identical to SEQ ID NO: 117119

SEQ ID NO: 127329 - DNA, 378 bp, Croceibacter atlanticus HTCC2559; identical to SEQ ID NO: 117120
  CDS (1)..(378): transl_table=11

SEQ ID NO: 127330 - protein, 125 aa, Croceibacter atlanticus HTCC2559; identical to SEQ ID NO: 117121

SEQ ID NO: 127331 - DNA, 360 bp, Roseovarius nubinhibens ISM; identical to SEQ ID NO: 117124
  CDS (1)..(360): transl_table=11

SEQ ID NO: 127332 - protein, 119 aa, Roseovarius nubinhibens ISM; identical to SEQ ID NO: 117125

SEQ ID NO: 127333 - DNA, 360 bp, Oceanicola batsensis HTCC2597; identical to SEQ ID NO: 117126
  CDS (1)..(360): transl_table=11

SEQ ID NO: 127334 - protein, 119 aa, Oceanicola batsensis HTCC2597; identical to SEQ ID NO: 117127

SEQ ID NO: 127335 - DNA, 372 bp, Erythrobacter sp. NAP1; identical to SEQ ID NO: 117128
  CDS (1)..(372): transl_table=11

SEQ ID NO: 127336 - protein, 123 aa, Erythrobacter sp. NAP1; identical to SEQ ID NO: 117129

SEQ ID NO: 127337 - DNA, 381 bp, Photobacterium sp. SKA34; identical to SEQ ID NO: 117134
  CDS (1)..(381): transl_table=11

SEQ ID NO: 127338 - protein, 126 aa, Photobacterium sp. SKA34; identical to SEQ ID NO: 117135

SEQ ID NO: 127339 - DNA, 393 bp, Oceanospirillum sp. MED92; identical to SEQ ID NO: 117136
  CDS (1)..(393): transl_table=11

SEQ ID NO: 127340 - protein, 130 aa, Oceanospirillum sp. MED92; identical to SEQ ID NO: 117137

SEQ ID NO: 127341 - DNA, 378 bp, Xanthobacter autotrophicus Py2
  CDS (1)..(378): transl_table=11
atgacgagcgtgcgctacacgaaggaccacgaatatgtgcgcgtcgaaggcgacgtggccgtggtgggcatctccgactatgcccagcagcagctgggtgacgtggtgttcgtcgagctgccggagatcggcaaggtcgtgaccaagggcggcgaggccgccgtggtggagagcgtgaaggcggcgagcgaggtctacgccccgctctccggcgaggtggtggaggtgaacagcgagctggaaggcgcccccggcctcgtcaacgaggctccggaaggcaagggctggttcatgaagctgaagctctccaaccccgccgagctggacgagcttttgaatgagcacgcctacaaggacttcctggacacgttggcctga

SEQ ID NO: 127342 - protein, 125 aa, Xanthobacter autotrophicus Py2
MTSVRYTKDHEYVRVEGDVAVVGISDYAQQQLGDVVFVELPEIGKVVTKGGEAAVVESVKAASEVYAPLSGEVVEVNSELEGAPGLVNEAPEGKGWFMKLKLSNPAELDELLNEHAYKDFLDTLA

SEQ ID NO: 127343 - DNA, 381 bp, Flavobacteria bacterium BBFL7; identical to SEQ ID NO: 117140
  CDS (1)..(381): transl_table=11

SEQ ID NO: 127344 - protein, 126 aa, Flavobacteria bacterium BBFL7; identical to SEQ ID NO: 117141

SEQ ID NO: 127345 - DNA, 387 bp, Desulfitobacterium hafniense DCB-2; identical to SEQ ID NO: 117146
  CDS (1)..(387): transl_table=11

SEQ ID NO: 127346 - protein, 128 aa, Desulfitobacterium hafniense DCB-2; identical to SEQ ID NO: 117147

SEQ ID NO: 127347 - DNA, 381 bp, Vibrio sp. Ex25
  CDS (1)..(381): transl_table=11
atggacaaaacactgaagtttacagatagccacgagtgggtacgtgacaacggtgacggcacagtaacacttggtatttctgagcatgcgcaagaaatgttgggtgacgtagtattcgttgacctaccagacgtagaagacgaagtagaagcaggtgaaagcttctctttggttgagtctgtaaaagcagcgtcagatatctactctcctgttaccggtgaaatcgtagaaatcaacgaagaactagaagacagcccagagctaatcaacgaagaaccgtacgaaggtggttggattgtgaaagtgaagctttcaaacccatctgagttcgatgacttaaaagacgcggaagaatacctaaactctatcgaagaagagtaa

SEQ ID NO: 127348 - protein, 126 aa, Vibrio sp. Ex25
MDKTLKFTDSHEWVRDNGDGTVTLGISEHAQEMLGDVVFVDLPDVEDEVEAGESFSLVESVKAASDIYSPVTGEIVEINEELEDSPELINEEPYEGGWIVKVKLSNPSEFDDLKDAEEYLNSIEEE

SEQ ID NO: 127349 - DNA, 393 bp, marine gamma proteobacterium HTCC2080; identical to SEQ ID NO: 117152
  CDS (1)..(393): transl_table=11

SEQ ID NO: 127350 - protein, 130 aa, marine gamma proteobacterium HTCC2080; identical to SEQ ID NO: 117153

SEQ ID NO: 127351 - DNA, 378 bp, Pseudomonas putida GB-1
  CDS (1)..(378): transl_table=11
atgagcactctgcgttttacccccgaacacgaatggctgcgcctggaggcgactggcgagttgaccgtcggtattaccagctatgcccaggcggcattgggggacgtggtgtacgtacagctgccggagccgggtgcgtatggcgagggcaatgaagtcgcggtgctcgagtcggtgaaggccgccagcaacatcaccatgcctttgaccggcaccgtggtggccgtcaaccaggcgctggccgacgacccagagctggtcaacgcctcgccaatgcaggacggctggttcttccgcatccaggccagcaaccctggcgacctcgatagcctgatggaccaggacggctatgaccgtttcctggccgaaaacgcctga

SEQ ID NO: 127352 - protein, 125 aa, Pseudomonas putida GB-1
MSTLRFTPEHEWLRLEATGELTVGITSYAQAALGDVVYVQLPEPGAYGEGNEVAVLESVKAASNITMPLTGTVVAVNQALADDPELVNASPMQDGWFFRIQASNPGDLDSLMDQDGYDRFLAENA

SEQ ID NO: 127353 - DNA, 384 bp, Pseudomonas putida GB-1
  CDS (1)..(384): transl_table=11
atgagcaatatccccgccgacctgcgttttgccgaaagccatgaatgggctcgcctggaagccgacggcagcgtgaccgtgggtatcagcgaccacgcccagcaagccttgggtgacgtggtgttcgtcgagttggccgaagtcggcaaggtattcgccgctggcgacgctgccggcgtggtcgagtcggtcaaggccgcttcggacatctacgccccgatcggtggcgaagtgattgccgtcaacgaagaactggccgacagcccagagcagctcaacgaagaaccgtacggcgcgtggatcttcaaactgaagccaagcgacaaggccgagctggacaagctgctggacgctgctggttacgcagcagctatcggcgagtaa

SEQ ID NO: 127354 - protein, 127 aa, Pseudomonas putida GB-1
MSNIPADLRFAESHEWARLEADGSVTVGISDHAQQALGDVVFVELAEVGKVFAAGDAAGVVESVKAASDIYAPIGGEVIAVNEELADSPEQLNEEPYGAWIFKLKPSDKAELDKLLDAAGYAAAIGE

SEQ ID NO: 127355 - DNA, 384 bp, Pseudomonas putida GB-1
  CDS (1)..(384): transl_table=11
atgagcgagttgcgtttcactgaagatcacgaatggctgcgcgtcgaagccgatggcagcgtcaccgtgggcatcaccgcctacgcccagaacgcccttggcgatgtggttttcgtgcaactgcccgagttgcagcagtacgagaaaggcagcgaagcgtccaccgttgaatcggtaaaggccgccagcggcgtgtacatgccgctgagcggcgaagtggtcgcggtcaacgaccagctggaaaacagcccagagctggtcaacgaagacccgatgggcgaaggctggttcttccgcttcaacccggccgacatgagcgaagtcagcgcactgctcgaccaggacgcctacgaccgcctgatcaaagccaacgacgacgcttga

SEQ ID NO: 127356 - protein, 127 aa, Pseudomonas putida GB-1
MSELRFTEDHEWLRVEADGSVTVGITAYAQNALGDVVFVQLPELQQYEKGSEASTVESVKAASGVYMPLSGEVVAVNDQLENSPELVNEDPMGEGWFFRFNPADMSEVSALLDQDAYDRLIKANDDA

SEQ ID NO: 127357 - DNA, 390 bp, Marinobacter sp. ELB17
  CDS (1)..(390): transl_table=11
atgagcgatgttccctctgatttgaaataccttgaaacccaccagtgggtgcgggtagataaaagcggtctggccaccgtgggcattaccgattttgcccagcggcagttgggcgacgtggtttatattggcgttccggagctgggcgctaccgtgaccggcggcgaagaagccggcgtggtggagtccgtcaaatctgcctcagacgtattcagcccggtaacgggcgaagtggtcgaaattaacgagcggctagaagacgagccggaaaaagtgaacgaagacccttacggcgaaggctggctgtttcgggtgaaaatgaccgacgacggcgagcttgatggcctgatggatgcagacacttacagcgacctggtcgcagcggagtaa

SEQ ID NO: 127358 - protein, 129 aa, Marinobacter sp. ELB17
MSDVPSDLKYLETHQWVRVDKSGLATVGITDFAQRQLGDVVYIGVPELGATVTGGEEAGVVESVKSASDVFSPVTGEVVEINERLEDEPEKVNEDPYGEGWLFRVKMTDDGELDGLMDADTYSDLVAAE

SEQ ID NO: 127359 - DNA, 879 bp, Populus tremuloides; identical to SEQ ID NO: 117154
  CDS (111)..(578)

SEQ ID NO: 127360 - protein, 155 aa, Populus tremuloides; identical to SEQ ID NO: 117155

SEQ ID NO: 127361 - DNA, 468 bp, Medicago truncatula; identical to SEQ ID NO: 117160
  CDS (1)..(468)

SEQ ID NO: 127362 - protein, 155 aa, Medicago truncatula; identical to SEQ ID NO: 117161

SEQ ID NO: 127363 - DNA, 522 bp, Aspergillus oryzae; identical to SEQ ID NO: 117162
  CDS (1)..(522)

SEQ ID NO: 127364 - protein, 173 aa, Aspergillus oryzae; identical to SEQ ID NO: 117163

SEQ ID NO: 127365 - DNA, 489 bp, Flaveria pringlei; identical to SEQ ID NO: 117164
  CDS (1)..(489)

SEQ ID NO: 127366 - protein, 162 aa, Flaveria pringlei; identical to SEQ ID NO: 117165

SEQ ID NO: 127367 - DNA, 387 bp, Eubacterium acidaminophilum; identical to SEQ ID NO: 117166
  CDS (1)..(387): transl_table=11

SEQ ID NO: 127368 - protein, 128 aa, Eubacterium acidaminophilum; identical to SEQ ID NO: 117167

SEQ ID NO: 127369 - DNA, 749 bp, Populus tremuloides; identical to SEQ ID NO: 117170
  CDS (47)..(544)

SEQ ID NO: 127370 - protein, 165 aa, Populus tremuloides; identical to SEQ ID NO: 117171

SEQ ID NO: 127371 - DNA, 677 bp, Flaveria cronquistii; identical to SEQ ID NO: 117172
  CDS (50)..(538)

SEQ ID NO: 127372 - protein, 162 aa, Flaveria cronquistii; identical to SEQ ID NO: 117173

SEQ ID NO: 127373 - DNA, 783 bp, Populus tremuloides; identical to SEQ ID NO: 117174
  CDS (65)..(532)

SEQ ID NO: 127374 - protein, 155 aa, Populus tremuloides; identical to SEQ ID NO: 117175

SEQ ID NO: 127375 - DNA, 498 bp, Arabidopsis thaliana; identical to SEQ ID NO: 117176
  CDS (1)..(498)

SEQ ID NO: 127376 - protein, 165 aa, Arabidopsis thaliana; identical to SEQ ID NO: 117177

SEQ ID NO: 127377 - DNA, 384 bp, Pseudomonas putida; identical to SEQ ID NO: 117178
  CDS (1)..(384): transl_table=11

SEQ ID NO: 127378 - protein, 127 aa, Pseudomonas putida; identical to SEQ ID NO: 117179

SEQ ID NO: 127379 - DNA, 414 bp, Sulfolobus solfataricus; identical to SEQ ID NO: 117182
  CDS (1)..(414): transl_table=11

SEQ ID NO: 127380 - protein, 137 aa, Sulfolobus solfataricus; identical to SEQ ID NO: 117183

SEQ ID NO: 127381 - DNA, 378 bp, Thermoanaerobacter tengcongensis; identical to SEQ ID NO: 117184
  CDS (1)..(378): transl_table=11

SEQ ID NO: 127382 - protein, 125 aa, Thermoanaerobacter tengcongensis; identical to SEQ ID NO: 117185

SEQ ID NO: 127383 - DNA, 501 bp, Arabidopsis thaliana; identical to SEQ ID NO: 117186
  CDS (1)..(501)

SEQ ID NO: 127384 - protein, 166 aa, Arabidopsis thaliana; identical to SEQ ID NO: 117187

SEQ ID NO: 127385 - DNA, 384 bp, Pseudomonas putida
  CDS (1)..(384): transl_table=11
atgagcaatatccccgccgaactgcgttttgccgaaagccatgagtgggctcgcctggaagccgacggcagtgtgaccgtgggtatcagcgatcacgcccaggaagccttgggtgatgtggtattcgtcgagctggctgaagtcggcaaagtgtttggcgctggcgacgctgcgggtgtggtcgagtcggtcaaggccgcttcggacatctatgccccggtcggtggcgaagtgattgcggtcaacgaagagctggccgatagcccggaactgctgaacgaagagccttacggttcgtggatcttcaaattgaagccaagcaacccggccgagctggacaagttgctggatgcggctggctaccaggcgctgattggcgagtaa

SEQ ID NO: 127386 - protein, 127 aa, Pseudomonas putida
MSNIPAELRFAESHEWARLEADGSVTVGISDHAQEALGDVVFVELAEVGKVFGAGDAAGVVESVKAASDIYAPVGGEVIAVNEELADSPELLNEEPYGSWIFKLKPSNPAELDKLLDAAGYQALIGE

SEQ ID NO: 127387 - DNA, 516 bp, Aquifex aeolicus; identical to SEQ ID NO: 117190
  CDS (1)..(516): transl_table=11

SEQ ID NO: 127388 - protein, 171 aa, Aquifex aeolicus; identical to SEQ ID NO: 117191

SEQ ID NO: 127389 - DNA, 363 bp, Agrobacterium tumefaciens; identical to SEQ ID NO: 117194
  CDS (1)..(363): transl_table=11

SEQ ID NO: 127390 - protein, 120 aa, Agrobacterium tumefaciens; identical to SEQ ID NO: 117195

SEQ ID NO: 127391 - DNA, 384 bp, Bacillus anthracis; identical to SEQ ID NO: 117196
  CDS (1)..(384): transl_table=11

SEQ ID NO: 127392 - protein, 127 aa, Bacillus anthracis; identical to SEQ ID NO: 117197

SEQ ID NO: 127393 - DNA, 369 bp, Bradyrhizobium japonicum
  CDS (1)..(369): transl_table=11
atgaccacgacgctgtacacctccgaccatgaatggctcgccatcgagggcgatgtcgccaccgtcgggatcaccgactacgcgcagtcgcagctcggcgacgtcgtgttcatcgagctgcccaagctcggccgcgcgctgaagaaggcggaagccgccgccgtggtggagtccgtgaaggccgcctccgacgtctacgcgcctgtgacgggcgaggtgctcgagaccaacgatgcgctcgccgccgagccggcgctggtgaactcggatgcgcaaggcaaggcctggttcttcaagatcaagattgccgacaagagcgaactaggcggcctcatggatgaagccgcctacaaggcccacacggcgtga

SEQ ID NO: 127394 - protein, 122 aa, Bradyrhizobium japonicum
MTTTLYTSDHEWLAIEGDVATVGITDYAQSQLGDVVFIELPKLGRALKKAEAAAVVESVKAASDVYAPVTGEVLETNDALAAEPALVNSDAQGKAWFFKIKIADKSELGGLMDEAAYKAHTA

SEQ ID NO: 127395 - DNA, 378 bp, Brucella melitensis
  CDS (1)..(378): transl_table=11
atgatttccatggccaatatcctgttcaccgaagatcatgagtggatcaacgtcgaaaacggcgttgccacggttggcatcacgatccacgcacaggaacagctcggcgacctcgttttcgtcgaattgccggaagtgggccgcaccgttgccaagggcgatggcgtggtggttgtggagtcggtcaaggccgcttccgacgtctacgcgccggtcgatggcgaagtggtggaagtcaacgatgctgtcgcgagcgatccttcccttatcaatcaggctgccgaaggcgaaggctggctgttcaagctgaagcttgccgatgaaggccagctcacgggcctgctcgacaaggccggttatgaaaagctgatcgggtga

SEQ ID NO: 127396 - protein, 125 aa, Brucella melitensis
MISMANILFTEDHEWINVENGVATVGITIHAQEQLGDLVFVELPEVGRTVAKGDGVVVVESVKAASDVYAPVDGEVVEVNDAVASDPSLINQAAEGEGWLFKLKLADEGQLTGLLDKAGYEKLIG

SEQ ID NO: 127397 - DNA, 366 bp, Caulobacter crescentus; identical to SEQ ID NO: 117202
  CDS (1)..(366): transl_table=11

SEQ ID NO: 127398 - protein, 121 aa, Caulobacter crescentus; identical to SEQ ID NO: 117203

SEQ ID NO: 127399 - DNA, 384 bp, Chlorobium tepidum; identical to SEQ ID NO: 117204
  CDS (1)..(384): transl_table=11

SEQ ID NO: 127400 - protein, 127 aa, Chlorobium tepidum; identical to SEQ ID NO: 117205

SEQ ID NO: 127401 - DNA, 393 bp, Coxiella burnetii
  CDS (1)..(393): transl_table=11
atggcagaatttccggctgagttatattacagcaaaaaccatgaatggatgagaaaagaaagcgacgaaacttttaccgttggcatcaccgatcacgctcaggagcaattgggtgatttagtatttgttgaattacccgaaacgaatattcacgtagacgctggcgatgaagtggctgttgtggaatcggtaaaaacagccgccgacgtttattctcccctcagcggcaaagtcatcgaaattaacaacgccttggaaaacgaaccagcaacggtgaatcgcgatccttacggggatggttggttgtatcgtataaccattgatgacgaaaaggaattaaatgatttattagacgccgatggttatcaaactttaattgaagcagaatcttaa

SEQ ID NO: 127402 - protein, 130 aa, Coxiella burnetii
MAEFPAELYYSKNHEWMRKESDETFTVGITDHAQEQLGDLVFVELPETNIHVDAGDEVAVVESVKTAADVYSPLSGKVIEINNALENEPATVNRDPYGDGWLYRITIDDEKELNDLLDADGYQTLIEAES

SEQ ID NO: 127403 - DNA, 498 bp, Drosophila melanogaster; identical to SEQ ID NO: 117208
  CDS (1)..(498)

SEQ ID NO: 127404 - protein, 165 aa, Drosophila melanogaster; identical to SEQ ID NO: 117209

SEQ ID NO: 127405 - DNA, 390 bp, Escherichia coli O157; identical to SEQ ID NO: 117210
  CDS (1)..(390): transl_table=11

SEQ ID NO: 127406 - protein, 129 aa, Escherichia coli O157; identical to SEQ ID NO: 117211

SEQ ID NO: 127407 - DNA, 628 bp, Flaveria anomala; identical to SEQ ID NO: 117214
  CDS (1)..(489)

SEQ ID NO: 127408 - protein, 162 aa, Flaveria anomala; identical to SEQ ID NO: 117215

SEQ ID NO: 127409 - DNA, 694 bp, Flaveria pringlei; identical to SEQ ID NO: 117216
  CDS (60)..(548)

SEQ ID NO: 127410 - protein, 162 aa, Flaveria pringlei; identical to SEQ ID NO: 117217

SEQ ID NO: 127411 - DNA, 650 bp, Flaveria trinervia; identical to SEQ ID NO: 117218
  CDS (1)..(498)

SEQ ID NO: 127412 - protein, 165 aa, Flaveria trinervia; identical to SEQ ID NO: 117219

SEQ ID NO: 127413 - DNA, 375 bp, Halobacterium salinarium
  CDS (1)..(375): transl_table=11
atgagcttcgacgttcctgacgacctgcagtatctcgaatcacacgaatggatcgaccctgcgaccggccgcgtcggcatcagcgagttcgcccaagacgaactcggcgatgtcgtgttcgtggagctgccgagcgtcggcgacgcgctcgaccagcacgacgagctcggcgtcgtcgagtctatcaaggcggtttcggacctgtacgcgcccgtttcgggcgaggtgacggcggtcaacgacgccctgacgaacgagccggagttggtcaacgaggcccccttcggcgacggctggctggtcgagatcgacttcgacagcgacgacctcgaagcgacgcttgactccgacgactaccgcgcacagatcgcgtga

SEQ ID NO: 127414 - protein, 124 aa, Halobacterium salinarium
MSFDVPDDLQYLESHEWIDPATGRVGISEFAQDELGDVVFVELPSVGDALDQHDELGVVESIKAVSDLYAPVSGEVTAVNDALTNEPELVNEAPFGDGWLVEIDFDSDDLEATLDSDDYRAQIA

SEQ ID NO: 127415 - DNA, 378 bp, Listeria monocytogenes
  CDS (1)..(378): transl_table=11
atgagtttaccaaaagacttattgtacacagaagaacacgaatgggtgaaagcagacgatggtagttatgttattggaattacggactttgctcaagatcaattaggggatatcgtatttgttgaattgccagaggttggcgacactgtaacaaaaggtgactccatcggtagcattgaatctgtaaaaacagtatctgatttttacgcaccagtaactggtaaagtagttgctgttaacgaaacattagaagatgaaccagaattaattaatagcaatccatacgatacaggctggattttaaaacttgaagaagtagaagaagcggatgtaaaggctcttttatcaagtgacgattacgaaaaagtattagattaa

SEQ ID NO: 127416 - protein, 125 aa, Listeria monocytogenes; identical to SEQ ID NO: 117227

SEQ ID NO: 127417 - DNA, 773 bp, Mesembryanthemum crystallinum
  CDS (45)..(536)
gaaaacttcaaagatacaccaagtaaattacagagagagctaaaatggctttgagaatgtgggcttcttcagcagccaatgctcttggtgtctcttgtgcccccaaatctcatcttctcccagctctttctctctccagatgcttctccactgttttggatggattgaagtatgcatcctcccatgaatgggtgaaacatggaggttcagtggccaccattggcattactgatcatgctcagggacatctaggggatgtggtgtttgcagagctgccagaaggaggagcagtatcagcagggaaaccctttgcttcagtggagagtgtgaaagctacaagtgatgtcaactcccccatctcaggtgaaattgttgaggttaacaccaagctttctgattcccctggtttgctcaattcaagtccatatgaagaagggtggatggtcaaagtgaagccaagcaatccagcggagttggaaagcctgatgggttctaaagagtacacaaaattctgtgaggaagaagatgctcattaacactctttcataaatggttttacattccaaataatgttgttgtttgagctgtgtttgagcttaatttgctcacaagtttgtaatttccacatcttcatgtgtaattagagctaaattatgccctatatccttttccatggagtcttaacacattttgacttgaataatatcaatcttttaagaatcaacagatgctttagtaatttggagcatcgtctcccaaccatgagattgacc

SEQ ID NO: 127418 - protein, 163 aa, Mesembryanthemum crystallinum; identical to SEQ ID NO: 117229

SEQ ID NO: 127419 - DNA, 390 bp, Nitrosomonas europaea; identical to SEQ ID NO: 117238
  CDS (1)..(390): transl_table=11

SEQ ID NO: 127420 - protein, 129 aa, Nitrosomonas europaea; identical to SEQ ID NO: 117239

SEQ ID NO: 127421 - DNA, 698 bp, Oryza sativa
  CDS (77)..(571)
gtgaatccagctaactaggagaaggaaaaaagaagaacgcagatactttggtaacaagcaagaaattggcacagaaatggctctgaggctgtgggctagctcagctgccaatgccctcaagatctcatgcagtggagccaccagggctgcacctgcctactcaatctccagatacttctccactgttcttgatgggttgaagtacagctcctctcatgagtgggtcaagaatgatggctctgtggccacaattggaattacagaccatgctcagggccatctgggagaggtggtgttcgtggagctgccggaggcgggggcgaaggtgagccagggaggtgcattcggcaacgtggagagtgtgaaggccaccagcgacatcaactcccccatctccggtgaggtcgtcgaggttaacgacaagctctctgagacacccggcctgattaactcaagcccgtacgaggacgggtggatgatcaaggtgaagccgagcagcccgtcggagctggacgccctgctggacccggccaagtacaccaagcactgcgaggaggaagacgctcactaggctcttcctctctgttttttttctctcccattttgtcactccgacctaatttctccctgttgcaacaactgctctgtatccgtatacgattaataactgaatcttcaggctttgcctggtgttcctt

SEQ ID NO: 127422 - protein, 164 aa, Oryza sativa; identical to SEQ ID NO: 117287

SEQ ID NO: 127423 - DNA, 679 bp, Pisum sativum
  CDS (58)..(555)
ggcatttcatttcattcttctacacactcctcacaaacacaacccttaacaataacaatggcacttaggatgtgggcttcttcaactgccaatgcactcaaactctcctcttcctctagattacatctctcccctaccttttccatctccagatgtttctctaatgttttggatggactcaagtacgcaccttcacatgaatgggtcaagcatgaaggatcagtagccactattggtatcactgaccatgcccaggaccatcttggagaggttgtgtttgtggagcttccagaacctggtgtctcagttacaaagggtaaaggtttcggagctgttgaaagtgtgaaggcaacaagtgatgtaaactctcctatttccggtgaggttatcgaggttaatactgggctcaccggaaagcctggcctcatcaattcaagcccctatgaagatggatggatgataaaaataaagccaactagtccagatgaattagaatccttgttgggtgcaaaagagtacacaaagttttgtgaggaagaagatgctgcacattgaagttcatttttcaatatattgaactgactgtttttaatattgtactactatctatcatccttgttgtctattttttttcaaatgcaatagaattgcttcaagttattgttgtttcaaaaaaaaa

SEQ ID NO: 127424 - protein, 165 aa, Pisum sativum; identical to SEQ ID NO: 117243

SEQ ID NO: 127425 - DNA, 405 bp, Pyrococcus furiosus; identical to SEQ ID NO: 117246
  CDS (1)..(405): transl_table=11

SEQ ID NO: 127426 - protein, 134 aa, Pyrococcus furiosus; identical to SEQ ID NO: 117247

SEQ ID NO: 127427 - DNA, 405 bp, Pyrococcus kodakaraensis; identical to SEQ ID NO: 117248
  CDS (1)..(405): transl_table=11

SEQ ID NO: 127428 - protein, 134 aa, Pyrococcus kodakaraensis; identical to SEQ ID NO: 117249

SEQ ID NO: 127429 - DNA, 363 bp, Rhizobium meliloti
  CDS (1)..(363): transl_table=11
atgctgaaattcaccgaggaacacgaatggctgaagatcgatggcgacgtcgcgaccgtcggcatcacggagcatgccgctggccagctcggcgatcttgtcttcgtggaactgccggaagcgggtgccagcttctccaagggcgactcggccgcgacggtcgagtccgtcaaggcggcttcggacgtctattgtccgcttgatggagaaatcgtcgaggtcaatcaggcgatcgtcgacgatccgtcgctcgtcaacagcgatccgcaaggcgcggcctggttcttcaagctgaagctcgccgatccggacgctgccaatgcgctcctggacgaagcggcctacaaggagttcgtcgcctga

SEQ ID NO: 127430 - protein, 120 aa, Rhizobium meliloti
MLKFTEEHEWLKIDGDVATVGITEHAAGQLGDLVFVELPEAGASFSKGDSAATVESVKAASDVYCPLDGEIVEVNQAIVDDPSLVNSDPQGAAWFFKLKLADPDAANALLDEAAYKEFVA

SEQ ID NO: 127431 - DNA, 399 bp, Rhodopirellula baltica; identical to SEQ ID NO: 117254
  CDS (1)..(399): transl_table=11

SEQ ID NO: 127432 - protein, 132 aa, Rhodopirellula baltica; identical to SEQ ID NO: 117255

SEQ ID NO: 127433 - DNA, 390 bp, Salmonella typhimurium; identical to SEQ ID NO: 117256
  CDS (1)..(390): transl_table=11

SEQ ID NO: 127434 - protein, 129 aa, Salmonella typhimurium; identical to SEQ ID NO: 117257

SEQ ID NO: 127435 - DNA, 378 bp, Streptomyces avermitilis
  CDS (1)..(378): transl_table=11
atgagcaacccccagcagctgcgctacagcaaggagcacgagtggctgtcgggcgccgaggacggcgtctcgacggtcggcatcacggagcacgcggccaacgcgctcggcgatgtcgtgtacgtccagctcccggaggtcggtgacacggtgaccgcgggcgagacctgcggcgagctggagtcgaccaagtcggtcagcgacctgtactcccccgtgacgggcgaggtcgtcgaggccaaccaggacgtggtggacgacccgtcgctggtgaactccgctccgttcgagggtggctggctgttcaaggtacgcgtcgcggaggagccgaaggacctgctctccgcggacgagtacaccgagttctccggctcttaa

SEQ ID NO: 127436 - protein, 125 aa, Streptomyces avermitilis
MSNPQQLRYSKEHEWLSGAEDGVSTVGITEHAANALGDVVYVQLPEVGDTVTAGETCGELESTKSVSDLYSPVTGEVVEANQDVVDDPSLVNSAPFEGGWLFKVRVAEEPKDLLSADEYTEFSGS

SEQ ID NO: 127437 - DNA, 378 bp, Streptomyces coelicolor; identical to SEQ ID NO: 117266
  CDS (1)..(378): transl_table=11

SEQ ID NO: 127438 - protein, 125 aa, Streptomyces coelicolor; identical to SEQ ID NO: 117267

SEQ ID NO: 127439 - DNA, 369 bp, Thermoplasma volcanium; identical to SEQ ID NO: 117272
  CDS (1)..(369): transl_table=11

SEQ ID NO: 127440 - protein, 122 aa, Thermoplasma volcanium; identical to SEQ ID NO: 117273

SEQ ID NO: 127441 - DNA, 381 bp, Vibrio parahaemolyticus; identical to SEQ ID NO: 117276
  CDS (1)..(381): transl_table=11

SEQ ID NO: 127442 - protein, 126 aa, Vibrio parahaemolyticus; identical to SEQ ID NO: 117277

SEQ ID NO: 127443 - DNA, 513 bp, Saccharomyces cerevisiae; identical to SEQ ID NO: 117282
  CDS (1)..(513)

SEQ ID NO: 127444 - protein, 170 aa, Saccharomyces cerevisiae; identical to SEQ ID NO: 117283

SEQ ID NO: 127445 - DNA, 387 bp, Yersinia pestis
  CDS (1)..(387): transl_table=11
atgagtaatgtaccaacagaattgaaatatgccttatctcatgaatgggttcgtgctgacggcgatggtgtgtatagcgtcgggatcactgaacatgcgcaagagctgctgggtgatatggtattcgtcgatctgccagaggtgggcagcgatgtttcggccggtagcgattgtgcggttgccgaatcggtgaaagccgcttccgatatttacgcgcctatcagcggtgaaatcgttgcagttaatactgagttggaaaactcgccagaattggttaacagcgcgccttataccgatggttggttgttcagtattaaagccgctgatgagtccgaactggacaatctgttggatgctgatgcttacctcgcggcgattgaagagtaa

SEQ ID NO: 127446 - protein, 128 aa, Yersinia pestis
MSNVPTELKYALSHEWVRADGDGVYSVGITEHAQELLGDMVFVDLPEVGSDVSAGSDCAVAESVKAASDIYAPISGEIVAVNTELENSPELVNSAPYTDGWLFSIKAADESELDNLLDADAYLAAIEE

SEQ ID NO: 127447 - DNA, 477 bp, Oryza sativa; identical to SEQ ID NO: 116954
  CDS (1)..(477)

SEQ ID NO: 127448 - protein, 158 aa, Oryza sativa; identical to SEQ ID NO: 116955

SEQ ID NO: 127449 - DNA, 471 bp, Brassica napus; identical to SEQ ID NO: 117288
  CDS (1)..(471)

SEQ ID NO: 127450 - protein, 156 aa, Brassica napus; identical to SEQ ID NO: 117289

SEQ ID NO: 127451 - DNA, 501 bp, Brassica napus
  CDS (1)..(501)
atggcactgagaatgtgggcttcctctacagcaaacgctcttaagctctcttcttctacctccaaatctcatctccttcctgcgttctccatctccagatgcttctcctcagtgttggaaggactcaagtatgcaacttcacacgagtgggtgaaacatgatggctcggtggctaccattggcatcactgaccatgcccaggaccatctaggagaagttgtgtttgtggagctgccagaagagaaaagctcagtgagcaaagaaaagaactttggagctgtggagagtgtgaaggcaacaagtgagattctatctccaatctctggtgaagtcattgaggttaacacaaagctaaccgattcacctggtttgatcaactcaagcccctatgaagatggttggatgataaaggtgaaaccaagcaaccctgcagagttggaaaccttgatgggttcaaaggaatacaccaagttctgcgaagaggaagatgctgctcactag

SEQ ID NO: 127452 - protein, 166 aa, Brassica napus; identical to SEQ ID NO: 116953

SEQ ID NO: 127453 - DNA, 501 bp, Brassica napus; identical to SEQ ID NO: 117290
  CDS (1)..(501)

SEQ ID NO: 127454 - protein, 166 aa, Brassica napus; identical to SEQ ID NO: 117291

SEQ ID NO: 127455 - DNA, 495 bp, Triticum aestivum
  CDS (1)..(495)
atggctcttaggctgtgggcaagctcagctgccaatgccctcaagatttcaagcagcggcgccagggctgctgccccggcttattcgatctccagatacttctccaccgttattgatggcttgaagtacacttcctcccacgagtgggtcaagaacgacggctccgtggccacgattggcatcagtgaccacgcccagggccatctcggggaggtggtgttcgtggagctgccggaggcaggcacgaaggtgagccagggcggagccttcggcaacgtggagagtgtgaaggccaccagcgacgtcaactcgcccatctccggcgaggtcgtcgacgtcaactcaaagctgtccgagacccccggcctgatcaactcgagcccgtacgaggatgggtggatgatcaaggtgaagccaagcagcccggcggagctggagggcctgctggactcggccaagtacaccaagcactgcgaggaggaggacgcccactag

SEQ ID NO: 127456 - protein, 164 aa, Triticum aestivum
MALRLWASSAANALKISSSGARAAAPAYSISRYFSTVIDGLKYTSSHEWVKNDGSVATIGISDHAQGHLGEVVFVELPEAGTKVSQGGAFGNVESVKATSDVNSPISGEVVDVNSKLSETPGLINSSPYEDGWMIKVKPSSPAELEGLLDSAKYTKHCEEEDAH

SEQ ID NO: 127457 - DNA, 480 bp, Zea mays; identical to SEQ ID NO: 117292
  CDS (1)..(480)

SEQ ID NO: 127458 - protein, 159 aa, Zea mays; identical to SEQ ID NO: 117293

SEQ ID NO: 127459 - DNA, 492 bp, Linum usitatissimum; identical to SEQ ID NO: 117328
  CDS (1)..(492)

SEQ ID NO: 127460 - protein, 163 aa, Linum usitatissimum; identical to SEQ ID NO: 117329

SEQ ID NO: 127461 - DNA, 477 bp, Hordeum vulgare; identical to SEQ ID NO: 117322
  CDS (1)..(477)

SEQ ID NO: 127462 - protein, 158 aa, Hordeum vulgare; identical to SEQ ID NO: 117323

SEQ ID NO: 127463 - DNA, 468 bp, Helianthus annuus
  CDS (1)..(468)
atggcatcaagactctgggcatctaaagctgcttcatacctcaagatctctaccttcaacttcaacagaggctttgcttccgtggtgaaggatttgaagtatgctgagtctcacgaatgggtcaaagtagatggtaagtcagccaccgttggcatcacagaccatgcccaggatcacctaggagacgtggtctacgttgaattaccagaggttggagccgctgtgactcaaggcagcagttttggtgcggtggagagcgtaaaggccactagcgatattaattcccctgtttcaggaaaggttgttgaagtcaatgaagagctcactagctcacctggcttggttaatggaagcccgtatgagaatggttggatcataaaggtggagataagtgacactaatgaggtaaactcgttaatggactctgaacagtattcaaagttctgtgaagaagaagataatcactag

SEQ ID NO: 127464 - protein, 155 aa, Helianthus annuus
MASRLWASKAASYLKISTFNFNRGFASVVKDLKYAESHEWVKVDGKSATVGITDHAQDHLGDVVYVELPEVGAAVTQGSSFGAVESVKATSDINSPVSGKVVEVNEELTSSPGLVNGSPYENGWIIKVEISDTNEVNSLMDSEQYSKFCEEEDNH

SEQ ID NO: 127465 - DNA, 471 bp, Helianthus annuus; identical to SEQ ID NO: 117318
  CDS (1)..(471)

SEQ ID NO: 127466 - protein, 156 aa, Helianthus annuus; identical to SEQ ID NO: 117319

SEQ ID NO: 127467 - DNA, 471 bp, Brassica napus; identical to SEQ ID NO: 117294
  CDS (1)..(471)

SEQ ID NO: 127468 - protein, 156 aa, Brassica napus; identical to SEQ ID NO: 117295

SEQ ID NO: 127469 - DNA, 501 bp, Brassica napus
  CDS (1)..(501)
atggcactgagaatgtgggcttcctctacagcaaacgctctcaagctctcttcttctgcctccaaatctcatctccttccagctttctccatctccagatgcttctcctcagtgttggaaggacttaagtatgcaaattcacatgagtgggtgaaacatgaaggctcagtggctactattggcatcagtgaccatgcccaggatcatttaggagaagttgtgtttgtggagctgcctgaagaaaaaagttcagtgaccaaagaaaaaaactttggagcagtggagagtgtgaaggcaacaagtgagattatatctccaatctctggtgaagtcatcgaggttaacacaaagctcgctgattcacctggcttgatcaactcaagcccttacgaagatggatggatgataaaggtgaaaccaagcaaccctgcagagctggaatccttgatgggtccaaaggaatacaccaagttctgcgaagaggaagacgctgctcactag

SEQ ID NO: 127470 - protein, 166 aa, Brassica napus; identical to SEQ ID NO: 117301

SEQ ID NO: 127471 - DNA, 471 bp, Brassica napus; identical to SEQ ID NO: 117296
  CDS (1)..(471)

SEQ ID NO: 127472 - protein, 156 aa, Brassica napus; identical to SEQ ID NO: 117297

SEQ ID NO: 127473 - DNA, 501 bp, Brassica napus; identical to SEQ ID NO: 117298
  CDS (1)..(501)

SEQ ID NO: 127474 - protein, 166 aa, Brassica napus; identical to SEQ ID NO: 117299

SEQ ID NO: 127475 - DNA, 471 bp, Brassica napus; identical to SEQ ID NO: 117302
  CDS (1)..(471)

SEQ ID NO: 127476 - protein, 156 aa, Brassica napus; identical to SEQ ID NO: 117303

SEQ ID NO: 127477 - DNA, 501 bp, Brassica napus; identical to SEQ ID NO: 117304
  CDS (1)..(501)

SEQ ID NO: 127478 - protein, 166 aa, Brassica napus; identical to SEQ ID NO: 117305

SEQ ID NO: 127479 - DNA, 468 bp, Glycine max; identical to SEQ ID NO: 117306
  CDS (1)..(468)

SEQ ID NO: 127480 - protein, 155 aa, Glycine max; identical to SEQ ID NO: 117307

SEQ ID NO: 127481 - DNA, 498 bp, Glycine max; identical to SEQ ID NO: 117308
  CDS (1)..(498)

SEQ ID NO: 127482 - protein, 165 aa, Glycine max; identical to SEQ ID NO: 117309

SEQ ID NO: 127483 - DNA, 498 bp, Glycine max; identical to SEQ ID NO: 117310
  CDS (1)..(498)

SEQ ID NO: 127484 - protein, 165 aa, Glycine max; identical to SEQ ID NO: 117311

SEQ ID NO: 127485 - DNA, 468 bp, Glycine max; identical to SEQ ID NO: 117312
  CDS (1)..(468)

SEQ ID NO: 127486 - protein, 155 aa, Glycine max; identical to SEQ ID NO: 117313

SEQ ID NO: 127487 - DNA, 468 bp, Glycine max; identical to SEQ ID NO: 117314
  CDS (1)..(468)

SEQ ID NO: 127488 - protein, 155 aa, Glycine max; identical to SEQ ID NO: 117315

SEQ ID NO: 127489 - DNA, 498 bp, Glycine max; identical to SEQ ID NO: 117316
  CDS (1)..(498)

SEQ ID NO: 127490 - protein, 165 aa, Glycine max; identical to SEQ ID NO: 117317

SEQ ID NO: 127491 - DNA, 468 bp, Helianthus annuus; identical to SEQ ID NO: 117320
  CDS (1)..(468)

SEQ ID NO: 127492 - protein, 155 aa, Helianthus annuus; identical to SEQ ID NO: 117321

SEQ ID NO: 127493 - DNA, 495 bp, Hordeum vulgare; identical to SEQ ID NO: 117324
  CDS (1)..(495)

SEQ ID NO: 127494 - protein, 164 aa, Hordeum vulgare; identical to SEQ ID NO: 117325

SEQ ID NO: 127495 - DNA, 495 bp, Hordeum vulgare; identical to SEQ ID NO: 117326
  CDS (1)..(495)

SEQ ID NO: 127496 - protein, 164 aa, Hordeum vulgare; identical to SEQ ID NO: 117327

SEQ ID NO: 127497 - DNA, 477 bp, Triticum aestivum; identical to SEQ ID NO: 117330
  CDS (1)..(477)

SEQ ID NO: 127498 - protein, 158 aa, Triticum aestivum; identical to SEQ ID NO: 117331

SEQ ID NO: 127499 - DNA, 495 bp, Triticum aestivum
  CDS (1)..(495)
atggctctgaggctgtgggcaagctcagctgccaatgccctcaagatttcaagcagcggcgccagggccgctgccccggcctactcgatctccagatacttctccaccgttattgatggcttgaagtacacttcctcccacgagtgggtcaagaacgacggctccgtggccacgattggcatcagtgaccacgcccagggccatctcggggaggtggtgttcgtggagctgccggagaccggcacgaaggtgagccagggtggggccttcggcaacgtggagagtgtgaaggccaccagcgacgtcaactcgcccatctccggcgaggtcgtcgaggtcaattcgaagctgtccgagaccccgggcctgatcaactcgagcccgtacgaggaggggtggatgatcaaggtgaagccgagcagcccggcggagctggagggcctgctggactcggccaagtacaccaagcactgcgaggaggaggacgcccactag

SEQ ID NO: 127500 - protein, 164 aa, Triticum aestivum; identical to SEQ ID NO: 116951

SEQ ID NO: 127501 - DNA, 495 bp, Triticum aestivum; identical to SEQ ID NO: 117332
  CDS (1)..(495)

SEQ ID NO: 127502 - protein, 164 aa, Triticum aestivum; identical to SEQ ID NO: 117333

SEQ ID NO: 127503 - DNA, 477 bp, Triticum aestivum; identical to SEQ ID NO: 117334
  CDS (1)..(477)

SEQ ID NO: 127504 - protein, 158 aa, Triticum aestivum; identical to SEQ ID NO: 117335

SEQ ID NO: 127505 - DNA, 495 bp, Triticum aestivum; identical to SEQ ID NO: 117336
  CDS (1)..(495)

SEQ ID NO: 127506 - protein, 164 aa, Triticum aestivum; identical to SEQ ID NO: 117337

SEQ ID NO: 127507 - DNA, 480 bp, Zea mays; identical to SEQ ID NO: 117338
  CDS (1)..(480)

SEQ ID NO: 127508 - protein, 159 aa, Zea mays; identical to SEQ ID NO: 117339

SEQ ID NO: 127509 - DNA, 495 bp, Zea mays; identical to SEQ ID NO: 117340
  CDS (1)..(495)

SEQ ID NO: 127510 - protein, 164 aa, Zea mays; identical to SEQ ID NO: 117341

SEQ ID NO: 127511 - DNA, 480 bp, Zea mays; identical to SEQ ID NO: 117342
  CDS (1)..(480)

SEQ ID NO: 127512 - protein, 159 aa, Zea mays; identical to SEQ ID NO: 117343

SEQ ID NO: 127513 - DNA, 507 bp, Zea mays; identical to SEQ ID NO: 117344
  CDS (1)..(507)

SEQ ID NO: 127514 - protein, 168 aa, Zea mays; identical to SEQ ID NO: 117345

SEQ ID NO: 127515 - DNA, 483 bp, Zea mays; identical to SEQ ID NO: 117346
  CDS (1)..(483)

SEQ ID NO: 127516 - protein, 160 aa, Zea mays; identical to SEQ ID NO: 117347

SEQ ID NO: 127517 - DNA, 21 bp, Artificial sequence
  primer
atggaactggaacatcctgac

SEQ ID NO: 127518 - DNA, 20 bp, Artificial sequence
  primer
ttaatctcccgtctctaggg

SEQ ID NO: 127519 - protein, 126 aa, Artificial sequence
  consensus sequence
  Variant (2)..(4): Xaa in position 2 to 4 is any amino acid
  Variant (8)..(14): Xaa in position 8 to 14 is any amino acid
  Variant (15)..(23): Xaa in position 15 to 23 is any or no amino acid
  Variant (26)..(28): Xaa in position 26 to 28 is any amino acid
  Variant (30)..(32): Xaa in position 30 to 32 is any amino acid
  Variant (35)..(36): Xaa in position 35 to 36 is any amino acid
  Variant (38)..(38): Xaa in position 38 is any amino acid
  Variant (40)..(40): Xaa in position 40 is any amino acid
  Variant (43)..(43): Xaa in position 43 is any amino acid
  Variant (44)..(44): Xaa in position 44 is any or no amino acid
  Variant (46)..(57): Xaa in position 46 to 57 is any amino acid
  Variant (62)..(63): Xaa in position 62 to 63 is any amino acid
  Variant (65)..(68): Xaa in position 65 to 68 is any amino acid
  Variant (70)..(71): Xaa in position 70 to 71 is any amino acid
  Variant (73)..(77): Xaa in position 73 to 77 is any amino acid
  Variant (79)..(80): Xaa in position 79 to 80 is any amino acid
  Variant (82)..(84): Xaa in position 82 to 84 is any amino acid
  Variant (86)..(88): Xaa in position 86 to 88 is any amino acid
  Variant (90)..(91): Xaa in position 90 to 91 is any amino acid
  Variant (93)..(94): Xaa in position 93 to 94 is any amino acid
  Variant (95)..(99): Xaa in position 95 to 99 is any or no amino acid
  Variant (102)..(112): Xaa in position 102 to 112 is any amino acid
  Variant (113)..(119): Xaa in position 113 to 119 is any or no amino acid
  Variant (121)..(125): Xaa in position 121 to 125 is any amino acid
YXXXHEWXXXXXXXXXXXXXXXXGIXXXAXXXLGXXVXVXLPXXGXXXXXXXXXXXXESVKXXSXXXXPXXGXXXXXNXXLXXXPXXXNXXPXXXXXXXGWXXXXXXXXXXXXXXXXXXLXXXXXY

SEQ ID NO: 127520 - protein, 30 aa, Artificial sequence
  protein pattern
  Variant (2)..(3): Xaa in position 2 to 3 is any amino acid
  Variant (4)..(9): Xaa in position 4 to 9 is any or no amino acid
  Variant (11)..(11): Xaa in position 11 is Ala, Ser or Thr
  Variant (12)..(12): Xaa in position 12 is Ala, Thr or Val
  Variant (14)..(14): Xaa in position 14 is Asp or Glu
  Variant (15)..(17): Xaa in position 15 to 17 is any amino acid
  Variant (19)..(19): Xaa in position 19 is any amino acid
  Variant (20)..(20): Xaa in position 20 is Ala, Asp, Gly, Ser or Thr
  Variant (22)..(22): Xaa in position 22 is any amino acid
  Variant (23)..(23): Xaa in position 23 is Ile or Val
  Variant (24)..(26): Xaa in position 24 to 26 is any amino acid
  Variant (28)..(29): Xaa in position 28 to 29 is any amino acid
  Variant (30)..(30): Xaa in position 30 is Ala, Ile, Leu or Val
EXXXXXXXXKXXSXXXXPXXGXXXXXNXXX

SEQ ID NO: 127521 - DNA, 1128 bp, Synechocystis sp.
  CDS (1)..(1128): transl_table=11
atgacaatggcaatgcaaccccaaactttggtgattaaaattggtacttctagcctagctcgtccggaaacgggtcagttggccctctccaccattgccgctttggtggaaactgtatgcaagttgatcggccaaggccatcgggtggtgctagtctcctctggagccataggagtaggttgtagtcgtttgggcctgacagaaaggccaaaaaaaatggccttaaagcaggcgatcgccgctgtgggccagggcagattaatgcggacctatgacgacctttttagtagcctccggcaacccattgcccaaattttgctcaccagacgggaattaattgagcgtaccgcctatgtcaacgcctacaacacgttccaagctctgtttgagttgggggtgattgccattgtcaatgaaaacgacacggtggcgatcgatgaactaaaatttggcgacaatgatactttgtcggctttagtggccagcttggtggaagcggattggctatttttgctcactgacgttgaccgcctttattccagtgacccccgtttagatcccgatgcctatcccattcccctagtcaaagccgcggaattagcccaattacaagtccgcaccgatagcactggttccgcctggggcaccggcggcatggccaccaaaatcaccgctgcccgcattgctacgggatcaggagtccgcaccgtcatcacccatggccaaaaacctgagcaaattttagccatcctccagggagctaatttgggcactcagtttgaagcccaaccccgctccgataatgctcgtaaacgttggatcgcctatggtttagtgcccaccgggaaaattttcattgacgctggggcggtccaggccctcaaagctaggggcaaatccctattggcgatcggggtggttgccctagaaggggaattcagtgccaccgatgccgtcataatctgtgatccccagggtcaagaattagggcggggattagttaattacaactgtaacgagctagaaaaaattaagggactccattccgaggcgatcgccgcagtgttaggctacgtggggccagatacagtgatccatcgagataatttagtattacaagaaaattaa

SEQ ID NO: 127522 - protein, 375 aa, Synechocystis sp.
MTMAMQPQTLVIKIGTSSLARPETGQLALSTIAALVETVCKLIGQGHRVVLVSSGAIGVGCSRLGLTERPKKMALKQAIAAVGQGRLMRTYDDLFSSLRQPIAQILLTRRELIERTAYVNAYNTFQALFELGVIAIVNENDTVAIDELKFGDNDTLSALVASLVEADWLFLLTDVDRLYSSDPRLDPDAYPIPLVKAAELAQLQVRTDSTGSAWGTGGMATKITAARIATGSGVRTVITHGQKPEQILAILQGANLGTQFEAQPRSDNARKRWIAYGLVPTGKIFIDAGAVQALKARGKSLLAIGVVALEGEFSATDAVIICDPQGQELGRGLVNYNCNELEKIKGLHSEAIAAVLGYVGPDTVIHRDNLVLQEN

SEQ ID NO: 127523 - DNA, 1161 bp, Pasteurella multocida subsp. multocida str. Pm70
  CDS (1)..(1161): transl_table=11
atgattaatggtaagttagcttcaattttgtgcgacaaaaataagaagatagagaagatgaaaatcgacaaaacactcgttgtgaaatttggaaccagtacgcttacgcaaggatcggcgaagttaaatttacctcatatgatggatattgtgcgtcagctcgcacagcttcatcaagcgggctttcgtttagtgattgtcacctcaggggcgattgcggcaggtcgtcattatttaaatcacccgcaattgccgccgacgattgcctcgaaacaattattggctgcggtaggacaaagtcagctcattcaaacgtgggaaaaattgtttgccatttatgatattcatattgggcagattttattgacccgtgccgacattgaagatcgtgaacgttttttaaatgccagagatactttgcgcgccttattagataatcagattattccagtgattaatgaaaatgacgctgtcgctacgtcagaaattaaagtaggcgataacgataatttatccgcgttagtggcgattttagtgcaagcagaacagttgtatttgcttactgatcagcaaggtttgtttgatcgtgatccgcgcaaacatccagacgccaaattgatcgccgacgtggacaaaattaccgatcatattcgcgcgattgcgggcggaagtggcacctcgttaggcacaggcggcatgtccaccaaaatcagtgccgcggatgtggcaacccgctccggcattgaaactattattgcaccgggtaatcgcccgaatgtgattgtggacttagcttatgggcaagccattggcaccaaatttagtgtgcaagcagatcgcttagaaagtcgtaaacaatggctatatgcggcgccgtcagccggtattattaccattgatgcgggggcggaaaacgcgatgttaatgcaacataaatcgttattgcctgctgggattgtgaacgtggaaggacgcttttcacgcggtgaagtggtaaaaattcgtactcagcaaggtaaggatgtcgccttagggatgccacgttataacagcgatgcactccatttaattcaaggcaaacattcgcaagatatcgaacaggttctcggttatgaatatggggcggttgcggtacaccgcgacgatatgattgtgttataa

SEQ ID NO: 127524 - protein, 386 aa, Pasteurella multocida subsp. multocida str. Pm70
MINGKLASILCDKNKKIEKMKIDKTLVVKFGTSTLTQGSAKLNLPHMMDIVRQLAQLHQAGFRLVIVTSGAIAAGRHYLNHPQLPPTIASKQLLAAVGQSQLIQTWEKLFAIYDIHIGQILLTRADIEDRERFLNARDTLRALLDNQIIPVINENDAVATSEIKVGDNDNLSALVAILVQAEQLYLLTDQQGLFDRDPRKHPDAKLIADVDKITDHIRAIAGGSGTSLGTGGMSTKISAADVATRSGIETIIAPGNRPNVIVDLAYGQAIGTKFSVQADRLESRKQWLYAAPSAGIITIDAGAENAMLMQHKSLLPAGIVNVEGRFSRGEVVKIRTQQGKDVALGMPRYNSDALHLIQGKHSQDIEQVLGYEYGAVAVHRDDMIVL

SEQ ID NO: 127525 - DNA, 1131 bp, Streptococcus pneumoniae R6
  CDS (1)..(1131): transl_table=11
atgaataatcggagtgagactatgaaatacaaacggattgtctttaaggtgggtacttcttctctgacaaatgaggatggaagtttatcacgtagtaaggtaaaggatattacccagcagttggctatgctgcacgaggctggtcatgagttgattttggtgtcttcaggtgccattgcggctggttttggagccttaggatttaaaaagcgtccgactaaaattgctgataaacaggcttcagcagcggtagggcagggacttttgttggaagaatatacgaccaatcttctcttgcgtcaaatcgtttctgcacaaatcttgctgacccaagatgactttgtggataagcgtcgttataaaaatgcccatcaggctttgtcggttttgctcaaccgtggggcaattcctatcatcaatgagaatgatagtgtcgttattgatgagctcaaggttggggacaatgacactctaagtgctcaagtagcggcgatggtccaagcagaccttttagttttcttgacagatgtggacggtctctatactggaaatcctaattcagatccaagagccaaacgcttggagagaatcgagaccatcaatcgtgagattattgatatggctggtggagctggttcgtcaaacggaactgggggtatgttaaccaaaatcaaggctgcaactatcgcgacggaatcaggagttcctgtttatatctgctcatccttgaaatcagattccatgattgaggcggcagaggagaccgaggatggttcttactttgttgctcaagagaaggggcttcgtacccagaaacaatggcttgccttctatgctcagagtcaaggttctatttgggttgataaaggggctgcggaagctctctctcaacatggaaagagtcttctcttatctggtatcgttgaagcagaaggagtcttttcttacggtgatatcgtgacagtatttgataaggaaagtggaaaatcacttggaaaaggacgcgtgcaatttggagcatctgctttggaggatatattgcgttctcaaaaagccaagggtgtcttgatttaccgtgacgactggatttccattactcctgaaatccaactactttttacagaattttag

SEQ ID NO: 127526 - protein, 376 aa, Streptococcus pneumoniae R6
MNNRSETMKYKRIVFKVGTSSLTNEDGSLSRSKVKDITQQLAMLHEAGHELILVSSGAIAAGFGALGFKKRPTKIADKQASAAVGQGLLLEEYTTNLLLRQIVSAQILLTQDDFVDKRRYKNAHQALSVLLNRGAIPIINENDSVVIDELKVGDNDTLSAQVAAMVQADLLVFLTDVDGLYTGNPNSDPRAKRLERIETINREIIDMAGGAGSSNGTGGMLTKIKAATIATESGVPVYICSSLKSDSMIEAAEETEDGSYFVAQEKGLRTQKQWLAFYAQSQGSIWVDKGAAEALSQHGKSLLLSGIVEAEGVFSYGDIVTVFDKESGKSLGKGRVQFGASALEDILRSQKAKGVLIYRDDWISITPEIQLLFTEF

SEQ ID NO: 127527 - DNA, 849 bp, Sinorhizobium meliloti 1021
  CDS (1)..(849): transl_table=11
ttggcaccgttctcaagtcttggcgaatcaagatcgaagatggaagacaagtttgatttgtcctcggcgcggcttgtggtggtaaagattggctctacgctcgttttagatagagagacaagcggaatccgcagctcttggctcgagtcgttgacagaagacgtttcccgtcttcttacacgtgggcagcaggtggtcctagtttcgtccggcgccgtcgcgattggatcgactattgtcgatcggcttgccacgtactcgcaagttagccacaagcaagctgcggccgcgcttggtcaggttcaactaacacacgcttattcagaaagcttgaaacgtcacggattgcaggttgcgcagctgttgatgggtcgcggagatttggtcgatcctgcccatcgcctcaacacgcgggcagtccttttgcgcctcatcgaccttggcgctgtgccacttgttaatgagaatgatacgactgcaacctgcgggacccgagtgggcgataacgatcggttggcggcgtggatcgcggaaattatcaacgccgaccttctcattctgctctccaacgtagatggcctcttcatgaaagatccgcgtaataatccgttgacccccatgcttacagaggtggagtctattactcgcgagattgaggcaatggccactcaatcagttgatccctattcttcgggtggcatgatatcgaagatagaagcaggcaagatagccatgaatgctggctgtagaatgattattgccaacggcacgagatctcacccgctttacgcaattgagagcggcgggccgtctacacatttcatccccgtcgcacgggatagggtttga

SEQ ID NO: 127528 - protein, 282 aa, Sinorhizobium meliloti 1021
MAPFSSLGESRSKMEDKFDLSSARLVVVKIGSTLVLDRETSGIRSSWLESLTEDVSRLLTRGQQVVLVSSGAVAIGSTIVDRLATYSQVSHKQAAAALGQVQLTHAYSESLKRHGLQVAQLLMGRGDLVDPAHRLNTRAVLLRLIDLGAVPLVNENDTTATCGTRVGDNDRLAAWIAEIINADLLILLSNVDGLFMKDPRNNPLTPMLTEVESITREIEAMATQSVDPYSSGGMISKIEAGKIAMNAGCRMIIANGTRSHPLYAIESGGPSTHFIPVARDRV

SEQ ID NO: 127529 - DNA, 1155 bp, Xanthomonas campestris pv. campestris str. ATCC 33913
  CDS (1)..(1155): transl_table=11
atgacccagccggtcgtcgcgacctcgctgtttaccgagcaggtgctgccgccgtggcggcgcgcagtgctcaaggtcggcagcagcctgctggcggccgatggcggcggcctgtcgccgcggtttgcgctgggcctggcgcagtttgtatcggccaatctggcggcggggcgcgaagtggtgatcgtctcgtccggcgcggtggcggccgggcgcgccatcctgcccaaggcagccgaagctggcgccgccatcgctgcgcgccaggcactggccgcgctgggccaggcgcagttgatcgcgttgtggcagcgctttttcgagcgcccggtggcgcaggtgctgctcacccacgacgacctgcgcaaccgccgccgctacctcaatgcgcgcgccacgctgggcgaactgttgcggctgggcgcattgccggtgatcaacgagaacgacaccgtgtcggtggatgaactcaagctcggcgacaacgacaacctggccgcgatcgtggccgcgctggtcgatgccgatgccttgttcatcgccaccgatatcgatggcctgtacagcgccgacccgcgcagcaacccgctggcacgcccgctcgacgaggtggccgaactcagcgccgaggtgctggcgatggccggcggcagcggcagcagcgtgggcaccggcggcatgcgcaccaagctggaagccgccgccaaggccggtgcggccgggatcgaaacctatctgttcaacggccgcagtgccgaggtggtgcgcgggctggcgcaggaccggctgtgcggcacgcgcatccacgccgcgcgcacgcgcattgccgcgcgcaaatactggctgcggcatgcgccggtggagccgggcacgatcctgatcgacgccggcgccgcgctggcgctcaccgacaagggcgcctcgctgctacccggtggcgtggccggtgccgaaggcgatttccgccgtggcgacatggtggaaatccacctgcgcgacagcgtgggcagccgctgcctggcacgtggcgtgagccagtattcggcacttgatgtgcgccgcatcgcccgccgccattcgcgcgagatcgaaccgatcctcggctacagctacggcgagaatgtggtgcatcgtgatgatctggtagttttgtag

SEQ ID NO: 127530 - protein, 384 aa, Xanthomonas campestris pv. campestris str. ATCC 33913
MTQPVVATSLFTEQVLPPWRRAVLKVGSSLLAADGGGLSPRFALGLAQFVSANLAAGREVVIVSSGAVAAGRAILPKAAEAGAAIAARQALAALGQAQLIALWQRFFERPVAQVLLTHDDLRNRRRYLNARATLGELLRLGALPVINENDTVSVDELKLGDNDNLAAIVAALVDADALFIATDIDGLYSADPRSNPLARPLDEVAELSAEVLAMAGGSGSSVGTGGMRTKLEAAAKAGAAGIETYLFNGRSAEVVRGLAQDRLCGTRIHAARTRIAARKYWLRHAPVEPGTILIDAGAALALTDKGASLLPGGVAGAEGDFRRGDMVEIHLRDSVGSRCLARGVSQYSALDVRRIARRHSREIEPILGYSYGENVVHRDDLVVL

SEQ ID NO: 127531 - DNA, 1158 bp, Xanthomonas axonopodis pv. citri str. 306
  CDS (1)..(1158): transl_table=11
atgagcacgcctgccagcacgtcgtcgccctttaccgagcaggcattgccgccatggcgccgtgcggtgctcaaggtcggcagcagcctgctcgccgccgatgggggggggctgtccccgcgcttcgcgctcggtctggcgcagttcgtctccgccaatctggcagccgggcgcgagctggtgatcgtgtcgtcgggcgcggtggccgccggccgtgccatcctgcccaaagcgatggatgtcggcgcaccgatcgcggcacggcaggcactggccgccttgggccaggcgcagttgattgcgttgtggcagcgctttttcgagcgaccggtggcgcaggtactgctcacgcatgacgacctgcgcaaccgtcgccgctacctcaatgcgcgtgccaccttgggcgagttgctgcggctgggcgcgctgccggtgatcaacgaaaacgataccgtctcggtggatgagttgaagctgggcgataacgacaacctggctgcgatcgtggctgcgctggtcgatgccgacgcgttgtttatcgccaccgatatcgatggcttgtatagcgccgacccacgcagcaacccgttggcgcgcccgctcgacgatgtgcccgagctcactccggaggtgctggcgatggccggcggcagcggtagcaatgtgggtaccggaggcatgcgcaccaaactggaagccgctgcaaaggccggcgcggccggcatcgaaacctatctgttcaacggccgaagtggcgaggtggtgcgcgccctggcgctggaccgcctgcgtggcacgcggatccacgccgcacgcacgcgcatcgctgcgcgaaaatactggctgcggcacgcaccggtggaagcgggcgcgatcctcatcgacgacggcgccgcagcggccttgaccggcaagggcgcttcgctgttgccaggcggggtggccggcgcgcagggcgatttccgtcgcggcgacatggtggagatccgtcggcgcgataccacgggcgacggacagtgtctggcacgcggcgtcagccagtattcggccctggatatccgtcgtatcgcaggccgccattcgcgcgagatcgagaacgtgctcggctacagttacggcgaaaacgtggtgcatcgcgatgatttggtggtgttgtag

SEQ ID NO: 127532 - protein, 385 aa, Xanthomonas axonopodis pv. citri str. 306
MSTPASTSSPFTEQALPPWRRAVLKVGSSLLAADGGGLSPRFALGLAQFVSANLAAGRELVIVSSGAVAAGRAILPKAMDVGAPIAARQALAALGQAQLIALWQRFFERPVAQVLLTHDDLRNRRRYLNARATLGELLRLGALPVINENDTVSVDELKLGDNDNLAAIVAALVDADALFIATDIDGLYSADPRSNPLARPLDDVPELTPEVLAMAGGSGSNVGTGGMRTKLEAAAKAGAAGIETYLFNGRSGEVVRALALDRLRGTRIHAARTRIAARKYWLRHAPVEAGAILIDDGAAAALTGKGASLLPGGVAGAQGDFRRGDMVEIRRRDTTGDGQCLARGVSQYSALDIRRIAGRHSREIENVLGYSYGENVVHRDDLVVL

SEQ ID NO: 127533 - DNA, 2331 bp, Drosophila melanogaster; identical to SEQ ID NO: 21020
  CDS (1)..(2331)

SEQ ID NO: 127534 - protein, 776 aa, Drosophila melanogaster; identical to SEQ ID NO: 21021

SEQ ID NO: 127535 - DNA, 1326 bp, Corynebacterium efficiens YS-314
  CDS (1)..(1326): transl_table=11
atgaatcacgtgacatcagctcagccagaatccgaaccacccactgacgaaccggacgcggtgacgctccgcgatgaactgcccaccccccacccggtgagcccggtgaccggtctgcccgtcaccccctacaagcaggaggacagcatcggcgccagtttcccggcgccgtcaccggggaccgaggacagtgctgccttcggacatgaatcgaatatgcgtgagcgtatcgccacggcgaaacgtgtggtggttaaaatcggatcctcctcgctgaccagcgatgaaggtggtcatacggtggatcccaaccgcatcaacaccatcgtcaacgccctccaggcccggatggaggccggctcagatgtcatcgtggtgtcctcgggttccgtcgccgcgggcatggcaccgctgggtctgaccacccgtccgacggatctgtccatgaagcaggccgcggccgccgtgggccaggtccacctcatgcaccagtggggccggtccttcgcccgctatgggcgccccgtcgggcaggtcctgctcaccgcgggcgatgccggccagcgtgaccgcgcgagaaacgcccagcgcaccatcgaccgtctgcgcatgctgggtgtcatcccgatcgtcaatgagaatgacaccgtggccaccaccggcgtgaacttcggtgacaatgaccgcctggccgccattgtctcccacctggtcagtgccgatgccctggtgctgctcagtgacgtggacggcctcttcgacaagaaccccgcggaccccaccgcccggttcatctccgaggtccgtgacggcaatgacctcaagggtgtgctcgccggggacggcggcaaggtcggtaccggcggcatggcctccaaggtctctgccgcgcgcctggcgtcccgcagtggtgtgcccgtgctgctgacctccgccgccaacatcggccccgccctcgaacacgcccaggtgggcaccgtgttccaccccaaggagaacaggctgtcggcctggaagttctgggcactctacgccgcagacaccgccggcaagatccgcctggaccagggtgcgacggaggccgtgacctccggtggcaagtccctcctcgcagtggggatcaccgaggtcatcggtgatttccgcgccggggagatcgtggagatcctcggtcccaacggcgagatcatcggccgcggcgaggtcaactacgattccgagaccctcatgccgatgctggggatgaaaacccaggaactccccgacgatatgcagcgacccgtggtccacgcggactacctgtcgaattacgccagccgggcgtag

SEQ ID NO: 127536 - protein, 441 aa, Corynebacterium efficiens YS-314
MNHVTSAQPESEPPTDEPDAVTLRDELPTPHPVSPVTGLPVTPYKQEDSIGASFPAPSPGTEDSAAFGHESNMRERIATAKRVVVKIGSSSLTSDEGGHTVDPNRINTIVNALQARMEAGSDVIVVSSGSVAAGMAPLGLTTRPTDLSMKQAAAAVGQVHLMHQWGRSFARYGRPVGQVLLTAGDAGQRDRARNAQRTIDRLRMLGVIPIVNENDTVATTGVNFGDNDRLAAIVSHLVSADALVLLSDVDGLFDKNPADPTARFISEVRDGNDLKGVLAGDGGKVGTGGMASKVSAARLASRSGVPVLLTSAANIGPALEHAQVGTVFHPKENRLSAWKFWALYAADTAGKIRLDQGATEAVTSGGKSLLAVGITEVIGDFRAGEIVEILGPNGEIIGRGEVNYDSETLMPMLGMKTQELPDDMQRPVVHADYLSNYASRA

SEQ ID NO: 127537 - DNA, 1143 bp, Escherichia coli CFT073
  CDS (1)..(1143): transl_table=11
ttgatatcattttttcctaaaattgaatggcagagaatcatgagtgacagccagacgctggtggtaaaactcggcaccagtgtgctaacaggcggatcgcgccgcctgaaccgtgcccatatcgttgaacttgttcgccagtgcgcgcagttacatgccgccgggcatcggattgttattgtgacgtcaggtgcgattgccgccggacgtgagcacctggggtacccggaattgccagcgactatcgcttcaaaacagctgctggcggcggtagggcagagtcgactgattcaactgtgggaacagctgttttcaatttacggcattcatgtcgggcagatgttgctgacccgtgctgatatggaagatcgtgaacgcttcctgaacgcccgcgataccctgcgtgcgttgctcgataacaatatcgttccggtaattaatgagaacgatgctgtcgctactgcagagattaaggtcggtgataacgataacctttctgcgctggcggcgattctggcgggtgccgataaactgttgctgctgaccgatcaaaaaggtttgtataccgctgacccgcgcagcaatccgcaggcagaactgattaaagatgtgtacggcattgatgacgcactgcgcgcgattgccggtgatagcgtttcaggcctcggaactggcggtatgagcaccaaattgcaggccgctgacgtggcttgccgtgcgggtatcgacaccattattgccgcgggcagcaagccgggcgttattggtgatgtgatggaaggcatttccgtcggtacgctgttccatgcccaggcgactccgcttgaaaaccgtaaacgctggattttcggtgcgccgcctgcgggtgaaatcacggtagatgaaggggcaactgccgccattctggaacgcggcagctccctgttgccgaaaggcattaaaagcgtgactggcaatttctcgcgtggtgaagtcatccgtatttgcaacctcgaaggtcgcgatatcgcccacggcgtcagtcgttacaacagcgatgcattacgccgtattgccggacaccactcgcaagaaattgatgcaatactgggatatgaatacggcccggttgccgttcaccgtgatgacatgattacccgttaa

SEQ ID NO: 127538 - protein, 380 aa, Escherichia coli CFT073
MISFFPKIEWQRIMSDSQTLVVKLGTSVLTGGSRRLNRAHIVELVRQCAQLHAAGHRIVIVTSGAIAAGREHLGYPELPATIASKQLLAAVGQSRLIQLWEQLFSIYGIHVGQMLLTRADMEDRERFLNARDTLRALLDNNIVPVINENDAVATAEIKVGDNDNLSALAAILAGADKLLLLTDQKGLYTADPRSNPQAELIKDVYGIDDALRAIAGDSVSGLGTGGMSTKLQAADVACRAGIDTIIAAGSKPGVIGDVMEGISVGTLFHAQATPLENRKRWIFGAPPAGEITVDEGATAAILERGSSLLPKGIKSVTGNFSRGEVIRICNLEGRDIAHGVSRYNSDALRRIAGHHSQEIDAILGYEYGPVAVHRDDMITR

SEQ ID NO: 127539 - DNA, 840 bp, Clostridium tetani E88
  CDS (1)..(840): transl_table=11
ttgttcattataaaaagggggcttatcatggaaagaatgcaatttaatagaaaagaatatttaaaagatgtaaaaaacatagttgtaaaagttggttcttctacattaacctatgaaaatggacttttaaatctatttcacattgaacatttagtacgtcaattagtagatctacataatagaggctataatgtaattttagtatcctctggagctataggtgcaggtgttggaaagcttggattatcagaaaaacctaaaagcattcctgaaaagcaagctgctgctgctgtaggtcaaggaatactcttgcatacctatgaaaaaatctttgctgagtatggcaaaactattggtcaaattcttttaactaaagaagatatgatagatgaagttagaagctgtaatgctacaaatacttttaacgcacttttagataaaagagttatacctataataaatgaaaatgatgctgtagtagtagatgaaattaaggttggcgataatgacactctttcagcttttgtatctaaattagtaaaggcagatttattaattttgatgtctgatatagaaggattatatagctgtgatccaagaataaataatgatgctgaattaataaattttgttgaaaaaataacaaaagatattatatcttgtgctggtggagcaggaactgatcttggtactggcggtatggctacaaaaataaaggcagcaaaaatagctacctcagcaggtataccaatgttaattgtaaatggtgcaacaaatgaagttttacaagatgtagttgagggaaaatcagtaggcacatggtttaatgcaattaaataa

SEQ ID NO: 127540 - protein, 279 aa, Clostridium tetani E88
MFIIKRGLIMERMQFNRKEYLKDVKNIVVKVGSSTLTYENGLLNLFHIEHLVRQLVDLHNRGYNVILVSSGAIGAGVGKLGLSEKPKSIPEKQAAAAVGQGILLHTYEKIFAEYGKTIGQILLTKEDMIDEVRSCNATNTFNALLDKRVIPIINENDAVVVDEIKVGDNDTLSAFVSKLVKADLLILMSDIEGLYSCDPRINNDAELINFVEKITKDIISCAGGAGTDLGTGGMATKIKAAKIATSAGIPMLIVNGATNEVLQDVVEGKSVGTWFNAIK

SEQ ID NO: 127541 - DNA, 1077 bp, Bordetella pertussis Tohama I
  CDS (1)..(1077): transl_table=11
atgggttcctcgctggtcaccaacgaaggccggggcctcgatcgcgccgcggtaggccactgggcagcccagatcgccgccctgcaccagcagggcaagcaggtcgtgctggtttccagcggcgccattgccgaaggcatggcgcggctgggctggcgcaagcgcccttcggccatgcacgaattgcaggccgccgccgccgtgggccagatgggcctgtgccaggcttacgaagccgccttcgccgagttcggcctgcgcaccgcgcagatcctgctcacccacgaagacctggccgaccggcaccgctacctgaatgcgcgctcgaccctgttcgccctgctgcgcctgggcgtagtgcccatcgtcaacgaaaacgacaccgtcgtcaccgacgaaatccgcttcggcgacaacgacaccctgggcgccctggtcaccaacctgatcgaagccgatgcgctcatcatcctgaccgaccagcgcggcctgtacgaagccgacccgcgccgcgacccggccgcgcgcttcgtggcgcatgcgcaagccggcgatgccgccctggaagccatggccggcggcgccggcagcggcgtgggcaccggcggcatgctcaccaagatcctggcggccaagcgggccgcccacagcggcgcccataccgtcatcgcatcaggccgcgaacgcaatgtgctgacccgcctggcgcaaggcgaatgcatcggcacggaattgcgcgcggtcctgccggtatggtcggcgcgcaagcaatggctggccgaccacctgcgcctgcgcggccgcgtggtgctcgatgatggcgccgtgcatgccctgctgcacgagggcaagagcctgctgcccatcggcgtggccgaagtccagggcgagttcgagcgcggcgacgtcgtggcctgcgtcgacatgcatggacgcgagtgcgcgcgcggcctgatcaattattcgtcggccgatacccggcgcatcctgcgccagccgtcgagccagatcgcgcgcatcctgggcagcatgacagacccggaactgatgcaccgcgacaacctggtcgtcacctga

SEQ ID NO: 127542 - protein, 358 aa, Bordetella pertussis Tohama I
MGSSLVTNEGRGLDRAAVGHWAAQIAALHQQGKQVVLVSSGAIAEGMARLGWRKRPSAMHELQAAAAVGQMGLCQAYEAAFAEFGLRTAQILLTHEDLADRHRYLNARSTLFALLRLGVVPIVNENDTVVTDEIRFGDNDTLGALVTNLIEADALIILTDQRGLYEADPRRDPAARFVAHAQAGDAALEAMAGGAGSGVGTGGMLTKILAAKRAAHSGAHTVIASGRERNVLTRLAQGECIGTELRAVLPVWSARKQWLADHLRLRGRVVLDDGAVHALLHEGKSLLPIGVAEVQGEFERGDVVACVDMHGRECARGLINYSSADTRRILRQPSSQIARILGSMTDPELMHRDNLVVT

SEQ ID NO: 127543 - DNA, 1191 bp, Vibrio vulnificus YJ016
  CDS (1)..(1191): transl_table=11
ttgattgttaaaacatcttctctatttttgtgtttcatttcagaagacatcatgacaacgaatcaacaaagcgtcgctgcttctcaaccaaaaactatcgttgtgaagcttggaaccagtgtgttaacaggtggtacattagcgttagatcgcgctcatatggttgagcttgcgcgccaatgtgcagagttaaaaaaacaaggccactctgtggtggtcgtctcgtcaggcgcgattgccgctggacgtgagcacttaggttaccccgcgctgcccaatgcgatggcaagcaaacagttgcttgctgcggttgggcaaagtcagttgattcaaacctgggaatcgttatttgcactgtatggcatcaaaattggccaaatgttgctcactcgagcggatctcgaagatcgcgaacgttttctcaatgctcgagatacgattaacgcgttagtggataacggcattatccctgtcgttaatgaaaatgacgccgtcgccacgagcgaaatcaaagtgggtgacaacgacaacctctctgcgttggtgggcattttatgtggtgctgataaactactgttgctgacagaccaaaaaggcttgtataccgccgatccgcgtaaagatcccaatgctgagctgatcaaagaagttaaagtcattgacgatactttgcgtaaaattgctggtggcagcggtacaacattaggtactggtgggatggcaacaaagctccaagctgcggacattgcgcgtcgtgctggcattgaagtcatcattgcggcaggccgtggtcaaaatgtcatttttgatgcgttgagcccagcccctcaaggaacccgtttcttgccttgtgaagaggcgttggaaaaccgcaagcgttggattctcgctggccctgcggcctctggtgatattgtgattgaccaaggtgcggtgaaagccgtggtcgaaaaagggagcagtttgttggcgaaaggggtgaccaaagtacttggcgagttttctcgtggcgaagtagttcgtgtaacggatgcacagggccatttggttgcgcgaggtattgcgagttattccaaccaagatatggcgaaaattgccggtaagcacagcaaagacattatttcgattctgggctatgactatggttcagaagtgattcaccgtgacgacatggttgtcattcaagaatag

SEQ ID NO: 127544 - protein, 396 aa, Vibrio vulnificus YJ016
MIVKTSSLFLCFISEDIMTTNQQSVAASQPKTIVVKLGTSVLTGGTLALDRAHMVELARQCAELKKQGHSVVVVSSGAIAAGREHLGYPALPNAMASKQLLAAVGQSQLIQTWESLFALYGIKIGQMLLTRADLEDRERFLNARDTINALVDNGIIPVVNENDAVATSEIKVGDNDNLSALVGILCGADKLLLLTDQKGLYTADPRKDPNAELIKEVKVIDDTLRKIAGGSGTTLGTGGMATKLQAADIARRAGIEVIIAAGRGQNVIFDALSPAPQGTRFLPCEEALENRKRWILAGPAASGDIVIDQGAVKAVVEKGSSLLAKGVTKVLGEFSRGEVVRVTDAQGHLVARGIASYSNQDMAKIAGKHSKDIISILGYDYGSEVIHRDDMVVIQE

SEQ ID NO: 127545 - DNA, 1239 bp, Gibberella zeae PH-1
  CDS (1)..(1239)
atgagaggaaacgggacaaagtccctgaccatcgtgatcaagcttggaacaagctcgattgtcgatgaaaagactcatgagccgcttcttcctattctcactctcattgttgacacagctgtaaagctccgaaaggatggccacagagtagtcattgtttcgtcgggagccatcggcgttgggctccggcgtatggacgtagagaagcgacctaagcatctcgcacagctacaggcactcgcggcgatcggtcaatgccgattgatgagtctatgggatagtttgttcactcatctcaggcagccaattgcccagattctccttactcgaaacgatattgcagacagaactagatacttcaatgcccaaaacaccttccatgcacttctggagcagggcgttattcccatcgtcaacgagaatgacactctcgccgttgccgaaatcaagtttggcgacaacgatactctctccgccatcactgccgccatgattcacgcagacatgttgttcttaatgacagatgttgactgtctgtacgacaagaacccccgcacccacccagatgccaaacccattgaggtggtcgaggacattgccgcccttcaagctgatgtttccagtgctggctcatccctcggaactggaggcatgagtaccaagattattgcagccagattgggcacttctgcgggtgtcacgactgtgattacaaggtcatctaacccagggaacgtgcttcatattgtgcaatacctccaatcaatacaaagagggaacacccctcccagtcctgatgagcgcgccgaaggtctgacacgttcagcgtcagctctgtcactgtcagcctccaatggaaatggtgccccctggccccccctacatacccgattcgtccctgccaacaaccctatccgggaccgtcacttctggctgcttcacaccccctatccccacggcaccctctacattgactcgggagcttacaaggcacttgttgggaaggctggcctgctccctgtaggcgtcgttgacgtcgagggtaactttgcccagcaggaagtagtgcggcttgtgacagtcaagagacgatcaactcctggaccggatgtgagtatgtcgctcaccgacagcatgttggcttctttgggaaaggtagcagaccaagcaaagagacgggaccgaaaaatggacaaaacgggggcaagcgaatacatttcaacatatgcagcgctttga

SEQ ID NO: 127546 - protein, 412 aa, Gibberella zeae PH-1
MRGNGTKSLTIVIKLGTSSIVDEKTHEPLLPILTLIVDTAVKLRKDGHRVVIVSSGAIGVGLRRMDVEKRPKHLAQLQALAAIGQCRLMSLWDSLFTHLRQPIAQILLTRNDIADRTRYFNAQNTFHALLEQGVIPIVNENDTLAVAEIKFGDNDTLSAITAAMIHADMLFLMTDVDCLYDKNPRTHPDAKPIEVVEDIAALQADVSSAGSSLGTGGMSTKIIAARLGTSAGVTTVITRSSNPGNVLHIVQYLQSIQRGNTPPSPDERAEGLTRSASALSLSASNGNGAPWPPLHTRFVPANNPIRDRHFWLLHTPYPHGTLYIDSGAYKALVGKAGLLPVGVVDVEGNFAQQEVVRLVTVKRRSTPGPDVSMSLTDSMLASLGKVADQAKRRDRKMDKTGASEYISTYAAL

SEQ ID NO: 127547 - DNA, 1458 bp, Candida glabrata CBS 138
  CDS (1)..(1458)
atgtcgcagacgatcgttataaaattgggtacgtcatcgctggtcgatgaaaagaccagggagcctaagctgtctatcatgacacaggttgtggaaacagttatccagctgaagagacaaggccacaaggtggtgattgtctccagtggtggtattgctgtgggtcttaatgccatggagatggacaagaagcccacggacctcgctgagatccaggccatcgccgctataggccaaggcagactgatcggaaggtggagtatgttgttccagcagtatggcgagaagatagcgcagattctgatcaccagaaatgatattctcgggtggactcagtataagaacgcccagaacactatcttgcagctgttggagatgggtgtcgtccccatagttaatgagaacgacactttgtccatcagcgagatcaagttcggtgacaacgacacgctgtctgctatcactgcggctctggtctctgctgatcacttgttcttgctaacagacgttgactgtctgtacactgagaacccaagaacaaaccccgacgctaagcccatagtcatcgtcccaaacatggaccaaggtgtgcccggtgtggatacgtcgaacgcagacgctggatcaagcgtcggtaccggtggtatgagaacgaaactgatcgctgcggacctggcgacaaacgcgggtgttaacactatcatcatgaagagtgacgcaccatccaacgtgaaacacatcgtggactacctggttaaatacccaaagaaagtcctatacgacgataacaagagcagtagggagcaatcctcagaaccattgagcctggatcagctcaaaaaccacccctatggcaagggaggagtcatctccccaccgaagagtgaagaggatctcctaagtctacaggatgctgaattgaaagaaatcaaggagagaaatgttccccttcatacggtattcttggctaaggatatagatcaccacttaaagaacagagagttctggatattacatggtctggttaccaaaggtgtgcttatcattgatgaagatgcctacaatacgctgacgaatgagtccggtgatgaggagcatgtgtctgaggcatatgtttccgaagtcgaggacgatgagatgtctgaagttgatcaagatcatggtctgttgccaaaggatgttattgaagtcaagggatcattccatgaacttgagtgtgttgacatcaaggtcggaaaaagattgcccaacggtaaactggaccctgatgctccattggaatacgtcggaagagccagatgtaattttacaagtgttgaactaaatagaattaaggggctgccagtagacagagttcaagacgttttgggttatgatgtaagcgaatatgttgcgcacaaggataacctggcattcccaccatcggctagtagtgtcagtttacagttgaagacctaa

SEQ ID NO: 127548 - protein, 485 aa, Candida glabrata CBS 138
MSQTIVIKLGTSSLVDEKTREPKLSIMTQVVETVIQLKRQGHKVVIVSSGGIAVGLNAMEMDKKPTDLAEIQAIAAIGQGRLIGRWSMLFQQYGEKIAQILITRNDILGWTQYKNAQNTILQLLEMGVVPIVNENDTLSISEIKFGDNDTLSAITAALVSADHLFLLTDVDCLYTENPRTNPDAKPIVIVPNMDQGVPGVDTSNADAGSSVGTGGMRTKLIAADLATNAGVNTIIMKSDAPSNVKHIVDYLVKYPKKVLYDDNKSSREQSSEPLSLDQLKNHPYGKGGVISPPKSEEDLLSLQDAELKEIKERNVPLHTVFLAKDIDHHLKNREFWILHGLVTKGVLIIDEDAYNTLTNESGDEEHVSEAYVSEVEDDEMSEVDQDHGLLPKDVIEVKGSFHELECVDIKVGKRLPNGKLDPDAPLEYVGRARCNFTSVELNRIKGLPVDRVQDVLGYDVSEYVAHKDNLAFPPSASSVSLQLKT

SEQ ID NO: 127549 - DNA, 1284 bp, Candida glabrata CBS 138
  CDS (1)..(1284)
atgaccgaaactagagttggtggtaagccatttacaattgtgatcaagcttggtacgtcttctttggttgatgagaagaccaaagaaccaaggctagctatcatgtccttgattgtggaaactgttgtcaaattacgtaggttaggccataatgttgtaatcgtttctagtggtagtataggtgttgggctgcacattttgggtatggagaagaggcctaaacatctgtcagaagtccaagcaattgcggccattggtcaaagcaaactgattggtagatgggactccttgtttgctcattttgggcaatctattgctcaaattcttctaacgagaaatgacattctagactggtctcaataccgaaacgctcaaaatactgtggaagagcttttaaagatgggtgtagttccaattatcaatgaaaatgatacattatctgttcaagagattaagtttggtgataacgatactctttcagctattacagcagggttgatacatgctgattatttattcctattaactgacgtggactgcttgtacaccgctgatccaagaagtgatcctgatgctaaaccaattttaattgttccagacctgtccaaaggtctaccaggtgttgatacatcatcgggttctgggtctgacgttggtacgggtggtatgcagacaaagttagtcgctgctgagcttgcaaccaacgctggtgttcatacaatcataatgaaaagtgatgctccttccaatatttacaagattgtgaaatatatacaatcattgcatgacactggtgaagataacaaagtatttgaaggtgatttaatgaaacttcagcttgaagagtatgaaaagcttgacagaatgggcgttccctttcacactaagtttttggccaatagtatatcgcgccacttaagaaataaagaattttggattttgcatggtttagttacttctggggcagtgattattgatgaaggtgcctacaaggctttgacaagaaagaacaaagccggtttgttacccgtcggtgtcattgaaattgaaggatccttccatgaaatggagtgtgttgacttaaaggttggtaaacgtttgccaaatggagaattggatcctgattacccactaacaattgttggaagggccagatgtaattatccatcattagaaattagcaaaatcaaagggcaacaaagtgatgagatcgagaacgaattaggttactgcaactccgaatatatcgctcatagagagaatatggcattcccaccacattaa

SEQ ID NO: 127550 - protein, 427 aa, Candida glabrata CBS 138
MTETRVGGKPFTIVIKLGTSSLVDEKTKEPRLAIMSLIVETVVKLRRLGHNVVIVSSGSIGVGLHILGMEKRPKHLSEVQAIAAIGQSKLIGRWDSLFAHFGQSIAQILLTRNDILDWSQYRNAQNTVEELLKMGVVPIINENDTLSVQEIKFGDNDTLSAITAGLIHADYLFLLTDVDCLYTADPRSDPDAKPILIVPDLSKGLPGVDTSSGSGSDVGTGGMQTKLVAAELATNAGVHTIIMKSDAPSNIYKIVKYIQSLHDTGEDNKVFEGDLMKLQLEEYEKLDRMGVPFHTKFLANSISRHLRNKEFWILHGLVTSGAVIIDEGAYKALTRKNKAGLLPVGVIEIEGSFHEMECVDLKVGKRLPNGELDPDYPLTIVGRARCNYPSLEISKIKGQQSDEIENELGYCNSEYIAHRENMAFPPH

SEQ ID NO: 127551 - DNA, 1257 bp, Kluyveromyces lactis NRRL Y-1140
  CDS (1)..(1257)
atggtaaagcagttcgtcatagtcataaaattgggatcttcatcactagttgatgaagagaccaaagaaccaaaactttctatcatgtcattgattgtggagactgtggtaaagttacgcagaagaggacacaaagttatcattgtatctagtggaggtatcgccgtcggattgaaaacgatgaatatgaagggaaggccaaagaaactatccaaggtgcaagcaatcgcagctgtgggccaaggcagattaattgggaggtgggattccttgttctctgaatttgatcagagaattgctcaaatcctaattactcgaaatgacattgttgattggactcagtataagaatgcacagaatactattagtgaattactttccatgggagtagtgccaatcgttaatgagaatgacactttatctgtgagcgaaatcaaatttggtgataatgatacattatcagctatcacagcagcgttgactggtgctgattatctatttttattgacagatgttgactgtttatacactgataatccaagagcaaatcccgatgcaaaacctatcttggttgttccagatatatcacaaggattgccaggtgtgaacacagacggtggatctggatcagatgttggaactggtggtatgaagactaagcttattgcggcagaattagcaaccaatgctggtgtccataccatcattatgaagagcgacactccagaaaacatttccaaaattgttctctacatgcaggaaagggacgatggcgtgaatgaacttacacaagatttggctgacctacaactcactgagatgcaaagtttagttaataatcatgttcctcttcatactaggtttattgccaatagtaatcatcatcacttgaagaacagacaattctggatgcttcatggactcgtcagtcaaggcgctgtaattatagacattggtgcatacgaagcgttaacgaggaaaaacaaagctggtttgttacctgcaggcgttattgaagtccaagggagcttccatgaacatgaatgtatagatataaaattgggagtcagggattcagatggaaatttggataaatccgttgcactgaaaacagtaggtagggctcgttgcaactatacaagcacagagttatcaaaaattaaaggtctgcaaagtgatcagattgaagatattctaggctatgctgatagtgaatacgtagctcatagggaaaatttagcattccctcctcattaa

SEQ ID NO: 127552 - protein, 418 aa, Kluyveromyces lactis NRRL Y-1140
MVKQFVIVIKLGSSSLVDEETKEPKLSIMSLIVETVVKLRRRGHKVIIVSSGGIAVGLKTMNMKGRPKKLSKVQAIAAVGQGRLIGRWDSLFSEFDQRIAQILITRNDIVDWTQYKNAQNTISELLSMGVVPIVNENDTLSVSEIKFGDNDTLSAITAALTGADYLFLLTDVDCLYTDNPRANPDAKPILVVPDISQGLPGVNTDGGSGSDVGTGGMKTKLIAAELATNAGVHTIIMKSDTPENISKIVLYMQERDDGVNELTQDLADLQLTEMQSLVNNHVPLHTRFIANSNHHHLKNRQFWMLHGLVSQGAVIIDIGAYEALTRKNKAGLLPAGVIEVQGSFHEHECIDIKLGVRDSDGNLDKSVALKTVGRARCNYTSTELSKIKGLQSDQIEDILGYADSEYVAHRENLAFPPH

SEQ ID NO: 127553 - DNA, 1275 bp, Debaryomyces hansenii CBS767
  CDS (1)..(1275)
atgtcagattcaaagtcatatataattgtcatcaaacttgggacctcatctttagtagatgaggttaccagagaaccaagaattgcaaatatgtcgcttatagtggaaactattgtcaaacttcgtcgccagggacacaagatagtccttgtctcatctggggcgattgcgtttgggatgaaaagggttggtatttctagcaaaccatcaaagttagctgcggtccaagcgttggcatcaattggtcaaggtcgcttaattggattatttgatgatctctttaggcaaatggagcagactattgggcagattttgcttacaagaaatgatataagtgattttaaccagtataagaatgctaaaaatacgttacatgaattattggacatgggagtgattccaattgtaaatgaaaatgacacgttatcagtagctgaaattaaatttggtgataatgatacgctttcggcaattactgcaggcatggttcatgccgactatttattcttaatgacagacgttcaatgcttatacacagacaacccaaggagtaatccagatgcagaacctatactagtggtagacaaagttgatgatttggacgtgaaaaccgatacagaatcgggcggatccaaagtgggtactgggggtatgactacaaaattaatcgcagctggattggctactaatgttggtgtcactactataataaccctttctagtcaaccagactcgattttatctattgtgtcaaatattcagtctatggataagcttgatttatctactgaacagcaaactagatatatagctggtgagatcaaaaaaaacaaaatccccctccatacacgcttcttagggttacctcgtgcaactaagataatatcggataagagattctggttattacatggtataaaaactaagggaactttatatattgatcatctatgttatgaagccttaactagaaaagatagggctggtttacttccagtgggtattgtggctgttgaaggcagtttccatgaaagtgagtgcgtatcaattaaggtgattgccgaaagatcctctcctttatctgatggtcttgaagtaggaacctgcagagtgaattatagtgctattgaaataaacttaataaaaggtttacacagtagtgaaattgaaccagttttgggatttgctgatagtgagtacgttgcccatagagataatttggcattccagccaaccttaccaccttccactgaatccttatttgaaaataattag

SEQ ID NO: 127554 - protein, 424 aa, Debaryomyces hansenii CBS767
MSDSKSYIIVIKLGTSSLVDEVTREPRIANMSLIVETIVKLRRQGHKIVLVSSGAIAFGMKRVGISSKPSKLAAVQALASIGQGRLIGLFDDLFRQMEQTIGQILLTRNDISDFNQYKNAKNTLHELLDMGVIPIVNENDTLSVAEIKFGDNDTLSAITAGMVHADYLFLMTDVQCLYTDNPRSNPDAEPILVVDKVDDLDVKTDTESGGSKVGTGGMTTKLIAAGLATNVGVTTIITLSSQPDSILSIVSNIQSMDKLDLSTEQQTRYIAGEIKKNKIPLHTRFLGLPRATKIISDKRFWLLHGIKTKGTLYIDHLCYEALTRKDRAGLLPVGIVAVEGSFHESECVSIKVIAERSSPLSDGLEVGTCRVNYSAIEINLIKGLHSSEIEPVLGFADSEYVAHRDNLAFQPTLPPSTESLFENN

SEQ ID NO: 127555 - DNA, 1635 bp, Ustilago maydis 521
  CDS (1)..(1635)
atgacaggatcgcacagcgtccccgcaacgggtccttctcactcgcaccatgctaatcctccaacctcggccgcctcctcctcttccaagacaatcgtaatcaagctcggcacctcctcaatcatttccgaagaaacacagctcccgaaaatcgccattctttcttcgcttgtcgaaacatgtcacaaactgcggtctcttggtcacaaggtcgtcattgtctgttctggagccattgggatgggacgaatccgaatgcatgttaatgaaaagcccaagtctctcggtgaacgacaagcgcttgccgcgctcggccagctacgactcatcgccctttgggactcgctcttcggcactgtgggcatcgacgtcgcacaggttctcctcactcgaaacgatatcgccgatcgacctcggtataacaacgcacgaactacactcaacactcttatatccgcgccattcaatgccatccctatcgtgaacgagaacgatacagtgtcggtatcagagttgaggttcggtgacaatgacacattatcagcgattacagccgggctggtagacgccgactttctatttctgtgcacagatgtagatggcctgtacacgggtaacccgcgcagcgatccaaatgccaggcgattgggtgttgtagaggacgtagcagctgcacgcaaagcggtctcggtagcgacgatgggttcgagttttggtaccggtgggatgcagaccaagctgattgctgcggagttggccacagcggcaggtgttgctactgtgattatcaacggtgaacatccggaaaacatgatcaaggtcgtggccaagggtattccgtcaatcggaacggaaagtacgtcgttgaggatggactcgttggcttcgtcggtgtcgtcgttggcatcggacgagaaggaactgatcggatatccgccgttagacagcccggcgcatacgatcttcctgccgaaagcgaatccgttatcttcgaggaaatggagcattttgcacgccttgcatccagcaggcgcactgatcatcgacgaaggcgcctttaaacgcatagctcgtgctgattctggtggacgattgttgcctgcaggtgtggtaggggttgagggtaactgggaacgcatgcaggctattcgtttggtggtgcgacgtcgcatctccaaagcgatcccccacgccacggggttggagcaaggcgcaccgctgagcaactcaactcccatcgctcgaagtttgggtcagtacctcttgaggaacgatacagactcggtctcaggtacaagaactccaccggtcatcgattcgcttagaaagggctctgtcgcagctgcatctgtgccgtccagtccatccagcacagccgcttcgccagcagatgcagcagcacatgcaaccacatcacagagcaccttgaccaaagacggcgaccaagactgggaatggcagctgatcgaagtaggaagggccctagccaattacacctcgatcgaaagcgagaggatcaaaggcttgaaatcttctcaaatctcatccacgttaggatacgctgactccgagtatttgaccgatcaggtggctttgcatactctttccctgcccgatccttacccttcgcaatga

SEQ ID NO: 127556 - protein, 544 aa, Ustilago maydis 521
MTGSHSVPATGPSHSHHANPPTSAASSSSKTIVIKLGTSSIISEETQLPKIAILSSLVETCHKLRSLGHKVVIVCSGAIGMGRIRMHVNEKPKSLGERQALAALGQLRLIALWDSLFGTVGIDVAQVLLTRNDIADRPRYNNARTTLNTLISAPFNAIPIVNENDTVSVSELRFGDNDTLSAITAGLVDADFLFLCTDVDGLYTGNPRSDPNARRLGVVEDVAAARKAVSVATMGSSFGTGGMQTKLIAAELATAAGVATVIINGEHPENMIKVVAKGIPSIGTESTSLRMDSLASSVSSLASDEKELIGYPPLDSPAHTIFLPKANPLSSRKWSILHALHPAGALIIDEGAFKRIARADSGGRLLPAGVVGVEGNWERMQAIRLVVRRRISKAIPHATGLEQGAPLSNSTPIARSLGQYLLRNDTDSVSGTRTPPVIDSLRKGSVAAASVPSSPSSTAASPADAAAHATTSQSTLTKDGDQDWEWQLIEVGRALANYTSIESERIKGLKSSQISSTLGYADSEYLTDQVALHTLSLPDPYPSQ

SEQ ID NO: 127557 - DNA, 1560 bp, Cryptococcus neoformans var. neoformans B-3501A
  CDS (1)..(1560)
atgtccggtaaatcaaaattcacccctctgactatcgtcattaagctcggtacctcatctattgtatccccgacatatccttttgtcccccaccttcgacttctttcatctattgttgagactgtagtgaaactccggacccaaggacatcgtgtcgtcttggtatcttcgggtgctatcggtgtggggttaaggaggatggatcttaaggaaagagggaaggggttgcatcagaagcagtcacacgaccaacaggcccttgctgctgttggtcaagggcggctgattgcgctgtgggataatctgttttctcaattggatcagcctattgcccagattcttctcacccgaatggacatttcagacgtgacacagagaacgcgttatctcaacgctcaaaacactttctctgaattattgcaaatgggcgttattcctatcgtcaatgagaatgatacagtctcagtatctgaaatcaaatttggcgacaatgacacattatcggcgatctcttctgctatctgccatgccgactatctcttccttttgactgacgttgactgtttatacacagacaacccccgtaccaaccccgatgcgaagcctgtgagagtcgtacgcgatattgagaaggtgaaacagcaagtatctacttctaccctcggaacatctcttggcacaggaggcatgtccacaaagctcattgcggccgagcttgctaccgctgctggcacaaccaccgttgttatgcattctatcaacgtaactgacattttcaaagtcattgaaaacggcccttcgccttgccgagaggttgcagagactccagaattgtttgagggcccactgtgtacgaggtttttaagacgagagtcagcccttaaagaccgaaaatggtggatcgcccacggtcttcacgctgccggtaccgttgtcatcgacgaaggtgcctgccgtgccattcgacgcaaagaatccggtggtcgtcttcttcctgccggtgtcgtccgcgtggttggccctttcgcaagtcaccaagccgtccgtctcgttgttcgccgtcgacgccacgacgacatcgctgcccttagctcagtcgacgaatcaacccccggtagccctacccccgacctttcccaagtaccccagccggcgacattcgcttctcctgctcttcgacaccttacgattgggactaccaatcctatcaccgtcatgtccgacgccaacaacactgaacctgatactcctcaactccaaccttccatgtctctttcatcgtcgatcgcttccctcgaccctttgagcaggagtgtgccccctagtcctgcgataacggctttggcggagaggttgggcacgacatcgttaacgagtattgggcggggagtggccgaaggagagagtgatgagtgggaagaggtcgaggtggcgaagggtctagctcaatacaacagtgtagaaattgacaggatgaagggacgaaagagttcggaaattgaaaaacttattggatacgtcgagagcgagcatgtggtggactcgattaccttcttgtag

SEQ ID NO: 127558 - protein, 519 aa, Cryptococcus neoformans var. neoformans B-3501A
MSGKSKFTPLTIVIKLGTSSIVSPTYPFVPHLRLLSSIVETVVKLRTQGHRVVLVSSGAIGVGLRRMDLKERGKGLHQKQSHDQQALAAVGQGRLIALWDNLFSQLDQPIAQILLTRMDISDVTQRTRYLNAQNTFSELLQMGVIPIVNENDTVSVSEIKFGDNDTLSAISSAICHADYLFLLTDVDCLYTDNPRTNPDAKPVRVVRDIEKVKQQVSTSTLGTSLGTGGMSTKLIAAELATAAGTTTVVMHSINVTDIFKVIENGPSPCREVAETPELFEGPLCTRFLRRESALKDRKWWIAHGLHAAGTVVIDEGACRAIRRKESGGRLLPAGVVRVVGPFASHQAVRLVVRRRRHDDIAALSSVDESTPGSPTPDLSQVPQPATFASPALRHLTIGTTNPITVMSDANNTEPDTPQLQPSMSLSSSIASLDPLSRSVPPSPAITALAERLGTTSLTSIGRGVAEGESDEWEEVEVAKGLAQYNSVEIDRMKGRKSSEIEKLIGYVESEHVVDSITFL

SEQ ID NO: 127559 - DNA, 2460 bp, Strongylocentrotus purpuratus
  CDS (202)..(2460)
ctatcccgtgctgtgagtgcaagcacaacagcaacacacctaaagactctgctcaatcctgaaatcagcttcttacaacagtctcgactactgttcagttacctgtcacatcggaatagccaagcaccgacaacaaccaggactggcaacaatgatggacaccttcaaaggttgtccactcataaccttattgcaaatagtatgtcttccctgaggtccgtatcaacgactgcagggtgtaagaagtcggcgacgtcgagagcggagctgaagagcagcaaaaggatagtcctgaagctaggtagtgctgtgatcacaagagacgatgagtgtgggttggccctaggtaggctggcttccatcgtagaacaggtttcagagctccaatcttcaggcagacaggtcgtactggtcaccagtggagctgtggcattcgggaagcagaggctacgccatgaagtcatgctgtcaaagagcatcaaacaaactcttgccccaaattcttctagcattattcagatggattcaagagcctgtgctgctgctggacagagtggtttgatgtctctgtacgaagctatgttctcacaatatgggctcactactgctcaggtactggtgaccaagccggacttctaccacgactacacccgcagcaacctccggggcaccatgcaggagctgctgcggatgaacatcatccccatcatcaactccaacgatgcggtggtcccgcccccagaggaggacaaggacttggccggggtaagaacaggggtcataagtatcaaagacaatgacagccttgcagcccgtcttgctattgagatcaatgctgatctacttgtcctgctttccgacgtcgacggcatcttctccgctcctcctggtcaagagggggcgtccttcttagatacggtctaccctggagacacagctttcattgagtttaaagggacttctcgtgttgggcttggcggtatggaatcaaaggtcaaagcagccaactgggcgctggagcgcggctgctccgtcgtgatcggcaacggcatgaacagggacgacatcgtcctcaacatcctcaacgggcggaaggtgggcaccttcttcacggagaccaaacccacgggcgtgtccccggagatgcaggctataaaagccagagacggtggcaggctactccaggcactcacttccgaacagagagctgaggtaataatacgtctagctgacctcttgattgaaaggtcatcaaccatcatggcggctaacaggagggacattgatgaggctaggctaagtaatatgactggacctaacctgtccagactagcgctgaccgatgccaagctgaagagcctgtccgacggtctgaggcagattgcggccacctctcacaagaatgttggccgagagatcaagaggacattgctgtccgatggcatgttgctgcgacaggtcaccgtgccgatcggagtgctcatggttatcttcgagtccaggccagactgtctgccgcaggtagcagcactggccatcagcagtgccaatggtctactcctgaagggaggcaaggaagcaagttatagtaatgaggtgctacactctctagtagaagaagccctggagatgcatgatgccaaagatgctgtagcactgatcagtaccagagagcaggtcggtgacttgctgaagatgtccgacgacattgacctggtcattccacgaggttccaaggagatggttcagctcattcagcagcagagtgagggtatcccagtcctcggacacagcgagggcatctgtcatgtctacatcgacgaggaggcggatctcgacatggccctgaagattatccgtgattctaagtgcgattatccagccgcctgcaacgctatggagacgctactcatccacaaaaagttcagacatactcaagtctttgaagatatccttgatatgctgagagcagaaaatgtcaaattcaacccaggccctcgcttggcccgatccctcaagtttggaccacgggaggcagactcgatgagcatcgagtacggtggcctggagtgcgcagtagaaatagttgacgacgtcacaggtgcaatcaaccatgtccacaaacatggcagctcccatacagatgtgattgttacaaataatgaagagacagcggatgaattcatgaagaacgtggacagtgcctgtgtcttccacaatgccagcactcgtttctctgatggataccgatttggattgggagctgaagtcggtatcagcaccacaaggatccacgcccggggaccggttggggtggagggcctcctcaccaccaagtggatccttgagggatccggagacactgtgcaggagtacgcagcaggagggagcaagatgtttgtacaccaggagctcgaggtggagaatggggaggaggtcctggagtcttcatcagcatag

SEQ ID NO: 127560 - protein, 752 aa, Strongylocentrotus purpuratus; identical to SEQ ID NO: 21027

SEQ ID NO: 127561 - DNA, 1083 bp, Prochlorococcus marinus str. MIT 9515
  CDS (1)..(1083): transl_table=11
atgaaaacgtgggtcgttaaagttggtactagtattctcagagggacaaatgagaaatctacagaacaagtaatagaaagtttatgtaaatctttaacaagttttattttgaggggtaataaagtggttctagtaaccagtggagcagttggattaggatgtaataaattaaatttgaatagaaggccaaaggaacttagttctctacaagctgtagctgctgtaggacaagtaaatttaatgactttgtatgataaaacaatgaaaaagctaggtcataatatagcacaaatactcataacaaaaactgatttcaattcgcgtgagtctttcaataatgcatccaaaacatttaaaaaattaattgatcttaatgtcatcccgatagttaatgaaaatgattctattgctaatgaagagctaaaatatggagataatgatactctctctgcattagttgctttagcaattaatgcaaataagcttattttattaactgatatagaaaatttatattctaaagatcccagaaataataaggatgctcatccaataagagaagttaatactaatgaattaaaaattattagagataaaaataataaaatttataataatgaatgggggacaggaggcattactacaaaacttattgctgctgaaattgctacaaaaggaggaatagaagttcaattggccgatggcagaaatgaaaataatttaatagatatttttaatgataaaaaaataggtacaatatttcatcctttagataaacctgttggtaataaaaaaaattggttatctcatgcgattaaaactgttggagaaattactttagatgaaggtgcatgtttagctattgtaaaaaaaggagcgtctcttttagtcgttggagttaaagaagtagagggagattttacggttaatcaagctgttagaattgtaaatacagataagaaagaagtcgcaaaaggtataacatcaatgagtagtgattctctaaaaagaattttaaataaaaaagaaaccattaattcatcaatgatagtggtacatagagatgttcttgctctttcttaa

SEQ ID NO: 127562 - protein, 360 aa, Prochlorococcus marinus str. MIT 9515
MKTWVVKVGTSILRGTNEKSTEQVIESLCKSLTSFILRGNKVVLVTSGAVGLGCNKLNLNRRPKELSSLQAVAAVGQVNLMTLYDKTMKKLGHNIAQILITKTDFNSRESFNNASKTFKKLIDLNVIPIVNENDSIANEELKYGDNDTLSALVALAINANKLILLTDIENLYSKDPRNNKDAHPIREVNTNELKIIRDKNNKIYNNEWGTGGITTKLIAAEIATKGGIEVQLADGRNENNLIDIFNDKKIGTIFHPLDKPVGNKKNWLSHAIKTVGEITLDEGACLAIVKKGASLLVVGVKEVEGDFTVNQAVRIVNTDKKEVAKGITSMSSDSLKRILNKKETINSSMIVVHRDVLALS

SEQ ID NO: 127563 - DNA, 1083 bp, Prochlorococcus marinus str. NATL1A
  CDS (1)..(1083): transl_table=11
atgacaacctgggtaatcaagattggcacaagccttttgagaggaaacgataaatatacaacttttgatgtaattaatgattattgttcttatatatcaaaagctcaaaggaatggcgataaaattatattggtttctagtggtgctgtaggacttggatgtcatcaaatgagattcaagacaagacctaaagaaataatctctcttcaagcttctgccgcaataggccaacttcatttaatggctttatatgaaaaggctatgagcatttttggatataaagtcgcacaaatattattaactagatcagaattaggctcaagaaatagttataactctgcttcgcaaacattaaaaagattgctcgaatgggatgttataccaatcgtaaacgaaaatgatataacctcagatgaagagctgaagtatggtgataatgatactttatctgcattagttgcaacagctatatctgctgatcaattaatattattaactgatatcgatcatctctactcttctgatcccaaaatcaatagtaaagctaagccaatcaaagatattaacaattcaaaagaattaaataatttagaactagcaaatgaacaaacttcatgggggactggaggaataaaaacaaaattaactgctgcaaagatcgccactgaaagcgggataaaagttcaattagcagatggcagagatccgaaaatattaggggaattacttgatggaaaaaaaataggaactgtttttcaccccaatccaaaccctatcgggaatagaaaaagttggttggcacatgcaattaaaccagtcggagaaatacacttagatgatggtgctagtgaagctatcaaaaacaaaggtgcttcactattattagttggggtgaaaaaagttagcgggaattttattgcgaatcaacctgtgaaagttattaacacggaaggagaggaaattgctaaaggaatttgctcaatgagcagtgatgctataaagataggaattaattcaagatccgaaacaacaggatctcctctagttatccaccgagatgttctggttctaacaagtgaataa

SEQ ID NO: 127564 - protein, 360 aa, Prochlorococcus marinus str. NATL1A
MTTWVIKIGTSLLRGNDKYTTFDVINDYCSYISKAQRNGDKIILVSSGAVGLGCHQMRFKTRPKEIISLQASAAIGQLHLMALYEKAMSIFGYKVAQILLTRSELGSRNSYNSASQTLKRLLEWDVIPIVNENDITSDEELKYGDNDTLSALVATAISADQLILLTDIDHLYSSDPKINSKAKPIKDINNSKELNNLELANEQTSWGTGGIKTKLTAAKIATESGIKVQLADGRDPKILGELLDGKKIGTVFHPNPNPIGNRKSWLAHAIKPVGEIHLDDGASEAIKNKGASLLLVGVKKVSGNFIANQPVKVINTEGEEIAKGICSMSSDAIKIGINSRSETTGSPLVIHRDVLVLTSE

SEQ ID NO: 127565 - DNA, 1086 bp, Prochlorococcus marinus str. MIT 9303
  CDS (1)..(1086): transl_table=11
atgagtctgtgggtggtgaaggtgggaaccagcctgctgagaggcaatgagaagcaatccaccgccgaagtgattgagagctacagcgcctgtctttcagcaagcctcaagcggggggatcatgttgtcctcgtaacaagtggcgccgtaggtctgggttgcaatcgtctagggctaagccaacggccggttgatgtggtggctctccaagcgacggcggctatcggccaaggacaactcatggctctctatgaggctgccatgagccgaaggggctacaccgtggctcaggtattgctcacccgctcagatcttggctcgaggcagcgataccgcaatgcttcaagcaccttgaagcaattactcgactggggcgtgctgccggtggtgaatgagaacgacgccctctctccggaagaattgcgttacggcgacaacgacaccctttcagctctcgttgcaaccgcagtggaggctgatcagctcatcatgctcaccgacgtggatcgcctttattcctcagatccccgcattaatgcctctgccgaaccgatctcagatgtttaccatccccatgaactgactgccctggaagtcgcggcaggggagggaggtccctggggtactgggggtatgagtacaaaacttgcggcagctcgcatcgctaccgcaagtggcatcaccgttcttcttgctgatggccgcgatcctcaagtgcttgatgggttgctgcaaggaagacggagcggcacggtgtttcatcctcaccctcaacctctcggtaatcgcaagagctggctggctcatgccctcaagcccttagggacccttcagctggatgaaggcgcctgcgatgcccttcaacatcgtggcgcctccctactcttggtgggggttaaagaggtggaaggaaactttgaagccaaccagccggtaagactaattaatcccgaaggtaacgagctcgctcgaggcttgtgttccttgagtagcaatgaactgcgcgaggccattgagacccaaatgagcacgaatcgttcaccggtcgtggtgcatagggacgtgttggttctccgcaacgcgtga

SEQ ID NO: 127566 - protein, 361 aa, Prochlorococcus marinus str. MIT 9303
MSLWVVKVGTSLLRGNEKQSTAEVIESYSACLSASLKRGDHVVLVTSGAVGLGCNRLGLSQRPVDVVALQATAAIGQGQLMALYEAAMSRRGYTVAQVLLTRSDLGSRQRYRNASSTLKQLLDWGVLPVVNENDALSPEELRYGDNDTLSALVATAVEADQLIMLTDVDRLYSSDPRINASAEPISDVYHPHELTALEVAAGEGGPWGTGGMSTKLAAARIATASGITVLLADGRDPQVLDGLLQGRRSGTVFHPHPQPLGNRKSWLAHALKPLGTLQLDEGACDALQHRGASLLLVGVKEVEGNFEANQPVRLINPEGNELARGLCSLSSNELREAIETQMSTNRSPVVVHRDVLVLRNA

SEQ ID NO: 127567 - DNA, 834 bp, Clostridium thermocellum ATCC 27405
  CDS (1)..(834): transl_table=11
atggaaagttcaaatttaagaaagtatttgtctgattccaaaagaatagtaataaaagtaggtacttcgactcttacatatgagaacggtgaaatgaatcttgcaaggatggaaaaactagtaagggttatatcggaccttatgaaccagggcaaagatgtggtattggttacgtccggagcaataggtgtcggcgtcagcaagctgaaactgggttcaaggccgaaagagttgaaagacaagcaagccgttgccgccgtaggtcagtgcgaacttatgtatatgtacagtaaattgttcttggaatacggtcatacagtgggacagattcttttaacccgtgacgtggttgaaaatcccacgggtaagaccaatgtaataaacacttttgagactttgcttgaaatgagaataattcctatagttaatgaaaacgactcggtggccgttgatgaaatagaatccgaaacaaaccacgtgtttggggacaacgacacgttgtcggcaatcgttgcgactttggttaatgcggatttgttgataattttatcggatattgacggattttatgactgtgacccgagagccaatgagtgttcaaaacttatttcggtgattgagaaaataacacctgagcttgagaaatgtgcgggaggagttggaagctcaaggggcaccgggggcatggttaccaagctttccgctgcaaagattgccactttggcaggtataaacatggttcttgccaacggtgataatccgaatattgtttatgacattttggcaggcaaggaagtgggttcacttttcctggcccaaaaatcagactcttga

SEQ ID NO: 127568 - protein, 277 aa, Clostridium thermocellum ATCC 27405
MESSNLRKYLSDSKRIVIKVGTSTLTYENGEMNLARMEKLVRVISDLMNQGKDVVLVTSGAIGVGVSKLKLGSRPKELKDKQAVAAVGQCELMYMYSKLFLEYGHTVGQILLTRDVVENPTGKTNVINTFETLLEMRIIPIVNENDSVAVDEIESETNHVFGDNDTLSAIVATLVNADLLIILSDIDGFYDCDPRANECSKLISVIEKITPELEKCAGGVGSSRGTGGMVTKLSAAKIATLAGINMVLANGDNPNIVYDILAGKEVGSLFLAQKSDS

SEQ ID NO: 127569 - DNA, 1119 bp, Herminiimonas arsenicoxydans
  CDS (1)..(1119)
atggattctgccattcaatcagccaaacgcatcatcatcaaggtcggctcttcgctcgtcactaatgacggcaagggactcgatactgccgcgattcaaaaatgggcagagcagatcgttcaattacgcgccttgggcaaggaagtggtactggtcagttcaggtgccattgccgaaggtatgcagcgtctcggattcgacaagcgtccgactggcgtccacgagttgcaggcctgtgctgcagtcggtcagatggggctggcgcaaatctatgaaaccagtttccgtcagcatcaggtacaaaccgcgcaaattctgctgacgcatgctgatctggcggatcgtgagcgttatctgaatgcgcgatcgacattgtttacattgctgcagctgggagtagtacccatcatcaatgaaaacgataccgtcgtcaccgatgaaatcaagttcggcgataacgatacgctgggtgcgctggtagccaatctgatcgaagccgatgcgctgattattttgaccgatcaacgcggcctgttcagcgccgatccgcgcaaagacccgcatgccacgttcattcatgaagcacaggctggcgatgtcgagctggaagcgatggcaggcggtgcgggcagtagccttggtcgcggcggcatgctgacaaaaatactggcggccaagcgggcggcattgtctggtgcacatacggtgattgcctggggacgcgaagaacaggtattgacgcgtttggcggctggcgaagcgataggcacgcaattgactgcgcaaactgcgcaactgacggcgcgcaagcaatggatggcggatcatttgcacacggcaggcaggatcgtgctcgatcagggcgccgtgctgaaattgacggcagaaggaaaatcgctgttgcctatcggcgtgatcgaggtgtccggcagtttcgggcgcggcgatgtgattacctgtgtcgatcaatcaggccgggcaattgcacgcggcattaccaactacacaagttcggaggctcgccgcatcatgcgcaagccgtcgacggacattttatccattcttggttttgttgaagagccggaattgatacaccgcgataatctggtgttgttgtaa

SEQ ID NO: 127570 - protein, 372 aa, Herminiimonas arsenicoxydans
MDSAIQSAKRIIIKVGSSLVTNDGKGLDTAAIQKWAEQIVQLRALGKEVVLVSSGAIAEGMQRLGFDKRPTGVHELQACAAVGQMGLAQIYETSFRQHQVQTAQILLTHADLADRERYLNARSTLFTLLQLGVVPIINENDTVVTDEIKFGDNDTLGALVANLIEADALIILTDQRGLFSADPRKDPHATFIHEAQAGDVELEAMAGGAGSSLGRGGMLTKILAAKRAALSGAHTVIAWGREEQVLTRLAAGEAIGTQLTAQTAQLTARKQWMADHLHTAGRIVLDQGAVLKLTAEGKSLLPIGVIEVSGSFGRGDVITCVDQSGRAIARGITNYTSSEARRIMRKPSTDILSILGFVEEPELIHRDNLVLL

SEQ ID NO: 127571 - DNA, 1119 bp, Burkholderia vietnamiensis G4
  CDS (1)..(1119): transl_table=11
atgcgttcgatcatcgcggattcgaagcgattggtggtgaaggtgggttcaagcctcgtgaccaacgacggcaagggcctcgatcatgcggcaatcggccgctgggcggcgcagatcgctgcgctgcgcgcgcagggcaaggaagtggtgctggtcagctcgggcgcgatcgccgaggggatgcagcgtctcggctggaacaagcgtccgcgcgaaatcgacgaattgcaggccgccgcggcggtcgggcagatggggctcgcgcaagtctacgaaagccgcttcaccgagcatcacattcgcaccgcgcagatcctgctcacgcatgccgacctggccgatcgcgagcgctatctgaacgcgcgctcgacgttgctcacgctgctgcgcctcggcgtcgtgccgatcatcaacgagaacgacacggtggtcaccgacgaaatcaagttcggcgacaacgacacgctcggcgcgctcgtcgcgaacctgatcgaaggcgatgcactgatcatcctgaccgaccagacggggttgttcaccgccgatccgcgcaaggatccgaacgcaacgctcgtcgcggaagcgagcgcaggcgcgccggagctcgagtcgatggcgggcggcgcggggtcgagcctcggccgcggcgggatgctgacgaagatcctcgcagcgaagcgcgccgcgcacagtggcgcgaacaccgtgatcgcgagcggccgcgaggccgacgtgctggtgcggctggccgcgggtgaggcgatcggcacgcagctgatcgcacggaccgcgcggatggccgcgcgcaagcaatggatggccgatcatctgcaggtgcgcgggcacgtcgtgatcgatgcgggcgcagtcgagaagctgagggacggcggcaagagcctgctgccgatcggcgtgatcgacgtgcagggcgcgtttgcacgcggcgaggtgatcgcgtgcgtcggcccggacgggcgtgaagtggcgcgcggcctcacgaactacagcagcgcggaaacgaagctgattcaccgcaagccgagcggcgagatcgagacggtgctcggctacatgctcgaacccgagctgattcaccgcgacaacctcgtgctggtctga

SEQ ID NO: 127572 - protein, 372 aa, Burkholderia vietnamiensis G4
MRSIIADSKRLVVKVGSSLVTNDGKGLDHAAIGRWAAQIAALRAQGKEVVLVSSGAIAEGMQRLGWNKRPREIDELQAAAAVGQMGLAQVYESRFTEHHIRTAQILLTHADLADRERYLNARSTLLTLLRLGVVPIINENDTVVTDEIKFGDNDTLGALVANLIEGDALIILTDQTGLFTADPRKDPNATLVAEASAGAPELESMAGGAGSSLGRGGMLTKILAAKRAAHSGANTVIASGREADVLVRLAAGEAIGTQLIARTARMAARKQWMADHLQVRGHVVIDAGAVEKLRDGGKSLLPIGVIDVQGAFARGEVIACVGPDGREVARGLTNYSSAETKLIHRKPSGEIETVLGYMLEPELIHRDNLVLV

SEQ ID NO: 127573 - DNA, 1137 bp, Bradyrhizobium sp. ORS278
  CDS (1)..(1137): transl_table=11
atggccccccgtctcgaaaacttccgccgcatcgtcgtcaaggtcggctcgtctctgctggtcgattccgaggccggcgaggtgcgcgccgcctggttgaccgcgctggccgccgacatcgctcggctgcacggccgcggctgcgagctgctggtggtgtcctccggctcgatcgcgctcgggcgcagccggctgaagctgccgcgcgggccgctgaagctggaggagagccaggcggcggccgcggtcggccagatcgccctggcgcggatctggtcggaagtgctgggcgcgtacggcatcggcgccggccagatcctggtcaccctgcaggacaccgaggagcgccgccgctatctcaacgcgcgctcgacgatcgcaaaactcctcgaatggcgcgcagtgccggtgatcaacgagaacgacacggtggcgaccgccgaaatccgctacggcgacaatgaccgtctcgccgcccgcgtcgcgaccatggccagcgccgatttgctggtgctgctgtcggacatcgacggcctctacaccgctccgcccgcccaggatccgaacgcgaagctgatcccggtggtcgagagcatcaccgccgatatcgagggcatcgccggcggcgcggcgtcggaattctcccgcggcggcatgaagaccaagatcgaagccgcgaagatcgcgaccaccggcggcacccacatgctgatcgcctccggcaagatcgagcacccgctcgcggcgatcgccaatggcggccgctgcacctggtttctcacgccggccaatccggtcacctcgcgcaaacgctggatcgccggctcgctggagccgaagggcacgctgacgatcgatgccggcgccgttgccgcgctgcgcgccggcaagagcctgctgccggccggcgtgatcaaggtcgacggccagttcgcccgcggcgatgccgtggtggtgcgcggccccgacaccgacgagatcggccgcggtctggtcgcctacgacgccgacgatgccgaacgcatcaagggccggtcgtcgccggatgtcgccgtcattctcggcatgtccggccgggccgagatgatccaccgcgatgaccttgtgatcgggccggcgggggtgggtccggcctaa

SEQ ID NO: 127574 - protein, 378 aa, Bradyrhizobium sp. ORS278
MAPRLENFRRIVVKVGSSLLVDSEAGEVRAAWLTALAADIARLHGRGCELLVVSSGSIALGRSRLKLPRGPLKLEESQAAAAVGQIALARIWSEVLGAYGIGAGQILVTLQDTEERRRYLNARSTIAKLLEWRAVPVINENDTVATAEIRYGDNDRLAARVATMASADLLVLLSDIDGLYTAPPAQDPNAKLIPVVESITADIEGIAGGAASEFSRGGMKTKIEAAKIATTGGTHMLIASGKIEHPLAAIANGGRCTWFLTPANPVTSRKRWIAGSLEPKGTLTIDAGAVAALRAGKSLLPAGVIKVDGQFARGDAVVVRGPDTDEIGRGLVAYDADDAERIKGRSSPDVAVILGMSGRAEMIHRDDLVIGPAGVGPA

SEQ ID NO: 127575 - DNA, 1236 bp, Propionibacterium acnes KPA171202
  CDS (1)..(1236): transl_table=11
atgacctgcgcggagagtcgtggcgcgcccgtgttgccgaagaggagtggttcgagggccgtgactgatcagcgcggagccatatgcggggccgccaccctggtggtcaaggtcggatcttcctctttgactcttcctggtggcgggattgacgttcgtcgtgttgacgacctggttgatgcgctgagtgaggtcatcgcggtcggccggcgcgtcgtcctggtgagttccggggcgattgccaccggatttcccgccatggggataactcatcgtccgcgcactttggctggcaagcaagcggccgcgtcggtgggacaaggtattttactggctcactacgcgtcgaggtttgccagtcacgggttgcgggtggggcaggtactactcaccgtcaatgacctggtgcggcccacctcgtaccgcaatgcctggtcaaccctcgacactttgctggggttgggcgtcgtgccgatcgtcaacgagaacgacacggtcgccaccggagaaattcggtttggcgataatgatcggcttgctgccctggtagccgagctggtgcgcgctcaagccctcatcctgctctctgacgttgacgccttgtacaccgcccatccggattcaccggatgctcgtcgcgtggaggttgtggaggacatcgacacattggatgtcgatacccataaagctggttcgggggtgggaaccggcggcatgaccacgaaacttgaagccgcccgaatggccacctgtgccggggtaccggtggtactcgcagcggcggtggatgccccggacgttctggctggtgtccccgtgggtacctacttccgcccgctggcgacgcgacggccccgacggttgctgtggttggccgacgctgccaccccgcagggacagatcgtcatcgacgacggagctgtcgaagctttgacacagcgtcattcctcgttgttggcggtgggtgtgactcgggtacacggggatttccaagcaggcgacccagtgacgatcctggcctccgacggtcgagttgttggtcgcggtatcgcccagttctcccatgatgaggtgcgcgtcatgaggggacgttcgagtgcctggctggccgcagaaatgggtccggcggcctctcgcgagatcatccaccgcgatgccatggtgctgagtcgtcgtcgtaaagctgagccgtcgtcgaggaaccagaaaagtagcgggtcaagggtgacgtcctga

SEQ ID NO: 127576 - protein, 411 aa, Propionibacterium acnes KPA171202
MTCAESRGAPVLPKRSGSRAVTDQRGAICGAATLVVKVGSSSLTLPGGGIDVRRVDDLVDALSEVIAVGRRVVLVSSGAIATGFPAMGITHRPRTLAGKQAAASVGQGILLAHYASRFASHGLRVGQVLLTVNDLVRPTSYRNAWSTLDTLLGLGVVPIVNENDTVATGEIRFGDNDRLAALVAELVRAQALILLSDVDALYTAHPDSPDARRVEVVEDIDTLDVDTHKAGSGVGTGGMTTKLEAARMATCAGVPVVLAAAVDAPDVLAGVPVGTYFRPLATRRPRRLLWLADAATPQGQIVIDDGAVEALTQRHSSLLAVGVTRVHGDFQAGDPVTILASDGRVVGRGIAQFSHDEVRVMRGRSSAWLAAEMGPAASREIIHRDAMVLSRRRKAEPSSRNQKSSGSRVTS

SEQ ID NO: 127577 - DNA, 828 bp, Streptococcus pyogenes MGAS10394
  CDS (1)..(828): transl_table=11
ttgggtatgatgaaacgacaatttgaagatgtaacacgtatcgtaattaaaattggcactagttcattagtgctaccaacaggtaaaatcaatttagaaaaaatcgaccaactggcttttgtgatttcaagtttgatgaataagggcaaggaagttattttagtatcatcgggagcgatgggatttggactagatattttgaaaatggaaaaacgtccgaccaatcttgctaaacaacaggcagtttccagtgttggtcaggtggccatgatgagtctttattcacaaatttttgcacactaccaaaccaacgtgtcacaaattttattgacgagagatgtggtggttttcccagaaagtctagccaatgttaccaatgcttttgaaagtctgattagtttgggcattgtgccgattgttaatgaaaacgatgcggttagtgtggatgaaatggatcatgcgactaaatttggagataatgaccgtttatctgctgtcgttgctggtattacaaaagctgatttattaatcatgttgtctgatattgatggcctttttgataaaaaccctactatttatgaggatgcgcagttacgcagtcatgttgcagtcattacgcaagaaatcattgcgtcagcaggtggtgcgggcagtaaatttggcacaggtgggatgctaagtaaggtgcagtctgctcagatggtatttgaaaacaaaggacagatggtcttgatgaatggagctaatcccagagatgttttaagagtgcttgaagggcaaccactaggcacctggttcaagcagatagaagaggtaacacatgactga

SEQ ID NO: 127578 - protein, 275 aa, Streptococcus pyogenes MGAS10394
MGMMKRQFEDVTRIVIKIGTSSLVLPTGKINLEKIDQLAFVISSLMNKGKEVILVSSGAMGFGLDILKMEKRPTNLAKQQAVSSVGQVAMMSLYSQIFAHYQTNVSQILLTRDVVVFPESLANVTNAFESLISLGIVPIVNENDAVSVDEMDHATKFGDNDRLSAVVAGITKADLLIMLSDIDGLFDKNPTIYEDAQLRSHVAVITQEIIASAGGAGSKFGTGGMLSKVQSAQMVFENKGQMVLMNGANPRDVLRVLEGQPLGTWFKQIEEVTHD

SEQ ID NO: 127579 - DNA, 1155 bp, Desulfotalea psychrophila LSv54
  CDS (1)..(1155): transl_table=11
atgatggtggacgttacagaggagttgcagcttcgtcgagagatatttgacaaggctcgtagggtagttgttaaggttggcagtgcaatcttaactaatgtcggtggcattcatacaagttttattgcagatcttgcccgggaaatttcttatctccgccaaagcggacatgaggttattttggtgtcatccggggctgttgctgcgggacgtaaaaaaatttcttggcaggatagtgccccgctgggcatgaaagaaaagcaggcccttgccgccattggtcaatctcatttgatgaggacctacgaagaggcctttggcttttacgagctggatgtggcccagatcctgcttacccatgccgatctttctcaccgggaccgctatctcaatatacgtaataccattcttaccctgcttaagtttggtgttacccctatcattaatgaaaatgatactgtctcggttgaagagttaaagtttggtgataatgataccctggctgctctattgaccaacctgcttgaagccgatatctgcatatgtctgacagatgtagatgccctctatgacaaaaatccccagaaagatccgacagctcgtcccctgcatattgtcacaaagatcagtccagagattgaggcaatggcggggaatagtaatagcctttttggcactggaggcatgcagagtaaaatacgtgccgccaagattgttttttcaggtggtgggacggcgataataggtcctggtcgtgctccgagagtgttacagcgtctttttgccggggaggatatcggtaccatttttcttccctgcaaagaacggatgaagagcaaaaaacagtggattgctcatgtgcttaagccaaaggggactcttttgcttgatgccggggcctgtaaggccctgttgcagggtggtaagagtttgctcccctccggtattgttggtatctccggtgaatttgatcgaggtgattctgtgaattgctgtcgtctcgatgggagtagaattgccgtcggtttggtgaactacgcctcggtggatgtgaacgccattaagggattgcagtcaagggagatagcctctgtgttgaagtgctgtgataacgaggaggttatccatcgggataatttagttattctgtcttaa

SEQ ID NO: 127580 - protein, 384 aa, Desulfotalea psychrophila LSv54
MMVDVTEELQLRREIFDKARRVVVKVGSAILTNVGGIHTSFIADLAREISYLRQSGHEVILVSSGAVAAGRKKISWQDSAPLGMKEKQALAAIGQSHLMRTYEEAFGFYELDVAQILLTHADLSHRDRYLNIRNTILTLLKFGVTPIINENDTVSVEELKFGDNDTLAALLTNLLEADICICLTDVDALYDKNPQKDPTARPLHIVTKISPEIEAMAGNSNSLFGTGGMQSKIRAAKIVFSGGGTAIIGPGRAPRVLQRLFAGEDIGTIFLPCKERMKSKKQWIAHVLKPKGTLLLDAGACKALLQGGKSLLPSGIVGISGEFDRGDSVNCCRLDGSRIAVGLVNYASVDVNAIKGLQSREIASVLKCCDNEEVIHRDNLVILS

SEQ ID NO: 127581 - DNA, 1161 bp, Bacillus cereus E33L
  CDS (1)..(1161): transl_table=11
atgaataaaagtgtaatgtataaaaaaactttgattttagacttgggggatataaaagtgaaaaaacaacgaattgttgtaaagattgggagcagttctttggcggatagtcacgaaggcatttctaaagaacaactttcagatcatgttgcggcattagctcgattgaaagaggaagggcatgaagtgttgttaattacatctggggccgtcgcagcaggtttttcagctctagggtaccctagtagacctgtaacaattaaaggaaaacaggctgcagcagctgtcggacaaagtttgttaatgcaggcgtacacggaggaatttcgtaaatacggtatcgttactgcgcaactattgctgacgagaagtgatttttctagaaaagaacaatatagtaacgcttacgctactttaggagagttactaaaccgttctgctcttccaatcattaatgaaaatgattccatttctttagaggagctaacattcggtgataatgatatgctgtcagctttagtaagcggacttgtttcggcggatatgctgatgatttttacagatgtgaacggtttatatgataaaaatcctcagaaaaatgaggatgcgaaaaaatattatttccttcctgaagttacagaagaaatcgcttctcttgcaggagatgctggctcaaaacttgggactggcggaatgaaatcaaaagtcgatgctgcaaagacagcactctctcttggtgtgagtgtatttatcggaacaggacgtggacaagagaaatttgtagatgttttgaaggggaaaggtgatggaacgtatgtcggaaacgcccctcaaaaagaaatgaagatgaataagcaatggatcgctttgcattcggttgttagcggacaaattgaaatagacgctggagcagctacagctatcattcagcatggcaagagtcttcttcctgctggtgttacaaatgtttcagggtttttccaagtgggcgaagtcgtagaagtaatgacgcaacaaggacgcgtgattggaaaaggacaatgcacatatagtgcagaggagctaagggatgtaaaaggtatgcaaagccaacatattcaggcaagaggcgaaaggcatagttatgaagtcatccatagagatcattgggtttcactttaa

SEQ ID NO: 127582 - protein, 386 aa, Bacillus cereus E33L
MNKSVMYKKTLILDLGDIKVKKQRIVVKIGSSSLADSHEGISKEQLSDHVAALARLKEEGHEVLLITSGAVAAGFSALGYPSRPVTIKGKQAAAAVGQSLLMQAYTEEFRKYGIVTAQLLLTRSDFSRKEQYSNAYATLGELLNRSALPIINENDSISLEELTFGDNDMLSALVSGLVSADMLMIFTDVNGLYDKNPQKNEDAKKYYFLPEVTEEIASLAGDAGSKLGTGGMKSKVDAAKTALSLGVSVFIGTGRGQEKFVDVLKGKGDGTYVGNAPQKEMKMNKQWIALHSVVSGQIEIDAGAATAIIQHGKSLLPAGVTNVSGFFQVGEVVEVMTQQGRVIGKGQCTYSAEELRDVKGMQSQHIQARGERHSYEVIHRDHWVSL

SEQ ID NO: 127583 - DNA, 1086 bp, Mannheimia succiniciproducens MBEL55E
  CDS (1)..(1086): transl_table=11
atgaaattcggtaccagcacattaactcaaggtacgccaaaattaaatcgcgcccacatgatcgaaatcgtgcgtcaattggcgcaattacatcaggaaggttatcgtcttgtaattgtcacatccggcgcaatggcggcgggcaggcattatcttaatcacccgaaacttccgcccacaatcgcctcaaaacaattattggcggcggttggacaaagccagctgattcaaacgtgggaacaactatttgccatttacgatattcatatcggtcagcttttattaacccgcgccgatattgaagaccgcgaacgctttttaaatgccagagatacgcttcacgcgttattggataaccgcattattccggtcgtaaatgaaaacgacgccgtcgccaccgcagaaatcaaagtaggcgataacgacaacttatcggcgttagtggcgattttagtacaggcggaacaactttatttgctcaccgaccaacaaggattatttgactccgatccgcggaaaaatccacaggcaaagctaatcccggtggtaaatgaaattaccgatcatattcgttctattgccggcggtagcggtacaaccttaggcacaggcggaatgtccaccaaaattaccgccgccgacattgcaacccgttccggcattgaaacaatcattgctccgggaaacagggaaaatgttatcgccgatcttgcccacggcgaagctataggtacgaaatttacggttcagaccgataaactggaaagccgtaaacaatggctctttgccgcgccttccgccggcattctgaccatcgatcaaggggcggaaaatgcaatattagaacaacataagtctttattgccggcgggtattgtaaatattgaaggtcgtttctcccgcggagaagtggtaaaaatccgcacccaacaaggcaaagatatcgcccttggcatgccgcgttacaacagcgatgcgctttatctcattcaaggcaaaaaatctcagaatattgaaaaaattctgggttatgaatacggctctgtggcgattcaccgcgatgatatgatcgtgttaaacaaataa

SEQ ID NO: 127584 - protein, 361 aa, Mannheimia succiniciproducens MBEL55E
MKFGTSTLTQGTPKLNRAHMIEIVRQLAQLHQEGYRLVIVTSGAMAAGRHYLNHPKLPPTIASKQLLAAVGQSQLIQTWEQLFAIYDIHIGQLLLTRADIEDRERFLNARDTLHALLDNRIIPVVNENDAVATAEIKVGDNDNLSALVAILVQAEQLYLLTDQQGLFDSDPRKNPQAKLIPVVNEITDHIRSIAGGSGTTLGTGGMSTKITAADIATRSGIETIIAPGNRENVIADLAHGEAIGTKFTVQTDKLESRKQWLFAAPSAGILTIDQGAENAILEQHKSLLPAGIVNIEGRFSRGEVVKIRTQQGKDIALGMPRYNSDALYLIQGKKSQNIEKILGYEYGSVAIHRDDMIVLNK

SEQ ID NO: 127585 - DNA, 1071 bp, Legionella pneumophila subsp. pneumophila str. Philadelphia 1
  CDS (1)..(1071): transl_table=11
atgaaaattattataaaagtcggaacacaaagtattttatcggtcgacggaagtccaatctattccgtactcaataatcttgtaaatcaaattatttatttaaagaacctggggcatcaggtcattttagtaagctctggggctgtgggctctggtcgaaaaatagctaagaactctctgggaaaaacatatggcgatacagtgggagagaagcaactcttggcttcaataggccaacccgaactgatgaatctctattctagcttgtttaaaaatgaaaacattttagtatctcagttattacttaccaaacaagacttccatactagacagcattatttaaatattgcccgtttattaacagaattgctaaagcatcaaaatattatccctattgttaatgaaaatgattcggtagccattgaagaattaatgtttaccgataatgatgaattagcaggacttattgcagctcaaattaatgctgattatctaatactcttaaccaatgtcgatggtgtgtttacatctcatcccaatgatcctgaatcaaaactcattaatacaattgaccccaattcaggttggcccaatgtctctgctgtaaaatcaaaattaggccgaggtggtatggtatccaaactggatactgccagaaaaatggctggtttaggtatcaatacagtgatcgcaaatgtaaatgtagaatccattgttccaaaaattctaaatagggaagcagttggaaccataattcttgctagtaaaagaaaatccagtataaagagatggattgcttttagtcatagaacttccttaccatctatagtaattaatgataatttaattaccttattacgaaatggtaatcgtgtaatgagcattttaccaatagggatagaagattttcgtggagaatgcaaaaaaggggatttaattgatatccttaattccaacaatgaaaagataggagttggaatcgccaggtatgatttcttaagattaaaggactatcttagacttcaaaataagcctgcatttatacattacgatcaattgcatattctatag

SEQ ID NO: 127586 - protein, 356 aa, Legionella pneumophila subsp. pneumophila str. Philadelphia 1
MKIIIKVGTQSILSVDGSPIYSVLNNLVNQIIYLKNLGHQVILVSSGAVGSGRKIAKNSLGKTYGDTVGEKQLLASIGQPELMNLYSSLFKNENILVSQLLLTKQDFHTRQHYLNIARLLTELLKHQNIIPIVNENDSVAIEELMFTDNDELAGLIAAQINADYLILLTNVDGVFTSHPNDPESKLINTIDPNSGWPNVSAVKSKLGRGGMVSKLDTARKMAGLGINTVIANVNVESIVPKILNREAVGTIILASKRKSSIKRWIAFSHRTSLPSIVINDNLITLLRNGNRVMSILPIGIEDFRGECKKGDLIDILNSNNEKIGVGIARYDFLRLKDYLRLQNKPAFIHYDQLHIL

SEQ ID NO: 127587 - DNA, 1230 bp, Corynebacterium glutamicum ATCC 13032
  CDS (1)..(1230): transl_table=11
atggcgccggtgacagggcttcctgtcaccccctacagccaggaagcaagcatcggtgcgagcttcccggcagtggatccggacaccaaagacagcgccgcatacggacatgaatccggaatgcgtgagcgcatctccaacgctaagcgagtggtggtgaaaattggttcgtcctcattgactaacgatgaggacggacacaccgtcgatcccaaccgcatcaacactattgtcaatgccttgcaagcacgcatggaagctggctcggacctcatcgttgtgtcctctggcgcagtggccgcgggaatggccccgcttggattgagcacccggcccacggaattggcagtcaagcaggctgcagcagcagtggggcaagttcacctcatgcaccagtggggacgttcttttgcccggtatggtcgccccatcggccaggtgcttcttaccgcagctgatgcaggaaagcgtgatcgtgcgaggaatgcgcagcgtaccatcgacaagctgcgcattttgggcgcggttcctatcgtcaatgaaaatgacaccgtggcaaccaccggtgtgaattttggtgacaacgaccgacttgctgcaattgtggcgcacctggtgtcggctgatgctttggtgctgctcagtgacgtggatggactttttgataaaaaccctactgatcccaccgcgaagtttatttccgaggttcgtgacggcaatgatttgaaaggtgtcattgccggcgacggcggaaaagtgggcaccggtggcatggcatcaaaggtgtctgctgcacgtttggcttcccgaagtggcgtgcctgtgctgttgacctctgcggcaaacattggcccagcactggaagacgcccaggtgggcactgtattccaccccaaggacaaccgcctctccgcgtggaagttctgggctttgtatgccgcagatactgcaggaaagatccgactcgatgacggcgcggtggaagcagtgacctccggtggtaaatctttgctggctgtgggcattactgaaatcattggtgatttccagcagggtgagatcgtggagatcttgggacctgccggccaaatcatcgggcgaggcgaggtgtcctacgattctgataccttgcaatcaatggttggtatgcaaacgcaggaccttccagatggcatgcagcgcccggtagtgcatgcagattatctgtccaactacgccagccgcgcgtaa

SEQ ID NO: 127588 - protein, 409 aa, Corynebacterium glutamicum ATCC 13032
MAPVTGLPVTPYSQEASIGASFPAVDPDTKDSAAYGHESGMRERISNAKRVVVKIGSSSLTNDEDGHTVDPNRINTIVNALQARMEAGSDLIVVSSGAVAAGMAPLGLSTRPTELAVKQAAAAVGQVHLMHQWGRSFARYGRPIGQVLLTAADAGKRDRARNAQRTIDKLRILGAVPIVNENDTVATTGVNFGDNDRLAAIVAHLVSADALVLLSDVDGLFDKNPTDPTAKFISEVRDGNDLKGVIAGDGGKVGTGGMASKVSAARLASRSGVPVLLTSAANIGPALEDAQVGTVFHPKDNRLSAWKFWALYAADTAGKIRLDDGAVEAVTSGGKSLLAVGITEIIGDFQQGEIVEILGPAGQIIGRGEVSYDSDTLQSMVGMQTQDLPDGMQRPVVHADYLSNYASRA

SEQ ID NO: 127589 - DNA, 1098 bp, Colwellia psychrerythraea 34H
  CDS (1)..(1098): transl_table=11
atgaactttaatagagctgtaatcaaagtaggtagtgccttagttgcaccgactagcgatggttgtagtggccaatacatcttagcaattgcacaattcattaccaaatgccaacagcaaggtaaggaaattattttagtttcatctggcggtgtggcagctggccgtactatcattcaacatggctcaccaaagctctcgctttccactaaaaaagccatggcaagcgttggtcagatgcaaatgatggctaattggcagcgtttttttgatatcccttgtagccagatactcatcactcaaaatgatttagccgatagagaacgctttatcagcattcaagaaacaataaaaattcaattagccaatggtgtactacctatcgttaatgagaatgataccgtcaccacaaaagcactcgctatcggcgataatgacaatattgccgcgttagttgcccaggcatgtgaagcagacagtttattcatattaagtgatattgatggtgtatttaccaaagacccaaatatccatgacgatgccgtattaatccctaatatcgataagattaccgatgaaatttatgccatggctggcacaagtcgtaatcctttagcgagcggaggcatgaaaaccaaaatacaagccgctgaaaaagccgttgaacacggcataaacacctatatagtcaacggctcgaaaagtgaggtatttagctcacttttagcaaaagttaatccaggcactcgttttgccgcagataaagatattattaccgctaaaaagcactggcttaaacacacattaaaaagtcgaggtaaaattaaactcgaccccggtgcagttaatgcggttgtgaacaaaggtgcttctttattaccttctggtataaaatcagtgactaatagatttaaagcaggtgatgcaatcgatctagttgatgcaagcaataatgcggtgatcgccaaaggaattactttatatagtcactatgacttaaaaagaattatgggcaaacacagtaatgatatcaccgatattttaggccatgaccaaggcgatgttgtggttcaccgtgatgatatggttatattataa

SEQ ID NO: 127590 - protein, 365 aa, Colwellia psychrerythraea 34H
MNFNRAVIKVGSALVAPTSDGCSGQYILAIAQFITKCQQQGKEIILVSSGGVAAGRTIIQHGSPKLSLSTKKAMASVGQMQMMANWQRFFDIPCSQILITQNDLADRERFISIQETIKIQLANGVLPIVNENDTVTTKALAIGDNDNIAALVAQACEADSLFILSDIDGVFTKDPNIHDDAVLIPNIDKITDEIYAMAGTSRNPLASGGMKTKIQAAEKAVEHGINTYIVNGSKSEVFSSLLAKVNPGTRFAADKDIITAKKHWLKHTLKSRGKIKLDPGAVNAVVNKGASLLPSGIKSVTNRFKAGDAIDLVDASNNAVIAKGITLYSHYDLKRIMGKHSNDITDILGHDQGDVVVHRDDMVIL

SEQ ID NO: 127591 - DNA, 1221 bp, Methanosarcina barkeri str. Fusaro
  CDS (1)..(1221): transl_table=11
atggaaatccggattgcagctgttactaatttcagctgtattcccaaaatattttacgaggccttgttattgacagatagaaatgaattcctcaatgatattaataaaatcgttatcaaaatcggtacttcctcacttacaaaacagaactgtgacagtacaaaagaaaactgtagtattgatcctacctttatagaaaatattgcagctcaggtctccgaacttcgaaagctcggaaaagaggtaattgtggtaagttcgggggcaataggtgtaggactctatgagctgggcattgccccaaaacctcgtgaaattcctatcaggcaggcagcagcagcggtaggacagagcatccttatgcagtactggagcgaagctttttcgaaacacgggataaaagttgctcaaatccttcttacttatgaattctattctgaccgggtatcctacctcaacctcagaaacagtatctctacccttctggaatatggggtagttcccataataaatgaaaacgattgtacctgtacaaacgagattgaagcaatctttggagacaatgacaaactttctgcaatggttgcaagcaaaatcgatgctgatctcctgattattctttcggatatcgatggcctttttgacaaaaacccaaagatacacgaggatgccagactcatctctctcgttgaaaaaattacgcctgaaatcgaaagttatgggggtgaccctacaagctttaagggcgtagggggaatgaggaccaagataaaagctgcaaagatctgtagcatggcaggttgctatgtcttgattgcaaacagcgaaattgaagacgttcttctgaaggttttgtctggaaaagagataggtaccctcttcctggctgaaaggcatatccagaagaaccgtgcccgctggatcatcctttcaagggcttcaggcactatccgtgtagacgcaggggcaaaagccgcagttcttgggaaaaacagtcttctttcggcaggagttgtggatgttgagggaaattttgatagaggagatgtggttagattagagtgtgaaggcagagtctttgcgaaaggaatcacagactacacatctgaagaacttatgaaaataaaaggtgcccacaccgatgaaatcgagggtatcctgggttataataattacagcaatgtaataaaaaaagaaaatatcggcataatggagaactga

SEQ ID NO: 127592 - protein, 406 aa, Methanosarcina barkeri str. Fusaro
MEIRIAAVTNFSCIPKIFYEALLLTDRNEFLNDINKIVIKIGTSSLTKQNCDSTKENCSIDPTFIENIAAQVSELRKLGKEVIVVSSGAIGVGLYELGIAPKPREIPIRQAAAAVGQSILMQYWSEAFSKHGIKVAQILLTYEFYSDRVSYLNLRNSISTLLEYGVVPIINENDCTCTNEIEAIFGDNDKLSAMVASKIDADLLIILSDIDGLFDKNPKIHEDARLISLVEKITPEIESYGGDPTSFKGVGGMRTKIKAAKICSMAGCYVLIANSEIEDVLLKVLSGKEIGTLFLAERHIQKNRARWIILSRASGTIRVDAGAKAAVLGKNSLLSAGVVDVEGNFDRGDVVRLECEGRVFAKGITDYTSEELMKIKGAHTDEIEGILGYNNYSNVIKKENIGIMEN

SEQ ID NO: 127593 - DNA, 1122 bp, Pseudomonas fluorescens PfO-1
  CDS (1)..(1122): transl_table=11
atgatgcggagcaaggtgacaggtgcgcagcgttgggtcgtgaagatcggcagcgctttgctgacagcggatggcaaagggctggatcgcacggcaatgggtgtctgggtcgagcagatggtggctctgcatgaggctggcgtcgagctggtgctggtgtcctccggggcggtggcggcaggcatgagtcgcctgggctggactgcgcgacccagtgcgatgcatgagctccaggctgccgctgcaatcggtcagatgggtctggtgcaagcctgggaatcgagctttgccgagcatggccggcacaccgcgcagattcttctgactcacgacgacctgtccgatcgcaagcgttacctgaacgcccgcagcaccttgcgtgcgctggtcgagctgaaagtcatcccagtgatcaacgagaacgacaccgtggtcactgacgaaatccgcttcggcgacaacgacacgctcgcggcgctggtggccaacctggtcgaggctgatctgctggtgatcctgacggatcgcgacggcatgttcgacgccgatccgcgcagtaaccctgacgcccaactgatttacgaagcgcgcgccgatgatccgacactggatgcggtggcgggcggtactggcggtgcattgggtcgtggcggcatgcagaccaagctgcgcgcggcgcggctggcggcacgttccggggcgcataccatcattgttggtgggcgtctggagcgcgtgcttgatcgtctgaaggcgggcgagcgcatcggtacgctgctgtcgcctgagcgcggcatgctcgcggcgcgcaagcagtggctggccgggcatctgcaaacccgtggcacgctggtgctggatgatggcgcggtttctgcgttgtcccagggcaacaaaagtctgctgccggtcggcgtcaaactggttcagggcagtttccgtcgcggcgaaatggtggtttgcgtggcgccggacggtcgtgagatcgcccgcggcctggcgaactacagtgctctggaagcacaaaaaatcatcggtcagtcgtcagatgcgattgtcggtttgctgggttacatggctgagccggaactggttcatcgtgacaacctgattctggtgtaa

SEQ ID NO: 127594 - protein, 373 aa, Pseudomonas fluorescens PfO-1
MMRSKVTGAQRWVVKIGSALLTADGKGLDRTAMGVWVEQMVALHEAGVELVLVSSGAVAAGMSRLGWTARPSAMHELQAAAAIGQMGLVQAWESSFAEHGRHTAQILLTHDDLSDRKRYLNARSTLRALVELKVIPVINENDTVVTDEIRFGDNDTLAALVANLVEADLLVILTDRDGMFDADPRSNPDAQLIYEARADDPTLDAVAGGTGGALGRGGMQTKLRAARLAARSGAHTIIVGGRLERVLDRLKAGERIGTLLSPERGMLAARKQWLAGHLQTRGTLVLDDGAVSALSQGNKSLLPVGVKLVQGSFRRGEMVVCVAPDGREIARGLANYSALEAQKIIGQSSDAIVGLLGYMAEPELVHRDNLILV

SEQ ID NO: 127595 - DNA, 777 bp, Acidobacteria bacterium Ellin345
  CDS (1)..(777): transl_table=11
atgcggttcgtcatcaaagtaggtaccagcctgatcgccccgggcggccgtattgatacggtgctcatgcgggcgctcgtcgaccagttggacctggagcggcacgaatacctcatcgtcagctcgggcgcgatcgcttccggcatgtcgaaattggcattttctgcgaagccgaagagcgtgaggctcatgcaagcgtgtgcagccgtgggacaaagcctgctgatgtatacctacgagcagctcttcttcggcaaaaaagtcgtcgcacaactgctgctttcgagcgacgacttcacgtcggctcttcgctacgagaatctgcaacacgcgttgcatgaattgctaaagcttggcgtggtaccgatcgtcaatgaaaacgatagtgtttccgtgcgcgaactcgttggtgctttcggggataacgacgagttgagcgcattgttggcgacggctgtgaaggccgactggctcgtgcttttgacgaacgtggatgggttctacgacagtgctggtcgcggacagaaactggtgcgcacggtgcggcgattgacgccgaagatggaagcgctctgcggcgaaaagagcgaactcggcaccggaggtatgcgatcaaagttacgcgcagccatgatggctagcgagaacggtgttcaggttgcaattgcaaacggcacggcaccgcaagcgattcgaaatgccatagagcggaagatcggtacatattttccggcgacgaagcctgcccctaagaaacgcgcaaaggctgcggattaa

SEQ ID NO: 127596 - protein, 258 aa, Acidobacteria bacterium Ellin345
MRFVIKVGTSLIAPGGRIDTVLMRALVDQLDLERHEYLIVSSGAIASGMSKLAFSAKPKSVRLMQACAAVGQSLLMYTYEQLFFGKKVVAQLLLSSDDFTSALRYENLQHALHELLKLGVVPIVNENDSVSVRELVGAFGDNDELSALLATAVKADWLVLLTNVDGFYDSAGRGQKLVRTVRRLTPKMEALCGEKSELGTGGMRSKLRAAMMASENGVQVAIANGTAPQAIRNAIERKIGTYFPATKPAPKKRAKAAD

SEQ ID NO: 127597 - DNA, 1113 bp, Haemophilus somnus 129PT
  CDS (1)..(1113): transl_table=11
atggaaacacaaaaaacaaataaaaccattgtggtaaaatttggtaccagcaccttaacgcaaggttcatcaaaattaaatcgccctcacatgatggaaattgtgcgtcaaatcacacagttgcatcgagcaggctttcgtataattattgttacctccggagcgatggcagcggggcgacattatctcaatcatccgcaacttcctccaacaattgcctcaaagcaattactagcagcagtaggacaaagtcaactcattcaaacgtgggaacaacttttcgctatttatgatattcatattgggcaaattctgttaactcgagcggacattgaagatcgtgaacgttttatgaacgcaagagatacgttacatgctttattagataaccgaattattccggtaattaatgaaaatgatgcggttgcaaccgctgaaattaaagtgggggataatgacaacctttctgcattagtggctattttggcacaagcggaacaactctacttgctaacagatcaacgtggattatttgatagtgatccaagaaaaaatcctcaagcaaaactgatttccatagtcgataaaattactgatcatatccgctctattgcaggaggaagtgggacaacgttagggacgggaggaatgacaacaaaaattagtgctgctgacatagcgactcgttccggtgttgaaaccattattgcaccgggtaatcttgaaaatgtcatcgtcaatttggcttatgggaaagaaatcggcacaaaatttgttgtgcagacagattgcttggaaagccgtaaacagtggctctttgctgcaccggttgcaggtatagtaactattgatgagggagcggaaagtgcggtattgattcagcataaatctctattacctgcaggtattatcagcgttgaaggatgtttttctcgtggtgaagttgttaaaatttgtggcacgaacggtaaaaaaattgctttgggcgtacctcgctataacagcgattctctcatacaaataaaaggaaaaaaatcgcaagatattgaacagatcctcggttatgaatatggttctgttgctattcatcgtgatgatatggtcgtttattaa

SEQ ID NO: 127598 - protein, 370 aa, Haemophilus somnus 129PT
METQKTNKTIVVKFGTSTLTQGSSKLNRPHMMEIVRQITQLHRAGFRIIIVTSGAMAAGRHYLNHPQLPPTIASKQLLAAVGQSQLIQTWEQLFAIYDIHIGQILLTRADIEDRERFMNARDTLHALLDNRIIPVINENDAVATAEIKVGDNDNLSALVAILAQAEQLYLLTDQRGLFDSDPRKNPQAKLISIVDKITDHIRSIAGGSGTTLGTGGMTTKISAADIATRSGVETIIAPGNLENVIVNLAYGKEIGTKFVVQTDCLESRKQWLFAAPVAGIVTIDEGAESAVLIQHKSLLPAGIISVEGCFSRGEVVKICGTNGKKIALGVPRYNSDSLIQIKGKKSQDIEQILGYEYGSVAIHRDDMVVY

SEQ ID NO: 127599 - DNA, 1110 bp, Trichodesmium erythraeum IMS101
  CDS (1)..(1110): transl_table=11
atgaatacaatagtgatcaaaataggcacttctagcctaactaattcagaaaccggaaatttagccttatctacaatttctagcttaattgaaactattatcaatttacgtcagcagggatatcaagtagttttagtatcttctggagctgttggtgtaggttgcgatatattaggactaaccaaaaagcctcgaaatatttctatgaaacaagccatagcagcagtaggtcaaggacaaataatgcgagtttacaatgacttgttttcatctttgcaacaaacagttgcccagattttattaacaaaaagtgacctgtcacgacgtagtagttatgtcaatgcctacaacacatttcaacaactttttcgactaggtgtagtcccaatagtgaatgaaaatgataccactgctgttgaagagctaaattttggggacaatgatactctatcagctttagttgccagtctagtagaggctgattggttattcatactaactgatgtcgatagattatactccgccgacccgagaaaaaatccagatgctttacccattaccttagtaggggaaatagaacaactcaaagaacttaaagttcaagttggagagtctgttagtggacgaggaactgggggaatggttacaaaaattgaggctgctaaaattgctacttctgctggagtccgaactgtaattactgatggtaaagtacccactaatatacaaaaaatcctcaatggagaatctataggtactcagtttgaacctcaaccagaacaagtcaatggtcgcaaacattggattgccaatgttttagttccagcaggccaactatatctagaccaaggtgcagttaaggcaatttctgagtatggtaaatctctattagctgctggtattattcaagtagaaggagaatttaattcatcggatgctgtcaaactatgcaatgaaaaaggccaggaaatagctaggggacttgtgaactacagcagtattgaattgcaaaaaattctaggttgtcgctcagaaaatatatctgatattttgggctatgtgggagctgaaacagttgtacatagaaataatcttttgctgacaaattaa

SEQ ID NO: 127600 - protein, 369 aa, Trichodesmium erythraeum IMS101
MNTIVIKIGTSSLTNSETGNLALSTISSLIETIINLRQQGYQVVLVSSGAVGVGCDILGLTKKPRNISMKQAIAAVGQGQIMRVYNDLFSSLQQTVAQILLTKSDLSRRSSYVNAYNTFQQLFRLGVVPIVNENDTTAVEELNFGDNDTLSALVASLVEADWLFILTDVDRLYSADPRKNPDALPITLVGEIEQLKELKVQVGESVSGRGTGGMVTKIEAAKIATSAGVRTVITDGKVPTNIQKILNGESIGTQFEPQPEQVNGRKHWIANVLVPAGQLYLDQGAVKAISEYGKSLLAAGIIQVEGEFNSSDAVKLCNEKGQEIARGLVNYSSIELQKILGCRSENISDILGYVGAETVVHRNNLLLTN

SEQ ID NO: 127601 - DNA, 1116 bp, Synechococcus sp. CC9311
  CDS (1)..(1116): transl_table=11
atgagcctgcgggtggtgaaggtgggaaccagtttgctgcgcagcacggaaagtcgcagcactgctgatgccatctcagctctgtgtctgaatctcgcccaatgtctccatcgaggcgaccgcgttgtcttagtcacgagtggggctgttggcctcggatgtcagcgccttggcctgaaggccaggccttcaacgctgaggggtcttcaagctgctgcagcgatcggtcaaggccatctgatggctctgtacgaagacgcgatggctgtccatgggatccctgtagcgcaggtgcttctcacccgatctgacctggccgacagtcgcagctatcacaacgcttccgcaaccttgcatcagttgatcgaatggaaggttttacccgttatcaatgaaaatgacacggtgtcttccgctgagttgcgttttggcgacaacgatacgctctcagccttagtggcagcagcgattaatgcggacgatctgatccttttgaccgatatcgaccgcttgtattccgctgatccgcgcagtgatgcatcggctcgcccgatttcggacgtgcatcacccagcagagctgcaggcccttcaacagggcgcaggagatggaggccgttggggaaccggcgggatgaccaccaagctcgcggccgctcggatcgccaccgcgagtggaatcacagtgcatctggcggatggtcgtgatcagcacatgcttgaaaccatgttggcgggggggcgcggaggcacggtctttcatccccatccccagccccttggtcatcgaaaaagctggctggcgcatgctttgcaacctctgggcagcctgcaaatcgatcgcggtgcctgcaaggcgctctgcaataaaggcgcctccttacttttggttgggattacggatttcaagggggagtttcaggccaaccaacctgtgcagattcttgatcaggaaggccatgaagtagcccgaggtctgagctctctcagtagtgagacccttcgaagtcttgtgaaagagccggcgcggactgatcggcaagggagctcgcctgtggtggttcatcgcgacgtgcttgtcctcagcacgcctacgatccgccaaccagacccctga

SEQ ID NO: 127602 - protein, 371 aa, Synechococcus sp. CC9311
MSLRVVKVGTSLLRSTESRSTADAISALCLNLAQCLHRGDRVVLVTSGAVGLGCQRLGLKARPSTLRGLQAAAAIGQGHLMALYEDAMAVHGIPVAQVLLTRSDLADSRSYHNASATLHQLIEWKVLPVINENDTVSSAELRFGDNDTLSALVAAAINADDLILLTDIDRLYSADPRSDASARPISDVHHPAELQALQQGAGDGGRWGTGGMTTKLAAARIATASGITVHLADGRDQHMLETMLAGGRGGTVFHPHPQPLGHRKSWLAHALQPLGSLQIDRGACKALCNKGASLLLVGITDFKGEFQANQPVQILDQEGHEVARGLSSLSSETLRSLVKEPARTDRQGSSPVVVHRDVLVLSTPTIRQPDP

SEQ ID NO: 127603 - DNA, 1107 bp, Shewanella sp. MR-4
  CDS (1)..(1107): transl_table=11
atgacagactctccccgtaaacgtatcgtcgtcaaagtggggagcgccttaatcgcgccccacaagcaaggttgcagtagccattatctcttgggtatcgcgcagtttattacttactgtcgcgtccaaggtatccaagtggtactggtttcatccggttcggttgccgcaggttggcatcattttgagggccaaactcaaccgagtgtcacagtgaaaaaggccatggcagccgcggggcaggcggatatgatggcgacgtggaataagctatttgattttcctaccgcccaactgctgctgacccatggcgatttacgtaatcgcgagcgttatatcagtattcgagacacgatttttagcctgctcgaacacggtttaatgccgatcatcaatgagaatgatgccgttaccgccgacaaacttaaggttggcgataacgataatctctcggccatggtggcagcagcggccgatgccgacaccttagtgatttgctcggatgtggatggactctatgatcaaaatccccacgaacatcccaatgccaagttgataaagcaagtcactgaaatcaatgccgatatctatgcgatggcgggaggcgccagcagcgatgttggcactggaggcatgcgcactaagatccaagccgccgagaaagccatctcccacggcattgagacctttattatcaatggctttaatgccgactcctttagccaactgctaaaggggcaaaatccgggcaccctctttaccccctacgaaaaaccgatgcaggagcatttgcattggatgacccacacctcgcaagcgcagggcgaagtgatcgtcgaggatgattttgacctcgcactcgatcagcacagcgagcaattaaccagcgatgatgtggttgaagtcaaaggggatttctctgtgggcgacaccattctggtgcgtaaaggcgatggcactaagttggcgaaagccaaatctaactacagcagttgcctactgagttttattaccgagcaggatgatcaggcatttgccagtgaattccagcaaaaaaccggccccatcatttccgataagaatatcgccattcttaaatccatttga

SEQ ID NO: 127604 - protein, 368 aa, Shewanella sp. MR-4
MTDSPRKRIVVKVGSALIAPHKQGCSSHYLLGIAQFITYCRVQGIQVVLVSSGSVAAGWHHFEGQTQPSVTVKKAMAAAGQADMMATWNKLFDFPTAQLLLTHGDLRNRERYISIRDTIFSLLEHGLMPIINENDAVTADKLKVGDNDNLSAMVAAAADADTLVICSDVDGLYDQNPHEHPNAKLIKQVTEINADIYAMAGGASSDVGTGGMRTKIQAAEKAISHGIETFIINGFNADSFSQLLKGQNPGTLFTPYEKPMQEHLHWMTHTSQAQGEVIVEDDFDLALDQHSEQLTSDDVVEVKGDFSVGDTILVRKGDGTKLAKAKSNYSSCLLSFITEQDDQAFASEFQQKTGPIISDKNIAILKSI

SEQ ID NO: 127605 - DNA, 1143 bp, Alkalilimnicola ehrlichei MLHE-1
  CDS (1)..(1143): transl_table=11
atgagtcgcggtatgcgcgagcggctgccccatgccatccggtgggtggtgaaggtggggagcgccctggtgaccagcgatggtcagggggtggcccgcggggccatccagggctgggcgagcgaagtggtcgggctgcgccgcggcgggcgccaggccacgctggtctcctccggtgctgtggccgagggcatgagtcggctgggctggtcgcagcggccgaacgcgctctaccagttgcaggccgccgctgcggtgggtcagatgggggtggtagaggcctgggagagcggctttcgtgccgaagggttgcgcaccgcccaagtgctgctgacccacgatgacctggccaaccgccgccgctacctgaatgcccggaccaccctgcgtgagctgctgcgcctgggcgtggtgccggtggtgaacgagaacgataccgtggtcaccgatgagatccgcttcggcgataacgacacccttgcggcgctggtggccaatctggtggaggcggacgtgctggtgatcctgaccgatcaggagggcctgtacgatgcggatccgcgcaggcacccggaggcgcggctgatccgcgaggcctcggccgaggatccggggctggagcggtactgcggcagtggcggcggcgcgttggggcggggcggtatgctcaccaaggtgcaggcggcggctcgcgcggcccgctcggggtgcatcaccgtgatcgcctcggggcgcgagcgcgacgtgctcgcccgtatcgctgccggtgaacgcctgggcaccctgctgtacccagagcgcgagccggtggcggcccgcaagcagtggctcgccagccatctgcggctgcgcggccggctctggctggatgagggtgcggcccgggtgctgcgcgaggcggggagcagcctgctgccggtcggcgtgacgcgggtggagggtcggttctcccgcggggagatggtggcctgtctggcgcctgacgggcgggaggtggcccgggggctggtcaactacagcgccaaggaggcgcgtcagatcctcgggcggcccagccgggagatccagtccatcctgggctacgtggatgaaccggagctgattcaccgggacaacatggtggtcaccgccgacggcggctga

SEQ ID NO: 127606 - protein, 380 aa, Alkalilimnicola ehrlichei MLHE-1
MSRGMRERLPHAIRWVVKVGSALVTSDGQGVARGAIQGWASEVVGLRRGGRQATLVSSGAVAEGMSRLGWSQRPNALYQLQAAAAVGQMGVVEAWESGFRAEGLRTAQVLLTHDDLANRRRYLNARTTLRELLRLGVVPVVNENDTVVTDEIRFGDNDTLAALVANLVEADVLVILTDQEGLYDADPRRHPEARLIREASAEDPGLERYCGSGGGALGRGGMLTKVQAAARAARSGCITVIASGRERDVLARIAAGERLGTLLYPEREPVAARKQWLASHLRLRGRLWLDEGAARVLREAGSSLLPVGVTRVEGRFSRGEMVACLAPDGREVARGLVNYSAKEARQILGRPSREIQSILGYVDEPELIHRDNMVVTADGG

SEQ ID NO: 127607 - DNA, 1116 bp, Hyphomonas neptunium ATCC 15444
  CDS (1)..(1116)
atgactgctgacaccctctcccgcgccaagcgcatcgtcgtgaaaaccggctctgccctcatcgcggaggcaggcgctccgcgccgcgaatggctcgccgccctcgccgcagacatcgccgccctgcgccagcgcggcaaggaagtcatcctcgtctcctccggcgccgttgcccttggccgctcagccctcggcgcgccctatcaaggccgcctggaacagaaacaggccgccgccgccatcggccagccccggctcatggccgcgctgggagacgccctcgccccccacgccatcgcctgcggccaggccctcctcacccccggcgacaccgaaaatcgccgcagatggctgaatgcccgcgccacgctggaaaccctgctggaagccggtgtcgtccccgtcatcaacgagaacgataccgtcgccaccgaagaaatccgctacggggataatgaccgcctcgccgcccgcgtcgcccagatgatggccgctgatgtcctgatcctcctctcggacatcgacggcctctacaccgcagacccgcgctcaaaccccggcgccccccacatccccttcctcgaagcgctcacccctgagcatgacgccatggccaccggcgccaacgccgccgccggtgtcggctccggcggcatggccaccaaactcgccgccgcccgcatcgcccatgcggcgggctgctccaccctcatcacgctcggcaaccgcccccaccccctcggcgccatcgaggccggcgaacgcgccaccctcatcgcctcccgcatcagccccgccaaggcccgcgccgcctggctcgaaggccacctcaagcccgaaggcgaactcctcatcgatgacggcgccgccgccgcgctggcaaaaggcgcgagcctcctcgccgtcggcgtgcgcggcgtcaccggccagttcgagcgcggcgccgccgtcgccatccgcgcccccgatggccgcatcatagccaagggcgtcaccgcctacggcaccgaagacatccgccgcatcgccggccgccgcaccgaagacgccgaagccatcctcggctatcgcggccgccccgccatcatccaccgcgacgacatggtgcgcctttga

SEQ ID NO: 127608 - protein, 371 aa, Hyphomonas neptunium ATCC 15444
MTADTLSRAKRIVVKTGSALIAEAGAPRREWLAALAADIAALRQRGKEVILVSSGAVALGRSALGAPYQGRLEQKQAAAAIGQPRLMAALGDALAPHAIACGQALLTPGDTENRRRWLNARATLETLLEAGVVPVINENDTVATEEIRYGDNDRLAARVAQMMAADVLILLSDIDGLYTADPRSNPGAPHIPFLEALTPEHDAMATGANAAAGVGSGGMATKLAAARIAHAAGCSTLITLGNRPHPLGAIEAGERATLIASRISPAKARAAWLEGHLKPEGELLIDDGAAAALAKGASLLAVGVRGVTGQFERGAAVAIRAPDGRIIAKGVTAYGTEDIRRIAGRRTEDAEAILGYRGRPAIIHRDDMVRL

SEQ ID NO: 127609 - DNA, 1203 bp, Rhizobium leguminosarum bv. viciae 3841
  CDS (1)..(1203): transl_table=11
atgagggcgaggacaagggtggagacgagggcgatgaccagccgtaagccgcttggccgctaccgccgcatcgtcatcaagatcggatccgcgcttctggtcgaccgcaaggccgggctgaagaaggcctggctcgacgccatgtgcgccgatatctccggcctgaaggccaagggtatcgacgtgctcgtcgtgtcctcgggcgcaatcgcgctcggccgctcggtgctcgacctgccctccggcgcgctgaagcttgaggaaagccaggcggcggcggccgtcggccagatcgcgctggcccgcgcctggtcggaaagcctgtcgcgcgacgagatcgtcgccggccagatcctgctgacgctcggcgataccgaggagcgccgtcgctatctcaatgcgcgcgccaccatcaatcagcttttgaagatcggcgccgtgccgatcatcaatgaaaacgacacggtcgccaccagcgagatccgctacggcgacaacgaccggctggccgcccgcgtcgcgacgatgaccggcgccgatctgctcattcttctctccgatatcgacggtctctacaccgcgccgccccatctcgatccgaacgcaacgttccttgagacgattgctgaaatcacccccgagatcgaggcaatggccggaggcgcggcctccgagctttcgcgtggcggcatgcgtaccaagatcgatgccggcaagattgcgacggcatcaggctgcgcgatgatcatcgcctccggcaagaccgagaaccctctgtcggcgatcgaaaacggcgcgcgttcctcctggtttgcgccgtcgggcacacccgttaccgcccgcaagacctggattgccggacagctgcagccggccggcgaactgcatgtcgatgacggcgccgtcacagccctcggcgccggcaagagcctgcttcccgccggcgttcgcagcgtttccggcctcttcagccgcggcgacacggtggcgatcatcggcccggccggccgcgagatcgcccgcggcctggtaagctacgatgccgacgacgcccgtcggattgccggccgcaagtcggcggagatcgagaccattctcggttatcccggacgcgccgccatggtccatcgcgacgacatggtgatgaccgcgcagatcggttcgaaatcggaaaggcagaagaaggacgcgagctatgcttga

SEQ ID NO: 127610 - protein, 400 aa, Rhizobium leguminosarum bv. viciae 3841
MRARTRVETRAMTSRKPLGRYRRIVIKIGSALLVDRKAGLKKAWLDAMCADISGLKAKGIDVLVVSSGAIALGRSVLDLPSGALKLEESQAAAAVGQIALARAWSESLSRDEIVAGQILLTLGDTEERRRYLNARATINQLLKIGAVPIINENDTVATSEIRYGDNDRLAARVATMTGADLLILLSDIDGLYTAPPHLDPNATFLETIAEITPEIEAMAGGAASELSRGGMRTKIDAGKIATASGCAMIIASGKTENPLSAIENGARSSWFAPSGTPVTARKTWIAGQLQPAGELHVDDGAVTALGAGKSLLPAGVRSVSGLFSRGDTVAIIGPAGREIARGLVSYDADDARRIAGRKSAEIETILGYPGRAAMVHRDDMVMTAQIGSKSERQKKDASYA

SEQ ID NO: 127611 - DNA, 807 bp, Oenococcus oeni PSU-1
  CDS (1)..(807): transl_table=11
atggcagaaaaaagtttcgataattggaaaaaaatcgttgttaaagttggtacttcaacgattgttcaagaaaatagccagattaatttaccgataatcggtcaattggttcagacgctttgtgctttgcgaaatcaaaaccgggaagtagtttttgtaacttccggggcggttggcgttgcgataaatcagcttggatttaaagaacgtccaaacgaaattcctcgacaacaggctttagcagcgattggccaagctgatttaatggctatttacaatcaaaacttttctttttatcaccagattaccggtcaaattcttttgacttatgatgtattcgataatccaaaaatgctcgaaaatatgttaaatgccttgcgggaattgctgaaaatgaaggcaattccgattattaatgagaacgacgtaattgccgttgacgaaatggatcatcaacattcgtttggtgataacgactgcttagcggcgatggtaacaaaaattatcgatgccgatggtttgattattttatcagatgttgatgcactttatgatagaaatcctcatgagtttgccaatgctaaagctatcaagcgggttggttcgatcaccaagcaggttattaatttggcctccggcaaaagcaatctcggaaaaggtggaatgttaacaaaattaaaagcagctaagtatcttttaaaaaatgataagcaaatgctattacttcctggatccgaacctgatggtattttgaaggctctttcgggtcaagagattggaactttattcgccaatgaatacaaataa

SEQ ID NO: 127612 - protein, 268 aa, Oenococcus oeni PSU-1
MAEKSFDNWKKIVVKVGTSTIVQENSQINLPIIGQLVQTLCALRNQNREVVFVTSGAVGVAINQLGFKERPNEIPRQQALAAIGQADLMAIYNQNFSFYHQITGQILLTYDVFDNPKMLENMLNALRELLKMKAIPIINENDVIAVDEMDHQHSFGDNDCLAAMVTKIIDADGLIILSDVDALYDRNPHEFANAKAIKRVGSITKQVINLASGKSNLGKGGMLTKLKAAKYLLKNDKQMLLLPGSEPDGILKALSGQEIGTLFANEYK

SEQ ID NO: 127613 - DNA, 789 bp, Leuconostoc mesenteroides subsp. mesenteroides ATCC 8293
  CDS (1)..(789): transl_table=11
atgaatagttggcatagaattgttgttaaagtcggcacgagcacaattgttaatcgtgatgggcaaattaattacccagtcgttaatcggttggcacaaacactttccagtttacaaaaatctggtcacgaaattttattagttacatccggggcaattggtgtggcattggatcagatgaatctagaaaaacgaccacaagaaattccacaacagcaagcattagctgccattggtcagggatacttgatgtcattgtacaatcaaagttttgcattctatcaacaattaattggacaagttttattgacgtatgatgtgttcgacaataaagcgatgcttgaaaacacaatgaatgccattgaaatgatgttttcacagcacatcattcccattgttaatgaaaatgatgtgattgcagttgatgagcttgaccatcaacattcatttggcgataatgaccgcttagctgctattgtgacacgtgaaattggtgccgatggattaattattttgagcgatgtcgacgcgttgtatacggctaatcctaatattgatgaatttgcacaagccattgataaggtaacgaaaattaccgatgatattcgtatgagcgccaccggatcaacttctggtttaggaacaggtgggatgagcacaaaacttgctgctggtgaatttgtgatgaaaaatggtggtaaaatggtgttaattaatggtaataatccagccttgattttagaagtaatagctggtaaaacggtgggaacattatttcaaggagaatga

SEQ ID NO: 127614 - protein, 262 aa, Leuconostoc mesenteroides subsp. mesenteroides ATCC 8293
MNSWHRIVVKVGTSTIVNRDGQINYPVVNRLAQTLSSLQKSGHEILLVTSGAIGVALDQMNLEKRPQEIPQQQALAAIGQGYLMSLYNQSFAFYQQLIGQVLLTYDVFDNKAMLENTMNAIEMMFSQHIIPIVNENDVIAVDELDHQHSFGDNDRLAAIVTREIGADGLIILSDVDALYTANPNIDEFAQAIDKVTKITDDIRMSATGSTSGLGTGGMSTKLAAGEFVMKNGGKMVLINGNNPALILEVIAGKTVGTLFQGE

SEQ ID NO: 127615 - DNA, 1134 bp, Magnetococcus sp. MC-1
  CDS (1)..(1134): transl_table=11
atgcgtgaggctacggaggcgtggcagcgtgtggcggctgcccagcggatagtggttaagattggttcaaacttgctgaccaccaaggatggggtgtgcgaggattggattgcggcccgttgtgcggagattgcggcattgatgggtcgtggcaagcaggttgtggtggtcacgtcgggctcggttgcggcgggggcgtcgcgtttgggtttggggcggcgtccggcaacactgccagagaagcaggcggcggcggcggcgggtcagggcaagttgatgcagatttatgagcaggcttttaacacccatggtttgcatacggggcagatattattaacgcgggatgatgtggcgaaccggcgtcgttatttgaatgcgcgggatacgttggagaccttattaaccttgggtttggtgccggtggttaatgagaatgacacggtggtggtggaggagattcggtttggtgacaatgataccctggcggcgttggtggcgggtttggtagaggctgagctgttggttttgttatcggatgtggatggtttatacagtgcggatccccgtaaggatgagagggcgcagcgtattgagttggtggtggaggtaacgccggagattgaggctttggcgggtggtaccggttcggaggttggctctgggggtatggtaacgaagttacgggcggcgaagatggcggcgcgtacggggtgtatgacggtgttggccaatggttttcaggcggatcctatcggggcggtgatggggggtggtgttggtacgctctttttatcgttgggggatgccattagcagccgcaagcgttggattgccaatggtttaacgtgtgagggtagtctatttttggacgagggggcggttgcggctttattaaagggcaagagtctcttagcgcggggtgtggtggcggttgagggtgtgtttgatcggggtgcggcgctctattgttgtgatgtgcaggggcggcggattgccaaggggttggtgaattatcgcagtgatcatatggagcagattaagggtaagcatagttgggagattgaggcggccttgggttttattattgatgaagaggtgatgcatcgggatgacatggtgcagttggtcaagtag

SEQ ID NO: 127616 - protein, 377 aa, Magnetococcus sp. MC-1
MREATEAWQRVAAAQRIVVKIGSNLLTTKDGVCEDWIAARCAEIAALMGRGKQVVVVTSGSVAAGASRLGLGRRPATLPEKQAAAAAGQGKLMQIYEQAFNTHGLHTGQILLTRDDVANRRRYLNARDTLETLLTLGLVPVVNENDTVVVEEIRFGDNDTLAALVAGLVEAELLVLLSDVDGLYSADPRKDERAQRIELVVEVTPEIEALAGGTGSEVGSGGMVTKLRAAKMAARTGCMTVLANGFQADPIGAVMGGGVGTLFLSLGDAISSRKRWIANGLTCEGSLFLDEGAVAALLKGKSLLARGVVAVEGVFDRGAALYCCDVQGRRIAKGLVNYRSDHMEQIKGKHSWEIEAALGFIIDEEVMHRDDMVQLVK

SEQ ID NO: 127617 - DNA, 1119 bp, Shewanella sp. ANA-3
  CDS (1)..(1119): transl_table=11
atgaatttaagtgagattgcgtatcgccgcgtggtagtgaagttagggacgagtgtgctgacgtctggcagtaaacagctagataaagcccatatggttgagcttgctcgtcaaatggcagcactgatgagatcaggggtcgaagtcgtattatgcacttctggcgcaattgccgccggacgcgaacatctccaatacccggaattgcccgacactatggccaataaacagttattagccgctgtcgggcagagtcagcttattctcgcttgggcacaactctttagcatctatggtttgcatgtggggcaattgctgctgacccgtgctgacctacacgatagagagcgatatttgaatgcccgcgatacgcttaatgccttgctggcaaacaatattatcccaatcatcaacgaaaacgatgccgttgctactaatgagatcaaagtgggcgacaacgacaacttgtcggcgcgtgcggcactgctgtgtgatgccgacctgttgattttgttgacggatcaaaagggcttattcgatgccgatccgcgcactaaccctaatgctaagctgatttcgcaggtcgagaaaattgacgacagtctgcgcctgttagcgggtggttcggtttctggcttaggtacgggcggaatgtcgactaagctagaagctgcggatattgctcgccgcgcgggtattgaagtggtgattgcctcgggtcatcaccccgatgtgattaaaaaggttgtcggcaaagaatctgtcggcacgcattttagtgccatcgaaaatccgttagagagccgcaaacagtggattttagcgggacctgccgcccaaggttcactggtgctcgatgcgggcgcggtgaaagccgtgaccgaaaaaggtcgcagcttgctctctaaggggattattggcgttaaaggggaatttgaacgtggtgcaaccctgcaattggttgaccaaaaaggcaaaatcattgccagaggcatcacccgctactgtggtgaggccttagggttaattgcgggtaaacattccgacgaaatcgagtcagtgctcggttacgattatggtgacgcaatagtgcaccgcaacgacatggtcgtcttataa

SEQ ID NO: 127618 - protein, 372 aa, Shewanella sp. ANA-3
MNLSEIAYRRVVVKLGTSVLTSGSKQLDKAHMVELARQMAALMRSGVEVVLCTSGAIAAGREHLQYPELPDTMANKQLLAAVGQSQLILAWAQLFSIYGLHVGQLLLTRADLHDRERYLNARDTLNALLANNIIPIINENDAVATNEIKVGDNDNLSARAALLCDADLLILLTDQKGLFDADPRTNPNAKLISQVEKIDDSLRLLAGGSVSGLGTGGMSTKLEAADIARRAGIEVVIASGHHPDVIKKVVGKESVGTHFSAIENPLESRKQWILAGPAAQGSLVLDAGAVKAVTEKGRSLLSKGIIGVKGEFERGATLQLVDQKGKIIARGITRYCGEALGLIAGKHSDEIESVLGYDYGDAIVHRNDMVVL

SEQ ID NO: 127619 - DNA, 1104 bp, Mycobacterium avium 104
  CDS (1)..(1104): transl_table=11
atgaccgcccaccgcgacgctatccgcacggcgcgcagcctggtggtcaaggtgggcaccaacgcgttgaccacgccggccggggtgttcgacgccggccggctggccgggctcgccgacgccatcgaggcgcggatgaaggccggcaccgacgtcgtcatcgtttcgtcgggtgccatcgccgcgggcatcgagccgctcggattgtcccgtcgccccagggatctggcgaccaagcaggccgcggccagcgtcggtcaggtggcactggtgaattcctggagcgcggcgttcgcccgctacggccgcaccgtcgggcaggtgctgctgagcgcgcacgacatctcgatgcgcgcccagcacaccaacgcccagcgcaccctggatcggctgcgcgccctgcatgcggtggcgatcgtcaacgagaacgacaccgtggccaccaacgagatccgattcggcgacaacgaccggctctcggcgctggtggcccacctggtcggcgccgaggcgctggtcttgctgtccgacatcgacggcctgtacgactcggacccgcgaaagaccaagggagccaagttcattccggaggtgacgggcgcggaggatctggccggcgtggtcgccggcccgggcagcgacctgggcaccggcggcatgacgtcgaagatgtcctcggcgctgctggccgccgacgccggggtgcccgtgctgctggccgccgcggccgacgccgccagcgcgctcaccgacgcttcggtcggcacggtgttcgccgcccggccggtgcggatgtcggcccggcggttctgggtgcgctacgccgccgaggcggccggcgcgctgaccctggacgagggcgcggtgcgcgccgtggtgcatcagcgccgctcgctgctgcccgcgggcatcaccgcggtgtccggccggttctacgccggcgacgtcgtggaactgcgcgggccggacgcggtgccggtggcccgcggcgtggtggcctacgacgccaccgaactggcgaccatgatggggcgctcgaccagtgagctgcccggcgagctgcgcaggcccgcggtgcacgccgacgacttggtggcggtgtga

SEQ ID NO: 127620 - protein, 367 aa, Mycobacterium avium 104
MTAHRDAIRTARSLVVKVGTNALTTPAGVFDAGRLAGLADAIEARMKAGTDVVIVSSGAIAAGIEPLGLSRRPRDLATKQAAASVGQVALVNSWSAAFARYGRTVGQVLLSAHDISMRAQHTNAQRTLDRLRALHAVAIVNENDTVATNEIRFGDNDRLSALVAHLVGAEALVLLSDIDGLYDSDPRKTKGAKFIPEVTGAEDLAGVVAGPGSDLGTGGMTSKMSSALLAADAGVPVLLAAAADAASALTDASVGTVFAARPVRMSARRFWVRYAAEAAGALTLDEGAVRAVVHQRRSLLPAGITAVSGRFYAGDVVELRGPDAVPVARGVVAYDATELATMMGRSTSELPGELRRPAVHADDLVAV

SEQ ID NO: 127621 - DNA, 1116 bp, Nocardioides sp. JS614
  CDS (1)..(1116): transl_table=11
atgagcctgcgccacgaggtcaccgaggcgaagcggatcgtcgtcaagatcggttcctcctcgctcaccacggcggccggcggcatcgacccgggccgcgtgcgcgacctcgtcgacgtgctcgcgaagttgcgcgccggcggcagcgaggtggtgctggtctcctcgggcgcgatcgctgccggactggcgccgctcgggctgcggcgccggccccgctccctccccgcccagcaggccgccgcctccgtcgggcaggggctgctcgtgcaccgctacaacgaggagctcgcccggcacggcgtggtcgccggccaggtgctgctcaccgtcgacgacgtcacccgccgctcgcactaccgcaacgcctaccagaccttcgccaagctgctcgagctcggcgtgctgccgatcgtcaacgagaacgacaccgtcgcgaccagcgagatccggttcggcgacaacgaccggctggcggccctcgtcgcacacctggtgcacgccgacctgctggtgctgctctccgacgtcgagggcctgtacgacgccgacccggccgcgccgggcagctcgatgctgcccgacgtcgtctcggtccacgacctcgccgacgtacgcatcggcaaggccggcgccgccggcctcggcaccggtggcatgcacaccaagatcgacgccgcccggatcgcgaccggtgccgggatccccgtcgtgctcacctccgccgagcgcgcgccggccgcgctgctcggggagccggtcggaacgctgttccacgccaccggccgacggcggccgacccggttgctgtggctggcccacgcgaccgagccgaaggggacgctgctgctggacgcgggcgcggtccgcgccgtcgtcgagcgccgggcctcgctgctggccgccgggatcaccggggtcgaggggaccttccacgcgggcgacccggtggacatcgccgcgccggacggcaccccggtcgcgcgcggcctggtcaacttcgacgccgaggagctcccgaacctcctcggccgctcctcccacgagctcaagcgcgagctcggggcgggctacgagcgcgaggtcgtccaccgcgacgacctggtcctgctgtag

SEQ ID NO: 127622 - protein, 371 aa, Nocardioides sp. JS614
MSLRHEVTEAKRIVVKIGSSSLTTAAGGIDPGRVRDLVDVLAKLRAGGSEVVLVSSGAIAAGLAPLGLRRRPRSLPAQQAAASVGQGLLVHRYNEELARHGVVAGQVLLTVDDVTRRSHYRNAYQTFAKLLELGVLPIVNENDTVATSEIRFGDNDRLAALVAHLVHADLLVLLSDVEGLYDADPAAPGSSMLPDVVSVHDLADVRIGKAGAAGLGTGGMHTKIDAARIATGAGIPVVLTSAERAPAALLGEPVGTLFHATGRRRPTRLLWLAHATEPKGTLLLDAGAVRAVVERRASLLAAGITGVEGTFHAGDPVDIAAPDGTPVARGLVNFDAEELPNLLGRSSHELKRELGAGYEREVVHRDDLVLL

SEQ ID NO: 127623 - DNA, 1116 bp, Azoarcus sp. BH72
  CDS (1)..(1116): transl_table=11
atgagagacaagatcaagaatgcgcgccggcttatcgtgaaagtcggcagcgccctcgtgaccaacaacggcgcggggctggatcctgccgcactcgacgactgggcgcgacagatcgccgcgctgcgtgcgcggggccgcgagatcgtgctggtgtcctcgggcgcgatcgccgccggcatgcagcgcctggggtgggtcaagcggccgcacgagatgcaccggctgcaggccgccgccgccgtgggtcagatggggcttgtggaggcttatgaaaaggcgttctcgcgccacggcctgcagactgctcagatcctgctcacccacgaggacctcgccgaccgcacgcgctatctgaatgcgcgctccacgctcgtcacgctgctggaactgggcgtcgtcccgatcatcaacgagaacgacacggtcgtcaccgacgagatcaagttcggcgacaacgacaccctcggcgccctggtcgcgaatctggtggaagccgacacgctgatcatcctcaccgaccagcgcggcctgtacaccgccgacccgaggcgtgacccgggtgcgacgctgatcagcgagggacgcgctgaggacaggcagtacgaagccatggcgggcggcgctggcagcggcatcagcaagggcggcatgatcaccaagatccgcgcggcgcagcgtgccgcccgcagcggcgcgcacacctgcattgccagcgggcgggaaaccgacccgctgctgcgtctggccgacggtgaagcggtgggcacgctgctctatgccgacagcacgccgctgcaggcccgcaagcagtggctggccgaccacctgcaactcgcgggcagcctgatcgtcgatgccggcgccgcgcgcgccctggatgacggccgcagcctgctgccggtcggcgtcgtcgaggtgcagggcgagttcaaacgcggggccgcggtcgcctgtcgcgacgaacacggcaccgaactcgcgcgcggcctggtcaattacagcagcgcggaatgccgtcgcatcctgcgccgcccgaccagcgacatcgagcaactgctcggctacatcgacgagcccgaactcatccatcgcgacaacctggtcatccgctag

SEQ ID NO: 127624 - protein, 371 aa, Azoarcus sp. BH72
MRDKIKNARRLIVKVGSALVTNNGAGLDPAALDDWARQIAALRARGREIVLVSSGAIAAGMQRLGWVKRPHEMHRLQAAAAVGQMGLVEAYEKAFSRHGLQTAQILLTHEDLADRTRYLNARSTLVTLLELGVVPIINENDTVVTDEIKFGDNDTLGALVANLVEADTLIILTDQRGLYTADPRRDPGATLISEGRAEDRQYEAMAGGAGSGISKGGMITKIRAAQRAARSGAHTCIASGRETDPLLRLADGEAVGTLLYADSTPLQARKQWLADHLQLAGSLIVDAGAARALDDGRSLLPVGVVEVQGEFKRGAAVACRDEHGTELARGLVNYSSAECRRILRRPTSDIEQLLGYIDEPELIHRDNLVIR

SEQ ID NO: 127625 - DNA, 1134 bp, Mycobacterium sp. KMS
  CDS (1)..(1134): transl_table=11
atgaccgaggccgccacccgtccgtccgtgcaccgcgaggccgtccgcaccgcgcgcagtgtcgtcgtcaagatcggcaccactgcgctgaccacgccgaccggcgtattcgacgccaaccggctggccacgctggtcgaggcgatcgagaagcggatgaaggcgggctccgacgtcgtcatcgtgtcgtccggcgccatcgcggccggtatcgaaccgttgcggctgtccaagcggccgaccgatctggccaccaaacaggccgccgccagcgtcgggcaggtcgcgctgatcaactcgtggaacaccgccttcgcccggtatgagcgcaccgtcggacaggtgctgctcaccgcccacgacatctcgatgcgcgtgcagcacaccaacgccgcccgcaccctcgaccggttgcgcgcactgcacgccgtggcgatcgtcaacgagaacgacacggtcgcgaccaacgagatccggttcggcgacaacgaccggctctcggcactggtggcgcatctggtgggggcggatgcgctcgtgctgctctccgatatcgacggcctctacgacggcgatccgcggaaagcgggcccggacaacccggcccgcttcatcgccgaggtcaacggagccgacgacctcgacggggtggtggccgggcgcggcagccacctcggcaccggcggtatggcgtcgaagttgtcgtcggcgctgctggccgcagatgccggtgttccggtgctgctggccgccgccgccgacgctgccaccgcactgtcggatgcgtcggtcggcacggtgttcgcccctcgcgcggagcggatgtcggcgcggcgcttctgggtgcggtacgccgccgagtccacaggtgcgttgaccctcgacgagggtgcggtcaatgccgttgtgcggcaacggcgttcgctgctgcccgcgggtatcaccggggtgtcgggacggttctacggcggcgacgtcgtggagttgcgcgcacccgatgcgaccatggtcgcccgtggcgtggtggcctacgacgcgaccgaactggccaccatgctgggccgttcgacgtcggacctacccgccgacatgcgcaggccggccgtccacgccgacgacctcgtcgccgtctga

SEQ ID NO: 127626 - protein, 377 aa, Mycobacterium sp. KMS
MTEAATRPSVHREAVRTARSVVVKIGTTALTTPTGVFDANRLATLVEAIEKRMKAGSDVVIVSSGAIAAGIEPLRLSKRPTDLATKQAAASVGQVALINSWNTAFARYERTVGQVLLTAHDISMRVQHTNAARTLDRLRALHAVAIVNENDTVATNEIRFGDNDRLSALVAHLVGADALVLLSDIDGLYDGDPRKAGPDNPARFIAEVNGADDLDGVVAGRGSHLGTGGMASKLSSALLAADAGVPVLLAAAADAATALSDASVGTVFAPRAERMSARRFWVRYAAESTGALTLDEGAVNAVVRQRRSLLPAGITGVSGRFYGGDVVELRAPDATMVARGVVAYDATELATMLGRSTSDLPADMRRPAVHADDLVAV

SEQ ID NO: 127627 - DNA, 1110 bp, Neisseria meningitidis FAM18
  CDS (1)..(1110): transl_table=11
atgaaatacaaaagaatcgtatttaaagtcggcacatcttcgattacccattcggacggcagtctctcgcgcggcaaaatccaaaccatcacccgccagcttgccgcattgcatcatgcgggacacgagctggtcttggtgtcttccggcgcggttgcggcagggttcggtgcgctgggtttcaaaaaacgtccggtcaaaatcgccgacaaacaggcttccgccgccgtcgggcaggggctgctgatggaagaatatacggcaaacctgtcttcagacggcatcgtgtccgcacaaatcctgctcagccgcgccgactttgccgacaaacgccgctaccaaaatgccggcggcgcactttccgtgctgctgcaacgccgcgccgtccccatcatcaatgaaaacgatacggtttcggttgaggaattgaaaatcggcgacaacgacacattgagtgcgcaagtggcggcgatgatacaggcagacctcttggtgctgctgaccgacatagacggtctttacacgggcaacccgaacagcaatcccgatgccgtacggctggacaaaatcgaacacatcaaccatgaaatcatcgaaatggcgggcggatcgggttcggcaaacggcacgggcggtatgctgaccaaaatcaaagcggcaaccatcgccgccgaatccggcgtaccggtgtatatctgttcctcgctcaaacccgatgcacttgccgaagctgccgaacatcaggcggacggctcgtttttcgtcccccgtgccaaaggtttgcggacgcagaagcaatggctggcgttctattccgaaagccggggcagcgtttatgtggacgaaggtgcggaacacgctttgtccgaacaggggaaaagcctgctgatgtcgggcattgccggaatcgaagggcatttttcccgtatggacaccgtaaccgtgtacagcaaggcaaccaaacagcccctgggcaaagggcgcgtcctgttcggttctgccgccgccgaagacctgctcaaatcgcgtaaggcgaaaggcgtgttcatccatcgggacgactggatttccatcacgcccgaaatacgcctgcttctgaccgaattttag

SEQ ID NO: 127628 - protein, 369 aa, Neisseria meningitidis FAM18
MKYKRIVFKVGTSSITHSDGSLSRGKIQTITRQLAALHHAGHELVLVSSGAVAAGFGALGFKKRPVKIADKQASAAVGQGLLMEEYTANLSSDGIVSAQILLSRADFADKRRYQNAGGALSVLLQRRAVPIINENDTVSVEELKIGDNDTLSAQVAAMIQADLLVLLTDIDGLYTGNPNSNPDAVRLDKIEHINHEIIEMAGGSGSANGTGGMLTKIKAATIAAESGVPVYICSSLKPDALAEAAEHQADGSFFVPRAKGLRTQKQWLAFYSESRGSVYVDEGAEHALSEQGKSLLMSGIAGIEGHFSRMDTVTVYSKATKQPLGKGRVLFGSAAAEDLLKSRKAKGVFIHRDDWISITPEIRLLLTEF

SEQ ID NO: 127629 - DNA, 1143 bp, Acidovorax sp. JS42
  CDS (1)..(1143): transl_table=11
atggtgtccagtgtattgcgcgacgcgcgtcgcatcgtggtcaaggtagggtccagtctcgtcacgaatgagggacgggggctggacgaggtggccattggggagtggtgccgccaactggcagcgctggtgcgggggcaggggggcgagccgcgcgaggtcatcatggtctccagcggagcgatcgccgaaggcatgaagcgcctgggctggagcagccgccccggcgagatccacgaactgcaggccgctgccgccgtgggacagatggggctggcgcagatgtacgagaccaagctgcgcgagcaatccatgggcagtgcgcaggtgctgctgacccatgccgacttggcggaccgcgagcgctacctgaatgcccgctccaccctgctgacgctgctgcgcctgggcgtggtgccggtgatcaatgagaacgacaccgtagtcaccgatgagatcaagtttggtgacaacgatactctgggggctctcgtcgccaacctcgtcgaagccgacgcgctggtgatcctgaccgaccagaaggggctgtacaccgccgatccgcggcgcgacccgcaggcgcagttcgtccacgaggcacaggctggcgatgcggcgctggaggcgatggccggcggcgcgggctccagcatcggcaagggcgggatgatcaccaagatcctcgcggccaaacgtgcggcgggctcgggtgcttccaccgtcatcgcatgggggcgggagccggacgtgctgctgcggctggcccggggcgaatcgatcggcacgttgctcgtggcgcagacgcagaagaaccaggcgcgcaagcagtggatggtggaccacctgcaactgcgcggctccgtgacggtggatgccggcgcggcggccaagctgcgcgaagacggcaagagcctgctgccgatcggcatggtggcggtggagggcgacttcgtgcgcggcgatgtgatcgcggtgcgcgaccccggcggcacagagatcgcccgcggtctcgccaactatgcgagcgccgaggcgcgcctgctgtgccgcaagccttccgcagagtttgagcgcctgctggggtacgcggccgaaccggagatggttcaccgcgacaacatggtggtgctcggcgcgcgatga

SEQ ID NO: 127630 - protein, 380 aa, Acidovorax sp. JS42
MVSSVLRDARRIVVKVGSSLVTNEGRGLDEVAIGEWCRQLAALVRGQGGEPREVIMVSSGAIAEGMKRLGWSSRPGEIHELQAAAAVGQMGLAQMYETKLREQSMGSAQVLLTHADLADRERYLNARSTLLTLLRLGVVPVINENDTVVTDEIKFGDNDTLGALVANLVEADALVILTDQKGLYTADPRRDPQAQFVHEAQAGDAALEAMAGGAGSSIGKGGMITKILAAKRAAGSGASTVIAWGREPDVLLRLARGESIGTLLVAQTQKNQARKQWMVDHLQLRGSVTVDAGAAAKLREDGKSLLPIGMVAVEGDFVRGDVIAVRDPGGTEIARGLANYASAEARLLCRKPSAEFERLLGYAAEPEMVHRDNMVVLGAR

SEQ ID NO: 127631 - DNA, 1113 bp, Magnetospirillum magnetotacticum MS-1
  CDS (1)..(1113): transl_table=11
atgaaccaactggccgccgccaaacgcctgatcgtcaagatcggctcctcgctgctggtggatgaatccaccggtcaggtgaggcgcggctggctggagaccgtggccgccgacatcgccgcctgcaaggcgcgcggccaagaggtgatcgtggtgtcctcgggggccgtggcggtgggtcggcgcaagctgggcctgaccccgcccctcaaattggaagaaaagcaggccgccgccgcgacggggcagatccggctggcccatgcctggcaggatgccctggctcatcactccatcaccgtggcccaggtgctcctcacgctcgacgattccgagaacaggcggcgttacctcaatgcgcgctcgacgctggagaccctgctgcgccttggggccgtgccggtgatcaacgagaacgacacggtggccaccgccgaaatccgggtcggcgacaatgaccggctggcggcgcgcgtggcccagatggtttccgccgacgccctggtgctgttctccgatatcgacggactctataccaatgatccgcgcaaggacccgacggcccgtttcattcccgaggtgcacgaactgacgcccgagatcgaggccatggcgggcgatcccggctcggcctatggctcgggcggcatggtcaccaagctggtggcggcgcgcatctgcctgtcggcgggctgccgcatggccatcaccaggggcgagcccatgcaccccttgaagaccatggaagagggggggcgctgcacctggttcctgcccaattccgagccccgtacggcgcgcaagcagtggattttcggctccatgaagcccaccggcacattggtgctggacacaggcgcggcccgcgcgctggcccagggccgctcgctgctgcccgccggaatcaccgaaatcgctggaagcttcgagcgcggcgattgcgtgctggtcaaggacgcggacggcaaggtgctgggccgtggcctggtggcctattccgccgaggacgcccgcgccatcatgggccgcaaatcgggcgagatcgaagccatcttaggctttcgcggccgcgacgaactgatccaccgcgacgatctggtgatggagggatga

SEQ ID NO: 127632 - protein, 370 aa, Magnetospirillum magnetotacticum MS-1
MNQLAAAKRLIVKIGSSLLVDESTGQVRRGWLETVAADIAACKARGQEVIVVSSGAVAVGRRKLGLTPPLKLEEKQAAAATGQIRLAHAWQDALAHHSITVAQVLLTLDDSENRRRYLNARSTLETLLRLGAVPVINENDTVATAEIRVGDNDRLAARVAQMVSADALVLFSDIDGLYTNDPRKDPTARFIPEVHELTPEIEAMAGDPGSAYGSGGMVTKLVAARICLSAGCRMAITRGEPMHPLKTMEEGGRCTWFLPNSEPRTARKQWIFGSMKPTGTLVLDTGAARALAQGRSLLPAGITEIAGSFERGDCVLVKDADGKVLGRGLVAYSAEDARAIMGRKSGEIEAILGFRGRDELIHRDDLVMEG

SEQ ID NO: 127633 - DNA, 1104 bp, Nostoc punctiforme PCC 73102
  CDS (1)..(1104): transl_table=11
atgactaaaacaattgttgtcaaaatcggtacttctagcctaactcaagcagaaacgggacaattagcactttccactatcgctaccttggcggaaacactttgccatttgagaagccagggacaccgggtaattttggtttcttctggcgctgtgggtgtgggttgtgcaaggttggggttaactgaacgtcctagagcgatcgcactcaaacaagctgtagcagcagtcggacaaggtaggttaatccgtatatatgatgatttgtttactacgctgcaacaggcgatcgctcaagtattactgacacgaagcgatctagtacagcgcagccgctatctcaatgcctacaacacctttcaggaattactgggactgggagtgatccccatagtcaatgaaaatgataccgtagcaatagacgaactaaaatttggtgataatgataccctttcggcattagttgctagcttaatagaagcagattggctatttttgctcaccgatgtcgataggttgtactcagccgatccacgttctgtcccagatgctcgaccgatcgctctagttagtagcattaaagaattagctgaattacaaataggttcccaaggttctcagtggggtactggtgggatggtgacaaaaatttcggctgcgaggattgcgatcgcggcgggagttcgtaccgtaattacccaagggcgatttccccagaatatagaaaaaattatccaaggtgaactgattgggacgcattttgaaccgcaacctgaaccaacttcggcgcgtaaacgttggatagcttacggacttttacctgcgggtaaattgtatttagatgaaggtgcgatcgcggcaatttctctagcaggaaaatcgttattagctgctggaattaagttagtagaaggagagtttgacacacaggatgcagtgcaattgtgtgacagtaatggtaacgaaattgccagaggacttgtgaattacaacagcaatgatctgcaaaagattcgtggttgtcattcacgagaaatttccacaattttaggttatgccggtgcagaaacagttattcaccgagataatttggttttgatttag

SEQ ID NO: 127634 - protein, 367 aa, Nostoc punctiforme PCC 73102
MTKTIVVKIGTSSLTQAETGQLALSTIATLAETLCHLRSQGHRVILVSSGAVGVGCARLGLTERPRAIALKQAVAAVGQGRLIRIYDDLFTTLQQAIAQVLLTRSDLVQRSRYLNAYNTFQELLGLGVIPIVNENDTVAIDELKFGDNDTLSALVASLIEADWLFLLTDVDRLYSADPRSVPDARPIALVSSIKELAELQIGSQGSQWGTGGMVTKISAARIAIAAGVRTVITQGRFPQNIEKIIQGELIGTHFEPQPEPTSARKRWIAYGLLPAGKLYLDEGAIAAISLAGKSLLAAGIKLVEGEFDTQDAVQLCDSNGNEIARGLVNYNSNDLQKIRGCHSREISTILGYAGAETVIHRDNLVLI

SEQ ID NO: 127635 - DNA, 1152 bp, Haemophilus somnus 2336
  CDS (1)..(1152): transl_table=11
atggtaacttatggggaaatttttcaagtaaagacaactatggaaacacaaaaaacaaataaaaccattgtggtaaaatttggtaccagcaccttaacgcaaggttcatcaaaattaaatcgccctcacatgatggaaattgtgcgtcaaatcacacagttgcatcgagcaggctttcgtataattattgttacctccggagcgatggcagcggggcgacattatctcaatcatccgcaacttcctccaacaattgcctcaaagcaattactagcagcagtaggacaaagtcaactcattcaaacgtgggaacaacttttcgctatttatgatattcatattgggcaaattctgttaactcgagcggacattgaagatcgtgaacgttttatgaacgcaagagatacgttacatgctttattagataaccgaattattccggtaattaatgaaaatgatgcggttgcaaccgctgaaattaaagtgggggataatgacaacctttctgcattagtggctattttggcacaagcagaacaactctacttgctaacagatcaacgtggattatttgatagtgatccaagaaaaaatcctcaagcaaaactgatttccatagtcgataaaattactgatcatatccgctctattgccggaggaagtgggacaacgttagggacgggaggaatgacaacaaaaattagtgctgctgacatagcgactcgttccggtgttgaaaccattattgcaccgggtaatcttgaaaatgtcattgtcaatttggcttatggaaaagacatcggcacaaaatttgttgtgcagacagatcgcttggaaagccgtaaacagtggatctttgctgcaccggttgcaggtatagtaactattgatgagggagcggaaagtgcggtattgattcagcataaatctctattacctgcaggtattatcagtgttgaaggatgtttttctcgtggtgaagttgttaaaatttgtggttcgaacggtaaaaaaattgctttgggcgtacctcgctataacagcgattctctcatacaaataaaaggaaaaaaatcgcaagatattgaacagatcctcggttatgaatatggttctggtgctattcatcgtgatgatatggtcgtttattaa

SEQ ID NO: 127636 - protein, 383 aa, Haemophilus somnus 2336
MVTYGEIFQVKTTMETQKTNKTIVVKFGTSTLTQGSSKLNRPHMMEIVRQITQLHRAGFRIIIVTSGAMAAGRHYLNHPQLPPTIASKQLLAAVGQSQLIQTWEQLFAIYDIHIGQILLTRADIEDRERFMNARDTLHALLDNRIIPVINENDAVATAEIKVGDNDNLSALVAILAQAEQLYLLTDQRGLFDSDPRKNPQAKLISIVDKITDHIRSIAGGSGTTLGTGGMTTKISAADIATRSGVETIIAPGNLENVIVNLAYGKDIGTKFVVQTDRLESRKQWIFAAPVAGIVTIDEGAESAVLIQHKSLLPAGIISVEGCFSRGEVVKICGSNGKKIALGVPRYNSDSLIQIKGKKSQDIEQILGYEYGSGAIHRDDMVVY

SEQ ID NO: 127637 - DNA, 1107 bp, Haemophilus influenzae R2866
  CDS (1)..(1107): transl_table=11
atgaacaaaaaaacaatcgttgtgaaattcggtacaagcacgctaactcagggttcgccaaaactgaattcgccacatatgatggaaatcgttcgtcaaattgcacaactgcataatgatggatttcgtatagtgatcgtgacttctggtgcgattgcagcgggtcgccattatttaaatcatcctcaattaccacccactatcgcctcaaagcaactgcttgcagcggttggtcaaagccaattaattcaggcttgggaaaaattatttgctatttatgatatccatatcgggcaacttttattaacccgtgcagatattgaagatcgcgaacgttttttaaatgcgcgagatactttacacgcacttttagataaccacattattcctgtgattaatgaaaatgacgcggtggcgactgcggaaattaaagtaggtgacaatgacaatttatcggcattagtcgctattcttgtgcaagcggaacagctttatttattgactgatcaacaaggtttatttgatagtgatccgcgtaaaaattctgaagcgaaattaattccaattgtagaacaaattaccgatcatattcgatcaattgcaggaggaagtggtacaaatcttggtacaggtggaatgatgaccaaaatcattgctgccgatgttgcgactcgctctggaattgaaaccattattgctccaggtaatcgcccaaatgtaattgcagatcttgcttatgaacaaaatattggtacaaaatttattgcacaccaatctgatcgattagaaagccgcaaacaatggcttttcgccgcaccatcggcaggtattattaccattgataacggtgcgcaaaatgccattcttgaacaaaataaatctttattacctgctggtattattaacgtggaagggcgtttttcgcgtggtgaagtagtcaaaatacgcactcaatcaggtaaagacattgcgctgggtatgccacgctataacagcgattccctacaattaattaagggcagaaaatcagcagacattgagaatgttttaggctatgaatatggcgcggtggcaatgcatcgtgatgatatgattattttgtcataa

SEQ ID NO: 127638 - protein, 368 aa, Haemophilus influenzae R2866
MNKKTIVVKFGTSTLTQGSPKLNSPHMMEIVRQIAQLHNDGFRIVIVTSGAIAAGRHYLNHPQLPPTIASKQLLAAVGQSQLIQAWEKLFAIYDIHIGQLLLTRADIEDRERFLNARDTLHALLDNHIIPVINENDAVATAEIKVGDNDNLSALVAILVQAEQLYLLTDQQGLFDSDPRKNSEAKLIPIVEQITDHIRSIAGGSGTNLGTGGMMTKIIAADVATRSGIETIIAPGNRPNVIADLAYEQNIGTKFIAHQSDRLESRKQWLFAAPSAGIITIDNGAQNAILEQNKSLLPAGIINVEGRFSRGEVVKIRTQSGKDIALGMPRYNSDSLQLIKGRKSADIENVLGYEYGAVAMHRDDMIILS

SEQ ID NO: 127639 - DNA, 1131 bp, Bacillus cereus G9241
  CDS (1)..(1131): transl_table=11
ttgattttagacttgggggatataaaagtgaaaaaacaacgaatagttgtaaagattgggagcagttctttggcggatagtcacggaggcatttctaaagaacaactttcagatcacgttgcggcattagctcgattgaaagaggaagggcatgaagttttactaattacatctggggccgttgctgcaggtttttctgctctaggataccctagcagacctgtaacaattaaaggaaaacaggctgctgcggctgtcggacaaagtttgttaatgcaggcatacacggaggaattccgtaaatatggcatcgttactgcgcaactattgctgacgagaagtgatttttctagaaaagaacaatatagtaacgcttacgctacgttaggggagttactaaaccgctctgctcttccaatcattaatgaaaatgattctatctctttagaggagctaacgtttggtgataatgatatgctgtcagctttagtaagcggacttgtttcggcggatatgctgatgatttttacagatgtgaacggtttatatgacaaaaatcctcagaaaaatgaggatgcaaaaaaatattatttccttcctgaagttacagaagaaatcgcttctcttgcaggagatgctggctcaaaacttgggactggcggtatgaaatcaaaaatcgacgctgcaaagacagcactttctcttggtgtgagtgtatttatcggaacaggacgtggacaagagaagtttgtagatgttttgaaaggcaaaggtgatggaacgtatatcggtaatgctcctcaaaaagaaatgaaaatgaccaagcaatggattgccttgcattcggttgttagtggacaaattgaagtagacgccggagcagctacagctatcattcagcatggcaagagtctgcttcctgctggtgttacaaatgtgtcaggatttttccaagtaggcgaagtcgtagaagtaatgacgcaacaagggcgcgtcattggaaaagggcaatgcacatatagcgcagaggaattaagagaggtaaaaggtatgcaaagtcaagatattcaggcaagaggcgaaaggcatagttatgaagtcattcatagggattattgggtttcactttaa

SEQ ID NO: 127640 - protein, 376 aa, Bacillus cereus G9241
MILDLGDIKVKKQRIVVKIGSSSLADSHGGISKEQLSDHVAALARLKEEGHEVLLITSGAVAAGFSALGYPSRPVTIKGKQAAAAVGQSLLMQAYTEEFRKYGIVTAQLLLTRSDFSRKEQYSNAYATLGELLNRSALPIINENDSISLEELTFGDNDMLSALVSGLVSADMLMIFTDVNGLYDKNPQKNEDAKKYYFLPEVTEEIASLAGDAGSKLGTGGMKSKIDAAKTALSLGVSVFIGTGRGQEKFVDVLKGKGDGTYIGNAPQKEMKMTKQWIALHSVVSGQIEVDAGAATAIIQHGKSLLPAGVTNVSGFFQVGEVVEVMTQQGRVIGKGQCTYSAEELREVKGMQSQDIQARGERHSYEVIHRDYWVSL

SEQ ID NO: 127641 - DNA, 1113 bp, Crocosphaera watsonii WH 8501
  CDS (1)..(1113): transl_table=11
atgaacccctcccaaacgattgttgtcaaagttggtacctctagtcttgctcaaccagagacaggaaaattagctttatctactatagctgctttggtggaaactttaaccgaattacgacaattcggctatcatgttgtcttagtttcctctggtgctgtgggagtgggttgtagtcgtttaaaattaacagaaaaacccaaaaaaatagtcataaaacaagctattgctgccgtgggacaaggtagattaattagagtttatgatgacctttttacagctttaaatcaacccattgcccaagttttattaacccgtcgagaattaatggaacggagttgttatgttaatgctaaaaatacctttgatgctctgtttgaattaggggttattcctattgttaatgaaaatgatactgttgctattgaagagttgaaatttggagataatgataccctttctgctttagttgctagtttaattaatgctgattggttgtttattttaaccgatgttgatcgactttattctgctgatcctcgcacctttccagatgctaaacctatcaaagttgttaatagtttagaattagataaattagaaattaaagcaggaggaaaaggatctcaatggggtacaggagggatgtcaaccaagctaacagcagcaagactggcaacatccgcaggtattactacagttataacccacggaaaaaagccaggaaacttattaaaaattattaaaggtgaagatattggcactaaatttgaggcacaattaaataatgataatgcccgcaaacgttggatctattatggattattacccagaggaaaattatatcttgatcggggggcagttaaagccatttctcaaaaaggaaaatctctgttaccagcaggaataattaaagttgaaggtgagtttgattctttagaggcagtgcaattatacaatgaaagtggtcaagaaattgggagaggaattgttaattataatcaggaagaaattgataaaataaaaggcaatcactcggataaaatacctgaattattaggttgtcatggagcagaaaccattgtccatcgagataatttagttattaattga

SEQ ID NO: 127642 - protein, 370 aa, Crocosphaera watsonii WH 8501
MNPSQTIVVKVGTSSLAQPETGKLALSTIAALVETLTELRQFGYHVVLVSSGAVGVGCSRLKLTEKPKKIVIKQAIAAVGQGRLIRVYDDLFTALNQPIAQVLLTRRELMERSCYVNAKNTFDALFELGVIPIVNENDTVAIEELKFGDNDTLSALVASLINADWLFILTDVDRLYSADPRTFPDAKPIKVVNSLELDKLEIKAGGKGSQWGTGGMSTKLTAARLATSAGITTVITHGKKPGNLLKIIKGEDIGTKFEAQLNNDNARKRWIYYGLLPRGKLYLDRGAVKAISQKGKSLLPAGIIKVEGEFDSLEAVQLYNESGQEIGRGIVNYNQEEIDKIKGNHSDKIPELLGCHGAETIVHRDNLVIN

SEQ ID NO: 127643 - DNA, 1092 bp, Prosthecochloris aestuarii DSM 271
  CDS (1)..(1092): transl_table=11
atgtttatttcagatcctgtgtacaggaaaatagtcgtcaaggtcggtacgaacgttatcaccaatgcagacggcaagctgaacctcgacattcttgatcagctcaccacacagatcgcccgtctctgcaaccagggcatagaagtcctccttgtctcctccggggctgtaggagcaggccgttcaatcatcacgcttccagtcggcttgccgccggttgccagaaggcaggtgctctcgtctacgggccagatcaaactgattaacacctacgcagatctcttcgcccgtcacggggtcacgacggcacagattctggtcaccaaaagcgactttcgcgaccgtcagcactatctcaacatgcgcacctgtttttcatcgctgatagagcaatctgtcattcccgtcatcaatgaaaacgatgccgtgtcggtcaccgagctcatgtttaccgacaacgatgagctctcaggactgatcgcatcgatgatgcaggttgacgcccatatcatcctgtcgcacgtcgatggccttttcgacctttccaaaaaaaaggataaccccgaagtcattccgcaaatcgatcctgaggacacccgttttcataaatttattcagcctggaaaatccgaattcggcagaggcggcatgctcactaaatgtcatatcgcccggaaacttgcaggcttcggcatctccgtccatatcgcaaacggccgtactcccggcattctttacgatattgtctcaggaaagtctgtcggcacgaaattcctggcaaaaaaacctacacacggccgaaaacgttggctcgctcatagtgaaggaatggaaaaaggcgctgtaacgatcaacgccggcgcggaaaaagcccttcgttctccaactgaagccaacagcctgctacctgtaggcattgaatcggtaaagggtgccttctacaaaggtgacatcattaaaatctgtactgaaaatggagaaatcataggctatggcatggcccgttacagctcggaaaaaaccagagagcttttgggcaaaaccggagaaaagcctcttatccactacgattacctctatatcaacatctga

SEQ ID NO: 127644 - protein, 363 aa, Prosthecochloris aestuarii DSM 271
MFISDPVYRKIVVKVGTNVITNADGKLNLDILDQLTTQIARLCNQGIEVLLVSSGAVGAGRSIITLPVGLPPVARRQVLSSTGQIKLINTYADLFARHGVTTAQILVTKSDFRDRQHYLNMRTCFSSLIEQSVIPVINENDAVSVTELMFTDNDELSGLIASMMQVDAHIILSHVDGLFDLSKKKDNPEVIPQIDPEDTRFHKFIQPGKSEFGRGGMLTKCHIARKLAGFGISVHIANGRTPGILYDIVSGKSVGTKFLAKKPTHGRKRWLAHSEGMEKGAVTINAGAEKALRSPTEANSLLPVGIESVKGAFYKGDIIKICTENGEIIGYGMARYSSEKTRELLGKTGEKPLIHYDYLYINI

SEQ ID NO: 127645 - DNA, 1155 bp, Xylella fastidiosa Dixon
  CDS (1)..(1155): transl_table=11
atgaccggcatccctcccccctcccgcttccccgaacaacccatccccccgtggcgccgcgccgtcctcaaagtgggcagcagcctcctcgccgccgatggcggcggcctttccccccgctttgccttggacttagcacacttcgtctccgccaacatcaccgccggacgccaactcgtcatcgtctcctctggcgctgtcgccgctggtcgtgccctgatacccccactgcccgaatccggcggcgctctcgccgcacgccaagccttagccgcccttggacaagcacaactcatcgcactgtggcaacgcttcttcgaccgccccgttgcccaggtcctcctgacccacgacgacctccgcaaccgccgtcgctacctcaacgcacgtgccacattgcgtgaactactgcacctgggcaccttgcccgtcgtcaacgaaaacgacaccgtctccgtagatgaactcaaactgggcgacaacgacaatctggcagccattgttgccgcactgattgatgcccaagccctgtttatcgccaccgatattgacggcttatacaccaccgacccacgccaccatcccgacgcacagcccctgcatgaagtccgcaccctgacccctgaacacctcgccatggctggtgacagcagcagcaccggcggcaccggcggcatgcgtaccaaacttgaagcagcacttaaagccggcgccgctggcattgacacctacctatttaacggccgcagcagcgacgttgtccgcggactcgcacaacaccgcctccgcggcacccgcatccatcccacctgtaccccgattgctgcccgtaaatattggttgcgtcacgccccagtcgagcccggcgcgattctcattgatgccggtgccgccgctgccttggcacaacaaggcgcttccctacttccgggcggcgttttgagtgccgaaggcgacttccgccgcggcgatatgatccagatagccacccgcagcccagatcacccctcccaccccctggcacgcggacttgtccaatactcagccgccgatgtccgccgcattgccggttgccattcccgcgatattcaaaccctccttggatacacctatggcgacacaatcgttcaccgtgatgacctcgtcctcctctga

SEQ ID NO: 127646 - protein, 384 aa, Xylella fastidiosa Dixon
MTGIPPPSRFPEQPIPPWRRAVLKVGSSLLAADGGGLSPRFALDLAHFVSANITAGRQLVIVSSGAVAAGRALIPPLPESGGALAARQALAALGQAQLIALWQRFFDRPVAQVLLTHDDLRNRRRYLNARATLRELLHLGTLPVVNENDTVSVDELKLGDNDNLAAIVAALIDAQALFIATDIDGLYTTDPRHHPDAQPLHEVRTLTPEHLAMAGDSSSTGGTGGMRTKLEAALKAGAAGIDTYLFNGRSSDVVRGLAQHRLRGTRIHPTCTPIAARKYWLRHAPVEPGAILIDAGAAAALAQQGASLLPGGVLSAEGDFRRGDMIQIATRSPDHPSHPLARGLVQYSAADVRRIAGCHSRDIQTLLGYTYGDTIVHRDDLVLL

SEQ ID NO: 127647 - DNA, 1077 bp, Streptococcus suis 89/1591
  CDS (1)..(1077): transl_table=11
atgacagaaaaaacaattgtatttaaggtcgggacaagttctctgacccaagaaaatggcagtctggaccgtatcaagattgctcggattaccaatcagctggctcagttgcatcagaagggctaccagattgtgctggtgacgtcgggctcgattgctgctggttttcggagattgggctttgagaaacgaccaaccaagattgcggagaagcaggcttctgcggccgttggacaaggtttgctgattgaggaatatacgcaaaatctgatgaaagatggcattgtgtcggctcagattttgctgacccaggatgattttgcggatgccagacgttatcagaatgcctctcaagccttacaggtcttgctgaaacaacgtgttattcctattatcaacgaaaatgataccattgccattgaggagattaaggtaggggacaatgatactttatctgcccaggtggcttctctcttgaaagcagacctcttggtactcttgacggatgtggatgggctttacacggccaatcccaacagcgatcccaatgccaaacatttgccagtgattacggaaattacggaagatttatttgccatggcagcaggagctggctcgtccaacggaacaggtggcatgaccaccaaattgcaggcggcccagattgcgaccaagtcaggcgtgcccgtctttatctgctcttcaaaagaggataccgccctcttacaggcggtcacccaagccaatcgtggaacgctctttttagctgacgaccacgccatgaaccaacgcaagcagtggatggccttctatgctcggacagacgcagcagttgaagtggatgcaggagcggttgatgccatgttgcaccagggccgcagtttgttagctactggtgtcaaagccctggaaggcgactttgaagtgggccaggtcgtagaggtttatagccaagcagaccatcgtttgattggtaaaggacgggtcaaactgtcctccaaggacttgcaggaccagttggcaaatggcagagcggaaggtgtgtttattcaccgcaacgattgggtgagcttatag

SEQ ID NO: 127648 - protein, 358 aa, Streptococcus suis 89/1591
MTEKTIVFKVGTSSLTQENGSLDRIKIARITNQLAQLHQKGYQIVLVTSGSIAAGFRRLGFEKRPTKIAEKQASAAVGQGLLIEEYTQNLMKDGIVSAQILLTQDDFADARRYQNASQALQVLLKQRVIPIINENDTIAIEEIKVGDNDTLSAQVASLLKADLLVLLTDVDGLYTANPNSDPNAKHLPVITEITEDLFAMAAGAGSSNGTGGMTTKLQAAQIATKSGVPVFICSSKEDTALLQAVTQANRGTLFLADDHAMNQRKQWMAFYARTDAAVEVDAGAVDAMLHQGRSLLATGVKALEGDFEVGQVVEVYSQADHRLIGKGRVKLSSKDLQDQLANGRAEGVFIHRNDWVSL

SEQ ID NO: 127649 - DNA, 792 bp, Croceibacter atlanticus HTCC2559
  CDS (1)..(792): transl_table=11
atgaaaactcaaaaaaacaccatggacaataagagagtagttataaaagtaggaactaacgtgatgaccaataaagacaatcgcatattaggtcctgtattgaacgaactcgtaagacaaatagcagaattatatgagaataatatttcaccaatattagtatcatctggatctgccattgcaggaatggaagtgttaggagattgtaaagcaacagacccatcaacaagaagacaaatattttcttctgttggtcaacctcgtatgatgcgccattactatagtttatttcatgattacggtatgcgctgtgcacaagtattagctaccaagcgagattttgcaccaggtaagcatagagaaaatatgataaactgttacgaaggattaattaatgaaggtattgttcctatagcaaatgaagatgacgcagtatcacttaaaatgtcaatgtttagtgataatgatgaattggcaagtttagtagcagagcttacaaatgcagatgccttaatcttattaacagatacagacggactttatacaggtcatccagatgatgatgattctgaaaagttagataaagtaaatgtggaagaaaatgtagaacaatatgtgcaagcttcagaaaaatctgaaggcgaaggacgtggtggaatgaagtctaagctaaagattgctaaggctactgctaagaaaaacattccaacatttatagcaaacggaaagcgtaaaaatgtaatagtagagctgttggaaggaaaagatatcggaaccaagttttacgcataa

SEQ ID NO: 127650 - protein, 263 aa, Croceibacter atlanticus HTCC2559
MKTQKNTMDNKRVVIKVGTNVMTNKDNRILGPVLNELVRQIAELYENNISPILVSSGSAIAGMEVLGDCKATDPSTRRQIFSSVGQPRMMRHYYSLFHDYGMRCAQVLATKRDFAPGKHRENMINCYEGLINEGIVPIANEDDAVSLKMSMFSDNDELASLVAELTNADALILLTDTDGLYTGHPDDDDSEKLDKVNVEENVEQYVQASEKSEGEGRGGMKSKLKIAKATAKKNIPTFIANGKRKNVIVELLEGKDIGTKFYA

SEQ ID NO: 127651 - DNA, 1161 bp, Sulfitobacter sp. EE-36
  CDS (1)..(1161): transl_table=11
atgtccaagaagaaacgtatcgtcgttaaaatcggatccagcctgttggccaatgaagaaaagctgacattgcgctatgctttcatgaacggtctcatggcggatttgggggaccttcaggaccagggatacgagatcatcctgacctcgtcaggctcggtcgcgcttggcctgaacatgatcgggaaacgccccgaagaggccggtattctggacaagcaagcggcggccgcctgtggtcagcccctgctgatgaacgcctaccgtcaggttgcgaatgaatacaattttgacgtggcgcaaatgctggtgaccgtcgaagacatggaagagcgtcgccgctttctgaacatcaagaacaccatgctgcggctatttgaaaaccagatcctgcccatcatcaatgaaaacgactccatcgccactcgcgacctgaaagtgggcgacaatgaccgtctttccgctaaggtggcccagatggtcgaggccgatcacctgatcatcctgaccagcgtcgaaggcctgtatgaccgtgacccttccgaacccggtgcccagttcatcgaggaaatcgaagatgtgtccgaacacctcgaatccaccaaaagcatcagcgaattgggcagcggcggcatgctgaccaagatgctggcggccaatatggcacagaacgccggggtcgagacgatcatcgccgacggtatcatcgaacgcccgatttcctcggtactgaacaacgaacgccgccacacccgttgtctggcgtcggccaaggccgcgtcgccgctgatgatctggctaagcaaccgtttgcaggttgccggaacgctggtcgtcacggacgaggctgtccgcgcgatcaccgccaaggagcgcggcttgcagcgtgatgatctggtatcgattcagggcgaattctctaaaggtgatgtgctgcacgtctatgacgagcaggggaacgagttcgcccgcgggctgaccaacttctcgtccgaagagacgatcctgatggcgcgtaaccccgagatggagatcgaagacgtcatcggctacaaaaccaaaagcgcggttgtgggggcggaaaacatcctgatcctcgaagatcaccacctgcagctcgacgcgcccgaggaagacgacaagcccgtcatttccctgtaa

SEQ ID NO: 127652 - protein, 386 aa, Sulfitobacter sp. EE-36
MSKKKRIVVKIGSSLLANEEKLTLRYAFMNGLMADLGDLQDQGYEIILTSSGSVALGLNMIGKRPEEAGILDKQAAAACGQPLLMNAYRQVANEYNFDVAQMLVTVEDMEERRRFLNIKNTMLRLFENQILPIINENDSIATRDLKVGDNDRLSAKVAQMVEADHLIILTSVEGLYDRDPSEPGAQFIEEIEDVSEHLESTKSISELGSGGMLTKMLAANMAQNAGVETIIADGIIERPISSVLNNERRHTRCLASAKAASPLMIWLSNRLQVAGTLVVTDEAVRAITAKERGLQRDDLVSIQGEFSKGDVLHVYDEQGNEFARGLTNFSSEETILMARNPEMEIEDVIGYKTKSAVVGAENILILEDHHLQLDAPEEDDKPVISL

SEQ ID NO: 127653 - DNA, 1110 bp, Sulfitobacter sp. EE-36
  CDS (1)..(1110): transl_table=11
ttggcaaccctaagcgacggcacccgtatcgttgtaaaaatcggctcggcgctgctcgtcgatcgggccaccggccagcttcgccgcgattggctgcaaagtctcgcgcaggatgtggcgtggctcaaggggcagggcaaggatgtggtgctggtgtcttcgggctccatcgcattggggcgtggtgtgcttgggctgccggcaaccacgcttgcgctggaacaatcccaagccgcggcggcggtggggcaaatccgtctcgcccgcgcctatgaagaggcgctggaaccctacgggatcaccgccgcgcaggtgcttgtcaccctggaagacagcgcggatcgtcggcggtatctcaacagccgcgccacgatggagcagctgttgtccatgggggcggtacccatcgtcaacgagaatgacaccgtcgccacggacgagattcgctttggcgacaatgaccggctcgcggcgcagatcgccgtgaccgtggcagccgaccggttgatcctgctgtcggatgtggatggtttctattccgccaatcccaatgacgaccccgatgccatccgctatgaggtgatcgacacgattaccccagaaatcgaggcgcaggcgggcgatgcgggctctggcctgtccaagggcggcatgaagacaaagctgatggccgcgaaaaccgcgactgctgcgggctgcgctatggccatctccgaaggatcaccgttgcggcctttgctgaccctcgaaaacggggccaacgccacttggttcaccgcgcaatccgacccccaaaccgcgcgcaaacaatggattacggcactcaaaccgcgcggcagcgtcacattggatgccggtgcagtggctgccatgtccaagggcaagtcgcttttgcccgccggtgtcaccgctgtttccggccctttcgggcgcggcgactccgtcgcgctgctggccccagatgggcgccccatcgggcacgggctgacacgctatacctcggcagaggcagagctgatcaaaggtcgtcaatcctcggagatcgaggccattctgggcgcgccgggacgtgctgctttgatccatcgggacgatcttgcgctttcctga

SEQ ID NO: 127654 - protein, 369 aa, Sulfitobacter sp. EE-36
MATLSDGTRIVVKIGSALLVDRATGQLRRDWLQSLAQDVAWLKGQGKDVVLVSSGSIALGRGVLGLPATTLALEQSQAAAAVGQIRLARAYEEALEPYGITAAQVLVTLEDSADRRRYLNSRATMEQLLSMGAVPIVNENDTVATDEIRFGDNDRLAAQIAVTVAADRLILLSDVDGFYSANPNDDPDAIRYEVIDTITPEIEAQAGDAGSGLSKGGMKTKLMAAKTATAAGCAMAISEGSPLRPLLTLENGANATWFTAQSDPQTARKQWITALKPRGSVTLDAGAVAAMSKGKSLLPAGVTAVSGPFGRGDSVALLAPDGRPIGHGLTRYTSAEAELIKGRQSSEIEAILGAPGRAALIHRDDLALS

SEQ ID NO: 127655 - DNA, 1107 bp, Roseovarius nubinhibens ISM
  CDS (1)..(1107): transl_table=11
atggcaaccgtaagcacggcacggcggatcgtcatcaagatcggatcggcgctgttggtggaccgggtgagcggcgcgttgcgcgatgcctggctcgggtcgttgatcgaggatgtggcctggctgcgtagcaagggcgcggaggtggttcttgtgtcgtcggggtcgattgcgctgggccgggccgagcttgggcttggcaatgcggagctgtcgctcgaacagagccaggcggcggcggcggtggggcagatccggcttgccggggcctatgaggccgcgctcaaatcccacgggatcaaggcggcgcaggtgttgctcacgctggaggacagcgagaaccggcggcgctatctcaacacgcgggcgacgctcgatcagctgttgcgattgggtgtggtgcccatcgtcaacgagaatgacaccgtggccaccgatgagatccgctatggcgacaatgaccggatggcggcgcaggtcgcggtgacggcgggggcggatcagctcatcctcctgagcgatgtggatgggttctattcggccaacccgaatgacgaccccacggccaagcggttcgacgaaatcaccgccatcacgcccgagatcgaggcgatggcgggcgatgcgggatcggggctcagcaagggcgggatgaagaccaagctcatggcggcgcgcacggcgatggcggcgggctgtgacatggcgatttccgagggcagcgtgaccaacccggtgcaggccatcgagggcggtgcgccggtcacatggttccgaggccagggcgatccgcaagcgcggcgcaaggcctggatcggtggcatgaagccgcgcggccggatcatcgtggatgcaggcgctgtggcggcgctcgaggccgggagcagcctcttgccggcgggcgtcagcgcgatcgagggccggtttggccggggcgatccggtgcaggtgcgggcgcaggacgggcgggtgctcggccaggggctcacgcgctatgatgcggaggaggcggccaagatcctcgggttgcgcaccgatgcgattgccgaggctttgggatatgcggcgcggggggccttgatccaccgcgacgacatggcattttaa

SEQ ID NO: 127656 - protein, 368 aa, Roseovarius nubinhibens ISM
MATVSTARRIVIKIGSALLVDRVSGALRDAWLGSLIEDVAWLRSKGAEVVLVSSGSIALGRAELGLGNAELSLEQSQAAAAVGQIRLAGAYEAALKSHGIKAAQVLLTLEDSENRRRYLNTRATLDQLLRLGVVPIVNENDTVATDEIRYGDNDRMAAQVAVTAGADQLILLSDVDGFYSANPNDDPTAKRFDEITAITPEIEAMAGDAGSGLSKGGMKTKLMAARTAMAAGCDMAISEGSVTNPVQAIEGGAPVTWFRGQGDPQARRKAWIGGMKPRGRIIVDAGAVAALEAGSSLLPAGVSAIEGRFGRGDPVQVRAQDGRVLGQGLTRYDAEEAAKILGLRTDAIAEALGYAARGALIHRDDMAF

SEQ ID NO: 127657 - DNA, 1137 bp, Oceanicola batsensis HTCC2597
  CDS (1)..(1137): transl_table=11
ttggcagccctgaccgacaccggcctctccggcgcgcgccgggtggtcatcaagatcggctcggcgcttctggtcgagcgcgagacgggtctgctgcgcgccgactggcttggcgggctggccgaggacgtggcgatgctgcgcgcgcggggtgtcgacgtggtgctggtctcgtccggctccatcgcgctcgggcggggggtgctgggcctcgggctcggcgacctgtcgctggaacaggcgcaggccgcggcggcgaccggtcagatcggcctggcagctgcctattccggcgcgctcggccgccacgggatcaaggtcgggcaggtgctcgtgacgctcgaggacagcgctgaccggcggcgctacctgaactcgcgtgcgacgctgcagacactcctgacttacggtgttgtcccgatcgtcaacgagaacgacaccgtcgccacggacgagatccgctatggcgacaacgaccgtctcgccgcgcaggtcgcggtcaccgtcggcgcggaccggctggtgctgctgtcggatgtggacgggctctatacggccaatcccaacatcgacccgaccgcgcggcggctggaccgggtggtccagatcacgcccgagatcgaggcgatggccggggatgcggggtcgggcctgtccaagggcggcatgaagaccaaggtcatggccgccaagaccgccaccgccgcgggctgcgccatggcgatcacgcacggctttcgcatgaaccccgtgcgggcactcgaggagggggcaaacgccacctggttccaggccaagggcgacccgcagaccgcccggaagggatggatcggctcgatgaagcccagagggcggctggtgttggatgacggcgcggtacgcgcgatgcggcaggggcgatcgctcctgcccgccggtgtcgcccgggtcgaggggcggttcggccgtggcgatccggtcgaactgacgggcccgaacgaagaggttctggcgcagggcctgacccgctacactgccgacgaggcgcggcgcatcgccgggcaccgctcggacgagatcgaggcgctgctcggctatcccggccgggcggcattggtgcacagggatgatcttgccttcctggcattggttgagtga

SEQ ID NO: 127658 - protein, 378 aa, Oceanicola batsensis HTCC2597
MAALTDTGLSGARRVVIKIGSALLVERETGLLRADWLGGLAEDVAMLRARGVDVVLVSSGSIALGRGVLGLGLGDLSLEQAQAAAATGQIGLAAAYSGALGRHGIKVGQVLVTLEDSADRRRYLNSRATLQTLLTYGVVPIVNENDTVATDEIRYGDNDRLAAQVAVTVGADRLVLLSDVDGLYTANPNIDPTARRLDRVVQITPEIEAMAGDAGSGLSKGGMKTKVMAAKTATAAGCAMAITHGFRMNPVRALEEGANATWFQAKGDPQTARKGWIGSMKPRGRLVLDDGAVRAMRQGRSLLPAGVARVEGRFGRGDPVELTGPNEEVLAQGLTRYTADEARRIAGHRSDEIEALLGYPGRAALVHRDDLAFLALVE

SEQ ID NO: 127659 - DNA, 1095 bp, Prochlorococcus marinus str. MIT 9211
  CDS (1)..(1095): transl_table=11
atgacactctgggtattaaagatagggacaagtttacttagaggaacagaaaagctatcgacaaaaaaaataatccataactattgttcctgtatagcagaatctaaagccagaggtgatcaacacataattgtatccagtggagccgttggtctgggatgtattcaacttggctttaaagatcgtcctaataacattaatgatctacaggctgctgcgtctgttggccaagtacaccttatggacttatatcaagaatatatggcaacttttgggtacaaagtggctcaaatcttaataacccgttcggactttagctcacgtaattgttataggaatgcctcaatgactctaaaaagacttttagattggggagtacttccaatagtcaatgaaaatgacgcaatagctaatgaggaattactatatggggataatgatacattatctgcgcttgtttctacagccattaatgctgatcaattagttctattaaccgacatagatcgtctttattcaacagacccaaaagttagtaatgaagcaaagccaataacagatgttcttaatccaaaccaattaaaagatattgaatcgaccattcaaaagccaactaattggggtactggaggaataaagacaaaacttgttgcagcaagaatagccactgaaagtggtataaaagttcatcttgcagacggaagaaaaccagaaacattatctaatattcttcagggctctagaggtgggacggtatttcacccaagtccaaaacctataggaaatagaaaaagctggctggcacatgctttagatccagcgggagctatagaagtcgatgaaggtgcatgtaaagcaatccaaaataatggagcatcacttcttcttgtaggaataaggcaaatacatggtgagtttactgccaaccaaccagtcaaactaattaactcaaaagggaaagagttggctagaggtattagttcattaagtagtgattctctaggaaattcaattaataatccaacaaataataagaattcacctgttgtcattcatagagatgtcctagttttgacaagcgacctcttcacgtag

SEQ ID NO: 127660 - protein, 364 aa, Prochlorococcus marinus str. MIT 9211
MTLWVLKIGTSLLRGTEKLSTKKIIHNYCSCIAESKARGDQHIIVSSGAVGLGCIQLGFKDRPNNINDLQAAASVGQVHLMDLYQEYMATFGYKVAQILITRSDFSSRNCYRNASMTLKRLLDWGVLPIVNENDAIANEELLYGDNDTLSALVSTAINADQLVLLTDIDRLYSTDPKVSNEAKPITDVLNPNQLKDIESTIQKPTNWGTGGIKTKLVAARIATESGIKVHLADGRKPETLSNILQGSRGGTVFHPSPKPIGNRKSWLAHALDPAGAIEVDEGACKAIQNNGASLLLVGIRQIHGEFTANQPVKLINSKGKELARGISSLSSDSLGNSINNPTNNKNSPVVIHRDVLVLTSDLFT

SEQ ID NO: 127661 - DNA, 1134 bp, Erythrobacter sp. NAP1
  CDS (1)..(1134): transl_table=11
atgactatcgaagcactcctcgattttcgcgatgtgtccaaatgtccgacgctggtcataaagatcggctcggcgctcctcgtccatactgacgggacgccgcgtttcgactggctgcgcagcgtagcgcacgaaattgccggtgcgcgtgagcgggggcagaaagtgatcgtcgtggcatcgggctcggttgccttgggcgcagccatgcttgaattgcccggaggcggtcgcgatacgctcgcacatgcgcaggccgcagcctccgtcgggcaggtgtttctcgccagcacatgggcgcagatgtttgccgaacacaatctgatggccggccagatgctgctttcgcttgatgatcttgaaaatcgcggacgctatctcaacgcgcgagccactttgcgcgaactgcttgagcgcggtgcgatcccgatcatcaacgaaaacgacaccaccgcgacgcaagagatcaagttcggcgacaacgaccggctggcagcgcgcgtcgctcaggcggctggcgccaatggcgtgatcctgctgaccgatgtcgagggcctgtacaccgcgcatccaagcgagccgaatgcagaactgctcgaagaggttcgcggcgtcactccggaaatgcacgccatggccacaggcggctctgggtcgggcatggggtcgggcggcatgagctcgaaactgctcgccgctgaaatcgcggaacgtgcggggattgcgcttacgatcatcaagggcgtcgatgactaccccattggccgcgcgctgagcgctaacctgggaacagttttcctgcccaagcgcgatgacaacgcattcaagtcctggatcggtggaaggatgcgtttcaacggctcgctcaggatcgatgctggagcggtagaagcgctgcgcggaggcaagagcctgcttgctgcaggtgtgaccgacgtcttcggaaagttcgaacgcgcggacgtgatcgctatcgaagaccccgatggacgcatgattgccaagggtatggtcgaatacgattcgaaccaatgcgatgcgatcaagggtctgcgcagcgaacagctttccgaaaagctgggcacgatcccgcgctcagcggtgatccatcgcgatcagatggttctgttgtag

SEQ ID NO: 127662 - protein, 377 aa, Erythrobacter sp. NAP1
MTIEALLDFRDVSKCPTLVIKIGSALLVHTDGTPRFDWLRSVAHEIAGARERGQKVIVVASGSVALGAAMLELPGGGRDTLAHAQAAASVGQVFLASTWAQMFAEHNLMAGQMLLSLDDLENRGRYLNARATLRELLERGAIPIINENDTTATQEIKFGDNDRLAARVAQAAGANGVILLTDVEGLYTAHPSEPNAELLEEVRGVTPEMHAMATGGSGSGMGSGGMSSKLLAAEIAERAGIALTIIKGVDDYPIGRALSANLGTVFLPKRDDNAFKSWIGGRMRFNGSLRIDAGAVEALRGGKSLLAAGVTDVFGKFERADVIAIEDPDGRMIAKGMVEYDSNQCDAIKGLRSEQLSEKLGTIPRSAVIHRDQMVLL

SEQ ID NO: 127663 - DNA, 1110 bp, Synechococcus sp. RS9917
  CDS (1)..(1110): transl_table=11
atgacgctgcgggtggtgaaggtgggcaccagcctgctccgcggcgacgacggctcttccacctcagcggtgatcggctggctgacggatgcgctcgccgcgagcctgatccagggcgatcgcacggtgctcgtgagcagtggcgccgtaggcctgggctgccggcgcctggggttgagtcaccgccccgacaacgtggtcgccctgcaggcggccgcagccgtgggccaggggcacctgatgagtctctatgaagaagcgatggctcgccatggccagcccgtggcgcaggtgctgctcacccgctccgatctcgccgaccgccgcagctaccgcaccgcttcagccaccctgcaccagcttctcgactggggggtgctgccggtggtcaacgagaacgacaccgtgtcgtcagcggaattgcgcttcggcgacaacgacaccctctcagccctggtggcggcagcggtggaagccgatgagctgatcctgctcacggatgtggatcgtctctacaccgccgatccccgcaccgatgccaatgcccatccgatcacggatgtgcaccatcccgccgaactggcccgcctgcaggatggggccggcgatggcggccgctggggaaccggaggcatgaccaccaaactggcagcagcacggatcgccacggccagcggcatcaccgtgcacctggccgatggccggcagcccgaggtgctcaagaagctgctcagcggtggccggggtggcactgtgtttcatccccaccccgaaccgctgggcaaccgcaaaagctggcttgcccatgcccttcggccccagggggatctcaggctcgacaacggagcctgcaacgccctggaacaacgcggtgcctccctgctgctggtgggaatcaccgccgtgcaagggcactttgccgccaaccaaccgatccggctgctcgcagccgatggtcgggaagtggcacgggggttgagctcatggagcagcgaagcgcttcagcgggccctgacccaggccccagccaacgccagcggctcccccgttgtggtgcatcgcgatgccctcgtgctcaccacgcctacgatccgcccgcaggacacctga

SEQ ID NO: 127664 - protein, 369 aa, Synechococcus sp. RS9917
MTLRVVKVGTSLLRGDDGSSTSAVIGWLTDALAASLIQGDRTVLVSSGAVGLGCRRLGLSHRPDNVVALQAAAAVGQGHLMSLYEEAMARHGQPVAQVLLTRSDLADRRSYRTASATLHQLLDWGVLPVVNENDTVSSAELRFGDNDTLSALVAAAVEADELILLTDVDRLYTADPRTDANAHPITDVHHPAELARLQDGAGDGGRWGTGGMTTKLAAARIATASGITVHLADGRQPEVLKKLLSGGRGGTVFHPHPEPLGNRKSWLAHALRPQGDLRLDNGACNALEQRGASLLLVGITAVQGHFAANQPIRLLAADGREVARGLSSWSSEALQRALTQAPANASGSPVVVHRDALVLTTPTIRPQDT

SEQ ID NO: 127665 - DNA, 1110 bp, Synechococcus sp. WH 5701
  CDS (1)..(1110): transl_table=11
atgatcaaggtgggcaccagcctgctgcgcggcaccgcccagcgcgacaccgaagcggtgatcgccggcctggccgccagcctcagccggcggcgccagctgggggaggccatcgccctggtcaccagcggtgcggtgggcctgggctgccatgcccttgggtttgggcagcgccccgaggaggtggtggcccttcaggccgccgccgccgtgggccagggccggctgatgcgtctctacgaaacggccttcgcccagcacgacacttccgtggcccaggtgctgctcacccgcggcgacctggcctcccgccgccgctaccagaatgcctgccgcaccctggagcagctgctcagctggggcgtggtgcccgtggtcaacgagaacgacaccctcgccaccgacgaactgcgtttcggcgacaacgacaccctctcggccctggtggcggtggcgatcggcgccgatgagctggtgctgctcaccgatgtggatcggctctattcgggcgatccccgcagcgatgccagtgcccagccgatcgaggaagtgcgcgatctgctggagctggagcgcctcagcggcgtggcccagggcggcgggcgatggggaaccggcggcatgaccaccaagctggccgccgcccgcatcgccacctccagcgggattgccgtgcgcctggccgatggccgcgatccagcggtgctcgaagccctgctggccggcgagcgcctcggcaccctcttccggcccagccccagccccctgcccgaccgcaagggctggctggcccatgccctgctgcccaagggggagctgctgatcgaccccggcgccgagcgggccctgatcgagcggggggcctccctgctggcggtgggcatccgcgccgtcaacggggagttcgaacgccgggatgccgtacggcttctgtctctggaagggcgggagatcggccgcggcctctctgccctcagcagcgctgaggtggcccaggtgctggggctgagcagccaggcggccgagagcaccctggagcacggcgctggcgatgccgtggtccaccgcgaccacctggtgctcaccgcgccggcggcagtcccgggctga

SEQ ID NO: 127666 - protein, 369 aa, Synechococcus sp. WH 5701
MIKVGTSLLRGTAQRDTEAVIAGLAASLSRRRQLGEAIALVTSGAVGLGCHALGFGQRPEEVVALQAAAAVGQGRLMRLYETAFAQHDTSVAQVLLTRGDLASRRRYQNACRTLEQLLSWGVVPVVNENDTLATDELRFGDNDTLSALVAVAIGADELVLLTDVDRLYSGDPRSDASAQPIEEVRDLLELERLSGVAQGGGRWGTGGMTTKLAAARIATSSGIAVRLADGRDPAVLEALLAGERLGTLFRPSPSPLPDRKGWLAHALLPKGELLIDPGAERALIERGASLLAVGIRAVNGEFERRDAVRLLSLEGREIGRGLSALSSAEVAQVLGLSSQAAESTLEHGAGDAVVHRDHLVLTAPAAVPG

SEQ ID NO: 127667 - DNA, 1116 bp, Synechococcus sp. WH 7805
  CDS (1)..(1116): transl_table=11
atgaagctcagggttgtgaaggttgggaccagccttctgagggaacgacctggtgcaacaacagctgatgccattgcgctcttggccagcagtttggcggacagcatgcaacacggtgacaaggttgttctcgtgacctcaggagctgtcggactggggtgtcaacgcctcgggatgtcaaatcggccgacaagcgtcagcggcctgcaagccgctgcagccatcggtcaggggcatctgatgagcctttatgaggaagccttgtcgcaccgatccattcctgtggcgcaggtgcttctgacgcgctcggatctggctgaccgccggagctaccacaacgcgtcagcgaccctgcaccaattgctgcagtggggtgttcttccagttgtcaatgaaaacgacacggtgtcgtctgccgaattgcgcttcggcgacaacgacaccctctcggcactggtggcatcagccgtgggcgccgatgaactgatcctgctcactgacgtggaccgtctctacaccgctgatccacgctctgacagggaagcaacaccaatcactgatgtgcatcatccctctgaaatcgcccaactggaagagggcgccggtgacggtggccgctgggggaccggtgggatgaccaccaaactggcagccgcacgcatcgcaacagccagcggcatcacagtccatctgggagacggacgcgaccccaaaggactgcgccagatccttcagggagggcggggcggaacggtcttccatccccaccccgaacccctgggcaaccgcaaaagctggctggtccacgctctccaacccactgggagtctgtccatcgacagcggtgcctgcagggccgtgaagcaacgaggtgcatccctccttctggtgggaatcaccggtattgagggtcagttcagcgccaatcaggccgtgcgcgtgctggaccctgatgggctggagattgcccgcggcctgacatcgattgacagtgaacaactctcgtcaagcatgaatcaatcatccagaccaagaaccatcggaggctcccccgttgtgattcaccgcgacgccatggtgctgatcacacctacgatccgccagccagcctcctga

SEQ ID NO: 127668 - protein, 371 aa, Synechococcus sp. WH 7805
MKLRVVKVGTSLLRERPGATTADAIALLASSLADSMQHGDKVVLVTSGAVGLGCQRLGMSNRPTSVSGLQAAAAIGQGHLMSLYEEALSHRSIPVAQVLLTRSDLADRRSYHNASATLHQLLQWGVLPVVNENDTVSSAELRFGDNDTLSALVASAVGADELILLTDVDRLYTADPRSDREATPITDVHHPSEIAQLEEGAGDGGRWGTGGMTTKLAAARIATASGITVHLGDGRDPKGLRQILQGGRGGTVFHPHPEPLGNRKSWLVHALQPTGSLSIDSGACRAVKQRGASLLLVGITGIEGQFSANQAVRVLDPDGLEIARGLTSIDSEQLSSSMNQSSRPRTIGGSPVVIHRDAMVLITPTIRQPAS

SEQ ID NO: 127669 - DNA, 1104 bp, Pseudoalteromonas tunicata D2
  CDS (1)..(1104): transl_table=11
atgtcaattacacaaaaacaacgtttagtcattaaagtcggcagcgctcttattgcacccaccgcctgtggttgcagtgaaaaataccttaaaaacattgctgattttattcatcgcattcgccaacaaggtcagcaggtcgttttagtatcatcaggctcagtcgctgcaggacgttatttatttaacaatcaacaaccgaatttggcacttaaaaaagcaatggctgctgcgggccaaactgaaatgatggcaatgtgggataagctattgggtttaccggtggcgcaaattttattgacccatgctgatttatgtaatcgtgaacgttatatcagcgtaaaagataccatcgaatctttactcgacaacggcattatgccgatagtaaacgaaaacgataccgtgacatcagaagaacttaaagtaggtgacaacgacaacttagctgcaatgacagcagcggcggttgatgcagatgccttattaatttgcactgatgttgatggtctctatgataaaaacccgcataagtttagtgacgcacaattacttaaagatgtaacgcgcatcacgcctgacatttttgcgatggcgggtggagccattagtgcaaccggcaccggtggtatgcaaactaaaattgaagctgcccaaaaggcaaccgcacaaggtatcgatacctatattattaatggcttcaaagcccaatcttttcattatttacttgagggccaaaatccaggtactcattttgtcgcctgcgaaagcccactctcaccgagtcaacattggatgacacacaccacaaaagaatgtggtgaagtgattatcgatgaacataaagaccattttgcacaaaacagcccagttattaccagtgatgacattgttgaggtcaaaggtgagttttcggttggtgataccattttacttagaagttgtgatggcacgcgcatggccaaagccactgccaattacagcagttgcttactcaattatgttaaacagcaacccagcatcccggaactcgtgggctcattgcatccacaacataattcaattatttctaaaaaacattttgccctattggagaacgtatga

SEQ ID NO: 127670 - protein, 367 aa, Pseudoalteromonas tunicata D2
MSITQKQRLVIKVGSALIAPTACGCSEKYLKNIADFIHRIRQQGQQVVLVSSGSVAAGRYLFNNQQPNLALKKAMAAAGQTEMMAMWDKLLGLPVAQILLTHADLCNRERYISVKDTIESLLDNGIMPIVNENDTVTSEELKVGDNDNLAAMTAAAVDADALLICTDVDGLYDKNPHKFSDAQLLKDVTRITPDIFAMAGGAISATGTGGMQTKIEAAQKATAQGIDTYIINGFKAQSFHYLLEGQNPGTHFVACESPLSPSQHWMTHTTKECGEVIIDEHKDHFAQNSPVITSDDIVEVKGEFSVGDTILLRSCDGTRMAKATANYSSCLLNYVKQQPSIPELVGSLHPQHNSIISKKHFALLENV

SEQ ID NO: 127671 - DNA, 1113 bp, Pseudoalteromonas tunicata D2
  CDS (1)..(1113): transl_table=11
atgagcgtcagtaaaaccatagtggttaagcttggcacaagtgtgctaacaggtggcagttatacgttagataaagcgcatatggtggagttagtccgccaatgtgcacaattaaggcaacaaggtcacaaagtgattttggtttcaagtggcgcggtggcggcgggtaaagagcacttacacatgagctgcgacttaaacaatttagccaataaacaaatgttggcggcggttggccaatcgcaacttattttaacatggcaaaccttatttaatatttatggtattcatgtcgggcaaatgctgctgactcgcgccgacttagaagaccgagagcgctacttaaatgcgcgcgataccctgcacgccttattaaaacaccatattgtgccgatcattaatgaaaatgatgccgtagccaccgccgaaataaaagtgggtgataacgataatttatcggccttaaccgctattttggctcaagccgatcagttactgttattaactgatcagcccggattatttactgcagatccgcgctcaaatcctgatgcaacccttattactgaagtgaataaaattgatgataatttacgcgcacttgctggtggcagtggtacaaatttaggcacaggtggcatggccactaagttacaagcggccgatgccgcacgccgtgcaggtattgaaaccatcattgcagcagggcacagacccaacgttattattgatacggttaatcaaacaggtgttggcacgcgttttaaagcactcgaatcggcgattgaagggcgaaaacgttggttgcttgcagggccttcaagcagcggtaagcttgtactcgatgctggggcaacggatgccattgtactgcaaggttccagtttattagccaaaggcgtgaagcaagttaaaggcttgtttgagcgtggcgatttagttgagttggtgacagtacaaggtgaagtcattgccaaaggtatttgccgctatagcagcatcgatttagataaaataaaaaccttacattcagagcaaatcaaagccgttttagggtttgataatggcaaagtggtgatccaccgcgatgacttagtgttgctggatgattaa

SEQ ID NO: 127672 - protein, 370 aa, Pseudoalteromonas tunicata D2
MSVSKTIVVKLGTSVLTGGSYTLDKAHMVELVRQCAQLRQQGHKVILVSSGAVAAGKEHLHMSCDLNNLANKQMLAAVGQSQLILTWQTLFNIYGIHVGQMLLTRADLEDRERYLNARDTLHALLKHHIVPIINENDAVATAEIKVGDNDNLSALTAILAQADQLLLLTDQPGLFTADPRSNPDATLITEVNKIDDNLRALAGGSGTNLGTGGMATKLQAADAARRAGIETIIAAGHRPNVIIDTVNQTGVGTRFKALESAIEGRKRWLLAGPSSSGKLVLDAGATDAIVLQGSSLLAKGVKQVKGLFERGDLVELVTVQGEVIAKGICRYSSIDLDKIKTLHSEQIKAVLGFDNGKVVIHRDDLVLLDD

SEQ ID NO: 127673 - DNA, 1155 bp, Photobacterium sp. SKA34
  CDS (1)..(1155): transl_table=11
atggcagataccaaaaatactaatgctcgagagcaagaccttgcagcatctgctgcatcacaaacaattgttgttaagttgggcaccagtgttctcactggcgggacgctgaagctagatcgcgcccacatggttgagcttgttcgtcaatgtgcgatgcttcgtcgtcaaggacataaaattattattgtcacatctggtgcaattgcagcaggacgtgagcatttaggttaccccgaactgcccaaaacaatggcgagtaagcaattactggcagctgttggtcaaggtcgattaattcaagagtgggaaagcttatttggtatctatgggatcaatattggtcaaatgctattaacgcgtgcagatttacacgatcgtgaacgttatttaaatgcgcgtgatatgttagtcgccttactggataacggcattgttcctgttgtaaatgaaaatgatgcggtagcgacaacagaaattaaagtgggtgataacgataacttatccgcacttgtcggtattttaggcggcgcagataaattattactgatgaccgatcagactggtttatttactgccgatccacgtaataatcctgacgcagagcttatccgcgaagtacatacaattgatgaaacactgcgtaaattagcaggtggtactgttggtggtttaggtactggcggtatggctacaaaactacaggcagctgatgtggctcgtcgagctggtatcgaagtgatcattgctgctggtcgtcgtcctgatgtaatcattgatttagcggaaggtaaatctgtcggtacgcgtttcttaccactggaatcaccattagaaagccgtaagcgttggattttagctgggcctcctcctgcaggtgacattgttattgacgatggtgctgtcattgcagtgcaacaacgtgggagtagtttacttgcaaaagggatcaccatggtaaaaggtgattttgaacgcggtgaagttgtgcgtatctttgataaacaaaataccctattagcacgtggtatttgccgctactcgagtgtagatatggcaaaaattgcaggaaagcatagtcaagaaattcaccttgtgttggggtacgaatatggtcatgtggctatccatcgtgatgatatggtagttatttaa

SEQ ID NO: 127674 - protein, 384 aa, Photobacterium sp. SKA34
MADTKNTNAREQDLAASAASQTIVVKLGTSVLTGGTLKLDRAHMVELVRQCAMLRRQGHKIIIVTSGAIAAGREHLGYPELPKTMASKQLLAAVGQGRLIQEWESLFGIYGINIGQMLLTRADLHDRERYLNARDMLVALLDNGIVPVVNENDAVATTEIKVGDNDNLSALVGILGGADKLLLMTDQTGLFTADPRNNPDAELIREVHTIDETLRKLAGGTVGGLGTGGMATKLQAADVARRAGIEVIIAAGRRPDVIIDLAEGKSVGTRFLPLESPLESRKRWILAGPPPAGDIVIDDGAVIAVQQRGSSLLAKGITMVKGDFERGEVVRIFDKQNTLLARGICRYSSVDMAKIAGKHSQEIHLVLGYEYGHVAIHRDDMVVI

SEQ ID NO: 127675 - DNA, 1125 bp, Oceanospirillum sp. MED92
  CDS (1)..(1125): transl_table=11
atggctataggaagggaaaagcttaagcgcagtaagcgttgggtgattaagatcggcagtgcgctgttaaccaatgatggtcagggccttgatcttgaggcgatcagtcgctgggttgatcagatcgcagcacttaaggcgtcgggtcttgaggttgttttggtctcttctggttctgtcgcggaagggatgacgcgtcttggttgggattctcgaccccatgaagtgtctaaattgcaggctgcagctgcggtaggtcaaatgggtctggtgcaggcttatgaggcgaacttccgtcgtcatgaaacgcatacggcgcaaatacttcttacccatgaagatcactctaaccgtaagcgctatctgaatgctcaggcgacgttaaaagagttgctggcactcggtgttgtccctgttgttaatgagaatgatacggttgtaacgaaagagatccgtttcggggataacgatacgcttggggccttggtagctaatttggtgcaggcggatgcgttgatccttctgactgaccaaaagggcttgtttacggcggatccgaggtatgatcctggcgcgatattaatctctgaggcgagagctggagatgaagcgctagaagcgatggcgggggatggcggaaagctgggtcgtggtggtatggcgaccaaagtgcgtgctgctaagttggcggcgcgttccggcgcggtgactgtgattgccagtggtcgtgaagatgatgtgttgttgaggctgcgtgagtcggagcaactaggcaccttgcttgtgcctgaaaaagagccgatggttgcacgtaagcagtggattgccgggcaccttcaggcgcgaggaacattggtgcttgatgagggggcggttaaagcgcttcgtgatcgtggtaaaagtttgcttcctgcgggtgtgcggagcatcagtggtgatttctctcgtggtgagatggtgattatcagtgatgagtatggccgaatcgtagcgcgtggtctggtgaattatggcgtcgaggatgctcagcggatcatgggtaaggctagccgggatatcgagtcagtattgggctttatgggtgaagaagagttagtgcacagagataatcttgtgttggcttaa

SEQ ID NO: 127676 - protein, 374 aa, Oceanospirillum sp. MED92
MAIGREKLKRSKRWVIKIGSALLTNDGQGLDLEAISRWVDQIAALKASGLEVVLVSSGSVAEGMTRLGWDSRPHEVSKLQAAAAVGQMGLVQAYEANFRRHETHTAQILLTHEDHSNRKRYLNAQATLKELLALGVVPVVNENDTVVTKEIRFGDNDTLGALVANLVQADALILLTDQKGLFTADPRYDPGAILISEARAGDEALEAMAGDGGKLGRGGMATKVRAAKLAARSGAVTVIASGREDDVLLRLRESEQLGTLLVPEKEPMVARKQWIAGHLQARGTLVLDEGAVKALRDRGKSLLPAGVRSISGDFSRGEMVIISDEYGRIVARGLVNYGVEDAQRIMGKASRDIESVLGFMGEEELVHRDNLVLA

SEQ ID NO: 127677 - DNA, 1122 bp, gamma proteobacterium HTCC2207
  CDS (1)..(1122): transl_table=11
atgacaagaacaatcacccaagatgcacagcgcctagtcgttaagattggcagtgcgttgctgaccaataacggcgcaggcctggatcgcgacgccatcgacggctgggtggagcaaatcgctcagctattggctcagggtaaagaaattgttttggtctcctcagggtcaattgccgaaggcatagtgcgacttggctggaaaacccgtcccgagagcattcatgagcttcaagccgctgccgcagtaggccagatgggcctgatccaaacctatgagagtagctttaagcgctttgatcgactcactgcacagatacttctagaccatgacgacctagccaatcgccagcgctacctcaatgcgcgcagcgcactgcagacactaatccagttaaatgtcgtgcccatagtcaacgagaatgacaccgtagtcaccgacgaaattcgctttggtgacaatgacagcctagctgcattggtggccaacctgatcgatgcagacctgctagtgatcctcactgacaaagacggtctctacagtgccaatcccgacctagatccgcacgctcagctgatcagcgaagccatggccgacgatagcgctctcgatgccttagcggggggcagcaacagtgcccttggtcgtggcggcatgataaccaaattgcaggccgctaggctggcggcacgctctggttgcaatacgataattgttggtggccgcaacagcggtatattaacagcagtctctgaaggtgccgaagttggaacattactgaccgcctctcagcaacccttggccgcacgtaaacagtggctggcggggcagcttcaagtaaaaggccagctggtgttagatgccggtgcaattaaagttctgcaacagcagggtcgtagcttactggccgttggtgtgactcaggtcaaagggcaatttacccgtggcgaattggtaagctgcatggatgctaatggtcaggaaattgcccgtgggttggtgaattataactctgatgaggcaacccgtattcagggacagagcactgagcgcatagccgaaattctcgggtatcgtgaagatgatgagcttatccatcgcgacaatatggttgttagctag

SEQ ID NO: 127678 - protein, 373 aa, gamma proteobacterium HTCC2207
MTRTITQDAQRLVVKIGSALLTNNGAGLDRDAIDGWVEQIAQLLAQGKEIVLVSSGSIAEGIVRLGWKTRPESIHELQAAAAVGQMGLIQTYESSFKRFDRLTAQILLDHDDLANRQRYLNARSALQTLIQLNVVPIVNENDTVVTDEIRFGDNDSLAALVANLIDADLLVILTDKDGLYSANPDLDPHAQLISEAMADDSALDALAGGSNSALGRGGMITKLQAARLAARSGCNTIIVGGRNSGILTAVSEGAEVGTLLTASQQPLAARKQWLAGQLQVKGQLVLDAGAIKVLQQQGRSLLAVGVTQVKGQFTRGELVSCMDANGQEIARGLVNYNSDEATRIQGQSTERIAEILGYREDDELIHRDNMVVS

SEQ ID NO: 127679 - DNA, 1188 bp, delta proteobacterium MLMS-1
  CDS (1)..(1188): transl_table=11
atgaagcagcaagcgaccgccacagcagcaaacgccaccgggcatacggaagccgttgccgaccgccggccttaccttgagcgggcccggcggctggtggtcaagatcggctcggcggtgctgaccaccgccgacggcctggattttacggtcctggaccacctggtggagcagatcgagcagttgcgggcccggggttgcgaagtgctggtggtcagctccggggcggtggcggcggggcggcgcaagctggccctgggcgatcgcgggctgaccctgcgggagaagcaggcggcggcggccattggccagagcagcctgatgcgggcctacgagaaatcctttgaagcccatggcagcaaggtcgcccaggtcctgctgacccatgatgtcttctcccgccgggatcgttacttaaacgcccgtaacaccctttttaccctgttgcaatggcaactggtgccgatcatcaacgaaaacgacgcggtggcggtggaggagttgcgctttggcgacaacgacaccctgggaggcatggttgccaacctggtcgaagccgatctgctgatctgcttaagcgatgtcgacgccctctataccgccgatcccggccgggagccgacggcccggccgctgcgcaccgtcaaacggatcaacgccgagatcgaagccatggccggcggcgcgggcagcaaagtgggcaccggtgggatgctgagcaaactcaaggcggccaagatggtgacctcccggggcggggcggcactgatcgggccgggccgggaggccgatgtcctgccgcgcctgctggccggggcagagttgggcagctttttcccgccggcggcccaccgcctgcccagccgtaagcactggatcgcccataccctgcgccccaaaggttttctggtgctggacgccggggcctgccgggccattgaacggggagggcgcagcctgttgccgtcgggggtggtcgaggtgcggggccatttcggtatcggtgacgcggtccactgcctggatgacgcgggccgggccgtggccgccggcctggtctcctatgaagcccaggccctgcagcgcatcaaaggggtgaaaagttcggccattgccgatatcctgggctacaaggatgccgacgaagtgatccatcgtgataacctggtattgatcgggcagcaatag

SEQ ID NO: 127680 - protein, 395 aa, delta proteobacterium MLMS-1
MKQQATATAANATGHTEAVADRRPYLERARRLVVKIGSAVLTTADGLDFTVLDHLVEQIEQLRARGCEVLVVSSGAVAAGRRKLALGDRGLTLREKQAAAAIGQSSLMRAYEKSFEAHGSKVAQVLLTHDVFSRRDRYLNARNTLFTLLQWQLVPIINENDAVAVEELRFGDNDTLGGMVANLVEADLLICLSDVDALYTADPGREPTARPLRTVKRINAEIEAMAGGAGSKVGTGGMLSKLKAAKMVTSRGGAALIGPGREADVLPRLLAGAELGSFFPPAAHRLPSRKHWIAHTLRPKGFLVLDAGACRAIERGGRSLLPSGVVEVRGHFGIGDAVHCLDDAGRAVAAGLVSYEAQALQRIKGVKSSAIADILGYKDADEVIHRDNLVLIGQQ

SEQ ID NO: 127681 - DNA, 1119 bp, Oceanobacter sp. RED65
  CDS (1)..(1119): transl_table=11
atgagccgtcaatctgttgcgaacgcaaagcgcattgttattaaaattggtagtgcgcttttaaccaatgacggcgccggcttaaataaagcaggcatcgccaactgggtggaccaaattgctgaactcaaggcccagggaaaagaaataatccttgtatcttctggctctgtggcagaaggtatgacacgcttgggatggtctgaacggcctaccgccttacatgaattacaagccgctgcagctgttggccaaatgggtttggttcaatgttatgaaagtaatttctctcgccatcagtatgtcaccgcacaagtactattgactcacgctgacctcagcaaccgaacacgctatcttaatgcgcgttctgccattacgtcgctgttatcgtttggagttgtgcctatcattaatgaaaacgatacggtaatcaccgatgagattcgttttggcgataatgatacgctcggggctttagtcgccaatttgatagaggctgatgcgctgatcattttgacagaccaggacggactctataccgcggatcctcgcaaagataaaaacgccaagctcattgagcaagctcgcgctgaagatccagatattgaagccgtagctggcggtggcggcaagttggggcgtggcggtatgacgacaaaagtgcgcgctgcaaaattggcggctcgttctggttgttttactgtgatagtgggtggtcgtattgaaaacgtcattacgcgcttaaataaagatgaagttttgggtacgcttttgtgtagtgatcaagagcccatggcggcgcgcaagcagtggcttgccggtcacttacaaacccgaggtcaaattacattggacccaggagcagttagagccgtgattgaacagggtagaagcttgctatcagtgggcgtggttcatgtggacggaaattttgggcgcggtgaagtagttgcttgtattaatgagcaaggtcaaatcattgcgaaaggtttgatcaattataacgcccttgaaacgcagaaaatcatgggtaaagaaagtaaagaaatcctcgatattcttggttacatggatgaacccgagttgattcaccgagataacttggttttagtataa

SEQ ID NO: 127682 - protein, 372 aa, Oceanobacter sp. RED65
MSRQSVANAKRIVIKIGSALLTNDGAGLNKAGIANWVDQIAELKAQGKEIILVSSGSVAEGMTRLGWSERPTALHELQAAAAVGQMGLVQCYESNFSRHQYVTAQVLLTHADLSNRTRYLNARSAITSLLSFGVVPIINENDTVITDEIRFGDNDTLGALVANLIEADALIILTDQDGLYTADPRKDKNAKLIEQARAEDPDIEAVAGGGGKLGRGGMTTKVRAAKLAARSGCFTVIVGGRIENVITRLNKDEVLGTLLCSDQEPMAARKQWLAGHLQTRGQITLDPGAVRAVIEQGRSLLSVGVVHVDGNFGRGEVVACINEQGQIIAKGLINYNALETQKIMGKESKEILDILGYMDEPELIHRDNLVLV

SEQ ID NO: 127683 - DNA, 1131 bp, Streptococcus pneumoniae TIGR4
  CDS (1)..(1131): transl_table=11
atgaataatcggagtgagactatgaaatacaaacggattgtctttaaggtgggtacttcttctctgacaaatgaggatggaagtttatcacgtagtaaggtaaaggatattacccagcagttggctatgctgcacgaggctggtcatgagttgattttggtgtcttcaggtgccattgcggctggttttggagccttaggatttaaaaagcgtccgactaagattgctgataaacaggcttcagcagcggtagggcaggggcttttgttggaagaatatacaaccaatcttctcttgcgtcaaatcgtttctgcacaaatcttgctgacccaagatgactttgtggataagcgtcgttataaaaatgcccatcaggctttgtcggttttgctcaaccgtggggcaattcctatcatcaatgagaatgatagtgtcgttattgatgagctcaaggttggggacaatgacactctaagtgctcaagtagcggcgatggtccaagcagaccttttagttttcttgacagatgtggacggtctctatactggaaatcctaattcagatccaagagccaaacgcttggagagaatcgagaccatcaatcgtgagattattgatatggctggtggagctggttcgtcaaacggaactgggggtatgttaaccaaaatcaaggctgcaactatcgcgacggaatcaggagttcctgtttatatctgctcatccttgaaatcagattccatgattgaggcggcagaggagaccgaggatggttcttactttgttgctcaagagaaggggcttcgtacccagaaacaatggcttgccttctatgctcagagtcaaggttctatttgggttgataaaggggctgcggaagctctctctcaatatggaaagagtcttctcttatctggtatcgttgaagcagaaggagtcttttcttacggtgatatcgtgacagtatttgacaaggaaagtggaaaatcacttggaaaaggacgcgtgcaatttggagcatctgctttggaggatatgttgcgttctcaaaaagccaagggtgtcttgatttaccgtgacgactggatttccattactcctgaaatccaactactttttacagaattttag

SEQ ID NO: 127684 - protein, 376 aa, Streptococcus pneumoniae TIGR4
MNNRSETMKYKRIVFKVGTSSLTNEDGSLSRSKVKDITQQLAMLHEAGHELILVSSGAIAAGFGALGFKKRPTKIADKQASAAVGQGLLLEEYTTNLLLRQIVSAQILLTQDDFVDKRRYKNAHQALSVLLNRGAIPIINENDSVVIDELKVGDNDTLSAQVAAMVQADLLVFLTDVDGLYTGNPNSDPRAKRLERIETINREIIDMAGGAGSSNGTGGMLTKIKAATIATESGVPVYICSSLKSDSMIEAAEETEDGSYFVAQEKGLRTQKQWLAFYAQSQGSIWVDKGAAEALSQYGKSLLLSGIVEAEGVFSYGDIVTVFDKESGKSLGKGRVQFGASALEDMLRSQKAKGVLIYRDDWISITPEIQLLFTEF

SEQ ID NO: 127685 - DNA, 1125 bp, Synechococcus sp. RS9916
  CDS (1)..(1125): transl_table=11
atgaccctgcgggtggtgaaggtgggcaccagcctgctcagggggcagaagggtcagaccaccgccgacgtgatcgatcaactgaccaccgccctggccgagagccttgaccgtggtgatcgagctgttctggtgagcagtggtgcggttggtctgggctgccggcgtttgggacgggagaggcgtccggagggagtggttgggcttcaagccgctgcagcgatcgggcaggggcatctcatgggcatctacgaccaggccatggcacgccatggccgtgctgtagctcaggtcttgctgacccgttccgagatcgccgaccgccgcagctacaccagcgcatcagcgaccttgcaccagctgctcgattgggaggtgcttccgatcgtgaatgagaacgacacggtgtcgtcggccgaattgagattcggcgacaacgacaccctgtcagcccttgtggctgcagcagtgggggcagatgagctgattctgctgaccgatattgactcgctgtattccgccgatccccgggtggatgccacagccaaacccatcagtgatgtgcaccatcccgacgagctggctgaactggaggaaggcgctggagatggcggacgctggggcaccggtggcatgaccaccaaattggctgccgcaagaatcgccacggccagcggcatcacggtgcatctggccgacggtcgtcagccaggcgtcttggaagagctgctggatggcggacggggcggaacggtgttccacccccacccggaaccccttggcagtcgcaaaagttggctggcgcacgctctggaacccatgggcaatctccgcctggacgccggcgcatgccaggccctgcgcgagcggggagcctcactgttacttgttggagtgcaggccatcgaaggcagctttggcccgaaccaaccggtgaccctgatggaccctgatggtcaagaactcgcacgcggcctgagctccatgagcagtgaggacctggatcgcgcccttgctgcagcgactgatcaaagcgctgacaacaagaccaactcaccagtggtggtgcacagggatgtgctggtgatgacggccacgcctacgatccggccgcagcagctctga

SEQ ID NO: 127686 - protein, 374 aa, Synechococcus sp. RS9916
MTLRVVKVGTSLLRGQKGQTTADVIDQLTTALAESLDRGDRAVLVSSGAVGLGCRRLGRERRPEGVVGLQAAAAIGQGHLMGIYDQAMARHGRAVAQVLLTRSEIADRRSYTSASATLHQLLDWEVLPIVNENDTVSSAELRFGDNDTLSALVAAAVGADELILLTDIDSLYSADPRVDATAKPISDVHHPDELAELEEGAGDGGRWGTGGMTTKLAAARIATASGITVHLADGRQPGVLEELLDGGRGGTVFHPHPEPLGSRKSWLAHALEPMGNLRLDAGACQALRERGASLLLVGVQAIEGSFGPNQPVTLMDPDGQELARGLSSMSSEDLDRALAAATDQSADNKTNSPVVVHRDVLVMTATPTIRPQQL

SEQ ID NO: 127687 - DNA, 1140 bp, Vibrio sp. Ex25
  CDS (1)..(1140): transl_table=11
atgacaacgaatcaacaaaatgcagttgtttcacaaccacaaactgtcgttgtgaaactgggtacaagtgtgctgacaggcggcactctggcactcgaccgtgctcacatggttgagttagcgcgccagtgtgctgagcttaaaaaacaaggccattcagtggtaatggtttcgtctggtgctattgcagcaggtcgtgagcaccttggttaccccgcattgcccaacgagatggcgagtaaacaattacttgcggcggtgggtcaaagtcgcttgattcaaacatgggagtctttgtttggtatttacggcattaagattggtcaaatgctactaactcgtgctgatttagaagatcgcgagcgattcttaaacgcacgtgacaccatcaatgcgctcgttgcgaacgatattattcctatcgtaaacgaaaatgatgccgttgcgaccagcgagattaaagtgggcgataacgacaacctttccgctttggtgggcattttgtgtggcgcagataagctcttgcttttaactgaccaaaaaggtctgtttactgctgaccctcgtaaagacccgaacgcagagctgatcaaggaagtaaaaaccatcgacgatacgctgcgtaaaatcgcaggaggaagtggtacaacgttgggtacaggcggtatggcaacgaagctgcaagccgcagacatcgctcgccgcgctggtatcgaggttattattgctgccggtagtgcaccgaatgttatctttgactctttgagtgcagagccacaaggcacgcgcttcctaccttgcgctgaagctttagaaaaccgtaaacgctggattctggcgggacctgcggcatcgggcgacatcattattgatgatggtgcggtaaatgcagtggtcggtaagggcagtagcctacttgctaaaggggtaatcaaagtaagtggtgactttgcacgaggcgaagtggcgcgtgtaacaaattctcacggtaagttggtggctcgtggcatcagcgcctactcaagtgatgacctaactaaaattactggtaagcacagtaaagatatcatctctattttggggcatgattatggctctgaggtgattcatcgcgatgatttggtcgtcattcaggaatag

SEQ ID NO: 127688 - protein, 379 aa, Vibrio sp. Ex25
MTTNQQNAVVSQPQTVVVKLGTSVLTGGTLALDRAHMVELARQCAELKKQGHSVVMVSSGAIAAGREHLGYPALPNEMASKQLLAAVGQSRLIQTWESLFGIYGIKIGQMLLTRADLEDRERFLNARDTINALVANDIIPIVNENDAVATSEIKVGDNDNLSALVGILCGADKLLLLTDQKGLFTADPRKDPNAELIKEVKTIDDTLRKIAGGSGTTLGTGGMATKLQAADIARRAGIEVIIAAGSAPNVIFDSLSAEPQGTRFLPCAEALENRKRWILAGPAASGDIIIDDGAVNAVVGKGSSLLAKGVIKVSGDFARGEVARVTNSHGKLVARGISAYSSDDLTKITGKHSKDIISILGHDYGSEVIHRDDLVVIQE

SEQ ID NO: 127689 - DNA, 1107 bp, Alteromonadales bacterium TW-7
  CDS (1)..(1107)
atgcaaaagttaaattggcgacgcattgttttaaaagtaggtagcgcacttattgctccagatcaagacggttgtcgttctcgttacatacttactatcgcacagtttattgttcgttgtcgtgctcgcggcattgaggtcattttagtttcatcaggttctgttgcggcaggttcgcatctattcccttcggaccaaccccgttcagttgtattaaaaaaagcaatggccgccgctggtcaaactgaaatgattgctatgtgggaccgcttttttgattttccatctgcccaacttttgctaactcatggtgatttgcgcgaccgagagcgttatcaaagtattcgtgaaaccgtgtttacattattagagcatggtgttttacctatcattaatgaaaatgatgcggtaactaccgatgaccttaaagtaggtgacaacgataatttatcagcaatggttgcagcagcggctgatgcagacgctttactcattttttcagacgtagatggtttatacgataaaaacccaaatcttcatgacgatgctgttttattacctgaaataaaatcaattgatgattctatttacgccatggcaggatgtgctactagcgcggtaggtactggcggtatgaaaactaaaatagaagcggcagaaaaagcaacatcacacggaatcgcaacatatataattaatggttttaaagaagagacatttaatcgtttattagagggtgacaaccctggaacaatatttttaccatacgaaaaaccaatgcaagattcggtgcattggatgacacacactgcgaatgagcaaggtgaagttgtggtagatggaacatttgatgaatcaatcgaaggtgaaacaggcataattcgcggcgatgaaattgttgaagtacatggtgagtttgcaattggcgacaccatactcgttagaagtgaagatggtacgcgtttagctaaagcgaccgcaaattacagtagttgtttgttgaatttcattgcagacaacgaacaaagtgaatttagtgaaaaaatgcaggattctattggacctgttatttcagaaaaagatatcgcattattggagaagtcatga

SEQ ID NO: 127690 - protein, 368 aa, Alteromonadales bacterium TW-7
MQKLNWRRIVLKVGSALIAPDQDGCRSRYILTIAQFIVRCRARGIEVILVSSGSVAAGSHLFPSDQPRSVVLKKAMAAAGQTEMIAMWDRFFDFPSAQLLLTHGDLRDRERYQSIRETVFTLLEHGVLPIINENDAVTTDDLKVGDNDNLSAMVAAAADADALLIFSDVDGLYDKNPNLHDDAVLLPEIKSIDDSIYAMAGCATSAVGTGGMKTKIEAAEKATSHGIATYIINGFKEETFNRLLEGDNPGTIFLPYEKPMQDSVHWMTHTANEQGEVVVDGTFDESIEGETGIIRGDEIVEVHGEFAIGDTILVRSEDGTRLAKATANYSSCLLNFIADNEQSEFSEKMQDSIGPVISEKDIALLEKS

SEQ ID NO: 127691 - DNA, 1104 bp, Alteromonadales bacterium TW-7
  CDS (1)..(1104)
atgcaaagggaacagataatagttgtaaagttaggtacgagcgtactaactggtggcaccaataaactagataaagcccatatggttgagttagttcgccaatgctgcgagcttaaaaagcaggggcatcaggttgttatggtatcgagcggcgccgtagctgcaggccgtgagcaactattaaaatcctgtggtacgagcttagtggataaacaaatgttagccgccattgggcagggccaacttattcatatatggcaaagtttgtttgccttgtatggtgtaaacgtagggcaaatgctgctaacacgcgctgatgttgatgtcagggagcgctacttaaacgcacgcgatacattaacggccttacttagttacaacgtggtgcctattataaatgaaaacgatgcggtggcgacgagcgaaataaaagtgggtgataacgataacctatcggccttggtggctatattagctaatgcagacaaattactattacttaccgatcaagacggcttgtttaccagcgatccgcgcaccaatgccgatgcaaagcttattgacgaagtaacccacataaacgatgagctgcgtcaacttgctggtggcagcggcacaaacttaggcactggcggtatggcaacaaagctgcaagcggctgatatagcaaggcgtgcaggcgttgaagtcattattgccaaaggcgctggcagcaacgttattttaaaatgcatgagcgagcaattaccgggtactcgctttttaaagttaacagcgcctaaagatggtcgcaaaaaatggttattagccgggcctaaaagcaatgggcaaatagcaatagacgcaggcgctattcgtgcgctgcaaaataatggggcaagtttattggccaaaggagtcacttgtgcctttggggattttgagcgtggtgatttaatagatttgattgatacaaataaccaagtaattgcgcgtggtttaacccgctttagtcgctcggaggttaataaaattaaaggcgcacattcaaaaaatattgcacagttacttagttatgacgctggggcagaagtattacatagggatgatttggtactactttaa

SEQ ID NO: 127692 - protein, 367 aa, Alteromonadales bacterium TW-7
MQREQIIVVKLGTSVLTGGTNKLDKAHMVELVRQCCELKKQGHQVVMVSSGAVAAGREQLLKSCGTSLVDKQMLAAIGQGQLIHIWQSLFALYGVNVGQMLLTRADVDVRERYLNARDTLTALLSYNVVPIINENDAVATSEIKVGDNDNLSALVAILANADKLLLLTDQDGLFTSDPRTNADAKLIDEVTHINDELRQLAGGSGTNLGTGGMATKLQAADIARRAGVEVIIAKGAGSNVILKCMSEQLPGTRFLKLTAPKDGRKKWLLAGPKSNGQIAIDAGAIRALQNNGASLLAKGVTCAFGDFERGDLIDLIDTNNQVIARGLTRFSRSEVNKIKGAHSKNIAQLLSYDAGAEVLHRDDLVLL

SEQ ID NO: 127693 - DNA, 1125 bp, marine gamma proteobacterium HTCC2143
  CDS (1)..(1125): transl_table=11
atgaccgcacgacaaaatttgcaacaaacccgacgatgggttgtgaaaataggcagcgctttgctgaccgctgatggcaagggtcttgactcgtccgccattgctgattggacgcgccaaatggcggagttgagagggcgtggtattgagttggtattggtgtcttctggcgctgttgccgagggtatgagccggttgggttggagtacccgtccgcacgctttgcatcatcttcaggctgccgctgccgttggtcaaatggggttggtgcaggcttatgagtcatgctttcaacaatttggcttgcataccgcacaagttcttttaggtcacgatgacatatcagctcgtgatcgttatcttaatgcccgtagtacactgacaacattgttggagttaggtgttgttcccgtggtgaatgaaaacgataccgttgtcaccgaagagatacggtttggcgacaacgataccctcgcggcattggtcgccaaccttatcgatgctgaagtgctggtgatcttaacggaccagcaggggttattcgatgccgacccaagaatcaatcctactgcaaagctggtgacagaggcgttggtgagtgatcctagccttgagagtatggcgggtggcagcagtggcgaactgggccaagggggaatgataaccaaggtgagagcatcaaagttggctgcgcgctctggcgctaatacggtgattgccagcggtaaggtcgacgatgtactgctgagtattgccgcgggccagtcggtagggaccttgttgactgccgagcaggcgccactaattgctcgtaaacagtggttggcgggcatgtctaatattaaaggtacggtacagttggatgatggcgccgttaaaatgctgcaacaggccggaaaaagtctgctgcctgttggtgttggagcggtgaccgggcattttgatcggggcgacttgatccgttgtatcgatagcaatggccaggaaattgcccgggggctggtaaactataagttcgatgaagtgaataaaattattggcaaaagcagtagtcagattgaaggcttgctgggctatcagggtgatgaggagttgatccaccgcgataatctggtattgatgtag

SEQ ID NO: 127694 - protein, 374 aa, marine gamma proteobacterium HTCC2143
MTARQNLQQTRRWVVKIGSALLTADGKGLDSSAIADWTRQMAELRGRGIELVLVSSGAVAEGMSRLGWSTRPHALHHLQAAAAVGQMGLVQAYESCFQQFGLHTAQVLLGHDDISARDRYLNARSTLTTLLELGVVPVVNENDTVVTEEIRFGDNDTLAALVANLIDAEVLVILTDQQGLFDADPRINPTAKLVTEALVSDPSLESMAGGSSGELGQGGMITKVRASKLAARSGANTVIASGKVDDVLLSIAAGQSVGTLLTAEQAPLIARKQWLAGMSNIKGTVQLDDGAVKMLQQAGKSLLPVGVGAVTGHFDRGDLIRCIDSNGQEIARGLVNYKFDEVNKIIGKSSSQIEGLLGYQGDEELIHRDNLVLM

SEQ ID NO: 127695 - DNA, 1128 bp, marine gamma proteobacterium HTCC2080
  CDS (1)..(1128): transl_table=11
ttgatcacagatgatcgccagattttactgactgcgcgccgttgggtcgtcaaagtgggtagtgctttattaaccgcagatggtcgtcgcctcgataaaggcgttattcatggtttggtgcagcagctgatcactttgcgagagcgaggctgcgaagtggtgctggtttccagcggtgccgtagcagcaggtgcggttcggctagggtttgaagatcgtccagaggacctccattcgttgcaggcggccgccgctgttggtcagtcagcgctgatccgcagttacgaggaggcactggctcctcagggcattaacacggctctcgttttgctgagccacgccgatattctcgcaagagaccgttacctcaatgctcgtggaacactggggcgcctgatcgatttgggcgttatcccggttgtgaacgaaaatgattcggtggtcaccgatgaaattcgcctcggtgataacgacaccttggcggcgttggtggcaaatttgatagacgccgatgtcctgctagtgctcaccgaccaggacgggctttgtgacgcaaatcctcgtgaaaatccagacgcggctgtaatttcggccgcggaggttgatgacccccgactggacacaatggttggtgaaggcggccagtttggacggggcggtatggttaccaaactcaatgctgctcgattggcagcgcgatcaggtgcggtaaccgtgattgctaatggtcgagtacccgaggtcattcccaaggtggccgcgggagagcaattaggcactctgctaagtactcggcatcggccgcaaagtgctcgtaagcagtggttagctagcttgcttcacattcaagggcgccttgtgcttgacgctggtgcggctgccgttgtggctgcgggggataagtcacttcttcccgtgggggttatttccgtagagggcgattttgtgcggggtgacctggtggcctgtgtggatgttgatgggcgccaaattgctcgaggtctagttaactacagtgccgaggaagcgcttcaattgcagggtaagccgtccaaggatatccccgttattctcggctatggtggcgacgcagagattattcatcgcgacaacatggtgagtgtatga

SEQ ID NO: 127696 - protein, 375 aa, marine gamma proteobacterium HTCC2080
MITDDRQILLTARRWVVKVGSALLTADGRRLDKGVIHGLVQQLITLRERGCEVVLVSSGAVAAGAVRLGFEDRPEDLHSLQAAAAVGQSALIRSYEEALAPQGINTALVLLSHADILARDRYLNARGTLGRLIDLGVIPVVNENDSVVTDEIRLGDNDTLAALVANLIDADVLLVLTDQDGLCDANPRENPDAAVISAAEVDDPRLDTMVGEGGQFGRGGMVTKLNAARLAARSGAVTVIANGRVPEVIPKVAAGEQLGTLLSTRHRPQSARKQWLASLLHIQGRLVLDAGAAAVVAAGDKSLLPVGVISVEGDFVRGDLVACVDVDGRQIARGLVNYSAEEALQLQGKPSKDIPVILGYGGDAEIIHRDNMVSV

SEQ ID NO: 127697 - DNA, 1119 bp, Pseudomonas putida GB-1
  CDS (1)..(1119): transl_table=11
atgcgaagcaaggtgacgggcgccaagcgctgggtcgtgaagattggcagtgctctgctgaccgccgatggcaagggcctcgaccgcggtgccatggccgtttgggtcgagcagatggtcgcgctgcgtgaggcaggcgtggagttggtactggtctcctccggggctgtggctgccggcatgagccagctgggctggaccacgcgaccgagcgcgatgaacgagctgcaggcggctgcctcgctcggccagatgcgcctggtgcaggcctgggagtcgagctttggcgaacacggcaagcacaccgcgcagatcctgctgacccatgacgacctgtccgaccgcaaacgttacctgaacgcccgcagcaccttgcgcaccttggtcgacctgggtgtggtgccggtgatcaacgaaaacgacaccgtggtcaccgatgaaatccgctttggcgacaacgacaccctcgcggcactggtggccaacctggtcgaggccgacctgctggtgatcctcaccgaccgcgatggcatgttcgacgccgacccgcgcaacaaccccgaagctcagctgatctacgaagcccgtgccgacgacccgtcgctggacgccgtggccggtggtaccgggggcgccctgggccgtggcggcatgcagaccaagctgcgcgctgcgcgcctggccgcccgttccggtgcccacaccatcatcatcggtggccgcatcgagcgcgtgctggatcgcctcaaggcgggtgagcgcctgggcaccctgttgtcgcccgagcgcggcatgctcgctgcgcgcaagcaatggctggccggccacctgcagacccgtggcaccctggtgctggatgccggtgccgtgcaggcactgcgccaggccaacaagagcctgttgccggtaggtgtgaagaccgtgcagggcagcttccgtcgtggcgagatggtggtgtgcgttggcccggacggtatcgaggtggcccgcggccttgccaactacagcgccctggaggcgcagaagatcattggccagccctcggacgcgatcgagtcgattcttggctacagcgccgagcctgagctggtacaccgcgacaatctggtgctggtatga

SEQ ID NO: 127698 - protein, 372 aa, Pseudomonas putida GB-1
MRSKVTGAKRWVVKIGSALLTADGKGLDRGAMAVWVEQMVALREAGVELVLVSSGAVAAGMSQLGWTTRPSAMNELQAAASLGQMRLVQAWESSFGEHGKHTAQILLTHDDLSDRKRYLNARSTLRTLVDLGVVPVINENDTVVTDEIRFGDNDTLAALVANLVEADLLVILTDRDGMFDADPRNNPEAQLIYEARADDPSLDAVAGGTGGALGRGGMQTKLRAARLAARSGAHTIIIGGRIERVLDRLKAGERLGTLLSPERGMLAARKQWLAGHLQTRGTLVLDAGAVQALRQANKSLLPVGVKTVQGSFRRGEMVVCVGPDGIEVARGLANYSALEAQKIIGQPSDAIESILGYSAEPELVHRDNLVLV

SEQ ID NO: 127699 - DNA, 1128 bp, Marinobacter sp. ELB17
  CDS (1)..(1128): transl_table=11
atgactgaacgcgcccagctgcaacaggcccgccgcctggtggtaaaaatcggaagtgctctgctaaccaacgacggtaaaggcctcgatgtgcctgctctgggctgctgggtagaccagatggcggcgctaatgcaagccggtgtcgagttggtggtggtgtcatccggcgctgttgccgagggcatgagccggttaggctggactcgccggccacagcaggcgcatgaattgcaggcagccgcggccgtagggcagatgggattggtacaaacctgggaggcacagttcaagcgccacggcatacacaccgcccagattcttctgacccacgacgacctgtctgatcgcaagcgttatctgaatggccgcagcaccctgcgggcgttattggagctgggcgtagtgccgatcgtgaacgagaacgatacggtggtgaccgatgaaatccgttttggtgataacgacaccctaggtgcgttggtggccaacgtggtcgaagctgacggcctgattatcctcacagatcagctgggtctgtttgataaagacccgcgcaaacacagcgacgcaacattggtgaacgagtgcttcgccagtaaccgcgacctggatgtcatggccggcagtagcgccggcgcgctgggtcgcgggggtatgcagactaagcttcgtgcggcgcggctagcagcacgctcaggagccttcacggtgattgtgggcgggcgcatcgacaatgttctgggccggctgcgcgaacgcgaagcgttgggtacgcttttattgccggagcagggccgtgtagcggctcgcaaacagtggctggccagtcacctgcaaacccgtggtgctttagtgattgatgatggcgcggcgcgggtgttgcgacagggtggtcgcagcttgctgcctgtaggcgttacccgtatcagtggtgaattccgccgcggcgagatggtggcgtgtctggatgagcagggtaacgaagtggctcgtggcctggtgaattacgacgccgctgctgcacgtttgattgctggccagtctagtgatcgcatcatggaattgctgggctttatgaccggtgaagagctgattcaccgcgacaacatggtgattgcctcttag

SEQ ID NO: 127700 - protein, 375 aa, Marinobacter sp. ELB17
MTERAQLQQARRLVVKIGSALLTNDGKGLDVPALGCWVDQMAALMQAGVELVVVSSGAVAEGMSRLGWTRRPQQAHELQAAAAVGQMGLVQTWEAQFKRHGIHTAQILLTHDDLSDRKRYLNGRSTLRALLELGVVPIVNENDTVVTDEIRFGDNDTLGALVANVVEADGLIILTDQLGLFDKDPRKHSDATLVNECFASNRDLDVMAGSSAGALGRGGMQTKLRAARLAARSGAFTVIVGGRIDNVLGRLREREALGTLLLPEQGRVAARKQWLASHLQTRGALVIDDGAARVLRQGGRSLLPVGVTRISGEFRRGEMVACLDEQGNEVARGLVNYDAAAARLIAGQSSDRIMELLGFMTGEELIHRDNMVIAS

SEQ ID NO: 127701 - DNA, 1128 bp, Cyanothece
  CDS (1)..(1128): transl_table=11
atgaaccactcccagactatcgttattaaaattggtacctctagtcttgctcaaccagagacaggaaaattagctttatcaactattgctgctcttgtggaaactttaacagaattacgacaattaggctacgatgttgttttagtttcatctggtgcagtgggagtgggttgtagtcgtttaaagttaacagaaagacccaaaaaaatagccaccaaacaagcgattgccgccgtaggacaaggccgattaattcgggtttatgatgacctttttaccgctttaaatcaacccattgctcaaattttgttaactcgtagagaattaatggaacggagttgttatgtcaatgctaaaaatacctttgatgcgctgtttgaattaggggttattcctattgttaatgaaaacgatacggtggctattgaagagttaaaatttggagataatgataccctttctgctttagtcgctagtttaattaatgccaattggttgtttattttaacggatgttgatcgactttattcagctgatcctcgcacttttcctgatgctaaacctatcaaagttgttaacagtttacaattagaccaattacaagttaaagcagggaataaaggatctcaatggggaacaggaggaatgtcaaccaaactcacagcagcaagactggctacatctgtaggggtgaccacggttatcacccacggaaaaaaaccagaaaacttattaaaaataattaatggagaagatattggcaccaaatttgaggcacaattaaagaatgataatgctcgaaaacgttggatcgcctatggtttattacctagaggaaaattgtatctcgataagggtgcagttaaagcgatttctcaaaaaggaaagtctttgttagcagcaggaattcttaaagtcgaaggcagttttgattcagcagatgcagttcaattgtgtgatgaaactggtcaagaaattgctagaggtattgttaattataatcaagaagagattaataaaataaaaggaaatcactccaatcaaattccagaattattagggtatgatggaggagggactattgtacatcgagataatttagttattaatggaacttttaaaaattaa

SEQ ID NO: 127702 - protein, 375 aa, Cyanothece
MNHSQTIVIKIGTSSLAQPETGKLALSTIAALVETLTELRQLGYDVVLVSSGAVGVGCSRLKLTERPKKIATKQAIAAVGQGRLIRVYDDLFTALNQPIAQILLTRRELMERSCYVNAKNTFDALFELGVIPIVNENDTVAIEELKFGDNDTLSALVASLINANWLFILTDVDRLYSADPRTFPDAKPIKVVNSLQLDQLQVKAGNKGSQWGTGGMSTKLTAARLATSVGVTTVITHGKKPENLLKIINGEDIGTKFEAQLKNDNARKRWIAYGLLPRGKLYLDKGAVKAISQKGKSLLAAGILKVEGSFDSADAVQLCDETGQEIARGIVNYNQEEINKIKGNHSNQIPELLGYDGGGTIVHRDNLVINGTFKN

SEQ ID NO: 127703 - DNA, 1143 bp, Candidatus Kuenenia stuttgartiensis
  CDS (1)..(1143): transl_table=11
atgaaagaaatatcagacatacggtacgaatacataaaagacacaaaaaagatcgttattaaaataggcaccggcgtgataactgacaatgcgggatatttggacaataaacagataaaagggttagccgaacaggtcgtagagttaaaaagaagaaattttaatgtaacggtggtaagttccggcgcaatcggatgcggtatgggcgagttggggttgcaaaagagacccggtacgcttcctgagctgcaggcggttgcgtccattggccaaagcaaattaataagcacgtatgatagtttttttaaatcgcatggatatcacgcagcacaaatcttatttacacgggaagatttcgaaaacaggaaaagatatttaaatacatgcaataccatccatacattattccgaatgaatgcgattcctgtagtaaacgagaatgatactatttcgaccgatgaaattgcctttggcgataatgacgaattgtccgcattagtaactaatcttattgacgcagacctgctggttattctctcttcagttgatgggttgtatgacaaacaacccgaaggagaaagccgggcgcatgttatccctgtagtggaacacattactcataaaaccaaacaaatggcttacaattccaagacgttgagaggggtgggggggatgcgtaccaagttggaagctgcatcaattgtgacgaatgccggtgaaaaagtgattattgccaacgggcgacatgaaaatgtgttgctaaagatttttcagtatgaggatatcgggacgttgtttcttccaaaaaatgaaaaactgacaagccgaaagcgatggatagggtattcaaagaaatcgaaaggcgttgtattcgttgatgaaggcgcctgttctgccctgtcgaagaaggggaagagccttcttgcatccggcattgtttcgattgaaggcggttttgagaaaggagatattgtttcgatttgtaaaggtgaaaatgatggcgtttttgcgagaggattaaccaattattcttctgaggagatagaaaaaatcaagggatgccgcgcctcttcgattcacaagattctgggctataaatcctatgatgaggttattcatcgggacaacctggttttgatttaa

SEQ ID NO: 127704 - protein, 380 aa, Candidatus Kuenenia stuttgartiensis
MKEISDIRYEYIKDTKKIVIKIGTGVITDNAGYLDNKQIKGLAEQVVELKRRNFNVTVVSSGAIGCGMGELGLQKRPGTLPELQAVASIGQSKLISTYDSFFKSHGYHAAQILFTREDFENRKRYLNTCNTIHTLFRMNAIPVVNENDTISTDEIAFGDNDELSALVTNLIDADLLVILSSVDGLYDKQPEGESRAHVIPVVEHITHKTKQMAYNSKTLRGVGGMRTKLEAASIVTNAGEKVIIANGRHENVLLKIFQYEDIGTLFLPKNEKLTSRKRWIGYSKKSKGVVFVDEGACSALSKKGKSLLASGIVSIEGGFEKGDIVSICKGENDGVFARGLTNYSSEEIEKIKGCRASSIHKILGYKSYDEVIHRDNLVLI

SEQ ID NO: 127705 - DNA, 1257 bp, Aspergillus oryzae
  CDS (1)..(1257)
atgcacatatttcaaagaatatcaactcatccttttccaacagggactagttccatagtagatgaaagcacccatgagccgatactttcgattctcactctgatagttgaagccgccgccaagcttcgccgggacggccataatgtcgttcttgtttcctcgggggctgttggtgtggggttgcggaggatggatgtggaagaaaggcccaagaatttgcctcgcattcaggcactcgcggctgttggacaatgcagactcatgagtctctgggatggtttattttcacaccttcgtttaccagtggctcagattctcttgactaggaacgacatagcagatagaacgcaatatgtcaacgcccaaaatactttttcacagctttttgatatgggcgtgatccctattgtcaatgaaaacgatactatagccgtttcggaaatcaaatttggtgataacgatacactgtcggccataacagccgccatggtcaaggccgactacctttttctgatgacggatgttgactgcctttatactgctaatccacgccacaacccaaatgcaagacccatcgaagttgtctcagatatatcctcgttggaagccgatgtgtcctcagctggatcctcccttgggactgggggtatgagcaccaaaattgttgctgcaaaattaggaactagcgctggcgtaacgacgattatcaccaagagctcgaaacctggaaacgttcatgagattgtaaaatatctccagcaggttaagcaagaagaacatacccatacaaccacaacaatgaatggaacagtcactgaagcaccccctctgcatacacgcttcctcccttctgaccatccggttcaatccaggacattctggctgctccacggtctgaagccccatggaaccatattcattgaccacggcgcatacagtgccctccagaagaaagccagtctcctaccagcgggtgttgtcggtgtggatggtcattttgcgcaacaggaggcagtacgtctagttgtagtacagagactctcccctgattcattgaatggcgattttctccaccacggccaggagcctaaagaggttgggcgtgcattggtcaactacggcagcctcgaaatcgagcgcatcaaagggcacaggagtactcaaattcagactttgcttggatacgcagatagtgaatatgtcgctcttcgagaaaatatctccttctttcaacaggacgatccttcatggcggtag

SEQ ID NO: 127706 - protein, 418 aa, Aspergillus oryzae
MHIFQRISTHPFPTGTSSIVDESTHEPILSILTLIVEAAAKLRRDGHNVVLVSSGAVGVGLRRMDVEERPKNLPRIQALAAVGQCRLMSLWDGLFSHLRLPVAQILLTRNDIADRTQYVNAQNTFSQLFDMGVIPIVNENDTIAVSEIKFGDNDTLSAITAAMVKADYLFLMTDVDCLYTANPRHNPNARPIEVVSDISSLEADVSSAGSSLGTGGMSTKIVAAKLGTSAGVTTIITKSSKPGNVHEIVKYLQQVKQEEHTHTTTTMNGTVTEAPPLHTRFLPSDHPVQSRTFWLLHGLKPHGTIFIDHGAYSALQKKASLLPAGVVGVDGHFAQQEAVRLVVVQRLSPDSLNGDFLHHGQEPKEVGRALVNYGSLEIERIKGHRSTQIQTLLGYADSEYVALRENISFFQQDDPSWR

SEQ ID NO: 127707 - DNA, 816 bp, Solanum lycopersicum
  CDS (1)..(816)
atgtcagaagtggttgatcaagcgccaatagctaagcagtggcggcgtgtcgtggttaaagtgggcacgagtagtattgtcgatgcggccggtgaaattaaatatcctgttattaaccggttagctcagaccttaacgcaactggaacaaaccggatatgaggtgattttagttacgtctggtgccattggcgtggcgctcaaacaaatgcatcaaacaaaacgcccaacagaaattccagcccagcaggccttagccgcgattggccaaagttatttgatggcgatttataatcaaagttttgcgttttatcagcaacacgtgggtcaagtcctgttgacttatgatgtgtttcataacaagcaaatgttacgccataccatcgatgccattgcggccatgttgcagcagcgtgtgattccaattattaacgaaaatgatgtgatcgctgtcgatgaattggatcatcaacattcatttggcgataatgaccgccttgccgccatggtaacgcatgagacgaatgctgatgcgctgattgtcttaagtgatatcgatgcgctgtataccgctaatccgcacgttgacccaacagcacaacccattccgttggtaactgcggtgacggatagtctacgcgccggtgcacggggatcgtcaacgcttgggacaggtgggatggctactaagttagtggcagccgattacttgttgcaacatgggcgacaaatggtactgattaatggtgaaaatccggccacaattttagaagtcttagcgggcgagccagttggcacattgtttaagggagagtaa

SEQ ID NO: 127708 - protein, 271 aa, Solanum lycopersicum
MSEVVDQAPIAKQWRRVVVKVGTSSIVDAAGEIKYPVINRLAQTLTQLEQTGYEVILVTSGAIGVALKQMHQTKRPTEIPAQQALAAIGQSYLMAIYNQSFAFYQQHVGQVLLTYDVFHNKQMLRHTIDAIAAMLQQRVIPIINENDVIAVDELDHQHSFGDNDRLAAMVTHETNADALIVLSDIDALYTANPHVDPTAQPIPLVTAVTDSLRAGARGSSTLGTGGMATKLVAADYLLQHGRQMVLINGENPATILEVLAGEPVGTLFKGE

SEQ ID NO: 127709 - DNA, 2259 bp, Medicago sativa
  CDS (1)..(2259)
atggcgaacgccgacccttgtagagaatttgtcaaagatgttaagcgcataatcatcaaggttggaactgctgttgttactcgccaagatggaagattagcagttggaaaattaggggcactctgtgagcagattaaggagctaaacattcttggttatgaagttattttggtttcatcaggtgctgttggcctcggtcgacaaaggcttagatacagaaaattgattcaaagcagttttgctgaccttcagaagccacaagttgaacttgatggcaaggcttgtgctgctgttggacaaagcagccttatggctacttatgatattttgtttagtcagctggatgtgacatctgctcagcttcttgttactgacaatgattttagagaccaagattttagaaagcaactttctgaaactgtgagatcacttctagcactaaaagttattccaatattcaacgagaacgacgcagtcagtactaggaaagctccatacgaggattcttctggcatattttgggataatgacagtttatcagctttgttggccttggaattaaaagcagatcttcttattttgttgagtgatgtagatggtctttataatggccctccaagtgatccactatcaaaacttattcacacatacatcaaggagaagcatcaaaatgaaattacttttggagacaagtctagggttggaagagggggaatgacagccaaagtaaaagcttctgttcatgctgctgatgccggaattcctgttatcattaccagtggtaatgcagctgaaaatctcactaaaattctccaaggacagcgtattggtaccctcttccataaagatgcacataagtgggtcccttcaaaagaggttgatgtacgcgagatggctgttgccgctagggactgttccagacggcttcaggtctctttaatatctgaacagttagaaaatgtctctcggatccctggatattaccaagcttcagtatatcgttcgttccaaaacatgctaatctccaatcttacgttacaggccgtgtcttcggaagaaaggaaacaaattttgctaaatatagctgatgcattgcaatcacgtgagaaagagatcaggattgaaaatgaagctgatgttgttgctgcacaagaagcaggatacgaaaaatccttggttgctaggctggttttaaagagtgagaagatcgtaggccttgccaacaacatacgaattattgcaaacatggaagatccgattggtcgagttttaaaacgaactgagcttgcagagggggttattttggagaaaacgtcatctcctttgggagttcttttaattattttcgagtctcgccctgatgcattggtacagatagcttccttggcaatacgaagtgggaatgggcttctcttgaaaggaggcaaggaggctaatcgatcaaatgccattttgcacaaagtaattactgaagccatacctgatactgttggttcaaaacttattggacttgtgacatcaagagctgaaatacctgagctacttaagctggatgatgtaattgatctggtgattccaagaggcagcaataaacttgtttctgatattaagagttcgacgaaaatccctgttctaggtcatgctgatgggatttgtcacgtctatgttgataaatctgctaatttggagatggctaagcagattgtactcgatgcaaaaacagattgtccatcaggatgcaatgccatggaaacacttcttgttcataaggatttggtagagaaaggctggctcaatagtattagtgacgatttgcggtcggaaggtgttactttatatggaggaccgaaagcaagttctctgttgaatgttccacttgctcgttcattacatcatgagtactgttcgttggcttgcaccttggaaatcgtggatgatgtttatgcagctattcatcatataaatctttatggaagtgcacataccgattccattgtcacagaagatcatgaagtagctgatgtatttcttcgtcaagtcgacagtgctgctgtttttcacaatgctagtacaagattcagcgatggagcacgatttggattaggcgcagaggttggaataagcacaagcaggattcatgctcggggtccagtaggagttgatggattgttaacaaccagatggcttctcaaaggaagtggacaagtagtagatggtgataaaacagttacctacacccacaaagacctaactacttga

SEQ ID NO: 127710 - protein, 752 aa, Medicago sativa; identical to SEQ ID NO: 21037

SEQ ID NO: 127711 - DNA, 2151 bp, Triticum aestivum
  CDS (1)..(2151)
atggccggcgccgaccccaaccggagcttcatgaaggacgtgaagcgcatcatcatcaaggtgggcactgcagttatcaccagaaatgatggaagactggctttgggcaggattggagccctgtgcgagcaggtcaaggatcttaatgctcaaggatatgaggtgattatggtcacctcgggcgctgtcggtgtggggcgacagcggctcaggtaccggaagcttgtcaatagcagctttgctgatctgcaaaagccacagatggagctggatggaaaggcgtgcgctgctgttggtcagagtgggctgatggcactctatgacatgttgtttacccaacttgatgtgtcatcatcacaacttcttgtgacagatagtgacttcgacaattcaaatttccgggagcgactccgcgaaactgtcgagtcattattagagcttagagttattccaatatttaatgaaaatgatgccatcagtacgaggaaggctccatacgaggattcatctggtatattctgggataatgacagtttggcaggtctactggcattggaactgaaagctgatctccttgttctgcttagtgatgtggatggcctctacagcggtccaccaagtgaaccttcatcaaagttaatacatacttatatcaaggaaaaacattatcatgaaattacttttggagacaagtcccgtgttggtagaggtggcatgacagctaaagtccaagctgctgtgtgggcttcaacgggtggtgtacctgttgttattacaagtggatgtgcatctcagagccttgttaaagttctccgtggggaaaaaattggtactctttttcataaaaatgcaagtttgtgggaaccatccaaggagaccagtgtccgtgaaatggctgttgctgcacgggattgttcaaggcgtctacagaatttgtcatcagaggagcgcaagaaaatattgttagatgttgcggatgctttagaggcaaatgaggatttaattagatccgagaatgaagcagatttagcagcagcacatgaggctgggtatgagagtgctttggtttctagattgactctgaaaccaggaaagatagcaagccttgccaaatctgttcgcactcttgcgaatatggaagaccctattaacgagatactgaaaaggacagaggttgctgatggtttagttcttgagaaaacatcttgccctttgggtgttctattgattatttttgagtcccgacctgatgccttagtccagattgcgtctttagccattcgaagtggtaatggtcttctcctaaaaggtggaaaagaagcaatgagatcaaacgcaatattgcataaggttataaccaatgctattcctgacaatgttggcgaaaaattgattggccttattacaactagagatgaaattgcggatttgctaaagcatgatgatgtcattgatcttgtcattccaagagggagtaataagcttgttgctcaaatcaaatcatcaacaaagattcctgttcttggccatgctgatggtgtttgtcatgtatatattgacaaatcagcagacatggatatggcaaaacgtattgtgatggatgcaaaaattgattacccagctgcctgcaacgcaatggagacgttgcttgttcataaagatcttatgaagactccagaactcaatgacatactagtagcactcaagacagcaggagttaatctttattgtgggcctgttgcgcataaagtattgggctacccaaaagcagattcattacatctggagtacagttctatggcttgcacagttgagatagttgatgatgtacaatcagcaattgaccatatacatcgctatggaagtgcacatacagactgtgtggtcactacagatgataaagtagcagagacctttctacgtcaagttgatagtgctgccgtattatacaacgcgagtacaagattctccgatggtgctcgttttggactcggtgctgaggttggcataagtacaggccgtatacatgcacgtggacctgtgggtgttgaaggtcttttaactacacgatggctcttacgagggaaagggcaagtggtgaatggtgacaaggatgttgagtacacccataagagccttcctttgcaatga

SEQ ID NO: 127712 - protein, 716 aa, Triticum aestivum; identical to SEQ ID NO: 21041

SEQ ID NO: 127713 - DNA, 2181 bp, Chorispora bungeana; identical to SEQ ID NO: 21042
  CDS (1)..(2181)

SEQ ID NO: 127714 - protein, 726 aa, Chorispora bungeana; identical to SEQ ID NO: 21043

SEQ ID NO: 127715 - DNA, 1131 bp, uncultured archaeon GZfos36D8
  CDS (1)..(1131): transl_table=11
atggcgggagttagggacatatcaaaagcgaaaaggattgtaataaaagttggaaccagcaaccttacggataagagctatcggcttgacccgcgaaaagtcgaaaaactcgctaaggagataattgaactgaaaaataagggtaaggaagtcattgtcgtaacgtcaggcgctatcggtgccggtatcggtaagctcgacctgaagcaaagaccccgcgacattaaagtattgcaggctacggctgccgtcggtcagaacatcctgatgagcacgtatgataaatattttgccaaatacgatcagactatcgctcaactcttattgacgcatgataatttctttaaccggcagaggtaccttaaccttagaaatacattgattacattgcttaagtctggtgtaatcccaataatcaacgagaacgataccgtagcagtggatgaaatcaaattaggtgataatgataatttatctgccctggtggcgagcagcctcggcgcggatttacttattatactgaccgacatagatggcttatacacttatgacccaaaaaggagcgaaaaagcggaattcatttcggttgtggaagatataacgccggagattgagcgaattgcctcgggcagaggaaagacaggtgtgggtggaatgaagacaaaagttcaggctgctgaagtcactatgaaagcaggtattccgatgatcattgcaaacggaggtgagaaaaacatcctctctcgggttatagcaggagaaccggtggggacgttattcatgcccaaaaagaaaagaatgaacgataaagagcactggattctattctccgcatcgccaaagggcaagattaaggtggatgaaggtgcaaaaaccgctctggtagaaggaggcggtagtttgcttccttccggtatcaccgacgttgaagatgaattcatgcgtggcgaccccgtgagcattattgactcccggagcgtggaattcgccagaggcattacaaactactcctccgcggaaataaaaaagattaaaggtgtgcaatcaaaagaaatcgagcaaattctgggtcgtaaagattacggatacggcgaagtagtagtttatagaggtaatctcgtgttgttataa

SEQ ID NO: 127716 - protein, 376 aa, uncultured archaeon GZfos36D8
MAGVRDISKAKRIVIKVGTSNLTDKSYRLDPRKVEKLAKEIIELKNKGKEVIVVTSGAIGAGIGKLDLKQRPRDIKVLQATAAVGQNILMSTYDKYFAKYDQTIAQLLLTHDNFFNRQRYLNLRNTLITLLKSGVIPIINENDTVAVDEIKLGDNDNLSALVASSLGADLLIILTDIDGLYTYDPKRSEKAEFISVVEDITPEIERIASGRGKTGVGGMKTKVQAAEVTMKAGIPMIIANGGEKNILSRVIAGEPVGTLFMPKKKRMNDKEHWILFSASPKGKIKVDEGAKTALVEGGGSLLPSGITDVEDEFMRGDPVSIIDSRSVEFARGITNYSSAEIKKIKGVQSKEIEQILGRKDYGYGEVVVYRGNLVLL

SEQ ID NO: 127717 - DNA, 1131 bp, uncultured archaeon GZfos32E4
  CDS (1)..(1131): transl_table=11
atggcgggagttagggacatatcaaaagcgaaaaggattgtaataaaagttggaaccagcaaccttacggatacgagctatcggcttgacccgcgaaaagttgaaaaactcgctaaggagataattgaactgaaaaatgagggtaaggaagtcattgttgtaacgtcaggcgctatcggtgccggtatcggtaagctcgatctgaagcaaagaccccgcgacattaaagtattgcaggctacggctgccgtcggtcagaacatcctgatgagcacgtatgaccggtattttgccaaatacgagcagactatcgctcaactcttattgacgcatgataatttctttaaccggcagaggtacctcaacctcagaaatacattgattacattgcttaagtctggtgtaatcccaataatcaacgagaacgacaccgtagcagtggatgaaatcaaattaggtgataatgataatttatctgccctggtagcgagcagcctcggtgcggatttacttattatactgaccgacatagatggcttgtacacttatgaccccaaaaggagcgaaaaagcggaattcatttcggttgtggaagatataacgccggagattgagcgaattgcctcgggcagaggaaagacaggtgtgggtggaatgaagacaaaagttcaggctgctgaagtcactatgaaagcaggtattccgatgatcattgcaaacggcggtgaggaaaacatcctctctcgggttatagcaggagaaccagtgggaacgttattcatgcccaaaaagaaaaggatgaacgataaagagcactggattctattctccgcatcgccaaagggcaagattaaggtggatgaaggtgcaaaaaccgctctggtagaaggaggcggtagtttgcttccttccggtatcaccgacgttgaagatgaattcatgcgtggcgaccccgtgagcattgttgacgcccggagcgtggaattcgccagaggcattacaaactactcctccgcggaaataaaaaagattaaaggtgtgcaatcaaaagaaatcgagcaaattctgggtcgtaaagattacggatacggcgaagtagtagtttatagaggtaatctcgtgttgttataa

SEQ ID NO: 127718 - protein, 376 aa, uncultured archaeon GZfos32E4
MAGVRDISKAKRIVIKVGTSNLTDTSYRLDPRKVEKLAKEIIELKNEGKEVIVVTSGAIGAGIGKLDLKQRPRDIKVLQATAAVGQNILMSTYDRYFAKYEQTIAQLLLTHDNFFNRQRYLNLRNTLITLLKSGVIPIINENDTVAVDEIKLGDNDNLSALVASSLGADLLIILTDIDGLYTYDPKRSEKAEFISVVEDITPEIERIASGRGKTGVGGMKTKVQAAEVTMKAGIPMIIANGGEENILSRVIAGEPVGTLFMPKKKRMNDKEHWILFSASPKGKIKVDEGAKTALVEGGGSLLPSGITDVEDEFMRGDPVSIVDARSVEFARGITNYSSAEIKKIKGVQSKEIEQILGRKDYGYGEVVVYRGNLVLL

SEQ ID NO: 127719 - DNA, 1131 bp, uncultured archaeon GZfos28G7
  CDS (1)..(1131): transl_table=11
atggcgggagttagggacatatcaaaagcgaaaaggattgtaataaaagttggaaccagcaaccttacggatacgagctatcggcttgacccgcgaaaagtcgaaaaactcgctaaggagataattgaactgaaaaatgagggtaaggaagtcattgttgtaacgtcaggcgctatcggtgccggtatcggtaagctcgatctgaagcaaagaccccgcgacattaaagtattgcaggctacggctgccgttggtcagaacatcctgatgagcacgtatgaccggtattttgccaaatacgagcagactatcgctcaactcttattgacgcatgataatttctttaaccgacagaggtaccttaaccttagaaatacattgattacattgcttaagtccggtgtaatcccaataatcaacgagaacgacaccgtagcagtggatgaaattaaattaggtgataatgataatttatctgccctggtggcgagcagcctcggcgcggatttactcattatactgaccgacatagatggcttatatacttatgacccaaaaaggagcgaaaaagcggaattcatttcggttgtggaagatataacgccggagattgagcgaattgcctcgggcagaggtaaaacaggtgtgggtggaatgaagacaaaagttcaggctgctgaagtcaccatgaaagcaggtattccaatggtcattgcaaacggcggtgaagaaaacatcctcaggcgggttatagcaggagaaccggtgggaacgttattcatgcccaaaaagaaaaggatgaacgataaagagcactggattctattctccgcatcgccaaagggcaagattaaggtggatgaaggtgcaaaaaccgctctggtagaaggaggcggtagtttgcttccttccggtatcaccgacgttgaagatgaattcatacgtggggaccccgtgagcattattgacgttcagagcgtggaattcgccagaggcattacaaactactcctccgcggaaattaaaaagattaaaggtgtgcaatcaaaagaaatcgagcaaattctgggtcgtaaaggttacggatacggcgaagtagtagtttatagaggtaatctcgtgttgttataa

SEQ ID NO: 127720 - protein, 376 aa, uncultured archaeon GZfos28G7
MAGVRDISKAKRIVIKVGTSNLTDTSYRLDPRKVEKLAKEIIELKNEGKEVIVVTSGAIGAGIGKLDLKQRPRDIKVLQATAAVGQNILMSTYDRYFAKYEQTIAQLLLTHDNFFNRQRYLNLRNTLITLLKSGVIPIINENDTVAVDEIKLGDNDNLSALVASSLGADLLIILTDIDGLYTYDPKRSEKAEFISVVEDITPEIERIASGRGKTGVGGMKTKVQAAEVTMKAGIPMVIANGGEENILRRVIAGEPVGTLFMPKKKRMNDKEHWILFSASPKGKIKVDEGAKTALVEGGGSLLPSGITDVEDEFIRGDPVSIIDVQSVEFARGITNYSSAEIKKIKGVQSKEIEQILGRKGYGYGEVVVYRGNLVLL

SEQ ID NO: 127721 - DNA, 1272 bp, Saccharomyces cerevisiae
  CDS (1)..(1272)
atgacaaaagcttatactatcgttatcaagctgggcagttcgtcgctcgtcgacgagagcacaaaagagccaaagttgtccatcatgacgttaatcgtcgagaccgtgacgaatcttaagcgcatgggccacaaagtgatcatcgtatccagcggcggcattgccgttggtttggacgctctcaacattccgcacaagcctaagcagttgtctgaagtgcaagcgattgccgctgtcggacaaggccgtctcatcgcgcgctggaacatgctgttttcccagtatggcgagcaaacagcgcagatcctgctcacgcgcaacgatatactgcgttggaaccagtacaatgacgcacgcaatacaatcaacgaactgctggccatgggtgtcatccctatagtcaacgaaaacgatacgctatccattagcgagatcgagttcggcgataacgacacgctttctgccattaccgctgctcttgtaggggcggatttcctgttcttgctcacagatgtggactgcctatatacagacaatccgcgcactaatccggatgctcgtcctattgttctcgtgccagagctatcagagggccttccgggcgtcaacacttccagtggttcaggctccgaggttggcacgggcggaatgcgcaccaaactcatagccgccgacctcgcctctaatgccggtatcgagactattgtgatgaagagcgaccgtccagagtacgtcccgaagatcgttgactacattcagcatcacttccgccctccgcgccatatcggaaacggcacacagcagcagtttctcgatcttcaggatacggagctcgaacagttgcgtcgctacgatgttcccatgcacaccaagttcttagctaatgacaacaaacacaagcttaagaacagggaattttggattctgcacgggctcattaccaagggcgccattatcatcgacgagaacagctatgataaacttttgtcaaaggatatggctagtctgactccaaacgccgtgatcgaagtccgagacaacttccacgaacttgaatgcgttgatctcaaaataggccagcggttacccaatggcgaattggatatctcgaagccgattcagtctgttggatgcgtccgttccaattatacgagtctggagcttgcgaagatcaagggcttacccagtgagaagattcacgatgttttgggctacagtgtgagtgaatacgtagcacatagagaaaacatcgctttccctccgcaattttga

SEQ ID NO: 127722 - protein, 423 aa, Saccharomyces cerevisiae
MTKAYTIVIKLGSSSLVDESTKEPKLSIMTLIVETVTNLKRMGHKVIIVSSGGIAVGLDALNIPHKPKQLSEVQAIAAVGQGRLIARWNMLFSQYGEQTAQILLTRNDILRWNQYNDARNTINELLAMGVIPIVNENDTLSISEIEFGDNDTLSAITAALVGADFLFLLTDVDCLYTDNPRTNPDARPIVLVPELSEGLPGVNTSSGSGSEVGTGGMRTKLIAADLASNAGIETIVMKSDRPEYVPKIVDYIQHHFRPPRHIGNGTQQQFLDLQDTELEQLRRYDVPMHTKFLANDNKHKLKNREFWILHGLITKGAIIIDENSYDKLLSKDMASLTPNAVIEVRDNFHELECVDLKIGQRLPNGELDISKPIQSVGCVRSNYTSLELAKIKGLPSEKIHDVLGYSVSEYVAHRENIAFPPQF

SEQ ID NO: 127723 - DNA, 1113 bp, Bacillus subtilis
  CDS (1)..(1113): transl_table=11
atgaaaaagcagagaattgttgtgaaaatcgggagcagctcgctcacaaacagtaacggaagtattgatgaagccaaaatcaaggagcatacggaagccatttcattattaaaagaaaacgggcatgaagtaatcctcattacctcaggcgcggtggcagccggtttttccgctctcggctatccggcgcgccccgttacgataaaaggaaagcaggcagccgccgcggtcggccagacgcttttaatgcagcaatatatggaccatttaaaaagatacggtctgacgccggcgcaaattttattaacaagaaatgatttctcaaaaagagagcggtacagaaatgcgtatgccacggtaatggaattattggagcggggagtcgtgccgattattaatgagaatgattccacatcagtcgaagaactgacgttcggagataatgacatgctgtcggcgcttgtgagcggcctgattcatgcagaccaattaatgattctcacagacattaacgggctgtacgatgccaatccgaatgaaaaccctgacgcaaagcggtttgactatttgactgacattacacctgaattgctcgggtatgccggatcagcgggctcgaaggtcggcaccggaggcatgaagtcaaaacttctcgctgcccagaccgcattgtcgctcggagttaaggtgtttatcggaaccggtgccggacgggaaaaactgaaggtgattttagacggtaaaggcgacggcacatatatcggtgataaagagctgtccaccgtcaataatacacggcaatggatcatgtttcattctccgatatcaggggaaatcatcattgatgggggagcggagcaggcgatgatccataacggctcaagtctccttccggccggtgtcgccgatgtctgcggcagttttccgaaaggggccgtggtggaagtcagaggtcccggcggcatcatcggcaaagggcagacgcattactcatccgatgagattttggaagccaaagggaagcggagcgatcagcttccgggcgcgaagcaggtggaagtgattcacagaaatgattgggtgaatttatttgacgagggggaaaacaaatga

SEQ ID NO: 127724 - protein, 370 aa, Bacillus subtilis
MKKQRIVVKIGSSSLTNSNGSIDEAKIKEHTEAISLLKENGHEVILITSGAVAAGFSALGYPARPVTIKGKQAAAAVGQTLLMQQYMDHLKRYGLTPAQILLTRNDFSKRERYRNAYATVMELLERGVVPIINENDSTSVEELTFGDNDMLSALVSGLIHADQLMILTDINGLYDANPNENPDAKRFDYLTDITPELLGYAGSAGSKVGTGGMKSKLLAAQTALSLGVKVFIGTGAGREKLKVILDGKGDGTYIGDKELSTVNNTRQWIMFHSPISGEIIIDGGAEQAMIHNGSSLLPAGVADVCGSFPKGAVVEVRGPGGIIGKGQTHYSSDEILEAKGKRSDQLPGAKQVEVIHRNDWVNLFDEGENK

SEQ ID NO: 127725 - DNA, 2148 bp, Glycine max; identical to SEQ ID NO: 21044
  CDS (1)..(2148)

SEQ ID NO: 127726 - protein, 715 aa, Glycine max; identical to SEQ ID NO: 21045

SEQ ID NO: 127727 - DNA, 2148 bp, Medicago truncatula
  CDS (1)..(2148)
atggcgaacgccgacccttgtagagatttcgtcaaagatgttaagcgcataatcatcaaggttggtactgctgttgttactcgccaagatggaagattagcagttggaaaattaggggcactctgtgagcagattaaggagcttaacattcttggttatgaagttattttagtttcatcaggtgctgttggtcttggtcgccaaaggcttagatatagaaaattgattcaaagtagttttgctgaccttcagaagccacaagttgaacttgatggcaaggcttgtgctgctgttggacaaagcagccttatggctacttacgatgatttatttagtcagctggatgtgacgtctgctcagcttcttgttactgacaatgattttagagaccaagattttagaaaccaactttctgaaactgtgaagtcgcttctagcactaaaagttattccaatattcaacgagaacgacgcagtcagtactaggaaagctccatatgaggattcttctggcatattttgggataatgacagtttatcagctttgctggccttggaattaaaagcagatcttcttattttgttgagtgatgtagatggtctttataatggccctccaagtgatccactatcaaaacttattcacacatacatcaaggaaaagcatcaaaatgaaattacttttggagacaagtctagggttggaagagggggaatgacagccaaagtaaaagcttctgttcatgcagctgatgccggaattcctgttatcattaccagtggtaatgcagctgaaaatctcactaaaattctccaaggacagcgtattggtaccctattccataaagatgcacacaagtgggtcccttcaaaagaggttgatgtacgcgagatggctgttgccgctagggactgttccagacggcttcaggccgtgtcttcggaagaaaggaaacaaattttgctaaatatagctgatgcattgcaatcacgtgagaaagagatcaggattgaaaatgaagctgacgttgttgctgcacaagaagcaggatacgaaaaatccttggttgctaggctggttttaaagagtgagaagatcgtaggccttgccaacaacatacgaattattgcaaacatggaagatccgattggtcgagttttaaaacgaactgagcttgcagaggggttaattttggagaaaacatcatctcctttgggagtccttttaattattttcgagtctcgccctgatgcattggtacagatagcttccttggcaatacgaagtgggaatgggcttctcttgaaaggaggcaaggaggctaatcgatcaaatgccattttgcacaaagtaattactgaagccatacctgatactgttggttcaaaacttattggacttgtgacgtcaagagctgaaatacctgagctacttaagctggatgatgtaattgatctggtgattccaagaggcagcaataaacttgtttctgatattaagagttcgacgaaaatccctgttctaggtcatgctgatggaatttgtcacgtctatgttgataaatctgctaatttggagatggctaagcagattgtactcgatgctaaaacagattatccatcaggatgcaatgccatggaaacacttcttgttcataaggatttggtagagaaaggctggctcaatagtattagtgtcaatttgcggtcagaaggtgttacgttatatggaggaccgaaagcaagttctctgttgaatgttccacttgctcgttcattacatcacgagtactgttcgttggcttgcaccgtggaaattgtggatgatgtttatgcagctattgatcatataaatcgttatggaagtgcacataccgattccattgtcacagaagatcatgaagtagctaatgtatttcttcgtcaagtcgatagtgctgctgtttttcacaatgctagtacaagattcagcgatggagcacgatttggattaggcgcagaggttggaataagtacaagcaggattcatgctcggggtccagtaggagttgatggattgttaacaaccagatggcttctcaaaggaaatggacaagtagtagatggtgataaaaaagttacctatacccacagagacataactacttga

SEQ ID NO: 127728 - protein, 715 aa, Medicago truncatula; identical to SEQ ID NO: 21047

SEQ ID NO: 127729 - DNA, 2154 bp, Arabidopsis thaliana; identical to SEQ ID NO: 21050
  CDS (1)..(2154)

SEQ ID NO: 127730 - protein, 717 aa, Arabidopsis thaliana; identical to SEQ ID NO: 21051

SEQ ID NO: 127731 - DNA, 2184 bp, Brassica napus
  CDS (1)..(2184)
atggaggatgagatagatcgttcccgcgctttcgccaaggacgttaagcgtatcgttgtcaaggttgggacagcagttgttacagggaaaggtggaagattggctcttggccgcttaggagctatctgcgagcagcttgctgaattgaactcggatggttttgaggtcattttggtgtcttctggtgcggttggtcttggtcgtcagaggcttagatacagacaattagtcaacagcagctttgcagaccttcagaagccacagactgaacttgatgggaaggcttgtgctggtgttggacagagcagtctcatggcttactatgagactatgtttgaccagatggatgtgacggtggctcaaatgctggtgactgatagcagtttcagagataaggatttcaggaagcaacttagtgagacagtcaaagctatgctgaaaatgagagttattccagttttcaacgagaatgatgctataagcactcgaaaagccccttacaaggattctactggtatattttgggataatgacagcttagctgctctactggcgcttgagctgaaagctgatcttttgattcttcttagtgacgttgagggtctttacactggtcctccaagcgatcctaagtcaaagttaatccacacatacgttaaagagaaacaccaggaagagattacctttggcgagaagtccagattaggacgaggtggtatgactgcaaaagttaaagctgctgttaatgcagcttatggtggcattcctgttatcataaccagtgggtatgcagctgagaatatagctaaagttcttaaaggactgcgtgttggtaccttgttccaccaagatgcacatttgtgggctagagtcgtagatactacttctcgtgacatggcagttgctgcaagggaaagttctagaaagcttcaggctttgtcttcagaagataggaaaaacattctactagatatagccaacgctctagaagcaaatgagaaaataattaaggctgagaatgatttagatgttgctgcagcacaagaagctggatatgaagagtctttggtagctcgtttagttatgaagcctggaaagatctcaagccttgcagcttctattcgccagctagctgaaatggaagacccaattggtcgtgttctaaagaaaactgaggttgcagatggtcttattttagagaaaacctcatcaccattaggtgttcttctgattgtttttgaatcccgtcctgatgcacttgttcagatagcttcacttgcaatcaggagtggaaatggtcttctgctgaagggtggaaaagaggctcgtcgatcaaatgctatcttacacaaggtgatcactgatgcaattccgaagactgttggaggtaaactcataggacttgtgacttcgagagatgagattcctgatttgctcaagcttgatgatgttattgatcttgtgatcccaagaggcagcaacaagcttgtttctcagataaaaaactcaacgaaaatcccagtgctagggcatgcggatggtatctgtcatgtgtatgttgacaagtcttgtaaagtagacatggcaaaacgtgttgtttcagatgcaaagttagactatccagcagcctgtaacgctatggaaacccttcttgtacataaggatctagagcagaatggtgtgctaaacgagcttatatatgccctgcaagccaatggtgtcactttgtatggtgggccaaaagcaagtggtaaactgaacattccggaagtaaaatcatttcatcacgagtacagttccaaggcctgcaccgttgaaattgtagaagacgtacacggtgctatagatcatattcaccaacacgggagtgcacacactgattgcatagtgacagaagatagtgaagtggcagagatcttcctccgccaagtggacagtgctgctgttatccacaatgcaagcacaagattctgtgatggttttcgatttggacttggtgctgaggtgggaataagcacaagcaggatccatgcccgtggtccagttggagtagaaggattattgacaacgagatggataatgagaggaaaaggacaagtggtggatggagacaatggagtcgcttacactcataaggaccttcctgtcttagaaaggacaaaggcagtgcagaacgggcattag

SEQ ID NO: 127732 - protein, 727 aa, Brassica napus; identical to SEQ ID NO: 21053

SEQ ID NO: 127733 - DNA, 2154 bp, Brassica napus
  CDS (1)..(2154)
atggaggagctagatcgttcacgcgctttcgctaaagacgtcaagcgtatcgtcgttaaggttggaacagctgttgtaactgggaaaggtggaagattggctcttggtcgcctaggagctctgtgtgaacagcttgcggaattaaactcggatggatttgaggtgatcttggtgtcatcaggtgcggttggccttggccgccaaaggcttcgctacagacagttagtcaatagcagctttgcggatctccagaagcctcagcatgaactagatgggaaggcttgtgctggtgttggacaaagcagtctcatggcttattatgagactatgtttgaccagctggatgtgacggctgctcagctgctggtgaatgacagtagtttcagagacaaggagttcaggaagcaacttaatgagacagtgaagtccatgcttgatttgagggttattcctattttcaatgagaacgatgctattagcaccagaagagctccttatcaggattcatctggcatcttttgggataacgacagcttagctgctctattggcgctggagctgaaagctgatcttctgattcttctgagtgatgtcgaaggtctttacactggccctccaagtgaccctaactcaaagctgatccacaccttcatcaaggagaaacatcaagacgagattacatttggcgacaagtcaagactaggaagaggaggcatgactgcaaaagtgaaagctgcagtgaatgcagcttatgctggtatccctgtcatcataaccagtggctatgcagctgagaacatagataaagtccttagaggactgcgtgttggaaccttgttccatcaagatgctcgtttatgggctcctatcacggattctactgctcgtgacatggcagtagctgcgagggaaagttccaggaagcttcaggccttatcttcggaggataggaagcagatactgtatagtatcgcagatgctcttgaagcaaatgagaaaacaatcagagctgagaatgaattagatgtggctacagcacaagaagctggacttgaagagtcattggtggctcgtttggtgatgacacctgcaaagatctcgagccttgcagcttcagttcgtaagctagctgatatggaagatccaattggccgtgttctaaagaaaaccgaggtggcagatggtcttgttttggagaagacctcatccccattaggcgtactcctgattgtttttgagtctcgacctgatgcacttgtacagatagcttcacttgctatccggagtggaaatggtcttctattgaagggtggaaaggaggccaggagatcaaatgctatcttacacaaggtgataactgatgctattccagagactgttggtggtaaactcattggacttgtgacttcaagggaagagattcctgatttgctcaagcttgatgacgttattgatcttgtgatcccaagaggcagcaacaagcttgtttcccagattaaaaacactacaaaaatccctgttcttggtcatgctgatggaatctgtcatgtatatgtggacaaggcttgtaatgtggatatggctaaacgcatagtttctgatgcaaagttagactatccagcagcttgtaatgccatggaaactcttcttgtgcataaggatctggagcagaacgctgtgctcaatgagcttatatttgctctgcagagcaatggagtcactttgtatggtggaccaaaggcaagtaaaatacttaacctaccagaagcacggtcgttcaatcacgagtactgttccaaggcgtgcactgttgaagttgtagaagatgtttatggtgctgtagatcacattcaccgacatggaagtgcacacacagactgtattgtgacagaggatcccgaagttgcagagctattccttcgccaagtggacagcgctgctgtgttccacaacgcaagcacaagattctctgatggttttcgatttggacttggtgctgaggtggggataagcacagggaggatccatgcccgtggtccagtgggagtagagggactacttacaaccagatggataatgagaggaaaaggacaagttgtggatggagacaatgggattacttacacccatcaagacattcccatccaagcttag

SEQ ID NO: 127734 - protein, 717 aa, Brassica napus; identical to SEQ ID NO: 21055

SEQ ID NO: 127735 - DNA, 2256 bp, Vigna unguiculata
  CDS (1)..(2256)
atggaacttctccaaaatggaaccaaagccaaaccctctgaaatacccctcgtcaatggaaccgcgttaactcacctcaactcgctcttccaaactcagttctccggtaatatcgatccttccagagctttcgtctccaaggtcaagcgtctcattgtaaaggttggaacagctgttgttactcgaagtgatggaagattggcactaggtagaattggagctctttgtgagcagcttaaagaacttagctctcaaggatttgaagtcatactggtaacttcaggtgctgttggccttggcaggcaaagacttagatatcgcaaattggccaatagcagtttttctgatcttcaaaagccacaaggtgagcttgatggtaaagcatgtgctgctgttgggcaaagtagtctcatggctctctatgataccatgttcagccagcttgatgtgacttcttcccaacttcttgtgaatgatggattttttagggatgctggcttcagaaaacaactttcggacacagtgaacgcgttattagatttaagggttatccccattttcaatgaaaatgatgctgttagtactaggaaagcaccatacgaggattcttctggtattttctgggacaatgacagtttggctggactattagccttagaacttaaagctgatcttcttgttttattgagtgatgttgagggcctttacagtggtcctccaagtgacccaaactcaaagttgatccacacatatgtgaaggagaaacatcaaggggaaattacttttggagacaagtcaagattgggaagagggggtatgactgctaaagttaatgctgcggtttgtgctgctcatgctggtatccctgtcattataactagtggctatgctacaaacaatatcatacgggttcttcaaggggaaagaataggtactgtctttcataaagatgctcacttgtggagcaatataaaggaagagagtgcacgtgaaatggcagtttcagcacgcgagagttctagaagacttcagatcctcaaatctgaagaaaggagtaaaatattattggcaattgctgatgcattggagaaaaatgcaagtgcaataagtcttgagaatgaagctgatgttgctgatgctgtgcttgctggatatgaaaattcgttgatatcacgtttaaccctgaaacatgagaagatctctaagcttgcaaagtctgtgcgcatgttggcagctatggaagaaccaattggtcaaattttaaaaagaacagagatagcagataaactcatcctggagaaaatttcatgtcctttgggagtccttctggttatattcgagtctcgaccagatgcccttgtgcagatagctgcattggcaattcgaagtgggaatggtttactgcttaaaggtggaaaagaagcccaacgatcaaatgcaatcttacacaaggtcattacttcggtgattccaaataccgtaggtgacaaacttattggccttgtgaattcaagagatgaaattccatacctacttaagcttgatgatgtgatagatcttgtggtcccaagaggcagtaataaacttgtttctcaaatcaaggagtcaacaaaaattcctgttcttggacatgctgatggaatttgtcatgtatatgtcgacaaatcagctaagattgatatggcaaaacagattattagagatgcaaagactgattatcctgcagcctgcaatgcaatggaaactcttcttgtacacaaggatctatcaaacaatggtggacttaatgagcttgtcgttgaactccaacgtgaaggtgttaaactgtatggtggaccaagagctagtggcatactaaatattgttgaaacaagcgcttttcatcatgagtacagttcacttgcttgcacagttgaaattgtagaagatgtatttgatgccattaaccacatacatgaacatggaagtgctcatactgaatgcattgttacagaagatcgtgaagttgctgagactttcttaagtcaagttgacagtgctgcagttttccacaatgcaagtacacgattttgtgatggagcacgctttggccttggtgcagaggttggaattagcacaagtcgaattcatgcacgaggcccagtaggagtagagggtttattgacgaacagatggatattgagagggagtgggcatgtggttaatggagatcaaggaatcaattacacgtacaaggaattgccactagaagcataa

SEQ ID NO: 127736 - protein, 751 aa, Vigna unguiculata; identical to SEQ ID NO: 21057

SEQ ID NO: 127737 - DNA, 2289 bp, Vitis vinifera
  CDS (1)..(2289)
atgcacatggacgccatggatccaactcgagcttttgttaaggacgttaagcgtctcgtaatcaagtttgggactgctgttgtcactcggtctgatggaagattagcactcggaagactaggtgcactttgtgagcagatcaaagaattgaactctcaaggatatcaggtcattgtggtcacatcaggtgctgttggccttggtcgccaaaggcttagatacaggagtttactcaacagcagctttgctgatctccaaaaaccacaagctgagcttgatggtaaggcgtgtgcagctgttggacaaaataaccttatggctctctatgacacattatttagccagctggatgtgacatcagctcagcttcttgtgactgataatgattttagggatgaagctttccgaaatcaacttactcaaacagtggattcattgttagctttgagggttattcctatatttaatgaaaatgatgctgaagtaacaaggaaagctccatatgaggattcttcgggaatattttgggataatgacagtttagcaggcctactggctttgcagctaaaggctgacctccttgttctattgagcgatgtagatggtctttatagtggccctcctagtgatccacgttctttactaatccatacatacttggaaaaaggtcatcagggacagattacttttggagacaagtcgagggttggaagagggggtatgactgcgaaagtaaaatctgcagtttattcatctcaggctggcattcctgttgttattactagtgggtatgctactggaagtatcttaaaggtccttaatggggagcgtattggcactctttttcatcgagatgcctataaatgggtacaagttaaagaagttggcgcacgtgaaatggcagttgcagcaagggaaagttccaggcggcttcaggcaatgtcttcacaagacaggaagaagattttactggacatagccaatgcactggaaacaaatgaagaactgattaaaattgaaaatgatgctgatgttgaggcagcacaactggctggatatgaaaaatcattggtttcaaggctggttctaaagcctggaaagatttcaagccttgcaaactcaattcgtgtgcttgcaaacatggaaagaccaattggtcatgttttgaagaaaactgaagttgcagatggacttatcctagaaaagatgtcatgcccattaggtgtgctcctaattgtttttgagtctcgaccaaatgctctggtacagatagcttcattagcaatccgaagtgggaatggacttctcttgaaaggtggaaaagaggccaagcgatctaatgcaattcttgcaaaggttattactgaagccattccagacagtgttgggaagaagctaattggacttgtgacttcaagagaggagatccctaatctcctcaagcttgatgatgtgatcgaccttgtaatcccaagaggcagcaataaacttgtttctcaaataaaggattcaacaaaaattcctgttctgggccatgctgatggcatctgccacgtttatgtcgacaagtctgctaatatggatactgcaaagcacatcgtattggatgcaaaagtagattatcctgcagcctgtaatgcaatggaaacacttcttgtacacaaggatttagtgcagactggtggcctcaatcagcttatcgtagagctccgcaatgaaggggttactttatatggtggaccaaaggcaagtgccttgctgaatcttccagaggctcactcttttcatcatgagtataattcaatggcttgcactgttgagattgttgatgatgtacattctgccattgatcatattcaccgacatggaagtgcacacgattgcatcattgcagaagaccttgaagttgctgaagtgtttttgcgccaagttgatagtgctgctgtctttcacaatgctagcacaagattttgtgatggggctcgttttggacttggggccggaggttggataagtacaagtaggattcatgctcgaggtccagtcggagttgaaggattgttaacaacaagatggattctcagaggaaatggccaagtggtgaatggcgataaaggggttacttacttacacccacaaggagcttactttgcagccctaagcctatcccatagtttgcttggtggcgatttattgaataatgtaggattgggtacttttgatttcagtttttgtaacggtagaagggtcaactggaccttggaccttaaagaggtaatttatcaataa

SEQ ID NO: 127738 - protein, 762 aa, Vitis vinifera; identical to SEQ ID NO: 21059

SEQ ID NO: 127739 - DNA, 2154 bp, Arabidopsis thaliana; identical to SEQ ID NO: 21008
  CDS (1)..(2154)

SEQ ID NO: 127740 - protein, 717 aa, Arabidopsis thaliana [sequence omitted]

SEQ ID NO: 127741 - DNA, 2181 bp, Arabidopsis thaliana; identical to SEQ ID NO: 21060
  CDS (1)..(2181)

SEQ ID NO: 127742 - protein, 726 aa, Arabidopsis thaliana; identical to SEQ ID NO: 21061

SEQ ID NO: 127743 - DNA, 2154 bp, Actinidia chinensis; identical to SEQ ID NO: 21062
  CDS (1)..(2154)

SEQ ID NO: 127744 - protein, 717 aa, Actinidia chinensis [sequence omitted]

SEQ ID NO: 127745 - DNA, 2160 bp, Mesembryanthemum crystallinum
  CDS (1)..(2160)
atggacgcgactagagctttcgttaaggacgttaagcgcgtcgtcgtcaaggttggaactgctgttgttacgaggagtgatgggagactggctcttggaagactaggctcactctgtgagcagctcaaggaactgaactctgatggatatgaagtaattttggtgacttcgggtgctgttagtgccggtcgtcagaggcttaggttcaggaaattggttaacagcagtttcgctgatcttcaaaaaccgcaagtcgaacttgatgggaaagcatgtgctgctgttgggcagaatggtcttatggctctttatgacaccttgtttagtcagttggatctgactgctgctcagctgcttgtgacggacaacgactttagagatccaagttttagaacacaactaactgaaacagtgtatcagttgttggatctaaaagttgtacctgtgttaaatgaaaatgatgcagtaagtaccaggaaagccccttatgaggattcatccggtatattctgggataatgatagtttagcggcactgcttgctttggaactaaaagcagatctccttattttgttgagtgatgtggatggtctttataatggcccaccaagcgatccacgatcaaagcttatctcaacatatgtcaaagagaagcatcaaggagaaatcacttttggagataaatctaggttgggcagagggggtatgactgccaaagttaaagcagctgtttatgctgcttatgctggaattcctgtaattatcgctagtggcaaggcaaccgacaatattatcaaagtaattgatggtcagtgtgttggcaccctatttcacaaagatgctcatttatgggttcaagttaaagaaactggtgtgcgtgacatggcagttgcagcaagagagagttctaggaggcttcaggcagtgtcttcagaagaaagaaaaaagattttgctagacatagctgatgctttggaggcaaatgaagaaaagatcctggctgaaaatgaagctgatgttgctgcggcacaatatgcgggatatgataggtcactggttgctcggttagccatgaaccctgacaagatttctagccttgcaaaatcaattcgtgttcttgctgatatggaggaacctattggtagaattttgaagagaactgagattgcagatggactcatcttggagaaaacatcatgccccttgggtgtactcctgattgtgtttgagtctcgtccagatgctttagttcagattgcttcattggctatacgaagtggaaatgggcttcttttgaagggtggaaaggaggcaaagagatcaaatgccatcttacacaaggttatcacttctgccataccagacaaagttggtgagaaattaattggtctagtcacctcaagagatgagattcctgatctccttaagcttgatgatgtgattgatctcgtcattccaagaggaagcaataagcttgtttctcagattaaggaatcaacaagaattcctgtcctgggtcatgctgatggaatttgtcatgtctatgttgacaaatctgctaatatggatatggcaaagcgcattgttctagatgcgaaaacggactatcctgcggcatgtaatgctatggaaacacttcttgtacacaaggacctagcagagaatggaggcttaaatgacctaattgttgatcttagaactgaaggtgttactatgtttggtggaccaagaattgatgccttgcaagagttcaatattcaagctactcagacattcaatagagagtacagttcaccagcttgtacagtggaaatagtagatgatgtgtatgctgccattgaacatattaaccaccatggaagtgcacacactgactgcattattgcagaagatcacaaagttgcagaaacgtttttgcagctagttgacagtgctgctgtacttcataatgcaagtacaagattctgtgatggattccgttttggattgggtgccgaggttggaataagtacaagtaggattcatgctcgaggtcctgttggggttgaagggttattaaccacaagatgggttctcaagggaagcggacaagttgtgcatggtgacaaaggtgtggtatatacccacaaggacctgccattggtggcgcaaaactcttga

SEQ ID NO: 127746 - protein, 719 aa, Mesembryanthemum crystallinum [sequence omitted]

SEQ ID NO: 127747 - DNA, 2154 bp, Solanum lycopersicum
  CDS (1)..(2154)
atggagacagttgattcaactcgagcatttgtgaagaacgtcaaacgactcattgtcaaggttgggactgcagttgtgactcgagctgatggaagattagcacttggaagattaggagccctctgtgagcagcttcaggagcttaattcgcaagggtatgaagttattttggtgacttctggtgctgtaggtgttggtcgtcagcggcttagatataggaagttgctcaacagcagttttcttgatcttcaaaagccacaaactgagcttgatggcaaggcttgtgctgctgtgggccagaatggcctcatggctctgtatgattctttgttcagtcagttggatgtgacatcagctcagcttctggtgactgataatgactttagagatccagattttaggagacaactcaatgacacagtaaattcgttgctttctctaaaagttatacctatattcaatgagaatgatgctatcagtacgcggagagctccttatgaggactcttctggaatattttgggataatgacagtctggcagctcttctagctttggaattaaaagctgatcttctagttctgttgagtgatgtagacggtctttacagtggtcctccccgtgatccagattcaaagttgatttacacatacattaaggaaatacatgagagagtgattacttttggagacaagtccagggtgggaagaggaggcatgactgccaaagtaaaagctgctatgtatgctgcttatgctggcattcctgttgtcataaccagtggctttgcgacagataacatcatcaaagtgctgcatggggaacgtataggcacactctttcattgtgatgccaataaatgggcctcaattggagagactgatgctcgtgagatggcagtggctgcaagggcatgttccagacgtcttcaggcactgtcttcccaagaaaggagtaaaatattgcaggatatagctgatgcactggaagcaaatgaaaaggcaatcctcgctgagaatgaagctgatgtggttgctgctcaacaggccggatatgagaagtctttgatatctcgtctggctttaaatccaggaaaaatttctagtcttgcaaactcagttcgtgtgctgtctaacatggatgagccccttggtcacactttaaaaagaacggagattgctgatggattcatcttggagaaatcatcatctccattaggcgttgtattgattatttttgagtcacgacctgatgcacttgtacagatagcttctctagcagtccgaagtgggaacggcctcatgttgaaaggaggaaaggaggccaaaagatcaaacgccatcttacacaaggtgattacctcggcaattcctgtaagtgtaggtgaaagacttattggactagtgacttctagagaagagatccctgaattacttaagcttgacgatgtgattgatcttgttatcccaagaggtagcaataaacttgtttctcaaatcaaggcatcaacaaaaattcctgttctaggccatgctgatggaatttgccatgtttatgttgacaagtctgctgacatggatatggctaagcgcattactgttgatgcaaaaatcgattatcctgcagcctgcaatgcgatggaaacacttcttgtgcataaggatttggcacaaaatggaggtcttaatgatctgattgtggaacttcaaacaaaaggggtttctttatatggtggacccaaagctagctccctgctcatgattccagaggcacgtacatttcgtcacgaatatagttcactagcttgcactgtggaagttgttgaagatgtatatgctgcgatagatcatatacatcagcatggaagtgcccacaccgatagcatcattactgaagatcaggaagttgctgaagtttttttacgtcaggttgacagtgctgctgtatttcacaacgcaagtacaagatttagtgatggattccgctttggacttggtgcagaggtgggcattagtactggtcgtattcatgctcgtggcccagttggagttgaaggattgctaacaactaaatggcttgcaaggggaagtggacaaattgttgatggtgataaatcaattgtgtatagtcacaaagaccttactcagcaagggtga

SEQ ID NO: 127748 - protein, 717 aa, Solanum lycopersicum; identical to SEQ ID NO: 21069

SEQ ID NO: 127749 - DNA, 2417 bp, Vigna aconitifolia
  CDS (37)..(2052)
tgctctaaaggctattgctcgtatcagtgctcagccatggagagcgcggtggatccttctcgggggttcatgaaggacgtgaagcgtgtgatcatcaaagttggcaccgcggtggtcactcgcgaagaaggaaggttagcggttggaagattgggagctctgtgcgagcagattaagcaactcaactctctcggatacgacattatactcgtctcctctggccccgtcggtattggacgccaaaggctacgtttccgtaaattaatcaacagcagcttcgccgaccttcagaaaccccaactcgaactcgacggcaaggcctgcgccgccgttggacagaacagtctcatggctctctacgatacgctgttcactcagctcgatgtgacatcggctcagcttcttgtgacggataacgattttcgagataaggatttcaggaagcagcttactgagactgtgaagtcgctgttggcgctgaaggttattccggtgttcaatgagaacgatgccgttagtaccaggaaggctccctatgaggattcttctggtatattttgggataatgatagtttatctgctttattagccttggagttaaaagccgatctccttgttttgttgagtgatgtagaaggtctttacagtggccctccaagtgaccctcattcaaagcttatttatacatataacaaagaaaaacatcagaatgaaattacttttggcgacaagtctagagtgggaagaggcggaatgactgccaaagtaaaagctgcggttcatgcagctgaagctggcattcctgttgttattaccagtggttttgcacctgagaatatcattaatgttctccaaggacaacgtataggaactctcttccataaagatgcacatgagtgggctcaagtaaaagaggttgatgcacgtgagatggctgttgcagcagggaatgttcgagaaggctccaggcgttatcttcagaggaaaggaaacaaaattttacttaaaatagctgatgccctggaagcaaatgaaaaaataatcaggattgaaaatgaagctgatgttactgctgcacaagaagcaggatatgaaaaatccttggtggctaggctagctttaaaacctgggaagattgcaagtcttgcaaacaacatgcgaatcattgccaatatggaagatccaattggtcgagtattaaaacgtaccgagctttcagatgggctaattttagaaaagacatcatctcctttgggagtgctccttattgtttttgagtcacgtcctgatgctcttgtacagatagcttcattggcaatccgaagtgggaatgggcttctcttgaaaggtggcaaagaagctaagcgatcaaatgcaattttgcacaaagtaattatcgaggccataccagataatgttggtggaaaacttataggacttgtgacctcaagggaagagatccctgagctacttaagttggatgatgtaattgatctggtaattccaagaggcagtaacaaacttgtttctcagatcaagagttcaactaaaattcctgttttaggtcatgctgatggaatttgccatgtctatgttgataagtctgctaacgtggagatggcaaagcggattgtattagatgcaaaagttgattatccggcagcctgcaatgccatggaaacacttcttatccacaaggatttgatagagaaaggttggcttaaggagatcattcttgaccttcgaactgaaggcgttatattatatggtggccctgtggcaagttctctgttaaatattccacaagcacattcatttcatcatgagtacagttcgctggcttgcaccgccgaaattgtggatgacgtgtatgcagctattgatcatataaatctgtatggaagtgcacatactgattcgatcgttgctgaagataacgaagtagctaatgtgtttctacgccaagtagacagtgctgctgtttttcacaatgcaagcaccagattcagtgatggggcacgatttgagactaggcgcagaggttggaattagtacaagcaggattcatgctcgaggtcagtaggagttgaggattgttaacaacaagatggatactaaaaggaagggacaagtggtagatggtgatagaggcgttgtctacacccacaaagaccttgcaatttaattttaatggtgctttgattccttttgtagccttttcgtttgttttttttttttcacagtagagaacggcatttgtacggttaaataaaaccgggtaatttatgtcattatttgcttgttcctttttgtctagaatctttactgtcaacaattatggtccacaatgtttaacgattcttgaatgactacaatttcaatttgagttaatttttatatgtaaaaaaaaaaaaaaa

SEQ ID NO: 127750 - protein, 671 aa, Vigna aconitifolia
MESAVDPSRGFMKDVKRVIIKVGTAVVTREEGRLAVGRLGALCEQIKQLNSLGYDIILVSSGPVGIGRQRLRFRKLINSSFADLQKPQLELDGKACAAVGQNSLMALYDTLFTQLDVTSAQLLVTDNDFRDKDFRKQLTETVKSLLALKVIPVFNENDAVSTRKAPYEDSSGIFWDNDSLSALLALELKADLLVLLSDVEGLYSGPPSDPHSKLIYTYNKEKHQNEITFGDKSRVGRGGMTAKVKAAVHAAEAGIPVVITSGFAPENIINVLQGQRIGTLFHKDAHEWAQVKEVDAREMAVAAGNVREGSRRYLQRKGNKILLKIADALEANEKIIRIENEADVTAAQEAGYEKSLVARLALKPGKIASLANNMRIIANMEDPIGRVLKRTELSDGLILEKTSSPLGVLLIVFESRPDALVQIASLAIRSGNGLLLKGGKEAKRSNAILHKVIIEAIPDNVGGKLIGLVTSREEIPELLKLDDVIDLVIPRGSNKLVSQIKSSTKIPVLGHADGICHVYVDKSANVEMAKRIVLDAKVDYPAACNAMETLLIHKDLIEKGWLKEIILDLRTEGVILYGGPVASSLLNIPQAHSFHHEYSSLACTAEIVDDVYAAIDHINLYGSAHTDSIVAEDNEVANVFLRQVDSAAVFHNASTRFSDGARFETRRRGWN

SEQ ID NO: 127751 - DNA, 1098 bp, Bacillus licheniformis
  CDS (1)..(1098): transl_table=11
gtgaaaaaacaacggattgtcattaaaatcggaagcagttcattaaccaactcgaagggcagcatcgatgaggagaagatcaatgaccatgttcgggcgatagctgctctgaaaaaagaaggccatgaagtcatcttcatttcgtcgggggctgtcgctgcgggatttttacagctcggctatcccgcaaggcctgtgacgctaaagggaaaacaggctgcagcggccgtcggccagagcttgttaatgcaaacatacatcgagcattttgcagaccacgatatcaagcctgcgcagatcttattgacgagaaacgattttgccaaacgggagcgctatcgaaatgcatatgcgaccgttatggaactgattgaacgggggcttgtcccgattattaatgaaaatgattcggtatctgttgaagaattgacgtttggggacaacgacatgctttccgcccttgtaagcggactgattcatgccgacaaactcatcattttaacggatattaacggcctctatgactcgaatccggctgaacatcccgatgcccgccgttttgattacattcccgaaattacggacgaacttttgggctgcgccgcttccgccggatcaaaagtcgggacgggcgggatgaagtcgaagcttttggcggcaaaaaccgctctttcactcggcgtcaatgttttcataggcgccggagagggagatgataagctgatccagattttaaaaggaaacggggacggcacctatatcggccaatccgacctgtcttccgtcaacaatcataggcagtggatcgcctttcattcacctgtttcagggaagattaccgttgatgaaggggctgagctggcgattaccgaaaacggcgggagcctgctgccggccggcgtaacagcgatatccggagattttccgaaaggggcggttgtcgaagtttacggaccgaacggcttggccgggaaaggccaaacgctgtactccgccgcagagcttgaagaggtaaaagggaagcgaagcgatgagttccatcatgaagaagggatagaagtcatccatcgaaatgattgggtaagcattaaagaataa

SEQ ID NO: 127752 - protein, 365 aa, Bacillus licheniformis
MKKQRIVIKIGSSSLTNSKGSIDEEKINDHVRAIAALKKEGHEVIFISSGAVAAGFLQLGYPARPVTLKGKQAAAAVGQSLLMQTYIEHFADHDIKPAQILLTRNDFAKRERYRNAYATVMELIERGLVPIINENDSVSVEELTFGDNDMLSALVSGLIHADKLIILTDINGLYDSNPAEHPDARRFDYIPEITDELLGCAASAGSKVGTGGMKSKLLAAKTALSLGVNVFIGAGEGDDKLIQILKGNGDGTYIGQSDLSSVNNHRQWIAFHSPVSGKITVDEGAELAITENGGSLLPAGVTAISGDFPKGAVVEVYGPNGLAGKGQTLYSAAELEEVKGKRSDEFHHEEGIEVIHRNDWVSIKE

SEQ ID NO: 127753 - DNA, 1137 bp, Rhizobium loti
  CDS (1)..(1137): transl_table=11
atgcagtcgctgaaaaaataccggcgcatcaccgtcaagatcggctcggcgctgctcgtcgaccgcgcgagcggcttgaagcgcgactggctggactcgctcgccgacgacatagcggtgcttgcccagggcggcgccgaaatcctcgtcgtctcctccggcgccatcgcgcttggccgcaccatccttggccttggcaagcgtgccttgaagctcgaggagagccaggcggccgccgccgtcgggcagatcgcgctcgccggcgcctggtcggatgcactcggcaggggcgccctgaagtcgggccagattcttctgacccttggcgataccgaagagcgccgccgctatctcaatgcgcgcgcgacgatctcgacattgctcaagatgaaggcggtgccggtcatcaacgagaacgacacggtcgccacctccgaaatccgctatggcgacaatgaccggctggccgcgcgcgtggccaccatgatgggcgccgatcttctggtgctgctctccgacatcgatgggctctacaccgcaccgccggcgcgcgaccccaaggccaagttcattccggtggtcgaccgcatcacgcccgacatcgaggcgatggcgggggctgccgcctccgaactgtcgcgcggcggcatgcgcaccaagctcgatgccggcaagatcgccaccgccgccggcaccgcgatgatcatcacctcgggcacgcggctgtcgccgctgatggcgatcgagcgcggcgagcgcgccaccttcttccggccgagcgccaatccggtcaagggctacaagacctggatcgccggccagctcgaaccggccggccggctgacggtcgacgccggcgccgtcggtgcgctcgcatcgggcaaatcgctgctgccggccggcgtcaaactggtcagcggcaatttttcgcgcggggatacggtggcgatcctgtcgcccgacgggcgcgagatcgcgcgcgggctggttgcctatgatgccgccgatgccgtaaggatcgcaggcctgaagacggccgagatcgaaaccgtgctcggctacgaagcgcgttcagcgatgatccaccgcgacgacctcgtggtgagtcacgctgggggcgacataagcggaggatga

SEQ ID NO: 127754 - protein, 378 aa, Rhizobium loti
MQSLKKYRRITVKIGSALLVDRASGLKRDWLDSLADDIAVLAQGGAEILVVSSGAIALGRTILGLGKRALKLEESQAAAAVGQIALAGAWSDALGRGALKSGQILLTLGDTEERRRYLNARATISTLLKMKAVPVINENDTVATSEIRYGDNDRLAARVATMMGADLLVLLSDIDGLYTAPPARDPKAKFIPVVDRITPDIEAMAGAAASELSRGGMRTKLDAGKIATAAGTAMIITSGTRLSPLMAIERGERATFFRPSANPVKGYKTWIAGQLEPAGRLTVDAGAVGALASGKSLLPAGVKLVSGNFSRGDTVAILSPDGREIARGLVAYDAADAVRIAGLKTAEIETVLGYEARSAMIHRDDLVVSHAGGDISGG

SEQ ID NO: 127755 - DNA, 1182 bp, Rhizobium meliloti
  CDS (1)..(1182): transl_table=11
atgaccaaggcccgcaaagcgctcgagaattaccgccgggtcgtcatcaagatcggctcggcactcctcgtcgaccgcaggaccgggctgaagaagagctggctcgacgcgctctgcgccgacattgcggccctcagggccaagggcgtggaagtgctcgtcgtctcctcgggagcgattgcgcttggacgcacggtgctcgacctgccggcgggtgcgctgaagctcgaagagagccaggcggccgccgccgtcggccagatcgtgctggcgcgtgcctggtcggagagcctctcgacccatgcgatcgtcgccggccagatcctcctgacgctgggcgacaccgaggagcgccggcgctacctcaatgcccgcgcgacgatcggtcagcttctgaagctcggctcggtgccgatcatcaacgagaacgacacggtcgcgaccacagaaatccgctatggcgacaacgaccggctggcagcgagggtcgcgaccatggtcggcgccgatctcctggtcctgctctcggatatcgacgggctctataccgcgccgccgcatctcgatccgaacgcccgtttcctcgaaacggtcgccgaaatcacgcccgaaatcgaggcgatggcgggcggcgctgcctccgagctttcgcgcggcggcatgcgcaccaagatcgacgccggcaagatcgcaaccactgccggctgcgcgatgatcatcgcctccggcaagccggatcatccgctggccgcgatcgaggcgggcgcgcgctcgtcctggttcgcgccatcaggctctccggtgaccgcccgcaagacctggatcgccggacagctcctgccggccggttcgctctcgatcgatgccggagcggaaacggcgctgcgttccggcaagagcctgctgccggccggcgtccggcaggtgacgggaagcttcagccgcggcgatacgattgcgataatcggcgcttccggccgcgagatcgcccgcggtcttgccggctacgatgccgacgaggcgcgccagatcgccggcaagaagtcggccgagatcgccgccatcctcggctatgccggccgcaccgccatggtgcatcgcgacgatctggtcatgacggctccatcgggcgcgcgccttgtagaggaaagcgacgagggaaagggcaagctccatgcttga

SEQ ID NO: 127756 - protein, 393 aa, Rhizobium meliloti
MTKARKALENYRRVVIKIGSALLVDRRTGLKKSWLDALCADIAALRAKGVEVLVVSSGAIALGRTVLDLPAGALKLEESQAAAAVGQIVLARAWSESLSTHAIVAGQILLTLGDTEERRRYLNARATIGQLLKLGSVPIINENDTVATTEIRYGDNDRLAARVATMVGADLLVLLSDIDGLYTAPPHLDPNARFLETVAEITPEIEAMAGGAASELSRGGMRTKIDAGKIATTAGCAMIIASGKPDHPLAAIEAGARSSWFAPSGSPVTARKTWIAGQLLPAGSLSIDAGAETALRSGKSLLPAGVRQVTGSFSRGDTIAIIGASGREIARGLAGYDADEARQIAGKKSAEIAAILGYAGRTAMVHRDDLVMTAPSGARLVEESDEGKGKLHA

SEQ ID NO: 127757 - DNA, 1122 bp, Bacillus licheniformis
  CDS (1)..(1122): transl_table=11
atgacctctaatcaacagagggtagttgtcaaagtgggaagcagttctttaacaagtcttcacggcgaaatcagcagcaaaaagctcgaaaagctcgttgagcagattgtccgcctcaaagatgaaggacacgaagtcctccttgtttcatctggcgctgtagcagccggttaccggaagctcggctttatcaacaggccggatacattgcctgaaaaacaagcatccgcttctgtcggccaaggcttattaatcgaagcgtattccaagctttttttatcccacggctatatcgcttcacaaattttaatcacaaaaagcgatttttcagatgaaaaacggtacaacaatgtgagaaatacgatgaacgtgctgctgaaacgcggcattattccgatcatcaacgaaaatgatacggttaccgtcaatcggctcaaattcggagacaatgacacgctttctgctaaagtggcgggtctgatcgacgccgacctgctgaccatcctctctgatatagacggcctttatgacgcgaatccgcgaaaaacgccggacgccgcactcgtccaggaagtaactgaaatcacgccggaaatagaagcttcagcaggggatgcaggaagcgaagtcggaaccggcggcatgaagtccaaactggacgcttttaaaattacaatggcttcaggcatcaaagggtttttagggcgcgcggacacccccggcattttgcacgaagcgatctgcgggactgcgaggggaacgtattttataccgaatgcggattcacacgccctcaaccataaaaagcaatggatagcatttaactctggacctgaaggagacatcgtcgtccacaacgaaagcaaagagtttattatcgaccgtaaaaaaagcctgtatccttctagtatttacgacatcaacggccgtttcagcaacggatccgtcgttcgaatccttgatcaggaaggagaggaaatcggcctcggcgtcgtcaacttttcctcatcccagcttcgtaaatggaagaaggatacgaatcaggaaacagccgcttcctcacaggctgtcgttgacagagaagcgtttgtctgtcatttagagctatccgttccgctttaa

SEQ ID NO: 127758 - protein, 373 aa, Bacillus licheniformis
MTSNQQRVVVKVGSSSLTSLHGEISSKKLEKLVEQIVRLKDEGHEVLLVSSGAVAAGYRKLGFINRPDTLPEKQASASVGQGLLIEAYSKLFLSHGYIASQILITKSDFSDEKRYNNVRNTMNVLLKRGIIPIINENDTVTVNRLKFGDNDTLSAKVAGLIDADLLTILSDIDGLYDANPRKTPDAALVQEVTEITPEIEASAGDAGSEVGTGGMKSKLDAFKITMASGIKGFLGRADTPGILHEAICGTARGTYFIPNADSHALNHKKQWIAFNSGPEGDIVVHNESKEFIIDRKKSLYPSSIYDINGRFSNGSVVRILDQEGEEIGLGVVNFSSSQLRKWKKDTNQETAASSQAVVDREAFVCHLELSVPL

SEQ ID NO: 127759 - DNA, 1134 bp, Acinetobacter sp
  CDS (1)..(1134): transl_table=11
atgatagaagtgatcgatgggcaacgacagctcaaggcgtgcaaacgtatcgttgttaaaatcggatcatctctactgacagccaatggacaaggtttagatctggatgcgatttcgcattgggcaatgcaaattgctgatctacacaatgctggacacgaaattattttggtgtcttcaggggctgtagcagaagggatggtgcgtatgaaactaacgagtcgacccaccgatctacccagtttgcaagcctgtgcggcgattggtcaaatgggcctgattcatacgtggtcgagtgtccttgaaaagcatacgattcagactgctcaagtactgctcacacatgatgatctggcagatcgtcgtcgttatttaaactcgtgtgatgccttacaaaacttgattgagtggcgagtgattcctgttatcaacgaaaatgatacagtatctactgatgaaattcgttttggtgataatgatacactcgctgcgatggtggcaggtcaggttcatgctgatttgctgatcattctgactgatcagcaagggatgtttgattcagatccacgtagtaatccgaatgcaaaattactcactactgttaatgcgatggatgatgcgttgtttgaaatggcaggtggcggcggtgtactcggacgtggtggtatggtcaccaaggttcgtgctgcacgtctggcggcaaaatctggttgtccaaccttgattgcaagtggtgaaagtgatcatgttttatcacgcctgatgtcaggtgagttacttggtactttatttagcactgataaagatcggattacagcgcatcagcaatggctggctgcccatcttcaaactgcgggtcgtctggtgattgatgcaggtgcagttgaagcgattaagcaacgacatcgtagtttattgccagttggggtgaaggctgttgaaggtcattttaaccgtggcgatgtggtcgaatgtgttgatcagtctgggcagcgtgttgcagtcgggcgcgtgaattttagttcacgttcggctgagatcattaaaggtttggcttcagataaagtacatcaagtgttaggtgaagcacgttctctggaaatgattcatcgcaatcatatggcgatttattaa

SEQ ID NO: 127760 - protein, 377 aa, Acinetobacter sp
MIEVIDGQRQLKACKRIVVKIGSSLLTANGQGLDLDAISHWAMQIADLHNAGHEIILVSSGAVAEGMVRMKLTSRPTDLPSLQACAAIGQMGLIHTWSSVLEKHTIQTAQVLLTHDDLADRRRYLNSCDALQNLIEWRVIPVINENDTVSTDEIRFGDNDTLAAMVAGQVHADLLIILTDQQGMFDSDPRSNPNAKLLTTVNAMDDALFEMAGGGGVLGRGGMVTKVRAARLAAKSGCPTLIASGESDHVLSRLMSGELLGTLFSTDKDRITAHQQWLAAHLQTAGRLVIDAGAVEAIKQRHRSLLPVGVKAVEGHFNRGDVVECVDQSGQRVAVGRVNFSSRSAEIIKGLASDKVHQVLGEARSLEMIHRNHMAIY

SEQ ID NO: 127761 - DNA, 1170 bp, Agrobacterium tumefaciens
  CDS (1)..(1170): transl_table=11
atgagcctgacgcgcaagccgctggcgagccaccaccggatcgtcatcaagatcggttcggcgcttctggtggaccggaaaagcggcctgaagaaagactggctggatgccatctgcgaggatatcgcggcgctgaaaaaaaacggcgcggatgtccaggtcgtgtcttctggcgccattgcgcttggccgcaccgtgctcggcctgccttccggtgcactgaagctggaagaaagccaggcggcggcggcagtcggccagattgcgctggcgcgggcatggtcggaaagcctgtcgcggcatgagatcgtcgccggtcaaattctattgacgctatccgataccgaggagcgtcggcgttatctcaacgcgcgtgccaccatcaatcagcttttgaagatcggcgccattccgatcatcaatgaaaacgacacggtggcgaccactgaaatccgttatggggacaatgaccgtctggccgcgcgcgtggccacgatgacgggtgccgatctcctggtgctgttgtcggatattgacgggctctacaccgccccaccgcatctcgatcccgatgcgaaatttcttgagacgattgccgatatcacgcccgaaatcgaagccatggcgggtggggcggcctccgagctttcgcgcggcggtatgcgcaccaagatcgatgcgggcaagatcgcgaccgctgccggttgtggtatgatcatcgcttccggcaagacgctcaatccgctgaaggcaatcgaaaacggcgcacggtcttcatggtttgcaccctccggcacgccggtgacggcccgcaagacctggattgccgggcaattgcagccggccggcgaaatccatgtggatgccggggccgaaaaggcgctttatgctgggaaaagcctgcttcccgccggtgtgcggcaggtgaagggcaatttcggacgcggcgatgccattgccatcatcggcgtcgaaggccgtgaagtggcgcgcggtcttgcgggttacgatgcagaggaagcgcgcctgatcatcggccacaagtccaacgagatcgagacgatcctcggttatgtcggacgggcggcgatgatccatcgcgacgaccttgtgatgactggcgctgccgtcaaagtgaaacatgcaaagaaggatgaggtccatgcctga

SEQ ID NO: 127762 - protein, 389 aa, Agrobacterium tumefaciens
MSLTRKPLASHHRIVIKIGSALLVDRKSGLKKDWLDAICEDIAALKKNGADVQVVSSGAIALGRTVLGLPSGALKLEESQAAAAVGQIALARAWSESLSRHEIVAGQILLTLSDTEERRRYLNARATINQLLKIGAIPIINENDTVATTEIRYGDNDRLAARVATMTGADLLVLLSDIDGLYTAPPHLDPDAKFLETIADITPEIEAMAGGAASELSRGGMRTKIDAGKIATAAGCGMIIASGKTLNPLKAIENGARSSWFAPSGTPVTARKTWIAGQLQPAGEIHVDAGAEKALYAGKSLLPAGVRQVKGNFGRGDAIAIIGVEGREVARGLAGYDAEEARLIIGHKSNEIETILGYVGRAAMIHRDDLVMTGAAVKVKHAKKDEVHA

SEQ ID NO: 127763 - DNA, 1110 bp, Anabaena variabilis
  CDS (1)..(1110): transl_table=11
atgaccaaaacaattgtcgtcaaaatcggcacatctagcctcacccaaccagaaaccggacaactagccctctccaccattgcaactttggcggaaacactctcttatttaagacagcaaggtaatcaagtgattttagtctcctctggggctgtgggagtcggttgtgcgcggttgggtttaacggaacgtcccaaagcgatcgctctcaaacaagcagtagccgcagtgggtcaaggtagattaatgcgcgtatatgacgacttatttaccaccttacaacagccgatcgcccaagttttgctaactcgcagcgatttggtacaacgtagccgttatctcaacgtatacaacacctttcgggaattacttgccttgggggtaattcctgtagtcaacgagaatgataccgttgccgtggatgaactgaaatttggtgataatgataccctttcagctttggttgctagtcttgtagaggcagactggctatttttactcactgacgtagaccgattatactcagccgatccccgttctgtccccgatgcccgaccgatatctttggtgacaagcatcaaagaattagcagacttacaagtacaaacaggttctcaaggttctcaatggggtactgggggaatgatgacaaaaatttcggcggcgagaattgcgatcgcggcgggagtgcgtactgtgattactcaagggcgatatcctcgcaatatcgaaaaaattatccaaggggaactgattggaactcattttcaaccccaaccagaaccaacctccgcccgtaaacgttggattgcttacggtttagtcccgacaggtaaattatacttagattctggtgcgatcgccgccatagttaaagcaggtaaatcgttattgccagcaggagttaaaaccgttgcaggtgaatttgagcctcaagatgcagtacagctattagatcctcaaggtaacgaaattgccagaggactagttaactatagcagcaaagacttacagcaaatttgtggtcgtcactctaaagaaatttcgactattttgggttatgtaggtgcagaaaccgtgatccatcgagataacttagtattgacgtag

SEQ ID NO: 127764 - protein, 369 aa, Anabaena variabilis
MTKTIVVKIGTSSLTQPETGQLALSTIATLAETLSYLRQQGNQVILVSSGAVGVGCARLGLTERPKAIALKQAVAAVGQGRLMRVYDDLFTTLQQPIAQVLLTRSDLVQRSRYLNVYNTFRELLALGVIPVVNENDTVAVDELKFGDNDTLSALVASLVEADWLFLLTDVDRLYSADPRSVPDARPISLVTSIKELADLQVQTGSQGSQWGTGGMMTKISAARIAIAAGVRTVITQGRYPRNIEKIIQGELIGTHFQPQPEPTSARKRWIAYGLVPTGKLYLDSGAIAAIVKAGKSLLPAGVKTVAGEFEPQDAVQLLDPQGNEIARGLVNYSSKDLQQICGRHSKEISTILGYVGAETVIHRDNLVLT

SEQ ID NO: 127765 - DNA, 1071 bp, Aquifex aeolicus
  CDS (1)..(1071): transl_table=11
atgagaatagttttcaagataggttctaacctccttgagaccgacgagggagatatagacctcagctttttatccaagctggcggaaggcataaaaaaactccactcctttggtgataaagttttaatagtctcttcgggtgcggttctctcgggagcgaagaagctaggaattaaggaaaagccaaaagatctgactttaaaacaggccctcgcctccgtgggacagagctacctcatgcacctttacgacacgatattctcaaactacggattgaaggtaggtcaggttctcctcacgaaagacgttttttcaaaggaaaaggaagagaggtttaaaaacgcaaagagcacccttgaaaagctcctagaactgggcgtagttcccgtaataaacgagaacgacgccgttgcagtggaggaactcgtgttcggggacaacgacttcctcgcggtttacgtctctttcatggtaaacgctgaccttctagtgatattctcaagtgctggtggactgaaggacgacaaagacaggataattcccgtggttgaggacatagaaaaggttttcaagtacgtgaggggaacgggtacgagcttcggaacgggcggaatgaggagcaagcttgaggccacaagactcgcaacaactctgaacattcccgtgataataacgagcaaggaagaaaacattttggacttgaggaatttgaaaactaagggaacgctttttaagccatccaagagaaaactcaggaacgccctcaaggttatagctaccttggaagaaccgaaaggtataatcgtggtggacaggggagctcaagaagccctgaaagcaggaaagagcctgcttcccgcgggtgtggtttccgttcagggaaactttaaaaggggagatgtggtaagcattcagaacgaagaaggactgataataggaaagggaaaggtgaatttttcttcggaggaaatagaaaagataaaaggtctaaaaacgagtgaagttagaaaactattaaacacaacaaaagacgaagtaatccacagagataatatggttatttttctctga

SEQ ID NO: 127766 - protein, 356 aa, Aquifex aeolicus
MRIVFKIGSNLLETDEGDIDLSFLSKLAEGIKKLHSFGDKVLIVSSGAVLSGAKKLGIKEKPKDLTLKQALASVGQSYLMHLYDTIFSNYGLKVGQVLLTKDVFSKEKEERFKNAKSTLEKLLELGVVPVINENDAVAVEELVFGDNDFLAVYVSFMVNADLLVIFSSAGGLKDDKDRIIPVVEDIEKVFKYVRGTGTSFGTGGMRSKLEATRLATTLNIPVIITSKEENILDLRNLKTKGTLFKPSKRKLRNALKVIATLEEPKGIIVVDRGAQEALKAGKSLLPAGVVSVQGNFKRGDVVSIQNEEGLIIGKGKVNFSSEEIEKIKGLKTSEVRKLLNTTKDEVIHRDNMVIFL

SEQ ID NO: 127767 - DNA, 1116 bp, Azoarcus sp
  CDS (1)..(1116): transl_table=11
atgagagacaagatccgcaacgcgcgacgcatcgtcgtcaaagtcggcagcgcactcgtcacgaacaacggcgccggactcgacaaagcggcgatgggcgactgggcgcgccagatcgcaacgttgcgtggcgcgggcaagcaggtcgtgctggtgtcgtccggtgcgatcgccgcgggaatgcagcgcctcggctggcaaaagcgcccgcacgaaatgcacaagctgcaggccgccgccgcggtcgggcaaatgggcctcgtcaaagcctacgaggatgccttttcgcgtcacaatctccacaccgcgcagatcctgctgacccacgacgacctcgccgaccgcaagcgctacctcaacgcacgttcgacgctgacgacgctgctcgagctgggcgtcgtgccgatcatcaacgagaacgacacgatcgtcaccgacgagatcaagttcggcgacaacgacacgctcggcgcgctggtcgcgaacctcatcgaagctcatgcgctggtgatcctcaccgaccagcaaggcttgtacactgccgacccgcgccgcgaccccaatgcgacgctcgtctgcgaaggtcgggccgaggacaggtcgtacgaagcgatggcaggcggcgccggcaccggtatcagcaggggcggcatgatcacgaagatccgcgccgcccagcgtgcggcgcgaagcggggcgcacacgtgcatcgcgagcggcaacgaagtcgacgcgctgatccgcctcacgcaggccgaaccgctcggcaccctgctctacgcgaccagttcgccgctgcaggcgcgcaagcagtggctcgccgaccacctgcagctcgcgggcgacctcattctcgacgacggcgcggtcgttgcgttgcgcagcggacgcagcttgttgcccgtgggcgtcgtcgaggtcggaggcgaattcgagcgcggcgcagcggtcgcatgccgtagcgccggcggtgacgagatcgcacgcggcctagtcaactacagtagcagcgagtgccgccgcatcgcgcgcaaatccagcacacaaatcgaaaagctgctcggctacatcgacgaacccgaactggttcaccgcgacaacatggtactgcgataa

SEQ ID NO: 127768 - protein, 371 aa, Azoarcus sp
MRDKIRNARRIVVKVGSALVTNNGAGLDKAAMGDWARQIATLRGAGKQVVLVSSGAIAAGMQRLGWQKRPHEMHKLQAAAAVGQMGLVKAYEDAFSRHNLHTAQILLTHDDLADRKRYLNARSTLTTLLELGVVPIINENDTIVTDEIKFGDNDTLGALVANLIEAHALVILTDQQGLYTADPRRDPNATLVCEGRAEDRSYEAMAGGAGTGISRGGMITKIRAAQRAARSGAHTCIASGNEVDALIRLTQAEPLGTLLYATSSPLQARKQWLADHLQLAGDLILDDGAVVALRSGRSLLPVGVVEVGGEFERGAAVACRSAGGDEIARGLVNYSSSECRRIARKSSTQIEKLLGYIDEPELVHRDNMVLR

SEQ ID NO: 127769 - DNA, 1104 bp, Bacillus anthracis
  CDS (1)..(1104): transl_table=11
gtgaaaaaacaacgaattgttgtaaagattgggagcagttctttggcggatagtcacgaaggcatttctaaagaacaactttcagatcatgttgcggcattagctcgattgaaagaggaagggcatgaagtgttgttaattacatctggggccgtcgcagcaggtttttcagctctagggtaccctagtagacctgtaacaattaaaggaaaacaggcagctgcggctgtcggacaaagtttgttaatgcaggcgtacacggaggaatttcgtaaatacggtatcgttactgcgcaactattgctgactagaagtgatttttctagaaaagaacaatatagtaacgcttacgcgactttaggagagttactaaaccgttctgctcttccaatcattaatgaaaatgattccatttctttagaggagctaacgttcggtgataatgatatgctgtcagctttagtaagcggacttgtttcggcggatatgctgatgatttttacagatgtgaacggtttatatgataaaaatcctcagaaaaatgaggatgcgaaaaaatattatttccttcctgaagttacagaagaaatcgcttctcttgcaggagatgctggctccaaacttgggactggcggaatgaaatcaaaagtcgatgctgcaaagacagcactctctcttggtgtcagtgtatttatcggaacaggacgtggacaagagaaatttgtagatgttttgaaggggaaaggtgatggaacgtatgtcggaaatgcccctcaaaaagaaatgaagataaataagcaatggatcgctttgcattcggttgttagcggacaaattgaaatagacgccggagcagctacagctatcattcagcatggcaagagtcttcttcctgctggtgttacaaatgtttcagggtttttccaagtgggcgaagtcgtagaagtaatgacgcaacaaggacgcgtgattggaaaaggacaatgcacatatagtgcagaggagctaagggatgtaaaaggtatgcaaagccaacagattcaagcaagaggcgaaagacataattatgaagtcattcatagagattattgggtttcattttaa

SEQ ID NO: 127770 - protein, 367 aa, Bacillus anthracis
MKKQRIVVKIGSSSLADSHEGISKEQLSDHVAALARLKEEGHEVLLITSGAVAAGFSALGYPSRPVTIKGKQAAAAVGQSLLMQAYTEEFRKYGIVTAQLLLTRSDFSRKEQYSNAYATLGELLNRSALPIINENDSISLEELTFGDNDMLSALVSGLVSADMLMIFTDVNGLYDKNPQKNEDAKKYYFLPEVTEEIASLAGDAGSKLGTGGMKSKVDAAKTALSLGVSVFIGTGRGQEKFVDVLKGKGDGTYVGNAPQKEMKINKQWIALHSVVSGQIEIDAGAATAIIQHGKSLLPAGVTNVSGFFQVGEVVEVMTQQGRVIGKGQCTYSAEELRDVKGMQSQQIQARGERHNYEVIHRDYWVSF

SEQ ID NO: 127771 - DNA, 1104 bp, Bacillus cereus
  CDS (1)..(1104): transl_table=11
gtgaagaaacagcgaatagttgtaaagattgggagtagttctttggcggatagtcatggaggcatttctaaagaacaactttcagatcatgttgccgcattggctcgattgaaagaggaagggcatgaagttttattaattacatctggggccgttgctgcaggtttttctgctctaggatatccgagcagacctgtaacaattaaagggaaacaggctgcagcagctgtcggacaaagtttattaatgcaggcgtacacggaggaattccgtaaatatggtattgttactgcacaacttttgctgacgagaagtgatttttctagaaaagaacaatatagtaacgcatacgctacgttaggagagttactaaaccgttctgctcttccaattattaatgaaaatgattccatctctttagaggagttaacgttcggtgataatgatatgctgtcagctttagtaagcggacttgtttcggcagatatgcttatgatttttacagatgtgaacggtttatatgataaaaatcctcaaaaaaatgaggatgcgaaaaaatattatttccttcctgaagttacagaagaaattgcttctcttgctggagatgctggctcaaaacttgggactggcggtatgaaatcaaaaattgatgctgcaaagacggcgctatctcttggggtaagtgtatttatcggtacaggacgtggacaagagaaatttgttgatgttttaaaggggaaaggtgacggaacgtatgtcgggaatgcccctcaaaaagaaataaagatgaacaagcaatggattgccttgcattcggttgttagcggtcaaattgaaatagacgccggagcagctacagctatcattcagcatggtaaaagtcttcttcctgctggtgttacaaatgtgtcaggatttttcaaagttggcgatgttgtagaagtaatgacgcaacaagggcgcgtaattggaaaaggacaatgcacatatagcgcagaggaattaagagagataaaaggtatgcaaagtcaacatattcaagcaagaggcgaaaggcataattatgaagtcatccatagggatcattgggtttcactttaa

SEQ ID NO: 127772 - protein, 367 aa, Bacillus cereus
MKKQRIVVKIGSSSLADSHGGISKEQLSDHVAALARLKEEGHEVLLITSGAVAAGFSALGYPSRPVTIKGKQAAAAVGQSLLMQAYTEEFRKYGIVTAQLLLTRSDFSRKEQYSNAYATLGELLNRSALPIINENDSISLEELTFGDNDMLSALVSGLVSADMLMIFTDVNGLYDKNPQKNEDAKKYYFLPEVTEEIASLAGDAGSKLGTGGMKSKIDAAKTALSLGVSVFIGTGRGQEKFVDVLKGKGDGTYVGNAPQKEIKMNKQWIALHSVVSGQIEIDAGAATAIIQHGKSLLPAGVTNVSGFFKVGDVVEVMTQQGRVIGKGQCTYSAEELREIKGMQSQHIQARGERHNYEVIHRDHWVSL

SEQ ID NO: 127773 - DNA, 1104 bp, Bacillus cereus
  CDS (1)..(1104): transl_table=11
gtgaaaaaacaacgagttgttgtaaagattgggagtagttccttggcagatagtcacggaggcatctctacagaacagctttcagatcacgttgccgcattggctcggttgaaagaagatgggcacgaggttgtgttaattacatctggagccgtcgctgcaggtttttcagcgctaggatatcctagcagacctgtaacgattaaagggaaacaggctgcagcagctgtcggacaaagtttgttaatgcaggcgtacacggaggaattccgtaaatatggcatcgttactgcgcaacttttgctgacgagaagtgatttttctagaaaagaacaatatagtaatgcttacgctacgttaggagaattattaaaccgctccgctcttccaattattaatgaaaatgattccatctccttagaggagctgacgttcggtgataatgatatgctgtcagctttagtaagcgggcttgtttcggcggatatgcttatgatctttacggatgtgaacgggttatatgacaaaaatcctcagaaaaatgcggatgcaaaaaaatattattttcttcctgaagttacggaagaaatttcttctcttgcaggagatgctggctcaaaacttgggactggcggtatgaaatcaaaaatcgatgctgcaaagacagcgctctctcttggtgtgagtgtatttatcggaacaggacgtggacaggaaaagtttgtaaatgttttgaagggtaagggtgatggaacgtatgttggtaatgctcctcaaaaagaaatgaagatgaacaagcaatggattgccttacattcgcttgttagcggacaaattgaagtagatgctggggcagctactgccatcattcagcatggtaagagtttacttccagctggagttacgaatgtatcaagatttttccaagtgggtgaagttgtagaggttgtaacgcaacaagggcgcgtaataggaaaaggacaatgcacatatagcgcagaggaactaatagatgtaaaaggtatgcaaagccaagatattcaagtaagaggcgagagacatagttatgaagtcatccatagggatcattgggtttcactttaa

SEQ ID NO: 127774 - protein, 367 aa, Bacillus cereus
MKKQRVVVKIGSSSLADSHGGISTEQLSDHVAALARLKEDGHEVVLITSGAVAAGFSALGYPSRPVTIKGKQAAAAVGQSLLMQAYTEEFRKYGIVTAQLLLTRSDFSRKEQYSNAYATLGELLNRSALPIINENDSISLEELTFGDNDMLSALVSGLVSADMLMIFTDVNGLYDKNPQKNADAKKYYFLPEVTEEISSLAGDAGSKLGTGGMKSKIDAAKTALSLGVSVFIGTGRGQEKFVNVLKGKGDGTYVGNAPQKEMKMNKQWIALHSLVSGQIEVDAGAATAIIQHGKSLLPAGVTNVSRFFQVGEVVEVVTQQGRVIGKGQCTYSAEELIDVKGMQSQDIQVRGERHSYEVIHRDHWVSL

SEQ ID NO: 127775 - DNA, 1125 bp, Bacillus halodurans
  CDS (1)..(1125): transl_table=11
atgaaaagacaacggatcgtaatcaaaattggaagtagttcgcttacgacgaaacaaggagcgcttgatttagagaaactagaaggctatgtgcgtgccatcgttaacctgcgtaaagctgggcatgaagtgatcctcatttcttctggggcagtagcggcgggcttttctcggctcggataccctgttcgaccaacgaccatggccggtaaacaggcggcagcggccgtcgggcaggcgttgcttatgcagcattatatggaacgttttcatcaacacggaattattgctgcccagcttctcttgacccgaaaagattttcaaaatcaaacgcagtatacaaacgcctattccgccttaatggagctattaaagcgtggggccctgccaatcattaatgaaaatgactccacttcgattgccgagctcacgtttggtgacaatgatatgctttctgcccttgtgagcggattgatccatgcacacaccctttgcattttgacagatgtcaatgggctatatgacgctaaccctaaaacgcatccgaatgcaaaacgctatcaatacctcccgacgattcctgatgaaatgttgcaaatgggcggagaagcaggatcgaacgttgggactggggggatgaagtcaaaggtagcagcagcacaaacggcgctatcgcttggagtagacgtgtttatcggaaaagcgagcggagaacatgcattacttgacatcctctcaggcaagggagatggcacgtatgtaggtaatacgggcgatttaatggaaggaaagacaaagcaatggattcgtcttcactcccccgtaagtggcgtagttcggatcgatcaaggggctgaacgggcgataatgaatgaaggaaagagtttacttccagcgggtgttacctccgtgcacgggacgtttcaagcgggagatgtggtccacatatggaatgaacaaaacaaagtcattgcgaaaggccaagtcacgctttcttctgagcagctacgaaaagttcaaggaagaaaaagtgatgaagccaaacagttgatcccactcgtgcgggatgaggtggtccatcgtgaccaattagtcatacaagaaaaggagttgaatgaatcatga

SEQ ID NO: 127776 - protein, 374 aa, Bacillus halodurans
MKRQRIVIKIGSSSLTTKQGALDLEKLEGYVRAIVNLRKAGHEVILISSGAVAAGFSRLGYPVRPTTMAGKQAAAAVGQALLMQHYMERFHQHGIIAAQLLLTRKDFQNQTQYTNAYSALMELLKRGALPIINENDSTSIAELTFGDNDMLSALVSGLIHAHTLCILTDVNGLYDANPKTHPNAKRYQYLPTIPDEMLQMGGEAGSNVGTGGMKSKVAAAQTALSLGVDVFIGKASGEHALLDILSGKGDGTYVGNTGDLMEGKTKQWIRLHSPVSGVVRIDQGAERAIMNEGKSLLPAGVTSVHGTFQAGDVVHIWNEQNKVIAKGQVTLSSEQLRKVQGRKSDEAKQLIPLVRDEVVHRDQLVIQEKELNES

SEQ ID NO: 127777 - DNA, 1104 bp, Bacillus thuringiensis subsp
  CDS (1)..(1104): transl_table=11
gtgaaaaaacaacgaattgttgtaaagattgggagcagttctttggcggatagtcacgaaggcatttctaaagaacaactttcagatcatgttgcggcattagctcgattgaaagaggaagggcatgaagttttgttaattacatctggggccgttgctgcaggtttttctgcgctaggatatcctagcagacctgtaacaattaaaggaaaacaggcagctgcagctgtcggacaaagtttgttaatgcaggcgtacacggaggaattccgtaaatatggtatcgttactgcgcaactattgctgacgagaagtgatttttctagaaaagaacaatatagtaacgcttacgctactttaggagagttactaaaccgttctgctcttccaatcattaatgaaaatgattccatttctttagaggagctaacgttcggtgataatgatatgctgtcagctttagtaagcggacttgtttcggcggatatgctgatgatttttacagatgtgaacggtttatatgataaaaatcctcagaaaaatgaggatgcgaaaaaatattatttccttcctgaagttacagaagaaatcgcttctcttgcaggagatgctggctcaaaacttgggactggcggaatgaaatcaaaaatcgatgctgcaaagacagcactctctcttggtgtgagtgtatttatcggaacaggacgtggacaagagaaatttgtagatgttttgaaggggaaaggtgatggaacgtatgtcggaaatgcccctcaaaaagaaatgaagatgaataagcaatggatcgctttgcattcggttgttagcggacaaattgaaatagacgctggagcagctacagctatcattcagcatggcaagagtcttcttcctgctggtgttacaaatgtttcagggtttttccaagtgggcgaagtcgtagaagtaatgacgcaacaaggacgcgtgattggaaaaggacaatgcacatatagtgcagaggagctaagggatgtaaaaggtatgcaaagccaacatattcaagcaagaggcgaaaggcatagttatgaagtcatccatagagatcattgggtttcactttaa

SEQ ID NO: 127778 - protein, 367 aa, Bacillus thuringiensis subsp
MKKQRIVVKIGSSSLADSHEGISKEQLSDHVAALARLKEEGHEVLLITSGAVAAGFSALGYPSRPVTIKGKQAAAAVGQSLLMQAYTEEFRKYGIVTAQLLLTRSDFSRKEQYSNAYATLGELLNRSALPIINENDSISLEELTFGDNDMLSALVSGLVSADMLMIFTDVNGLYDKNPQKNEDAKKYYFLPEVTEEIASLAGDAGSKLGTGGMKSKIDAAKTALSLGVSVFIGTGRGQEKFVDVLKGKGDGTYVGNAPQKEMKMNKQWIALHSVVSGQIEIDAGAATAIIQHGKSLLPAGVTNVSGFFQVGEVVEVMTQQGRVIGKGQCTYSAEELRDVKGMQSQHIQARGERHSYEVIHRDHWVSL

SEQ ID NO: 127779 - DNA, 1119 bp, Bacillus clausii
  CDS (1)..(1119): transl_table=11
atggccacaggaacgattgtcattaaaattggcagcagcagtttaacagatggcaacggcgccttaagcacggaacggttaagaggccatgtcgaagccatatgcgagctgcgccatcaaggcataaatgtgattgtcgtgacgtctggcgcagtcgcggctggttttacgctcattggctatcaccagaggccgaaatccatttcgcaaaaacaagcggcagcagccgttggccaaagcttgctcatgcaagcatatatggatgcattccgcttgcatggctacacagcagcgcagctgctgttaacacgagccgactttgcggatccagcacgtttttcaaacatttcacaaacattgcgtgaactcttaaagcgaggtgctattccagtcattaacgaaaacgactcgacttcagttgatgaactgacgtttggcgacaatgaccgcttgtctgccctcgttagcggcatcattcacgcagatatgctctgcttgtataccgatgtcaacggtgtatatgaccaaaacccaaacgactcgcctaacgccaaaaaataccattacttagcaagcgtacctgaagcattgcttgatcgggtgagcgctgatacttctgctgttggaacaggaggcatgaagtcgaagctgcttgctgcgaaaacggcgattgagcttggtacaaatgtatttatcggcaatggcaaaggaagggaaacgtttacagatgttttacttggtaaaggcgatggtacgtatctcggcccctttacaaataaaacgatgtcgacgacaaaacaatggattgtcttccatagcgaaccggctggaagcattgaaatcgacagcggcgcttcaaccgcgttgttaaaaaggggcaaaagcttgctgcctgcaggcgtactctcagctaaaggcgatttttcagccggcgacatcattgaagtgtttttcaacaaccgccccatcggcaaggggaaaaccaactttagcaaacatgaactagagcttattaaaggactcaatagcgaggaagccttgtctctaacaaaacgttcaaaaaaagctgttattcaccgcgacttttgggtggcgacaaaaaaggagtgttcttattaa

SEQ ID NO: 127780 - protein, 372 aa, Bacillus clausii
MATGTIVIKIGSSSLTDGNGALSTERLRGHVEAICELRHQGINVIVVTSGAVAAGFTLIGYHQRPKSISQKQAAAAVGQSLLMQAYMDAFRLHGYTAAQLLLTRADFADPARFSNISQTLRELLKRGAIPVINENDSTSVDELTFGDNDRLSALVSGIIHADMLCLYTDVNGVYDQNPNDSPNAKKYHYLASVPEALLDRVSADTSAVGTGGMKSKLLAAKTAIELGTNVFIGNGKGRETFTDVLLGKGDGTYLGPFTNKTMSTTKQWIVFHSEPAGSIEIDSGASTALLKRGKSLLPAGVLSAKGDFSAGDIIEVFFNNRPIGKGKTNFSKHELELIKGLNSEEALSLTKRSKKAVIHRDFWVATKKECSY

SEQ ID NO: 127781 - DNA, 1098 bp, Bacillus subtilis
  CDS (1)..(1098): transl_table=11
atgaaaaaacaaagaatagtagtgaaaataggaagcagttcgctcacgaatagcaaaggaagcattgatgaggcaaaaatcagagagcatgttcaggcgatttccgtgttaaaaaaagcggggcatgaaatgattctgattacctcgggtcccgtagcgcgggggttttccagcctcggttatccatcccgtcccgttaccatcaaaggaaaacaggcggcggccgcggtcggacaaacactgttaatgcagcaatatatgaatcaatttaaacaatactcactgactccgggacaaatccttttaacgagaaatgatttttcgaaaagagaacggtatcgaaacgcgtatgctacgataatggaattattagagcggggcgtcattccgattatcaacgagaacgattctacatctgttgaagaattgacattcggagataatgatatgctttctgcgttagtcagcggattgattcacgcggaccagctcatgattctcactgacattaacggactgtatgatgccaatccaaatgaaaatcctgaggcgaaacgatttgattatttgccagagatcacgcctgaattgcttggatatgcaggttcagctggatcaaaggtcggcaccggcggaatgaaatcaaagctgttagccacacaaaccgcgctgtctctgggagtgaaagtattcattggaactggcagcggagagcaaaaacttgcggacattttggacggcaggggagacggcacttatatcggagacaaagaactatcttcggttaacaacacaaggcagtggattcagttccactcgccgatatcgggagaaattatcattgatgcgggtgccgaagaggcgatgatccataatggaagcagccttttgcccgctggagttgtgggcgtgaacggaagctttccgaaaggggcggttgtggaagtcaggggaccgggcggcgtgatcggcaaaggccaaactcattactcctccgaggagattatggaggctaaaggcaaacgcagtgacgaacttgattttgagaaaacgtttgaggttattcataggaatgactgggtcaatgtaaaagactag

SEQ ID NO: 127782 - protein, 365 aa, Bacillus subtilis
MKKQRIVVKIGSSSLTNSKGSIDEAKIREHVQAISVLKKAGHEMILITSGPVARGFSSLGYPSRPVTIKGKQAAAAVGQTLLMQQYMNQFKQYSLTPGQILLTRNDFSKRERYRNAYATIMELLERGVIPIINENDSTSVEELTFGDNDMLSALVSGLIHADQLMILTDINGLYDANPNENPEAKRFDYLPEITPELLGYAGSAGSKVGTGGMKSKLLATQTALSLGVKVFIGTGSGEQKLADILDGRGDGTYIGDKELSSVNNTRQWIQFHSPISGEIIIDAGAEEAMIHNGSSLLPAGVVGVNGSFPKGAVVEVRGPGGVIGKGQTHYSSEEIMEAKGKRSDELDFEKTFEVIHRNDWVNVKD

SEQ ID NO: 127783 - DNA, 1083 bp, Bacteroides thetaiotaomicron
  CDS (1)..(1083): transl_table=11
atgaaacaagagtttacacgaatagcagtaaaagtaggcagtaacgtattggcacgccgtgacggtacattggacgtcacccgtatgtcggcactcgttgaccagatagcagaattaaataaatccggagtagagatcattctcatttcttcgggagcagttgcttcgggacgcagcgaaatacacccacagaaaaagctcgacagtgtagaccagcgccagttattctccgccgtaggacaggctaaattaataaaccgctactacgaacttttccgtgaacacggcattgcggtaggtcaggtgctgactaccaaagagaatttcagtacccgccgccattatctgaatcagaagaactgtatgacggtgatgctcgaaaacggcgtcatccccatcgtcaatgagaatgatacgatttcggtcagcgagcttatgttcacggacaatgacgaactttccgggctgatcgcttccatgatggatgcgcaggcactgattatcctgagtaacatagacggaatctacaacggttcaccctccgatcctgcctccgctgtcattcgggagatcgagcacggaaaggatttatccaactatatccaggctaccaaatcgagcttcggccgcggcggtatgctgacgaaaacgaatattgcccgcaaggtagccgacgaagggattacggtcatcatcgccaacggaaaacgggataatattctcgtagacttgttgcaacagccggacgatacagtttgcacgcgctttatcccttccaccgaagcggtatccagtgtaaagaaatggattgcccacagcgaaggattcgccaaaggggaaattcatattaacgaatgtgccacggatatcctcagttcggagaaggcagccagcattcttccggtcggaatcacccacatcgaaggcgaatttgagaaagacgatattgtacgcatcatggactttctgggcaatcaggttggtgtaggaaaagcgaactgcgattccgcacaagccagggaagcaatgggcaaacatggcaaaaagcctgtagtacattacgactatctgtatatcgaataa

SEQ ID NO: 127784 - protein, 360 aa, Bacteroides thetaiotaomicron
MKQEFTRIAVKVGSNVLARRDGTLDVTRMSALVDQIAELNKSGVEIILISSGAVASGRSEIHPQKKLDSVDQRQLFSAVGQAKLINRYYELFREHGIAVGQVLTTKENFSTRRHYLNQKNCMTVMLENGVIPIVNENDTISVSELMFTDNDELSGLIASMMDAQALIILSNIDGIYNGSPSDPASAVIREIEHGKDLSNYIQATKSSFGRGGMLTKTNIARKVADEGITVIIANGKRDNILVDLLQQPDDTVCTRFIPSTEAVSSVKKWIAHSEGFAKGEIHINECATDILSSEKAASILPVGITHIEGEFEKDDIVRIMDFLGNQVGVGKANCDSAQAREAMGKHGKKPVVHYDYLYIE

SEQ ID NO: 127785 - DNA, 1140 bp, Bartonella henselae
  CDS (1)..(1140): transl_table=11
atggcagttggattgcaaaagcttgtacattataaacgcattgtgatcaaaattggatctgcgcttttggttgatcctcagacaggtttacgcgctgaatggcttaaaagtttaataagtgatgttgccaacttgcatcaaaaaggcgttgagattttattggtttcttcaggggctattgctttaggaagaacattgcttcgtcttcctaagggggctttgaaattggaagagagtcaggcttgtgctgctttggggcaaattgagttggctaaaacctatagtgatacgcttgcgcaatatggattaaaaacgggtcagattttgctcactctcttcgatacggaagaacgacggcgttatctcaatgcgcgcgctacgattaatgtgcttttacgttttggagcggtacccgttattaatgaaaatgatactgttgccacaagtgaaattcgctatggtgataatgatcgtttagcagcacgtgtagcaacgatgatgggggcagatcttttgatacttttatcagatattgatggtctttataccaaatctccccatcgtgatccaacggcagagtttattccttttattgcatcaattacgagtgatatcgaaaaaatggcagatgttgctcattcagagctgtctcgtggaggaatgaagactaagcttgatgctggaaaaatagcaaattctgctggaacggctatgattattacttcagggaagcgtatgaatcctcttgcggcgattgacagaggggaacgcggaagtttttttgctgccggtgaaaagcctgttaatgcttggaaaacttggatttctggtcatttagatccctctggtattttaatgattgatcaaggagcggttaaggctcttgaatctggaaaatccttattagctgcgggagtcgtagcgattgagggaagattcaatcgtggagatacggttgcgattgttgatacaaatggcgttgaaattgctcgtggacttgtgagttatggcaaagatgaatctgtacgcattatggggcgtaaaagcgaagaaattgaatctatcctagggtatgaagcgcgttctgctatggtgcatcgtaatgatatggttttacgctgcttgaccgattctgcttaa

SEQ ID NO: 127786 - protein, 379 aa, Bartonella henselae
MAVGLQKLVHYKRIVIKIGSALLVDPQTGLRAEWLKSLISDVANLHQKGVEILLVSSGAIALGRTLLRLPKGALKLEESQACAALGQIELAKTYSDTLAQYGLKTGQILLTLFDTEERRRYLNARATINVLLRFGAVPVINENDTVATSEIRYGDNDRLAARVATMMGADLLILLSDIDGLYTKSPHRDPTAEFIPFIASITSDIEKMADVAHSELSRGGMKTKLDAGKIANSAGTAMIITSGKRMNPLAAIDRGERGSFFAAGEKPVNAWKTWISGHLDPSGILMIDQGAVKALESGKSLLAAGVVAIEGRFNRGDTVAIVDTNGVEIARGLVSYGKDESVRIMGRKSEEIESILGYEARSAMVHRNDMVLRCLTDSA

SEQ ID NO: 127787 - DNA, 1155 bp, Bartonella quintana
  CDS (1)..(1155): transl_table=11
atgtcaggactgattaagacagctggattgcaaaaacttgcgcactataaacgtattgtggtaaaaattggatctgcgcttttggttgagcctcagacaggtttacgagctgaatggcttaaaagtttgataaatgatgttgccaagttgcatcaaaaaggcgttgagattttattagtgtcttcaggggctattgccttagggagaacattgctccgtcttcctagaggtgctttgaaattggaagaaagtcaggcatgtgctgctttggggcaaattgaattagcaaaaacctatggtgatgcgcttgctcaatatggattaaaaactggtcagattttgctcactctattggatacggaagagcgacggcgttatctcaatgcgcgtgctacgattaatgtgcttttacgttttggagcagtgcctgttattaatgagaatgatactgttgcaacaagtgaaattcgttatggtgataatgatcgtttagcagctcgtgtggcgacgatgatgggtgcggatcttttaatacttttatcagatattgatggtctttatacgaagtctcctcatcgtgatccaacagctgaatttattccttttattgcatcaattacaagtgatatcgaaaaaatggcagacgttgctgcttcagagctttcacggggaggaatgaagactaagcttgatgccggaaaaatagcaaattctgctggaacagcaatggttattacttcaggcaagcgcatgaatcctcttgcagcgattgatagaggggaacgcagaagtttttttgctgccagtgaaaagcctgttaatgcttggaaaacatggatttctggtcatttaggtccgtctggtattttaacgattgatccgggagcagctaaggctcttgaatcgggaaaatctttattagctgcaggagttatagcggttgatgggatgtttcatcgtggagatacggttgcaattgttgatacaaatggcgttgagattgctcgtgggcttgtgagttatggcaaaaatgaagctgtacgcattatggggtgtaaaagagaagaaatcgagtctattcttgggtatgaagcgcgttctgctatggtgcatcgtaatgatatggttttacgctgcttgaccgattctacttaa

SEQ ID NO: 127788 - protein, 384 aa, Bartonella quintana
MSGLIKTAGLQKLAHYKRIVVKIGSALLVEPQTGLRAEWLKSLINDVAKLHQKGVEILLVSSGAIALGRTLLRLPRGALKLEESQACAALGQIELAKTYGDALAQYGLKTGQILLTLLDTEERRRYLNARATINVLLRFGAVPVINENDTVATSEIRYGDNDRLAARVATMMGADLLILLSDIDGLYTKSPHRDPTAEFIPFIASITSDIEKMADVAASELSRGGMKTKLDAGKIANSAGTAMVITSGKRMNPLAAIDRGERRSFFAASEKPVNAWKTWISGHLGPSGILTIDPGAAKALESGKSLLAAGVIAVDGMFHRGDTVAIVDTNGVEIARGLVSYGKNEAVRIMGCKREEIESILGYEARSAMVHRNDMVLRCLTDST

SEQ ID NO: 127789 - DNA, 1134 bp, Bifidobacterium longum
  CDS (1)..(1134): transl_table=11
atgagcactccgagtcaggccgaggtgcggcgcatgatcgccgcagccggaaccattgtcgtgaaagtcggctccagctcgctgacccagccgagcggtcacctcgacccggacaagctcgacgcgttggccgcggccttggctcaggtccgattgatgggcggacgtgtggtgctggtctcgtccggtgctatcgccgccggtttcgggcctctgggctttgactcgcggccggtggacgtggccactcagcaggccaccgcagccgtcggccaagggctactgatggcccgctacgagactgcgttcggtcgattcggtattcgcgtcggccagattctgatcactgccgaagatacgattcgtgccacccagtaccgcaatgtggaacgcacgctggaccgtctgcttgacctcggcgtggtgccgatcatcaacgaaaacgattcgttggcctcgaacgagattcgcttcggcgacaacgatcgactctccgcgttggtggccaacctggtgcgggccgaagccttggtgctactgaccgacgtggacgcgctgtacactgcgccgccctcgcagcccggctcccgccgtgtggaatatgtgcccaacgtgattgatgcgctgggcgacatccaagtctccggctccggctccaaggtcggcaccggcggcatggtcaccaaactcgaggccgcgcgcgtggcggccgtctcgggcatccccacggtactcacctgcgcctcgaacgcgggccctgcgatgatgggcgatccggtgggcaccgtgttcgcaccggttaaggcccgcggctcctcacgccgtctgtggatcggcttcgccgccgacccgcgcggcacgattgtggtcgatgcgggtgccggccaggcgattcgcggcgggcgtgcctcgctgctggcggccggcgcgctcgaagtacatggcgatttttccgccggcgatccggtctggatcgatgccgaaagcggtgaacacctggcccgaggcctcgccggcttcgattccgaagaaattccgcagatgctcgggcgtaacaccgcccaactcaagcgtttcctcggcccccagtacgcccacccactggttcatcgcgacaatctcgtgctcgtgtga

SEQ ID NO: 127790 - protein, 377 aa, Bifidobacterium longum
MSTPSQAEVRRMIAAAGTIVVKVGSSSLTQPSGHLDPDKLDALAAALAQVRLMGGRVVLVSSGAIAAGFGPLGFDSRPVDVATQQATAAVGQGLLMARYETAFGRFGIRVGQILITAEDTIRATQYRNVERTLDRLLDLGVVPIINENDSLASNEIRFGDNDRLSALVANLVRAEALVLLTDVDALYTAPPSQPGSRRVEYVPNVIDALGDIQVSGSGSKVGTGGMVTKLEAARVAAVSGIPTVLTCASNAGPAMMGDPVGTVFAPVKARGSSRRLWIGFAADPRGTIVVDAGAGQAIRGGRASLLAAGALEVHGDFSAGDPVWIDAESGEHLARGLAGFDSEEIPQMLGRNTAQLKRFLGPQYAHPLVHRDNLVLV

SEQ ID NO: 127791 - DNA, 1137 bp, Bordetella bronchiseptica
  CDS (1)..(1137): transl_table=11
atgactgcccaaacctctgccgtttctgtcatttccgcggccaatcggctggtcgccaaagtgggttcctcgctggtcaccaacgaaggccggggcctcgatcgcgccgcggtaggccactgggcagcccagatcgccgccctgcaccagcagggcaagcaggtcgtgctggtttccagcggcgccattgccgaaggcatggcgcggctgggctggcgcaagcgcccttcggccatgcacgaattgcaggccgccgccgccgtgggccagatgggcctgtgccaggcttacgaagccgccttcgccgagttcggcctgcgcaccgcgcagatcctgctcacccacgaagacctggccgaccggcaccgctacctgaatgcgcgctcgaccctgttcgccctgctgcgcctgggcgtggtgcccatcgtcaacgaaaacgacaccgtcgtcaccgacgaaatccgcttcggcgacaatgacaccctgggcgccctggtcaccaacctgatcgaagccgatgcgctcatcatcctgaccgaccagcgcggcctgtacgaagccgacccgcgccgcgacccggccgcgcgcttcgtggcgcatgcgcaagccggcgatgccgccctggaagccatggccggcggcgccggcagcggcgtgggcaccggcggcatgctcaccaagatcctggcggccaagcgggccgcccacagcggcgcccataccgtcatcgcatcaggccgcgaacgcaatgtgctgacccgcctggcgcaaggcgaatgcatcggcacggaattgcgcgcggtcctgccggtatggtcggcgcgcaagcaatggctggccgaccacctgcgcctgcgcggccgcgtggtgctcgatgatggcgccgtgcatgccctgctgcacgagggcaagagcctgctgcccatcggcgtggccgaagtccagggcgagttcgagcgcggcgacgtcgtggcctgcgtcgacatgcatggacgcgagtgcgcgcgcggcctgatcaattattcgtcggccgatacccggcgcatcctgcgccagccgtcgagccagatcgcgcgcatcctgggcagcatgacagacccggaactgatgcaccgcgacaacctggtcgtcacctga

SEQ ID NO: 127792 - protein, 378 aa, Bordetella bronchiseptica
MTAQTSAVSVISAANRLVAKVGSSLVTNEGRGLDRAAVGHWAAQIAALHQQGKQVVLVSSGAIAEGMARLGWRKRPSAMHELQAAAAVGQMGLCQAYEAAFAEFGLRTAQILLTHEDLADRHRYLNARSTLFALLRLGVVPIVNENDTVVTDEIRFGDNDTLGALVTNLIEADALIILTDQRGLYEADPRRDPAARFVAHAQAGDAALEAMAGGAGSGVGTGGMLTKILAAKRAAHSGAHTVIASGRERNVLTRLAQGECIGTELRAVLPVWSARKQWLADHLRLRGRVVLDDGAVHALLHEGKSLLPIGVAEVQGEFERGDVVACVDMHGRECARGLINYSSADTRRILRQPSSQIARILGSMTDPELMHRDNLVVT

SEQ ID NO: 127793 - DNA, 1122 bp, Bradyrhizobium japonicum
  CDS (1)..(1122): transl_table=11
atggccagccccgaactcagtcaattccgccgcatcgtcgtcaaggtcggctccgcactgctggtcgattccgacaagggcgaggtgcggacgtcctggctcgccgcgcttgccgacgacatggccaagctgcacaaggagggacgcgacgtcctcgtcgtctcctcgggctcgatcgcgctcggccgcagccggctcaagctgccgcgcggcccgctgaagctggaggagagccaggccgccgctgccgtcggccagatcgcgctggcgcggatctggtccgaggtgctcggcgcgcacggcatcgacgccgggcagattctcgtgacgctccaggataccgaggagcgccgccgctatctcaatgcgcgctccaccatcggcaagctcctggagtggcgcgccatccccgtgatcaacgagaacgacacggtcgccaccaccgagatccgctacggggacaacgaccgcctcgccgcgcgcgtcgcgaccatggcgagcgccgatctcctggtgctgctctccgatatcgacgggctctacgatgcccccccgaagaacaacccgaacgcaaagctcattcccgtcgtcgacagcatctcctcggagatcgaggctgtcgcaggcgacgccgagtccgagctctcgcgcggcggcatgcgcacgaaggtcgaggcggccaagatcgccacgaccggcggcacgcatatgctgatcgcctccggcaagatcgagcatccgctgcaggcaatcgccaatggcggccgctgcacctggttcctgacaccggccaatcccatcacctcgcgcaagcgctggatcgcgggcacgctggagccgaagggcacgctgacgatcgacgccggcgcggtgacggcgctgcgggccggcgccagcctgctgccggccggcgtgatcaaggtcgagggccagttcgcccgcggcgatgccgtgatcgtgcgcggccccgatacgagcgagatcggccgcggcctgatcgcctatgacgccgacgacgccgaacgcatcaagggccgctcctcccctgatgtgatgaccatcctcggcatcagcggccgcgcggagatgatccaccgtgacgatctggtggtgggcgggtaa

SEQ ID NO: 127794 - protein, 373 aa, Bradyrhizobium japonicum
MASPELSQFRRIVVKVGSALLVDSDKGEVRTSWLAALADDMAKLHKEGRDVLVVSSGSIALGRSRLKLPRGPLKLEESQAAAAVGQIALARIWSEVLGAHGIDAGQILVTLQDTEERRRYLNARSTIGKLLEWRAIPVINENDTVATTEIRYGDNDRLAARVATMASADLLVLLSDIDGLYDAPPKNNPNAKLIPVVDSISSEIEAVAGDAESELSRGGMRTKVEAAKIATTGGTHMLIASGKIEHPLQAIANGGRCTWFLTPANPITSRKRWIAGTLEPKGTLTIDAGAVTALRAGASLLPAGVIKVEGQFARGDAVIVRGPDTSEIGRGLIAYDADDAERIKGRSSPDVMTILGISGRAEMIHRDDLVVGG

SEQ ID NO: 127795 - DNA, 1137 bp, Brucella melitensis
  CDS (1)..(1137): transl_table=11
atgctgaagaaactgaaagactatcgccgcatcgttgttaaaataggctctgcccttctggtggaccgggccacaggcctgaagcgcgaatggctggaaagcctggggcaggatattgccgccttgcagcatgcgggcgttgaggtgctggtggtttcgtcgggtgcaattgcactggggcgcacggttctgggcctgccgaaaaaggcgctgaagcttgaggaaagccaggcggcggcagcagccgggcagattgcgctggcgaaggcttatgcggatgtgctgggcggacatggcatcaagtcgggacagattctggtcacgctttccgatacggaagagcgccgccgctatctcaatgcgcgcgcaaccatcgagaccctgctgaagctcaaggccgtgccgatcatcaatgaaaacgatacggtggcaaccaccgaaatccgttatggcgacaatgacaggttggcggcgcgcgtcgcgaccatgatgggcgcggaccttctgatcctgctttccgacattgacgggctttataccgcgccgccgcacaagaatccggatgcgcaatttctgccctttgtcgaaaccatcacgccgcagatcgaagccatggcgggggcggcagcatccgagctttcgcggggtggcatgaagaccaagctcgatgcgggcaagattgcaaacgctgccgggaccgcgatgattatcacttcgggcacgcgtttcggcccgctttcggcaattgaccgaggggagcgtgcgacattgttcgaggctgcccatgcgccggtcaatgcgtggaagacgtggatttccggcaatctggaaccggctggccggttgactgtggatgcgggtgctgtcaaggcgctcaaatccggcaaatcgcttttgcctgcgggcgtgaaggaagttgacggggatttcgagcgtggcgacacggttgccgtcatgaacgaggatgggcgggagattgcgcgcggtctgatcgcctatgatgctgctgacgcccgcaaggttgccgggcataaaagcgatgagatcagtgccattcttggctatgatgcccgcgcggcgatgatccatcgcaacgatctggtggtgcgggccgccagcgatgcgaaagccgcatag

SEQ ID NO: 127796 - protein, 378 aa, Brucella melitensis
MLKKLKDYRRIVVKIGSALLVDRATGLKREWLESLGQDIAALQHAGVEVLVVSSGAIALGRTVLGLPKKALKLEESQAAAAAGQIALAKAYADVLGGHGIKSGQILVTLSDTEERRRYLNARATIETLLKLKAVPIINENDTVATTEIRYGDNDRLAARVATMMGADLLILLSDIDGLYTAPPHKNPDAQFLPFVETITPQIEAMAGAAASELSRGGMKTKLDAGKIANAAGTAMIITSGTRFGPLSAIDRGERATLFEAAHAPVNAWKTWISGNLEPAGRLTVDAGAVKALKSGKSLLPAGVKEVDGDFERGDTVAVMNEDGREIARGLIAYDAADARKVAGHKSDEISAILGYDARAAMIHRNDLVVRAASDAKAA

SEQ ID NO: 127797 - DNA, 1119 bp, Burkholderia mallei
  CDS (1)..(1119): transl_table=11
atgcgttcgatcatcgccgattcgaagcgcctggtagtgaaagtgggctcgagcctcgtcaccaacgacggccgcgggctcgatcatgacgccatcggccgatgggccgctcagatcgccgcgctgcgcggcgcgggcaaggaagtggtgctcgtcagctcgggcgcgatcgcggaaggcatgcagcgcctcggttggagcaagcggccgcgcgagatcgacgagttgcaagcggccgcggccgtcgggcaaatggggctcgcgcaggtatacgagagccggtttgccgaacacgggatccgcaccgcgcagattctcctcacgcatgcggatctcgccgaccgcgaacgctacctgaacgcgcgctcgacgctcctcacgctgctgcggctcggcgtcgtgccgatcatcaacgagaacgacaccgtcgtcaccgacgaaatcaagttcggcgacaacgacacgctcggcgcgctcgtcgcgaatctgatcgaaggcgatacgctcgtcatcctgaccgaccagccggggctgttcacggccgatccgcgcaaggatccgggcgcgacgctcgttgccgaggcgagcgccggtgcgccggagctcgaagcgatggcgggcggtgcgggctcgagcatcggccgcggcggcatgctgacgaagattctcgcagccaagcgcgccgcgcacagcggcgcgaacaccgtgatcgcgagcggccgcgagcgcgacgtgctcgtgcggctcgcggccggcgaggcgatcggcacgcaactgatcgcgcgcaccgcgcggatggcggcgcgcaagcaatggatggcggaccacctgcaggtacgtggccatgtcgttatcgatgcgggggcggtcgacaagttgacggcggggggcaagagcctgttgccgatcggcgtcgtcgccgtgcagggcgtgttcgcgcgcggcgaagtgatcgcgtgcgtcgacgacaccggccgtgaagtcgcgcgcgggatcaccaattacagcagcgccgaaacgaagctgatccagcgcaagccgagcggcgagatcgaaacggtgctcggctacatgctcgagcccgagctgatccatcgggacaatctcgtgctggtctga

SEQ ID NO: 127798 - protein, 372 aa, Burkholderia mallei
MRSIIADSKRLVVKVGSSLVTNDGRGLDHDAIGRWAAQIAALRGAGKEVVLVSSGAIAEGMQRLGWSKRPREIDELQAAAAVGQMGLAQVYESRFAEHGIRTAQILLTHADLADRERYLNARSTLLTLLRLGVVPIINENDTVVTDEIKFGDNDTLGALVANLIEGDTLVILTDQPGLFTADPRKDPGATLVAEASAGAPELEAMAGGAGSSIGRGGMLTKILAAKRAAHSGANTVIASGRERDVLVRLAAGEAIGTQLIARTARMAARKQWMADHLQVRGHVVIDAGAVDKLTAGGKSLLPIGVVAVQGVFARGEVIACVDDTGREVARGITNYSSAETKLIQRKPSGEIETVLGYMLEPELIHRDNLVLV

SEQ ID NO: 127799 - DNA, 1119 bp, Burkholderia sp
  CDS (1)..(1119): transl_table=11
atgcgttcgatcatcgcggattcgaagcgattggtggtgaaggtgggctccagcctcgtgaccaacgacggcaaggggctcgatcatgcagcaatcggccgttgggcggctcagatcgccgcactgcgcgcccagggcaaggaagtcgtgctcgtcagttcgggcgcgattgccgaagggatgcagcggctaggctggagcaagcggccgcgggaaatcgacgagttgcaggctgccgccgcagtcggccagatggggctcgcgcaggtctatgagagccgcttcaccgagcacgacatccgcaccgcgcagatcctgctgacgcatgccgacctggcggaccgcgagcgttacctgaatgcacgttcgacgatgctgacgctgttgcggctcggcgtcgtgccgatcatcaacgagaacgacacggtcgtcaccgacgaaatcaagttcggcgacaacgacacgctcggcgcgctcgttgcaaacctgatcgaaggcgatgcactgatcatcctgaccgaccagtcggggctgttcaccgccgatccgcgcaaggatccgaatgcgacgctcgttgcagaagccaatgcaggcgcgccggaactcgaggcgatggccggcggcgcgggttcgagcctcggccgcggcgggatgctgacgaagatcctcgcggcgaagcgcgcggcacacagcggcgcgaacaccgtgatcgcgagcggccgggagaccgacgtgctcgtgcgtctggcggccggcgaggcgatcggcacgcaactgatcgcacgtaccgcgcggatggcggcgcgcaagcagtggatggccgaccaccttcaggtgcgcggccatgtcgtgatcgacgcgggcgcggtcgagaagctgacggccggcggcaagagcctgctgccgatcggcgtgatcgacgtgcagggtgcgttcgcgcgcggtgaagtcatcgcgtgtgttggccccgacgggcgcgaagtggcgcgtgggctcacgaactacagcagtgcggagacgaaactgattcaccgcaaaccgagcggcgagatcgaatccgtgctcggctacatgctggagcccgagttgatccatcgcgacaacctggtgctggtgtga

SEQ ID NO: 127800 - protein, 372 aa, Burkholderia sp
MRSIIADSKRLVVKVGSSLVTNDGKGLDHAAIGRWAAQIAALRAQGKEVVLVSSGAIAEGMQRLGWSKRPREIDELQAAAAVGQMGLAQVYESRFTEHDIRTAQILLTHADLADRERYLNARSTMLTLLRLGVVPIINENDTVVTDEIKFGDNDTLGALVANLIEGDALIILTDQSGLFTADPRKDPNATLVAEANAGAPELEAMAGGAGSSLGRGGMLTKILAAKRAAHSGANTVIASGRETDVLVRLAAGEAIGTQLIARTARMAARKQWMADHLQVRGHVVIDAGAVEKLTAGGKSLLPIGVIDVQGAFARGEVIACVGPDGREVARGLTNYSSAETKLIHRKPSGEIESVLGYMLEPELIHRDNLVLV

SEQ ID NO: 127801 - DNA, 1119 bp, Burkholderia thailandensis
  CDS (1)..(1119): transl_table=11
atgcgttcgatcatcgccgattcgaagcgcttggtagtgaaagtcggctcgagcctcgtcaccaacgatggccgcgggctcgatcatgacgccatcggccgatgggctgcccagatcgccgcgctgcgcaacgagggcaaggaagtggtgcttgtcagctcgggggcgatcgcggaaggaatgcagcgcctgggctggagcaggcggccgcgcgagatcgacgagctgcaggctgccgcggcggtcgggcaaatggggctcgcgcaggtgtatgaaagccgttttgccgagcacggaatccgcaccgcgcagattctcctcacgcacgccgatcttgctgaccgcgaacgctacctgaacgcgcgctcgacgcttctcacgctgctgcggctcggcgtcgtgccgatcatcaacgagaacgacaccgtcgtcaccgacgaaatcaagttcggcgacaacgacacgctaggcgcgctcgtcgcgaacctgatcgaaggtgacgcgctcattatcctgaccgatcagcaggggcttttcacggccgatccgcgcaaggacccgggcgcgacgctcgttgccgaggcaagcgccggggcgccggagctcgaagcgatggcgggcggcgcgggctcgagcatcggccgcggcggcatgctgacgaagattctcgcggcgaagcgcgctgcgcacagcggcgcgaacacggtgatcgcgagcggtcgcgagcgcgacgtgctcttgcggctcgcgtccggcgaggcgatcggcacgcaactgatcgcgcgtaccgctcggatggcggcgcgcaagcagtggatggcggatcacctgcaggtgcgcggccacgtcgttatcgatgcgggcgcggtcgacaagctgacggcaggcggcaagagcctgttgccgatcggcgtcgtcgccgtgcagggcgtgttcgcgcgtggcgaagtgattgcgtgcgtcaatgatgcaggccgcgaagtcgcgcgcgggatcaccaattacagcagcgccgaagcgaagctgatccagcgcaagccgagcggcgaaatcgaagcggtgctcggctacatgctcgagcctgaactgatccatcgggacaatctcgtgctcgtctga

SEQ ID NO: 127802 - protein, 372 aa, Burkholderia thailandensis
MRSIIADSKRLVVKVGSSLVTNDGRGLDHDAIGRWAAQIAALRNEGKEVVLVSSGAIAEGMQRLGWSRRPREIDELQAAAAVGQMGLAQVYESRFAEHGIRTAQILLTHADLADRERYLNARSTLLTLLRLGVVPIINENDTVVTDEIKFGDNDTLGALVANLIEGDALIILTDQQGLFTADPRKDPGATLVAEASAGAPELEAMAGGAGSSIGRGGMLTKILAAKRAAHSGANTVIASGRERDVLLRLASGEAIGTQLIARTARMAARKQWMADHLQVRGHVVIDAGAVDKLTAGGKSLLPIGVVAVQGVFARGEVIACVNDAGREVARGITNYSSAEAKLIQRKPSGEIEAVLGYMLEPELIHRDNLVLV

SEQ ID NO: 127803 - DNA, 756 bp, Campylobacter jejuni
  CDS (1)..(756): transl_table=11
atgaaaagaatagttgttaaagtgggttctcatgtgattagcgaagaaaacactttaagttttgagcgtcttaaaaatttagtcgcatttttagctaaactcatggaaaaatatgaagtaattttagtaacctcggcggctatttcggcaggacacaccaaactagatatcgatagaaaaaaccttattaataaacaagttttagctgctattggacaaccttttttaatcagtgtttataacgagcttttagccaaatttaacaaactaggcggacaaattttacttacaggcaaggattttgactctagaaaagctactaaacacgcaaaaaatgctatcgatatgatgataaatttaggaattttgcctattatcaatgaaaatgacgctacagctatagaagaaattgtctttggtgataatgatagtttaagtgcttatgctacgcatttttttgatgcggatttgcttgtgattttaagcgatattgatggattttacgataaaaatcctagtgaatttagtgatgcaaagcgtttagaaaaaatcactcatattaaagaagaatggctacaagcaaccataaaaacaggtagtgagcacggaacaggtggtatagtaaccaaacttaaggcagctaaatttttacttgaacacaataaaaaaatgtttttagcaagtggctttgatttaagtgtggcaaagacatttttattagaagataaacaaataggtggaactttgtttgagtga

SEQ ID NO: 127804 - protein, 251 aa, Campylobacter jejuni
MKRIVVKVGSHVISEENTLSFERLKNLVAFLAKLMEKYEVILVTSAAISAGHTKLDIDRKNLINKQVLAAIGQPFLISVYNELLAKFNKLGGQILLTGKDFDSRKATKHAKNAIDMMINLGILPIINENDATAIEEIVFGDNDSLSAYATHFFDADLLVILSDIDGFYDKNPSEFSDAKRLEKITHIKEEWLQATIKTGSEHGTGGIVTKLKAAKFLLEHNKKMFLASGFDLSVAKTFLLEDKQIGGTLFE

SEQ ID NO: 127805 - DNA, 1119 bp, Carboxydothermus hydrogenoformans
  CDS (1)..(1119): transl_table=11
atgcgcgaaatattaaaaaatgtccgccggctggttgtaaaaatcggttcttcgtccttaacccaccccgagacggggaaaattaaccttgcggctatggagcgttttgtaagggaatgtgccgatttaaaaaatgcaggattcgaagtaattattgtctcttccggagcaatagctgccggaatgggaaggcttgcccttccagaaaagccgaaaaatttaccggaaaaacaagcatgtgctgcggtaggccagggggtattaatgcatttatacgaaaaatttttttccgaataccaggtgatcgcagcgcaggtgcttttaaccggggaagatttggcggtaaggaagcgttttttgaacgccaaacatactttttcggcccttttaaattacggggttgttccggtggttaatgaaaacgatacggtagcggtagaggaaattcgctttggggataacgatacattatcggcccgggtagcggtactggtggaggctgatctcctggttcttctttccgatatcgatggcttgtataccgcagaccccaggaagaatagtaatgcccgttttcttccggaggttttggaaattaatgaggaaatcgaacagctggccgggggaagcgggacggcagttggtaccggtgggatggagaccaaaatagaggcggcgaaaatagcggtaaatgcggggatacccatggtaattgcccgggcagattatggcaatttgcggcgaattttaagaggggaagaggttggaacctttttttacccgaaaaagaaaaagcagtggaaaaagcaatggctgttatccggggcaagagtgcagggaagtatcatagttgatttgggagctgaagaagccctttgcagtggcggaaagagccttttgccttcgggagtgctgggagtggaaggagaatttccgacaggagctatagttgcggttaaaaatttaaagggacgggtgattgctaaagggcttaccaattatgcggctcaggatatcttaaaaattaagggacttcattcctgggaaattgctgacgttttaggccataaagattatgacgaaattattcaccgggataatctggtgctggtggattaa

SEQ ID NO: 127806 - protein, 372 aa, Carboxydothermus hydrogenoformans
MREILKNVRRLVVKIGSSSLTHPETGKINLAAMERFVRECADLKNAGFEVIIVSSGAIAAGMGRLALPEKPKNLPEKQACAAVGQGVLMHLYEKFFSEYQVIAAQVLLTGEDLAVRKRFLNAKHTFSALLNYGVVPVVNENDTVAVEEIRFGDNDTLSARVAVLVEADLLVLLSDIDGLYTADPRKNSNARFLPEVLEINEEIEQLAGGSGTAVGTGGMETKIEAAKIAVNAGIPMVIARADYGNLRRILRGEEVGTFFYPKKKKQWKKQWLLSGARVQGSIIVDLGAEEALCSGGKSLLPSGVLGVEGEFPTGAIVAVKNLKGRVIAKGLTNYAAQDILKIKGLHSWEIADVLGHKDYDEIIHRDNLVLVD

SEQ ID NO: 127807 - DNA, 1134 bp, Caulobacter crescentus
  CDS (1)..(1134): transl_table=11
gtgacgtcgggctcccagggagccttcgaggccgcccgccgcatcgtgttcaaggtcggctcggccctgctggtcgacgccgagacgggcgcagccaaccgcgcctggctggaggcgttctgcgccgacgccgccgacctgcgcgccgccggcaaacaggtgctcgtggtctcgtccggtgcggtggccctgggccgtcgtcggcttgggctgaccggtcgaaagaccaccctgcccgaaaagcaggccgccgccgccgcaggtcagagcctcctgatgcgcgcctgggaagaagctttcgagccgcacgggatcggcgtcgcccagatcctgctgacccgcgacgacaccgagatgcgccgccgctggctgaacgcccgcgcgacgaccgagaccttgatgggtttgggcgtcgtccccgtggtcaacgagaacgacaccgtcgtgaccgaggagatccggtacggcgacaacgaccgtctggccgcccgcgtcgcccagatggccggcgccgacctcctggtgctgctgtcggacatcgacggcctctacaccgccgacccgcgcaagaaccccaaggcccagcatatcccgcgggtctccgagatcacgccggagatcgccggcatggccgagggggccaacgccgccgccggcgtcggcaccggcggcatggccaccaaaatcgccgccgcccgtatcgcccgcgccgccggctgcgccaccctgatcaccctgggctcgcgcccccgcccgctggccgccatcgcagccggcgaaaaggccaccctgatcgaggcgggagcctcgcccgccgccgcctacaaggcctggatcgccggctcgctggcgccccagggctgggtcacggtcgacgccggggcggccagcgcgctgctggccggcaagagcctgctgcccgccggggtccgcgccgtcgagggtccgttcgacaagggcgacgccgtccgcgttcgcgacgaaaacggccgtgaggtcgcgcggggcctcgtgcgctatgacagcgccgacgcccagcggatcgcgggcctgagatcagacgccatcgaggccgaactcggctttaccgagggtccgatgatccatgccgacgacctggccgtagcccactag

SEQ ID NO: 127808 - protein, 377 aa, Caulobacter crescentus
MTSGSQGAFEAARRIVFKVGSALLVDAETGAANRAWLEAFCADAADLRAAGKQVLVVSSGAVALGRRRLGLTGRKTTLPEKQAAAAAGQSLLMRAWEEAFEPHGIGVAQILLTRDDTEMRRRWLNARATTETLMGLGVVPVVNENDTVVTEEIRYGDNDRLAARVAQMAGADLLVLLSDIDGLYTADPRKNPKAQHIPRVSEITPEIAGMAEGANAAAGVGTGGMATKIAAARIARAAGCATLITLGSRPRPLAAIAAGEKATLIEAGASPAAAYKAWIAGSLAPQGWVTVDAGAASALLAGKSLLPAGVRAVEGPFDKGDAVRVRDENGREVARGLVRYDSADAQRIAGLRSDAIEAELGFTEGPMIHADDLAVAH

SEQ ID NO: 127809 - DNA, 1086 bp, Chlorobium tepidum
  CDS (1)..(1086): transl_table=11
atgagtcaccaacatccggtttacaggcgaattgtcgtcaaggttggaaccaacgtcattacggggcgcaacggcaagctcgatccagcgattctcgacagcctgacctcgcagatcgccgcactcatgcaggacggcgttgaagtcattctcgtcacctccggcgcggtcagcgccgggcgcggcatcgtgtcgctcagcggtaatctgacgccggtcgagacgcgccaggtgctggccgccaccgggcagatccggctcatcaacgcctacaatgaccgtttcaaaaaacacggcataaccggtgctcaactgctcgtcaccaagggcgatttccgcgaccgccagcactacctcaacatgcgcacctgcttcgaagcgctgcttcagcagaagatcgtgccgatcgtcaacgagaacgacgccgtggcaatcaccgagctgatgttcaccgacaacgacgaactctccggcctcatcgcatcgatgttgcaggtggacgcgaacatcattctctcgaacgtggatggcctgttcgatacacagagcgaagggaacccggtgatcgaggagatcgatcccggcacgaagaacttcagccagtacatccgccccggaaaatcggaattcgggcgtggcggcatgctcaccaagtgcaacatcgcgcacaaactctcgcgcctcggcatcactgtgcatatcgccaacggcaccactcccggcattctacagaccatcgcgcacggcggaaaagccggcacgaagttcatcgcccagaaaccaaagcagagccgcaagcgctgggtcgcgctcagtgaagggcttgagaagggagccgtcatcatcaatcagggcgccatcgacgccctgacctccggccagagagccacaagtcttttgcctgtcggcatcaccggcgtcgaaggctcgttccagcgcggcgacatcatccgcatctgctcgacagatggcaaggtcatcggttacggcatggcctcctgcaccgcagaaaaagcccgctcagcgatgggccagaaaggcctcaaaccggtcatccactacgatcacctgtatctggtgccgtag

SEQ ID NO: 127810 - protein, 361 aa, Chlorobium tepidum
MSHQHPVYRRIVVKVGTNVITGRNGKLDPAILDSLTSQIAALMQDGVEVILVTSGAVSAGRGIVSLSGNLTPVETRQVLAATGQIRLINAYNDRFKKHGITGAQLLVTKGDFRDRQHYLNMRTCFEALLQQKIVPIVNENDAVAITELMFTDNDELSGLIASMLQVDANIILSNVDGLFDTQSEGNPVIEEIDPGTKNFSQYIRPGKSEFGRGGMLTKCNIAHKLSRLGITVHIANGTTPGILQTIAHGGKAGTKFIAQKPKQSRKRWVALSEGLEKGAVIINQGAIDALTSGQRATSLLPVGITGVEGSFQRGDIIRICSTDGKVIGYGMASCTAEKARSAMGQKGLKPVIHYDHLYLVP

SEQ ID NO: 127811 - DNA, 1119 bp, Chromobacterium violaceum
  CDS (1)..(1119): transl_table=11
atgcactcggtgattcacgcttcagaccgcatcgtggtcaaggtaggctccagcctggtaaccaacgacggcagggggctggacctgaacgcgctggcgcgctgggcggaggaagttgccgaactgaaacgccgcggcaagcaggtggtgctggtctccagcggcgccatcgccgaaggctgccagcgcctgggctggacggtgcgcccgaagggcgtgcatgagctgcaggccgcagccgccgtcggccagatgggcctgtgccaggcctacgagagcgcgttccgctccttcggcctgcgcaccgcgcagatcctgctgacccacgaagacctggccgaccgcacccgctacctgaacgcccgctccacgctgaccagcctgctgaatctgaacgtggtgcccatcatcaacgagaatgacaccgtggccaccagcgaaatccgcttcggcgacaacgacacgctgggcgcgctggtgaccaacctgatcgaagccgacgccctggtgatcctgaccgaccagcgcggactctacagcgccgacccgcgcaagcatcccgacgccgagttcatccaccaggccgaagccggcgacgagcgcctggaggacatggccggcggcgccggttccagcgtcggcaccggcggcatgatcaccaagatcctggccgccaagcgcgccgcccgcagcggcgccgccaccgtgatcgccagcggccgcgaaccccatgtgctgtctcggctggccgacggcgaagccatcggcacccagctggtcgccgccaccaaccgcatggccgcccgcaagcagtggctggccgaccacctgaagctggccggccgcctgctgctggacgacggcgccgcgctggcgatacgcgagcgcggcaccagcctgctgccggtgggcgtcagcgcggtggaaggcgatttcctgcgcggcgaggcggtggcctgcgtcgacgcggcggggcacgaggtggcgcgcggcctggtcaactacagctcggacgaagcgcgtcagatcatgcgcaaaagcacgcgcgagatcgaagccgcgctcggttacatcgtagaaccggagttgatccaccgggacaatatggtcgcgctctga

SEQ ID NO: 127812 - protein, 372 aa, Chromobacterium violaceum
MHSVIHASDRIVVKVGSSLVTNDGRGLDLNALARWAEEVAELKRRGKQVVLVSSGAIAEGCQRLGWTVRPKGVHELQAAAAVGQMGLCQAYESAFRSFGLRTAQILLTHEDLADRTRYLNARSTLTSLLNLNVVPIINENDTVATSEIRFGDNDTLGALVTNLIEADALVILTDQRGLYSADPRKHPDAEFIHQAEAGDERLEDMAGGAGSSVGTGGMITKILAAKRAARSGAATVIASGREPHVLSRLADGEAIGTQLVAATNRMAARKQWLADHLKLAGRLLLDDGAALAIRERGTSLLPVGVSAVEGDFLRGEAVACVDAAGHEVARGLVNYSSDEARQIMRKSTREIEAALGYIVEPELIHRDNMVAL

SEQ ID NO: 127813 - DNA, 810 bp, Clostridium perfringens
  CDS (1)..(810): transl_table=11
atgagaaaagcattaaaagatagtaaaagaatagttgttaaggttggaacttctacattaacttatgaaaatggaagtgtaaacttaatgagaatagaaaaattatctagagtaatttcagatatatgtaatatgggaaaagaagttgttcttgtttcatcaggagcaattggagttggagttggaaaacttagacttgagaaaaaaccagagactataagagaaaagcaagctgtagctgccgttggacagtgcgctttaatgcatatatataataaattttttggagaatatagtcatgttgtggcacaggttcttttaactagagatgtactagaaaatgaaagaatgaaaaataacgtatgtaatacatttgatactttattagaaaaaggaattatacctatagttaatgagaatgatgctatatcaatagatgagatacaaaacatattaaactttggagataatgataatctttcagctatagtttctactttagtaaatgcagatactttaataatattatctgatatagatggtttctacgattcagatccaagaactaatgaggatagtaagatgcttaaagaagtttatgaaataactcctgaaatagaagaatgtgcagggggagctggaagtaatagaggaacaggcggaatggtaactaaactttcagcagctaaggtagcaacaagtaatggaatagatatgattttagctaatggagaaaatccagaaatattaattgacatattaaatggtgaagatataggaactatgtttgtagctaagaagggggaataa

SEQ ID NO: 127814 - protein, 269 aa, Clostridium perfringens
MRKALKDSKRIVVKVGTSTLTYENGSVNLMRIEKLSRVISDICNMGKEVVLVSSGAIGVGVGKLRLEKKPETIREKQAVAAVGQCALMHIYNKFFGEYSHVVAQVLLTRDVLENERMKNNVCNTFDTLLEKGIIPIVNENDAISIDEIQNILNFGDNDNLSAIVSTLVNADTLIILSDIDGFYDSDPRTNEDSKMLKEVYEITPEIEECAGGAGSNRGTGGMVTKLSAAKVATSNGIDMILANGENPEILIDILNGEDIGTMFVAKKGE

SEQ ID NO: 127815 - DNA, 1131 bp, Corynebacterium diphtheriae
  CDS (1)..(1131): transl_table=11
atgaatgcccagcacagcagcgccgatctgcgcgacgtgattagaaacgctaagcggattgtggtcaagattggttctagttcactgaccggcgaaaattttgaggtctctccgggtcgtatcgaccgcattgtggaggctctagaagatcgtatgcatcgcggttccgacgtgattgttgtatcttctggtgctgtggctgctggtatggctccattggggttgacttcgcggccgaaggatttggcaacaaagcaagctgctgcctcggtggggcaggtgcatttggctaatgcgtggggtaatagttttgcccgttataaccgcacgattggccaggtgctgttaacggcctccgacgcaggccagcgggatcgtgcgcgtaatgcgcagcgcactattgatcgcttgcggttgctacacgcagtgccgattattaatgagaatgacacggttgcaacctctgagatgcactttggagacaacgaccgccttgccgcgattgtgtcgcacctagtgtccgcggacgcattggtgctgctctcggacgtagatgggttgtatgacaaaaaccctgcggatccttcggcacgatttgtgtctgaagtcagagacggcaacgacctgaaaggtgtgatcgcaggcgatggtggggccgtggggaccggtggcatggcgtcgaaggtgtcggctgcgcggttggcgtcgcgaagcggcgtgcccgttttgttgacctccgctgattatgtggccgaggcgctgggcgatgctgaggtgggtacggtgttttaccccaaggatgatcgcctatcagcgtggaagttttgggcgctgtacgctgcagatactggcggcgcattgcgtatcgacgccggcgcggtcgccgcagtcaccgccggcggaaactccctgctggccgtgggaattaccgaggtcattggtgatttccacgctggtgagatcgtggagatcctcggccctgagggtgagatcattggccgaggcgaggtggcttatgattccgcagtgctcatcaccatgctgggcaaacaaaccgcgcagctgcccgagggtctgcaacgtcccgtcgtccatgctgattatctttccgattacgcgtcacgtgcgtag

SEQ ID NO: 127816 - protein, 376 aa, Corynebacterium diphtheriae
MNAQHSSADLRDVIRNAKRIVVKIGSSSLTGENFEVSPGRIDRIVEALEDRMHRGSDVIVVSSGAVAAGMAPLGLTSRPKDLATKQAAASVGQVHLANAWGNSFARYNRTIGQVLLTASDAGQRDRARNAQRTIDRLRLLHAVPIINENDTVATSEMHFGDNDRLAAIVSHLVSADALVLLSDVDGLYDKNPADPSARFVSEVRDGNDLKGVIAGDGGAVGTGGMASKVSAARLASRSGVPVLLTSADYVAEALGDAEVGTVFYPKDDRLSAWKFWALYAADTGGALRIDAGAVAAVTAGGNSLLAVGITEVIGDFHAGEIVEILGPEGEIIGRGEVAYDSAVLITMLGKQTAQLPEGLQRPVVHADYLSDYASRA

SEQ ID NO: 127817 - DNA, 1326 bp, Corynebacterium efficiens; identical to SEQ ID NO: 127535
  CDS (217)..(1326): transl_table=11

SEQ ID NO: 127818 - protein, 369 aa, Corynebacterium efficiens
MRERIATAKRVVVKIGSSSLTSDEGGHTVDPNRINTIVNALQARMEAGSDVIVVSSGSVAAGMAPLGLTTRPTDLSMKQAAAAVGQVHLMHQWGRSFARYGRPVGQVLLTAGDAGQRDRARNAQRTIDRLRMLGVIPIVNENDTVATTGVNFGDNDRLAAIVSHLVSADALVLLSDVDGLFDKNPADPTARFISEVRDGNDLKGVLAGDGGKVGTGGMASKVSAARLASRSGVPVLLTSAANIGPALEHAQVGTVFHPKENRLSAWKFWALYAADTAGKIRLDQGATEAVTSGGKSLLAVGITEVIGDFRAGEIVEILGPNGEIIGRGEVNYDSETLMPMLGMKTQELPDDMQRPVVHADYLSNYASRA

SEQ ID NO: 127819 - DNA, 1119 bp, Dechloromonas aromatica
  CDS (1)..(1119): transl_table=11
atgaatcccacccgcctcgccaacgccaagcgcctggtcgtcaaagtcggctcggcgctcgtcaccaacaacggcaccggccttgacctctcagccatcaacgactgggcgcgacagatcgccgtcctgcgccagcaagacaaggaagtcgtactcgtctcctccggcgccatcgcctgcggcatgcagcgcctgggctgggccaaacgaccgaagagcgtgcacgaactccaggcggccgctgccgttggccagatgggcctcgtccaggtctatgaaggcgccttcgccaagcacggcctgcataccgcccagatcctgctgacccacgacgaccttgccgatcgcaagcgctacctgaacgcccgctcgaccctaaataccctgctcgaactcggcgtcgtccccatcatcaacgagaacgacaccgtcgtcaccgacgagatcaagttcggcgacaacgacaccctcggcgcactggtcgccaatctgatcgaagccgatgcgctgatcatcctgaccgaccagcaaggtctgtacacggccgatccgcgcaaggacccgagcgccacactgatcaacgaagccacggccggcgacgaaacactggaaggcatggccggcggcgccggcacccgcatcggcactggcggcatgatcaccaaggtcattgccgccaaacgcgccgcacgcagcggcgcccataccgccatcgccagcggccgcgaaaccgacccgatcatccgcctggccaatggcgaaccggtcggcaccctactcgtctcgcaaacccaaccgctggctgcccgcaagcaatggcttgctgaccacctgcaactggctggccgcctgatcctcgatgccggcgccgtgaatgcgctacatgccggcaagagcctgctcccgatcggcgttatcgccgccgagggagaattcgaacgcggcgctgccgttgcctgcatcagccccgacggccgagaaatcgcccgcggcctgagcaactacggcagcggcgaagcccggctgatcgcccgcaagaccacccaggaaatcgagaatacactgggctacgtggacgaaccggaaatcatccaccgggacaacctgatcctctcctga

SEQ ID NO: 127820 - protein, 372 aa, Dechloromonas aromatica
MNPTRLANAKRLVVKVGSALVTNNGTGLDLSAINDWARQIAVLRQQDKEVVLVSSGAIACGMQRLGWAKRPKSVHELQAAAAVGQMGLVQVYEGAFAKHGLHTAQILLTHDDLADRKRYLNARSTLNTLLELGVVPIINENDTVVTDEIKFGDNDTLGALVANLIEADALIILTDQQGLYTADPRKDPSATLINEATAGDETLEGMAGGAGTRIGTGGMITKVIAAKRAARSGAHTAIASGRETDPIIRLANGEPVGTLLVSQTQPLAARKQWLADHLQLAGRLILDAGAVNALHAGKSLLPIGVIAAEGEFERGAAVACISPDGREIARGLSNYGSGEARLIARKTTQEIENTLGYVDEPEIIHRDNLILS

SEQ ID NO: 127821 - DNA, 1122 bp, Dehalococcoides ethenogenes
  CDS (1)..(1122): transl_table=11
atgaacggaaattgttacaaacggattgtaataaagctggggacaagcctgctgaccggaggcacaggcaagcttgaccatgagcgcatggcggatttatgccgccagatagctgacctgacccgtttgggtacggaggtaattattgtttcctccggggcgattgccgccggacgggctaaaatgggtctccggcatatcccgaaagatgtgcctttcaagcaggtgctggcggctataggccagagccagcttatgaattattatgaccagctgttcagcccccacgggctgactgttgcccagggtctgctgaccaagagtgatttgtctgaccgttccggttacttaaacgccagaaataccctgctggctttgatggagctgggagttataactattgtcaatgaaaatgacgtggtggcggtagatgaaatccagcaggccaaattcggggacaatgacaacctgtctgccatggtagccaacctgatagaggctgatttgctgctgatactgactaatatccgcgggctttatacagctgaccccaccctccacccggatgcccggctgataaccgaagttaaagagattaccgaagagctggagaaactggctgccggcagttccaacaagctgggtaccggcggcatggttaccaagctggaagccgccaggctggcaacatcttcaggggtaaatgtcatcatagcagacgggcatatacctgatattatccttaaactggccagcggggaaaccgaaggtacccgctttatgccttcactccacaaaccggacagccgccagcgctggatgatgagcgggctttgcacccgcggcaatatctgcatagatgacggggcggtcaaagctatacgggaaaaccagaaaagcctgcttgccgccggggtacaacaatccgagggcaaattcgggcggggggatattgtaaaactgagcgacagccgcggcaaacggctgggctatggcataaccaattattcttcagatgatgtttcaaagataaaagggctgcatacagacgaaataaacacagttctggcaggcaatcagggcccggaaataattcaccgcaataacctggtggtaatttaa

SEQ ID NO: 127822 - protein, 373 aa, Dehalococcoides ethenogenes
MNGNCYKRIVIKLGTSLLTGGTGKLDHERMADLCRQIADLTRLGTEVIIVSSGAIAAGRAKMGLRHIPKDVPFKQVLAAIGQSQLMNYYDQLFSPHGLTVAQGLLTKSDLSDRSGYLNARNTLLALMELGVITIVNENDVVAVDEIQQAKFGDNDNLSAMVANLIEADLLLILTNIRGLYTADPTLHPDARLITEVKEITEELEKLAAGSSNKLGTGGMVTKLEAARLATSSGVNVIIADGHIPDIILKLASGETEGTRFMPSLHKPDSRQRWMMSGLCTRGNICIDDGAVKAIRENQKSLLAAGVQQSEGKFGRGDIVKLSDSRGKRLGYGITNYSSDDVSKIKGLHTDEINTVLAGNQGPEIIHRNNLVVI

SEQ ID NO: 127823 - DNA, 1122 bp, Dehalococcoides sp
  CDS (1)..(1122): transl_table=11
atgaacgaaaattgttataaacgggttgtaataaagttgggcaccagtctgctcaccggcggcacaggcaagcttgaccatgagcgcatggctgacctgtgccgacagatagccgaactgacccgcctgggtactgagatagttatagtttcttcgggggctattgccgccggacgctctaaaatgggtatccgccacattccgaaagatgttccttttaaacaagtgctggccgccataggccagagccagcttatgaattattatgaccagttattcagtcctcacgggctgacggttgcccaaggtctgctgaccaaaagtgacctgtctgaccgttcgggttacctcaacgcccgaaataccctgctggctttgatggaactgggaattataaccattgtcaatgaaaatgacgtggtagcaatagatgaaatccagcaagccaaatttggggataatgacaatctgtcggccatggtagccaacctgatagaggctgatttactgctgatactgaccaatatccgcgggctttacacctcagaccctactctccaccctgaagctaccctgataaccgaggtcaaagagattaccgaagaactggagcaactggccgccggcagctcaaacaagctgggtacaggcggaatggtaaccaaactggaagccgccagactggccacatcttcaggggtaaccgccattattgcagacgggcatataccggatattattctcaaactggcgaatggtgaaaatgaaggtacccgttttataccttcactgcacaagccggatagccgccagcgctggatgatgagcgggctttgcacccgcggcagcatctgtgtagatgacggggcagccaaagcactaagagaaaaccagaaaagcctgctggctgccggagtgcaacaggccgaaggcaaattcgggcggggtgatattgtaaagcttaccgacagccacggaaaacggctgggttatggcataaccaattactcttcagatgatatttccaaaataaaaggccttcactcacaggaactaaacgccgttttagggggcaaccaaggccctgaagtaatacaccgcaataatctggtggtaatttaa

SEQ ID NO: 127824 - protein, 373 aa, Dehalococcoides sp
MNENCYKRVVIKLGTSLLTGGTGKLDHERMADLCRQIAELTRLGTEIVIVSSGAIAAGRSKMGIRHIPKDVPFKQVLAAIGQSQLMNYYDQLFSPHGLTVAQGLLTKSDLSDRSGYLNARNTLLALMELGIITIVNENDVVAIDEIQQAKFGDNDNLSAMVANLIEADLLLILTNIRGLYTSDPTLHPEATLITEVKEITEELEQLAAGSSNKLGTGGMVTKLEAARLATSSGVTAIIADGHIPDIILKLANGENEGTRFIPSLHKPDSRQRWMMSGLCTRGSICVDDGAAKALRENQKSLLAAGVQQAEGKFGRGDIVKLTDSHGKRLGYGITNYSSDDISKIKGLHSQELNAVLGGNQGPEVIHRNNLVVI

SEQ ID NO: 127825 - DNA, 1092 bp, Deinococcus radiodurans
  CDS (1)..(1092): transl_table=11
atgcgcgttgtcctcaagctcggcaccagtgttctgaccgcaggcaccgaccgcctgcaccggccccggctggtagacctgatgcgcgacatcgccgccgtgtcggcgcaggggcacgaggtcgtgctggtcagcagcggcgcggtcacggcgggctgggaagcgctcgggtttccgccgcgcgagcgcaccctcgccgaaaagcaactgctcgcggcggtggggcaggtgcagttgatgcacctctatacgtcgctggccgagctgtatggcctgcgctcggcccagttgctcctcaccgccgacgacttccgcgaacgcacccgctacctcaacgcccgcaccaccctggagggctgcctcagccggggcgtgctgccggttatcaacgagaacgacaccgtggcggtggagcagatcaaggtgggcgacaacgacaccctctcggccttcgtcgccaatctggtggaggccgacctgctgctgatcctgaccgacgcgccgggcctctacaccgccgacccgcgcactcacccggacgccaccctgattccggtggtggagcgcgtgacccccgatatctgggcactggcgggcggcgcgggaagccaccggggcaccggcggaatgcacaccaagattcaggccgccgaaattgccacgcgcgccggcacccccgtcgtcatcgcccccggcgacttgcccgaggccctgcgccgggtggtggacggcgaggcgctcggcacccgctttctggcgcacggcacccgtttggaggcccgcaagcgctggattctggccgaaatcgcgcacgggcggctgctcctcgacggcggcgcggcgcaggcggtgcgcgagcgcggcagcagcctgcttccggcgggcatccggcaggtggagggcgacttcgagcgcggccacaccgtgcgcctgctcgcccccgacggccaggaactcgggcgcggcctgacccgctaccgggccgacgacctgcgccgggtgtgtggccaccattcccgtgagatcgaggcgctgctggggtacacctacggtgaagaggcggtgcaccgtgacgacctggtgctgctctag

SEQ ID NO: 127826 - protein, 363 aa, Deinococcus radiodurans
MRVVLKLGTSVLTAGTDRLHRPRLVDLMRDIAAVSAQGHEVVLVSSGAVTAGWEALGFPPRERTLAEKQLLAAVGQVQLMHLYTSLAELYGLRSAQLLLTADDFRERTRYLNARTTLEGCLSRGVLPVINENDTVAVEQIKVGDNDTLSAFVANLVEADLLLILTDAPGLYTADPRTHPDATLIPVVERVTPDIWALAGGAGSHRGTGGMHTKIQAAEIATRAGTPVVIAPGDLPEALRRVVDGEALGTRFLAHGTRLEARKRWILAEIAHGRLLLDGGAAQAVRERGSSLLPAGIRQVEGDFERGHTVRLLAPDGQELGRGLTRYRADDLRRVCGHHSREIEALLGYTYGEEAVHRDDLVLL

SEQ ID NO: 127827 - DNA, 1140 bp, Desulfovibrio desulfuricans
  CDS (1)..(1140): transl_table=11
atggactggcagaccgagcgcgggcaggttctggattccgcccgcagagtggttatcaaggtggggagtgcggtgcttacttccggcaacgggctggatgtgggcgtggtggataatctggtggcccagattgccgacctgcacggccgcggcgtagatgtggtgctggtgtcctccggtgcggtttcggccgggcgtgccgtgctgcggcgctgctgcgagataaaaggcatgccgcacaagcaggcggcatcggccgtggggcagagccgtctcatgcactattatgacgaggcgttcggcagacacggcattatttccgcgcagatactgctcaccaaggacgacctgcgcagccgtcaccgttttcttaacgcccgcaacacgtttgcggcacttatggactggcatgccgtgcccattgtcaatgaaaacgacacagtggccgtacgcgaactggaattcggcgacaatgacagtctggccagtctgctgctgaatgtggtggatgccgacctgttcatcaatctgacatcggccggcggagtatatgccgacaaccccgacaccaaccccgatgcgcgtgtcatggaatgcatagaaaatgtgcacgggcttaatctggacgtgatgtgcggcggtaaaaccgctgtggggtcgggcggcatgtattcaaaattgctggcggcacggcgggcagcacagcttggggtgcccacgcttattctgcccggacgcaagcccgatgccatgctgcgggcttttgccggtgacgaacccggaacatgggtgcgaccggaaaagaaaaccgtttcggcacgcaaattctggctggcgtatcacgctgatcccacaggatcggtggtggtggatgacggtgctgtaaaagcgcttgaggcgggcaaaagcctgctgcctgccggaatcatcggtgttgaagggggcttcgggcgtggtgcgcttgtgcgtgtcacttctgcggccggtgccgtggtggctgtgggcctcagcaactaccccgccgccgacctgcggcgcatcatgggccaccgcacggcggaacttacggccattctgggtgacaaccagtatccggaagccatccaccgcgataatatgctgatggacgccgtggtgtga

SEQ ID NO: 127828 - protein, 379 aa, Desulfovibrio desulfuricans
MDWQTERGQVLDSARRVVIKVGSAVLTSGNGLDVGVVDNLVAQIADLHGRGVDVVLVSSGAVSAGRAVLRRCCEIKGMPHKQAASAVGQSRLMHYYDEAFGRHGIISAQILLTKDDLRSRHRFLNARNTFAALMDWHAVPIVNENDTVAVRELEFGDNDSLASLLLNVVDADLFINLTSAGGVYADNPDTNPDARVMECIENVHGLNLDVMCGGKTAVGSGGMYSKLLAARRAAQLGVPTLILPGRKPDAMLRAFAGDEPGTWVRPEKKTVSARKFWLAYHADPTGSVVVDDGAVKALEAGKSLLPAGIIGVEGGFGRGALVRVTSAAGAVVAVGLSNYPAADLRRIMGHRTAELTAILGDNQYPEAIHRDNMLMDAVV

SEQ ID NO: 127829 - DNA, 1110 bp, Desulfitobacterium hafniense
  CDS (1)..(1110): transl_table=11
gtgagtgacctgcgtagaatcgtgatcaaggtagggagcagcagtttaaaccatcctgaaggcggtcttgatgatcaagctattcagaggattgccggggtcattgccgggatccgccagcttggtgtagaatgtgtcctggtcagctcgggtgcagtggctgccggggtggggaagctgggtctaaaaaccaagcctaaggatatggccggcaaacaggcagttgccgctgtaggtcagggcgttttgattgagaaatacgcccttgctttggaggcacggggcttggtctgcgctcaggtcctgctgtcccgccttgacttagctgaggcctcccgttatcgcaatgctcaaaacaccttagagcagctgctgcgttatcaggtgattccgattatcaatgaaaatgatactgtggcggtggaagagctgtgtttcggggataatgaccgcctttccgccctggtggcgggtttggttcatggagacttgctggtgattctcacggatgtggacggactctattctgccaatcccaaactcaatcctcaggcagagctcattgaggaagtggaggatttgacccaagttatgcacatcgccggaggtgcgggcagctccatgggtacaggcgggatggtgaccaaactaaaggcagcggagatcaccacccgttttggtatggggatgttcctcctgcactccaagcgcatggaagaaatcattgaactgattcaaggggagcggcctttaggcacctactttttcccggctgcccaccgcattatgggcaagaaacgctggatcgcctatggcggcctatccgagggaagcatctttattgatgagggggccgtaaaggctttactcaaaggaaaaagcctgctggcttcaggcattaccggcatcgacggtgtctgggaacgaaaagaactggtacgcatcaataacccggacggaattgaggtggctcgcggcttagtggagctgagcagtgaagagttagagaaagtccgtggcaagcactcggaagagatgttggccaccatccccaatctagagggtgaagaggtcgttcatcgcgataatatgaccttgatgatcgaatga

SEQ ID NO: 127830 - protein, 369 aa, Desulfitobacterium hafniense
MSDLRRIVIKVGSSSLNHPEGGLDDQAIQRIAGVIAGIRQLGVECVLVSSGAVAAGVGKLGLKTKPKDMAGKQAVAAVGQGVLIEKYALALEARGLVCAQVLLSRLDLAEASRYRNAQNTLEQLLRYQVIPIINENDTVAVEELCFGDNDRLSALVAGLVHGDLLVILTDVDGLYSANPKLNPQAELIEEVEDLTQVMHIAGGAGSSMGTGGMVTKLKAAEITTRFGMGMFLLHSKRMEEIIELIQGERPLGTYFFPAAHRIMGKKRWIAYGGLSEGSIFIDEGAVKALLKGKSLLASGITGIDGVWERKELVRINNPDGIEVARGLVELSSEELEKVRGKHSEEMLATIPNLEGEEVVHRDNMTLMIE

SEQ ID NO: 127831 - DNA, 1143 bp, Desulfovibrio vulgaris
  CDS (1)..(1143): transl_table=11
atggagtggacggaggaacgcgccgcagccctgcgcgaggcgcgttgcgtagtggtcaaggtgggcagtgccgtgctgaccaccgaaacgggcgtcaatcttgccgtcatcgacagtctcgccgcccagctttcggccttgcaggaatctggcaagcgggtggtgctcgtctcttcgggtgctgtggctgccgggcgcagtgccttgcgcgactgctgcgagattgccggaatgccgcataagcaggcggcttcggccgtagggcaaagccgtctcatgcatcactatgacgaggcgttcgcccgttacgggcatctctcggcgcaagtgcttctcacccgggacgacctgcggaaccgtgagcgttttctcaacgcacgcaacacgttccaggcgcttctcgactggggggtcatcccggtcgtcaacgagaacgacaccgtggcggtgcaggaactcaagtttggcgacaacgactgccttgccagcctgctgctcaacgtcgtcgagggcgacctgtacgtcaacctcacctccgcgtcgggtgtctatgccgacaacccgcagaccaatcccgaagccggtatcctgccgtgcatcgaggacgtgcacacgctcgacctcgatgtgatgtgcggaggcaagacgtctgtcggtaccggcggcatgtactccaagctgctggctgcaagccgcgccgcacaactgggggtgccgacgctcattcttccggggcgtgaaccgcgcatcctcgaacgtgccttctcgggtgaacccgtggggacatgggtgcgccccgaggcacgagtcgtgtcgcgccgcaagtactggctggcgtaccagtccgaaccttcggggacggtgacggtggacgagggtgcggcccgtgcgctgttgcagcaaggtggaagcctgcttccgggcggcgtctgcgatgtctccggcgcattcgaacccggggcgcttgtgcgtatcgccgggccggacggaaccgtcattgccgtgggtttgtcgaattacggcgaccgtgaccttgtgcggataaaggggcatcgacgtcacgaggtggctgccattctcggtgatgcccatttcccggaagtggtgcaccgcgacaacatgcttctggacgccgtggtatag

SEQ ID NO: 127832 - protein, 380 aa, Desulfovibrio vulgaris
MEWTEERAAALREARCVVVKVGSAVLTTETGVNLAVIDSLAAQLSALQESGKRVVLVSSGAVAAGRSALRDCCEIAGMPHKQAASAVGQSRLMHHYDEAFARYGHLSAQVLLTRDDLRNRERFLNARNTFQALLDWGVIPVVNENDTVAVQELKFGDNDCLASLLLNVVEGDLYVNLTSASGVYADNPQTNPEAGILPCIEDVHTLDLDVMCGGKTSVGTGGMYSKLLAASRAAQLGVPTLILPGREPRILERAFSGEPVGTWVRPEARVVSRRKYWLAYQSEPSGTVTVDEGAARALLQQGGSLLPGGVCDVSGAFEPGALVRIAGPDGTVIAVGLSNYGDRDLVRIKGHRRHEVAAILGDAHFPEVVHRDNMLLDAVV

SEQ ID NO: 127833 - DNA, 1104 bp, Escherichia coli O157
  CDS (1)..(1104): transl_table=11
atgagtgacagccagacgctggtggtaaaactcggcaccagtgtgctaacaggcggatcgcgccgcctgaaccgtgcccatatcgttgaacttgttcgccagtgcgcgcagttacatgccgccgggcatcggattgttattgtgacgtcgggcgcgatcgccgccggacgtgagcacctgggttacccggaactgccagcgactatcgcctcgaaacaactgctggcggcggtagggcagagtcgactgattcaactgtgggaacagctgttttcgatttatggcattcacgtcgggcaaatgctgctgactcgtgctgatatggaagaccgtgaacgcttcctgaacgcccgcgacaccctgcgtgcgttgctcgataacaatatcgttccggtaatcaatgagaacgatgctgtcgctacggcagagattaaagtcggcgataacgacaacctttctgcactggcggcgattctggcgggtgccgataaactgttgttactgaccgatcaaaaaggtttgtataccgctgacccgcgcagcaatccgcaggcagaactgattaaagatgtttacggcattgatgacgcactgcgcgcgattgctggtgacagcgtttcaggcctcggaactggcggcatgagtaccaaattgcaggccgctgacgtggcttgccgtgcgggtatcgacaccattattgccgcgggcagcaagccgggcgttattggtgatgtgatggaaggcatttccgtcggtacgctgttccatgcccaggcgactccgcttgaaaaccgtaaacgctggattttcggtgcgccgcctgcgggtgaaatcacggtagatgaaggggcaaccgccgccattcttgaacgcggcagctccctgttgccgaaaggcattaaaagcgtgactggcaacttctcgcgtggtgaagtcatccgcatttgtaacctcgaaggtcgcgatatcgcccacggcgtcagtcgttacaacagcgatgcattacgccgtattgccggacaccactcgcaagaaattgatgcaatactgggatatgaatacggcccggttgccgttcaccgtgatgacatgatcacccgttaa

SEQ ID NO: 127834 - protein, 367 aa, Escherichia coli O157
MSDSQTLVVKLGTSVLTGGSRRLNRAHIVELVRQCAQLHAAGHRIVIVTSGAIAAGREHLGYPELPATIASKQLLAAVGQSRLIQLWEQLFSIYGIHVGQMLLTRADMEDRERFLNARDTLRALLDNNIVPVINENDAVATAEIKVGDNDNLSALAAILAGADKLLLLTDQKGLYTADPRSNPQAELIKDVYGIDDALRAIAGDSVSGLGTGGMSTKLQAADVACRAGIDTIIAAGSKPGVIGDVMEGISVGTLFHAQATPLENRKRWIFGAPPAGEITVDEGATAAILERGSSLLPKGIKSVTGNFSRGEVIRICNLEGRDIAHGVSRYNSDALRRIAGHHSQEIDAILGYEYGPVAVHRDDMITR

SEQ ID NO: 127835 - DNA, 816 bp, Enterococcus faecalis
  CDS (1)..(816): transl_table=11
atgagaaacaaactccaacaggccaaacgaattgtgatcaaagtcggaaccagttctctgatttatcccaatggcaatattaacttaaaagcaattgatcaattagcctttactttgagtgatttaagcaaccaaggcaaagaaattattttagtttcttctggcgcaattggtgtcggactgaataaattaaatctatctgtacgcccaacgacaattcccgaacaacaggcagtcgctgcagtcggccaagcagaattaatgaacatttataatcagcggttttcaacctatagccaacaaatggcacaagttttattaactcgtgatgttattgaatatcctgaaagtcgcaataatgttaccaatacttttgaacaactgttaaaaatgaatattattcctatcgtcaatgaaaatgatactgtcgcaattgaagaattggatcacttaaccaagttcggggataacgatcaattgtctgccattgtctgccaaattgttcaagctgacttgttagttatgttatcagatattgatggtttcttttcagacaaccctactgtcaacaaagaagccacgttattttctgaaatcaatgaaattaatgaagacttgttccaattagccggtggtaagggaagccgctttggcactggtgggatgtctagtaaattaaaagctgctgaacgtgtgttagctaatcaacaggcgatgattttagcaaacggaaagcagccaaaaatcatttttgaaattttagaaggaaaagatatcggtacgttatttattaaaggagggcatgaaagtgactga

SEQ ID NO: 127836 - protein, 271 aa, Enterococcus faecalis
MRNKLQQAKRIVIKVGTSSLIYPNGNINLKAIDQLAFTLSDLSNQGKEIILVSSGAIGVGLNKLNLSVRPTTIPEQQAVAAVGQAELMNIYNQRFSTYSQQMAQVLLTRDVIEYPESRNNVTNTFEQLLKMNIIPIVNENDTVAIEELDHLTKFGDNDQLSAIVCQIVQADLLVMLSDIDGFFSDNPTVNKEATLFSEINEINEDLFQLAGGKGSRFGTGGMSSKLKAAERVLANQQAMILANGKQPKIIFEILEGKDIGTLFIKGGHESD

SEQ ID NO: 127837 - DNA, 1104 bp, Erwinia carotovora subsp
  CDS (1)..(1104): transl_table=11
atgagcggcagccagactttggttgtgaaactgggcaccagcgtgttaaccggcggttcacgccgtcttaaccgtgctcacattgttgaactggtgcgccagtgcgcgcagcaacatgcggcagggcaccggattgttattgtcacctcaggggcgattgctgctgggcgcgaacatttgggctaccccgaactcccggccacgattgcaaccaaacaactgctggccgccgtgggccaaagccgcctgattcaactgtgggaacagctgttttccatctacggtatccacgtcgggcagatgctgctgacgcgtgcggatatggaagatcgtgagcgtttcctcaatgcacgtgacaccatgcgggcgctgctggataacaacatcgttccagtgattaatgaaaacgatgcggttgcgaccgctgagatcaaggtcggcgataacgacaacctgtccgcgctggccgcgattctggccgatgcggataagctactgttgctaaccgatcaggcggggctgtttaccgccgatccgcgtaataatcctgatgcggaactgatccgtgaagtgaccggcatcaacgatgcgctgcgcagtattgcgggtgacagcgtgtctggcctcggaacgggcggcatgtcgactaagttgcaggctgccgatgtggcctgtcgcgccggcatcgacgtggtgattgccgcaggcagcaaaccgggcgtgattggcgatgtgattgctgatatttccgtcggaacacgttttcatgcactggatacgccgctggaaagccgcaaacactggatttttggtgcaccaccggcgggggaaatcaccgtcgatgacggcgcgctttcggcgatcctcgaacgcggtagctcgctgctgcctaaaggtatccgcacggtagaaggcaatttctctcgtggcgaagtgattcgcgtgcgtagcctagcgggccgcgatgtggcgcatgccgtgacgcgttacaacagcgatgcgctgcgcctgattgccggacatcattctcaacagattgccgagattcttggctacgaatatggtccggtggctatccatcgcgacgatatgattatcaattaa

SEQ ID NO: 127838 - protein, 367 aa, Erwinia carotovora subsp
MSGSQTLVVKLGTSVLTGGSRRLNRAHIVELVRQCAQQHAAGHRIVIVTSGAIAAGREHLGYPELPATIATKQLLAAVGQSRLIQLWEQLFSIYGIHVGQMLLTRADMEDRERFLNARDTMRALLDNNIVPVINENDAVATAEIKVGDNDNLSALAAILADADKLLLLTDQAGLFTADPRNNPDAELIREVTGINDALRSIAGDSVSGLGTGGMSTKLQAADVACRAGIDVVIAAGSKPGVIGDVIADISVGTRFHALDTPLESRKHWIFGAPPAGEITVDDGALSAILERGSSLLPKGIRTVEGNFSRGEVIRVRSLAGRDVAHAVTRYNSDALRLIAGHHSQQIAEILGYEYGPVAIHRDDMIIN

SEQ ID NO: 127839 - DNA, 1116 bp, Frankia sp
  CDS (1)..(1116): transl_table=11
gtgcgtccgttcgtgaccgacgcgcgccgggtcgtcgtcaaggtcggttcgtcctcgctgacgacggccgccggcggtctggacgtcgaccggcttgaggcgctggtggccgcggtgctgccccgggccggacaacaactggtgctggtgtcctccggggccatcgccgcgggtctcgccccgctcggcctggcccggcggccgcgtgacctcgccacccagcaggcggcggcgagcgtcggccagagctcgctcgtacacagctacgcggcggcgttcggacgggccggtcaccaggtcggccaggtgctgctgacggcgaccgatgtgatccgccgcacccactaccgtaacgcccggaccgcgctcgaccggctgcttgagctcgacgtcatcccgatcatcaacgagaacgacgcggtggccacccaggagatccgggtcggcgacaacgaccggctcgccgcgattgtcgcccatctcgtgtcggcggatctgctggtgcttctgtccgacgtggacggcctgtacgacgccaaccccaggctgggcccggcgaccatggtgcgcgaggtgcgttcggataccgacctggacgggctgaccgcccggggcacgggcaccgccggtgtcggggtcggcgggatggctaccaagatcgaggcggcccggatggcggcttccggcggcgtcacggcgatcatcacctcggccgcgaacgccgcaccggtgctgcggggggaggaggtcggcaccgtcttccaccccaccgggtcgcgtcgggcctcccgcctgctctggctggcgcacgcgaccgcacccgagggccggctgcacttggactccggggcggtggccgcggtggtacggcggcgggcgtcgctgctgcccgccgggataaccggcgtggagggggacttcgccgccggggacccggtggacctggtcgaccccgacgggcggtccgtggcgcgggggctcgtcgccttcgacgcggcggagctgcccgtgatgctcgggcgttcgacggccgacctcgccatggaactcggaccgtcgtacgaacgtgagatcgtccaccgcgacgacctcgtgctgctgctgccggcccgctga

SEQ ID NO: 127840 - protein, 371 aa, Frankia sp
MRPFVTDARRVVVKVGSSSLTTAAGGLDVDRLEALVAAVLPRAGQQLVLVSSGAIAAGLAPLGLARRPRDLATQQAAASVGQSSLVHSYAAAFGRAGHQVGQVLLTATDVIRRTHYRNARTALDRLLELDVIPIINENDAVATQEIRVGDNDRLAAIVAHLVSADLLVLLSDVDGLYDANPRLGPATMVREVRSDTDLDGLTARGTGTAGVGVGGMATKIEAARMAASGGVTAIITSAANAAPVLRGEEVGTVFHPTGSRRASRLLWLAHATAPEGRLHLDSGAVAAVVRRRASLLPAGITGVEGDFAAGDPVDLVDPDGRSVARGLVAFDAAELPVMLGRSTADLAMELGPSYEREIVHRDDLVLLLPAR

SEQ ID NO: 127841 - DNA, 1125 bp, Geobacillus kaustophilus
  CDS (1)..(1125): transl_table=11
atgaaacggcagcgcgtggtggtcaaaatcggcagcagctcgctcaccgatccgaaaggcggcctttgccatgacaaactgttcgatcacgttgaggcgatcgcttatctcaaacagctcggccatgacgtcattctcatcacgtccggcgctgtcgccgctggtttcggacctttaggctacccggcgcgcccgacgacaatcgctgggaaacaggcagccgcagccgtcgggcaaagtttgctcatgcaggcgtacagctcggcgttcgcccaattcggctttacggccgctcagctgttgttgacgcgcagcgacttttacagccgcgagcggttccgcaacttgtttgccacaatcaccacactgcttgagaacggcgccgtgccgatcattaatgaaaacgactccgtttccatcgaagaattgacatttggcgacaatgacatgctttcggcgcttgtcgccggctttttgcacgctgatgcgctcattttgcttacggacattaacgggttgtatgacgccaatccgaaaacgaatccgcaggcgaaaaaatacgcctttttgccggaaatcaccgatgagatgatcgaagccgccggcggcatcggttcagccgtcggcaccggcgggatgcgctcgaagcttctcgcggctcgaaaagcactttcgtttggcgtcagcgtgttcatcggcacgggaagcggccgagaaaaactggctgatattttagctggaaaaggagacggcacgtacatcggcgttccgtttccgaaacaaatgcaaatgcgcaaacaatggattgcctatcatgctcctgtcgccggcatgatcacggtcgacagcggggctgaagaagcgttgcttatgcgtgggaaaagtttgctccctgctggcgtaacagcggtttccggcgacttccatgcgatggatgtcgtggatgtcgtcaatgaaaaagggatcacgatcggacgcggccaagtgtattacgccgccgccgatttgaaaaaagtgaaagggcggccgagcgaagaggcccggcaatactcttaccttcaccgcccggaagtcatccaccgcgacaattgggtcacgttgcgaaaggagagtgtatcgaaatga

SEQ ID NO: 127842 - protein, 374 aa, Geobacillus kaustophilus
MKRQRVVVKIGSSSLTDPKGGLCHDKLFDHVEAIAYLKQLGHDVILITSGAVAAGFGPLGYPARPTTIAGKQAAAAVGQSLLMQAYSSAFAQFGFTAAQLLLTRSDFYSRERFRNLFATITTLLENGAVPIINENDSVSIEELTFGDNDMLSALVAGFLHADALILLTDINGLYDANPKTNPQAKKYAFLPEITDEMIEAAGGIGSAVGTGGMRSKLLAARKALSFGVSVFIGTGSGREKLADILAGKGDGTYIGVPFPKQMQMRKQWIAYHAPVAGMITVDSGAEEALLMRGKSLLPAGVTAVSGDFHAMDVVDVVNEKGITIGRGQVYYAAADLKKVKGRPSEEARQYSYLHRPEVIHRDNWVTLRKESVSK

SEQ ID NO: 127843 - DNA, 1122 bp, Geobacter metallireducens
  CDS (1)..(1122): transl_table=11
atgcgcacagccatcctcaaaaaggtcaaacggatcgtcatcaagatcgggagccgtgtcctcaccggcgacgagaacggcctcaaccacgccttcatcgcccggcttgccgccgagaccgcatcgttgcgacagcaggggcgccaggtcatcgtcgtttcatcgggtgccgtggctgccggcaggcgcgaactcggcatcgagggacggcccaagagcattccccagaagcaggccgctgccgccatcggccagtcacgcctcatgcgggcctacgaagaggacttcggccgcttcggccacaaggtggcacagatactcctcacccgggacgatctcgccaaccgccgccgtttcctgaacgcccgggcaacccttgacacgctcctggacttcggcgtcattcccgtcatcaacgagaacgacaccgtggtggtggacgagatcaagttcggcgacaacgacaacctgtcggccctggtgaccaacctggccgaggcccacctcctggtgatcctgaccgacatcgacggcttctacgactccgacccccgggcgaaccccgatgccaggctgatccacctggtgaagagcatcacccgcgaaacggagcgggccgccggcgacagcggctccagcgtgggcaccggcggcatggtgacgaagctggccgcagccaagaaggcggggcagttcggcgtcccgaccctcatgctcaacggcacggtgccgggcattctcaccaaggcctttgccggccgggaggtgggaaccctcttccttcccgcccgggagagcctcaaccgccgcaagcactggatcgcccacaccctgcgccccagcggccgagtcatcgtggacgacggagcccggacggtcctctcccgtcaggggaaaagtctcctcccctcgggggtaatccgagtggagggagagttcgaccgaggggcctgtgtccgggtttgcggggccgacggcgccgaaatcgcccggggggtggtggactactcccacgccgaaatcgagcggatcctcggccaccggagcggcgagatcgaggcgatcctcggctacaagtacggagacgagatcatccaccgggacaacctggtggtgctataa

SEQ ID NO: 127844 - protein, 373 aa, Geobacter metallireducens
MRTAILKKVKRIVIKIGSRVLTGDENGLNHAFIARLAAETASLRQQGRQVIVVSSGAVAAGRRELGIEGRPKSIPQKQAAAAIGQSRLMRAYEEDFGRFGHKVAQILLTRDDLANRRRFLNARATLDTLLDFGVIPVINENDTVVVDEIKFGDNDNLSALVTNLAEAHLLVILTDIDGFYDSDPRANPDARLIHLVKSITRETERAAGDSGSSVGTGGMVTKLAAAKKAGQFGVPTLMLNGTVPGILTKAFAGREVGTLFLPARESLNRRKHWIAHTLRPSGRVIVDDGARTVLSRQGKSLLPSGVIRVEGEFDRGACVRVCGADGAEIARGVVDYSHAEIERILGHRSGEIEAILGYKYGDEIIHRDNLVVL

SEQ ID NO: 127845 - DNA, 1122 bp, Geobacter sulfurreducens
  CDS (1)..(1122): transl_table=11
atgcgtagcggaatcctctccaaggtcaagcggatcgtcatcaagatcggcagtggggtcctcacctgtggggacaacgggctcaacaagcccctcatgggcagcatcgccgcccaggtggccgagctgcgcgccagcggccgccaggtgatcatcgtctcctcgggcgccgttgccgcggggcggaaagagctcggcatcgacggcagaccccggagcattccccagaagcaggcggcggcggccatcggccagtcgcgcctcatgcacgcctacgaggaggccttcgagcccttcggccacaaggtggcgcagatccttctgacccgcgacgacctggcccaccggggacggtttctcaacgcccgggctacccttgataccctcctctccttcggggtgatcccgatcatcaacgaaaacgacactgtggtcttcgacgagatcaagttcggcgacaacgacagcctctccgccctggtcaccaacctggccgaggccaatctgctggtgatcctgaccgacatcgacggtttctacgaggcgaatccccgtaccaaccccgacgcgcggctcattcccctggttcggcagatcacccgggagatggaacgggctgccggcggcagcggttccaccgtcggcacgggcgggatggtaaccaagctggctgcggccaagaaggccggccagttcggggtgccgacgctcatgctcaacggcaggaatccgtccctgctggccgaagcctttgccggccgcgaggtggggaccctgttcctccccggcaaggagagcctcaaccggcgcaagcactggattgcccatactctgaggccgtcggggaaaatcatcgtggacgacggcgcccgcacggtccttgcccgccaggggaaaagcctgctaccgtcgggggtggtccgggtcgaggggaagttcgaccggggcgcctgcgtccgggtctgcggcaccgacggcactgagatcgcccgggggctcgtagactattcccatgacgagatcacccgcatcctcggtcatcgaagtggcgagatcgaggccatcctcggctacaagtacggggacgagatcatccaccgggacaatcttgtggtgctgtag

SEQ ID NO: 127846 - protein, 373 aa, Geobacter sulfurreducens
MRSGILSKVKRIVIKIGSGVLTCGDNGLNKPLMGSIAAQVAELRASGRQVIIVSSGAVAAGRKELGIDGRPRSIPQKQAAAAIGQSRLMHAYEEAFEPFGHKVAQILLTRDDLAHRGRFLNARATLDTLLSFGVIPIINENDTVVFDEIKFGDNDSLSALVTNLAEANLLVILTDIDGFYEANPRTNPDARLIPLVRQITREMERAAGGSGSTVGTGGMVTKLAAAKKAGQFGVPTLMLNGRNPSLLAEAFAGREVGTLFLPGKESLNRRKHWIAHTLRPSGKIIVDDGARTVLARQGKSLLPSGVVRVEGKFDRGACVRVCGTDGTEIARGLVDYSHDEITRILGHRSGEIEAILGYKYGDEIIHRDNLVVL

SEQ ID NO: 127847 - DNA, 1110 bp, Gloeobacter violaceus
  CDS (1)..(1110): transl_table=11
atggtcgcgctggtggtcaaaatcggcacatcgagcctgagcgacccgagcacaggggatttgcgcctggcgacgcttggggggctcgccgagacgctcacgcggctgcggcgcgcgggccaccggatcatcctggtcagcagtggggcggtgggggtcggctgcgcacggctcggcctcaaggagcgccccgccaccgtggcgggcaagcaggccgccgccgccgtcgggcaggggctgctgatgagcatgtacgatcgcctcttcggagcgctcggccaaccggtggcccaggtattactcacccgccaggatttgatggaccgcgtccgctacctcaacgcccgcgaaacgttgagcgaattgtggcgactcgggacggtgcccatcgtcaacgaaaacgacacggtggccaccgacgagttgcgcttcggggacaacgacgccctctcggcgctggtggcggggctggtcgaggcgcagtggctggtgctgctcaccgacgtggccgggctctactcggccaacccgcgcctcgatccgcaggcacggcttttgtccgaggtgaccgagatttctgaagaactgctgcagtcggcccgcgggcgcagcctctggggcagcggcggcatggcgagcaaactggaggcggcgcgcatcgccgcgagcgccggggtggccaccgtgatcaccgagggaaacaccccgcaaaatatcgagcgcatcctggcgggcgaagcaatcggcacccgatttgccctggcgcggcccggggggcgtctgtcgctgcgcaagcgctggatcggctacggtctggtgcccgccggggcgctccacctcgacgagggggcggtcctggcggtgcgcgaagggggcaaatcgctgctgccggccggggtgaggggcgtggaaggccgcttcgagacgggagcgctggtgcggctcatcgacgggcagggcctcgaatttgcccgggggctcgtgaattattccagcgaagaactggaaaaaatccgcggccgcaaaagccatgagattgccgcgcttttgggtatcgaaggacaaccgcccacggccgtgcaccgcgacaatctggtcaccctttcttga

SEQ ID NO: 127848 - protein, 369 aa, Gloeobacter violaceus
MVALVVKIGTSSLSDPSTGDLRLATLGGLAETLTRLRRAGHRIILVSSGAVGVGCARLGLKERPATVAGKQAAAAVGQGLLMSMYDRLFGALGQPVAQVLLTRQDLMDRVRYLNARETLSELWRLGTVPIVNENDTVATDELRFGDNDALSALVAGLVEAQWLVLLTDVAGLYSANPRLDPQARLLSEVTEISEELLQSARGRSLWGSGGMASKLEAARIAASAGVATVITEGNTPQNIERILAGEAIGTRFALARPGGRLSLRKRWIGYGLVPAGALHLDEGAVLAVREGGKSLLPAGVRGVEGRFETGALVRLIDGQGLEFARGLVNYSSEELEKIRGRKSHEIAALLGIEGQPPTAVHRDNLVTLS

SEQ ID NO: 127849 - DNA, 1137 bp, Gluconobacter oxydans
  CDS (1)..(1137): transl_table=11
atgaccgctccggcttctgctcctcgtctggcgcaggcccgccggatcgtcatcaagatcggaagtgcgcttctggtcgattccgcgaatgcaagccttcgtcttgaatggctgcagagcgtctgtgcggatattgctgacctgcgttcccggggcgcggaagtcatcgtcgtgtcctcgggcgcgatttccctggcgcgacatcgcctcggcctgacatcccgccgccttcggctggacgaaaaacaggccatggccagtgtcggccagatcggactggcgcaaggctggagcgcagccctcgccggccatgatctggtcgcggcccagcttcttctgaccccggacgatacggaaaaccgtgagcgccacctcaacgcgcgcgccacgctccagaccctgctcgatctgggctgcgttcccgtcatcaacgaaaacgatgccatcgcgaccggcgagatccgcttcggcgacaatgaccgcctgggcgcgcgtgtggcccagatgaccggggccgactgtctggtcctgctgtccgacatcgacgggctctatacagcggacccgcgacaggatccgtccgcgcggcatattcctgttgtcgaacagatgacggacgagatcatggcgatgggaggcgagccgccgccgggttattcgtctggcggaatgcgcacgaagctcctcgcggcccggattgcgacgcgcgcgggtgcaaacatggtgatcgcggccggacaggagcatcatccgctccgcagactgcagaatggcgggctgtgcacatggttcatggcgcagaccgatgccggctcagcccgcaagcgctggatcggtggcagccttcagcccaaggggacacttacgatcgatgccggcgcccgtcgtgctcttgaagagagcgcatcccttctgccagcaggcgtgaccggccttgagggcagttttgggcgcggcgacctggtactcatccgtgatgctgacggcagcattatcgggcgcggtctgatcgcctatgattccgaggagagccagaagctgattggccatcgctccggcgagatggaacagcttctgggatatcgcggacgtgatgccctgatccatcgggatgatctggcgctcgatcttccctga

SEQ ID NO: 127850 - protein, 378 aa, Gluconobacter oxydans
MTAPASAPRLAQARRIVIKIGSALLVDSANASLRLEWLQSVCADIADLRSRGAEVIVVSSGAISLARHRLGLTSRRLRLDEKQAMASVGQIGLAQGWSAALAGHDLVAAQLLLTPDDTENRERHLNARATLQTLLDLGCVPVINENDAIATGEIRFGDNDRLGARVAQMTGADCLVLLSDIDGLYTADPRQDPSARHIPVVEQMTDEIMAMGGEPPPGYSSGGMRTKLLAARIATRAGANMVIAAGQEHHPLRRLQNGGLCTWFMAQTDAGSARKRWIGGSLQPKGTLTIDAGARRALEESASLLPAGVTGLEGSFGRGDLVLIRDADGSIIGRGLIAYDSEESQKLIGHRSGEMEQLLGYRGRDALIHRDDLALDLP

SEQ ID NO: 127851 - DNA, 1107 bp, Haemophilus influenzae
  CDS (1)..(1107): transl_table=11
atgaacaaaaaaacaatcgttgtgaaattcggtactagcacgctaactcagggttcgccaaaattgaattcgccacatatgatggaaatcgttcgtcaaattgcacaactgcataatgatggatttcgtatagtaatcgtgacttctggtgctattgcagcgggtcgccattatttaaatcatcctcaattaccacccactattgcctcaaagcaactgcttgcagcggttggtcagagccaattaattcaggcttgggaaaaattatttgctatttatgatattcatatcgggcaacttttattaactcgtgctgatattgaagatcgcgaacgttttttaaatgcacgagatactttacatgcacttttagataaccacattattcctgtgattaatgaaaatgatgcggtggcgactgcggaaataaaagtaggagacaatgacaatttatctgcactagtcgctattcttgtgcaagcggaacaactttatttattgactgatcaacaaggtttatttgatagtgatccgcgtaaaaatcctgaagcaaaattaattccagttgtagaacaaatcactgatcacattcgatcaattgcaggaggaagtggtacaaatcttggcacaggtggaatgatgactaaaatcattgctgccgatgttgccactcgctctggaattgaaacaattattgcaccaggtaatcgtccaaatgtaattgcagatcttgcttatgaacaaaatattggtacaaaatttattgcacaccaatctgatcgattagaaagtcgcaaacaatggcttttcgccgcgccatcggcaggcattatcactattgatgatggagcgaaaaatgccattcttgaacaaaataaatctttattacccgctggtattattaacgtggaagggcgtttttcgcgtggtgaagtagtcaaaatatgcactcaatctggtaaagacattgtactaggtatgccacgctataacagcgatgctctacaattaattaagggcagaaaatcagcagatattgaaaatgttttaggctatgaatatggtgcggtggcaatgcatcgtgatgatatgattattttgtcataa

SEQ ID NO: 127852 - protein, 368 aa, Haemophilus influenzae
MNKKTIVVKFGTSTLTQGSPKLNSPHMMEIVRQIAQLHNDGFRIVIVTSGAIAAGRHYLNHPQLPPTIASKQLLAAVGQSQLIQAWEKLFAIYDIHIGQLLLTRADIEDRERFLNARDTLHALLDNHIIPVINENDAVATAEIKVGDNDNLSALVAILVQAEQLYLLTDQQGLFDSDPRKNPEAKLIPVVEQITDHIRSIAGGSGTNLGTGGMMTKIIAADVATRSGIETIIAPGNRPNVIADLAYEQNIGTKFIAHQSDRLESRKQWLFAAPSAGIITIDDGAKNAILEQNKSLLPAGIINVEGRFSRGEVVKICTQSGKDIVLGMPRYNSDALQLIKGRKSADIENVLGYEYGAVAMHRDDMIILS

SEQ ID NO: 127853 - DNA, 1107 bp, Haemophilus influenzae
  CDS (1)..(1107): transl_table=11
atgaacaaaaaaacaatcgttgtgaaattcggtacaagcacgctaactcagggttcgccaaaactgaattcgccacatatgatggaaatcgttcgtcaaattgcacaactgcacaatgatggatttcgtatagtgatcgtgacttctggtgcgattgcagcgggtcgccattatttaaatcatcctcaattaccacccactatcgcctcaaagcaactgcttgcagcggttggtcagagccaattaattcaggcttgggaaaaattatttgctatttatgatatccatatcgggcaacttttattaacccgtgcagatattgaagatcgcgaacgttttttaaatgcgcgagatactttatacgcacttttagataaccacattattcctgtgattaatgaaaatgatgcggtagcgactgcggaaattaaagtaggagacaatgacaatttatcggcattagtcgctattcttgtgcaagcggaacagctttatttattgactgatcaacaaggtttatttgatagtgatccacgtaaaaatcctgaagcgaaattaattccagttgtagaacaaatcaccgatcatattcgatcaattgcaggaggaagtggtacaaatcttggtactggtggaatgatgaccaaaatcattgctgccgatgttgcgactcgctctggaattgaaaccattattgctccaggtaatcgcccaaatgtaattgcagatcttgcttatgaacaaaatattggtacaaaatttattgcacaccaatctgatcgattagaaagccgcaaacaatggcttttcgccgcaccatcggcaggtattattaccattgataacggtgcgcaaaatgccattcttgaacaaaataaatctttattacccgctggtattattaacgtggaagggcgtttttcgcgtggtgaagtagtcaaaatacgcactcaatcaggtaaagacattgcgctgggtatgccacgctataacagcgatgctctacaattaattaagggcagaaaatcagcagacattgagaatgttttaggctatgaatatggcgcagtggcaatgcatcgtgatgatatgattattttgtcataa

SEQ ID NO: 127854 - protein, 368 aa, Haemophilus influenzae
MNKKTIVVKFGTSTLTQGSPKLNSPHMMEIVRQIAQLHNDGFRIVIVTSGAIAAGRHYLNHPQLPPTIASKQLLAAVGQSQLIQAWEKLFAIYDIHIGQLLLTRADIEDRERFLNARDTLYALLDNHIIPVINENDAVATAEIKVGDNDNLSALVAILVQAEQLYLLTDQQGLFDSDPRKNPEAKLIPVVEQITDHIRSIAGGSGTNLGTGGMMTKIIAADVATRSGIETIIAPGNRPNVIADLAYEQNIGTKFIAHQSDRLESRKQWLFAAPSAGIITIDNGAQNAILEQNKSLLPAGIINVEGRFSRGEVVKIRTQSGKDIALGMPRYNSDALQLIKGRKSADIENVLGYEYGAVAMHRDDMIILS

SEQ ID NO: 127855 - DNA, 795 bp, Helicobacter hepaticus
  CDS (1)..(795): transl_table=11
atgcaaaagccacgaatagttcttaaaattggctcttcaaacctttgtaatggcaaaatcattgacaaaacccaaattaaagcattagcacaaattatcagtgagctcaagatgcgttttgatgtgattcttgtcagttccggagcagtagcaagcggtcatactacgctgcacatagatagaaatactttgcaaaacaaacaagccctagcaagtatcggtcagcctttgctaatggaatcttatcgtgaggcattaaaagattatgcaattcctactgcacaattgctccttgtgtggcgtgatttcgattctcgcaaaaatacaacttttgcaaaggatacgattgatacacttctagcacacaatgcactccctattattaatgaaaatgatactattgccacagatgaaatggtttttggcgacaatgataggcttggtgcttatgtaacatattattttggtgcaaaactccttattattttaagcgatattgatggctattttgacaaaaatcctcatcaatatgatgatgcacaaatcctccctatagtgcattctattccttctcaagcattagaacaaactcatagcccacacggagattttgccacaggagggattgttaccaaacttatagcagcagattttttacttcaacgcaaatgtatgatgtttttaagccacggacgcaaacttgatgtattaagagattttcttctacataataaacagagttcgggcacacttttttgccctgcagattctcaaggtataaagacgcttatatga

SEQ ID NO: 127856 - protein, 264 aa, Helicobacter hepaticus
MQKPRIVLKIGSSNLCNGKIIDKTQIKALAQIISELKMRFDVILVSSGAVASGHTTLHIDRNTLQNKQALASIGQPLLMESYREALKDYAIPTAQLLLVWRDFDSRKNTTFAKDTIDTLLAHNALPIINENDTIATDEMVFGDNDRLGAYVTYYFGAKLLIILSDIDGYFDKNPHQYDDAQILPIVHSIPSQALEQTHSPHGDFATGGIVTKLIAADFLLQRKCMMFLSHGRKLDVLRDFLLHNKQSSGTLFCPADSQGIKTLI

SEQ ID NO: 127857 - DNA, 1116 bp, Idiomarina loihiensis
  CDS (1)..(1116): transl_table=11
atgaaagcgccatcctggcgaagagccgtactgaaagtggggagtgcgctcatcgcgccagatgaaactggggttagcaccaaatacctattacccatagctcgttttattaacgagtgccgagaacgcgggcaagaagttgtcttagtctcgtcaggcagcgttgctgccggccgcaaacattttaactttgaacacaagaaagtaccggttgctgtgcgtaaagcaatgtccgcagtcggtcaaaatgaaatgatgggttactggtcacgctttttcgattccccctgcgcccagttgcttatgacccacagtgacttacgcgaccgagctcgctacgtcagcattaaaaacaccctaaacagattgttagagcacgacattttaccggtggtaaatgagaacgatgctcttgctactgacgaaatgaaagtgggtgataacgacaacttgtcggccatgatcgcgactttggttgatgccgacgcgctgtttatttgttcagacatcgacggtctgtatgactcagatccgaacctgaatccggacgcgaaaaaaataccggtggttgaacaaattgacgaaagcatttattcgcttgccggtggttcagtaagttccgtcggtaccgggggaatgcgcactaaagttgaggcggcagaaaaagctacttcacacggtatcgatacttacatagttaacggtcgtaagggtgaaacttttgaatcgttactacagggggacatccccggcacattattccgtcgccaatctgatccaattagcaataaaaagcattggttaagacatactctggttgcccagggtgaaatattggttgatgaaggtgctgagaaagcattaattgagaacggtgcctcactactgagttcaggcattgttgatgtacaaggtgactttgatcgcggtgacgccgtgctggttcgcagcgccaacgatactgacgctatcgcaaaaggtatttgtcagtacagcgcacatgaactgatgcatattaaagggcagcaaacggaagatatagcggagaaatttggctatagcccaattacggaagttattcaccgcgacgatctaatgattttggaggattcatga

SEQ ID NO: 127858 - protein, 371 aa, Idiomarina loihiensis
MKAPSWRRAVLKVGSALIAPDETGVSTKYLLPIARFINECRERGQEVVLVSSGSVAAGRKHFNFEHKKVPVAVRKAMSAVGQNEMMGYWSRFFDSPCAQLLMTHSDLRDRARYVSIKNTLNRLLEHDILPVVNENDALATDEMKVGDNDNLSAMIATLVDADALFICSDIDGLYDSDPNLNPDAKKIPVVEQIDESIYSLAGGSVSSVGTGGMRTKVEAAEKATSHGIDTYIVNGRKGETFESLLQGDIPGTLFRRQSDPISNKKHWLRHTLVAQGEILVDEGAEKALIENGASLLSSGIVDVQGDFDRGDAVLVRSANDTDAIAKGICQYSAHELMHIKGQQTEDIAEKFGYSPITEVIHRDDLMILEDS

SEQ ID NO: 127859 - DNA, 813 bp, Lactococcus lactis subsp
  CDS (1)..(813): transl_table=11
atgattatgacaagaaaaaatattttgagtgttaaacgaattgtagttaagattggaacgagttcgttgattttgccaaatggaaaaataaatttatcaaatatagacgagttggcttttgttttatctgatttgaataataaaggttatgaagtgattttggtgacttctggagcgattggagttggcttgaatgtgcttggtatagataaacgtcccaaagggattgctgaccagcaggctttggcttcaatcggtcaggttgaattgatgagtctttatacgcaaatgtttcgtcgttattcgcaaaaagtttctcagttacttttgacacgtgatgtgactgattttccaacgagtcgtgagaatgctgaaaatgcactaaatgcgttacttgggcttgggattattccaattattaatgaaaatgatgctattgcggttgatgaaatggatcatcaaacaaaatttggtgataatgataaattgggagcgattgtttctaaattagtgaatgctgatttattgattatgctgtcagatatcgatggactttttgataaaaatccatcgatttatgatgatgcgaaaatttttaatgaaattcatgaaattactgatgaattacgtcaaatggctggtggtgccggttcgcgttttggaactggcgggatgacttcaaaattggcggctgcacagattttatttgaaaatggtcaagaaatggttctgaccaatggcgaacggattcgagagattaaagaaattatcgaaggacgtgagattgggacttattttcatcaaaaatcttga

SEQ ID NO: 127860 - protein, 270 aa, Lactococcus lactis subsp
MIMTRKNILSVKRIVVKIGTSSLILPNGKINLSNIDELAFVLSDLNNKGYEVILVTSGAIGVGLNVLGIDKRPKGIADQQALASIGQVELMSLYTQMFRRYSQKVSQLLLTRDVTDFPTSRENAENALNALLGLGIIPIINENDAIAVDEMDHQTKFGDNDKLGAIVSKLVNADLLIMLSDIDGLFDKNPSIYDDAKIFNEIHEITDELRQMAGGAGSRFGTGGMTSKLAAAQILFENGQEMVLTNGERIREIKEIIEGREIGTYFHQKS

SEQ ID NO: 127861 - DNA, 813 bp, Leifsonia xyli subsp
  CDS (1)..(813): transl_table=11
atgaccatcgacgaccgcggccagatccgctccgcccggcgcatcgttgtgaaggtgggctcctcctccatcagcggcgagaacgcaggccagatcggcccgttggtggacgccctggccgaagcccacggccgcggttcgcaggtcgtcctcgtctcctcgggcgcgatcgcgacgggcatcccgtatctcgccctcacggagcgtccgaaggatctcgccactcagcaggctgccgccgcagtcgggcagaatgtgctcatctaccgttaccaggacagcctcgaccggtacggcatcgtcgccggtcaggtgttgctgaccgcgcgcgacgtggagaatccgacgcatcggagcaatgcgaaacgcgcgatggagcggctgctcgatctgcgcattctgccgatcgtcaacgagaacgacaccgttgcgacgcatgagatccgcttcggcgacaacgaccgcctcgccgcgctcgtggcgaagctggtcgaggccgatctgctggtactcctctccgatgtggacgcgctctacaccaaacccccgcaggaatccggcgccgagcggatcgcccacgtcggctggaacgaccagctggagggcgtcgagatcggctcggccggtccctccggcgtcggcaccggcggcgcactgacgaaggtctcggcggctcgtcaggccgccgagcacggcacagcggtggtgctcaccgcgacctcgctcgtggtggatgcgcttcgcggggagccggtcggcacctggttcgcgccggcgcaggagacggccgtggaaagcgctccggcgtcctag

SEQ ID NO: 127862 - protein, 270 aa, Leifsonia xyli subsp
MTIDDRGQIRSARRIVVKVGSSSISGENAGQIGPLVDALAEAHGRGSQVVLVSSGAIATGIPYLALTERPKDLATQQAAAAVGQNVLIYRYQDSLDRYGIVAGQVLLTARDVENPTHRSNAKRAMERLLDLRILPIVNENDTVATHEIRFGDNDRLAALVAKLVEADLLVLLSDVDALYTKPPQESGAERIAHVGWNDQLEGVEIGSAGPSGVGTGGALTKVSAARQAAEHGTAVVLTATSLVVDALRGEPVGTWFAPAQETAVESAPAS

SEQ ID NO: 127863 - DNA, 873 bp, Leptospira interrogans serogroup Icterohaemorrhagiae serovar
  CDS (1)..(873): transl_table=11
atgaaaccggaacgaaactcactttctgaaaagatccgtaacgctgaaaagatcgttatcaaagtaggttcggcaaggctttctggacttccgtcggaagtaaacgattttctatttcaattggtaagtgatattcgtcatcttagagatttaggaaaaaaggtgattttagtctcttcaggagcgattgcaagaggaagacttttgttaagcgaacttccctctacaatttcttcgggggattcacttgccgaaaaacaagcgttagccgcaatggggcaaaataggcttgtcaatctctacgatagttttttttccaaagtcaatttgagcatcgcacagatcctttttggtgttttggatttggaatccaaagaaggttataaaaatctaaagaacacgtttactcaacttgtagaatgggggatacttccagtagttaacgaaaatgattccgttgcaaccgaagaagtaaagtttggagacaacgatatgctttccgctttggtgagtttgatcgtagaagccgatcttttgattatacttacaggtgtggatggttttttaaaagaagagaaagttgtaccttttctggagaaaatttctaaagaagatttaggtcttgctgggggtcctagtggacctggcacaggcggaatgttcactaaacttaaatctgcgggtttattatctgaggctgggattccgaccgcgatcctaaacggaaaaaaaatgcatgtgattcgtgaatttttagaaaaaaattcaataggaacattagttgctccttccggaaaccgcgttttttctgaagaggacgtaaaagaaatcatccgtaaaaatagaaacggaaacggaggaaatagtttatga

SEQ ID NO: 127864 - protein, 290 aa, Leptospira interrogans serogroup Icterohaemorrhagiae serovar
MKPERNSLSEKIRNAEKIVIKVGSARLSGLPSEVNDFLFQLVSDIRHLRDLGKKVILVSSGAIARGRLLLSELPSTISSGDSLAEKQALAAMGQNRLVNLYDSFFSKVNLSIAQILFGVLDLESKEGYKNLKNTFTQLVEWGILPVVNENDSVATEEVKFGDNDMLSALVSLIVEADLLIILTGVDGFLKEEKVVPFLEKISKEDLGLAGGPSGPGTGGMFTKLKSAGLLSEAGIPTAILNGKKMHVIREFLEKNSIGTLVAPSGNRVFSEEDVKEIIRKNRNGNGGNSL

SEQ ID NO: 127865 - DNA, 831 bp, Listeria monocytogenes
  CDS (1)..(831): transl_table=11
atgcgcgaatctttaaaaaatagcaagagactagttatcaaggttggtacaagtacattaatgtatggaaatggccatattaacctaagaactatcgaaaaattagcgatggttttatccgatttacgtaatgaaggaaaagaagttatcttagtttcttctggggcaatcggcgttggatgtcataaattacaacttccagtgcgacctacaagtattcccgaacaacaagcagttgcttctgtcggtcagagtgaattaatgcatatatatagtaagttttttggtgaatacggacaagttgttggtcaagtactacttactcgagatgtaactgacttccctattagtagagaaaatgttatgaacacgctcgaaagtctcttagaacgcggaattattcctatcgtaaatgaaaatgatacagttgctgttgaggaactagaacatgtaactaaatacggcgataacgaccttctttcagctattgtagctaaactcgtgcaagctgatttacttatcatgctatctgatattgatggcttttatggtagtaatccttcaactgacccagatgcagttatgttttctgaaatcaatcaaataacaccagaaattgaagcacttgctggcggtaaaggttctaaattcggaactggcggcatgttaacgaaactttccgctgcttcttattgtatgaatgctaaccaaaaaatgattttaaccaatggcaaaaatcctacaattatttttgatataatgcaaggtgaacaaatcgggactttatttgcaagtaaaaaggaggaattttcccatgacggaactcattaa

SEQ ID NO: 127866 - protein, 276 aa, Listeria monocytogenes
MRESLKNSKRLVIKVGTSTLMYGNGHINLRTIEKLAMVLSDLRNEGKEVILVSSGAIGVGCHKLQLPVRPTSIPEQQAVASVGQSELMHIYSKFFGEYGQVVGQVLLTRDVTDFPISRENVMNTLESLLERGIIPIVNENDTVAVEELEHVTKYGDNDLLSAIVAKLVQADLLIMLSDIDGFYGSNPSTDPDAVMFSEINQITPEIEALAGGKGSKFGTGGMLTKLSAASYCMNANQKMILTNGKNPTIIFDIMQGEQIGTLFASKKEEFSHDGTH

SEQ ID NO: 127867 - DNA, 1122 bp, Mannheimia succiniciproducens
  CDS (1)..(1122): transl_table=11
atggaacaaaaacaaaactcgcaaaaaaccattgtagtgaaattcggtaccagcacattaactcaaggtacgccaaaattaaatcgcgcccacatgatcgaaatcgtgcgtcaattggcgcaattacatcaggaaggttatcgtcttgtaattgtcacatccggcgcaatggcggcgggcaggcattatcttaatcacccgaaacttccgcccacaatcgcctcaaaacaattattggcggcggttggacaaagccagctgattcaaacgtgggaacaactatttgccatttacgatattcatatcggtcagcttttattaacccgcgccgatattgaagaccgcgaacgctttttaaatgccagagatacgcttcacgcgttattggataaccgcattattccggtcgtaaatgaaaacgacgccgtcgccaccgcagaaatcaaagtaggcgataacgacaacttatcggcgttagtggcgattttagtacaggcggaacaactttatttgctcaccgaccaacaaggattatttgactccgatccgcggaaaaatccacaggcaaagctaatcccggtggtaaatgaaattaccgatcatattcgttctattgccggcggtagcggtacaaccttaggcacaggcggaatgtccaccaaaattaccgccgccgacattgcaacccgttccggcattgaaacaatcattgctccgggaaacagggaaaatgttatcgccgatcttgcccacggcgaagctataggtacgaaatttacggttcagaccgataaactggaaagccgtaaacaatggctctttgccgcgccttccgccggcattctgaccatcgatcaaggggcggaaaatgcaatattagaacaacataagtctttattgccggcgggtattgtaaatattgaaggtcgtttctcccgcggagaagtggtaaaaatccgcacccaacaaggcaaagatatcgcccttggcatgccgcgttacaacagcgatgcgctttatctcattcaaggcaaaaaatctcagaatattgaaaaaattctgggttatgaatacggctctgtggcgattcaccgcgatgatatgatcgtgttaaacaaataa

SEQ ID NO: 127868 - protein, 373 aa, Mannheimia succiniciproducens
MEQKQNSQKTIVVKFGTSTLTQGTPKLNRAHMIEIVRQLAQLHQEGYRLVIVTSGAMAAGRHYLNHPKLPPTIASKQLLAAVGQSQLIQTWEQLFAIYDIHIGQLLLTRADIEDRERFLNARDTLHALLDNRIIPVVNENDAVATAEIKVGDNDNLSALVAILVQAEQLYLLTDQQGLFDSDPRKNPQAKLIPVVNEITDHIRSIAGGSGTTLGTGGMSTKITAADIATRSGIETIIAPGNRENVIADLAHGEAIGTKFTVQTDKLESRKQWLFAAPSAGILTIDQGAENAILEQHKSLLPAGIVNIEGRFSRGEVVKIRTQQGKDIALGMPRYNSDALYLIQGKKSQNIEKILGYEYGSVAIHRDDMIVLNK

SEQ ID NO: 127869 - DNA, 1173 bp, Meiothermus ruber
  CDS (40)..(1173): transl_table=11
gtgagaaatgccccaagaagcgttacgataacgcaggctatgcacggtcgtcttcccctcaccgcccaaacccatcgccggctggtagtcaaggtgggcagcgccgtcctgagcgggccccaggggcggcagcaccaactggccattgccgcccaggtggccgccctgcgggccgaggggcgcgaggtggtgctggtctcctcgggggcccaggccaccggcatgcaaaagctgggcctgaccgaaaagcccaagtccatgcccggcaaacaggccctggccgccgtcgggcagcccaccctcatgctcctgtgggagcaggcttttagctggtacgacctgaaggtggcccaggtgttgctcaccgccgaagatctggcccaccgccaccgctacctgaacgcccggcagaccctggagacgcttttggagtggggcatcgtgcccatcatcaacgagaacgacacggtaatggtggaggagatcaagtttggcgacaacgaccagctttcggccctgattgcttcgctggtaggggccgatctgctgatcttgctctccgacatcgaggctttgtacgaggccgacccccgcacccaccccgaagcccagcccatcccctacgtggagcgggtggatgccggggtgctgcgcatggcaggcgacagtcccaaccgggtgggcaccggcgggatgaaaagcaagctgctggccgcggaaaaagctcaggccgccgggattccccacctgctgctgcccggcacccggccccagagcatcgccgaggccctgcaaggcgccccggtgggcacgctgtttgccggggggcagcgccgctacagcggccgtaagctctggctgtaccagctccccaagccccagggggaggtggtggtggacgccggggcggcgaaagccttacgccagggcggggcctcgctcctgccggcgggcatcctcgaggtgcgcgggcagtttggggtgggcgaggcggtcaggtgcctggacgagcagggcaacctgatcggggtgggcctggtcaactacagcgccgccgagctcgcccgcatcaagcgccgaaaaaccagggagatcgaggccctgctgggctacaaaaacaccgacgaggccatccaccgcgactactttgccctggcctcggagctcgagtga

SEQ ID NO: 127870 - protein, 377 aa, Meiothermus ruber
MHGRLPLTAQTHRRLVVKVGSAVLSGPQGRQHQLAIAAQVAALRAEGREVVLVSSGAQATGMQKLGLTEKPKSMPGKQALAAVGQPTLMLLWEQAFSWYDLKVAQVLLTAEDLAHRHRYLNARQTLETLLEWGIVPIINENDTVMVEEIKFGDNDQLSALIASLVGADLLILLSDIEALYEADPRTHPEAQPIPYVERVDAGVLRMAGDSPNRVGTGGMKSKLLAAEKAQAAGIPHLLLPGTRPQSIAEALQGAPVGTLFAGGQRRYSGRKLWLYQLPKPQGEVVVDAGAAKALRQGGASLLPAGILEVRGQFGVGEAVRCLDEQGNLIGVGLVNYSAAELARIKRRKTREIEALLGYKNTDEAIHRDYFALASELE

SEQ ID NO: 127871 - DNA, 1173 bp, Mesorhizobium sp
  CDS (1)..(1173): transl_table=11
atgagtggaatttcgctttcctcttatcgccgcgtgaccgtgaagatcggctctgccctgctggtcgatcgcgcggcagggttgaagcgtgagtggctcgccgcccttgttgacgatattgcccggctcatgtcggctggcacggaagtgctcgttgtatcctccggcgccattgccctgggacgcacggtgctgggccttggaaagcgcacattaaggctcgaggagagccaggccgcggcggccgtggggcagatcgcacttgcgggcgcgtggtcgggcgagctcggccgccacgggctcatctccggccaggtgctggttacattgggtgatacggaagaacgccgccgctacctcaacgcccgggcaacgatctcgacgcttctcaaaatgaaggccgttccagtcatcaatgagaacgacaccgtggcgaccagcgaaatccgatacggggacaacgaccggttggctgcgcgcgtcgccactatgatgggcggcgacctcctcatactcctgtccgatgtggatgggctttacacggctccgcccgagcgcgatcctgcggcaaagttcatcccggtcgtggatgccatcacgccggaaattatggctatgggcggggctgccgcctcggagctatcccgagggggcatgcgcaccaagctcgatgccgggcggatcgccaccgcggcgggtacggcaatgatcatcgcatcggggaaggagcgcggcccgctgtccgcgatcgagcgcggcgcgcgcgctaccctcttcaagccgagccccacgccggttcgcgcctacaagacctggatcgcgggtcaactcgagcccgccggccgtatcgggatcgatgacggcgcgttgagggcgctgcttcagggcaagagcctgctaccggcaggtgtgaggcgggtcgagggtgtcttctcccgtggcgacaccgtggcgatcgttgattccgcggggcgtgagattggccgggggctggttgcctatgatgccgccgatgccgtaaagatcgctgggctgaaaacgggcgatattgctggaatcctgggttacgaagcgcgagcggccatggtgcaccgggacgacctggtcctttccgggcctactggcgagctcatggatcgcaaggtggaaggaatcgatgttgcaggtgcgtga

SEQ ID NO: 127872 - protein, 390 aa, Mesorhizobium sp
MSGISLSSYRRVTVKIGSALLVDRAAGLKREWLAALVDDIARLMSAGTEVLVVSSGAIALGRTVLGLGKRTLRLEESQAAAAVGQIALAGAWSGELGRHGLISGQVLVTLGDTEERRRYLNARATISTLLKMKAVPVINENDTVATSEIRYGDNDRLAARVATMMGGDLLILLSDVDGLYTAPPERDPAAKFIPVVDAITPEIMAMGGAAASELSRGGMRTKLDAGRIATAAGTAMIIASGKERGPLSAIERGARATLFKPSPTPVRAYKTWIAGQLEPAGRIGIDDGALRALLQGKSLLPAGVRRVEGVFSRGDTVAIVDSAGREIGRGLVAYDAADAVKIAGLKTGDIAGILGYEARAAMVHRDDLVLSGPTGELMDRKVEGIDVAGA

SEQ ID NO: 127873 - DNA, 1158 bp, Methanosarcina acetivorans
  CDS (1)..(1158): transl_table=11
ttgacagatagagaacaattcttccgtgatgttaataaaatcgttattaagattggaacttcttcgataaccagaaagggttgcgaccacactaaagaaaactgcaatattgaccctgcctttatggaaagcatcgcagctcaggtctacgaacttcgaaaacatggaaaagaagtaattcttgtaagttcgggagcaataggcgtggggcttaacgagctgggcatagcccccaaaccccgcgagatccccattaggcaggcagccgcagctgttgggcagagcatactgatgcaggactggagcagggctttttccaaatacgggatgaaggtagcccagattcttcttacctatgaattctattccgatcgcgtaacctaccttaacctgaggaacagcatttcaacccttctggagtatgaagtcgtcccgataataaacgaaaacgactgtacatgtacaaacgagattgaagcaatcttcggggacaatgacaagctctctgcaatggttgcaagcaaaattgatgctgacctcctgatcatcctttcagacattgacgggctctttgacaggaacccaaagacgcacagtgatgcaaaactgctgacccttataaaaaagatcacacctgaaatcgagagctacgggggagaccccacaaacttcaagggtgtgggggggatgcgaaccaagataaaagctgcaaaaatctgcagcatggcaggctgctatgtcgtaatcgcaaacagtgaaatagaggatgtggttactaagatcctttccggagaagagatcggaacgctcttccttgcagagaggcatattcagaaaaaccgcgctcgctggataattcttgccagagcctcagggactgtccgcgtggacgccggagcaaaagctgcggtgctgggaaaaaacagcctccttccggcaggtattgtggatattgagggaacttttgacaggggagacgtcgtgaagctcgaatgtgaaggcaaggtctttgcaaagggaatcacgaactacacttccaaagaactgattaaaatcaaaggagcccagacaaatcaaatcgacaatattctgggctataataattatgataatgtaattaagaaagaaaatatcggtatactggaagggataaactaa

SEQ ID NO: 127874 - protein, 385 aa, Methanosarcina acetivorans
MTDREQFFRDVNKIVIKIGTSSITRKGCDHTKENCNIDPAFMESIAAQVYELRKHGKEVILVSSGAIGVGLNELGIAPKPREIPIRQAAAAVGQSILMQDWSRAFSKYGMKVAQILLTYEFYSDRVTYLNLRNSISTLLEYEVVPIINENDCTCTNEIEAIFGDNDKLSAMVASKIDADLLIILSDIDGLFDRNPKTHSDAKLLTLIKKITPEIESYGGDPTNFKGVGGMRTKIKAAKICSMAGCYVVIANSEIEDVVTKILSGEEIGTLFLAERHIQKNRARWIILARASGTVRVDAGAKAAVLGKNSLLPAGIVDIEGTFDRGDVVKLECEGKVFAKGITNYTSKELIKIKGAQTNQIDNILGYNNYDNVIKKENIGILEGIN

SEQ ID NO: 127875 - DNA, 1128 bp, Methanococcoides burtonii
  CDS (1)..(1128): transl_table=11
ttgaccaatcgaaaagaaataatcggtgatgctgaaaagatcgttattaagataggaacaacttccataagccgggaagatggcagccttaataacgagttcatggatacgatagcatcacaggtatctgagctgcatagagccggaaaacagataatactggtaagttccggttccataggaataggtattgaaatactcgaccttggatgtcgcccgaaagagatacccgtgcgccaggctgccgctgctgtggggcagggagtcctcatgcagcactggacagaagcattccaaaaatatggtttgaatgtagcgcagatcctgctaacatacgattcattcaccaaccgtctgacctacctcaacctaaggaacagcatttccactcttttgagctatggggtcatccccataatcaatgagaacgaccccatctgtgtccatgagatagaagcaactcttggggacaatgataaactttcagcaatggttgccagcaagatggaagcagacctgttaatactttttacagacatagatggcctttatgacaaaaatccaaaaagacacgatgatgcagttctgctaaggactgttgaagagataactcctaccatcgaaagctatggtggaaaccccactagcatgaaaggtgtcggaggaatgaggacaaagatagatgccgccaagatctgcaatatatcaggttgctacatggtcatcgcaaacagcaatgtcgatgatggtatccgaagaatactggatggcgaagaattgggaaccctcttcctcactaaccagttcgtacacaaaaataggatacgctggataatcctcgccagatcatcaggaagtatcgtagtcgataccggtgcaaaggaagcattggctaaaagaatgagccttcttccatcaggagttctaggcgttgcaggcacttttgaccgaggggacattgtaaaacttgaatgtgacggtgttgtattcggaaaagggataacagattatacgtccgaagaactgaaagcaatcaaaggaaaacagaccaacgaaattgcagatatactcggatacaagaactatgatcatgtggtccagaaagacaatattggcctgttcaaataa

SEQ ID NO: 127876 - protein, 375 aa, Methanococcoides burtonii
MTNRKEIIGDAEKIVIKIGTTSISREDGSLNNEFMDTIASQVSELHRAGKQIILVSSGSIGIGIEILDLGCRPKEIPVRQAAAAVGQGVLMQHWTEAFQKYGLNVAQILLTYDSFTNRLTYLNLRNSISTLLSYGVIPIINENDPICVHEIEATLGDNDKLSAMVASKMEADLLILFTDIDGLYDKNPKRHDDAVLLRTVEEITPTIESYGGNPTSMKGVGGMRTKIDAAKICNISGCYMVIANSNVDDGIRRILDGEELGTLFLTNQFVHKNRIRWIILARSSGSIVVDTGAKEALAKRMSLLPSGVLGVAGTFDRGDIVKLECDGVVFGKGITDYTSEELKAIKGKQTNEIADILGYKNYDHVVQKDNIGLFK

SEQ ID NO: 127877 - DNA, 1125 bp, Methylococcus capsulatus
  CDS (1)..(1125): transl_table=11
atgcagagcaggaatgagctccctggcagccggcgcgtcatcgtcaagatcggcagcgccctgctgaccgcaggcggcaaaggactggaccaacctgccatcggccaatgggtgcagcagatcgcggaactgcgccagcaggggatccaagtggtgctggtttcctcgggctcggtcgccgaaggcatgtcgcggctgggctggaagacccggccgcatcggctgaatgagctccaggccgccgcctcggtcggccagatggggctggtgcagacttacgaaagtctgttcaagcggcacggcctgcagacagcgcagatcctcttgacccacgacgacctgtcgaaccgggagcgctatctcaactcgcgcagcaccatactcacattactcgagctcggagtcatcccggtcatcaacgaaaacgacaccgtcaccacggaagaaatccgcttcggcgacaacgacacgctgggtgcgctggtggcgaatgcggtcgaggccgatctgctcatcattctgacagaccaggccggactgttcgagcgcaacccctcgctcgacccctcggccccgctggtcccccaagccggtatcaacgatccccggctcaatgacatggtcggggacagtctgagcggtctgggccggggaggcatgattaccaagctacgtgcggcacggctggcggcccggtcgggaacggccacggtgatcgccagcggcagggaaagcggagtactgcctcgcattctcgacggagaagagctgggcacactgctgattccggacgtttcccctctgatcgcccgcaagcgctggatggccggacagctcaaattgaaaggatgtttcgtggttgacgaaggcgccgcaagggtattgcgggacgccgggaagagcctgttgccgatcggcgtaatcgccgtggagggcgaattccggcgcggcgacctcgtagcctgcacggattccgcgggccaggaaatcgcacgcggactgaccaactacagcgctgaagaagcccgtctcatcatgcgccagccgagcacgcggatcgaggagatcctgggatacgtggacgagccagaactcatccaccgcgacaatctggtgttgagctga

SEQ ID NO: 127878 - protein, 374 aa, Methylococcus capsulatus
MQSRNELPGSRRVIVKIGSALLTAGGKGLDQPAIGQWVQQIAELRQQGIQVVLVSSGSVAEGMSRLGWKTRPHRLNELQAAASVGQMGLVQTYESLFKRHGLQTAQILLTHDDLSNRERYLNSRSTILTLLELGVIPVINENDTVTTEEIRFGDNDTLGALVANAVEADLLIILTDQAGLFERNPSLDPSAPLVPQAGINDPRLNDMVGDSLSGLGRGGMITKLRAARLAARSGTATVIASGRESGVLPRILDGEELGTLLIPDVSPLIARKRWMAGQLKLKGCFVVDEGAARVLRDAGKSLLPIGVIAVEGEFRRGDLVACTDSAGQEIARGLTNYSAEEARLIMRQPSTRIEEILGYVDEPELIHRDNLVLS

SEQ ID NO: 127879 - DNA, 1119 bp, Methylobacillus flagellatus
  CDS (1)..(1119): transl_table=11
atgacgtcattgctattgaatgcaaaatgcctggtcgtgaaggtaggctccagtctggtgactaacaacggcgctggcctggataaaggtgccattgcagcctgggccgatcagattgcccggctggtgaagtcgggccggcaggtggtactggtatccagcggtgccgtggcggaaggcatgcagcgcctgggctggaagaagcggccagtggcgatcaacgagttgcaggctgctgcagccgttgggcaaatgggcttggtgcagatgtacgagtcctgctttgcttcccacggtttgcatactgcccagattctgctgacgcatgcagacttggccgacaggaaacgctacctgaatgcgcggacgacattgcgtaccttgctggacttgggcgtcattccgatcatcaatgaaaatgacacagttgtgaccgatgaaattcgcttcggtgacaatgacaccctgggatcgctggtagccaacctgatcgaagcggatgcgctggtgatcctcaccgaccagccgggcttgtattcggccgatccgcgcaagcatcccgatgcgcaattcattcagtatgaaactgctggcaatcctgctctggaaaagatggcaggtggcgccggcaccctgattgggagcggtggcatgctgaccaagatcctcgctgccaagcgggcagcgcgtagcggggcgcatactgtcatcgcctccggccgggagccggatatcttggtgaggctggcgcaaggcgaggtggtaggcacgcatctcaaggcgggccaggtcaagaccttggctcgcaagcaatggcttgcggatcaactgcgtgttgccggcaaggtcgtggtggatgaaggcgcagccaaggcattgcgcgaagggggacgcagcctgttgccgatcggcgtgatggctgtagaaggcagttttgagcgtggagaggtcgtatcctgtgtgaataccgcgggcgaggaaatcgcgcgcggattggtgaattacagtgcgctagagacggctcgcatcctgcgtcagccgagtcacgaaatagaacatatcctgggttatatcgatgggcctgaattgattcatcgcgacaacctgattctggtgtaa

SEQ ID NO: 127880 - protein, 372 aa, Methylobacillus flagellatus
MTSLLLNAKCLVVKVGSSLVTNNGAGLDKGAIAAWADQIARLVKSGRQVVLVSSGAVAEGMQRLGWKKRPVAINELQAAAAVGQMGLVQMYESCFASHGLHTAQILLTHADLADRKRYLNARTTLRTLLDLGVIPIINENDTVVTDEIRFGDNDTLGSLVANLIEADALVILTDQPGLYSADPRKHPDAQFIQYETAGNPALEKMAGGAGTLIGSGGMLTKILAAKRAARSGAHTVIASGREPDILVRLAQGEVVGTHLKAGQVKTLARKQWLADQLRVAGKVVVDEGAAKALREGGRSLLPIGVMAVEGSFERGEVVSCVNTAGEEIARGLVNYSALETARILRQPSHEIEHILGYIDGPELIHRDNLILV

SEQ ID NO: 127881 - DNA, 1158 bp, Methanosarcina mazei
  CDS (1)..(1158): transl_table=11
ttgacagaaagagaacaatttttccgtgatgttaataaaatcgtcattaagatcggaacttcttcaattaccagaaagggctgtgaccataccagggaaaactgcaacattgacccggcatttatggaaagcatagccttccaggtctcagagctccgaaagcaggggaaagaagtaattattgtgagttcgggagcaataggtgtcgggctgaatgagctgggcatagcccccaaaccccgtgagatccctatcagacaggcagctgcagcggtcgggcagagtatgctgatgcaggactggagcagagctttttccagatacggaatgaaggttgcccagatccttcttacctatgaattctattctgatagagtaacttacctcaacctgagaaacagcatctcaaccctgctggagtatggtgttgtcccgataataaacgaaaacgactgtacctgtacaaacgagattgaagcaatcttcggggacaatgacaagctctctgcaatggttgcgagcaaaatcgatgctgatcttctgattatcctttcggatattgatgggctttttgacaggaacccgaaaactcacattgacgcaaagcttctgaccattgtgaaaaagatcacgcctgagattgaaagttatgggggcgaccctacaagcttcaaaggcgttggcgggatgcggaccaaaataaaagctgcaaaaatctgcagtatggcaggctgctatgtagttattgcaaacagcgatgtagaggacgtcatcctgaaaatagcctcaggggaagaaatagggacccttttccttgctgaacggcatatccagaaaaaccgcgctcgctggattatccttgccagggcttcaggaacggtccgtgtagatgccggagcaaaagctgctgtcctcgggaaaaatagccttctcccggcaggcgttgtggatgtggaagggacatttgataggggagatgtcgtgaaactcgaatgtgacggcaaaatatttgcaaaagggattaccgactatacctctgaagagttaattaaaataaaaggagttcatacagaccagattgaaaacgttctgggctacagtaattacaacaacgtgataaaaaaggaaaatatcggcatactggaagagttaaattga

SEQ ID NO: 127882 - protein, 385 aa, Methanosarcina mazei
MTEREQFFRDVNKIVIKIGTSSITRKGCDHTRENCNIDPAFMESIAFQVSELRKQGKEVIIVSSGAIGVGLNELGIAPKPREIPIRQAAAAVGQSMLMQDWSRAFSRYGMKVAQILLTYEFYSDRVTYLNLRNSISTLLEYGVVPIINENDCTCTNEIEAIFGDNDKLSAMVASKIDADLLIILSDIDGLFDRNPKTHIDAKLLTIVKKITPEIESYGGDPTSFKGVGGMRTKIKAAKICSMAGCYVVIANSDVEDVILKIASGEEIGTLFLAERHIQKNRARWIILARASGTVRVDAGAKAAVLGKNSLLPAGVVDVEGTFDRGDVVKLECDGKIFAKGITDYTSEELIKIKGVHTDQIENVLGYSNYNNVIKKENIGILEELN

SEQ ID NO: 127883 - DNA, 1137 bp, Moorella thermoacetica
  CDS (1)..(1137): transl_table=11
ttgacggaaagggagtgccggctggctttgagccaggcgcggcggctggtaataaaggtggggaccagtaccctgacccataaaacgggcaaactaaacctgggacggatggagcgtctggtgcgggagctggtggatcaggtcaacgccggccgccaggtggtcctggtaacctccggagccgtgggagccggtatgggccgcctgggtttgaaagaaaagccccggaccctgccggaaaaacaggccgctgccgccgtgggccaggggctgctcatgcatatgtacgaaaagttcttcagcgattacggcctgctggtagcccaggtgcttttgacccgggccgacctggccgaccgcagccgctacctaaattcccgccataccctggcggccctcctgcgcctgggagttgtacccattgtcaacgagaacgacaccgtagcggttgaggaaatccgcgtcggggataatgacaccctctccgccctggtggccgggctggtagacgcggatatcctgtttttactgactgataccggaggcctctttaccgccaacccggttaccagtgacgacgctgtcctgctcccctgcgtgacggagattacgccggagatagaagccctggccgggggggcgggttccacctggtcaacggggggcatggccactaagatccaggccgcccgcctggccaccagcttcggcatcccggtggtcatcgccagcggtctccaggccgggcaaatcgaagccgtcctgaagggtgaggaaataggcactattttcctgccccgggaacatcgggcccacaccaggaaacgctggctcgcctatgctccggccgtccaggggcaaatccaggttgacgccggggcagcccgggcaatatgtaaaaatggcaagagcctcctccccggtggcgttattgcggtggatggtgatttcgaccagggggctatagtaagtatcgttgatcccgctggtaaagagatcgcccggggtatggccaactatccggcagcggctatttctcggattaaaggcaggaaaacgggcgagattggcgaaatcttaggctataaggattacgacgagattgttcaccgggacaatctaattgtcctggggtag

SEQ ID NO: 127884 - protein, 378 aa, Moorella thermoacetica
MTERECRLALSQARRLVIKVGTSTLTHKTGKLNLGRMERLVRELVDQVNAGRQVVLVTSGAVGAGMGRLGLKEKPRTLPEKQAAAAVGQGLLMHMYEKFFSDYGLLVAQVLLTRADLADRSRYLNSRHTLAALLRLGVVPIVNENDTVAVEEIRVGDNDTLSALVAGLVDADILFLLTDTGGLFTANPVTSDDAVLLPCVTEITPEIEALAGGAGSTWSTGGMATKIQAARLATSFGIPVVIASGLQAGQIEAVLKGEEIGTIFLPREHRAHTRKRWLAYAPAVQGQIQVDAGAARAICKNGKSLLPGGVIAVDGDFDQGAIVSIVDPAGKEIARGMANYPAAAISRIKGRKTGEIGEILGYKDYDEIVHRDNLIVLG

SEQ ID NO: 127885 - DNA, 1131 bp, Mycobacterium bovis
  CDS (1)..(1131): transl_table=11
atgagaagtccgcatcgggacgcaatccggaccgcgcgcggccttgtcgtgaaggtcgggaccacggcgcttaccacaccgtccgggatgttcgatgccggccggctggccggactggccgaggcggtcgagcggcggatgaaggcgggttccgacgtcgtcatcgtgtcttcgggcgccatcgccgccggcatcgagccgctcgggctgtcccgtcgtcccaaagatctggcgaccaagcaggcggcggccagcgtcgggcaggtcgcgctggtgaactcgtggagcgcggcgttcgcccgctacggccgcacggtgggccaggtgctgctgaccgcgcacgacatttcgatgcgggtgcagcacaccaacgcccaacgcacgctggatcggctgcgcgcgttgcacgcggtggcgattgtcaacgagaacgacaccgtggccaccaacgagatccggttcggtgacaacgatcggctgtctgcactggtggcgcacctggtcggcgccgacgctttggtgctgctgtcggacatcgacggcctctacgactgcgacccgcgcaaaaccgcggacgcgacgttcattccggaggtgtccgggccggcggatctggacggtgtggtcgccggccgcagtagccacctgggtactggcggcatggcgtccaaggtgtcggcggcgctgttggccgccgacgccggggtgccggtactgctggcccccgcggccgacgccgcgaccgcgctcgccgacgcgtcggtgggcacggtgtttgcggcccggcccgcgcgtctgtcggcccggcggttctgggtgcgttatgccgccgaagcaaccggcgcactgactctcgacgccggtgcggtgcgcgctgtggtgcgacaacgccggtcactgctggcggcgggtatcaccgcggtgtccggccggttttgcggcggcgatgtggtcgaactgcgtgcacccgacgcggccatggtagcccgcggggtggttgcctacgacgcgtccgagctggccaccatggtgggccggtccacctctgagctacccggcgagctgcgccgcccggtggtgcacgccgacgatctggtcgcggtgtcggcgaagcaagctaagcaagtttag

SEQ ID NO: 127886 - protein, 376 aa, Mycobacterium bovis
MRSPHRDAIRTARGLVVKVGTTALTTPSGMFDAGRLAGLAEAVERRMKAGSDVVIVSSGAIAAGIEPLGLSRRPKDLATKQAAASVGQVALVNSWSAAFARYGRTVGQVLLTAHDISMRVQHTNAQRTLDRLRALHAVAIVNENDTVATNEIRFGDNDRLSALVAHLVGADALVLLSDIDGLYDCDPRKTADATFIPEVSGPADLDGVVAGRSSHLGTGGMASKVSAALLAADAGVPVLLAPAADAATALADASVGTVFAARPARLSARRFWVRYAAEATGALTLDAGAVRAVVRQRRSLLAAGITAVSGRFCGGDVVELRAPDAAMVARGVVAYDASELATMVGRSTSELPGELRRPVVHADDLVAVSAKQAKQV

SEQ ID NO: 127887 - DNA, 1104 bp, Mycobacterium paratuberculosis
  CDS (1)..(1104): transl_table=11
gtgaccgcccaccgcgacgccatccgcacggcgcgcagcatggtggtcaaggtgggcaccaacgcgttgaccaccccggccggggtgttcgacgccggccggctggccgggctcgccgacgccatcgaggcgcggatgaaggccggcaccgacgtcgtcatcgtctcgtcgggtgccatcgccgcgggcatcgagccgctcggattgtcccgtcgccccagggatctggcgaccaagcaggccgcggccagcgtcggtcaggtggcactggtgaattcctggagcgcggcgttcgcccgctacggccgcaccgtcgggcaggtgctgctgagcgcgcacgacatctcgatgcgcgcccagcacaccaacgcccagcgcaccctggatcggctgcgcgccctgcatgcggtggcgatcgtcaacgagaacgacaccgtggccaccaacgagatccggttcggcgacaacgaccggctctcggcgctggtggcccacctggtcggcgccgaggcgctggtcttgctgtccgacatcgacggcctttacgactcggacccgcgaaagaccaagggagccaagttcattccggaggtgacgggcgcggaggatctggccggcgtggtcgccggcccgggcagcgacctgggcaccggcggcatgacgtcgaagatgtcctcggcgctgctggccgccgacgccggggtgcccgtgctgctggccgccgcggccgacgccgccagcgcgctcaccgacgcttcggtcggcacggtgttcgccgcccggccggtgcggatgtcggcccggcggttctgggtgcgctacgccgccgaggcggccggcgcgctgaccctggacgagggcgcggtgcgcgccgtggtgcatcagcgccgctcgctgctgcccgcgggcatcaccgcggtgtccggccggttctacgccggcgacgtcgtggaactgcgcgggccggacgcggtgccggtggcccgcggcgtggtggcctacgacaccaccgaactggcgaccatgatggggcgctcgaccagtgagctgcccggcgagctgcgcaggcccgcggtgcacgccgacgacctggtggcggtgtga

SEQ ID NO: 127888 - protein, 367 aa, Mycobacterium paratuberculosis
MTAHRDAIRTARSMVVKVGTNALTTPAGVFDAGRLAGLADAIEARMKAGTDVVIVSSGAIAAGIEPLGLSRRPRDLATKQAAASVGQVALVNSWSAAFARYGRTVGQVLLSAHDISMRAQHTNAQRTLDRLRALHAVAIVNENDTVATNEIRFGDNDRLSALVAHLVGAEALVLLSDIDGLYDSDPRKTKGAKFIPEVTGAEDLAGVVAGPGSDLGTGGMTSKMSSALLAADAGVPVLLAAAADAASALTDASVGTVFAARPVRMSARRFWVRYAAEAAGALTLDEGAVRAVVHQRRSLLPAGITAVSGRFYAGDVVELRGPDAVPVARGVVAYDTTELATMMGRSTSELPGELRRPAVHADDLVAV

SEQ ID NO: 127889 - DNA, 1134 bp, Myxococcus xanthus
  CDS (1)..(1134): transl_table=11
gtgagttcgatttccacgggacgcaccgccctacgctccgcccggcgggtggtggtgaaaatcggcaccaacgcgctgacgaacgccaccggacgtttcaaccgtcagcacttcgatgcgctgggccaggatttgttgtgggccgcgcagggccgcgagctggtggtggtgtccagcggggccattgccctgggggtcgagcggctgggcctgccctcgcgccctcgcgacatcccgggcaagcaggcgtgcgcggcggtggggcagagccggctggtgcaggcctacgaagaggccttcgccgcgcatgggaaggcggtggcccaggtgctgctcacccacgaggacgtgcaggagcgccgccgctacctcaacgtgaagcacaccctggagcggttgctgacggcgggcgtcgtccccgtcatcaacgagaacgacaccgtctccgtggacgagctgaagttcggtgacaacgacacgctggcggggctggtggccggcgtggtggatgccgacgcgctcgtcctgctgtcggatgtggagggcctctacaccggagacccccggcgcgacgcaggcgcggagctgctggccacggtgatgcaggtgacgcccgaggtcctggcgctcgccaccggtacgagcagcggggtggggacgggcgggatgagcaccaaggtgcgggcggccgcgcgcgcgtccgattccggcattcactgcgtgattacgtccggcgccgtgcccggccgcctgcgcgccgtcctggaaggcgcggacgtggggacccacttcgaacccaccggcagccgccgcagtgcccgcgccgcgtggattgcccatgccctgcgcgcacgcgggacgctcacggtggatgccggcgcgcgcgaggccattgtcaccggcaagcgcagcctgctgcccagcggcgttcgcggcgtggagggggacttcgggcgcggagacccggtggacctggtggacgcggagggggccgtgttcgcgcgggggctggcggcctacgacgccaacgagctgcgacgcatcgccggacatcgcacggcggacatcgaagcggtgctgggctaccgctacctcgacgaggccgtgcaccgcgacgacctggccgtgctgtag

SEQ ID NO: 127890 - protein, 377 aa, Myxococcus xanthus
MSSISTGRTALRSARRVVVKIGTNALTNATGRFNRQHFDALGQDLLWAAQGRELVVVSSGAIALGVERLGLPSRPRDIPGKQACAAVGQSRLVQAYEEAFAAHGKAVAQVLLTHEDVQERRRYLNVKHTLERLLTAGVVPVINENDTVSVDELKFGDNDTLAGLVAGVVDADALVLLSDVEGLYTGDPRRDAGAELLATVMQVTPEVLALATGTSSGVGTGGMSTKVRAAARASDSGIHCVITSGAVPGRLRAVLEGADVGTHFEPTGSRRSARAAWIAHALRARGTLTVDAGAREAIVTGKRSLLPSGVRGVEGDFGRGDPVDLVDAEGAVFARGLAAYDANELRRIAGHRTADIEAVLGYRYLDEAVHRDDLAVL

SEQ ID NO: 127891 - DNA, 1110 bp, Neisseria meningitidis serogroup A
  CDS (1)..(1110): transl_table=11
atgaaatacaaaagaatcgtatttaaagtcggcacatcttcgattacccattcggacggcagtctctcgcgcggcaaaatccaaaccatcacccgccagcttgccgcattgcatcatgcgggacacgagctggtcttggtgtcttccggcgcggttgcggcagggttcggtgcgctgggtttcaaaaaacgtccggtcaaaatcgccgacaaacaggcttccgccgccgtcgggcaggggctgctgatggaagaatatacggcaaacctgtcttcagacggcatcgtgtccgcacaaatcctgctcagccgcgccgactttgccgacaaacgccgctaccaaaatgccggcggcgcactttccgtgctgctgcaacgccgcgccgtccccatcatcaatgaaaacgatacggtttcggttgaggaattgaaaatcggcgacaacgacacattgagtgcgcaagtggcggcgatgatacaggcagacctcttggtgctgctgaccgacatagacggtctttacaccggcaacccgaacagcaatcccgatgccgtacggctggacaaaatcgaacacatcaaccatgaaatcatcgaaatggcgggcggctcgggttcggcaaacggcacaggcggtatgctgactaaaatcaaagcggcgacgattgcgaccgagtccggcgtaccggtctatatctgttcctcgctcaaacccgatgcacttgccgaagcggcagataatcaggcggacggctcgtttttcgtcccccgtgccaaaggtttgcggacgcagaagcaatggctggcgttctattccgaaagcaggggcggcgtttatgtggacgaaggtgcggaacacgctttgtccgaacagggaaaaagcctgctgatgtcgggcattgccggaatcgaagggcatttttcccgtatggacaccgtaaccgtgtacagcaaggcaaccaaacagcctttgggcaaagggcgagtcctgttcggctctgccgccgccgaagacctgctcaaattgcgtaaggcgaaaggcgtgttcatccatcgggacgactggatttccatcacgcccgaaatacgcctgcttctgaccgaattttag

SEQ ID NO: 127892 - protein, 369 aa, Neisseria meningitidis serogroup A
MKYKRIVFKVGTSSITHSDGSLSRGKIQTITRQLAALHHAGHELVLVSSGAVAAGFGALGFKKRPVKIADKQASAAVGQGLLMEEYTANLSSDGIVSAQILLSRADFADKRRYQNAGGALSVLLQRRAVPIINENDTVSVEELKIGDNDTLSAQVAAMIQADLLVLLTDIDGLYTGNPNSNPDAVRLDKIEHINHEIIEMAGGSGSANGTGGMLTKIKAATIATESGVPVYICSSLKPDALAEAADNQADGSFFVPRAKGLRTQKQWLAFYSESRGGVYVDEGAEHALSEQGKSLLMSGIAGIEGHFSRMDTVTVYSKATKQPLGKGRVLFGSAAAEDLLKLRKAKGVFIHRDDWISITPEIRLLLTEF

SEQ ID NO: 127893 - DNA, 1122 bp, Nitrosomonas europaea
  CDS (1)..(1122): transl_table=11
atgacgcaatcgattctgcaatccgcccgccggatagtcgtaaaagttggcagcagcctggtgacgaatgaaggacacggtcttgatcgctgtgcactgggaggctgggccggacagatttcccggctcagacagatgggcaaggaagtcgtgctggtttcatccggcgccgttgccgagggtatgcagcgtctgggctggaaaatgcgtcctgcggcgctttatgagctgcaggctgccgcggcagtggggcagatggggcttgcccaggcctatgccgattgtttcagtgaatacgaattacagacggctcagattctgctgacgcatgatgatctgtcgagtcgtaaacgctatctgaatgcccgttcgaccattcttacgctgctgaatctgggtatcattccggtcatcaatgagaacgatactgtggtttccgatgaaatccggtttggtgacaacgataatctggctgcactggttgccaatctgatcgaagccgaagtgctggtgatcctgactgaccaggaaggtctttttaccggcgatccgcgcaaaaataccgatgccagactgatcccggaagtcagcgtcagcgatccggatatcgaagtcatggccggtggggcgggcagcagcatcggacgcggtggtatgcaaagcaaggtaatggctgccaggcgtgctgctcgcagcggtgcgcatacggtgatcgcttcaggcagggcgaaggatgtgctggttcgtctggcaggtggagaggctatcggaaccattctgctggcggatatgccagtgaaggtggcgcgcaagttgtggctggccgatcatctccaggtacgggggagtgtagtgctggacgatggggccagcagagcattgctgtctggaggtaaaagtctgctgcccatcggggtggtggagataaagggtgaatttgaacgtggagaagccatatcctgcctcgatgccagcggccgtgaaatcgctcgtggcctgatcaattacgatgctcgtgaatcacgcaagatcatgcgtcgtcctaccagccagattgaagctgtgctgggttatgtggatgaatatgaacttattcacagagataacctggttattctgtaa

SEQ ID NO: 127894 - protein, 373 aa, Nitrosomonas europaea
MTQSILQSARRIVVKVGSSLVTNEGHGLDRCALGGWAGQISRLRQMGKEVVLVSSGAVAEGMQRLGWKMRPAALYELQAAAAVGQMGLAQAYADCFSEYELQTAQILLTHDDLSSRKRYLNARSTILTLLNLGIIPVINENDTVVSDEIRFGDNDNLAALVANLIEAEVLVILTDQEGLFTGDPRKNTDARLIPEVSVSDPDIEVMAGGAGSSIGRGGMQSKVMAARRAARSGAHTVIASGRAKDVLVRLAGGEAIGTILLADMPVKVARKLWLADHLQVRGSVVLDDGASRALLSGGKSLLPIGVVEIKGEFERGEAISCLDASGREIARGLINYDARESRKIMRRPTSQIEAVLGYVDEYELIHRDNLVIL

SEQ ID NO: 127895 - DNA, 1101 bp, Nocardia farcinica
  CDS (1)..(1101): transl_table=11
ttgagcgcggccaggcaggcgatcgcgtcggcgcgcagcgtggtcgtcaagatcggctcgtcggcgctgaccagtctcgaaggcggattggacaccacccggctggaccggctcgccgacgccgtggaggcgcgcatgcgggccggatcggatgtcgtggtggtctcctccggcgcgatcggcgccgggctcgccccgctcgggttgtcccgccggccacgagatctggcgaccaagcaggccgccgccagcgtcgggcagctcgccctcgcacacgcttggggcacctccttcgcccgctacggtcgcaccgtcggccaggtgctgctgtcggccgacgacttctcccgccgcgagcaccaccgcaacgcccagcgcacgctggaccggttgcgctcgctcggcgcggtcgcggtcgtcaacgagaacgacacggtggccaccgaggagatccggttcggcgacaacgaccggctggccgcactggtcgcccacctggtcggcgccgacgcgttgatcctgctctccgacgtcgagggcctctacgacggcgacccccgcaagggcgcggccaccttcatccccgaggtgcgcagcagtgccgacctcgatggcgtgatcgcgggcagcggcggcgtgctcggcaccggcggtatggcctccaagctctcggccgcgcgactggccgccgacgcgggcgtcccggtgctgctggccgccgccgaacaggccgcgaccgcgctgggcagcggcaccgtcggcaccgcgttcgccgcccgcccggtgcggttgtcggcgcgcaagttctgggtgcggcacgccgccgacagccgcggcgcgctcgtcctcgacgacggcgcggtgcaggcggtcgcgcagcggcgccggtccctgctcgccgccgggatcaccgccgtgcgcgggcgcttccacggcggcgacgtggtggatctgctcgccgccgaccagcggctggtcgcgcgcggtgtggtcgaatacgacagcaccgagttgtccaccatgctcggccggtccaccaccgaactgcccgacaccatgcagcggccggtgatccacgccgacgacctggtcaaggtctga

SEQ ID NO: 127896 - protein, 366 aa, Nocardia farcinica
MSAARQAIASARSVVVKIGSSALTSLEGGLDTTRLDRLADAVEARMRAGSDVVVVSSGAIGAGLAPLGLSRRPRDLATKQAAASVGQLALAHAWGTSFARYGRTVGQVLLSADDFSRREHHRNAQRTLDRLRSLGAVAVVNENDTVATEEIRFGDNDRLAALVAHLVGADALILLSDVEGLYDGDPRKGAATFIPEVRSSADLDGVIAGSGGVLGTGGMASKLSAARLAADAGVPVLLAAAEQAATALGSGTVGTAFAARPVRLSARKFWVRHAADSRGALVLDDGAVQAVAQRRRSLLAAGITAVRGRFHGGDVVDLLAADQRLVARGVVEYDSTELSTMLGRSTTELPDTMQRPVIHADDLVKV

SEQ ID NO: 127897 - DNA, 1134 bp, Novosphingobium aromaticivorans
  CDS (1)..(1134): transl_table=11
atgaagatcagccagcttgcccaactgacccaggcttccacctgtccgcgcctcgtggtcaaggtcgggtcggccctgcttgtcggcaaggatggcgagccgcgccgcgaatggctttctgccctggtgtccgagatcgccgccatgcgcgcggccggacaggaagtcatcgtcgtctcctccggcgcgatcgcgctcggtgcgcgcaagctcgggcttgccaagggcgggcggggcagcctctccgacgcccaggccgccgcctcggtgggccagatcgcgctcgcggggctctgggccgaacttctggcgcagcacgggctcaccgccgcgcagatcctgctgacgctcgaagatctcgaggatcgccgacgttacctcaatgtcaccgccacgctgggcacgctgctcgcggcatgcgcggtgccggtgatcaacgagaacgattccgtcgcaacccaggaaatccgtttcggagacaacgaccgccttgccgcccgtgtgggccaggccgcaggcgcatcgggtgtgctgctcctgtccgacatcgacggtctctacgatcgcgacccccgccagcccggcgccacccgcattcccgtggtcaagggcgtgacccctgaaatccacgccatggccactggcggttcgtcttccggactcggctcgggcggcatgacgtccaagctccaggccgccgaaattgccgagcttgccggaatggcgcttgccatcatcgacggacagcccgttgccccgatcgccgctgccatgggcgctgcgcgcggcaccctgttcctgccacgcggacgcaagcaggcgcgcaaggcctggctcggcgggcgaatgcggatgcgcggcagcgtgcaggtcgacgccggtgccgccgccgcgctggcccgtggctccagcctgcttgccgccggagtgacagaggtcgacggcgatttccagcgcggcgatgccattgccgtgctcggtcccgacggccggacgctggcgcgcggcctttcggaatacgacgctgccgagtgcgcgcgcctcaaggggcgccacagccgcgagcatgaagaacttctgggctatgcgccgcgctcggcattgatccatcgcgaccagatggtgctgctgtaa

SEQ ID NO: 127898 - protein, 377 aa, Novosphingobium aromaticivorans
MKISQLAQLTQASTCPRLVVKVGSALLVGKDGEPRREWLSALVSEIAAMRAAGQEVIVVSSGAIALGARKLGLAKGGRGSLSDAQAAASVGQIALAGLWAELLAQHGLTAAQILLTLEDLEDRRRYLNVTATLGTLLAACAVPVINENDSVATQEIRFGDNDRLAARVGQAAGASGVLLLSDIDGLYDRDPRQPGATRIPVVKGVTPEIHAMATGGSSSGLGSGGMTSKLQAAEIAELAGMALAIIDGQPVAPIAAAMGAARGTLFLPRGRKQARKAWLGGRMRMRGSVQVDAGAAAALARGSSLLAAGVTEVDGDFQRGDAIAVLGPDGRTLARGLSEYDAAECARLKGRHSREHEELLGYAPRSALIHRDQMVLL

SEQ ID NO: 127899 - DNA, 1119 bp, Oceanobacillus iheyensis
  CDS (1)..(1119): transl_table=11
atgaataagaagagggtagttataaaaattggaagtagctcactaacgaatgaaaaaggtgaaattgatcataagaaactaggagaccatgtgaatgcgttagctatgttacatcaacataactttgaagttattttagtttcctcaggagctgttgcagcgggttttcgaaacttaggatattcttctagaccggttacgttaaaaggaaaacaagcatccgcggcgattggtcaaggtctacttattcatacttatatggataagtttatggaatacaatattcgatctgctcaattattattaacgaggtctgatttttcggtccaaaaacggtataagaatgctacatctactatgcttgaattactagaacgaggagttataccgattattaatgaaaacgacacagttgctgttgatgagttaacgttcggggataatgatatgctttctgctttagttagtggttctatccatgcagctcaattaataatattaaccgatattgatgggatttatgataaacatcctggtaaatatgcgagtgctatgcggtacgatacaattgatttaattactaatgatatgatacaggaaacggatgtttcaggatcgaaattaggtactggtggtatgaaatcgaaactgatggcagcaaaggtagcagcttctctcggagtcccagtttttattggtaaaggggtaggagtatctaaattactagaaatagtaaatggacatggacagggaacgtatgttagaagtttccgcaataaacaaattccgattcgtaagcaatggatttctttgcattcgacattagaggggaaagtatttattgatgatggggctactcaagcacttatgcataacggcggtagtttgttgtcagctggtgtgattaatactcagggagattttgaagatggagatgttgtagaagtttataatcgaagaaatttattaggaagagggcaagtgagttgttcgtctgaagagctcaacgcagccaacacattaaaaaaagcaaaacagatgacgcaaatccctgctattgaggtgattcacagagattcatgggttatggttgatcaaataaaggaggagttccaatga

SEQ ID NO: 127900 - protein, 372 aa, Oceanobacillus iheyensis
MNKKRVVIKIGSSSLTNEKGEIDHKKLGDHVNALAMLHQHNFEVILVSSGAVAAGFRNLGYSSRPVTLKGKQASAAIGQGLLIHTYMDKFMEYNIRSAQLLLTRSDFSVQKRYKNATSTMLELLERGVIPIINENDTVAVDELTFGDNDMLSALVSGSIHAAQLIILTDIDGIYDKHPGKYASAMRYDTIDLITNDMIQETDVSGSKLGTGGMKSKLMAAKVAASLGVPVFIGKGVGVSKLLEIVNGHGQGTYVRSFRNKQIPIRKQWISLHSTLEGKVFIDDGATQALMHNGGSLLSAGVINTQGDFEDGDVVEVYNRRNLLGRGQVSCSSEELNAANTLKKAKQMTQIPAIEVIHRDSWVMVDQIKEEFQ

SEQ ID NO: 127901 - DNA, 1161 bp, Pasteurella multocida; identical to SEQ ID NO: 127523
  CDS (58)..(1161): transl_table=11

SEQ ID NO: 127902 - protein, 367 aa, Pasteurella multocida
MKIDKTLVVKFGTSTLTQGSAKLNLPHMMDIVRQLAQLHQAGFRLVIVTSGAIAAGRHYLNHPQLPPTIASKQLLAAVGQSQLIQTWEKLFAIYDIHIGQILLTRADIEDRERFLNARDTLRALLDNQIIPVINENDAVATSEIKVGDNDNLSALVAILVQAEQLYLLTDQQGLFDRDPRKHPDAKLIADVDKITDHIRAIAGGSGTSLGTGGMSTKISAADVATRSGIETIIAPGNRPNVIVDLAYGQAIGTKFSVQADRLESRKQWLYAAPSAGIITIDAGAENAMLMQHKSLLPAGIVNVEGRFSRGEVVKIRTQQGKDVALGMPRYNSDALHLIQGKHSQDIEQVLGYEYGAVAVHRDDMIVL

SEQ ID NO: 127903 - DNA, 1107 bp, Photorhabdus luminescens subsp
  CDS (1)..(1107): transl_table=11
atgatgaatagcagccaaacattggttgtgaaactggggacgagtgtactgacaggcggctctcgtcgcctgaatcgagctcatattgtagaactggtaaggcaatgtgctcagcaacatgaaaaaggtcatcgcattattattgtgacttccggtgctattgcggcagggagggaacatttgggctatccggatctacctgcaacaattgcatccaagcaattgctggcggcggtcggccaaagtcggttgattcagttatgggagcagtttttttctatttatggtatccatgttgggcaaatgttattgacccgggcggatttagaagatcgcgaacgttttttaaatgccagagatactttacaggctttgcttgataatcgcattgtgcctgtcattaatgagaatgatgcggttgcgacggcggaaataaaagtgggtgataatgataatttatctgcactagcggcaattctggggggcgccgataaattgctattgctgacggatattgaagggctgtataccgctgatccgcgtaacaatccagacgcaaaacttatcccggaagtttatgacatcagcgatgaattacgtatggttgccggtgatagcatttcgggtttagggacgggaggcatggcaactaaacttcaggcggcggggattgctggtcgcgcggggattgatgtcattattgccgcgggtaataaacccgatgtcatctctgatgtcattgaaggtaatccggtaggtactcgttttcatgggttggaaagcccgatggaaaatcgcaagcgttggatttttggcgcacctccggcgggtgaaattattgtagatcatggcgctgaaacagcaatctgcgaaaaaggcagctctttattaccgaaagggattaaaaatattaaaggtgatttctcccgtggagaggttatctgtattcgtagtctgtctggtaaagatttggcgcatggtgtttgccgttataacagtgatgctctacgtttaattgcaggccaccattcacaacagataagccaaatcctcggttatgaatatggtgctgttgcggttcatcgtgatgacatgatcgtgagttaa

SEQ ID NO: 127904 - protein, 368 aa, Photorhabdus luminescens subsp
MMNSSQTLVVKLGTSVLTGGSRRLNRAHIVELVRQCAQQHEKGHRIIIVTSGAIAAGREHLGYPDLPATIASKQLLAAVGQSRLIQLWEQFFSIYGIHVGQMLLTRADLEDRERFLNARDTLQALLDNRIVPVINENDAVATAEIKVGDNDNLSALAAILGGADKLLLLTDIEGLYTADPRNNPDAKLIPEVYDISDELRMVAGDSISGLGTGGMATKLQAAGIAGRAGIDVIIAAGNKPDVISDVIEGNPVGTRFHGLESPMENRKRWIFGAPPAGEIIVDHGAETAICEKGSSLLPKGIKNIKGDFSRGEVICIRSLSGKDLAHGVCRYNSDALRLIAGHHSQQISQILGYEYGAVAVHRDDMIVS

SEQ ID NO: 127905 - DNA, 1137 bp, Photobacterium profundum
  CDS (1)..(1137): transl_table=11
atgacaccacctttatcggataaacaaacgctcccccccaagcaaaccattgttgtaaagcttggtaccagtgtattaacgggtggtactttgaagctagatcgtgctcatatggttgagttggttcgccaatgtgcttatcttcgacgttatggtcataaagtgattattgtgacatcgggtgcgattgcagctggtcgagagcatttagactaccctgaattgccgaaaacaatggctagcaaacagttacttgcggctgtaggtcaaagtcgtttgattcaagagtgggaaagcctgtttggcatttatggtcttcatgtcggtcagatgctgctaacgcgtgctgatcttgacgatcgtgaacgttacttgaatgctcgagacatgctcattgcgttattagataacggcattattcctgttgtaaatgaaaatgatgcggttgctaccactgaaataaaagtgggcgataatgataatttatccgctctagtgggtattttaggcggtgcagataagctactgctattaaccgaccaacccggtttatttactgctgatccacgtaataacccagatgcagagcttattcgcgaagtacataccattgatgaaacactgcgcaaattagcaggtggcagtgcaggtggtttaggtactggtggtatggcgactaaattgcaagcagcagatgttgctcgtcgtgcgggtattgaagtaattattgcagcgggtagtcgccccgatgtgatttctgatttagccagtggtgagtcggtaggaacacgctttcttccgttagatacaccactagaaagtcgtaagcgttggattttagcgggtccccctcctgctggtgatattgtgattgatgctggtgccgctaaggccgtactggaaagaggcagtagcttactatcgaaaggtattagcgaagtaaaaggggcatttgaacgtggcgaagtcgcacgcattttcgataccaacggtgttttgttagcccgcggtatttgtcgctattcaagccgcgatatggcaatgattgtaggtaagcacagccaagaaatttataaagtgctgggttatgaatatggtcctgttgctattcaccgtgatgatctagtggttatttaa

SEQ ID NO: 127906 - protein, 378 aa, Photobacterium profundum
MTPPLSDKQTLPPKQTIVVKLGTSVLTGGTLKLDRAHMVELVRQCAYLRRYGHKVIIVTSGAIAAGREHLDYPELPKTMASKQLLAAVGQSRLIQEWESLFGIYGLHVGQMLLTRADLDDRERYLNARDMLIALLDNGIIPVVNENDAVATTEIKVGDNDNLSALVGILGGADKLLLLTDQPGLFTADPRNNPDAELIREVHTIDETLRKLAGGSAGGLGTGGMATKLQAADVARRAGIEVIIAAGSRPDVISDLASGESVGTRFLPLDTPLESRKRWILAGPPPAGDIVIDAGAAKAVLERGSSLLSKGISEVKGAFERGEVARIFDTNGVLLARGICRYSSRDMAMIVGKHSQEIYKVLGYEYGPVAIHRDDLVVI

SEQ ID NO: 127907 - DNA, 1083 bp, Prochlorococcus marinus
  CDS (1)..(1083): transl_table=11
atgaaaacttgggttataaaaattggtactagtattttaagagggacagaggaaacatctactgaagaagttattgaaaccctttgtagatcctttacaagttttcttttaaaaggaaacaaattgattttagtgactagtggagccgttggattaggttgccaaaaattaaatattaaaactaggccaaatgatttaagtacccttcaagctaccgctgcagtaggtcaagttaatttaatgtctttgtacgataaaatatttaataaattaggtcataatattgctcaaattttaatcacgaaagctgactttaattcgcgagaatctttcaataacgcttctaaaacattaaaaaaattaatcgatttgaatgttattccaatagtaaatgaaaatgataccgtagcaaatgaggagcttaaatatggagataatgataccctctctgccttagttgccttagctattaatgctaataagcttattttattaaccgacattgaaaatctatattcaaaagatccacgtaagaataaagatgcgcatcctattaaagaggttcataatagtgaattaaaagaaattaaaaataaaaacaatcaaaactcaaataatgaatggggaacaggaggaatttctacaaaactaatttctgcagaaatagctacaaaagggggagttgaagttcaattagttgatggaacgaataaaaaaaatttaattgagatttttaatgataataaaattggaactttattttatccattagaaaaacctataggaaacaaaaaaagttggctttctcatgcaattcacacagtaggaaaaatcactttagatgatggagctttttttgcaattaacaaaaaaggtgcctcacttttagcggttggtgttaaaaatgtagaaggaaactttacggttaatcaagctgttaaaatcgtaaatacagataataaagaagttgcaaaaggtttagtatcaataagtagtgacaacttaagaagtatcttaaataataaagacaataacaactcctctataattgtcgtacacagagatgttctagctctctcttag

SEQ ID NO: 127908 - protein, 360 aa, Prochlorococcus marinus
MKTWVIKIGTSILRGTEETSTEEVIETLCRSFTSFLLKGNKLILVTSGAVGLGCQKLNIKTRPNDLSTLQATAAVGQVNLMSLYDKIFNKLGHNIAQILITKADFNSRESFNNASKTLKKLIDLNVIPIVNENDTVANEELKYGDNDTLSALVALAINANKLILLTDIENLYSKDPRKNKDAHPIKEVHNSELKEIKNKNNQNSNNEWGTGGISTKLISAEIATKGGVEVQLVDGTNKKNLIEIFNDNKIGTLFYPLEKPIGNKKSWLSHAIHTVGKITLDDGAFFAINKKGASLLAVGVKNVEGNFTVNQAVKIVNTDNKEVAKGLVSISSDNLRSILNNKDNNNSSIIVVHRDVLALS

SEQ ID NO: 127909 - DNA, 1095 bp, Prochlorococcus marinus
  CDS (1)..(1095): transl_table=11
atgacgttatggacaataaaaataggcacaagccttttaagaggtaataaagaatttagtactaataaaataatagaaacatactgtggatttatagctgaatctaaagctaaaggtgaccaagtaattattgtatctagtggtgctgttggcctgggatgcaatcgacttggattaaaggttagaccaaacgacctgaattccctacaagcagcagctgcagtagggcaaggttatctgatgtcactttatgaaagtgctatgaagaaatatggatacaatgtagcgcaaatacttctaacacgttctgatttcgaatccaaaagatgttttaaaaatgcttccttaactataaaaaaacttcttgattggaaagtgttgccaattatcaatgaaaatgattcaattgctaatgaagaattgaggtatggcgataacgatacattatctgctttagtttctactgctatatcagcagatcaattagttttactaactgatatagataaattatattcatctgaccctaaatttgataaagatgcaaagcctataactgatgtacatagttcaaatgaaataatacaaatacaaagcaattcaaatgaatctaataattggggtacgggtgggataaaaactaagttaacagctgctcaaattgccaccaaaaatggaataacagttcatcttgctgatgggagagagccaaaaattctaaaagacattttaaaaggttctcgcggaggaacagtatttcatccaaatccaaaaccaataggcacaatgaagagctggcttgcccatgccttatatcctcaagggacacttcatgtagatgatggtgcttataatgcaattcaaaataaaggggcgtctcttcttattgttggcataattaatattgatggggattttgcaaaaaaccaacctgtaaaaatagttaatcttgaaggaatagaaatagctaaaggaataagttcaataagcagtgagtcaattaggcgttttataaataatcgtataaaatcaactcaataccctgttgttgttcacagagatgttctagtactttctagtgaattacttatttaa

SEQ ID NO: 127910 - protein, 364 aa, Prochlorococcus marinus
MTLWTIKIGTSLLRGNKEFSTNKIIETYCGFIAESKAKGDQVIIVSSGAVGLGCNRLGLKVRPNDLNSLQAAAAVGQGYLMSLYESAMKKYGYNVAQILLTRSDFESKRCFKNASLTIKKLLDWKVLPIINENDSIANEELRYGDNDTLSALVSTAISADQLVLLTDIDKLYSSDPKFDKDAKPITDVHSSNEIIQIQSNSNESNNWGTGGIKTKLTAAQIATKNGITVHLADGREPKILKDILKGSRGGTVFHPNPKPIGTMKSWLAHALYPQGTLHVDDGAYNAIQNKGASLLIVGIINIDGDFAKNQPVKIVNLEGIEIAKGISSISSESIRRFINNRIKSTQYPVVVHRDVLVLSSELLI

SEQ ID NO: 127911 - DNA, 1086 bp, Prochlorococcus marinus
  CDS (1)..(1086): transl_table=11
atgagtctgtgggtggtgaaggtgggaaccagcctgctgagaggcaatgagaagcaatccaccgccgaagtgattgagagctacagcgcctgcctttcagcaagcctcaagcggggggatcatgttgtcctcgtaacaagtggcgccgtaggtcttggttgtaatcgtctagggctaagccaacggccggtcgatgtggtggctctccaagggacggcggcgatcggtcaaggacaactcatggctctttatgaggctgccatgagccgaaggggtcacaccgtggctcaggtattgcttacccgctcagatcttggctccaggcagcgataccgcaatgcttctagcaccttgaagcaattgctcgactggggcgttctgccggtggtgaatgagaacgacgccctctctccggaagaattgcgatacggcgacaacgacaccctttcagctctcgttgcaaccgcagtggaggctgatcagctcatcatgctcaccgacgtggatcgcctttattcctcagacccccgcattaatgcctctgccgaaccgatctcagatgtttaccatccccatgaactgactgccctggaagtcgcggcaggggagggaggtgcctggggcactgggggcatgactacaaaacttgcggcagctcgcatcgctaccgcaagtggcatcaccgttcttcttgctgatggccgcgatcctcaagtgcttgatgggttgctgcaaggaagacggagcggcacggtgtttcatcctcaccctcaacctctcggcaatcgcaagagctggctggcccatgctctgaagcccttagggacccttcagctggatgaaggcgcctgcgatgcccttcaacatcgtggcgcctccctgctcttggtgggggttaaagaggtggaaggaaactttgaagccaaccagccggtaagactaattaatcccgaaggtaacgagctcgctcgaggcctgtgttccttgagtagcaaagaactgcgcgaggccattgagacccaaatgagcacgaatcgttcaccggtcgtggtgcatagggacgtgttggttctccgcaacgcgtga

SEQ ID NO: 127912 - protein, 361 aa, Prochlorococcus marinus
MSLWVVKVGTSLLRGNEKQSTAEVIESYSACLSASLKRGDHVVLVTSGAVGLGCNRLGLSQRPVDVVALQGTAAIGQGQLMALYEAAMSRRGHTVAQVLLTRSDLGSRQRYRNASSTLKQLLDWGVLPVVNENDALSPEELRYGDNDTLSALVATAVEADQLIMLTDVDRLYSSDPRINASAEPISDVYHPHELTALEVAAGEGGAWGTGGMTTKLAAARIATASGITVLLADGRDPQVLDGLLQGRRSGTVFHPHPQPLGNRKSWLAHALKPLGTLQLDEGACDALQHRGASLLLVGVKEVEGNFEANQPVRLINPEGNELARGLCSLSSKELREAIETQMSTNRSPVVVHRDVLVLRNA

SEQ ID NO: 127913 - DNA, 1083 bp, Prochlorococcus marinus subsp
  CDS (1)..(1083)
atgaaaaaatgggtcgtaaaaattggtactagtattctcagaggaaatgaggatcaatctacagaacaagtaatagaaagtttatgtaaatctctaacaagttttatttttaaaggcaataaagtcattctcgtaacaagtggtgcggttggattaggatgtaaaaaattaaatttgaatacaagaccaaaggaactcagtgcacttcaagctgtagctgcagtgggacaagttaatttaatgactttatatgaaaagacaatgaaaaagctaggtcataatatagctcaaatactaataacaaaaactgattttgattcacgagaatccttcaataatgcttcaaaaacatttcaaaagttaattgatctgaatgtcatacctatagtcaacgagaatgattctattgccaatgaagagcttaaatatggagacaatgatactctttctgctttagttgctttagccataaatgccaataagctgattttattaactgatatagaaaatttatattcaaaagacccaagaaataatgaagatgctcatccaataaaagaagttaatagtaatcaattgaaaattataaaagataaaaacatccaaaattataataacgaatgggggacaggtggtattacaacaaaattaattgctgctgaaatagcaacaaaaggaggtgtagaagttcaattagccgatggcagaaatgagaataatttaataaatattttcaatgaaaaaaaaatagggacaatatttcatcctgttgataaaccagtaggtaataaaaaaagttggttatctcatgctattaaaacagttggacaaataacattagatgaaggtgcttgtcttgcaattgagcaaaaaggtgcctctcttctagttgtaggagttaaagaggtagaaggagattttactgttaatcaggctgttagaattgtaaatactaataagaaagaagttgcaaaaggtataacatcaatgagtagtgattctctaaaaagaatcttaaataaaaaagaaaacattaattcatcaatgatcgttgttcatagggatgttcttgctcttacctaa

SEQ ID NO: 127914 - protein, 360 aa, Prochlorococcus marinus subsp
MKKWVVKIGTSILRGNEDQSTEQVIESLCKSLTSFIFKGNKVILVTSGAVGLGCKKLNLNTRPKELSALQAVAAVGQVNLMTLYEKTMKKLGHNIAQILITKTDFDSRESFNNASKTFQKLIDLNVIPIVNENDSIANEELKYGDNDTLSALVALAINANKLILLTDIENLYSKDPRNNEDAHPIKEVNSNQLKIIKDKNIQNYNNEWGTGGITTKLIAAEIATKGGVEVQLADGRNENNLINIFNEKKIGTIFHPVDKPVGNKKSWLSHAIKTVGQITLDEGACLAIEQKGASLLVVGVKEVEGDFTVNQAVRIVNTNKKEVAKGITSMSSDSLKRILNKKENINSSMIVVHRDVLALT

SEQ ID NO: 127915 - DNA, 1083 bp, Prochlorococcus marinus
  CDS (1)..(1083): transl_table=11
atgacaacctgggtaataaagattggcacaagccttttgagaggaaacgataaatatacaacttttgatgtaattaacgattattgttcttatatatcaaaagctcaaaggaatggcgataaaattatattggtttctagtggtgctgtaggacttggatgtcatcaaatgagattcaagacaagacctaaagaaataatctctcttcaagcttctgctgcaataggtcaacttcatttaatggctttgtatgaaaaggctatgagcagttttggatataaagttgcgcaaatattattaactaggtcagaattaggatcaagaaatagttataattctgcttcgcaaacattaaaaaggttgctcgaatgggatgttataccaatcgtaaacgaaaatgatataacctcagatgaagagctaaagtatggtgataatgatactttatctgcattagttgcaacagctatatctgctgatcaattaatattattaactgatatcgatcatctctactcttctgatcccaaaatcaatagtaaagctaagccaatcaaagatattaacaattcaaaagaattaaataatttagaactagcaaatgaacaaacttcatgggggactggaggaataaaaacaaaattaactgctgcaaagatcgccactgaaagcgggataaaagttcaattagcagatggcagagatccgaaaatattaggcgaattacttgatggaaaaaaaataggaactgtttttcaccccaatccaaaccctatcgggaatagaaaaagttggttggcacatgcaattaaaccagtcggagaaatacacttagatgatggtgctagtgaagctatcaaaaacaaaggtgcttcactattattagttggggtaaaaaaagttagtggagattttattgctaatcaacctgtaaaagttattaacacggaaggagaggaatttgctaagggaatttgctcaatgagcagtgatgctataaagataggaattaattcaagatccgaaacaacaggatctcctctagttatccaccgagatgttctggttctaacaagtgaataa

SEQ ID NO: 127916 - protein, 360 aa, Prochlorococcus marinus
MTTWVIKIGTSLLRGNDKYTTFDVINDYCSYISKAQRNGDKIILVSSGAVGLGCHQMRFKTRPKEIISLQASAAIGQLHLMALYEKAMSSFGYKVAQILLTRSELGSRNSYNSASQTLKRLLEWDVIPIVNENDITSDEELKYGDNDTLSALVATAISADQLILLTDIDHLYSSDPKINSKAKPIKDINNSKELNNLELANEQTSWGTGGIKTKLTAAKIATESGIKVQLADGRDPKILGELLDGKKIGTVFHPNPNPIGNRKSWLAHAIKPVGEIHLDDGASEAIKNKGASLLLVGVKKVSGDFIANQPVKVINTEGEEFAKGICSMSSDAIKIGINSRSETTGSPLVIHRDVLVLTSE

SEQ ID NO: 127917 - DNA, 1107 bp, Pseudomonas syringae pv
  CDS (1)..(1107): transl_table=11
gtgacgggcgcccagcgctgggttgtgaagattggcagtgccttgctgaccgcggatggcaagggcctggatcgcaacgccatgggtgtttgggtggagcagatggcggcgctgcatgaggcgggtgtcgagctggtgctggtgtcttccggggcggtggctgccggtatgagccgtcttggctggacggcccgacccagcgccatgcatgagctccaggctgctgcggccatcggtcagatgggcttggtgcaggcgtgggaatcgagttttgccgagcacggccggcataccgcgcaaattctgctgacccatgacgacctgtcggaccgcaagcgctacctcaatgcccgcagtaccctgcgcacgctggtcgagcttggggttgtgccggtcatcaacgaaaatgacacagtggtcaccgacgaaatccgttttggcgataacgacacgctggcggcgctggttgccaatctggtcgaggcagatctgttggtcatcctgactgaccgcgacggcatgttcgacgctgatccgcgcaacaacccggaggctcagctgatctacgaagcgcgcgccgatgaccctgcgctggatgctgtggctggtggtacaggtggcgcactggggcgcggtggtatgcagaccaagttacgcgctgcgcggttggcggcgcgttccggtgcgcataccgtcattgtcggtgggcgtatagagcgcgtgctggcgcggctcaagggtggcgaacgtttggggacattgctgtctcccgagcgcggcatgctcgcggcgcgcaagcagtggctggcagggcacctgcaaactcgcggcacgctggtgctggatgatggcgctgttgcggcgctggccaaggatcagaaaagcctgctaccggtgggtgtcaagctggtccagggcagcttccggcgtggcgagatggtggtatgcgttgcctcggacggtcgcgagatcgctcgcgggctgagcaactacagtgctatcgaagcccagaaaatcattggtcactcttccgaatccatcgtgcgcgagctgggatatatggccgagcctgagctgattcatcgggataacctgatcctcgtctga

SEQ ID NO: 127918 - protein, 368 aa, Pseudomonas syringae pv
MTGAQRWVVKIGSALLTADGKGLDRNAMGVWVEQMAALHEAGVELVLVSSGAVAAGMSRLGWTARPSAMHELQAAAAIGQMGLVQAWESSFAEHGRHTAQILLTHDDLSDRKRYLNARSTLRTLVELGVVPVINENDTVVTDEIRFGDNDTLAALVANLVEADLLVILTDRDGMFDADPRNNPEAQLIYEARADDPALDAVAGGTGGALGRGGMQTKLRAARLAARSGAHTVIVGGRIERVLARLKGGERLGTLLSPERGMLAARKQWLAGHLQTRGTLVLDDGAVAALAKDQKSLLPVGVKLVQGSFRRGEMVVCVASDGREIARGLSNYSAIEAQKIIGHSSESIVRELGYMAEPELIHRDNLILV

SEQ ID NO: 127919 - DNA, 1107 bp, Pseudomonas fluorescens
  CDS (1)..(1107): transl_table=11
gtgacaggtgcgcagcgctgggtcgttaagatcggcagtgcgctgctgacggcggacggcaaggggctggatcgcacggcaatgggtgtgtgggtggagcagatggtggccttgcatgaggccggcgtcgagctggtactggtttcctccggtgctgtagcggccggcatgagccgcctgggctggaccgcacgaccgagtgcgatgcatgagttgcaggccgctgcggccatcggccagatggggctggtgcaggcctgggagtcgagctttgccgagcatggccggcatactgcacagattctcctgacccatgacgacctctccgatcgcaagcgctacctcaatgctcgcagtaccttgcgtgccctggtggagctcaaggtgatcccggtgatcaacgagaacgacactgtggtgaccgacgagatccgctttggcgacaacgatactctggcggcgctggtggccaacctggttgaggctgatctgctggtgattcttaccgaccgtgacggcatgttcgatgccgacccgcgtaacaatcctgatgcccagctgatctatgaggcgcgggccgacgacccggcgctggatgcggtggccggtggtacgggcggtgcgctggggcgtggcggcatgcagaccaagttgcgtgcggcgcggctggctgcgcgttccggggcgcatacaatcatcgttggtgggcgtctggatcgcgtgctggaccgcctcaaggctggcgagcgcatcggcaccttgctgtcgccggagcgcggcatgctggcggcgcgcaagcagtggctggccgggcatctgcagacccgcggcaccctggtgctggatgagggggcggtgtcggctctgtcccagggtaacaagagcctgttgccggtgggggtcaagcaggtccagggtggtttccggcgtggtgagatggtggtgtgcgtagcgccggatggtcgtgaaattgctcgtggcctggccaactacagtgcgcttgaggcgcagaagatcattggtcagccgtccgacgctattgtcggtgtcctggggtatatggcggagcctgaactggtacaccgcgataacctgattctggtgtaa

SEQ ID NO: 127920 - protein, 368 aa, Pseudomonas fluorescens
MTGAQRWVVKIGSALLTADGKGLDRTAMGVWVEQMVALHEAGVELVLVSSGAVAAGMSRLGWTARPSAMHELQAAAAIGQMGLVQAWESSFAEHGRHTAQILLTHDDLSDRKRYLNARSTLRALVELKVIPVINENDTVVTDEIRFGDNDTLAALVANLVEADLLVILTDRDGMFDADPRNNPDAQLIYEARADDPALDAVAGGTGGALGRGGMQTKLRAARLAARSGAHTIIVGGRLDRVLDRLKAGERIGTLLSPERGMLAARKQWLAGHLQTRGTLVLDEGAVSALSQGNKSLLPVGVKQVQGGFRRGEMVVCVAPDGREIARGLANYSALEAQKIIGQPSDAIVGVLGYMAEPELVHRDNLILV

SEQ ID NO: 127921 - DNA, 1122 bp, Pseudomonas fluorescens; identical to SEQ ID NO: 127593
  CDS (4)..(1122): transl_table=11

SEQ ID NO: 127922 - protein, 372 aa, Pseudomonas fluorescens
MRSKVTGAQRWVVKIGSALLTADGKGLDRTAMGVWVEQMVALHEAGVELVLVSSGAVAAGMSRLGWTARPSAMHELQAAAAIGQMGLVQAWESSFAEHGRHTAQILLTHDDLSDRKRYLNARSTLRALVELKVIPVINENDTVVTDEIRFGDNDTLAALVANLVEADLLVILTDRDGMFDADPRSNPDAQLIYEARADDPTLDAVAGGTGGALGRGGMQTKLRAARLAARSGAHTIIVGGRLERVLDRLKAGERIGTLLSPERGMLAARKQWLAGHLQTRGTLVLDDGAVSALSQGNKSLLPVGVKLVQGSFRRGEMVVCVAPDGREIARGLANYSALEAQKIIGQSSDAIVGLLGYMAEPELVHRDNLILV

SEQ ID NO: 127923 - DNA, 1119 bp, Pseudomonas putida
  CDS (1)..(1119): transl_table=11
atgcgaagcaaggtgacgggcgccaagcgctgggtcgttaagattggcagtgctctgctgaccgccgatggcaagggcctcgaccgcggtgcaatggccgtttgggtcgagcagatggtcgcgctgcgtgaggcgggcgtggagttggtactggtctcctccggggccgtggctgccggcatgagccagctgggctggaccaagcgaccgagtgcgatgaacgagctgcaggcggctgcctcgctcggccagatgcgtctggtgcaggcctgggagtcgagcttcggggagcacgggaagcacaccgcgcagatcctgctgacccatgacgacctgtccgaccgcaagcgttacctgaatgcccgcagcaccctgcgcaccttggtcgatctgggcgtggtgccggtgatcaacgaaaacgacaccgtggtcaccgacgagatccgcttcggcgacaacgacaccctggcggcgctggtggccaacctggtcgaggccgacctgctggtgatcctcaccgaccgcgatggtatgttcgatgccgacccgcgcaacaaccccgaagcgcagttgatctacgaagcccgcgccgacgacccctcactggatgccgtggccggtggtaccggtggtgccctgggccgtggcggcatgcagaccaagctgcgtgcggcgcgcctggctgcccgttccggcgcccacaccatcattatcggtggccgcatcgagcgcgtgctggaccgcctgaaggcgggcgagcgcctgggcaccttgctgtcccctgagcgcggcatgctcgcggcgcgcaagcagtggctggccggtcacctgcaaacccgtggcaccctggtgctggatgccggtgccgtgcaagcgctgcgtcaggccaacaagagcttgctgccggttggcgtgaagactgtgcagggcagcttccgtcgcggcgagatggtggtgtgcgtcggcccggacggtgttgaagtggctcgcggcctggccaactacagcgccctggaggcgcagaagatcattggtcagtcgtccgaagccatcgagtcgatccttggctatagcgccgagccggaacttgtacaccgcgacaacctggtgctggtatga

SEQ ID NO: 127924 - protein, 372 aa, Pseudomonas putida
MRSKVTGAKRWVVKIGSALLTADGKGLDRGAMAVWVEQMVALREAGVELVLVSSGAVAAGMSQLGWTKRPSAMNELQAAASLGQMRLVQAWESSFGEHGKHTAQILLTHDDLSDRKRYLNARSTLRTLVDLGVVPVINENDTVVTDEIRFGDNDTLAALVANLVEADLLVILTDRDGMFDADPRNNPEAQLIYEARADDPSLDAVAGGTGGALGRGGMQTKLRAARLAARSGAHTIIIGGRIERVLDRLKAGERLGTLLSPERGMLAARKQWLAGHLQTRGTLVLDAGAVQALRQANKSLLPVGVKTVQGSFRRGEMVVCVGPDGVEVARGLANYSALEAQKIIGQSSEAIESILGYSAEPELVHRDNLVLV

SEQ ID NO: 127925 - DNA, 1119 bp, Pseudomonas syringae pv
  CDS (1)..(1119): transl_table=11
atgcgcagcaaagtgacgggcgcccagcgctgggttgtgaagattggcagtgccttgctgaccgcggatggcaagggcctggatcgcaacgccatgggtgtgtgggtagagcagatggtggcgctgcatgaagcaggcgtcgagctggtgctggtttcttccggggctgttgctgccggtatgagtcgccttggctggacggcgcgacccagtgcaatgcacgagcttcaggctgccgctgcaatcggtcagatggggctggtgcaggcgtgggagtcgagttttgccgagcatggccggcataccgcgcagatcctgctgacccacgacgacctgtcggaccgcaaacgctacctgaatgcccgtagcaccctgcgtacgctggtcgagcttggggtggtgccggtcatcaacgaaaacgacacagtggtcaccgacgagatccgttttggcgacaacgacacactggcggcgctggttgccaacctggtcgaggccgatctgctggtcatcctgactgatcgtgatggcatgttcgacgctgatccgcgcaacaaccctgatgcgcagctgatttacgaagcgcgtgccgatgatccggcgctggatgcggtagcgggcggtacgggcggtgcgctggggcgtggcggcatgcagaccaaattgcgtgctgcgcgcctggctgcgcgttccggtgcgcataccgtgatcgtcggcgggcgcatcgagcgcgtgctggcgcggctcaaggggggcgaacggctgggaacattgctgtcgcccgagcgcgaaatgctcgcggcgcgcaagcaatggctggctggccacttgcagacccgcggtacgctggtgctggacgacggcgcggtttcggcgctggccagcgatcacaaaagcctgctgccggttggcgtcaagctggtgcagggcagcttccgtcgcggcgagatggtggtgtgtgtcgcgcctgacggtcgggagatcgctcgcgggttgagtaactacagtgccatcgaggcgcagaagatcattggtcactcatccgaggccatcgtgcgcgagctgggctatatggccgagccggagctgattcatcgggataatctgattcttgtctga

SEQ ID NO: 127926 - protein, 372 aa, Pseudomonas syringae pv
MRSKVTGAQRWVVKIGSALLTADGKGLDRNAMGVWVEQMVALHEAGVELVLVSSGAVAAGMSRLGWTARPSAMHELQAAAAIGQMGLVQAWESSFAEHGRHTAQILLTHDDLSDRKRYLNARSTLRTLVELGVVPVINENDTVVTDEIRFGDNDTLAALVANLVEADLLVILTDRDGMFDADPRNNPDAQLIYEARADDPALDAVAGGTGGALGRGGMQTKLRAARLAARSGAHTVIVGGRIERVLARLKGGERLGTLLSPEREMLAARKQWLAGHLQTRGTLVLDDGAVSALASDHKSLLPVGVKLVQGSFRRGEMVVCVAPDGREIARGLSNYSAIEAQKIIGHSSEAIVRELGYMAEPELIHRDNLILV

SEQ ID NO: 127927 - DNA, 1119 bp, Pseudomonas syringae pv
  CDS (1)..(1119): transl_table=11
atgcgcagcaaagtgacgggcgcccagcgctgggttgtgaagattggcagtgccttgctgacggcggatggcaagggtctggatcgcaacgccatgggtgtttgggtggagcagatggtggcgctgcacgaggcgggtgtcgagctggtactggtgtcttccggggcggtggctgccggcatgagccgtcttggctggacggcccgacccagcgccatgcatgagctccaggctgctgcggcgattggtcagatgggcttggtgcaggcgtgggagtcgagcttcgccgagcatggccgacataccgcgcagatccttctgactcacgatgacctgtcggaccgcaagcgctacctgaatgcccgtagcaccctgcgcacgctggtcgagcttggggttgtgccggtcatcaatgaaaacgacacagtggtcaccgacgaaatccgttttggcgataacgacacgctggcggcgttggttgccaatctggtcgaggctgatctgctggtcatcctgaccgaccgtgacggcatgttcgacgctgatccgcgcaacaacccggaggcgcagctgatttacgaagcgcgtgccgatgatccggcgctggatgcagtggccggtggtaccggcggtgcgctgggtcgcggcggcatgcagaccaagttgcgtgcagcgcgactggcggcgcgttccggtgcgcataccgtcatcgtcggcgggcgcatcgagcgcgttctggcgcggctcaagggaggggagcggttgggtacgctgctgtccccggagcgcggcatgctcgcagcacgcaagcagtggctggcaggtcatctgcagacccgcggtacgctggtgctggatgatggcgctgttgcggcgctggccagggatcagaaaagcctgctgccggtgggcgtcaaactggtccagggcagcttccggcgcggcgagatggtggtatgcgtcgcccaggacggtcgcgagatcgctcgtgggctgagtaactacagtgccatcgaagcccagaaaatcattggtcactcttccgaatccatcgtgcgcgagctgggctatatggccgagcccgagctgattcatcgggataacctgatcctcgtctga

SEQ ID NO: 127928 - protein, 372 aa, Pseudomonas syringae pv
MRSKVTGAQRWVVKIGSALLTADGKGLDRNAMGVWVEQMVALHEAGVELVLVSSGAVAAGMSRLGWTARPSAMHELQAAAAIGQMGLVQAWESSFAEHGRHTAQILLTHDDLSDRKRYLNARSTLRTLVELGVVPVINENDTVVTDEIRFGDNDTLAALVANLVEADLLVILTDRDGMFDADPRNNPEAQLIYEARADDPALDAVAGGTGGALGRGGMQTKLRAARLAARSGAHTVIVGGRIERVLARLKGGERLGTLLSPERGMLAARKQWLAGHLQTRGTLVLDDGAVAALARDQKSLLPVGVKLVQGSFRRGEMVVCVAQDGREIARGLSNYSAIEAQKIIGHSSESIVRELGYMAEPELIHRDNLILV

SEQ ID NO: 127929 - DNA, 1119 bp, Ralstonia eutropha
  CDS (1)..(1119): transl_table=11
atgcaatcggtcattgcccaggcaaaacgtatcgtcgtcaaggttggctccagcctggtcaccaacgacggcaagggattggactacgacgccattgcgcgctgggcggcgcagatcgcaaagctgcgttcgatcggcaaggaagtggtgctggttagttccggcgccattgccgagggcatgcaacgcctgggctgggtacgccgaccgcgtgaaatccacgaactgcaagccgccgccgccgttggccagatgggcctggcgcaggtctacgaaagccagttcggccgctatggcatccgcaccgcgcaggtgctgctgacccacgccgatctggccgaccgcgaacgctacctgaacgcacgttccacgctgctcacgctgctgtctctcggcgtcgtgccgatcatcaacgagaacgacaccgtggttaccgacgaaatcaagttcggcgacaacgacacgcttggcgcgctggtcaccaacctgatcgaaggcgatgcgctggtcatcctgaccgaccagcgtgggctctacaccgctgatccgcgcaaggacccgaatgccgagttcgtcgacgaggcgctggccggcacgcccgagctggagcagatggcgggcggcgccggtacatcgatcggccggggcggcatgctgaccaagatcctcgcggccaagcgcgcggccaagtcaggcgcgcacacgaccattgcgtctggccgtgaggccaacgtgctcgaacgcctggcagccggtgaggccattggcacgcaactgctggcgccgaccggccgcctgaccgcgcgcaaacagtggatggcagatcacttgcagctgcgcggccgcgtggtcatcgacgccggcgccgtcgaaaagctgaccagcggcggcaagtcactgctgccgatcggcgtggtcgaagtgcagggcgagttcgcgcgcggcgaggtaattgcctgtgtcggcgcggacgggcgcgaagtggcgcgcggcatcaccaactattcgagcgccgaggcccgcctgattgcgcgcaagccgtcgtcggagatcgagtcggtgctcggccacctgaacgaacccgaactgatccaccgggacaacctcgtgctggtctga

SEQ ID NO: 127930 - protein, 372 aa, Ralstonia eutropha
MQSVIAQAKRIVVKVGSSLVTNDGKGLDYDAIARWAAQIAKLRSIGKEVVLVSSGAIAEGMQRLGWVRRPREIHELQAAAAVGQMGLAQVYESQFGRYGIRTAQVLLTHADLADRERYLNARSTLLTLLSLGVVPIINENDTVVTDEIKFGDNDTLGALVTNLIEGDALVILTDQRGLYTADPRKDPNAEFVDEALAGTPELEQMAGGAGTSIGRGGMLTKILAAKRAAKSGAHTTIASGREANVLERLAAGEAIGTQLLAPTGRLTARKQWMADHLQLRGRVVIDAGAVEKLTSGGKSLLPIGVVEVQGEFARGEVIACVGADGREVARGITNYSSAEARLIARKPSSEIESVLGHLNEPELIHRDNLVLV

SEQ ID NO: 127931 - DNA, 1119 bp, Ralstonia metallidurans
  CDS (1)..(1119): transl_table=11
atgcaatcggtcatcgcccaggcaaaacgcattgtcgtcaaagtaggttcgagtctggttaccaacgacggcaaggggctcgaccacgatgccatcgcgcgctgggcagctcagatcgccaagctgcgtggcacgggcaaggaagtcgtgctggttagctcaggcgcgattgccgaagggatgcagcgactgggctgggcgcgccggccgaaggaaatccacgaactgcaggccgctgccgcggtgggccagatgggcttggcgcaggtctacgaaagccagttcggccgatatggcatccgcaccgcgcaggtgctgctgacgcacgctgacctggccgatcgcgagcgctatctgaatgcccgttccacgctgctgacgctgctgtccctcggcgtggtgccgatcatcaacgagaacgacacggtcgtcaccgacgaaatcaagttcggcgacaacgatacgctcggcgcgctggtgacgaatttgatcgaaggcgacgcattggtgatcttgaccgaccagcgtgggctctacaccgctgatccgcgcaaggacccgaatgccgagttcgtccatgaagcgctggctggcacgcccgaactcgaggccatggccggtggcgcgggctcgtctattggccgaggcggcatgctgaccaagatcctggcggccaagcgggcggcgaagtctggtgctcatacgacgatcgcctcgggtcgcgaggccgatgtgctgggcaggctggctgccggcgaggccatcggcacgcaactgctggcgccgaccggtcgtctgacggcgcgcaagcagtggatggcggatcacctgcagttgcgcggccgcgtgatcatcgacgcgggcgctgtagagaagctcaccagcggtggcaagtcgctgctgccgattggcgtagtggaagtgcagggcgagttcgcccgtggcgaggtcattgcgtgcgccagcccggaggggaaggaagtggcgcgcggcatcaccaactattcgagcgccgaagcccgtctgatcgcacgcaagccgtcatcggagatcgagtcggtgctgggccatctgaacgagcccgagttgatccatcgcgacaaccttgtgctggtctga

SEQ ID NO: 127932 - protein, 372 aa, Ralstonia metallidurans
MQSVIAQAKRIVVKVGSSLVTNDGKGLDHDAIARWAAQIAKLRGTGKEVVLVSSGAIAEGMQRLGWARRPKEIHELQAAAAVGQMGLAQVYESQFGRYGIRTAQVLLTHADLADRERYLNARSTLLTLLSLGVVPIINENDTVVTDEIKFGDNDTLGALVTNLIEGDALVILTDQRGLYTADPRKDPNAEFVHEALAGTPELEAMAGGAGSSIGRGGMLTKILAAKRAAKSGAHTTIASGREADVLGRLAAGEAIGTQLLAPTGRLTARKQWMADHLQLRGRVIIDAGAVEKLTSGGKSLLPIGVVEVQGEFARGEVIACASPEGKEVARGITNYSSAEARLIARKPSSEIESVLGHLNEPELIHRDNLVLV

SEQ ID NO: 127933 - DNA, 1125 bp, Ralstonia solanacearum
  CDS (1)..(1125): transl_table=11
atggccctgcgttcgctgatcgccgatgcgcgccgcctcgtcgtcaaggtcggttccagcctggtcaccgatgacggccgcggcctcgaccaggccgccatcgcccgctgggccgcgcagatcgcggcgctgcgcgcggccggcaaggaggtcgtgctggtgagctccggcgccatcgccgaaggcatgcagcggctgggctggacccggcggccgaaggagatccacgagctgcaggccgctgccgccgtcggacagatgggcctggcccaggtgtacgaatcggagttcgcgcggcacggtatccgcacggcgcaggtgctgctgacgcatggcgatctggctgaccgcgagcgctacctgaacgcgcgctcgacgctgctgaccctgctgggcctcggcgtggtgccgatcatcaacgagaacgacacggtcgtcaccgacgagatcaagttcggcgacaacgatacgctgggcgcgctggtcaccaacctgatcgaaggcgatgcgctgatcatcctgacggatcagcgtggcctgtacaccgccgatccgcgcaagcaccccgatgcgcgcttcgtcgacgaagcccaggccggggcgccggagctggaggccatggctggcggtgccggcagcagcatcggcaagggcggcatgctgaccaagatcgtggcggccaagcgggcagccaagtcgggggcccacaccgtgatcgcctcgggccgcgaggccgacgtgctggcgcggctggccggcggcgaggccatcggcacgcaactgcgcgcgccgaccgggcgcatggctgcgcgcaagcagtggatgatcgaccacctgcaactgcgcggccgcgtcgtgctggatgccggtgcggtcgacaagctcacggccggcggcaagtcgctgttgccgatcggcgtgacggaagtgcagggcgagtttgcgcgcggggaagtgatttcgtgcgtcgacacggccgggcgcgaagtggcgcgcgggctgaccaactattccgccgccgaggcgcggctgattgcccgcaaagcgtcttcggagatcgaggcggtgctgggatatgtcagcgccgccgagctggtgcaccgcgacaacctggtgctgctctga

SEQ ID NO: 127934 - protein, 374 aa, Ralstonia solanacearum
MALRSLIADARRLVVKVGSSLVTDDGRGLDQAAIARWAAQIAALRAAGKEVVLVSSGAIAEGMQRLGWTRRPKEIHELQAAAAVGQMGLAQVYESEFARHGIRTAQVLLTHGDLADRERYLNARSTLLTLLGLGVVPIINENDTVVTDEIKFGDNDTLGALVTNLIEGDALIILTDQRGLYTADPRKHPDARFVDEAQAGAPELEAMAGGAGSSIGKGGMLTKIVAAKRAAKSGAHTVIASGREADVLARLAGGEAIGTQLRAPTGRMAARKQWMIDHLQLRGRVVLDAGAVDKLTAGGKSLLPIGVTEVQGEFARGEVISCVDTAGREVARGLTNYSAAEARLIARKASSEIEAVLGYVSAAELVHRDNLVLL

SEQ ID NO: 127935 - DNA, 1170 bp, Rhodopirellula baltica
  CDS (1)..(1170): transl_table=11
ttgaacgaatcttcagaagcaaacgatctcgccattcggcgtcagatcatcgacgaaaccaaatgcgtggtggtcaaggtcggcacgcgagttctcacgacatcggacggcaaactcgatctcgaacgtgtggatcgactggcggaacagctttgccgcatcgccgacaccggacgtcaaaccatcatggtcagtagcggtgccgttggtgccggcgttgccaaactgggtttgccgcagcgtcccaccgacctgaaatctttgcaggcgattgccgcgatcggacaagccgatttgatcggcgcgtacgaaaagtcgttgcagaagcgaggtcgacatgccgctcaggttttgctgacccgaaatgaccttcgtcgtcgcagcggttacttacacgtgcgaaacgcgctcaacggaatcgatgagttgggagcgatcgcggtcgtcaacgaaaacgactcggtcgccgtttcggaactgaagacgaccttcggcgacaacgatcgtttggccgcgcaagtcgcggggctattcaacgacgtgatgctgattttgctgacggatgtttccgcactgtacgacggtcaccccgacgaaaaagacagccagccgatccacatggttcacgatgtggacgatggtgtgatggcgttggttgacgatcaagtttcgaccgtcagtaaaggtggcatgggcggaaagcttcgagcttccaagctggccaactcgcacgggcatcccaccatcattggatcaggtaccgaggaatttgttctcgaccgaattttcgcgggtgacgccgtcggaacactgtttgtgcctccgaagcgttcgctcaaaggacgtcgacgttggattggcagttccgccaatgtcgccgggacgttgttcctcgaccaaggcgcagtcgatgccatccaaaagcacggccgaagcctgttggcgattggaatccagcgtgtggaagggacgtttgcccacgggaacgtggtccgcttggtcggtcccaacggcgaagagttcgggcgtggactatcgaactatcgcagccacgaagtggcccgaatcgctggtaaacccagcgagcaaatcgaatggatcctcgggcatcgcccttacgagaacgtcatccaccgcaacaacttggtgttgcgtattgttcccgagtga

SEQ ID NO: 127936 - protein, 389 aa, Rhodopirellula baltica
MNESSEANDLAIRRQIIDETKCVVVKVGTRVLTTSDGKLDLERVDRLAEQLCRIADTGRQTIMVSSGAVGAGVAKLGLPQRPTDLKSLQAIAAIGQADLIGAYEKSLQKRGRHAAQVLLTRNDLRRRSGYLHVRNALNGIDELGAIAVVNENDSVAVSELKTTFGDNDRLAAQVAGLFNDVMLILLTDVSALYDGHPDEKDSQPIHMVHDVDDGVMALVDDQVSTVSKGGMGGKLRASKLANSHGHPTIIGSGTEEFVLDRIFAGDAVGTLFVPPKRSLKGRRRWIGSSANVAGTLFLDQGAVDAIQKHGRSLLAIGIQRVEGTFAHGNVVRLVGPNGEEFGRGLSNYRSHEVARIAGKPSEQIEWILGHRPYENVIHRNNLVLRIVPE

SEQ ID NO: 127937 - DNA, 1131 bp, Rhodopseudomonas palustris
  CDS (1)..(1131): transl_table=11
atggccagccctaagcttcacgatttccgccacatcgtcgtcaaggtcggctcgtcgctgctgatcgactccgccgccggcgaggtgcgggccgggtggctggcggcgctcgccgccgacattgccgagctgcatcgtggcggcagggacgtgatggtggtgtcgtcgggctcgatcgcgctcggacggagccggctgaagctgccgcgcggcccgctcaagcttgaggaaagccaggccgccgcggcggtcgggcaaatcgaactggcgcggacctggtcggaagtgctcggcgcccatggcatcggcgccggccagattctggtgacgttccaggacaccgaagagcggcggcgctatctcaacgcccgctcgaccatcgccaagctgctggaatggcgagcggtgccggtgatcaacgaaaacgacaccgtcgccaccaccgagattcgctacggagataacgaccggcttgcggcgcgggtcgccaccatggcgagcgccgatctgctgatcctgctgtccgacattgacgggctgtacaccgcgccgcccggcagcaatccggacgccacgctgattcctgtcgtcgaagcgatcaccgccgagatcgagggcatggccggggcggcaggctcggagctgtcgcgcggcggcatgcgcaccaagatcgaggcggccaagatcgcgacctccgctggcactcatatgctgatcgcctccggcaagatcgatcatccgctcaaagcgatcgccgacggcggcaagtgcacttggttcctgacgccggccaatccggtgacggcgcggaagcgctggattgccggcacgctggagccgaagggcacgctgacgatcgatgccggcgcagtcagcgcgctgcgcgccggcaagagcctgctgccggccggcgtgatccgggtcgacggtcaattttcccgcggcgacgccgtgatcgtgcgcggcccggacacccatgagatcggccgcggcctggtcgcttacgacgccgaggatgccgagaagatcaaaggccactcgtcgccggacgtgatgatgatcctcggaatcaccggccgcgccgagatgatccatcgcgacgatctagtcgtcggaacggcgccgacctga

SEQ ID NO: 127938 - protein, 376 aa, Rhodopseudomonas palustris
MASPKLHDFRHIVVKVGSSLLIDSAAGEVRAGWLAALAADIAELHRGGRDVMVVSSGSIALGRSRLKLPRGPLKLEESQAAAAVGQIELARTWSEVLGAHGIGAGQILVTFQDTEERRRYLNARSTIAKLLEWRAVPVINENDTVATTEIRYGDNDRLAARVATMASADLLILLSDIDGLYTAPPGSNPDATLIPVVEAITAEIEGMAGAAGSELSRGGMRTKIEAAKIATSAGTHMLIASGKIDHPLKAIADGGKCTWFLTPANPVTARKRWIAGTLEPKGTLTIDAGAVSALRAGKSLLPAGVIRVDGQFSRGDAVIVRGPDTHEIGRGLVAYDAEDAEKIKGHSSPDVMMILGITGRAEMIHRDDLVVGTAPT

SEQ ID NO: 127939 - DNA, 1128 bp, Rhodospirillum rubrum
  CDS (1)..(1128): transl_table=11
gtgatcaagatcggctcggcccttctcgtcgatcagggcagcgggctggtgcgcaccggctggctcaaggccctggccgaagacatcgcccagctgcgcgccgaagggcgcgaggtgctgatcgtctcctcgggggcgatcgccgtcggccggcgctcgctgcatctggaaccgggccgcatgcggcttgatgaaaagcaggccgccgccgccgccggccagatcgaactggcccatgcctatcgcacggtgatggccgatcacgccatcaacgtcgcccaattgctgctgacccttgatgactccgagaaccgccggcgttatctcaacgcccgcaactgcctggaaaccctgctccggctaggcgtcatcccggtcatcaacgaaaacgacaccgtcaccacccaggaaatccgctttggcgacaacgaccggctggccgcccgcgtcgcccagatggcctgcgccgacgcgttgatcctgctttcggatatcgatggcctttataccgccgatccccaccgcgatcccgaggcccgcttcatccccaccgtcaccgccctgaccccggagatcgccgccatggccggggcggcgctgaccccgcatggcaccggcggcatggtcaccaagcttctggccgcgcgcatctgcatggatgccggctgcgccatggcgatcgccccgggcaaggacgaccacgccttgcgcctgctgcgccagggcggccgccagacctggttcctgccggccgaagagccgcgcacggcgcgcaaggcatggatttccggggcgctgaaggccgaggggaccctgtgggtcgatgacggcgccgcccgggcgctggcggcgggcagcagcctgttgccgccgggcgtgcgcacggtcgagggcgatttccagcgcggcgccgccgtgcgggtggtcgggctcgacggcagcccgctggccaaggggctgatcgcctatccctccgacgaggcgcgtttgctcgtcggccatcgcagcggcgacatcgaggcgctgctgggataccgtgggcgcgaggaactgatccaccgcgatgatctggtgctcgacagccgcttccggcaccgcgacgaggacggggaaggacaccgatcgtga

SEQ ID NO: 127940 - protein, 375 aa, Rhodospirillum rubrum
MIKIGSALLVDQGSGLVRTGWLKALAEDIAQLRAEGREVLIVSSGAIAVGRRSLHLEPGRMRLDEKQAAAAAGQIELAHAYRTVMADHAINVAQLLLTLDDSENRRRYLNARNCLETLLRLGVIPVINENDTVTTQEIRFGDNDRLAARVAQMACADALILLSDIDGLYTADPHRDPEARFIPTVTALTPEIAAMAGAALTPHGTGGMVTKLLAARICMDAGCAMAIAPGKDDHALRLLRQGGRQTWFLPAEEPRTARKAWISGALKAEGTLWVDDGAARALAAGSSLLPPGVRTVEGDFQRGAAVRVVGLDGSPLAKGLIAYPSDEARLLVGHRSGDIEALLGYRGREELIHRDDLVLDSRFRHRDEDGEGHRS

SEQ ID NO: 127941 - DNA, 1113 bp, Rhodobacter sphaeroides
  CDS (1)..(1113): transl_table=11
atgccgcttcaggcgccggatatccgcagcgccaagcgtctggtcgtgaagatcggctcggcgctcctcgtggatggcgaggggctgcgccgccaatggctctcggcgctggcgctcgacgtggccgaggcgcggacgcggggcacgcaggtgatcctcgtctcctcgggctcgatcgcgctcgggcggcgggtgctgcatctgccgccggggccgctcgcgctcgaacagagccaggcggcggcggccgtgggccagatccggctcgcccgcgcctatgaggaggtgctggccccgcacggcatcaccaccgcgcaggtgctggtcacgctcgaggataccgaggaccggcggcgctacctcaattcccgcgccacgatggagacgctgctcgggctcggcaccgtgcccatcgtgaacgagaacgacacggtcgccaccgacgagatccgcttcggcgacaacgaccggctggccgcgcagatcgcggtgacggtgggggcggatcagctcgtgctcctgtccgacgtggacggcttctattcggccaatcccaaggaagatcccaccgccgagcggttcgatctggtcgagacgatcacgcccgcgctcgaggcgatggcgggcgatccggtttcgggcctgtccaagggcggcatgaagaccaagatcatggcggccaagaccgccgtcgccggcggctgcgccatggcgatcaccgaaggctcggcgatgcggccgctcaaggcgctggaacagggcgcggcgcgcacctggtttgtggcgcagggcgacccgcaggcggcgcgcaagcgctggatcaacgcgatgaagccgcgcggcacgatccgggtggatgcgggtgcggtgcaggcgctgcaggcgggcaagtcgctgctgcccgcgggcgtggtggcggtcgagggcaatttcgggcgcggcgatccggtcgagatcgcggggcccatgggcgaggtgctgggacgcgggctcacccgctacacggcggtcgaggcggtgcagatcgcgggccaccgctcggccgagatcgtggccatcctcggctacagcggccgggcagccctcatccatcgcgacgatatggtgatctga

SEQ ID NO: 127942 - protein, 370 aa, Rhodobacter sphaeroides
MPLQAPDIRSAKRLVVKIGSALLVDGEGLRRQWLSALALDVAEARTRGTQVILVSSGSIALGRRVLHLPPGPLALEQSQAAAAVGQIRLARAYEEVLAPHGITTAQVLVTLEDTEDRRRYLNSRATMETLLGLGTVPIVNENDTVATDEIRFGDNDRLAAQIAVTVGADQLVLLSDVDGFYSANPKEDPTAERFDLVETITPALEAMAGDPVSGLSKGGMKTKIMAAKTAVAGGCAMAITEGSAMRPLKALEQGAARTWFVAQGDPQAARKRWINAMKPRGTIRVDAGAVQALQAGKSLLPAGVVAVEGNFGRGDPVEIAGPMGEVLGRGLTRYTAVEAVQIAGHRSAEIVAILGYSGRAALIHRDDMVI

SEQ ID NO: 127943 - DNA, 1101 bp, Rhodococcus sp
  CDS (1)..(1101): transl_table=11
gtgagcgccacccggcgcacgatcgcgtcggcgggcagcattgtcgtgaagatcggctcgtccgcgctgaccagcctggtcggcgggctcgacgtcggtcgactcgacgcgctggccgatgcgatcgaggatcggatgcgtgccggttccgacgtggtcgtcgtgtcgtcgggggccgtgggcgcgggtctggccccgctggggctgaccaagcggccacgggacctggcgacgaagcaggccgccgcgagcgtcggccagctggcactggcccatgcctggggcacgtcgttcgcccggtacggccgcaccgtcgggcaggtgctgctcaccgcagacgacatcgcccgccgcgcgcagcaccgcaacgcgcaacgcaccctcgaccgtctgcgcgcgctgcacgcggtcgcgatcgtcaacgagaacgacaccgtcgccacggcggagctgcgattcggtgacaacgaccggctcgccgcgctcgtcgcgcacctggtcggcgccgatgccctggtcctgctctcggatgtcgacgggctgtacgacggcgacccccgcaagggcaatgccacgctgattcccgaggtgaacagccccgaggatctcgacggggtggtcgcgggctcgggcggcgctctcggcaccggcgggatggcgtccaagctgtcggcagcgcgcctcgcggccgatgccggcgtgcccgtactgctcgccgccgcctcggacgccggggcagcgctgcgggacgccggggtgggaacggcgttcgtggcccggccgtcccggttgtcggcgcgcaagttctgggtacgccacgccgcggacgagcaggggatcctgcacatcgacgagggcgctgtgcgtgccgtcgtcaccaagcggcggtcgttgctgcccgcggggatcagcgcggtctcggggaggttctacggcggcgacgtcgtgtcgctcctcggccccgacgagcgacccgtggccaggggagtggtggcgtacgactcggcggagatcagcgacatcctgggtaagtcgacccaggaactgcccgcggagatgcagcgccccgtcgtccacgcggacgatctggtgccgctctga

SEQ ID NO: 127944 - protein, 366 aa, Rhodococcus sp
MSATRRTIASAGSIVVKIGSSALTSLVGGLDVGRLDALADAIEDRMRAGSDVVVVSSGAVGAGLAPLGLTKRPRDLATKQAAASVGQLALAHAWGTSFARYGRTVGQVLLTADDIARRAQHRNAQRTLDRLRALHAVAIVNENDTVATAELRFGDNDRLAALVAHLVGADALVLLSDVDGLYDGDPRKGNATLIPEVNSPEDLDGVVAGSGGALGTGGMASKLSAARLAADAGVPVLLAAASDAGAALRDAGVGTAFVARPSRLSARKFWVRHAADEQGILHIDEGAVRAVVTKRRSLLPAGISAVSGRFYGGDVVSLLGPDERPVARGVVAYDSAEISDILGKSTQELPAEMQRPVVHADDLVPL

SEQ ID NO: 127945 - DNA, 1122 bp, Saccharophagus degradans
  CDS (1)..(1122): transl_table=11
atgagcaaaagacagttagttaagcagagtcgtcgttgggtaataaaaataggtagtgcgctattaaccaataacggacgtggtttagatcgcgaagaaatggctgtgtgggtaaagcagatggctgctttatccaagcgaggctatgaggtggtgttggtgtcttccggtgcggttgcggcgggtatgacgcgcttggggtgggccgagcggccaaaggcgctgcacgagcttcaggctgccgctgcggtggggcagtccagtttaattcaggcctacgagcaagagtttcaaaaatacagcattaaaactgcgcaaatcctgttggatcacgatgatttatctaatcgtcagcgctaccttaatgcgcgctccacgctgcgcacactcactaagttgggcgtgattcctattgttaacgaaaacgatacggtggtaaccgacgaaattcgctttggggataacgataccttgggtgcgttggtggccaatcttatcgaggctgacactctgtgcattctcaccgatcaaaaagcgatgttcgatagcgaccccaggcaaaatgcgctggctaaaatgcttattgagcgttcggcgttcgacccagggttggatgcgatggcgggtgatggcggtgcgcttggtcgcggcggcatgatcagcaaggtgcgcgcggcgcgtttggctgctcgttctggggcgaatactattgttgtgggcggtaaggtttttgatgttattccgcgggtggcgagcggcgaaattttaggaacgttactgtattccgagtcgcagcctattgctgcgcgcaagcgctggctggcgggtaatatgcagccccgagggcgtttaaccctagacgacggtgcggtgaaagtgttgcgcgagcagggtaagagtttattgcctgttggtgtgcgcgccgtagaagggtattttactcgcggcgagctagttttgtgtgaagatactgctggccgcgaaattgcgcgtggcttagtgaattacagtagcgatgaaacaaataaaattaaaggtgcttccagctcgcgtatagattcgctgcttggctacaaagattacgacgagcttatccatcgcgataacctggtattggtttaa

SEQ ID NO: 127946 - protein, 373 aa, Saccharophagus degradans
MSKRQLVKQSRRWVIKIGSALLTNNGRGLDREEMAVWVKQMAALSKRGYEVVLVSSGAVAAGMTRLGWAERPKALHELQAAAAVGQSSLIQAYEQEFQKYSIKTAQILLDHDDLSNRQRYLNARSTLRTLTKLGVIPIVNENDTVVTDEIRFGDNDTLGALVANLIEADTLCILTDQKAMFDSDPRQNALAKMLIERSAFDPGLDAMAGDGGALGRGGMISKVRAARLAARSGANTIVVGGKVFDVIPRVASGEILGTLLYSESQPIAARKRWLAGNMQPRGRLTLDDGAVKVLREQGKSLLPVGVRAVEGYFTRGELVLCEDTAGREIARGLVNYSSDETNKIKGASSSRIDSLLGYKDYDELIHRDNLVLV

SEQ ID NO: 127947 - DNA, 1104 bp, Salmonella choleraesuis
  CDS (1)..(1104): transl_table=11
atgagtgacagccagacgctggtcgtaaaactcggcaccagcgtgctaacaggcggatcgcgccgcctgaaccgtgcccatatcgtagaacttgtccgccagtgcgcgcagctacacgccgcgggacatcgtattgttattgttacctctggcgcgattgccgccggacgtgaacatctcggctacccggaactgccggcaacaattgcctctaaacagcttctggcggcggtagggcaaagccgtctgattcaactgtgggagcagttgttttcaatttacggtatccatatcgggcagatgctgttgacgcgtgcggatatggaagacagagagcgctttctgaacgcccgcgatacgctgcgtgcattactggataaccatattgtgccggttatcaatgaaaatgatgccgttgcgacagcggaaattaaagtgggcgataacgataacctctccgcgctggcggcgatcctggcaggcgcggataaactgctgctgctgaccgatcagcaaggattatttaccgccgatccgcgtagcaatccgcaggcggagcttatcaaagatgtgtatggcgttgacgatgcgctgcgctctatcgcgggagacagcgtttccgggctgggaaccggtggtatgagcactaagcttcaggcggcagacgtggcctgtcgcgcgggtattgatacgattattgcctcaggcagtaaaccgggcgttatcggcgatgtgatggaggggatttccgtcggcacccgttttcatgcgcaagcctcgccgctggagaaccgaaaacgttggatcttcggcgcgccgccggcaggcgaaattacggttgatgaaggcgcgaccgcggcaatgctggaacgtggcagttcacttctgccaaaaggcatcaaaagcgtgacgggcaatttctcgcggggggaggtcatcagaatttgtaacctgcaagggcgtgatattgctcatggcgtcagccgttataacagtgatgctctgcggcggatagccggtcaccactctcaacaaatcgatgcgattctgggctatgaatatggcccggtcgctgttcatcgtgatgacatgattactcgataa

SEQ ID NO: 127948 - protein, 367 aa, Salmonella choleraesuis
MSDSQTLVVKLGTSVLTGGSRRLNRAHIVELVRQCAQLHAAGHRIVIVTSGAIAAGREHLGYPELPATIASKQLLAAVGQSRLIQLWEQLFSIYGIHIGQMLLTRADMEDRERFLNARDTLRALLDNHIVPVINENDAVATAEIKVGDNDNLSALAAILAGADKLLLLTDQQGLFTADPRSNPQAELIKDVYGVDDALRSIAGDSVSGLGTGGMSTKLQAADVACRAGIDTIIASGSKPGVIGDVMEGISVGTRFHAQASPLENRKRWIFGAPPAGEITVDEGATAAMLERGSSLLPKGIKSVTGNFSRGEVIRICNLQGRDIAHGVSRYNSDALRRIAGHHSQQIDAILGYEYGPVAVHRDDMITR

SEQ ID NO: 127949 - DNA, 1104 bp, Salmonella paratyphi
  CDS (1)..(1104): transl_table=11
atgagtgacagccagacgctggtcgtaaaactcggcaccagcgtgctaacaggcggatcgcgccgcctgaaccgtgcccatatcgtagaacttgtccgccagtgcgcgcagctacacgccgcgggacatcgtattgttatcgttacctctggcgcgattgccgccggacgtgaacatctcggctacccggaactgccggcaacaattgcctctaaacagcttctggcggcggtagggcaaagccgcctgattcaactgtgggagcagttgttttcaatttacggtatccatatcgggcagatgctgttgacgcgtgcggatatggaagacagagagcgctttctgaacgcccgcgatacgctgcgtgcgttactggacaaccatattgtgccggtgatcaatgaaaatgatgccgttgcgacagcggaaattaaagtgggcgataacgataacctctccgcgctggcggcgatcctggcaggcgcggataaactgctgctgctgaccgatcaacaaggattatttaccgccgatccgcgtagcaatccgcaggcggagcttatcaaagatgtgtatggcgttgacgatgcgctgcgctctgtcgcgggagacagcgtttccgggctgggcaccggtggtatgagcactaagcttcaggcggcagacgtggcctgccgcgcgggtattgatacgattattgcctcaggcagtaaaccgggcgtgatcggcgatgtgatggaggggatttccgtcggcacccgttttcatgcgcaagcctcgccgctggagaaccgcaaacgctggatcttcggcgcgccgccggcaggcgaaattacggttgatgaaggcgcgaccgcggcaatgctggaacgtggcagttcacttctgccaaaaggcatcaaaagcgtgacgggcaatttctcgcggggggaggtcatcagaatttgtaacctgcaagggcgtgatattgctcatggcgtcagccgttataacagtgatgctctgcggcggatagccggtcaccactctcaacaaatcgatgcgattctgggctatgaatatggcccggtcgctgttcatcgtgatgacatgattactcgataa

SEQ ID NO: 127950 - protein, 367 aa, Salmonella paratyphi
MSDSQTLVVKLGTSVLTGGSRRLNRAHIVELVRQCAQLHAAGHRIVIVTSGAIAAGREHLGYPELPATIASKQLLAAVGQSRLIQLWEQLFSIYGIHIGQMLLTRADMEDRERFLNARDTLRALLDNHIVPVINENDAVATAEIKVGDNDNLSALAAILAGADKLLLLTDQQGLFTADPRSNPQAELIKDVYGVDDALRSVAGDSVSGLGTGGMSTKLQAADVACRAGIDTIIASGSKPGVIGDVMEGISVGTRFHAQASPLENRKRWIFGAPPAGEITVDEGATAAMLERGSSLLPKGIKSVTGNFSRGEVIRICNLQGRDIAHGVSRYNSDALRRIAGHHSQQIDAILGYEYGPVAVHRDDMITR

SEQ ID NO: 127951 - DNA, 1209 bp, Schizosaccharomyces pombe
  CDS (1)..(1209)
atgtctccgaagtcgaaaagcacaaataagacttacacaattgtcatcaaacttggcacatcgtcaatttgtgatgaaaagactcatgaaccattaatttcaaatttgtcactaatcgttgaaaccgttgtcaagcttcgaaagttgggtcataatgtcgttttggtttcaagtggtggtattgcaatgggccttcgtagattagatttacctaagcgtccttcaaagctttctgctgtacaagcaattgccgcggtcggtcaaggaagactaatttccttatgggataccttatttacacaacttcgtcagcctattgcgcaagttttaatcactagaaacgacattgccgagagatcccaatatgtaaatgcagcgaacacaatttccgagttgctacattttggggtagttcccattgtaaatgaaaatgatactctgtctgttcaagaaatccgttttggtgataacgatactttatcggcaattacagctggcatgataaacgcagattatttgtttttacttacagatgttgattgtttgtatacagacaacccacgtaccaaccctgacgctaagcctattttaaaaattcatgatacatcaatggtaaatgcaaacgtttccacacccggtagtggagttggaacagggggaatgaagacgaaattgatcgctgcagatttgggaacgtcttcaggcgtaaatgttataatatgtcgtggttctaaaccttcgagtatattcgatataatccgtcaggaatcctctgataataaaaatgagtcagttgaattacctctgcatacccactttgtagccaaaaagcaaggaaggatccgtgatcgacacttttggcttttgcacggccttaaatcacatgggagtttggaaattgatcgtggggctttcgaggctataacccgtacaaatagagcaggattactaccagttggtgtaaccaaagtacatggccatttttcagctcaccaagcagttacggttatttacaacggagaggaaattggcagagcccttgttaattacagcagtactgaaatagatttgattaaaggcaagagaagcaaagaaattgcatccatcttaggatataacgaaactgaatatgtcgcctacagagactatttagtagttcatggtttaaattctcatcatgattcacaagttagttctgatgagcattga

SEQ ID NO: 127952 - protein, 402 aa, Schizosaccharomyces pombe
MSPKSKSTNKTYTIVIKLGTSSICDEKTHEPLISNLSLIVETVVKLRKLGHNVVLVSSGGIAMGLRRLDLPKRPSKLSAVQAIAAVGQGRLISLWDTLFTQLRQPIAQVLITRNDIAERSQYVNAANTISELLHFGVVPIVNENDTLSVQEIRFGDNDTLSAITAGMINADYLFLLTDVDCLYTDNPRTNPDAKPILKIHDTSMVNANVSTPGSGVGTGGMKTKLIAADLGTSSGVNVIICRGSKPSSIFDIIRQESSDNKNESVELPLHTHFVAKKQGRIRDRHFWLLHGLKSHGSLEIDRGAFEAITRTNRAGLLPVGVTKVHGHFSAHQAVTVIYNGEEIGRALVNYSSTEIDLIKGKRSKEIASILGYNETEYVAYRDYLVVHGLNSHHDSQVSSDEH

SEQ ID NO: 127953 - DNA, 1104 bp, Serratia marcescens
  CDS (1)..(1104): transl_table=11
atgaacggcagccagacattggttgtgaaattgggcaccagcgtgttgaccggcggatcgctgcgtctgaaccgcgcccacatcgtcgaattggtgcgccagtgcgcgcagcaacacgccgcgggccaccgcattgtcatcgtcacctccggcgccatcgccgccgggcgcgaacacctgggctaccccgagctgcccgccaccatcgcttccaagcagctgctggcagcggtggggcagagccggctgatccagctgtgggaacagctgttctccatttacggtatccacgtcgggcagatgctgctgacgcgcgccgatctggaagaccgcgagcgcttcctcaacgcgcgcgataccatgacggcgctgctggacaaccgcatcgtgccggtaatcaatgagaacgacgccgtcgccaccgccgaaatcaaggtgggcgacaacgataacctgtcggcactggcggccattctggccggggccgacaaactgctgctgctgaccgatcagcagggcctctacaccgccgatccgcgcaacaatccgcaggccgaactgatccgtgaagtgcacggcatcgacgacgcgctgcgcgccatcgccggcgacagcgtctccggtctgggcaccggcggcatgggcaccaagctgcaggcggccgacgtggcctgccgcgccggcatcgacgtggtgatcgccgcgggcagcaagccgggcgtggtggcggacgtgatcgaaggcaaaccggtgggcacccgtttccacgcgttggaaaccccgctggaaaaccgcaagcgctggatctttggcgcgccaccggccggtgagatcaccgtcgacgacggcgcggtggaagcgatgatggcgcgcggcagctcgctgttgccaaagggcatccgcgaagtgaagggcgacttctcgcgcggcgaagtgatccgtatccgcaacctgacggggcgcgatctggcgcacggcgtcagccgctacaacagcgacgcgatgcgcatgatcgccgggcaccactcgcaggaaatcagcgagatcctcggttatgaatacggtccggtggcagtgcaccgcgacgatatgattgtcagttaa

SEQ ID NO: 127954 - protein, 367 aa, Serratia marcescens
MNGSQTLVVKLGTSVLTGGSLRLNRAHIVELVRQCAQQHAAGHRIVIVTSGAIAAGREHLGYPELPATIASKQLLAAVGQSRLIQLWEQLFSIYGIHVGQMLLTRADLEDRERFLNARDTMTALLDNRIVPVINENDAVATAEIKVGDNDNLSALAAILAGADKLLLLTDQQGLYTADPRNNPQAELIREVHGIDDALRAIAGDSVSGLGTGGMGTKLQAADVACRAGIDVVIAAGSKPGVVADVIEGKPVGTRFHALETPLENRKRWIFGAPPAGEITVDDGAVEAMMARGSSLLPKGIREVKGDFSRGEVIRIRNLTGRDLAHGVSRYNSDAMRMIAGHHSQEISEILGYEYGPVAVHRDDMIVS

SEQ ID NO: 127955 - DNA, 1119 bp, Shewanella oneidensis
  CDS (1)..(1119): transl_table=11
atgaatttaagtgagatagcgtatcgccgcgtggtagtgaagttggggacgagtgtgctgacttctggcagtaaacagctagataaagcccatatggttgagcttgctcgtcaaatggccgcactgatgagatcaggggtcgaagtcgttttatgtacttctggggcaattgccgcaggacgcgaacatctccaatacccggcactgcccgacactatggccaataagcaattattagccgctgtcgggcaaagccagcttattctcgcttgggcgcaactctttagtatctacggtttgcatgtggggcaattgctgctgacccgcgccgatttacacgatagagagcggtatttgaatgcccgcgacactctgaatgctttgctggcaaacaatattatccccatcatcaatgaaaacgatgcggttgcaactaacgaaatcaaagtgggcgacaacgacaatttgtcagcgcgagcggcgttgctgtgtgatgctgacctgctgatcttactgacagatcaaaagggcttattcgacgccgatccgcgtaccaatcccaatgccaaactgatttctcaggtcgagaagattgatgatagtctgcgcctgttagcgggtggctcggtttctggtttaggcacgggcggcatgtcgactaagctagaggccgctgatattgcccgccgcgctgggattgaagtggtgatcgcctcaggtcatcatcccgatgtgattaaaaaagtcgttgctaaagaatccattggcacccattttagcgccatcgaaaacccattagaaagccgcaaacagtggattttggcggggcccgcggcccaaggttcactggtgctcgatgctggagcggttaaagccgtcactgaaaaaggccgcagcctgttatcgaagggcattattggcgtcaaaggggaatttgaacggggtgcaactctgcaattagttgaccaaaacggcaaaattattgccagaggcataacccgttactgtggtgaggcgttagggttaattgcgggtaaacattccgacgaaatcgagtctgtgctcggttacgattatggtgacgcaattgtccaccgtaacgatatggtcgtcttataa

SEQ ID NO: 127956 - protein, 372 aa, Shewanella oneidensis
MNLSEIAYRRVVVKLGTSVLTSGSKQLDKAHMVELARQMAALMRSGVEVVLCTSGAIAAGREHLQYPALPDTMANKQLLAAVGQSQLILAWAQLFSIYGLHVGQLLLTRADLHDRERYLNARDTLNALLANNIIPIINENDAVATNEIKVGDNDNLSARAALLCDADLLILLTDQKGLFDADPRTNPNAKLISQVEKIDDSLRLLAGGSVSGLGTGGMSTKLEAADIARRAGIEVVIASGHHPDVIKKVVAKESIGTHFSAIENPLESRKQWILAGPAAQGSLVLDAGAVKAVTEKGRSLLSKGIIGVKGEFERGATLQLVDQNGKIIARGITRYCGEALGLIAGKHSDEIESVLGYDYGDAIVHRNDMVVL

SEQ ID NO: 127957 - DNA, 1104 bp, Shigella flexneri
  CDS (1)..(1104): transl_table=11
atgagtgacagccagacgctggtggtaaaactcggcaccagtgtgctaacaggcggatcgcgccgtctgaaccgtgcccatatcgttgaacttgttcgccagtgcgcgcagttacatgccgccgggcatcggattgttattgtgacgtcgggcgcgatcgccgccggacgtgagcacctgggttacccggaactgccagcgactatcgcctcgaaacaactgctggcggcggtagggcagagtcgactgattcaactgtgggaacagctgttttcgatttatggcattcacgtcgggcaaatgctgctgacccgtgctgatatggaagaccgtgaacgcttcctgaacgcccgcgacaccctgcgtgcgttgctcgataacaatatcgttccggtaatcaatgagaacgatgctgtcgctacggcagagattaaggtcggcgataacgataacctttctgcgctggcggcgattctggcgggtgccgataaactgttgctgctgaccgatcaaaaaggtttgtataccgctgatccgcgcagaaatccgcaggcagaactgattaaagatgtttacggcattgatgacgcactgcgcgcgattgccggtgacagcgtttcaggcctcggaactggcggcatgagtactaaattgcaggccgctgacgtggcttgccgtgcgggtatcgacaccattattgccgcgggcagcaagccgggcgttattggtgatgtgatggaaggcatttccgtcggtacgctgttccatgcccaggcgactccgcttgaaaaccgtaaacgctggattttcggtgcgccgccggcgggtgaaatcacggtagatgaaggggcaactgccgccattctggaacgcggcagctccctgttgccgaaaggcattaaaagcgtgactggcaatttctcgcgtggtgaagtcatccgcatttgcaacctcgaaggtcgcgatatcgcccacggtgtcagtcgttacaacagcgatgcattacgccgtattgccggacaccactcgcaagaaattgatgcaatactgggatatgaatacggcccggttgccgttcaccgtgatgacatgattacccgttaa

SEQ ID NO: 127958 - protein, 367 aa, Shigella flexneri
MSDSQTLVVKLGTSVLTGGSRRLNRAHIVELVRQCAQLHAAGHRIVIVTSGAIAAGREHLGYPELPATIASKQLLAAVGQSRLIQLWEQLFSIYGIHVGQMLLTRADMEDRERFLNARDTLRALLDNNIVPVINENDAVATAEIKVGDNDNLSALAAILAGADKLLLLTDQKGLYTADPRRNPQAELIKDVYGIDDALRAIAGDSVSGLGTGGMSTKLQAADVACRAGIDTIIAAGSKPGVIGDVMEGISVGTLFHAQATPLENRKRWIFGAPPAGEITVDEGATAAILERGSSLLPKGIKSVTGNFSRGEVIRICNLEGRDIAHGVSRYNSDALRRIAGHHSQEIDAILGYEYGPVAVHRDDMITR

SEQ ID NO: 127959 - DNA, 1107 bp, Silicibacter pomeroyi
  CDS (1)..(1107): transl_table=11
ttggcaaccctgacgacagcccggcggctggtggtcaagatcggctcggccctgctggtcgatcgcaacacgggcgacctgcgcgccgactggctgcattctctggcggccgacgtggcctggctcaaggggctgggcctggatgtgatcctggtctcgtccggctcgatcgcgttggggcggggcgtgttgggcctgccgcgcacggcgctgccgctggaacagtcgcaggccgccgccgccgtgggtcagatccgtctggcccgcgcctatgaagaggcgctggccccgcacaggatcacaaccgcgcaggttctggtcacgctggaggatagcgaggatcgccgccgctatctgaattcgcgcgcgacgctggaaacgctgctgggccttggggcggtgcccatcgtcaacgagaacgacaccgtcgccaccgacgagatccgctatggcgacaatgaccggctggctgcacagatcgcggtcaccgtgggcgccgatcagctgattctgctgtcggatgtggacgggttctataccggcaaccccagcgacgatccgggcgccacccggttcgacgtgatcgaccggatcacgcccgagatcgtggcgatggcaggggatgcaggctcgggcctgtccaagggcggcatgaagaccaagctgatggcggcacagatggccaccgccggcggctgcgccatggcaattaccgaagggtcgcctctgaacccgctgaaaacgctggaaaacggtgccaactgcacctggttcaccgcaacgcttgatccgcaggcggcgcgcaaacgctggattgcggcgatgaagccgcgcggcgacatcaccgtcgatgcgggtgctgcgcgcgcgctggagggcggcaaaagcctgctgcctgcgggcgtggcctcggtcaccggcgatttcgggcgcggcgatccggtggcgatcctcgggcctgacgggcggcgcctgggtcaggggctgtgccgctataccggggacgaggcgcgcgccattcgcgggcggcagtcttcggatatcgaggcgacgctgggctacccaggccgcgccgcgctgatccaccgggacgacatggcgctttga

SEQ ID NO: 127960 - protein, 368 aa, Silicibacter pomeroyi
MATLTTARRLVVKIGSALLVDRNTGDLRADWLHSLAADVAWLKGLGLDVILVSSGSIALGRGVLGLPRTALPLEQSQAAAAVGQIRLARAYEEALAPHRITTAQVLVTLEDSEDRRRYLNSRATLETLLGLGAVPIVNENDTVATDEIRYGDNDRLAAQIAVTVGADQLILLSDVDGFYTGNPSDDPGATRFDVIDRITPEIVAMAGDAGSGLSKGGMKTKLMAAQMATAGGCAMAITEGSPLNPLKTLENGANCTWFTATLDPQAARKRWIAAMKPRGDITVDAGAARALEGGKSLLPAGVASVTGDFGRGDPVAILGPDGRRLGQGLCRYTGDEARAIRGRQSSDIEATLGYPGRAALIHRDDMAL

SEQ ID NO: 127961 - DNA, 1107 bp, Silicibacter sp
  CDS (1)..(1107): transl_table=11
ttggcagccctaagcacggcgcggcgcgtcgtcatcaagatcggctccgcccttttggtggatcgcaccagcagtgccttgcggcaggagtggctcctgtcgctggcagaggatgtggcccgcctgaaaaaacagggcaaggatgtgatcctcgtgtcctcgggctcgattgcgctggggcgcggtgccctgggcctgccgcgcaaggatctgccgcttgaacagtcacaggccgccgcagctgtgggccagatccggcttgcgcgcgcttatgaggaggccctggcgccgcatgggatcaccacggcgcaggtgcttgtaacgctggaggacagcgaaaaccgccgccgttacctcaattcccgcgccacgctcgagactttgatcggtctgggcgcggtgcccatcgtcaatgagaacgataccatcgccaccgacgagatccgctatggcgacaacgaccgtctggcggcccaggtcgcggtgacggtgggggccgatgtgctgatcctgttgtcggatgtggacgggttctacagcgccaatcctgcgcttgatccagacgccaaacggtttgaccggatcgaacagatcacgcccgagatcgaggcaatggcgggcgatggggtctcggggctgtccaaaggcggcatgatcaccaagctcttggcggccaagatggccaccgccgcaggctgcgccatggcaatctccgaaggatcggtgatgtcgccggtttcggcacttgaggctggggctgcttcgacgtggttcacagcccaaggtgacccgcaggtcgcgcgcaaacgctggatcgccgcgatgaaaacccgcggcgtgatcaccgtggatgaaggtgcggccaaggcgctgcacaacggaaacagtctgctgcccgcaggggtgcgtcatgtggagggtgactttggccgcggagatccgctggccatcctcggcccagatggccgtaagctggggcaggggctgagccgctacacggccgaggaagcccgcgcccttcagggacatcgttcggatgagatcgaggcgatcctcggctatgctggacgtgcggccctgatccaccgggatgacatggcgctttga

SEQ ID NO: 127962 - protein, 368 aa, Silicibacter sp
MAALSTARRVVIKIGSALLVDRTSSALRQEWLLSLAEDVARLKKQGKDVILVSSGSIALGRGALGLPRKDLPLEQSQAAAAVGQIRLARAYEEALAPHGITTAQVLVTLEDSENRRRYLNSRATLETLIGLGAVPIVNENDTIATDEIRYGDNDRLAAQVAVTVGADVLILLSDVDGFYSANPALDPDAKRFDRIEQITPEIEAMAGDGVSGLSKGGMITKLLAAKMATAAGCAMAISEGSVMSPVSALEAGAASTWFTAQGDPQVARKRWIAAMKTRGVITVDEGAAKALHNGNSLLPAGVRHVEGDFGRGDPLAILGPDGRKLGQGLSRYTAEEARALQGHRSDEIEAILGYAGRAALIHRDDMAL

SEQ ID NO: 127963 - DNA, 1107 bp, Sphingopyxis alaskensis
  CDS (1)..(1107): transl_table=11
atgagcctgtttccgcccgcctcctgcccgcgactgatcgtcaagatcgggtcggcgctgctcgtcgatccgggcggcgcggtgcggcgcgactggctcacaggcatcgccgccgacatcgcggaacgcgcccgcgccgggcaacaggtcgcggtcgtctcgtcgggtgcgatcgcgctcggcgcgcggcggctggggcttgccaagggcggccgcgcgagcctcgaagatgcacaggcggccgccgcgacggggcagatcgcgctcagccaggtgtgggccgaggtgctcggcgccgaggggctgacggcggcacagatgcttgtgacgctcggtgacctcgaacatcggcgccgctacctcaacgccgcggcgacgctcgatcgcctgctcagcctgggcgtcgtcccgatcatcaacgagaatgacagcgtcgcgaccgaggaaatccgcttcggcgacaacgaccggctcgccgcgcgcgtcgcgcaggccgccgcggcgcgcggcgtcatccttctctctgacatcgacggactctacgaccgcaacccggcgcaaccgggcgccgtacatatcgagcgaatcgagcggattgacgcagcgatcgaagcgatggccgacacggggtccgcatcgggcatgggatcgggcggcatggtgtcgaaaatcgccgccgcgcgcatcgccaacgccgcgggcgcgcatctggccatcgcttcgggtcggatcgaccgtccgctgtcgaccgcggcgcggcacagcctgttcgtcgccgagcgcggcgcgagcgcgcgcaaggcgtggctcgcgggcgggctgaccgccgaagggcggctgacgatcgacgcgggcgcggtcaaggcgctggtgggcggcgcgagcctgctcgccgccggggtaactgcggtatcaggcagcttcgcgcgcggcgacatcctcgatatcgtcggacccgacgggcgcgtcgtcgcgcgcggcctgtccgaatatcctgcggccgatgcggctgcaatcgtcgggctcggccgcgacgcgcaggaggccgcgctcggctatgcgccgcgcagcgccatcgtccaccgcgaccatatggtgctgctgtga

SEQ ID NO: 127964 - protein, 368 aa, Sphingopyxis alaskensis
MSLFPPASCPRLIVKIGSALLVDPGGAVRRDWLTGIAADIAERARAGQQVAVVSSGAIALGARRLGLAKGGRASLEDAQAAAATGQIALSQVWAEVLGAEGLTAAQMLVTLGDLEHRRRYLNAAATLDRLLSLGVVPIINENDSVATEEIRFGDNDRLAARVAQAAAARGVILLSDIDGLYDRNPAQPGAVHIERIERIDAAIEAMADTGSASGMGSGGMVSKIAAARIANAAGAHLAIASGRIDRPLSTAARHSLFVAERGASARKAWLAGGLTAEGRLTIDAGAVKALVGGASLLAAGVTAVSGSFARGDILDIVGPDGRVVARGLSEYPAADAAAIVGLGRDAQEAALGYAPRSAIVHRDHMVLL

SEQ ID NO: 127965 - DNA, 1128 bp, Streptomyces avermitilis
  CDS (1)..(1128): transl_table=11
gtgtcagcggcaaggcagggtgtggctcaggcccgcaggatcgtcgtcaaagtgggctcctcgtccctgaccaccgccgcgggcggactggacgccgaccgggtcgacgccctcgtggacgtactcgccaagagccgcagcggcggcgagaaggagatcgtcctcgtctcctccggagccatcgccgccggtctggcgcccctggggctgcgcaggcgccccaaggacctggcccggcagcaggcggccgcaagcgttggccaaggccttctggtggcccgctacaccgcttcctgcgcccgccacggcatccgcgtcggtcaggtgctgctcacctccgacgacaccagccgccgcgcgcaccaccgcaacgcctcccgcaccctcgacaagctcctcgcgatgggcgccctgccggtcgtgaacgagaacgacacggtcgccacggacgagatccgcttcggcgacaacgaccggctcgccgccctcgtcgcccacctcgtacgagcggacctgctggtcctgctgtccgacgtggacggcgtgtacgacggcgatcccagcaagcccggtacgtcgcgggtggcgcaggtgcacggcccgcaggacctcgcgcacgtggagatcggcagcgcgggccgggccggggtcggcaccggcggcatggtcaccaagatcgaggcggcccggatcgccgccgcggccggcatccccgtggtgctgaccagcgcggtccatgccgccgacgccctcgcgggccgggacaccggcacctacttccaccccaccggcaagcgctccgcggaccggctgctgtggcttcagcacgcgtccactccacagggcgcgctcaccctcgacgacggggccgtgcgcgcggtcgtcgagcggcgcaagtcgctgctgcccgcgggcatcgccgcggtcgagggcgagttcaccgcgggggaccccgtcgagttgcgcgacagtgaggggcgcgcggtggcgcgggggctcgtgagcttcgacgccaaggagatcccgcagctgctcggccgctcgacgcgggaactggcgcgcgagctcggtcccgcgtacgaacgagaggtcgtacacagggacgatctcgtcctgctgcaaccgtga

SEQ ID NO: 127966 - protein, 375 aa, Streptomyces avermitilis
MSAARQGVAQARRIVVKVGSSSLTTAAGGLDADRVDALVDVLAKSRSGGEKEIVLVSSGAIAAGLAPLGLRRRPKDLARQQAAASVGQGLLVARYTASCARHGIRVGQVLLTSDDTSRRAHHRNASRTLDKLLAMGALPVVNENDTVATDEIRFGDNDRLAALVAHLVRADLLVLLSDVDGVYDGDPSKPGTSRVAQVHGPQDLAHVEIGSAGRAGVGTGGMVTKIEAARIAAAAGIPVVLTSAVHAADALAGRDTGTYFHPTGKRSADRLLWLQHASTPQGALTLDDGAVRAVVERRKSLLPAGIAAVEGEFTAGDPVELRDSEGRAVARGLVSFDAKEIPQLLGRSTRELARELGPAYEREVVHRDDLVLLQP

SEQ ID NO: 127967 - DNA, 1125 bp, Streptomyces coelicolor
  CDS (1)..(1125): transl_table=11
gtggcaggggcaaggcaggccgtgggcgaggcccgcaggatcgtggtcaaggtcggttcctcctcgctgaccaccgccgcgggcggcctggacgccgaccgggtcgacgcgctcgtcgacgtgctcgccaagatgcgcggcgccgacaaggaggtcgtcctcgtctcctccggcgccatcgccgccgggctcgcccccctcggcctgccccgccgcccgagggacctggcccgccagcaggccgccgccagcgtcggccagggactgctggtcgcccgctacaccgcctccttcgcgcgctacggcgtccgcgtcggccaggtgctgctgaccagcgacgacatgagccgccgcgcccaccaccgcaacgcctcccgcaccctggacaagctgctggcgatgggcgccttcccgatcgtcaacgagaacgacaccgtcgccaccgacgagatccgcttcggcgacaacgaccgcctggccgccctcgtcgcccacctggtccgcgccgacctcctggtgctgctgtccgacgtggacggcgtctacgacggcgacccgagcaggccgggcacctcccggctggccgaggtgcgggacatgggcgacctcgcgggcgtcgacatcggcagcgcgggcaaggccggggtcggcaccggcggcatggtcaccaaggtcgaggcggcccggatcgccgccgccgccggcatccccgtggtgctgaccagcgccgtccacgcggccgacgccctggccggcggcgacaccggcacgtacttccacgccaccggcaggcgctccgccgaccggctgctgtggctccagcacgcctccgccccgcagggcgcgctcgtcctcgacgacggggcggtccgcgcggtcgtcgaaggccgcaagtcgctgctgccggccggcatcgcgggcgtcgagggcgacttcgccgcgggcgaccccgtggagctgcgggacggcacgggccgggcggtggcccgcgggctggtcaacttcgacgccaaggagatgccccggctgatcggccgctccacccgggaactggcgcgcgaactcggacccgcgtacgaacgtgaggtcgtacacagggacgatctggtgatcctgcacccgtaa

SEQ ID NO: 127968 - protein, 374 aa, Streptomyces coelicolor
MAGARQAVGEARRIVVKVGSSSLTTAAGGLDADRVDALVDVLAKMRGADKEVVLVSSGAIAAGLAPLGLPRRPRDLARQQAAASVGQGLLVARYTASFARYGVRVGQVLLTSDDMSRRAHHRNASRTLDKLLAMGAFPIVNENDTVATDEIRFGDNDRLAALVAHLVRADLLVLLSDVDGVYDGDPSRPGTSRLAEVRDMGDLAGVDIGSAGKAGVGTGGMVTKVEAARIAAAAGIPVVLTSAVHAADALAGGDTGTYFHATGRRSADRLLWLQHASAPQGALVLDDGAVRAVVEGRKSLLPAGIAGVEGDFAAGDPVELRDGTGRAVARGLVNFDAKEMPRLIGRSTRELARELGPAYEREVVHRDDLVILHP

SEQ ID NO: 127969 - DNA, 1110 bp, Streptococcus pneumoniae
  CDS (1)..(1110): transl_table=11
atgaaatacaaacggattgtctttaaggtgggtacttcttctctgacaaatgaggatggaagtttatcacgtagtaaggtaaaggatattacccagcagttggctatgctgcacgaggctggtcatgagttgattttggtgtcttcaggtgccattgcggctggttttggagccttaggatttaaaaagcgtccgactaagattgctgataaacaggcttcagcagcggtagggcaggggcttttgttggaagaatatacaaccaatcttctcttgcgtcaaatcgtttctgcacaaatcttgctgacccaagatgactttgtggataagcgtcgttataaaaatgcccatcaggctttgtcggttttgctcaaccgtggggcaattcctatcatcaatgagaatgatagtgtcgttattgatgagctcaaggttggggacaatgacactctaagtgctcaagtagcggcgatggtccaagcagaccttttagttttcttgacagatgtggacggtctctatactggaaatcctaattcagatccaagagccaaacgcttggagagaatcgagaccatcaatcgtgagattattgatatggctggtggagctggttcgtcaaacggaactgggggtatgttaaccaaaatcaaggctgcaactatcgcgacggaatcaggagttcctgtttatatctgctcatccttgaaatcagattccatgattgaggcggcagaggagaccgaggatggttcttactttgttgctcaagagaaggggcttcgtacccagaaacaatggcttgccttctatgctcagagtcaaggttctatttgggttgataaaggggctgcggaagctctctctcaatatggaaagagtcttctcttatctggtatcgttgaagcagaaggagtcttttcttacggtgatatcgtgacagtatttgacaaggaaagtggaaaatcacttggaaaaggacgcgtgcaatttggagcatctgctttggaggatatgttgcgttctcaaaaagccaagggtgtcttgatttaccgtgacgactggatttccattactcctgaaatccaactactttttacagaattttag

SEQ ID NO: 127970 - protein, 369 aa, Streptococcus pneumoniae
MKYKRIVFKVGTSSLTNEDGSLSRSKVKDITQQLAMLHEAGHELILVSSGAIAAGFGALGFKKRPTKIADKQASAAVGQGLLLEEYTTNLLLRQIVSAQILLTQDDFVDKRRYKNAHQALSVLLNRGAIPIINENDSVVIDELKVGDNDTLSAQVAAMVQADLLVFLTDVDGLYTGNPNSDPRAKRLERIETINREIIDMAGGAGSSNGTGGMLTKIKAATIATESGVPVYICSSLKSDSMIEAAEETEDGSYFVAQEKGLRTQKQWLAFYAQSQGSIWVDKGAAEALSQYGKSLLLSGIVEAEGVFSYGDIVTVFDKESGKSLGKGRVQFGASALEDMLRSQKAKGVLIYRDDWISITPEIQLLFTEF

SEQ ID NO: 127971 - DNA, 804 bp, Streptococcus thermophilus
  CDS (1)..(804): transl_table=11
atgaaacgaaattttgactcagtaaaacgcctagttatcaaaatcgggaccagctccttggttttgccatcagggaaaattaatcttgaaaaaatcgatcagctagcttttgtgatttctagcttacacaataaagggattgaggttgtcctcgtatcctctggtgctatgggatttggtcttaatgttctagatcttgagaagcgtccagcagaggtaggtaagcaacaggctgtctcaagtgtagggcaggtggccatgatgagcctttattctcaagtcttttcacattaccaaaccaaggtatctcagcttcttttgacccgtgatgtggtcgagtactccgagagtttggccaatgccatcaatgccttcgaaagcctctttgagcttggagtagttccaattgttaatgaaaatgatgctgtcagtgtagatgaaatggatcatgcaactaagtttggggacaatgaccgcttgtcagctatcgtagctaaggttgttggtgcggacttacttatcatgttgtcagatattgatgggctctttgataagaacccaaatgtctatgaggatgcaacccttcgtagctatgtaccagagattaccgaggaaattctagcctcagctggtggtgctggtagtaaatttggtacgggtggtatgatgagtaaaattaagtcagctcagatggtttttgaaaatcaaagccaaatggttttaatgaatggtgaaaatccacgtgacattcttcgtgtcctagaaggagccaaaatcggtacactttttaaacaggaggactaa

SEQ ID NO: 127972 - protein, 267 aa, Streptococcus thermophilus
MKRNFDSVKRLVIKIGTSSLVLPSGKINLEKIDQLAFVISSLHNKGIEVVLVSSGAMGFGLNVLDLEKRPAEVGKQQAVSSVGQVAMMSLYSQVFSHYQTKVSQLLLTRDVVEYSESLANAINAFESLFELGVVPIVNENDAVSVDEMDHATKFGDNDRLSAIVAKVVGADLLIMLSDIDGLFDKNPNVYEDATLRSYVPEITEEILASAGGAGSKFGTGGMMSKIKSAQMVFENQSQMVLMNGENPRDILRVLEGAKIGTLFKQED

SEQ ID NO: 127973 - DNA, 1158 bp, Syntrophus aciditrophicus
  CDS (1)..(1158): transl_table=11
atgaatgaaaatcgagaacaagtcctgaaaaatgtaaagagagttctgataaagatcggcagcgccgtccttacaggcgacaacggcctcgacctggaaaggatccagcacctggtggaccagatggccgccctgacacacaggggctatcaagtcgtcatggtcacctcgggcgccatcgcctcggggaaacaccgcctcggcattaccaccgctttgaagagcattccccagaagcaggccgcggcagccatagggcagggacgcctgatgcgcatttattccaattccttcgggaaacacggcctctatgtcggacagattcttctcaccatgagcgatctgacggatcgaaggcgtttcctcaatatccgcaataccctttccaccctcatggaatggggcatcatcgccattatcaacgaaaacgacaccgtggccatcgatgagatcaaattcggcgataacgacaatctggccgccatgatcgccaatatcatcgaagcccatctggtcatcaatttaaccagcacaccgggactctatgatcggaatcccgcttcatccaggaatgccagactgattccccttgtccgggaaatcacggaagatattgaagcagccgcgtcggaggaagggacctccgtcggaacgggagggatgaaaagcaaggtcatggcggccaaaaaggtaaccgccttcggcatcccttacattattgctcccggaaagcagaaggacgttctgctggatatctttgatggaaacgagctgggcacccttttcctccccatgagagagcatctcagcagccgcaaatactggattgcctttaccctcagatctcgaggggttctgagcattgacgccggcgcccgaaccgcgattctggaagagggaaaaagcctgctgccctcaggaattgtcggtgtggaaggtgatttcatcgtgggagacccggtcacgtgcgtcgatcgggacggcgttcccctggccaaggggctggttaattacagcgctcccgatatccggaagatcatgggactcaagacgtcccggatcgaacaggtgctgggacacaaggactatgacgaaatcattcaccgcgacaacctggccgtgatccgtcgcagtcgcagacacagagaagcaggctga

SEQ ID NO: 127974 - protein, 385 aa, Syntrophus aciditrophicus
MNENREQVLKNVKRVLIKIGSAVLTGDNGLDLERIQHLVDQMAALTHRGYQVVMVTSGAIASGKHRLGITTALKSIPQKQAAAAIGQGRLMRIYSNSFGKHGLYVGQILLTMSDLTDRRRFLNIRNTLSTLMEWGIIAIINENDTVAIDEIKFGDNDNLAAMIANIIEAHLVINLTSTPGLYDRNPASSRNARLIPLVREITEDIEAAASEEGTSVGTGGMKSKVMAAKKVTAFGIPYIIAPGKQKDVLLDIFDGNELGTLFLPMREHLSSRKYWIAFTLRSRGVLSIDAGARTAILEEGKSLLPSGIVGVEGDFIVGDPVTCVDRDGVPLAKGLVNYSAPDIRKIMGLKTSRIEQVLGHKDYDEIIHRDNLAVIRRSRRHREAG

SEQ ID NO: 127975 - DNA, 1110 bp, Synechococcus elongatus
  CDS (1)..(1110): transl_table=11
atggcacaaacactggtcgtcaaaattggcacatcgagcttagcggggggcaaagaaggaaacctagccttggccaccattgcccaactggtggaggtgctgtgtcactgtcaacggcggggcgatcgcgtggtgctcgtctcctctggggcggtgggcgtgggtgctatgcgcttgggcctgacagaacgtccccaacaattagcccaaaaacaagcagtggcagcagtgggtcaaggacacctgatgcggatgtacgatgatctctttgcggtcctgcgtcagcccattgcccaaatcctggtgacacggcaaaattttgtcgatcgccagagctacttgaatatctacaacacgttccaagcactgtttgaattgggggtcatccccattgtcaatgagaacgatacagtggcggtggatgaactcaagtttggtgacaatgataccctctcagcccttgtggcaagtcttgtcgaagccgattggttatttttgctcacagatgtcgatcgcctctattcagccgatccacgcattgataagaccgctgttcccattgagcgggtcgtctccttggccgagttagcacaaaccattcaagttgggtctgctggctccccttggggcaccggcggcatggccaccaaaattcgggctgcggaaattgccacagaagccggcgtgcgcaccgtcattaccgatgggcgatcgcccaccaacctcctgaaaatccttgggggtgaagccttgggcacccactttgaacctcgtcccaaaaccatcaatgcccgtaaacgctggattgcccgtgccctcattcccaaaggcgagttatggctagatgagggtgccgttaaggcaatcaccgtgggtggcaagtccctcttagcagcaggcattacccgtgtggaaggggagtttcaggctcaagatgctgtgaagctctgtgaccccacaggagccgaaattgcccgtggccttgtcaactacaacagtgaagaaattcgtcgtgtccaagggcaacaatctacggaattggccaacatcctcggctatgccggtgccgatacaattgtccaccgtgacaacctagtggtgaccctgtaa

SEQ ID NO: 127976 - protein, 369 aa, Synechococcus elongatus
MAQTLVVKIGTSSLAGGKEGNLALATIAQLVEVLCHCQRRGDRVVLVSSGAVGVGAMRLGLTERPQQLAQKQAVAAVGQGHLMRMYDDLFAVLRQPIAQILVTRQNFVDRQSYLNIYNTFQALFELGVIPIVNENDTVAVDELKFGDNDTLSALVASLVEADWLFLLTDVDRLYSADPRIDKTAVPIERVVSLAELAQTIQVGSAGSPWGTGGMATKIRAAEIATEAGVRTVITDGRSPTNLLKILGGEALGTHFEPRPKTINARKRWIARALIPKGELWLDEGAVKAITVGGKSLLAAGITRVEGEFQAQDAVKLCDPTGAEIARGLVNYNSEEIRRVQGQQSTELANILGYAGADTIVHRDNLVVTL

SEQ ID NO: 127977 - DNA, 1113 bp, Synechococcus sp
  CDS (1)..(1113): transl_table=11
gtggctcccatgtccgagaccctcgtggtcaaaattggcaccagcagtctgaccaatccccaccatccgggcttggcactctcgacgattgcggggctggttgaagtgatttgccaactgcgccgacagggctacaacgtcgttctagtctcctcgggcgcggttggggtcggttgcactcgccttgggctgcgcgatcgccccagccgtattgcccaacgtcaggcgatcgcagcggtcggtcagggtcgcttgatgcgcacctacgacgatctgtttacgaccctcggtcagccgatcgctcaagttctgctaacgcgcggtgatctggcgcagcggcaacgctacatcaatgcctatcaaacctttcaggaactattcgagctgggcgtcgtgccaattgtcaacgagaatgacacggtcgctgttgaagaactcaagtttggcgacaatgacacgctgtcggccttagtcgccagtctcgtggaagcgcaatggctgttcctactaaccgatgttgatcggctctacacagccgaccctcgccaggatccaaatgctaagccgatcacaattgtccacgacctctcggagctggaatcgattcaagcaggtggacagggcagtcgctggggtacaggcggtatggcaacgaagttgactgcagcgaaaattgctacccaagcgagcgttcgtaccgtgattacccaagggcgatcgcccgaaaatctgctgaaaatcttggcgggtgaggcgatcggcacttggtttgagccgcaaccggaaacagtcaatgcccgcaaacgctggattgcccacggcctcgtgccaactggaaaactgttgctggatgctggtgcagtgcaagcgattcaagcagggggtaagtcgcttttagccgctggaattcaagcgatcgaaggagattttgaagcccaagatgcagttcagctctgtgatctcaacggcactgaaattgcccgaggattagtcaactatgacagtcacgaactgcagcagatccgtggctgtcaaagtgatcaaattgttcaaatcctaggctacgaaggtgcagaaaccatcgtccatcgcgacaacttagttttaagctag

SEQ ID NO: 127978 - protein, 370 aa, Synechococcus sp
MAPMSETLVVKIGTSSLTNPHHPGLALSTIAGLVEVICQLRRQGYNVVLVSSGAVGVGCTRLGLRDRPSRIAQRQAIAAVGQGRLMRTYDDLFTTLGQPIAQVLLTRGDLAQRQRYINAYQTFQELFELGVVPIVNENDTVAVEELKFGDNDTLSALVASLVEAQWLFLLTDVDRLYTADPRQDPNAKPITIVHDLSELESIQAGGQGSRWGTGGMATKLTAAKIATQASVRTVITQGRSPENLLKILAGEAIGTWFEPQPETVNARKRWIAHGLVPTGKLLLDAGAVQAIQAGGKSLLAAGIQAIEGDFEAQDAVQLCDLNGTEIARGLVNYDSHELQQIRGCQSDQIVQILGYEGAETIVHRDNLVLS

SEQ ID NO: 127979 - DNA, 1104 bp, Synechococcus sp
  CDS (1)..(1104): transl_table=11
atgtccgagaccctcgtggtcaaaattggcaccagcagtctgaccaatccccaccatccgggcttggcactctcgacgattgcggggctggttgaagtgatttgccaactgcgccgacagggctacaacgtcgttctagtctcctcgggcgcggttggggtcggttgcactcgccttgggctgcgcgatcgccccagccgtattgcccaacgtcaggcgatcgcagcggtcggtcagggtcgcttgatgcgcacctacgacgatctgtttacgaccctcggtcagccgatcgctcaagttctgctaacgcgcggtgatctggcgcagcggcaacgctacatcaatgcctatcaaacctttcaggaactattcgagctgggcgtcgtgccaattgtcaacgagaatgacacggtcgctgttgaagaactcaagtttggcgacaatgacacgctgtcggccttagtcgccagtctcgtggaagcgcaatggctgttcctactaaccgatgttgatcggctctacacagccgaccctcgccaggatccaaatgctaagccgatcacaattgtccacgacctctcggagctggaatcgattcaagcaggtggacagggcagtcgctggggtacaggcggtatggcaacgaagttgactgcagcgaaaattgctacccaagcgagcgttcgtaccgtgattacccaagggcgatcgcccgaaaatctgctgaaaatcttggcgggtgaggcgatcggcacttggtttgagccgcaaccggaaacagtcaatgcccgcaaacgctggattgcccacggcctcgtgccaactggaaaactgttgctggatgctggtgcagtgcaagcgattcaagcagggggtaagtcgcttttagccgctggaattcaagcgatcgaaggagattttgaagcccaagatgcagttcagctctgtgatctcaacggcactgaaattgcccgaggattagtcaactatgacagtcacgaactgcagcagatccgtggctgtcaaagtgatcaaattgttcaaatcctaggctacgaaggtgcagaaaccatcgtccatcgcgacaacttagttttaagctag

SEQ ID NO: 127980 - protein, 367 aa, Synechococcus sp
MSETLVVKIGTSSLTNPHHPGLALSTIAGLVEVICQLRRQGYNVVLVSSGAVGVGCTRLGLRDRPSRIAQRQAIAAVGQGRLMRTYDDLFTTLGQPIAQVLLTRGDLAQRQRYINAYQTFQELFELGVVPIVNENDTVAVEELKFGDNDTLSALVASLVEAQWLFLLTDVDRLYTADPRQDPNAKPITIVHDLSELESIQAGGQGSRWGTGGMATKLTAAKIATQASVRTVITQGRSPENLLKILAGEAIGTWFEPQPETVNARKRWIAHGLVPTGKLLLDAGAVQAIQAGGKSLLAAGIQAIEGDFEAQDAVQLCDLNGTEIARGLVNYDSHELQQIRGCQSDQIVQILGYEGAETIVHRDNLVLS

SEQ ID NO: 127981 - DNA, 1074 bp, Synechococcus sp
  CDS (1)..(1074): transl_table=11
atgacgctgtgggtggtgaagctgggcacgagcttgttgcggggggataccgccgcaacgatcgctggtttcgccgcaggcattgctgctgccttcgcaaggggcgatcgcgttgtgctggtttccagtggtgctgtcggcctcggttgccagcggcttcagcttccccagaggcccgagaccgtggtggccctgcaggcggcggctgccaccgggcagggtcagctgatggctttgtacgaacgggccttggcgaaccacggcatcgctgtggcccagatccttgtcacccggtcagatctggctgatcgtcgccgttatcagaacgcctcaggaaccctgcagcagctgttgcagtggggtgtgttgccggtggtcaatgaaaacgacgctatctccccggcggagctccgcttcggagacaacgacaccctgtctgccctagtggcggcggccgttggtgccgaccagctcatcctgctcaccgacgtggaccgtctgtactcagccgatccgcggcttgtcgtcgatgcccgcccgatttccgatgtgcaccacccacgggagctcgacgcccttgaagccgtcgccggtgatggcggacgttggggccgcggcggcatgaccaccaagctggcggcggccaggattgccaccgccagcggcatcactgtgcatctggcagatggtcgggatcccaggcgcctcgatgccctgcttcagggggaacgcgggggaacggtgtttcatccccacccggaacccctgggcaaccgtcgcagctggctggctcatgccttgcaaccccagggcgagctgacgctggatgccggtgcctgcgatgccttgcatcagcgggggtcctccctgttgatggttgggattactgcggtgaagggggtgttcggcgccaatcaaccggtccggttgcagggtcctgacggccgcgagctgggacgcggcctttgccagctgtccagcgcagctgttcagcgcgctcttgatgctgcgccggccgctggtccatcgcctgtggtggtgcatcgggacgccctggtgcttcacagccgctga

SEQ ID NO: 127982 - protein, 357 aa, Synechococcus sp
MTLWVVKLGTSLLRGDTAATIAGFAAGIAAAFARGDRVVLVSSGAVGLGCQRLQLPQRPETVVALQAAAATGQGQLMALYERALANHGIAVAQILVTRSDLADRRRYQNASGTLQQLLQWGVLPVVNENDAISPAELRFGDNDTLSALVAAAVGADQLILLTDVDRLYSADPRLVVDARPISDVHHPRELDALEAVAGDGGRWGRGGMTTKLAAARIATASGITVHLADGRDPRRLDALLQGERGGTVFHPHPEPLGNRRSWLAHALQPQGELTLDAGACDALHQRGSSLLMVGITAVKGVFGANQPVRLQGPDGRELGRGLCQLSSAAVQRALDAAPAAGPSPVVVHRDALVLHSR

SEQ ID NO: 127983 - DNA, 1074 bp, Synechococcus sp
  CDS (1)..(1074): transl_table=11
atgaccctgtgggtcgtgaaaatcggcaccagcctgcttcggggggagaccgccaccacgattgatggctatgcccgctgcttcgcaggggccatggaccgcggtgatcaggtggtgctggtcaccagtggtgccgtcgggctgggctgccagaagctggccctcaccaaccgacctgacacggtggtggccctgcaggcggctgcagccatcggccagggagcgctgatggggctgtatgaacgggccatggcccgccatggccgttccgtggcccaggtgctgctgacccgctccgacctggccgatcgccgtcgctaccagaatgcttcgggcaccttgcggcagctgctgagctggggggtgctgccggtgatcaacgagaacgatgccctttcgccggcggagttgcgcttcggcgacaacgacaccctctcggctttggtggccgccgccgttgaagcgcagcaactgatcctgcttacggatgttgatcgcctctattcctcggatccgcgggttgatgccaacgccgaaccgatctcggatattcgccaccctcgggagctggattcgttggaacagggggccggcgacggggggcgctggggcaccgggggcatgaccacgaagctggcggcagcccgcatcgccaccgccagtggcatcaccgtgcagctcgccgacgggcgcgatcccgctcgccttgaggccttgttgcagggtcaacggggagggacggtgttccatccccaccctgaacccctgggcaatcgacgcagttggcttgcccatgtgcttcgacctgagggtgaactgcagctggatgcgggagcctgtgcggcgctgcagcaccgtggtgcgtccctgctgctggtaggtgttacggcggtgcggggtgacttcgccgccaatcaacccattcagttgctggaccctgatggtgaggatctgggccgtggcctctgttcgatggacagcgaccagttgcgggccgcgatgaatgacccatctcccggagagtcctccccggtggtggtgcatcgcgatggccttgtgctgcgcagccgataa

SEQ ID NO: 127984 - protein, 357 aa, Synechococcus sp
MTLWVVKIGTSLLRGETATTIDGYARCFAGAMDRGDQVVLVTSGAVGLGCQKLALTNRPDTVVALQAAAAIGQGALMGLYERAMARHGRSVAQVLLTRSDLADRRRYQNASGTLRQLLSWGVLPVINENDALSPAELRFGDNDTLSALVAAAVEAQQLILLTDVDRLYSSDPRVDANAEPISDIRHPRELDSLEQGAGDGGRWGTGGMTTKLAAARIATASGITVQLADGRDPARLEALLQGQRGGTVFHPHPEPLGNRRSWLAHVLRPEGELQLDAGACAALQHRGASLLLVGVTAVRGDFAANQPIQLLDPDGEDLGRGLCSMDSDQLRAAMNDPSPGESSPVVVHRDGLVLRSR

SEQ ID NO: 127985 - DNA, 1167 bp, Thermobifida fusca
  CDS (1)..(1167): transl_table=11
gtgggcacaggcgtcggtcagacgcgtgcggaaatcgctcaggcgcgacgagtcgtggtcaaggtgggctcctcctctctcaccaccccgcaaggcggcctcgaccacgagcggatccgcgacctcaccgacgtgctggcggaacgccgcaaagcgggcaccgaagtggtgctggtctcctccggagcggtcgccgcgggaatggctcccctgggcctcacccagcggccccgcgacctcgctacccagcaggccgcggccagcgtaggccaagggctgctcctggcccgctacaccgccgagttcgcccggcattcgctgactgccgcgcagatcctgttgaccgccgacgacctgatgcgccgcgcccagtaccgcaacgcgcagcgcgcgatgagccgcctgctggagatcggcgcggtgccgatcgtcaacgagaacgacacggtcgccacccacgagatccggttcggcgacaacgaccggctcgccgccctcgtcgcccacttgctgcgcgcggacgtgctggtgctgttgaccgacgtggacgcgctgtacgacgggaacccgtccctgccgacgagcacacgcatcacccaggtcaacggcccggaggatcttgtcggggtggacctcggcagcgcgaacaagcgcggggtggggaccggcggcatgatcaccaaggtcgaatccgcgcggatcgcgaccgaagcgggggtggctactgtgctgacctcggcggccaacgcccgggctgcgctccgaggtgatcccgtcggcacgttcttcgtccccgcgaaacaccgccgcccgtccagccgccaactctggctggcccatgcgacggcgggccgcggcagtgtcttcttggacccgggggcggtgcatgccgtggtcaccgagaaagcgtccctgctgcccgcgggggtcatcaaagtggaaggcgatttcaacgcgggcgaccccgtggacttgcgggacgagaacggtgtcctcgtcgcccgcggcctggtcaactacgactctgcggagatccccgacttgatgggccgctccacccggtggctggcccgggagctcggcgccgaatacagccgcgagatcgtgcaccgcgacgacctggtcgtgctccgcaacggcagcaccagcgaccgggaagcctgctga

SEQ ID NO: 127986 - protein, 388 aa, Thermobifida fusca
MGTGVGQTRAEIAQARRVVVKVGSSSLTTPQGGLDHERIRDLTDVLAERRKAGTEVVLVSSGAVAAGMAPLGLTQRPRDLATQQAAASVGQGLLLARYTAEFARHSLTAAQILLTADDLMRRAQYRNAQRAMSRLLEIGAVPIVNENDTVATHEIRFGDNDRLAALVAHLLRADVLVLLTDVDALYDGNPSLPTSTRITQVNGPEDLVGVDLGSANKRGVGTGGMITKVESARIATEAGVATVLTSAANARAALRGDPVGTFFVPAKHRRPSSRQLWLAHATAGRGSVFLDPGAVHAVVTEKASLLPAGVIKVEGDFNAGDPVDLRDENGVLVARGLVNYDSAEIPDLMGRSTRWLARELGAEYSREIVHRDDLVVLRNGSTSDREAC

SEQ ID NO: 127987 - DNA, 1062 bp, Thermotoga maritima
  CDS (1)..(1062): transl_table=11
atgattatgaaagtcgttgtaaaggttggaagcaacctgcttgtgggaagttctggcttgagaaagtcttacatcgcagaactctgtcgcgaggttgcacgtttgaaaagtcaagggcacgaaatttccatcatcacatctggggcccgcgctgcgggctttacttatcttggaaaaggaaagagaacacaggaccttcacataaaacaggctctctgcgctgtgggacaggtccagctcatgaaggtgtacgaaaacgccttcgatttctatggcatcaaaatcgcccagatcctgctcacaagggacactttttccaacagaaaaaggtacctgaacctcagaaacacactgatcggactctcggagttcgatgttgtacccatcgtgaacgaaaacgacacagttgcaacagaggagatcacactcggtgacaacgacacgctcgctgccatgttctcgatagcctgggatgcggacttccttgtgcttttcacaacggtggatggagtcatcgatgagaacggaaaactcgtcgaaagattcgacgagtcggtgaaactgaaagatatgggaaagagcagctggggaactggtggtatcagatccaagatagaatctgcgttgatggcttcaagatgcggtgtgaaagcgaccatatgcagcggaaacgacgtttcaaacctcacaaggtttgtgaagggagaacctgtcggtactgtttttgaaccacaaggacgcttgaaagcaaaaaaagcctggattgcctttctctcagaacctgcaggaaagatatacgtaaacaaaggagctgaagaggcactcaaaagcggtaatagccttctgcctgttggtgtcacaggtgtggaaggaacgttcgatgtgggagatgtggtggagatagtgaacgaagaaggagaactcgtcggtcgagggatcgtgaattactcgtcttcggatctggagaaaatagcgggtcacaaatcttccgatttgaaaaagatcctcggatacgaaggaaacaaggtggtcgttcacatagacaacatgtgggtagcttaa

SEQ ID NO: 127988 - protein, 353 aa, Thermotoga maritima
MIMKVVVKVGSNLLVGSSGLRKSYIAELCREVARLKSQGHEISIITSGARAAGFTYLGKGKRTQDLHIKQALCAVGQVQLMKVYENAFDFYGIKIAQILLTRDTFSNRKRYLNLRNTLIGLSEFDVVPIVNENDTVATEEITLGDNDTLAAMFSIAWDADFLVLFTTVDGVIDENGKLVERFDESVKLKDMGKSSWGTGGIRSKIESALMASRCGVKATICSGNDVSNLTRFVKGEPVGTVFEPQGRLKAKKAWIAFLSEPAGKIYVNKGAEEALKSGNSLLPVGVTGVEGTFDVGDVVEIVNEEGELVGRGIVNYSSSDLEKIAGHKSSDLKKILGYEGNKVVVHIDNMWVA

SEQ ID NO: 127989 - DNA, 1113 bp, Thermus thermophilus
  CDS (1)..(1113): transl_table=11
atgcgcccggggctttcggccaagcgcctggtggtcaaggtgggaagcgccgtcctcacaggggaaaggggcctggacctcgaggccatggccgagatcgcccgccaggtggccgccctgagggaggaaggccgggaggtggtcctcgtctcctcgggggcggtggcggcgggaatgcgacggctcgggctaaaggagcgccccaaggacatgcccaagaagcaggccctcgccgccctcggccagcccctcctcatggccttctggcaagaggccttcgcccccttcggccttcccgtggcccaggtcctcctcaccgccgaggacctctcctccaggagccgctacctgaacgccaaggccaccttgcgggccctcctggacctgggggccatacccgtgatcaacgaaaacgacaccgtggcctttgaggagatccgctttggggacaacgaccagctctccgcccgggtggcggccctggtggaggcgggcctcctcgccctcctctccgatgtggacgccctctacgaggaggaccccaagaaaaacccccaggcccgccccatccccgaggtggagtccgtggaggcggttttggcccacgccggagaggaaaacccgctaggaagcggggggatgaagagcaagctcctcgccgcccgcatcgccggtagggtggggatccccaccctgcttctccccgggaagcggccaggggtcctcctccaagccctctccggggcccccctgggcacctacttccacgcgcggcggcgctaccggggggaaaaggcctggctttttggcctcctccgccccaagggggagctcgtcctggaccggggggcggtgcgggccttaaaggagcggggagcgagcctgcttcccgccggggttaaggaggtgcgggggaggttctcccggggcgaggcggtccgcctcctctcggaggagggcgaggaggtgggggtggggctcgccaactacgcctcggaggagatcgcccgcatcaaggggcggcggagcgcggagattgaggccgtcctgggctaccgctacaccgaggaggtggtccaccgggaccacctcgccttgaaggaggaggcatga

SEQ ID NO: 127990 - protein, 370 aa, Thermus thermophilus
MRPGLSAKRLVVKVGSAVLTGERGLDLEAMAEIARQVAALREEGREVVLVSSGAVAAGMRRLGLKERPKDMPKKQALAALGQPLLMAFWQEAFAPFGLPVAQVLLTAEDLSSRSRYLNAKATLRALLDLGAIPVINENDTVAFEEIRFGDNDQLSARVAALVEAGLLALLSDVDALYEEDPKKNPQARPIPEVESVEAVLAHAGEENPLGSGGMKSKLLAARIAGRVGIPTLLLPGKRPGVLLQALSGAPLGTYFHARRRYRGEKAWLFGLLRPKGELVLDRGAVRALKERGASLLPAGVKEVRGRFSRGEAVRLLSEEGEEVGVGLANYASEEIARIKGRRSAEIEAVLGYRYTEEVVHRDHLALKEEA

SEQ ID NO: 127991 - DNA, 1119 bp, Thermoanaerobacter tengcongensis
  CDS (1)..(1119): transl_table=11
atgaggattgtagttaaggttgggactagtactttgactcatgaaaatgggaaattgaatttagaaataatggaaaaactagtaagacaaatcgcaaatttgtcaaataaaggagaagaagttatacttgtgacgtctggggcgattggagctggaatgggaaaattaaacttgacagaaaagcccaaaaaccttccgcaaaagcaggccctagcagccattggtcaaggtctccttatagagatttacgagaaatttttcaacgaatacgggaaaataactgcccagcttcttttgacgagggaggactttagtgacagaaaaaggtatttaaatatgagctacaccctctctaaccttctcaagtggggagtcatacctgtgataaatgaaaatgacactgtggcagtagaggagataaagattggggataatgataccctggcagcccttgtggcaagccttgttgaagcagaccttttgattattttgactgatatcgatggcctttttgacaaggacccgagaatttataaggatgctaaggttatagaagtggttgaggagttttctgatgacctttttaaaatagctggcggggcaggtacaaaaagaggaacaggaggaatgtacacaaagattcaggcagccaagatatgctacaattcgggagttaaaatggtgattgcaaatggcaaaattgacaatgtattaaatagaattgcagcaggagaaaaaattgggactacttttcttcccatgaaaaatcctataagcagcagaaaaatctggattgctttcaatgcaaaggtgaatggttttttgtttgtagatgaaggggcagcaaaggctttagtaaagcatggaaaaagcttactgccaagcggtattgtaaagacagaaggccagtatgacgttggggactgcgtggcagtggtggaccaccagggcagggaaatagctagagggcttgtcaactattcttctgaggaagtcgaaaaaataaaaggctgtaagacccatgacatagagtcaatattggggtataagtactacgacgaggttattcacagggacaatctcgtagttcttgagagaggtgagaagtatggaggttga

SEQ ID NO: 127992 - protein, 372 aa, Thermoanaerobacter tengcongensis
MRIVVKVGTSTLTHENGKLNLEIMEKLVRQIANLSNKGEEVILVTSGAIGAGMGKLNLTEKPKNLPQKQALAAIGQGLLIEIYEKFFNEYGKITAQLLLTREDFSDRKRYLNMSYTLSNLLKWGVIPVINENDTVAVEEIKIGDNDTLAALVASLVEADLLIILTDIDGLFDKDPRIYKDAKVIEVVEEFSDDLFKIAGGAGTKRGTGGMYTKIQAAKICYNSGVKMVIANGKIDNVLNRIAAGEKIGTTFLPMKNPISSRKIWIAFNAKVNGFLFVDEGAAKALVKHGKSLLPSGIVKTEGQYDVGDCVAVVDHQGREIARGLVNYSSEEVEKIKGCKTHDIESILGYKYYDEVIHRDNLVVLERGEKYGG

SEQ ID NO: 127993 - DNA, 1125 bp, Thiobacillus denitrificans
  CDS (1)..(1125): transl_table=11
gtgagcacgtcggtcgtccgccacgcacggcgcatcgtcgtcaaggtcggttccagcctggtcacggcggacgggcgcggcctcgaccacgcggcgctgtcgcgctgggccgagcagatcgccgcgctggccgaacagggcaaggaagtcgtgctcgtgtcgtcgggcgcgatcgccgagggcatcgcgcgcctcggctggaaaaagcgcccgaaagcggtcaacgagttgcaggccgcggcggcggtcgggcagatgggtctcgtgcaggcctacgagtcgatttttcgcacccacaagttgcatgcggcccaagttcttctgacccacgaggatctcgccgaccgcacgcgctatctcaacgcgcgctcgacgctacgcacgctgcttgaattacgcgtggtcccgatcatcaacgagaacgacacggtggcgaccgacgagatccgtctcggcgacaacgatacgctgggcgcgctcgtgaccaatctgatcgaagccgactgcctcgtcatcctcaccgaccaggcggggctttatacggccgatccgcgcaaggtcgccgatgcgagcctcgtcatggaggcgcacgccggcgaccccgagctcgagcgcatggccggcggggccggtagcagcgtcgggaccggcggcatgctgaccaagatcctcgccgccaagcgcgcggcgcgcagcggcgcgcacaccgtgatctgcagcggccgcgagccgcgcgtgctgctgcgtcttgccgagggcgaacccatcggcagccagctggtcgcgcgccaggcgcccctcgccgcgcgccgccagtggctcgccgatcacctgcaactgcgcggcgggctcgtgctcgacgacggcgccgtgcgcgcgctgcaggaggacggcaagagcctcctgccggtcggcgtccggggcgtgaccggagaattcgaacgcggcgaggtcgtcgccgtcgtcgacgcgagcggacgcgagatcgcccgcggcctgaccaactacagcgccgccgaagcgcgccgtatcgcgggcaagcccagtaccgcgatcgaagccgagctcggctacatggacgagcccgaactgatccaccgcgacaacctggtcgttctggcgtga

SEQ ID NO: 127994 - protein, 374 aa, Thiobacillus denitrificans
MSTSVVRHARRIVVKVGSSLVTADGRGLDHAALSRWAEQIAALAEQGKEVVLVSSGAIAEGIARLGWKKRPKAVNELQAAAAVGQMGLVQAYESIFRTHKLHAAQVLLTHEDLADRTRYLNARSTLRTLLELRVVPIINENDTVATDEIRLGDNDTLGALVTNLIEADCLVILTDQAGLYTADPRKVADASLVMEAHAGDPELERMAGGAGSSVGTGGMLTKILAAKRAARSGAHTVICSGREPRVLLRLAEGEPIGSQLVARQAPLAARRQWLADHLQLRGGLVLDDGAVRALQEDGKSLLPVGVRGVTGEFERGEVVAVVDASGREIARGLTNYSAAEARRIAGKPSTAIEAELGYMDEPELIHRDNLVVLA

SEQ ID NO: 127995 - DNA, 891 bp, Treponema pallidum
  CDS (1)..(891): transl_table=11
gtgatccgtgcgctttttgctgcggcaaaaaaaattgtgataaagattgggtcaaatacgcttgcgcaggcagatggtactcctgatgaggagtttttggcggagtgtgctcgcgcctgtgcggcgctgatgcgtgacggcaagcagatagttgtggtgtcgtctggcgctcaggttgcagggatttctgcgctccattgcctttcatctcctcctcagggggcgggtttagagcgtcacgaatcgcgcggcgttattccgggtgatggtgcgtcctgcaaacaggcgttgtgtgcggtgggtcaggcggagttgataagtcgttggcgttctgcgtttgcagcgcaccagcagtgcgtgggccagtttctgtgtacgaaggaggattttactgactcggaccgcgcggcgcaggtacgctacacgttgtcctttttgctcgagcgcagggtagtacctatccttaatgaaaatgacgcgctctgttgcagcgacgtcccctctgtacccgccgaccggcgggtgtccctatcacctcaaaaaaggattggagataatgacagtctgtccgcgtttgtagcgctgttgtggcaggcagatcttttgcttttgttgagtgacattgacggcgtgtatgacaaagacccaaaggcacacacagatgcgcagcacgttcctctggtgacggacgtgtcagcgcttgtgggtaaaacgagcatgggttcttccaatgtctttggtacgggtgggattgctacaaagctggatgctgcgcgtcttgtcacgagggcgggaattcctctggtgctggcaaacgggcgccatctggatccgatcctgagccttatgcgcggggatgcgcgggggacacttttcgtgcctgtttcttag

SEQ ID NO: 127996 - protein, 296 aa, Treponema pallidum
MIRALFAAAKKIVIKIGSNTLAQADGTPDEEFLAECARACAALMRDGKQIVVVSSGAQVAGISALHCLSSPPQGAGLERHESRGVIPGDGASCKQALCAVGQAELISRWRSAFAAHQQCVGQFLCTKEDFTDSDRAAQVRYTLSFLLERRVVPILNENDALCCSDVPSVPADRRVSLSPQKRIGDNDSLSAFVALLWQADLLLLLSDIDGVYDKDPKAHTDAQHVPLVTDVSALVGKTSMGSSNVFGTGGIATKLDAARLVTRAGIPLVLANGRHLDPILSLMRGDARGTLFVPVS

SEQ ID NO: 127997 - DNA, 1191 bp, Vibrio cholerae
  CDS (58)..(1191): transl_table=11
ttgcagtgtggattgctaaaacatcgtctcttaaagtttttctcaacagaagcaatcatgaccacaaatcaacgaagcatcaaagctccacaaacggttgttgtgaagctgggaaccagtgttctgaccggcggtactcttgcgctggatcgtgctcatatggttgagctcgctcgccagtgtgctgaactcaaaaagcaaggtcactcagtagtgatcgtgacctcgggcgccattgcggctggccgtgagcatttaggttaccctgcgctgcccaacgcgatttccagcaagcaactgctggcagcggttgggcaaagtcgtttgattcaggtctgggaatcgttatttgcgatttatggcatcaaaattggtcagatgctgctcacccgtgctgatcttgatgaccgtgagcgtttccttaatgcgcgtgacaccatcaatgcgttagttgaaaatggcattgtgcctgtggtcaacgaaaacgatgcggtagcaaccaatgaaatcaaagtcggtgacaacgataacttatcggcgctggtcggtattttgtgtggtgcggataagctgctgctgttgaccgatcaaaaaggcttgttcaccgccgatccgcgtaaagatcccaatgcccaactgatcaaagaagtgaccaccattgatgacacactgcgcaaaattgctggtggcagtggcactacactcggtacgggcggcatggccaccaagctgcaagcggcggacattgctcgtcgtgctggtattgaagtcatcattgcggcaggtcgtgcgcccaatgtgatttttgactccttaagtgatgagccacaaggcacgcgcttcttagctttggaagaagcgttagaaaaccgcaaacgctggattttggcaggcccagcggcatcaggcgatattgtgattgacgatggcgcagtgaaagcggtgcaaaccaagggcagcagcttgctcgccaaaggtgtggtgcgagtgcaaggtcagttcgcccgtggtgaagtggtgcgggtactggataagcaaagtcatctgattgcgcgcggcatcgcggcctactccaatgacgagttggcgcaaattgctggtaagcacagtaaagagatcatcgatattttaggctacgatcacggctcagaagtgatccaccgcgacgacatggtcgtgattcaagagtaa

SEQ ID NO: 127998 - protein, 377 aa, Vibrio cholerae
MTTNQRSIKAPQTVVVKLGTSVLTGGTLALDRAHMVELARQCAELKKQGHSVVIVTSGAIAAGREHLGYPALPNAISSKQLLAAVGQSRLIQVWESLFAIYGIKIGQMLLTRADLDDRERFLNARDTINALVENGIVPVVNENDAVATNEIKVGDNDNLSALVGILCGADKLLLLTDQKGLFTADPRKDPNAQLIKEVTTIDDTLRKIAGGSGTTLGTGGMATKLQAADIARRAGIEVIIAAGRAPNVIFDSLSDEPQGTRFLALEEALENRKRWILAGPAASGDIVIDDGAVKAVQTKGSSLLAKGVVRVQGQFARGEVVRVLDKQSHLIARGIAAYSNDELAQIAGKHSKEIIDILGYDHGSEVIHRDDMVVIQE

SEQ ID NO: 127999 - DNA, 1140 bp, Vibrio parahaemolyticus
  CDS (1)..(1140): transl_table=11
atgacaacgaatcaacaaaacgcagttgtttcgcaaccacaaaccgtcgttgtgaaactgggtacaagtgtgctgacaggcggcacattggcactagatcgcgctcacatggttgagctagcgcgtcagtgtgctgagcttaagaaacaaggccattcagtggtaatggtttcgtctggtgcaattgcagcaggccgtgagcatcttggataccccgcactgcccaacgagatggcgagcaaacagttgcttgctgctgtgggtcagagtcgtttgattcaaacatgggagtctttgtttggtatttacggtatcaagattggtcaaatgctactgactcgtgctgacttggatgatcgtgagcgttttcttaatgcgcgtgacaccatcaatgcgcttgtggcgaacgatattattccaatcgtgaacgaaaatgatgcagtagccaccagtgaaatcaaagtcggcgacaatgacaacctatcggctttagtgggtattttgtgtggtgcagataagttattgctactgaccgatcaaaaaggtctgtttactgcagacccacgaaaagatccgaatgcagagctgatcaaagaagttaaaaccattgatgacacgttgcgtaaaattgctggcggcagcggtacaacactcggtacgggtggtatggcgacaaaacttcaagctgctgacatcgcacgtcgcgcgggtattgaagttattatcgcagcaggtagcgcgccaaacgtaatttttgactcgttgagcacggagcctcaaggtacgcgtttcctaccttgttcagaagcattggaaaaccgtaagcgttggatcctcgcaggtcctgcagcatcgggtgacattatcatcgatgatggtgcggtgaatgcggttgttggtaaaggcagcagcttgctagcaaaaggggtcatcaaggtgagcggtgattttgcccgtggtgaagttgctcgcgtaacaaattctcatggcaaactggttgcgcgtggtattagcgcctactcaagtgaagacttggcaaaaattactggcaaacacagtaaagacatcatctctattttgggtcatgactacggctcagaagtgattcatcgcgatgatcttgtcgtcattcaagaatag

SEQ ID NO: 128000 - protein, 379 aa, Vibrio parahaemolyticus
MTTNQQNAVVSQPQTVVVKLGTSVLTGGTLALDRAHMVELARQCAELKKQGHSVVMVSSGAIAAGREHLGYPALPNEMASKQLLAAVGQSRLIQTWESLFGIYGIKIGQMLLTRADLDDRERFLNARDTINALVANDIIPIVNENDAVATSEIKVGDNDNLSALVGILCGADKLLLLTDQKGLFTADPRKDPNAELIKEVKTIDDTLRKIAGGSGTTLGTGGMATKLQAADIARRAGIEVIIAAGSAPNVIFDSLSTEPQGTRFLPCSEALENRKRWILAGPAASGDIIIDDGAVNAVVGKGSSLLAKGVIKVSGDFARGEVARVTNSHGKLVARGISAYSSEDLAKITGKHSKDIISILGHDYGSEVIHRDDLVVIQE

SEQ ID NO: 128001 - DNA, 1140 bp, Vibrio vulnificus
  CDS (1)..(1140): transl_table=11
atgacaacgaatcaacaaagcgtcgcagcttctcaaccaaaaactattgttgtgaagcttggaaccagtgtattgaccggtggtacattagcgttagatcgcgctcatatggttgagcttgcgcgccaatgtgcagagttaaaaaaacaaggccactctgtggtggtcgtctcgtcaggcgcgattgccgctggacgtgagcacttaggttaccccgcgctgcccaatgcgatggcaagcaaacagttgcttgctgcggttgggcaaagtcagttgattcaaacttgggaatcgttatttgcactgtatggcatcaaaattggccaaatgttgctcactcgagcggatctcgaagatcgcgaacgttttctcaatgctcgagatacgattaacgcgttagtggataacggcattatccctgtcgttaatgaaaatgacgccgtcgccacgagcgaaatcaaagtgggtgacaacgacaacctctctgcgttggtgggcattttatgtggtgctgataaactactgttgctgacagaccaaaaaggcttgtataccgccgatccgcgtaaagatcccaatgctgagctgatcaaagaagttaaagtcattgacgatactttgcgtaaaattgctggtggcagcggtacaacattaggtactggtgggatggcaacaaagctccaagctgcggacattgcgcgtcgtgctggcattgaagtcatcattgcggcaggccgtggtcaaaatgtcatttttgatgcgttgagcccagcccctcaaggaacccgtttcttgccttgtgaagaggcgttggaaaaccgcaagcgttggattctcgctggccctgcggcctctggtgatattgtgattgaccaaggtgcggtgaaagccgtggtcgaaaaaggcagcagtttgttggcgaaaggggtgaccaaagtacttggcgagttttctcgtggtgaagtggtccgtgtaacggatgcacaaggccatttggttgcgcgaggtattgcgagttattccaaccaagatatggcgaaaattgccggtaagcacagcaaagacattatttcgattctgggctatgactatggttcagaagtgattcaccgtgacgacatggttgtcattcaagaatag

SEQ ID NO: 128002 - protein, 379 aa, Vibrio vulnificus
MTTNQQSVAASQPKTIVVKLGTSVLTGGTLALDRAHMVELARQCAELKKQGHSVVVVSSGAIAAGREHLGYPALPNAMASKQLLAAVGQSQLIQTWESLFALYGIKIGQMLLTRADLEDRERFLNARDTINALVDNGIIPVVNENDAVATSEIKVGDNDNLSALVGILCGADKLLLLTDQKGLYTADPRKDPNAELIKEVKVIDDTLRKIAGGSGTTLGTGGMATKLQAADIARRAGIEVIIAAGRGQNVIFDALSPAPQGTRFLPCEEALENRKRWILAGPAASGDIVIDQGAVKAVVEKGSSLLAKGVTKVLGEFSRGEVVRVTDAQGHLVARGIASYSNQDMAKIAGKHSKDIISILGYDYGSEVIHRDDMVVIQE

SEQ ID NO: 128003 - DNA, 786 bp, Wolinella succinogenes
  CDS (1)..(786): transl_table=11
atgaggcgaattgtcatcaaggtcggaagcgcgcttttaagccgagggcatgagatggcaatggatcggatggagtcgctctgtcgttttatcgcggagttgaagcaaaaaggcgatgaggtgattttggtcacttcggccgcggtagcagcgggatacacagcactggcgttggataagagacaattgcccaatcgtcaggcgcttgctgccattggccagccacttctcatgaatctctatcatcaaacgctagcccccttgggaatcttgcccgctcaaatgctcctctctgcctatgattttgattcgcgaaagcgaacagaaaatgcacgcaacacgattgaggtgctgctgagtcatggcgttttgcccatcatcaatgagaatgacgcggttgccaccaaggagcttgatatgctcgcggtctttggcgacaacgatcgactctcggctcatgtagcgcactattttagcgccgagattcttctgattttgagtgacattgatggctattatgataagaatccttgtgaatttcctgatgccaagatcaggcgtgtggtcaattttttgacacccgaggagctggaggcggaggtttcacccaataacgcttttgccacagggggaattgtcaccaagcttcaagcggcggattttctcatgaagcgagggcagaaaatgtttctggccaatggcttcaatctaggggatgcgcgaagctttctcttggagggaatccattgccaagggacgctatttgtgcaaggaggagaatcgtga

SEQ ID NO: 128004 - protein, 261 aa, Wolinella succinogenes
MRRIVIKVGSALLSRGHEMAMDRMESLCRFIAELKQKGDEVILVTSAAVAAGYTALALDKRQLPNRQALAAIGQPLLMNLYHQTLAPLGILPAQMLLSAYDFDSRKRTENARNTIEVLLSHGVLPIINENDAVATKELDMLAVFGDNDRLSAHVAHYFSAEILLILSDIDGYYDKNPCEFPDAKIRRVVNFLTPEELEAEVSPNNAFATGGIVTKLQAADFLMKRGQKMFLANGFNLGDARSFLLEGIHCQGTLFVQGGES

SEQ ID NO: 128005 - DNA, 1155 bp, Xylella fastidiosa
  CDS (1)..(1155): transl_table=11
atgaccggcatccctcccccctcccgcttccccgaacaacccatccccccgtggcgccgcgccgtcctcaaagtgggtagcagcctcctcgccgccgatggcggcggcctttccccccgctttgccttggacttagcacacttcgtctccgccaacatcaccgccggacgccaactcgtcatcgtctcctctggcgctgtcgccgctggtcgtgccctgatacccccactgcccgaatccggcggcgctctcgccgcccgccaagccttagctgcccttggacaagcacaactcatcgcactgtggcaacgcttcttcgaccgccccgttgcccaggtcctcctgacccacgacgacctccgcaaccgccgtcgctacctcaacgcacgtgccacattgcgtgaactactgcacctgggcaccttgcctgtcgtcaacgaaaacgacaccgtctccgtcgatgaactcaaactaggcgacaacgacaacctggcagccattgttgccgcactgattgatgcccaagccctgtttatcgccaccgatattgacggcttatacaccaccgacccacgccaccattctgacgcacagcccctgcatgaagtccgcaccctgacccctgaaaaccttgccatggctggtgacagcagcagcaccgttggcaccggcggtatgcgtaccaaacttgaagcagcacttaaagccggcgccgctggcattgacacctacctatttaacggccgcagcagcgacgttgtccgcggactcgcacaacaccgcctccgcggcacccgcatccatcccacctgtaccccgattgccgcccgtaaatattggttgcgtcacgccccagtggagcccggcgcgatcctcatcgatgccggtgccgccgctgccttggcacaacaaggcgcttccctacttccgggcggcgttttgagtgccgaaggcgacttccgccgcggcgatatgatccagatagccacccgcagcccagatcacccctcccaccccctggcacgcggacttgtccaatactcagccgccgatgtccgccgcattgccggttgccattcccgcgatattcaaaccctccttggatacacctatggcgacacaatcgttcaccgtgatgacctcgtcctcctctga

SEQ ID NO: 128006 - protein, 384 aa, Xylella fastidiosa
MTGIPPPSRFPEQPIPPWRRAVLKVGSSLLAADGGGLSPRFALDLAHFVSANITAGRQLVIVSSGAVAAGRALIPPLPESGGALAARQALAALGQAQLIALWQRFFDRPVAQVLLTHDDLRNRRRYLNARATLRELLHLGTLPVVNENDTVSVDELKLGDNDNLAAIVAALIDAQALFIATDIDGLYTTDPRHHSDAQPLHEVRTLTPENLAMAGDSSSTVGTGGMRTKLEAALKAGAAGIDTYLFNGRSSDVVRGLAQHRLRGTRIHPTCTPIAARKYWLRHAPVEPGAILIDAGAAAALAQQGASLLPGGVLSAEGDFRRGDMIQIATRSPDHPSHPLARGLVQYSAADVRRIAGCHSRDIQTLLGYTYGDTIVHRDDLVLL

SEQ ID NO: 128007 - DNA, 1104 bp, Yersinia pestis
  CDS (1)..(1104): transl_table=11
atgagtggcagccagacattggttgtgaaattggggacgagtgtactgaccgggggttcccgccgtcttaaccgtgcccatattgttgaattggtgcgtcaatgtgcccagcaacacgcaaaaggtcatcgtattgttattgtcacctctggggcgattgctgcgggtcgtgaacatttagggtatccagagttgcccgccactattgcctcgaaacaattgctagccgcggttgggcaaagccggttaattcagctctgggaacaactgttttcaatttatggcattcatatcggccagatgctgctaacccgcgcagatttagaggatcgtgagcgttttcttaatgcccgcgataccatgaatgcgttgcttgataaccgcattgtaccggtgatcaatgagaacgacgccgtcgctactgctgaaatcaaagtgggcgataacgataatctctccgcattggcggccattttggccagtgcagataagctactgttgttgaccgatcaggcggggttgtacaccgctgatccgcgtaacaatccagaagcggagttaattcgcgaagtgcatggcattgatgatgtcctgcgcgggatggccggagacagcgtttcggggctcgggacggggggcatggcgactaaactgcaagcggcggatgtcgcgtgccgtgcgggtattgatgtggtgattgccgcaggtagccaggtgggtgtgattgccgatgtgattgacggtacgccagtcggtacccgtttccactcattggaaacaccattagaaaaccgtaaacgttggatttttggtgcgccaccggcaggtgaaatcacagtggacgacggtgctgtatttgcgatcatggaacggggcagttcgctgctgccaaaaggcattcgcagcgttaaaggggacttctcccgtggtgaagtgatccgtatccgtaatctcaatgggcgggatttagcacacggtgtttcacgctataacagtgatgcattgcgcatgttagcggggcatcactcgcaacaaatcagtgaaatcctcggatatgaatacggcccggtggctgttcatcgtgatgatatgattgtcagctaa

SEQ ID NO: 128008 - protein, 367 aa, Yersinia pestis
MSGSQTLVVKLGTSVLTGGSRRLNRAHIVELVRQCAQQHAKGHRIVIVTSGAIAAGREHLGYPELPATIASKQLLAAVGQSRLIQLWEQLFSIYGIHIGQMLLTRADLEDRERFLNARDTMNALLDNRIVPVINENDAVATAEIKVGDNDNLSALAAILASADKLLLLTDQAGLYTADPRNNPEAELIREVHGIDDVLRGMAGDSVSGLGTGGMATKLQAADVACRAGIDVVIAAGSQVGVIADVIDGTPVGTRFHSLETPLENRKRWIFGAPPAGEITVDDGAVFAIMERGSSLLPKGIRSVKGDFSRGEVIRIRNLNGRDLAHGVSRYNSDALRMLAGHHSQQISEILGYEYGPVAVHRDDMIVS

SEQ ID NO: 128009 - DNA, 1194 bp, Zymomonas mobilis
  CDS (1)..(1194): transl_table=11
atggtcgccgatctaacttctgatatttcagaatcccaagagcaagaaacagaaactaactctgccaataacaacggtgcggttttccgaccggaaaactgcccgcgactggttataaaaattggttcttctttgctcgttgaccaacgcggtcaagttcgtcgcgattggctgcaaactgtcgcctatgacattgccaaattgcatcaagctggacagcaaatcattgttgtttcctcaggcgctatcgcactgggtgccagacgcttgaacttgccacgcggtggacgggcatccttggaagatgctcaagcctcggcttctgtcggacaaattttgcttagccaatgctgggcagaattgctgggtgcatgcagcttggattcatcccaaattctactgacactggatgatctggaagatcgccgccgctatctgaacgtctcggctacgcttgatcgcctgctttctcttggtgtcgtgccagtcatcaatgaaaatgactcgattgcgaccgcagaaattcgttttggagataatgaccgtctcgctgctcgcatcgggcaggccagccatgcctctggcgttatcctcttttcggatgtggatggcctttacacggccaaccccatgaaagatcccaacgccaaacggattgatcgggtcgaacatatcgacaatagcacagaagctatggctagcagtgattctgcttccggcatgggttctggcggcatggcttccaaggtagaagcggcgcgtatcgccacctattccggcgttaatctcgcgattacaacgggtaaacgcccttccccgctgacgatgtttttggatgatggtgctggcacgctattcacagccgatgaaagcgcttcagctcataaaacatggctggccggacgattaaccgctcatggtcaggtttatatcgatcaaggcgcagtcgaggcactccatgatggaaacagcctgctccctgcgggcgtctgctccatagaaggcaagttcaaccgcggtgacgtggtcgatatcctcgatcaagaacacaaccttattgcgcggggtctgatcgaatatgacagcgaagattctgcccaaatcacaggcaagcggtcgcaggaaattgctgatattctaggatatgaggccagaacagccctgatccatcgcaatcatatggttatgctatga

SEQ ID NO: 128010 - protein, 397 aa, Zymomonas mobilis
MVADLTSDISESQEQETETNSANNNGAVFRPENCPRLVIKIGSSLLVDQRGQVRRDWLQTVAYDIAKLHQAGQQIIVVSSGAIALGARRLNLPRGGRASLEDAQASASVGQILLSQCWAELLGACSLDSSQILLTLDDLEDRRRYLNVSATLDRLLSLGVVPVINENDSIATAEIRFGDNDRLAARIGQASHASGVILFSDVDGLYTANPMKDPNAKRIDRVEHIDNSTEAMASSDSASGMGSGGMASKVEAARIATYSGVNLAITTGKRPSPLTMFLDDGAGTLFTADESASAHKTWLAGRLTAHGQVYIDQGAVEALHDGNSLLPAGVCSIEGKFNRGDVVDILDQEHNLIARGLIEYDSEDSAQITGKRSQEIADILGYEARTALIHRNHMVML

SEQ ID NO: 128011 - DNA, 1116 bp, Bacillus subtilis
  CDS (1)..(1116): transl_table=11
gtgacgcctgatacaagcatgaaaagagtcgttgtgaagattggaagcagttcattaacaagccttcatggagaaatcagcattcgaaaattagaagcgttggtcgaccaggtcgtcaaactcaaagacgccggttatgaagtgattttggtttcctcaggcgcagtggcggcgggatatcggaagctcggatttatccaaaggcccgagaagcttccagaaaaacaagcatcagcttcaatcggccagggattgctaatggaggcttattcaaagctgtttttggcacacggctatgtcgcatcccaaattttaattacgagaagcgatttttctgatgaatatcgatacaacaatgtcaggaatacaatgaatgtactgctcgagcgcggcatcatcccgatcataaacgaaaatgacacagttaccgtcaatcggctcaagtttggcgacaatgatacgctcgcagcaaaagtcgcaggattgattgatgcagatatgcttgtgattttatcagatatagacggattatatgacggcaatccgcgcacaaatccagaagcgaaaaagatacagcgggtgagtgaaataacacctgacatcgaagcatgcgcaggtgacactggaagcatcgttggcaccggcggcatgcgctctaagcttgatgcgtttaaaatcgtaatggcgtctggcattaaaggtttcctaggtcaggcagatgctggcgatattttataccacgccgttcatgaacaggcggaaggcacctattttgaagcagaaggaacgcttccgttgaatcaaaaggagcaatggatcgcttttaattccggtccggaaggtgaaatgattttatcagatgattgttcacgaaaaataacaaacggacaatcgagtttatacctagacggtgtacagaagattaaagggaaattcaaaagcggttcagttgttcggctgatggattcaaaagggacggaaatcggccttggaatcgtcaattactcttctgtacagcttcaagaaccggaaaagaaaaaggaactgacaaatagagctctaattgatcaagaagcatttgtttgccatgtggatttttctttacctgtaaattaa

SEQ ID NO: 128012 - protein, 371 aa, Bacillus subtilis
MTPDTSMKRVVVKIGSSSLTSLHGEISIRKLEALVDQVVKLKDAGYEVILVSSGAVAAGYRKLGFIQRPEKLPEKQASASIGQGLLMEAYSKLFLAHGYVASQILITRSDFSDEYRYNNVRNTMNVLLERGIIPIINENDTVTVNRLKFGDNDTLAAKVAGLIDADMLVILSDIDGLYDGNPRTNPEAKKIQRVSEITPDIEACAGDTGSIVGTGGMRSKLDAFKIVMASGIKGFLGQADAGDILYHAVHEQAEGTYFEAEGTLPLNQKEQWIAFNSGPEGEMILSDDCSRKITNGQSSLYLDGVQKIKGKFKSGSVVRLMDSKGTEIGLGIVNYSSVQLQEPEKKKELTNRALIDQEAFVCHVDFSLPVN

SEQ ID NO: 128013 - DNA, 1272 bp, Saccharomyces cerevisiae
  CDS (1)..(1272)
atgacaaaagcttatactatcgttatcaagctgggcagttcgtcgctcgtcgacgagagcacaaaagagccaaagttgtccatcatgacgttaatcgtcgagaccgtgacgaatcttaagcgcatgggccacaaagtgatcatcgtatccagcggcggcattgccgttggtttggacgctctcaacattccgcacaagcctaagcagttgtctgaagtgcaagcgattgccgctgtcggacaaggccgtctcatcgcgcgctggaacatgctgttttcccagtatggcgagcaaacagcgcagatcctgctcacgcgtaacgatatactgcgttggaaccagtacaataacgcacgcaatacaatcaacgaactgctggccatgggtgtcatccctatagtcaacgaaaacgatacgctatccattagcgagatcgagttcggcgataacgacacgctttctgccattaccgctgctcttgtaggggcggatttcctgttcttgctcacagatgtggactgcctatatacagacaatccgcgcactaatccggatgctcgtcctattgttctcgtgccagagctatcagagggccttccgggcgtcaacacttccagtggttcaggctccgaggttggcacgggcggaatgcgcaccaaactcatagccgccgacctcgcctctaatgccggtatcgagactattgtgatgaagagcgaccgtccagagtacgtcccgaagatcgttgactacattcagcatcacttccgccctccgcgccatatcggaaacggcacacagcagcagtttctcgatcttcaggatacggagctcgaacagttgcgtcgctacgatgttcccatgcacaccaagttcttagctaatgacaacaaacacaagcttaagaacagggaattttggattctgcacgggctcattaccaagggcgccattatcatcgacgagaacagctatgataaacttttgtcaaaggatatggctagtctgactccaaacgccgtgatcgaagtccgagacaacttccacgaacttgaatgcgttgatctcaaaataggccagcggttacccaatggcgaattggatatctcgaagccgattcagtctgttggatgcgtccgctccaattatacgagtctggagcttgcgaagatcaagggcttacccagtgagaagattcacgatgttttgggctacagtgtgagtgaatacgtagcacatagagaaaacatcgctttccctccgcaattttga

SEQ ID NO: 128014 - protein, 423 aa, Saccharomyces cerevisiae
MTKAYTIVIKLGSSSLVDESTKEPKLSIMTLIVETVTNLKRMGHKVIIVSSGGIAVGLDALNIPHKPKQLSEVQAIAAVGQGRLIARWNMLFSQYGEQTAQILLTRNDILRWNQYNNARNTINELLAMGVIPIVNENDTLSISEIEFGDNDTLSAITAALVGADFLFLLTDVDCLYTDNPRTNPDARPIVLVPELSEGLPGVNTSSGSGSEVGTGGMRTKLIAADLASNAGIETIVMKSDRPEYVPKIVDYIQHHFRPPRHIGNGTQQQFLDLQDTELEQLRRYDVPMHTKFLANDNKHKLKNREFWILHGLITKGAIIIDENSYDKLLSKDMASLTPNAVIEVRDNFHELECVDLKIGQRLPNGELDISKPIQSVGCVRSNYTSLELAKIKGLPSEKIHDVLGYSVSEYVAHRENIAFPPQF

SEQ ID NO: 128015 - DNA, 2208 bp, Oryza sativa; identical to SEQ ID NO: 21018
  CDS (1)..(2208)

SEQ ID NO: 128016 - protein, 735 aa, Oryza sativa; identical to SEQ ID NO: 21019

SEQ ID NO: 128017 - DNA, 20 bp, Artificial sequence
  primer
atgacaatggcaatgcaacc

SEQ ID NO: 128018 - DNA, 27 bp, Artificial sequence
  primer
ttaattttcttgtaatactaaattatc

SEQ ID NO: 128019 - protein, 740 aa, Artificial sequence
  consensus sequence
  Variant (2)..(2): Xaa in position 2 is any amino acid
  Variant (4)..(4): Xaa in position 4 is any amino acid
  Variant (6)..(36): Xaa in position 6 to 36 is any amino acid
  Variant (37)..(47): Xaa in position 37 to 47 is any or no amino acid
  Variant (49)..(49): Xaa in position 49 is any amino acid
  Variant (53)..(55): Xaa in position 53 to 55 is any amino acid
  Variant (57)..(59): Xaa in position 57 to 59 is any amino acid
  Variant (61)..(70): Xaa in position 61 to 70 is any amino acid
  Variant (71)..(89): Xaa in position 71 to 89 is any or no amino acid
  Variant (92)..(92): Xaa in position 92 is any amino acid
  Variant (95)..(95): Xaa in position 95 is any amino acid
  Variant (98)..(99): Xaa in position 98 to 99 is any amino acid
  Variant (101)..(113): Xaa in position 101 to 113 is any amino acid
  Variant (114)..(116): Xaa in position 114 to 116 is any or no amino acid
  Variant (118)..(118): Xaa in position 118 is any amino acid
  Variant (120)..(120): Xaa in position 120 is any amino acid
  Variant (122)..(123): Xaa in position 122 to 123 is any amino acid
  Variant (125)..(132): Xaa in position 125 to 132 is any amino acid
  Variant (133)..(135): Xaa in position 133 to 135 is any or no amino acid
  Variant (137)..(139): Xaa in position 137 to 139 is any amino acid
  Variant (141)..(143): Xaa in position 141 to 143 is any amino acid
  Variant (145)..(150): Xaa in position 145 to 150 is any amino acid
  Variant (151)..(152): Xaa in position 151 to 152 is any or no amino acid
  Variant (154)..(155): Xaa in position 154 to 155 is any amino acid
  Variant (160)..(164): Xaa in position 160 to 164 is any amino acid
  Variant (166)..(168): Xaa in position 166 to 168 is any amino acid
  Variant (169)..(183): Xaa in position 169 to 183 is any or no amino acid
  Variant (188)..(188): Xaa in position 188 is any amino acid
  Variant (190)..(190): Xaa in position 190 is any amino acid
  Variant (192)..(198): Xaa in position 192 to 198 is any amino acid
  Variant (201)..(201): Xaa in position 201 is any amino acid
  Variant (203)..(204): Xaa in position 203 to 204 is any amino acid
  Variant (206)..(206): Xaa in position 206 is any amino acid
  Variant (208)..(209): Xaa in position 208 to 209 is any amino acid
  Variant (212)..(214): Xaa in position 212 to 214 is any amino acid
  Variant (215)..(215): Xaa in position 215 is any or no amino acid
  Variant (217)..(237): Xaa in position 217 to 237 is any amino acid
  Variant (238)..(249): Xaa in position 238 to 249 is any or no amino acid
  Variant (251)..(251): Xaa in position 251 is any amino acid
  Variant (255)..(256): Xaa in position 255 to 256 is any amino acid
  Variant (258)..(259): Xaa in position 258 to 259 is any amino acid
  Variant (262)..(263): Xaa in position 262 to 263 is any amino acid
  Variant (265)..(267): Xaa in position 265 to 267 is any amino acid
  Variant (269)..(275): Xaa in position 269 to 275 is any amino acid
  Variant (277)..(288): Xaa in position 277 to 288 is any amino acid
  Variant (289)..(446): Xaa in position 289 to 446 is any or no amino acid
  Variant (449)..(452): Xaa in position 449 to 452 is any amino acid
  Variant (453)..(465): Xaa in position 453 to 465 is any or no amino acid
  Variant (467)..(467): Xaa in position 467 is any amino acid
  Variant (468)..(474): Xaa in position 468 to 474 is any or no amino acid
  Variant (476)..(479): Xaa in position 476 to 479 is any amino acid
  Variant (481)..(481): Xaa in position 481 is any amino acid
  Variant (484)..(484): Xaa in position 484 is any amino acid
  Variant (485)..(538): Xaa in position 485 to 538 is any or no amino acid
  Variant (541)..(542): Xaa in position 541 to 542 is any amino acid
  Variant (544)..(545): Xaa in position 544 to 545 is any amino acid
  Variant (546)..(548): Xaa in position 546 to 548 is any or no amino acid
  Variant (550)..(550): Xaa in position 550 is any amino acid
  Variant (551)..(566): Xaa in position 551 to 566 is any or no amino acid
  Variant (568)..(609): Xaa in position 568 to 609 is any amino acid
  Variant (610)..(739): Xaa in position 610 to 739 is any or no amino acid
VXKXGXXXXXXXXXXXXXXXXXXXXXXXXXXXXXXXXXXXXXXXXXXVXSGAXXXGXXXLXXXXXXXXXXXXXXXXXXXXXXXXXXXXXQAXAAXGQXXLXXXXXXXXXXXXXXXXQXLXTXXDXXXXXXXXXXXNXXXTXXXLXXXXXXXXPXXNENDXXXXXEXXXXXXXXXXXXXXXXXXGDNDXLXAXXXXXXXADXLXXLXDXXGLXXXXPXXXXXXXXXXXXXXXXXXXXXXXXXXXXXXXXXGXGGMXXKXXAAXXAXXXGXXXXXXXGXXXXXXXXXXXXXXXXXXXXXXXXXXXXXXXXXXXXXXXXXXXXXXXXXXXXXXXXXXXXXXXXXXXXXXXXXXXXXXXXXXXXXXXXXXXXXXXXXXXXXXXXXXXXXXXXXXXXXXXXXXXXXXXXXXXXXXXXXXXXXXXXXXXXXXXXXXXXXXXXXXXXXXXXXXGTXXXXXXXXXXXXXXXXXWXXXXXXXXGXXXXDXGAXXXXXXXXXXXXXXXXXXXXXXXXXXXXXXXXXXXXXXXXXXXXXXXXXXXXXXXLLXXGXXXXXGXXXXXXXXXXXXXXXXXFXXXXXXXXXXXXXXXXXXXXXXXXXXXXXXXXXXXXXXXXXXXXXXXXXXXXXXXXXXXXXXXXXXXXXXXXXXXXXXXXXXXXXXXXXXXXXXXXXXXXXXXXXXXXXXXXXXXXXXXXXXXXXXXXXXXXXXXXXXXXXXXXXXXXXXXXXXXXXXXXXXXXXXXXXXXXR

SEQ ID NO: 128020 - protein, 32 aa, Artificial sequence
  protein pattern
  Variant (3)..(3): Xaa in position 3 is any amino acid
  Variant (5)..(5): Xaa in position 5 is Ala, Gly or Ser
  Variant (7)..(8): Xaa in position 7 to 8 is any amino acid
  Variant (9)..(9): Xaa in position 9 is Ala, Gly, Ser or Thr
  Variant (10)..(13): Xaa in position 10 to 13 is any amino acid
  Variant (14)..(14): Xaa in position 14 is Ala or Gly
  Variant (15)..(16): Xaa in position 15 to 16 is any amino acid
  Variant (18)..(18): Xaa in position 18 is any amino acid
  Variant (19)..(19): Xaa in position 19 is any or no amino acid
  Variant (21)..(21): Xaa in position 21 is any amino acid
  Variant (22)..(22): Xaa in position 22 is any or no amino acid
  Variant (24)..(26): Xaa in position 24 to 26 is any amino acid
  Variant (27)..(27): Xaa in position 27 is Phe, Ile, Leu, Met or Val
  Variant (28)..(28): Xaa in position 28 is any amino acid
  Variant (29)..(29): Xaa in position 29 is Asp, Glu, Gly, Asn, Ser or Thr
  Variant (30)..(31): Xaa in position 30 to 31 is any amino acid
NDXLXAXXXXXXXXXXLXXLXXDXXXXXXXXP

SEQ ID NO: 128021 - protein, 15 aa, Artificial sequence
  protein pattern
  Variant (2)..(2): Xaa in position 2 is Ala or Leu
  Variant (3)..(3): Xaa in position 3 is any amino acid
  Variant (5)..(5): Xaa in position 5 is Ala or Ser
  Variant (6)..(6): Xaa in position 6 is Ala, Ile, Leu or Val
  Variant (9)..(10): Xaa in position 9 to 10 is any amino acid
  Variant (12)..(14): Xaa in position 12 to 14 is any amino acid
  Variant (15)..(15): Xaa in position 15 is Phe, Trp or Tyr
QXXAXXGQXXLXXXX

SEQ ID NO: 128022 - protein, 15 aa, Artificial sequence
  protein pattern
  Variant (2)..(3): Xaa in position 2 to 3 is any amino acid
  Variant (4)..(5): Xaa in position 4 to 5 is Ile, Leu or Val
  Variant (6)..(6): Xaa in position 6 is Ile, Leu, Met or Val
  Variant (8)..(8): Xaa in position 8 is Ala, Cys, Ser or Thr
  Variant (11)..(12): Xaa in position 11 to 12 is any or no amino acid
  Variant (14)..(14): Xaa in position 14 is any amino acid
GXXXXXVXSGXXAXG

SEQ ID NO: 128023 - protein, 15 aa, Artificial sequence
  protein pattern
  Variant (2)..(3): Xaa in position 2 to 3 is any or no amino acid
  Variant (6)..(6): Xaa in position 6 is any amino acid
  Variant (7)..(7): Xaa in position 7 is Ala, Ser or Thr
  Variant (9)..(9): Xaa in position 9 is Ile, Leu or Val
  Variant (10)..(10): Xaa in position 10 is any amino acid
  Variant (13)..(14): Xaa in position 13 to 14 is any amino acid
  Variant (15)..(15): Xaa in position 15 is Ala, Cys, Gly, Thr or Val
GXXGMXXKXXAAXXX

SEQ ID NO: 128024 - DNA, 300 bp, Synechocystis sp.
  CDS (1)..(300): transl_table=11
atgaccattacctttgttaaagagcagaaggatattgttgtggcccagggtgccaacctacgggaaaaggccctgcagaatggcgttgatatttataccttgaaaggaaaactgatgaactgcggaggctacggccaatgtggcacttgcatcgtggaaatcacagcgggtatggaaaatctttccccgaaaaccgactttgaaaatagggtattgcgcaaaaagcccgacaatttccgtctcgcctgtcaaaccttggtcaatgggccggtgagtgtgaacaccaaacccaaaggctaa

SEQ ID NO: 128025 - protein, 99 aa, Synechocystis sp.
MTITFVKEQKDIVVAQGANLREKALQNGVDIYTLKGKLMNCGGYGQCGTCIVEITAGMENLSPKTDFENRVLRKKPDNFRLACQTLVNGPVSVNTKPKG

SEQ ID NO: 128026 - DNA, 944 bp, Glycine max
  CDS (130)..(606)
ggctcgctggccatctgcggggggcgctgttttacatcacaaaagataaaaacagagaaagaaagattatttaggaacaagaaggtgtgcgcgcgcgaaccatccataacagaaacaacaatggcttccatgagtatattcaccaccatttccctcgccgccgacgcccggaatccggccatctattttccccggcggcggcagcccaacacggtcattttcgccgccgcctcatcgccggaatctcctccagaaatagagctcgagttcatcgggccaaaaccgggaagtgatggatcgtacccggtggagagagtgaaagcaataagcggagagaagctgttgaggaacatcatgttggataacaagatcgagctttatgccacctatgggaagctgatgaactgcgcgggaggtggtagctgcggaacatgcatagtagagattattgaaggaaaggatcttttaaatgaaagaacaaacactgaactcagatatcttagtaagaaacccgaatcttggaggctggcttgtcaaactattgttggaaacaaagaaaactctggcaaggttgctgttcaaaggattcctcagtggaagaagtagtaaaccatggatgcttagaaagaagagctccatatgttcctcctcaatttgacacagtttgaagcaacactacaaatcattgatccatgcatcataaatttatgaaaacttttgctttggttcttaatggaatcttgcagatatctgtaatgtataatttcccttcatgttttgtaatggttgccacttggcttcaattctttaggttagggtacaaatctttggagtatacattatcaaagcaattttgaatttgtttacatcatcaatgcatgatacattatcaaagaaactctattagagtgcaaatgacacattatctttgatgtgcaattccc

SEQ ID NO: 128027 - protein, 158 aa, Glycine max
MSIFTTISLAADARNPAIYFPRRRQPNTVIFAAASSPESPPEIELEFIGPKPGSDGSYPVERVKAISGEKLLRNIMLDNKIELYATYGKLMNCAGGGSCGTCIVEIIEGKDLLNERTNTELRYLSKKPESWRLACQTIVGNKENSGKVAVQRIPQWKK

SEQ ID NO: 128028 - DNA, 944 bp, Glycine max; identical to SEQ ID NO: 128026
  CDS (121)..(606)

SEQ ID NO: 128029 - protein, 161 aa, Glycine max
MASMSIFTTISLAADARNPAIYFPRRRQPNTVIFAAASSPESPPEIELEFIGPKPGSDGSYPVERVKAISGEKLLRNIMLDNKIELYATYGKLMNCAGGGSCGTCIVEIIEGKDLLNERTNTELRYLSKKPESWRLACQTIVGNKENSGKVAVQRIPQWKK

SEQ ID NO: 128030 - DNA, 363 bp, Prochlorococcus marinus str. MIT 9301
  CDS (1)..(363): transl_table=11
atggcaactatcagatttattcgtgaggatttagaggtccaatgcaatccgggtgaaaatttaagggaacttgttatgagagagaatttacagctttatggattaaaaggtattttaggtaattgtggaggtgctggacaatgcagtacttgttttatttctgttgaaggtggaaataaaaattctttgagccctcttacatctgttgaagaagaaaaactcaaaaacagaccagaaaattggcgccttgcttgccaaacattaataaaatcatccacagtaatcttaacaaaaccacaatcccccccctcaaatttggaagaattaaaaaaaattagtgaaaataaaaaattacctcgctaa

SEQ ID NO: 128031 - protein, 120 aa, Prochlorococcus marinus str. MIT 9301
MATIRFIREDLEVQCNPGENLRELVMRENLQLYGLKGILGNCGGAGQCSTCFISVEGGNKNSLSPLTSVEEEKLKNRPENWRLACQTLIKSSTVILTKPQSPPSNLEELKKISENKKLPR

SEQ ID NO: 128032 - DNA, 558 bp, Oryza sativa (japonica cultivar-group)
  CDS (1)..(558)
atggcggccacgagctccacctccacggcgctcttctcgctggccatcccttcctcccgcgtcgtctccacccgaggccaccgcaaggctagctctggcagtggccccttccgggcggcccgcatcaggtgctccaacgccgcctcgccgaacgcgtccgccggagccgcctccgcggaggaggcagcgccgccgcccaagccccaaatcgacctcgagttcgtcggaccgaaggcggatgccgatgggtcgttcccggtggaccgggcggcggcgggcagcggcgagaagctcctccgggacgtcatggtcgagaacaagatcgagctctacgcggcatatgggaaggtgatgaactgcggcggcggcggcagctgcggcacttgcatcgtcgagatagttgatggcaaggagctcctgaatgaaagaacaaacactgagaaccggtatctgaagaagaaaccggagtcatggaggcttgcttgtcagactattgttggaaacaaagaaaattccggcaaggttgtcgtccaacgtctgccccagtggaaaaaatga

SEQ ID NO: 128033 - protein, 185 aa, Oryza sativa (japonica cultivar-group)
MAATSSTSTALFSLAIPSSRVVSTRGHRKASSGSGPFRAARIRCSNAASPNASAGAASAEEAAPPPKPQIDLEFVGPKADADGSFPVDRAAAGSGEKLLRDVMVENKIELYAAYGKVMNCGGGGSCGTCIVEIVDGKELLNERTNTENRYLKKKPESWRLACQTIVGNKENSGKVVVQRLPQWKK

SEQ ID NO: 128034 - DNA, 633 bp, Oryza sativa (japonica cultivar-group)
  CDS (1)..(633)
atgggagcgaccatgcagctcgtcgtcggcctcgccggcgtcgcctcctcctccccccgcctcgcgccacactgcgccgtggccacggccaccaccaccagcagctgcagcgtcaggaaacagagctgcagctgctgcggcgccgcccatctgccacggcggctgcagcacaaacagcagaggaggtgcgggattcgtgtccgcgccgtcgagacggacgccgccgccggcggcgaggcgaaggccgcaccggaggagccgccgagcgtcgacttcgcgttcgtcgccccgcggctgctgccggacgggacgccggacgtgcactaccggacggcgtgcggcgggcagaagctccgcgacatcatgctcgacaactacatcgacctctacgggccttacgataagcttctgctcaactgcgagggaggtggagagtgcgggacctgcatcgtcgaggtagttgaaggcggtgaactgctttcccccaaaactgatgttgagaaggaattgctgaaaaggaaaccaaagacatggagattggcgtgccaggctactgtcggcaatccagattcaactggacagatggtcattcagcaattgccggagtggaagatacatgagtgggacaagtag

SEQ ID NO: 128035 - protein, 210 aa, Oryza sativa (japonica cultivar-group)
MGATMQLVVGLAGVASSSPRLAPHCAVATATTTSSCSVRKQSCSCCGAAHLPRRLQHKQQRRCGIRVRAVETDAAAGGEAKAAPEEPPSVDFAFVAPRLLPDGTPDVHYRTACGGQKLRDIMLDNYIDLYGPYDKLLLNCEGGGECGTCIVEVVEGGELLSPKTDVEKELLKRKPKTWRLACQATVGNPDSTGQMVIQQLPEWKIHEWDK

SEQ ID NO: 128036 - DNA, 1758 bp, Archaeoglobus fulgidus DSM 4304
  CDS (1)..(1758): transl_table=11
atgccgattatcactttccttccttcaggcaagcgtgctgaggttgatgaaggtaaaaccattctctctgctgctcaggaaattggtgaaggaattagaagcttatgcggcggaaaagggagttgtggtaagtgtttagtggtggtaaggaagggagatgtggagattttaagtgaggaggctcacgagaagtttgtcagggaaaagggatactacctcgcttgccagactgcagtcaaaggtgatgttgaggtcttcattcctcctgaatcgaggctggaaaggcagcaaatcctcaaggacttcttcatctcctccaaagagttcaacccggttgtgaaggtggagttctgcagcgacgctttccttcctgaagttttgtcgcagaaggggttgaggcttgcttgcagcacagacgtggaggagggcgatttcgggcttgttgtgaggggtaaggaggttatcgatgtccttcccgacgagaaagcctttgggctggctgttgatgtgggcacaacgactattgtagcagctcttgtggatttgaaggatgggaaggtggtgaatgtagcatcagactacaacgggcagattatttacggtgaggaggtgctcagcagggttgagttcgcaagaagcaggaaggatggtgttgaggttctgcagagggctgtggtggagtcgataaacaagctcattgacaaacttctggagggctacgcaacgcctgacagaatctatgatgttgttgccgcaggaaatacaataatgacccactttctggtggggaaggacgtggagtaccttttctcctctcccgatgtaaaagtagaaagggagggttttgtagtaaatgcctcagaaattggattgaaggtgaacagcaacgccgagctcttctgcctgcctccagtgggcagatttgttggcggtgacattgttggcgacattctcgcctcaagaattgtcgattctgccaccatttcgctgatggttgacctcggaaccaatggggagattgttgtggggagtgagggctgggcaatggcgacgagcgtggcgagcgggccggcctttgagggctacgaaatcaagcacggaagcagggcggttgaaggggcgatagaccacgttgaaattgagggcgaggaggtgaggtacactgtaattggcaatggaaagccgaggagcatttgtggtagtgggctaattgacctgatggcggagatgttcaagaacggcattctcgacgctaccggggcgatgaacaaaaagcatccgagagttaggaggggagaggatggctacgaatttgttgtggttgaggctgaaaagtccgctacagccaaagacatcgttttcaccgaaaaggatgtcgaaactttgcttaaatccaaagctgcggtgtgtgcggggatagcggtgctgataaagaaagctggtctgggacttgaggatatagacgagttttacattgcgggagcctttggatactacataaactttgataatgccgttacaattggcttattccccgaactgaaagcggaggtaaagcagataggcaacggctcacttgctggagcatacctcgccctcgtgtcggagagaaaaaggaagcttgcagagacaattgcaaacgccttcgcctactttgacctctcaacggatgcggactttgttgaggaatacagggctgctctctcacttccgggaaggcctgaactctttcccgaaacctacgcaaagtatgtatga

SEQ ID NO: 128037 - protein, 585 aa, Archaeoglobus fulgidus DSM 4304
MPIITFLPSGKRAEVDEGKTILSAAQEIGEGIRSLCGGKGSCGKCLVVVRKGDVEILSEEAHEKFVREKGYYLACQTAVKGDVEVFIPPESRLERQQILKDFFISSKEFNPVVKVEFCSDAFLPEVLSQKGLRLACSTDVEEGDFGLVVRGKEVIDVLPDEKAFGLAVDVGTTTIVAALVDLKDGKVVNVASDYNGQIIYGEEVLSRVEFARSRKDGVEVLQRAVVESINKLIDKLLEGYATPDRIYDVVAAGNTIMTHFLVGKDVEYLFSSPDVKVEREGFVVNASEIGLKVNSNAELFCLPPVGRFVGGDIVGDILASRIVDSATISLMVDLGTNGEIVVGSEGWAMATSVASGPAFEGYEIKHGSRAVEGAIDHVEIEGEEVRYTVIGNGKPRSICGSGLIDLMAEMFKNGILDATGAMNKKHPRVRRGEDGYEFVVVEAEKSATAKDIVFTEKDVETLLKSKAAVCAGIAVLIKKAGLGLEDIDEFYIAGAFGYYINFDNAVTIGLFPELKAEVKQIGNGSLAGAYLALVSERKRKLAETIANAFAYFDLSTDADFVEEYRAALSLPGRPELFPETYAKYV

SEQ ID NO: 128038 - DNA, 615 bp, Arabidopsis thaliana
  CDS (1)..(615)
atgggaagtgtacagttgagtggttccggcctagtagcttctctacctccaaatcatagctttagccacaagaccaaacttaataagccaaattcgtacttctttcgctcaaaacacaatgccgcaagaaccaaaaccgtccgagccataagcaccgcaccagcgagccagcctccagccgctgatgagcccgacgaacctcctgctgtcgattttgcgttcgtccattcggtgttgttgccggacgggacaccggacgtacattggagaagagcgaacggtggacagaaactaagagacataatgttggattctaacatcgaactctatggtccttatagtaagcctttgtcaaactgcgcaggagtaggaacttgcgctacttgcatggtcgagattgtaaatggaaaggagcttctaaatccgcgaactgatattgagaaggagaaactcaaaaggaaaccaaaaaattggagactagcttgtcaaaccaacgtgggaaatccagattctaccggattggttgtcatacaacaattgccagagtggaaagctcatgagtggaacatccctaagaatatacctaatgacgatgatctcgaaacttctacttga

SEQ ID NO: 128039 - protein, 204 aa, Arabidopsis thaliana
MGSVQLSGSGLVASLPPNHSFSHKTKLNKPNSYFFRSKHNAARTKTVRAISTAPASQPPAADEPDEPPAVDFAFVHSVLLPDGTPDVHWRRANGGQKLRDIMLDSNIELYGPYSKPLSNCAGVGTCATCMVEIVNGKELLNPRTDIEKEKLKRKPKNWRLACQTNVGNPDSTGLVVIQQLPEWKAHEWNIPKNIPNDDDLETST

SEQ ID NO: 128040 - DNA, 276 bp, Chlamydophila pneumoniae AR39
  CDS (1)..(276): transl_table=11
atggccaagctagtcattacctctgatgatgaacaacaagagttcgagttagaagacaatagtgagatcgcagagccttgtgaatccatgggcattccctttgcttgtacagaaggtgtctgtggaacttgtgtgatagaggtcttagaaggacgtgagaatctttctgagtttacggaaccagaatacgattttctaggagaacccgaagactctaacgaacgtcttgcttgtcagtgccgcatcaaaggtggctgtgtcaaagttactttctaa

SEQ ID NO: 128041 - protein, 91 aa, Chlamydophila pneumoniae AR39
MAKLVITSDDEQQEFELEDNSEIAEPCESMGIPFACTEGVCGTCVIEVLEGRENLSEFTEPEYDFLGEPEDSNERLACQCRIKGGCVKVTF

SEQ ID NO: 128042 - DNA, 297 bp, Nostoc sp. PCC 7120
  CDS (1)..(297): transl_table=11
atgggtaatatcaaatttgttaaagaagataaagaagtaattgctgcggatggtgcaaatctgcggcttaaggcaatggataatggcgttgatatttataagttgtttggcaaactcacaaattgtggtggtgtcggccaatgcggtacttgtattgttgagatagttgaaggaatcgaaaatctttctactccgacggatgtagaaaatcggatgttaaagaaaaagccagctaattaccgtttggcttgtcaaactttagtaaatggcccagtaagtgtagtaaccaaaccttga

SEQ ID NO: 128043 - protein, 98 aa, Nostoc sp. PCC 7120
MGNIKFVKEDKEVIAADGANLRLKAMDNGVDIYKLFGKLTNCGGVGQCGTCIVEIVEGIENLSTPTDVENRMLKKKPANYRLACQTLVNGPVSVVTKP

SEQ ID NO: 128044 - DNA, 339 bp, Nostoc sp. PCC 7120
  CDS (1)..(339): transl_table=11
atgcctaaggtattagctcagggtaaaacaattgagtgcgatcgcggagagaatttacgcaaagttctgctaaaaagtggtattgacctctacaatagcggtgctaaggtaataaactgtcggggtattggtagttgtggtacctgtgctgtccaagtagaaggtgaagtgtctgtggcgaattggcgagatcaagcacggcgttcgcttcctcctcattctcctacaaaagacctgcgtttagcttgtcagactcaggtattaggtgatgtgaagataacaaaatttgacggattttggggtcaaggttctcagctagtgtggcaaccagaaggttag

SEQ ID NO: 128045 - protein, 112 aa, Nostoc sp. PCC 7120
MPKVLAQGKTIECDRGENLRKVLLKSGIDLYNSGAKVINCRGIGSCGTCAVQVEGEVSVANWRDQARRSLPPHSPTKDLRLACQTQVLGDVKITKFDGFWGQGSQLVWQPEG

SEQ ID NO: 128046 - DNA, 522 bp, Arabidopsis thaliana
  CDS (1)..(522)
atggcttcgttaggtttcaacctcggcttcaccttctccaatgcacaaattcagcagcatcgaaaagtttccggaggtggaagagctcgcgtaatctcctgtaacagctcttcttcttcttcttctcaagcatcatctcctcaggggatttctgcagtgacgcctcttgagatagagctcgagttcttcggtccgaagccgggtagcgacgggtcatatccggtagataaagcaaaggctgtgagtggagataagcttctcagaagcattatgcaggataacaaaattgaactctacgctgcttacgggaaagtgatgaactgtggtggtggaggaagctgtggaacttgcattgtggagatactcgatggcagagatcttctgaatgagagaacagatacagaaaaccggtacctgaaaaagaagccggaatcttggagactcgcatgtcaaacaatagtagggaacaaagaaaactcaggaaaggttgtcgtgcagcggattccacagtggaagaagtga

SEQ ID NO: 128047 - protein, 173 aa, Arabidopsis thaliana
MASLGFNLGFTFSNAQIQQHRKVSGGGRARVISCNSSSSSSSQASSPQGISAVTPLEIELEFFGPKPGSDGSYPVDKAKAVSGDKLLRSIMQDNKIELYAAYGKVMNCGGGGSCGTCIVEILDGRDLLNERTDTENRYLKKKPESWRLACQTIVGNKENSGKVVVQRIPQWKK

SEQ ID NO: 128048 - DNA, 327 bp, Thermosynechococcus elongatus BP-1
  CDS (1)..(327): transl_table=11
atggcaagcaaagctgaattcgtgggcacaaatattaagtttgttaacgaaaacaaagaaattgttgctgccaacggtgcgaatctgcgcttaaaagcaatggaagcgggggttgacctctacacccttaagggcaagctctttaattgtgggggctatgggcagtgtggcacctgtattgttgagattgttgaaggcatggaacacctctcaccccgtacccccgtggaagagcgcaagctccgccgcaagcccgagaattatcgtttggcttgtcaaacccttgtctatgggccagtgtctgtgaagacaaagccaaagggctag

SEQ ID NO: 128049 - protein, 108 aa, Thermosynechococcus elongatus BP-1
MASKAEFVGTNIKFVNENKEIVAANGANLRLKAMEAGVDLYTLKGKLFNCGGYGQCGTCIVEIVEGMEHLSPRTPVEERKLRRKPENYRLACQTLVYGPVSVKTKPKG

SEQ ID NO: 128050 - DNA, 393 bp, Prochlorococcus marinus subsp. marinus str. CCMP1375
  CDS (1)..(393): transl_table=11
ttgaattgcaactttgttgtttttcgaactatgccaattattcgtttcgttagagaaggaagagatgttaagtgtcaatttggagaaaatcttcgagaagttgctttgagggaaggtctggaactttatggattcaaaggaaaattgggaaattgtggagggtatggtcaatgcattacttgttatgtttctgtagcagaagggcaacaagattctttgtcacctattacggacattgagcaaaccaagctgagaggtcgtccaggtaattggagactcgcttgtcaggcggttgtcaaaacttctgcaattgtcctcactaagccacagtctccgccagctaacgttgaatcattgatggatgaagctttgtctaaggatttaccaaaataa

SEQ ID NO: 128051 - protein, 130 aa, Prochlorococcus marinus subsp. marinus str. CCMP1375
MNCNFVVFRTMPIIRFVREGRDVKCQFGENLREVALREGLELYGFKGKLGNCGGYGQCITCYVSVAEGQQDSLSPITDIEQTKLRGRPGNWRLACQAVVKTSAIVLTKPQSPPANVESLMDEALSKDLPK

SEQ ID NO: 128052 - DNA, 306 bp, Bordetella bronchiseptica RB50
  CDS (1)..(306): transl_table=11
gtgaacaccatggtcgaaatcaccttcatcaccaacggcggcaaggtcgtcaccgcgcccgagaacagcaatctgctgcgcgtttccctcaaggagcagggcggcattcccttcaagtgcggcggcgggctgtgcgggacctgcaagtgcctgatcgaatcggggctggagcataccgacgccatcaagcccaaggagcgccggcacctgacgccggaagatttcgagcgcggctaccgcatggcgtgccagacgttcgtcaacggcgacatcaaggtgtcgtggcagaaacccaagcccgtttga

SEQ ID NO: 128053 - protein, 101 aa, Bordetella bronchiseptica RB50
MNTMVEITFITNGGKVVTAPENSNLLRVSLKEQGGIPFKCGGGLCGTCKCLIESGLEHTDAIKPKERRHLTPEDFERGYRMACQTFVNGDIKVSWQKPKPV

SEQ ID NO: 128054 - DNA, 363 bp, Prochlorococcus marinus subsp. pastoris str. CCMP1986
  CDS (1)..(363): transl_table=11
atggcaattatcagattcatccgtgaaggaatagatatcgaatgcaaacctggagaaaatttgagagagttagtaatcagagagaaattacaactttatggattaaagggcatacttggaaattgcggcggtgttgggcaatgcagtacttgttttgtttctgttgaagggggagcgaaaaactcgctaagtcctctaacttctgtcgaggaagaaaaactcaataacagacctgataactggagacttgcctgtcaaactctcatcaattcatcagcggtaatacttactaagcctcaatctcctccatcaaatttgaaagatttgaaagaatctgctgaaagcaaaaaattacctagataa

SEQ ID NO: 128055 - protein, 120 aa, Prochlorococcus marinus subsp. pastoris str. CCMP1986
MAIIRFIREGIDIECKPGENLRELVIREKLQLYGLKGILGNCGGVGQCSTCFVSVEGGAKNSLSPLTSVEEEKLNNRPDNWRLACQTLINSSAVILTKPQSPPSNLKDLKESAESKKLPR

SEQ ID NO: 128056 - DNA, 390 bp, Prochlorococcus marinus str. MIT 9313
  CDS (1)..(390): transl_table=11
atgggttgtcttttgcgttccagatccatgcccatcattcgctttgtccgggaaggcaaagatgttgagtgcaagcaaggcgaaaatctcagggaggttgccttgcgcgaggggatggagctctatgggctgaaaggaaagttggggaactgtggaggttgtggtcagtgcattacttgttttgttggaattgagggggaaagcaaagttggtgcgctttcaccacgaactgaggttgaggaaatcaagctcaagcgccgccctgagaattggcgccttgcttgtcagaccattgttatgtcgtcagtgatcgtcgtgactcgaccacaggaagccctgcttaatgccaagagtcgacttgaggcggcgcgtgcgcaaaagctgtcttaa

SEQ ID NO: 128057 - protein, 129 aa, Prochlorococcus marinus str. MIT 9313
MGCLLRSRSMPIIRFVREGKDVECKQGENLREVALREGMELYGLKGKLGNCGGCGQCITCFVGIEGESKVGALSPRTEVEEIKLKRRPENWRLACQTIVMSSVIVVTRPQEALLNAKSRLEAARAQKLS

SEQ ID NO: 128058 - DNA, 360 bp, Synechococcus sp. WH 8102
  CDS (1)..(360): transl_table=11
gtgcccaccatccgatttgagcaggaaggccagcaggttggatgcatcgaaggcgcgaacctccgcaaggctgcccttgacgccggcatcaatccatacaacggtgtcaacaacctcaacaactgcagtggtgtcggccagtgcggcacctgtgtgatggaagtggtggaaggacaggccaacctctcccctcgcagcgacgttgaggaggtttatcttgctgaccgcccggccaatttccgtctcagctgccggaccaccgttaatggtgatgtcacggttcgcacccgccctgctgagggcgtcggccgtggctctaacagtctgatcggtgccatcaagtcgctgttcggccgctga

SEQ ID NO: 128059 - protein, 119 aa, Synechococcus sp. WH 8102
MPTIRFEQEGQQVGCIEGANLRKAALDAGINPYNGVNNLNNCSGVGQCGTCVMEVVEGQANLSPRSDVEEVYLADRPANFRLSCRTTVNGDVTVRTRPAEGVGRGSNSLIGAIKSLFGR

SEQ ID NO: 128060 - DNA, 462 bp, Synechococcus sp. WH 8102
  CDS (1)..(462): transl_table=11
atgccggtgatccgttttatccgtgaaggtcgtgatgttgagtgttatccgggcgaaaacctgcgggaggtggccctgcgcgagggcatcgagctttacggattgaaaggtcagctggggaactgcggtggctgtggccaatgcattacgtgtttcgtttccgttgtcgatgaaggtgggaagaaggcgttgacggcccgtacgcccgttgaggacaacaagcttcgccgacgtccggccgaatggcgccttgcctgtcaggccttggtggagacgtcggtgatggtcctgacccgcccccaggtgcgcctgccggacgccgacaaccgcttgaacgcagcgcgtcaggcgccacttcctgccggacctctggcctggccagcaccccccgaggccgaagacgagcccgaagaatcatccgatgaggacaccaaggctgctactgccgatgacgaggactga

SEQ ID NO: 128061 - protein, 153 aa, Synechococcus sp. WH 8102
MPVIRFIREGRDVECYPGENLREVALREGIELYGLKGQLGNCGGCGQCITCFVSVVDEGGKKALTARTPVEDNKLRRRPAEWRLACQALVETSVMVLTRPQVRLPDADNRLNAARQAPLPAGPLAWPAPPEAEDEPEESSDEDTKAATADDED

SEQ ID NO: 128062 - DNA, 300 bp, Wolinella succinogenes DSM 1740
  CDS (1)..(300): transl_table=11
atgtctgagaatctaacgagagtggagattgtgaacgacttcctagcgatcaaagttccagaagggtgcacgattcaagaggtggcggagcgctcaggctctagtattccctttggctgtcgagatggcgagtgcggaacatgcgtgatcacagtcgtagaagggatggaatacctaagccccctcaatgagaaggagaaaaaagtcctctccaccatgccagatcacaccatcaatagtcgactctcatgccaaatgaagatcgtgaagggtggcggttatattcgacttcgatattga

SEQ ID NO: 128063 - protein, 99 aa, Wolinella succinogenes DSM 1740
MSENLTRVEIVNDFLAIKVPEGCTIQEVAERSGSSIPFGCRDGECGTCVITVVEGMEYLSPLNEKEKKVLSTMPDHTINSRLSCQMKIVKGGGYIRLRY

SEQ ID NO: 128064 - DNA, 348 bp, Gloeobacter violaceus PCC 7421
  CDS (1)..(348): transl_table=11
atgccacaagtcaaaattttcggcaagacctacacctgcgcccagggagccaacctccgccagtttttgctcgagcagaacgtgcctctgtacaacggcccgtcgtccctgatcaactgccatggcctcggcacctgcggcacctgtgctgtgggtatcgccgggccggtctcagaaccgggcggccgggagaagtttcgtctcggactgcccccgcacaaaggcgtcgaaggcgggcggcggctcgcctgccaggtgacggtcctgggggacatcgaagtgaccaagtacgaagggatatggggcgaaggtgcaagacccgtcgacgaccgcgtctcggcgtcgtaa

SEQ ID NO: 128065 - protein, 115 aa, Gloeobacter violaceus PCC 7421
MPQVKIFGKTYTCAQGANLRQFLLEQNVPLYNGPSSLINCHGLGTCGTCAVGIAGPVSEPGGREKFRLGLPPHKGVEGGRRLACQVTVLGDIEVTKYEGIWGEGARPVDDRVSAS

SEQ ID NO: 128066 - DNA, 297 bp, Gloeobacter violaceus PCC 7421
  CDS (1)..(297): transl_table=11
atggccacgatccatttcgaagccgaaggcacaaccgcctatgtgatggacggtacgatcctgcgcgatgcgatgctcgaaaaacgcatcgatctttataagggtatggccaaggtgctcaactgcggtggggtgggccagtgcggcacctgcatcgtcgatattctctcgggcatcgaacactgttcggagcgcacaccggtagaggatcagaagctgcgcaagaagcccgccacctaccgcctggcttgccagaccctggtcaatggagaggtgcgggtgcgttcaaagccctga

SEQ ID NO: 128067 - protein, 98 aa, Gloeobacter violaceus PCC 7421
MATIHFEAEGTTAYVMDGTILRDAMLEKRIDLYKGMAKVLNCGGVGQCGTCIVDILSGIEHCSERTPVEDQKLRKKPATYRLACQTLVNGEVRVRSKP

SEQ ID NO: 128068 - DNA, 288 bp, Bdellovibrio bacteriovorus HD100
  CDS (1)..(288): transl_table=11
atgccgttgatttcctttaaaaagaacatgcctgccattgaagttcctgccggcaccgtactgatgacggcgttgctggaagcaggccttcctgtggcctccagctgcgacggagatggcgtttgcgcaaagtgcaaaattatcattgtggatggaaaacagaatctatctgctgaaaacgacacggaaaatttcctgcgcgaaaaaaacgggctttcttcggaggttcgcatcagttgccaaacccgggttcagggcgacatcacaatcgacgcgacatactggtga

SEQ ID NO: 128069 - protein, 95 aa, Bdellovibrio bacteriovorus HD100
MPLISFKKNMPAIEVPAGTVLMTALLEAGLPVASSCDGDGVCAKCKIIIVDGKQNLSAENDTENFLREKNGLSSEVRISCQTRVQGDITIDATYW

SEQ ID NO: 128070 - DNA, 543 bp, Arabidopsis thaliana
  CDS (1)..(543)
atggcttcgttaggtttcaacctcggcttcaccttctccaatgcacaaattcagcagcatcgaaaagtttccggaggtggaagagctcgcgtaatctcctgtaacagctcttcttcttcttcttctcaagcatcatctcctcaggggatttctgcagtgacgcctcttgagatagagctcgagttcttcggtccgaagccgggtagcgacgggtcatatccggtagataaagcaaaggctgtgagtggagataagcttctcagaagcattatgcaggataacaaaattgaactctacgctgcttacgggaaagtgatgaactgtggtggtggaggaagctgtggaacttgcattgtggagatactcgatggcagagatcttctgaatgagagaacagatacagaaaaccggtacctgaaaaagaagccggaatcttggagactcgcatgtcaaacaatagtagggaacaaagaaaactcaggaaagtcggctttggatataggttgtcgtgcagcggattccacagtggaagaagtgaattaa

SEQ ID NO: 128071 - protein, 180 aa, Arabidopsis thaliana
MASLGFNLGFTFSNAQIQQHRKVSGGGRARVISCNSSSSSSSQASSPQGISAVTPLEIELEFFGPKPGSDGSYPVDKAKAVSGDKLLRSIMQDNKIELYAAYGKVMNCGGGGSCGTCIVEILDGRDLLNERTDTENRYLKKKPESWRLACQTIVGNKENSGKSALDIGCRAADSTVEEVN

SEQ ID NO: 128072 - DNA, 363 bp, Prochlorococcus marinus str. AS9601
  CDS (1)..(363): transl_table=11
atggcaactatcagatttatccgtgaggacttagaggttcaatgtaatcctggtgaaaatttaagagaactcgtaatgaaagagaatttgcagctttatggactaaaaggtattttgggaaattgtggaggagctggacaatgcagtacttgctttatttcagttgaaggtggaaacaaaaattctttaagccctcttacatcagttgaagaagaaaaactcaaaaatagaccagaaaattggcgactagcatgccaaacattgataaagtcatctgcagtaatcttaacaaaaccacaatcccctccctcaaatttggaagaactaaaaaaaataagtgaaaataaaaaattatcacgctaa

SEQ ID NO: 128073 - protein, 120 aa, Prochlorococcus marinus str. AS9601
MATIRFIREDLEVQCNPGENLRELVMKENLQLYGLKGILGNCGGAGQCSTCFISVEGGNKNSLSPLTSVEEEKLKNRPENWRLACQTLIKSSAVILTKPQSPPSNLEELKKISENKKLSR

SEQ ID NO: 128074 - DNA, 363 bp, Prochlorococcus marinus str. MIT 9515
  CDS (1)..(363): transl_table=11
atgacaactatcagatttatccgagaaggagtggacatcaaatgcaaacctggagaaaatttgagagagttagtaattaaagagaaattacaactttatggattaaagggattattaggcaattgtgggggagttggccaatgtagtacttgctttatttctttggaaggaggaacgaaaaattcgcttagtcctattactgcagttgaacaggaaaaactcaaaaatagacctgaaaactggaggcttgcttgtcaaaccctaataagttcatctgcgataatactcactaaacctcaatctcctccaccaaatttgaaagaattgaaagaatcagctgaaaataaaaaactacctagataa

SEQ ID NO: 128075 - protein, 120 aa, Prochlorococcus marinus str. MIT 9515
MTTIRFIREGVDIKCKPGENLRELVIKEKLQLYGLKGLLGNCGGVGQCSTCFISLEGGTKNSLSPITAVEQEKLKNRPENWRLACQTLISSSAIILTKPQSPPPNLKELKESAENKKLPR

SEQ ID NO: 128076 - DNA, 378 bp, Prochlorococcus marinus str. MIT 9303
  CDS (1)..(378): transl_table=11
ttgcgttccagatccatgcccatcattcgctttgtccgggaaggcaaagatgttgagtgcaaacagggcgaaaatctcagggaggttgccttgcgcgagggaatggagctctacgggctgaaaggaaagttggggaactgtggaggttgtggtcagtgcattacttgttttgttggaattgagggggagagcaaagttggtgcgctttcaccacgaactgaggttgaggaaatcaagctcaagcgccgccctgagaattggcgccttgcttgtcaaaccattgttatgtcgtcagtgatcgtcgtgactcgaccacaggaagccctgcttaatgccaagagtcgtcttgaggaggcgcgtgcgcaaaagctgtcttaa

SEQ ID NO: 128077 - protein, 125 aa, Prochlorococcus marinus str. MIT 9303
MRSRSMPIIRFVREGKDVECKQGENLREVALREGMELYGLKGKLGNCGGCGQCITCFVGIEGESKVGALSPRTEVEEIKLKRRPENWRLACQTIVMSSVIVVTRPQEALLNAKSRLEEARAQKLS

SEQ ID NO: 128078 - DNA, 1593 bp, Leptospira interrogans serovar Copenhageni str. Fiocruz L1-130
  CDS (1)..(1593): transl_table=11
atgattcttgtaaattttgaaaacgaaaaagaaattagtttatccaagccccagaacctgttagaaattagtctaaacaacggtattccacatacacacgcctgcggcggaaatgctcgatgctctacttgtcgcgttttggttttagaaaacccttctcatctatctcctccagaacaaaaagaaaaagaactctctcaaaaaaaaggttttcctaaatccgttcgacttgcgtgccagacaacagttttaggcgacgttcgggttcgaagaatcgttttagacgaagaagattataatcttacaattccaggatcagccacaatttcaggagaagaaaaagaaatcgcgatccttttcagcgatattcgagattttactctattttccgaatcacatcttccttacgatgtaattcatatactcaaccgatatttttataaaatgggggacgtgattttaaaacacggaggtaaaatagataaatatatcggagacggactcatggctctcttcggagttaacggtggttctcctcaagaaatttgtatctccgctctgcgtgccgccaaggagatggagttagaactctactcccttaacgaatatctaaagtctcatcttcatacttcgttccgtatcggcgtaggagtacattacggaaattgtatattaggacaattgggtcatcctgcaaatatgtcttacacggctatcggtgattccgtaaacatagcgagcagaatcgaatctaaaaccaaaaaatcgggcgcttccgttttgatttccgaatctctctacaaacaagtaaaagaaaaagttgtcaaaggcagagttttttccgcacaactcaaaggaaaaaccggaaattataaactctatgagattcaggaaattttggaaaaagtagatgcgaatctctgggaagaagctaaaaattctctccgaagaatcatacttgttcgagaagtaggaagttggttaaaactagtttaccatctctcttgtctttttgacgaaaatcaaaactggatcggactttctgctgcaaactcttttcaaaagttttccaaacttccggaaaacggagatttggttcaaaatttttatcaaatcaaagatacgtttaacgaacaatttcaaaactctttttcctttgcagaccttttagctctcgccggtgcagtcgctatcgaaaaatcaggtggcccaaaaatcccgattcaacctggaagaaaagatcgattgttaagcgaagtatttcaaattcttccactgagtatgcagactcaaaaagaccaactcccatatcttcaaaaaatgaaactgggaattagagatatagtcctgatttcaggagcgcgtacaatcggatggttaggcggggaatcgtttacttcgaacccttataactttgataatagttatttccatgttcttctcaaagcgggattagaaggtccattattgattccgaacgatagagaacttttgaaaaacgatgaatccagagcctttgtgttggattacgccctggatccttctaagtttttcgaagactttacttctacatacttaaaacttacaagttaa

SEQ ID NO: 128079 - protein, 530 aa, Leptospira interrogans serovar Copenhageni str. Fiocruz L1-130
MILVNFENEKEISLSKPQNLLEISLNNGIPHTHACGGNARCSTCRVLVLENPSHLSPPEQKEKELSQKKGFPKSVRLACQTTVLGDVRVRRIVLDEEDYNLTIPGSATISGEEKEIAILFSDIRDFTLFSESHLPYDVIHILNRYFYKMGDVILKHGGKIDKYIGDGLMALFGVNGGSPQEICISALRAAKEMELELYSLNEYLKSHLHTSFRIGVGVHYGNCILGQLGHPANMSYTAIGDSVNIASRIESKTKKSGASVLISESLYKQVKEKVVKGRVFSAQLKGKTGNYKLYEIQEILEKVDANLWEEAKNSLRRIILVREVGSWLKLVYHLSCLFDENQNWIGLSAANSFQKFSKLPENGDLVQNFYQIKDTFNEQFQNSFSFADLLALAGAVAIEKSGGPKIPIQPGRKDRLLSEVFQILPLSMQTQKDQLPYLQKMKLGIRDIVLISGARTIGWLGGESFTSNPYNFDNSYFHVLLKAGLEGPLLIPNDRELLKNDESRAFVLDYALDPSKFFEDFTSTYLKLTS

SEQ ID NO: 128080 - DNA, 339 bp, Anabaena variabilis ATCC 29413
  CDS (1)..(339): transl_table=11
atgcctaaggtattagctcagggtaaaacaattgagtgcaacaacggagaaaatttacgcaaagttctgctaaaaagtggtattgacctctacaatagcggtgctaaggtaataaactgtcggggtattggtagttgtggtacctgtgctgtccaagtagaaggtgaagtgtctgtggcgaattggcgagatcaagcacggcgatcgcttcctcctcattctcctacaaaagacctgcgtttagcttgtcagactcaggtattaggtgatgtaaaggtaacaaaatttgacggattttggggtcaaggttctcaagtagtgtggcaaccagaaggttag

SEQ ID NO: 128081 - protein, 112 aa, Anabaena variabilis ATCC 29413
MPKVLAQGKTIECNNGENLRKVLLKSGIDLYNSGAKVINCRGIGSCGTCAVQVEGEVSVANWRDQARRSLPPHSPTKDLRLACQTQVLGDVKVTKFDGFWGQGSQVVWQPEG

SEQ ID NO: 128082 - DNA, 297 bp, Anabaena variabilis ATCC 29413
  CDS (1)..(297): transl_table=11
atgggtaatatcaaattcgttaaagaagataaagaagtaatcgctgcggatggtgcaaatctgcggcttaaggcaatggataatggcgttgacatttataagttttttggcaaactcacaaattgtggtggtgtcggtcaatgtggtacttgtattgttgagatagttgaaggaatcgaaaatctttctactccgacagatgtggaaaatcggatgttaaagaaaaagccagctaattaccgtttggcttgtcaaactttagtaaatggcccagtaagtgtagtaaccaaaccttga

SEQ ID NO: 128083 - protein, 98 aa, Anabaena variabilis ATCC 29413
MGNIKFVKEDKEVIAADGANLRLKAMDNGVDIYKFFGKLTNCGGVGQCGTCIVEIVEGIENLSTPTDVENRMLKKKPANYRLACQTLVNGPVSVVTKP

SEQ ID NO: 128084 - DNA, 477 bp, Synechococcus sp. CC9605
  CDS (1)..(477): transl_table=11
atgcccgttatccgttttgttcgcgaagggcgtgatgtggagtgttatcccggtgagaatctgcgtgaggtagcccggcgtgagggcatcgagctctatggtctgaaggggcagctgggcaactgtggaggctgtggtcagtgcatcacctgctttgtttccgtggtcgacgaagacaatgccgatgcactgacggcacgcaccgccgtcgaagacagcaagctgcgccgccgaccccaggagtggcgtctggcctgccaggccctggtggagaagtccgtcatggttctcacccggcctcaggtgaggctcgccaatgccgattcgagattggctgcggccaggcaggcgccgctgccggcgggccccaccgcatggccagcgcctccggccagtgaactcgatgaggaggatcaggatggggtcgatggcgacagccgagatgccaaagctgctaccgccggtgaagaggcctag

SEQ ID NO: 128085 - protein, 158 aa, Synechococcus sp. CC9605
MPVIRFVREGRDVECYPGENLREVARREGIELYGLKGQLGNCGGCGQCITCFVSVVDEDNADALTARTAVEDSKLRRRPQEWRLACQALVEKSVMVLTRPQVRLANADSRLAAARQAPLPAGPTAWPAPPASELDEEDQDGVDGDSRDAKAATAGEEA

SEQ ID NO: 128086 - DNA, 399 bp, Synechococcus sp. CC9605
  CDS (1)..(399): transl_table=11
atgcttgtaggttggttcgcactgagatttgcggaacccgtgcccaccatccgattcgagcaggaaggccagcaggttggctgcatcgagggcgcaaatctgcgaaaggctgcacttgatgcgggcgtcaatccctacaagagtctcaacaacctcaacaactgcagtggggttggtcagtgcggcacctgcgtgatggaggtgctcgagggacaggccaacctttcccctcgcagcgatgttgaagaggtctacctcgcagaccgtcctgcgaacttccgcctgagctgccgcaccacagtgtttggtgatgtcaccgttcgcaccagtcccgctgaaggtgtgggccgcggctccaacagcctcgttggtgcgatcaaatccctgttcggccgctga

SEQ ID NO: 128087 - protein, 132 aa, Synechococcus sp. CC9605
MLVGWFALRFAEPVPTIRFEQEGQQVGCIEGANLRKAALDAGVNPYKSLNNLNNCSGVGQCGTCVMEVLEGQANLSPRSDVEEVYLADRPANFRLSCRTTVFGDVTVRTSPAEGVGRGSNSLVGAIKSLFGR

SEQ ID NO: 128088 - DNA, 363 bp, Prochlorococcus marinus str. MIT 9312
  CDS (1)..(363): transl_table=11
atggcaactatcagatttatccgtgaggatttagaggttcaatgcaatcctggtgaaaatttaagagaattagtaataaaagagaacttacagctttatggattgaaaggtattttaggaaactgtggaggggcaggacaatgcagtacttgttttatttcagttgaaggaggcaacaaaaattctttaagccctcttacttccgttgaagaagaaaaactcaaaaatagaccagaaaattggcgacttgcatgccaaacattaataaaatcttctgcagtaatcttaacaaaaccacaatcgcccccttcaaatttggaagaattaaaaaatattagtaaaaataaaaaattacctcgctaa

SEQ ID NO: 128089 - protein, 120 aa, Prochlorococcus marinus str. MIT 9312
MATIRFIREDLEVQCNPGENLRELVIKENLQLYGLKGILGNCGGAGQCSTCFISVEGGNKNSLSPLTSVEEEKLKNRPENWRLACQTLIKSSAVILTKPQSPPSNLEELKNISKNKKLPR

SEQ ID NO: 128090 - DNA, 435 bp, Synechococcus elongatus PCC 7942
  CDS (1)..(435): transl_table=11
atgccgagcattcgctttatccgtgaagacaaagaggtctttgccgctgatggggccaacctccgcttcaaagctgtagagaaccaagtggacctctacaccttcggcggcaagatgatgaactgcggcggctacggccaatgcgggacttgcatcgtcgaaattgttcagggcgctgagaatctctcgccccgtacgtcttttgaggagcgcaagctcaagcgcaagcctgattcctaccgtcttgcctgccaagcgaccgtcaatggacccgtgacggtgttgaccaaacccaacccgaaagaggcccaacgcgagactctgatcgctcaggatttagctcggccaattccggtaacagcgccgcctgcactgccacaaactgagactgaagtggccggcgatccaccgtcgatcgcaacagctgagacctaa

SEQ ID NO: 128091 - protein, 144 aa, Synechococcus elongatus PCC 7942
MPSIRFIREDKEVFAADGANLRFKAVENQVDLYTFGGKMMNCGGYGQCGTCIVEIVQGAENLSPRTSFEERKLKRKPDSYRLACQATVNGPVTVLTKPNPKEAQRETLIAQDLARPIPVTAPPALPQTETEVAGDPPSIATAET

SEQ ID NO: 128092 - DNA, 1908 bp, Moorella thermoacetica ATCC 39073
  CDS (1)..(1908): transl_table=11
gtggatcagtttgctgtcacctttttacctgataatatcaccgtccgggtggcggctggtaccagcattatggaggcggccaaccaggccggcctgcccctgaaaagcacctgcggcggggccggcacctgtggtcgctgtgccatcaaggtccaggaggggaaagttgaggtcaggggaggccatcttccggcccgtttaagggaagagggctattccctggcgtgccagaccatggttatgggagatgctataatagccatcccaccggaatcccgcctgggccggcaccaggtattactgcaggataaaggacgcctgcaggacagcctgactgatctactgggcagttatccccttgacccggcgtgtagcgttgcctccctggtcttgccggaaccgacgctgactgaaaacaccagtgatgccagccgcctgctggccaccctgcgcaaggaaaagggcctggaggggcaactcgacctggtcttcttgcaggagttaccggatagcctgcgccaggccaactggcaagtagatgttaccctggccgcgggaagtaatcgtcttatccggatcacccccctgggggaaacaagagccttcggcttggctattgacctgggtacaaccacggtagtggtatccctgctggacctgcgcagtggcgaacgggtgatgcgcaagggcagttataaccgccaggcagtttatggtgatgacgttatctcccggattattcacgccaccagtaatgaggggggcctggaggaattacgccaggcggccctggctaccattaacgatttaataacagcggtcctgacttccgggggaattgatccggcagaggtaacggcagcaactatagccggcaataccaccatgactcacctgttgctgggaataaaccccaggtacctccgcctgcagccctatataccggcagcagccgaattgccggtactgaaggccgccgaggtggggttaaagattaatccgctggctccggtccaaatcttcccggcggtagccagctatgtaggcggggacatcgtctccggcgccctctttacccggattgccagtagtgaagaattgaccctcttcattgacatcggcaccaacggggaaatggtcctgggcaacagcgactggctgatctcctgtgcctgttcggccgggccggcttttgagggcagcggcattacctgcggtatgcgggccatggaaggagcaatcgaaggggtgagcatcgacccggataccctggaagtcgagttggaggtaatcggcggtggtcgcccgtccgggatatgtggtagcggtttaattgactgcctggcaaagctccggcgcgcgggtattattgaccgcaccggcaacttccaggaagtagccaccccacggctgcgtaccactgacgaaggcccggaatttgtcctggcctgggctacccagagcagtacccagcgggatattgtcctgaccgccgccgacattaaaaaccttattcgttccaagggagccgttttcgccggcatccagagcctgctcaaaacagtctcccttgaaatagacgccatcgaaaggatcatcatcgccggtgggttcggcaattacctccatatccccaatgccgtagagatcggcctgttacccgacctaccgccggagaaatatatttttgccggcaatacttccctgaagggagccgagctggccctcctttcccagccggcctggcaggaaaccctggaactggcccgcaggatgacctacctggagctttcagccggcaacctcttcatggaagagtttgtatcggccctgttcctgccccataccaggctggaactcttcccatccgtggggaatgggtccggcgacgaaaggaggtcgggttaa

SEQ ID NO: 128093 - protein, 635 aa, Moorella thermoacetica ATCC 39073
MDQFAVTFLPDNITVRVAAGTSIMEAANQAGLPLKSTCGGAGTCGRCAIKVQEGKVEVRGGHLPARLREEGYSLACQTMVMGDAIIAIPPESRLGRHQVLLQDKGRLQDSLTDLLGSYPLDPACSVASLVLPEPTLTENTSDASRLLATLRKEKGLEGQLDLVFLQELPDSLRQANWQVDVTLAAGSNRLIRITPLGETRAFGLAIDLGTTTVVVSLLDLRSGERVMRKGSYNRQAVYGDDVISRIIHATSNEGGLEELRQAALATINDLITAVLTSGGIDPAEVTAATIAGNTTMTHLLLGINPRYLRLQPYIPAAAELPVLKAAEVGLKINPLAPVQIFPAVASYVGGDIVSGALFTRIASSEELTLFIDIGTNGEMVLGNSDWLISCACSAGPAFEGSGITCGMRAMEGAIEGVSIDPDTLEVELEVIGGGRPSGICGSGLIDCLAKLRRAGIIDRTGNFQEVATPRLRTTDEGPEFVLAWATQSSTQRDIVLTAADIKNLIRSKGAVFAGIQSLLKTVSLEIDAIERIIIAGGFGNYLHIPNAVEIGLLPDLPPEKYIFAGNTSLKGAELALLSQPAWQETLELARRMTYLELSAGNLFMEEFVSALFLPHTRLELFPSVGNGSGDERRSG

SEQ ID NO: 128094 - DNA, 1917 bp, Desulfitobacterium hafniense Y51
  CDS (1)..(1917): transl_table=11
atggagaaataccaggttaaatttatgccggatcagcaagtgattgaggtggaaaaaggaacctccctgctcaaagcagcttctcaggcaggtatttttataaaatccagctgcggcggcaaaggtacctgtggtgcctgtaaagttacggtgatatccggtgaagccaaaagtgaaagaacgggaaatttatctccggaacaactgagccgtggggtgcgtttaagctgccacacctttgttgaaggggatctgaccgttgaggtcccaccggaatcacgcctacaagcacatcaggttcttcttgagaatgccaatgcagcgctgctcacagaaaccagtaaagatctgttaacttattatgggtatcatcccctggcccgcaaggtcaatattcgttgctctgaacctaccctaacggataatgccggcgactgggctcgtttgtcccttgagttaaagcgggtgcttcaatccgataaacctttgaccattcccttatccgtattgcaaactttgccggaaaccttgcgtcaggcacattgggacctatccgttattttaacggatttagaattagggtacactgtgctccatgtggagcctgccaatgaccgcccgtgctatggtttggcaattgatgtgggtaccaccaccgtggttgtctacttggtcgatctggatagcggagaaatcgtggataaacaaggctcctacaataagcaagcccaatttggggatgatgtcatttcgcggattgtctatgcggttgatagtaaggagaacatggctgagattcaaaaagccgtagtggataccgtcaatgcccttattgatggaatacttgagcggcaaagcctgaccagccaggatatagccagtgcggtgatcgccggcaatacgaccatgtcgcagctcttcttaggcatcaacccccgttatattcgcttagaaccctacatcccaaccgtcaattccacaccggcggtatcagcgcgggaaatagggcttagacttcttcctgaggcactcattcatacctatccttcagtggccagttatgtgggcggagatatcgtttccggtgctttagccacagatatggccaactccgatgagattattttatttatcgatatcggaaccaatggggagatagtgctggggaataaggattggcttgtttcttgtgcctgctcggccggaccgtgttttgaaggaggaggaattctctttggcatgagagctatgcccggtgctattgagcgggtggacattgatccggaaagccttgatgtcaagctgaaagtggtcggcaagattgctcctgttggcatctgcggctcgggattagtggattgcctggccaagctgcgcaaggcaggaattatcgatcgtgccggaaacttccaattggaacatccttcccaatcggcgcggattcgtgccaccgaggatgataaagagtttgttttggcttgggcccatcaggcagggggagataaggacattgtcatttccgaaaatgatgtgaagaatctgattcgggctaaaggggcgatctatgcagggattcgttcattgctgcaaacagtggccctggaaattgatatgatcgagcgaatcgtcattgggggcggcttcggcaattacctcaatgttcacgattcggtagaaataggcctgcttcccgacctgcctcaggaaaagtttgagttcataggcaattcttctgttaaaggggcacgtcttgccttgctttcgcagaaggcttggaacgaggctgccgatcttgcccgcaagatgacctatattgaactgtccattggcaccacttttatggatgagtttgtatcggccttgttcctgccccatactgatttatcgttatttccttctgtagaaggaacattttag

SEQ ID NO: 128095 - protein, 638 aa, Desulfitobacterium hafniense Y51
MEKYQVKFMPDQQVIEVEKGTSLLKAASQAGIFIKSSCGGKGTCGACKVTVISGEAKSERTGNLSPEQLSRGVRLSCHTFVEGDLTVEVPPESRLQAHQVLLENANAALLTETSKDLLTYYGYHPLARKVNIRCSEPTLTDNAGDWARLSLELKRVLQSDKPLTIPLSVLQTLPETLRQAHWDLSVILTDLELGYTVLHVEPANDRPCYGLAIDVGTTTVVVYLVDLDSGEIVDKQGSYNKQAQFGDDVISRIVYAVDSKENMAEIQKAVVDTVNALIDGILERQSLTSQDIASAVIAGNTTMSQLFLGINPRYIRLEPYIPTVNSTPAVSAREIGLRLLPEALIHTYPSVASYVGGDIVSGALATDMANSDEIILFIDIGTNGEIVLGNKDWLVSCACSAGPCFEGGGILFGMRAMPGAIERVDIDPESLDVKLKVVGKIAPVGICGSGLVDCLAKLRKAGIIDRAGNFQLEHPSQSARIRATEDDKEFVLAWAHQAGGDKDIVISENDVKNLIRAKGAIYAGIRSLLQTVALEIDMIERIVIGGGFGNYLNVHDSVEIGLLPDLPQEKFEFIGNSSVKGARLALLSQKAWNEAADLARKMTYIELSIGTTFMDEFVSALFLPHTDLSLFPSVEGTF

SEQ ID NO: 128096 - DNA, 279 bp, Burkholderia xenovorans LB400
  CDS (1)..(279): transl_table=11
atgatccagattacttttctcagcaatgacaacaagtgcgtcagcgcgccccccaacagcaatctgcttcgcgtttccctgcgcgaaaaaggcggtattccgttcaagtgcggcggcggcctttgcggcacgtgcaggtgcaaggtcgaacagggcatagagaataccgacgccgtgaaggagaaggaaaagcggcacctgagcgccgctgaactcgaggcaggctaccggatggcctgtcagacattcgtcaacggagacgtgagcgtgtcatggtga

SEQ ID NO: 128097 - protein, 92 aa, Burkholderia xenovorans LB400
MIQITFLSNDNKCVSAPPNSNLLRVSLREKGGIPFKCGGGLCGTCRCKVEQGIENTDAVKEKEKRHLSAAELEAGYRMACQTFVNGDVSVSW

SEQ ID NO: 128098 - DNA, 309 bp, Trichodesmium erythraeum IMS101
  CDS (1)..(309): transl_table=11
atgatggccaacattaagtttgaaaacgaaaatcaggaagtaattgctgctgatggagccaatttaaggctcaaagctctagaaaatcgcgttgacatttacacctttacggccaaattgatgaattgtggtggctatggacagtgtggcacttgtgttgtagaaattattgaaggtctggaaaatctttcaccccgtactgaggtggaagaaaaaaagttaaaaaagaggcctgaaaactggagattagcttgtcaggtcctagtgaacggtcctgtggttgtcaaaacaaaaccaaaacgtaaataa

SEQ ID NO: 128099 - protein, 102 aa, Trichodesmium erythraeum IMS101
MMANIKFENENQEVIAADGANLRLKALENRVDIYTFTAKLMNCGGYGQCGTCVVEIIEGLENLSPRTEVEEKKLKKRPENWRLACQVLVNGPVVVKTKPKRK

SEQ ID NO: 128100 - DNA, 594 bp, Synechococcus sp. CC9311
  CDS (1)..(594): transl_table=11
ttgatttgttttccccgcagtcctgtcagtgcttccgtcccttgcctgccgcattcgggtctggccgagggggttacaaaacgcaacctttgggcgcaaagtgggcgtttattgctggggcactccatgccagtcattcgttttctgcgtgaaggacgtgatgtggagtgttatcccggtgaaaatttgcgcgacgtcgctctgcgagaaaacatcgagctttacggcttgaagggacagctcgggaattgtggtggatgcggtcagtgcattacctgtttcgtcgatgttgtgggatccgatgccgacgcgcctttaacggcaagaaccgttgttgaagacaacaagctcaggcggcgtcccgagtcctggagattggcttgtcaagcgttggtggagcaatccgtgatcgtgttgacacgcccgcaagttcgtttggctgaactcgataagaaaaaagcagcagctcgctcagaagccctgccagcagggccaactgcgtggccgtttgtcgagggcgctgaagacgctgaagaaggctcgaaacaggagactgattccgcttcggctgctacgcccagtgacgaggggtga

SEQ ID NO: 128101 - protein, 197 aa, Synechococcus sp. CC9311
MICFPRSPVSASVPCLPHSGLAEGVTKRNLWAQSGRLLLGHSMPVIRFLREGRDVECYPGENLRDVALRENIELYGLKGQLGNCGGCGQCITCFVDVVGSDADAPLTARTVVEDNKLRRRPESWRLACQALVEQSVIVLTRPQVRLAELDKKKAAARSEALPAGPTAWPFVEGAEDAEEGSKQETDSASAATPSDEG

SEQ ID NO: 128102 - DNA, 360 bp, Synechococcus sp. CC9311
  CDS (1)..(360): transl_table=11
gtgcccaccatccgttttgagcaggaaggccaacaggtcggttgcatcgaaggagcgaatttacgcaaagcagccctttcatccggggtcaatccttataagggttttaataacctcaacaactgtggcggggttggccagtgcggaacctgtgtgatcgaggttctcgaaggagctcagaacctttcaccacgaagcgatgtggaagaggtttatctttctgaccgtcctgcgaactatcgcttgagctgccgcacgagtgtgaatggcgatgtgaccgttcggactcgccccgacgaaggagttggcaagggttcaaacagcttgctaggtgctgtgaagaacttgtttggacgttga

SEQ ID NO: 128103 - protein, 119 aa, Synechococcus sp. CC9311
MPTIRFEQEGQQVGCIEGANLRKAALSSGVNPYKGFNNLNNCGGVGQCGTCVIEVLEGAQNLSPRSDVEEVYLSDRPANYRLSCRTSVNGDVTVRTRPDEGVGKGSNSLLGAVKNLFGR

SEQ ID NO: 128104 - DNA, 339 bp, Nostoc punctiforme PCC 73102
  CDS (1)..(339): transl_table=11
atgcctaaagtactagctgaaggtaaaacaattcagtgcgtaagcggaagcaatctccgaacaattttgctgcaaaatggtattcacctctacaatgacggtgctaaggtaataaactgtcggggcattggcagttgcggaacctgtgcggttaaggtagagggcgaagtatcagcagcgaattggcgcgatcgagcccggcgttcgcttcctccccattctcctaaaacagacttgcgtttagcctgccaaactcaggttttaggcgatgtgaaagtgacaaagtttgatggattttggggacaaggttctcgaatagtgtggacaccaaaaggttaa

SEQ ID NO: 128105 - protein, 112 aa, Nostoc punctiforme PCC 73102
MPKVLAEGKTIQCVSGSNLRTILLQNGIHLYNDGAKVINCRGIGSCGTCAVKVEGEVSAANWRDRARRSLPPHSPKTDLRLACQTQVLGDVKVTKFDGFWGQGSRIVWTPKG

SEQ ID NO: 128106 - DNA, 297 bp, Nostoc punctiforme PCC 73102
  CDS (1)..(297): transl_table=11
atgggtaatatcaaattcgttaaagagaataaagaagtagtagcggcggatggtgccaatctccgactcaaagccatgcaaaatgacattgatatatatacattcattggcaagatgaccaattgcggtggtaatggtcaatgtggtacttgcattgttgaaatagtcgaaggactagaaaatctttccccccgcacagacgtagaaaatcgtaaattcaagaaaaagcctgaaaattaccgccttgcgtgtcaaactttagtgaatggctcagtcagcgtagttacgaagccttaa

SEQ ID NO: 128107 - protein, 98 aa, Nostoc punctiforme PCC 73102
MGNIKFVKENKEVVAADGANLRLKAMQNDIDIYTFIGKMTNCGGNGQCGTCIVEIVEGLENLSPRTDVENRKFKKKPENYRLACQTLVNGSVSVVTKP

SEQ ID NO: 128108 - DNA, 360 bp, Crocosphaera watsonii WH 8501
  CDS (1)..(360): transl_table=11
atgtttaagattgctgctcaaggaaaaactatcacttgtgatcaaggggaaaatttacgccgtgttcttattaatcataagattgatcttcataacggtaactcaaaaataatcaattgtcggggtattggaagctgcggaacttgttctttagaaatagagggtttagtttctgaagctaactggaaagataaagcaagacgctcttttcctccccattctccagaaaaaaatcgccgtttagcttgtcaaactaaagtgtatggagacttaaaattaactaaatatgatggtttttggggacagggtgataaggtagtttggaatgctaaaaacaccatctttaaagacggtgtttaa

SEQ ID NO: 128109 - protein, 119 aa, Crocosphaera watsonii WH 8501
MFKIAAQGKTITCDQGENLRRVLINHKIDLHNGNSKIINCRGIGSCGTCSLEIEGLVSEANWKDKARRSFPPHSPEKNRRLACQTKVYGDLKLTKYDGFWGQGDKVVWNAKNTIFKDGV

SEQ ID NO: 128110 - DNA, 333 bp, Crocosphaera watsonii WH 8501
  CDS (1)..(333): transl_table=11
ttgttttatatagatcggcgtaatgcaaggaggcagatgactattaaatttgttaaagaggataaagaggttgtctcagcacaaggggctaacctacgggaaaaagctctacaaaataaagttgatatttataccttcaagggtaaacttatgaactgcggtggttatgggcaatgtggaacctgtctggtggaaatcgtggaagggatgggaaatgtttccccccgtaccgattttgaacaacgagtcctcaagaaaaagcctgataatcaccgtcttgcttgccaaaccctagtcaatggcccgatagcagtggttactaagccgaaataa

SEQ ID NO: 128111 - protein, 110 aa, Crocosphaera watsonii WH 8501
MFYIDRRNARRQMTIKFVKEDKEVVSAQGANLREKALQNKVDIYTFKGKLMNCGGYGQCGTCLVEIVEGMGNVSPRTDFEQRVLKKKPDNHRLACQTLVNGPIAVVTKPK

SEQ ID NO: 128112 - DNA, 363 bp, Prochlorococcus marinus str. MIT 9211
  CDS (1)..(363): transl_table=11
atgccaacggttcgttttattcgagaaggaagggatgttaaatgcgaagttggcgaaaatttgagagaagttgctttaaaggagggtctgcaactttatggtcttaaaggtgtcttgggaaattgtggtggatgtggtcaatgcattacatgctttgtttcggttgaaggaggtggtaaggactccttatccccattaactgaggttgagaatgcaaaattgtccaaccgtcccaagaactggagactctcatgtcaatgccttgttaaatcttctctggttgttttgacaaaacctcaggcccctcctcctaattcaaaagctcttattcaagcagctcttggaaaggatctgcctacttga

SEQ ID NO: 128113 - protein, 120 aa, Prochlorococcus marinus str. MIT 9211
MPTVRFIREGRDVKCEVGENLREVALKEGLQLYGLKGVLGNCGGCGQCITCFVSVEGGGKDSLSPLTEVENAKLSNRPKNWRLSCQCLVKSSLVVLTKPQAPPPNSKALIQAALGKDLPT

SEQ ID NO: 128114 - DNA, 468 bp, Synechococcus sp. RS9917
  CDS (1)..(468): transl_table=11
atgccggtgatccgatttgttcgagaaggtcgcgacgtggagtgttacccaggcgaaaacctgcgcgacgtggcgttgcgggaagggatcgctctctacgggctcaaaggtcagctgggcaattgcggcggctgcggacagtgcatcacctgctttgtggatgtgcaggaagggggagcgctgggggccctttcgccccgcacggctgtggaggaggccaagttgcgccggcgaccccagtcctggcggctggcttgccagaccctggtggaagggtcggtgttgatcatgacgcgcccgcaggcgggcctggctgatgctgcggcccggttggccgctgcacaggcgacgccgttgccggcggggcccaccgcctggccggtcacgcaggagccagaggcctcctctgacgacgaggaggtgagcgcatcgctcgatgaagctgctacgcccggtgacgaggactga

SEQ ID NO: 128115 - protein, 155 aa, Synechococcus sp. RS9917
MPVIRFVREGRDVECYPGENLRDVALREGIALYGLKGQLGNCGGCGQCITCFVDVQEGGALGALSPRTAVEEAKLRRRPQSWRLACQTLVEGSVLIMTRPQAGLADAAARLAAAQATPLPAGPTAWPVTQEPEASSDDEEVSASLDEAATPGDED

SEQ ID NO: 128116 - DNA, 363 bp, Synechococcus sp. WH 5701
  CDS (1)..(363): transl_table=11
gtgcccaccatccgcttcgataatgaagaccagaaggttggttgtatcgagggggccaacctgcgccaggcggctttggatgccggcatcaacccctacaagggtctgaacaacctcaacaattgcggcggcctgggccagtgcggcacctgcgtcgtcgaggtgcttgagggcgcccagaatctttcgccccgcagcgatgtcgagcaggtttacctgtctgatcgcccagccaactaccgcctcagctgccgcaccagcgtcaacggcgacgtgaccatccgcacccggccggacgccgccgtgggcaagggctccaacagccttgtcggtgcgctgaaatcgctcgtcgggcggaagtga

SEQ ID NO: 128117 - protein, 120 aa, Synechococcus sp. WH 5701
MPTIRFDNEDQKVGCIEGANLRQAALDAGINPYKGLNNLNNCGGLGQCGTCVVEVLEGAQNLSPRSDVEQVYLSDRPANYRLSCRTSVNGDVTIRTRPDAAVGKGSNSLVGALKSLVGRK

SEQ ID NO: 128118 - DNA, 360 bp, Synechococcus sp. WH 7805
  CDS (1)..(360): transl_table=11
gtgcccaccatccgttttgagcaggaaggccagcaggtcggttgtatcgaaggtgccaatctgcgcaaagcggctcttgcttcaggcattaatccctacaaaggcctgaataacctcaataactgcggaggcgttggccaatgcggcacctgcgtcgtggaggttctggagggttcccagaatctttccccccgcagcgatgttgaagaggtctatctctctgatcgaccagccaactatcgcctcagctgtcgcacgagtgtgaacggagacgtcacgatccgtacccgtcctgacgatggtgtcggcaaaggttccaacagccttctcggtgctgtgaagagccttctaggccgttga

SEQ ID NO: 128119 - protein, 119 aa, Synechococcus sp. WH 7805
MPTIRFEQEGQQVGCIEGANLRKAALASGINPYKGLNNLNNCGGVGQCGTCVVEVLEGSQNLSPRSDVEEVYLSDRPANYRLSCRTSVNGDVTIRTRPDDGVGKGSNSLLGAVKSLLGR

SEQ ID NO: 128120 - DNA, 489 bp, Synechococcus sp. WH 7805
  CDS (1)..(489): transl_table=11
atgcctgtgatccggtttgtacgtgaaggtcgcgacgtggagtgctatccgggagagaacctccgcgacgtggctcttagggagggaatacagctgtatggcctgaaaggccagctggggaactgtggtggatgtgggcagtgcattacctgttttgttgaggtcaaaggggatcaggcggccgccaactccctctctggccgaacagctgtagaggattccaagctccgccgccggcctggtagttggagactcgcctgccaggctctcgttgaacgttccgttgtcatcctcacaaggccgcaggtgtcgatgggtgatcagcgccgacgcattgaggcggctctcagtgcacctctaccgccagggcccacggcatggcctgtggtggaaagcagtgaggatgacgatgaaggggctggcgatgatgaggatcttcaaaagcagtcatccacagacgctcctgctacacccggtgacgagccgtga

SEQ ID NO: 128121 - protein, 162 aa, Synechococcus sp. WH 7805
MPVIRFVREGRDVECYPGENLRDVALREGIQLYGLKGQLGNCGGCGQCITCFVEVKGDQAAANSLSGRTAVEDSKLRRRPGSWRLACQALVERSVVILTRPQVSMGDQRRRIEAALSAPLPPGPTAWPVVESSEDDDEGAGDDEDLQKQSSTDAPATPGDEP

SEQ ID NO: 128122 - DNA, 360 bp, Synechococcus sp. RS9916
  CDS (1)..(360): transl_table=11
gtgcccaccatccgttttgagcaggaaggccagcaggtcggttgcatcgagggagcgaatcttcgcaaggctgctctctctgcaggtatcaacccctacaagggcctcaacaacctcaacaactgtggtggcgtcggtcagtgcggcacctgtgtggtggaagtcgtcgaaggcgctcagaatctttccccccgcagcgatgtggaagaggtgtatctcgcagatcgccccgccaactaccgcctcagctgccgcaccagcgtcaacggtgatgtgaccgtgcgcacccgcccctccgacggcgtcggcaagggctccaacagcctgctgggtgctgtgaagaacctcttcggcaagtga

SEQ ID NO: 128123 - protein, 119 aa, Synechococcus sp. RS9916
MPTIRFEQEGQQVGCIEGANLRKAALSAGINPYKGLNNLNNCGGVGQCGTCVVEVVEGAQNLSPRSDVEEVYLADRPANYRLSCRTSVNGDVTVRTRPSDGVGKGSNSLLGAVKNLFGK

SEQ ID NO: 128124 - DNA, 603 bp, Synechococcus sp. RS9916
  CDS (1)..(603): transl_table=11
gtgctgttgctcgctcgtgcccgtgagatgaggaagcctttgcgggcgcccacggttacaaaacgaaactctgggcctcagaatgatgcgctgacctttctcttgagcgccatgcccgtcattcgattcgttcgtgaaggtcgggatgtggagtgctacccgggcgaaaaccttagggatgtggcgctccgggaggggatcgagctttacggcctcaagggtcggcttggaaattgcaatggctgcggccagtgcattacctgttttgtggagatctcgggtggtgctgggccagattcgctgtcgccgcgcacggccgttgaggacgcaaagctcaagcgtcgcccagaagattggcgcttggcctgtcaggcccttgtgcaacggtcggcgattgtgttgaccaagccccagacgggcctccctgatcgtgaaggcaaaattgctgccgcacgagcccaggagcttccggctggtcccaccgcctggcccgtcgtggaggtggatgaagacgatgccgatgagtcggccgatgccggtggcgagtcgtcagccgaggccggggttgagctggatgctgctacgcccggtgacgagggctga

SEQ ID NO: 128125 - protein, 200 aa, Synechococcus sp. RS9916
MLLLARAREMRKPLRAPTVTKRNSGPQNDALTFLLSAMPVIRFVREGRDVECYPGENLRDVALREGIELYGLKGRLGNCNGCGQCITCFVEISGGAGPDSLSPRTAVEDAKLKRRPEDWRLACQALVQRSAIVLTKPQTGLPDREGKIAAARAQELPAGPTAWPVVEVDEDDADESADAGGESSAEAGVELDAATPGDEG

SEQ ID NO: 128126 - DNA, 576 bp, Medicago truncatula
  CDS (1)..(576)
atgtcactcctccaactcaaactaacccctaatgcattcacacctctctcttcttcctcacataaaaaattcagaccaaacacaacactctttgcaagaaccaaaattagagcagttggtacagtccctgagaaaaaggattcagagaccactactgactctaatgaccctccctctataggctttgcatttgtcagttctgtgttgctaccagatggaacaccagatgtgcattatcgtacagcttgtggtggacagaagcttaggaacataatgttggattctaatattgaactctatggaccttatggtagaattttgttaaattgtggagggggtggaacttgtgcaacatgtatggtagaggttcttgaaggcaaggagcttctgagtccttgcaccgacaaagagaaagaaaaacttaagaggaaaccaaagaattggagattagcatgtcaaacaactgtgggtgaagcagattctacaggggtggtcgtgattcaacaattaccagagtggaaaggacatgaatggaaatatgaaaaggatgatgatgagtcagcagagtctttgtga

SEQ ID NO: 128127 - protein, 191 aa, Medicago truncatula
MSLLQLKLTPNAFTPLSSSSHKKFRPNTTLFARTKIRAVGTVPEKKDSETTTDSNDPPSIGFAFVSSVLLPDGTPDVHYRTACGGQKLRNIMLDSNIELYGPYGRILLNCGGGGTCATCMVEVLEGKELLSPCTDKEKEKLKRKPKNWRLACQTTVGEADSTGVVVIQQLPEWKGHEWKYEKDDDESAESL

SEQ ID NO: 128128 - DNA, 897 bp, Oryza sativa
  CDS (33)..(665)
gtgctcgccaaaagagaaggggaaggaaagccatggcggccacgagctccacctccacggcgctcttctcgctggccatcccttcctcccgcgtcgtctccacccgaggccaccgcaaggctagctctggcagtggccccttccgggcggcccgcatcaggtgctccaacgccgcctcgccgaacgcgtccgccggagccgcctccgcggaggaggcagcgccgccgcccaagccccaaatcgacctcgagttcgtcggaccgaaggcggatgccgatgggtcgttcccggtggaccgggcggcggcgggcagcggcgagaagctcctccgggacgtcatggtcgagaacaagatcgagctctacgcggcatatgggaaggtgatgaactgcggcggcggcggcagctgcggcacttgcatcgtcgagatagttgatggcaaggagctcctgaatgaaagaacaaacactgagaaccggtatctgaagaagaaaccggagtcatggaggcttgcttgtcagactattgttggaaacaaagaaaattccggcaagtacaagactacaagtataccacaagaacgaagggtcttttcgctcatgcttatcacccaaaatttggcccacgaaaatgcatttattcaccatgatttcagtgagatttaaacggttttattattattatttattttcgcaggttgtcgtccaacgtctgccccagtggaaaaaatgattgtagtgcacacgtgatgcactaactgcatgtgatcagcgatcaagttgtactacctgctatgcactgttgaacacggaagcatgcaatgatttttctcctggaatttattggcaatatgtaaaaattataccatatcattgaaatttacatttacttcggtag

SEQ ID NO: 128129 - protein, 210 aa, Oryza sativa
MAATSSTSTALFSLAIPSSRVVSTRGHRKASSGSGPFRAARIRCSNAASPNASAGAASAEEAAPPPKPQIDLEFVGPKADADGSFPVDRAAAGSGEKLLRDVMVENKIELYAAYGKVMNCGGGGSCGTCIVEIVDGKELLNERTNTENRYLKKKPESWRLACQTIVGNKENSGKYKTTSIPQERRVFSLMLITQNLAHENAFIHHDFSEI

SEQ ID NO: 128130 - DNA, 2730 bp, Moorella thermoacetica
  CDS (32)..(1945): transl_table=11
caacctggcttcataggataaacgggaggggatgcctgtggatcagtttgctgtcacctttttacctgataatatcaccgtccgggtggcggctggtaccagcattatggaggcggccaaccaggccggcctgcccctgaaaagcacctgcggcggggccggcacctgtggtcgctgtgccatcaaggtccaggaggggaaagttgaggtcaggggaggccatcttccggcccgtttaagggaagagggctattccctggcgtgccggaccatggttatgggagatgctataatagccatcccaccggaatcccgcctgggccggcaccaggtattactgcaggataaaggacgcctgcaggacagcctgactgatctactgggcagttatccccttgacccggcgtgtagcgttgcctccctggtcttgccggaaccgacgctgactgaaaacaccagtgatgccagccgcctgctggccaccctgcgcaaggaaaagggcctggaggggcaactcgacctggtcttcttgcaggagttaccggatagcctgcgccaggccaactggcaagtagatgttaccctggccgcgggaagtaatcgtcttatccggatcacccccctgggggaaacaagagccttcggcttggctattgacctgggtacaaccacggtagtggtatccctgctggacctgcgcagtggcgaacgggtgatgcgcaagggcagttataaccgccaggcagtttatggtgatgacgttatctcccggattattcacgccaccagtaatgaggggggcctggaggaattacgccaggcggccctggctaccattaacgatttaataacagcggtcctgacttccgggggaattgatccggcagaggtaacggcagcaactatagccggcaataccaccatgactcacctgttgctgggaataaaccccaggtacctccgcctgcagccctatataccggcagcagccgaattgccggtactgaaggccgccgaggtggggttaaagattaatccgctggctccggtccaaatcttcccggcggtagccagctatgtaggcggggacatcgtctccggcgccctctttacccggattgccagtagtgaagaattgaccctcttcattgacatcggcaccaacggggaaatggtcctgggcaacagcgactggctgatctcctgtgcctgttcggccgggccggcttttgagggcagcggcattacctgcggtatgcgggccatggaaggagcaatcgaaggggtgagcatcgacccggataccctggaagtcgagttggaggtaatcggcggtggtcgcccgtccgggatatgtggtagcggtttaattgactgcctggcaaagctccggcgcgcgggtattattgaccgcaccggcaacttccaggaagtagccaccccacggctgcgtaccactgacgaaggcccggaatttgtcctggcctgggctacccagagcagtacccagcgggatattgtcctgaccgccgccgacattaaaaaccttattcgttccaagggagccgttttcgccggcatccagagcctgctcaaaacagtctcccttgaaatagacgccatcgaaaggatcatcatcgccggtgggttcggcaattacctccatatccccaatgccgtagagatcggcctgttacccgacctaccgccggagaaatatatttttgccggcaatacttccctgaagggagccgagctggccctcctttcccagccggcctggcaggagaccctggaactggcccgcaggatgacctacctggagctttcagccggcaacctcttcatggaagagtttgtatcggccctgttcctgccccataccaggctggaactcttcccatccgtggggaatgggtccggcgacgaaaggaggtcgggttaatggcccgtcatattgccgtagccggtaagggggggacaggtaagaccacctttgccgccctgatgatccgctacttgattgaggggcaaaagggcagcatcctggccgtcgatgccgatcctaacgccaatttaaatgaagccctgggtgtccagatagacacagccattgctgatattctggatgccaccaagaatccaaaatccatacccgagggcatgagcaaggagatattcgtccagtaccagctggcccaggccctggtagaaacgaaagacttcgacctgctaactatgggccggccccagggaccaggatgttattgctaccccaatgatcttttacggaaacacctggaaaccctgagcgataattatgactacatgattatcgatagcgaggccggcctggagcacatcagccggcggattatccaaaatgtgagcgatctattcgttatcagtgatgcctcagcccggggtatccgttccgccggcagggtaagggaattggttcaggaattacagttgccaatcaataacctgtacctgatagttaccaaaactactggcgatattgccccccttcaggaggagatcgaaaggacaggaatacccttaacgggagttaccccctacgatgagcaaatagtagattatgatattcacagtaaacccctttttgatctgccggcaacttccgtatcggttcaagcagtaaaagctatcctggcccgatgccagttttaagttgaaaggagtgttttaaaatggccgtccagattt

SEQ ID NO: 128131 - protein, 637 aa, Moorella thermoacetica
MPVDQFAVTFLPDNITVRVAAGTSIMEAANQAGLPLKSTCGGAGTCGRCAIKVQEGKVEVRGGHLPARLREEGYSLACRTMVMGDAIIAIPPESRLGRHQVLLQDKGRLQDSLTDLLGSYPLDPACSVASLVLPEPTLTENTSDASRLLATLRKEKGLEGQLDLVFLQELPDSLRQANWQVDVTLAAGSNRLIRITPLGETRAFGLAIDLGTTTVVVSLLDLRSGERVMRKGSYNRQAVYGDDVISRIIHATSNEGGLEELRQAALATINDLITAVLTSGGIDPAEVTAATIAGNTTMTHLLLGINPRYLRLQPYIPAAAELPVLKAAEVGLKINPLAPVQIFPAVASYVGGDIVSGALFTRIASSEELTLFIDIGTNGEMVLGNSDWLISCACSAGPAFEGSGITCGMRAMEGAIEGVSIDPDTLEVELEVIGGGRPSGICGSGLIDCLAKLRRAGIIDRTGNFQEVATPRLRTTDEGPEFVLAWATQSSTQRDIVLTAADIKNLIRSKGAVFAGIQSLLKTVSLEIDAIERIIIAGGFGNYLHIPNAVEIGLLPDLPPEKYIFAGNTSLKGAELALLSQPAWQETLELARRMTYLELSAGNLFMEEFVSALFLPHTRLELFPSVGNGSGDERRSG

SEQ ID NO: 128132 - DNA, 300 bp, Anabaena variabilis
  CDS (1)..(300): transl_table=11
atgggtaatatcaaatttgttaaagaagataaagaagtaatcgctgcggatggtgcaaatctgcggcttaaggcaatggataatggcgttgacatttataagttttttggcaaactcacaaattgtggtggtgtcggtcaatgtggtacttgtattgttgagatagttgaaggaatcgaaaatctttctactccgacagatgtggaaaatcggatgttaaagaaaaagccagctaattaccgtttggcttgtcaaactttagtaaatggcccagtaagtgtagtaaccaaacctttgtaa

SEQ ID NO: 128133 - protein, 99 aa, Anabaena variabilis
MGNIKFVKEDKEVIAADGANLRLKAMDNGVDIYKFFGKLTNCGGVGQCGTCIVEIVEGIENLSTPTDVENRMLKKKPANYRLACQTLVNGPVSVVTKPL

SEQ ID NO: 128134 - DNA, 22 bp, Artificial sequence
  primer
atgaccattacctttgttaaag

SEQ ID NO: 128135 - DNA, 22 bp, Artificial sequence
  primer
ttagcctttgggtttggtgttc

SEQ ID NO: 128136 - protein, 75 aa, Artificial sequence
  consensus sequence
  Variant (3)..(8): Xaa in position 3 to 8 is any amino acid
  Variant (9)..(12): Xaa in position 9 to 12 is any or no amino acid
  Variant (14)..(17): Xaa in position 14 to 17 is any amino acid
  Variant (18)..(22): Xaa in position 18 to 22 is any or no amino acid
  Variant (24)..(24): Xaa in position 24 is any amino acid
  Variant (26)..(26): Xaa in position 26 is any amino acid
  Variant (28)..(28): Xaa in position 28 is any amino acid
  Variant (30)..(30): Xaa in position 30 is any amino acid
  Variant (33)..(48): Xaa in position 33 to 48 is any amino acid
  Variant (49)..(52): Xaa in position 49 to 52 is any or no amino acid
  Variant (54)..(56): Xaa in position 54 to 56 is any amino acid
  Variant (58)..(61): Xaa in position 58 to 61 is any amino acid
  Variant (62)..(67): Xaa in position 62 to 67 is any or no amino acid
  Variant (73)..(74): Xaa in position 73 to 74 is any amino acid
LRXXXXXXXXXXYXXXXXXXXXCXGXGXCXTCXXXXXXXXXXXXXXXXXXXXEXXXLXXXXXXXXXXRLACQXXV

SEQ ID NO: 128137 - protein, 11 aa, Artificial sequence
  protein pattern
  Variant (3)..(3): Xaa in position 3 is any amino acid
  Variant (5)..(5): Xaa in position 5 is any amino acid
  Variant (7)..(7): Xaa in position 7 is Gln, Ser or Thr
  Variant (9)..(9): Xaa in position 9 is any amino acid
NCXGXGXCXTC

SEQ ID NO: 128138 - protein, 17 aa, Artificial sequence
  protein pattern
  Variant (2)..(4): Xaa in position 2 to 4 is any amino acid
  Variant (6)..(10): Xaa in position 6 to 10 is any or no amino acid
  Variant (12)..(12): Xaa in position 12 is Ala or Ser
  Variant (14)..(14): Xaa in position 14 is Gln or Arg
  Variant (15)..(15): Xaa in position 15 is Ala, Cys, Thr or Val
  Variant (16)..(16): Xaa in position 16 is any amino acid
  Variant (17)..(17): Xaa in position 17 is Ile or Val
PXXXRXXXXXLXCXXXX

SEQ ID NO: 128139 - DNA, 2925 bp, Saccharomyces cerevisiae
  CDS (1)..(2925)
atgaacagtatggccgataccgatagagtcaacttgactcccatccagagggcatctgagaaatccgtgcaataccacttgaagcaggtcattgggaggggttcttacggggtagtttacaaagccattaataaacatactgaccaagtcgtggcaataaaggaggtcgtgtacgaaaatgatgaggaacttaatgacattatggcagaaattagcttgttaaaaaatttaaaccataacaatattgttaaataccacggcttcatacgaaaaagctatgaattgtatatcctcctcgaatactgcgctaatggttctttgaggaggctcatttcaaggagctctaccggattaagtgaaaatgaatcgaaaacctatgtgacacagacactattggggctgaaatatttacacggtgaaggagtcatccacagggacatcaaggcggctaacatcctgctgagtgctgataacactgtcaaacttgctgattttggcgtttccactattgtgaactccagcgccttaacgctagcgggcacactcaattggatggctccagagatcctgggcaacaggggagcttctacgctcagcgacatttggtctctaggtgccactgtagttgaaatgctcacaaagaatccaccctaccacaatttgacagacgccaatatctactacgctgttgaaaatgatacctactacccacctagctctttctctgagccactaaaggatttcttatctaaatgctttgtgaaaaacatgtacaagaggccgacagccgaccagttactcaagcatgtgtggatcaactctaccgaaaatgtgaaggtcgacaagctcaacaagttcaaggaggactttaccgacgctgattatcattgggatgccgattttcaagaagagaaactaaatatatcaccctctaaattcagtcttcgagcggctcccgctccctgggcagaaaacaatcaagaactagatttaatgccccccactgaaagtcaattgctgagccaattgaagagttcatctaagcctttgacggacttgcatgtgcttttcagtgtttgctccctcgagaacatcgctgatacaattatcgagtgtctgtcgcgcacaactgttgataaacgattaataactgcatttggctccatttttgtttacgatacccagcataaccactctaggttgcgactgaaattcatcgctatgggaggaattccactgatcattaaattcgaacatttagccaaagagttcgtcatcgactaccctcagactttaattgaatgtggaataatgtatcctccgaattttgcatcgctgaaaaccccaaagtatattttagaactcgtctataggttctacgatttaacatccacagccttctggtgtcgctggtgtttcaaacacctcgatatatcactccttctgaataacatccatgaaagaagagcccaatccatactactaaagctatcgtcatatgcaccatggtcttttgagaaaattttgccctctttaattgactctaagctaaaaaagaaaattttaatcagtcctcaaattacttacgtagtcttcaaatcaataaactatatgataaccacgaatgacgataaaatacacaagtccgctattccttcttcttcctctctaccgttatcctcctcacccacgaggaactcaccagtgaattcggtacagtctccatcaaggtcccctgttcattctttgatggcaacgcgtccctcttctccaatgcgacacaagagcatttcaaactttccccatctgaccatatcttcaaaatcaagactactaattgaattaccggagggtttctttacctggctaacatctttttttgttgacatggcccaaatcaaagatttatctgttttaaagtacttcaccaagctttgttaccttacagtacatataaacagcacttttttaaatgatctgcttgacaacgatgctttttttgcttttatccggaatattgataccatcattccctttatcgacgacgcaaagacagcagctttcatttggaaacaaatcactgctatatgcgttgaaatgagtttggatatggaccaaatgagtgcttctttattttctacagctatgaatttcatcagaaaaaagaataacacctccataagtggactggagatcatactgaactgcttgcattttacgttacgcaatgtaaatgatgatgtggctcctacagtgggctcatcagagtctcatagtgttttcctcataaaggtcaacaatgacgctgctattgaattaccgattgatcaattagttgacctgttttatgcattgaatgacgatgacgttaacctcagtaaactaattagcattttcacgaagatatgctcattgcccggttttgaaaaccttacaattaatatcatatttcacccgaacttttatgaaaagattgtttctttctttgatacctatttcaacagtttacttattcaaatcgatctattgaaattcataaagctaatattctcaaaatcgttattgaagctatatgactacacaggacagccggatcctataaagcaaaccgaaccaaatcgtcgtaataaggccactgttttcaaacttcgtgccattttagtacaaataacggagtttttaaacaacaactggaacaacggatgtccaaaaaggaattcaaatcaagttgggggggactcagttttgatctgtcagctatgtgaggatatccgttcattatcaaaaaaaggaagcctgcaaaaagtttcaagcgtcactgcagcaattggtagttctccaacaaaagatgagcgtagtaatttgcgatcctccaaagataaaagtgacggcttttccgtccccattacaacatttcaaacataa

SEQ ID NO: 128140 - protein, 974 aa, Saccharomyces cerevisiae
MNSMADTDRVNLTPIQRASEKSVQYHLKQVIGRGSYGVVYKAINKHTDQVVAIKEVVYENDEELNDIMAEISLLKNLNHNNIVKYHGFIRKSYELYILLEYCANGSLRRLISRSSTGLSENESKTYVTQTLLGLKYLHGEGVIHRDIKAANILLSADNTVKLADFGVSTIVNSSALTLAGTLNWMAPEILGNRGASTLSDIWSLGATVVEMLTKNPPYHNLTDANIYYAVENDTYYPPSSFSEPLKDFLSKCFVKNMYKRPTADQLLKHVWINSTENVKVDKLNKFKEDFTDADYHWDADFQEEKLNISPSKFSLRAAPAPWAENNQELDLMPPTESQLLSQLKSSSKPLTDLHVLFSVCSLENIADTIIECLSRTTVDKRLITAFGSIFVYDTQHNHSRLRLKFIAMGGIPLIIKFEHLAKEFVIDYPQTLIECGIMYPPNFASLKTPKYILELVYRFYDLTSTAFWCRWCFKHLDISLLLNNIHERRAQSILLKLSSYAPWSFEKILPSLIDSKLKKKILISPQITYVVFKSINYMITTNDDKIHKSAIPSSSSLPLSSSPTRNSPVNSVQSPSRSPVHSLMATRPSSPMRHKSISNFPHLTISSKSRLLIELPEGFFTWLTSFFVDMAQIKDLSVLKYFTKLCYLTVHINSTFLNDLLDNDAFFAFIRNIDTIIPFIDDAKTAAFIWKQITAICVEMSLDMDQMSASLFSTAMNFIRKKNNTSISGLEIILNCLHFTLRNVNDDVAPTVGSSESHSVFLIKVNNDAAIELPIDQLVDLFYALNDDDVNLSKLISIFTKICSLPGFENLTINIIFHPNFYEKIVSFFDTYFNSLLIQIDLLKFIKLIFSKSLLKLYDYTGQPDPIKQTEPNRRNKATVFKLRAILVQITEFLNNNWNNGCPKRNSNQVGGDSVLICQLCEDIRSLSKKGSLQKVSSVTAAIGSSPTKDERSNLRSSKDKSDGFSVPITTFQT

SEQ ID NO: 128141 - DNA, 3231 bp, Candida glabrata CBS 138
  CDS (1)..(3231)
atggctgatcgtataagtgtgactcccgcgcagcaattcaggaaagaacataagtccgtgcagtaccaactgcgacagattataggtagagggtcgtatggtgttgtctacaaagccaccaataagaaaactgcgcaggaagtagccataaaagaggtgaactaccaggatgacgatgaattggtggatattatgtcggagattgacctcttgaagaatctgaatcacataaacattgtcaaataccacggtttcattcaaaaacaacataacctatacatcattcttgagtactgcgcaaagggttccttgaagaacttgatctcacgaaacaggcccatgagtgaacacgaggccaagccttacgtaagacaaactttaaacgggctaaactatttacatgaacaaggtgttatccatagagatatcaaagcagcaaatatattactggattccgaaaatgttgttaagttggcagattttggtgtctccactaaagttaacaacactgctatgaccttagcaggttccctaaattggatggctcccgagattattggtaatcgtggtgcatcaactttgagtgatatatggtctcttggagcaacagttgtggagttattaacaggcaatccaccctttcataacctgatagatatgaatatttactatgccattgaaaatgattcttatttccctccaagtagcttgtcctcaggtgctaaggatttcttacagcagtgttttgctaaaaacatgtacaagagacccacagcagttcaattgttacaacataattggttagaaaacgataactccaaagactctaccatggataaacaagtgataccaagtgttgaaaaattaaatctttatcaggagaaatttgaagattccgacctttgttgggatgatgattttgaagaaaaggatttaaatttatcatcaccatctaaaaaggatttagttaaaactaaaattccttctgatgaatttattcctgatgtttttaacatatcagaggttaatcaaggaaatcaaggaaatcaaggaaatcaaggaaatcaaggaaatcaaggaaatcaaggaaatcaaggaaatgatcccattaagaacgaacaagcgagaagtaataataatattgttattcaaagtcaattggagagaagttctactccatttacaatggatagaaataagggtaatgcagattttctacaaaactcatctttagatgaggacaatcttttacagatcgttaaatctgggaaatctattgaaaatgtggattattttttccaaaaatgttctatagatatgttggcgttgacattgattgaactgactatgaataagaaagatatgattagggagcatctagcaccatcaaatcatgaattaaatttgtataagtttttcgaatacgatgaaaaaaaaaacaaaagtaagttgaaaagaaagttcattcaactaggtgggttacctagtctatttcattatgaaaaattactgagcattttctttgtcgatgattttgttgatgatttgataagagcaggtatcatcccatatgttagggactacaaaaatggaagtctggtactttcaattataaacaagcatatggaacttatgagtattcaaagttggtgtaaatggtgtaattttaatttgccaattgatatcattctagaaaacttgatagctcgaaaagcacaatctatcttacttaaaatttccacttatggaagtaaagaatttaaactggaaatcttaaagaatattgtgaactataattataatagttcaaatcagaaaatcttattggattcgcaagtgatgtatgttatattcaagtcggtgttttatatcttgagatctcttcacttgaactctggaacttcaaataattcagccatgttattaaattttcactcacatcacatttctacaacgggttccaatactgggaatacaccttctctaagttcttcacctactaaatcacccgtaagttcatggaaaacccaatcaccaccactatccccaacgagaacgttgagtgggaaatctcaaggttatccatctggtgtatctaatcctccaaacgctttgtcaagtaataataacgggtttattgttcctgagaatgtatttttatggatggaagagtttttaaggagcaaatatttttgctcattgatggatattcatgtttggaaatatttcaatagagcattttattacaccacctataataataagccacgattactgaaattattggccgatgattgttataccagattttgcataagagttgcagacacggtttctgacaaaaatggcagacaggtcatgggtcaggcatctctggttttgatgaggatgtccaacgagctattatcatcgttgcataataatcaaatattatctggtaacaaaaaaatcagtatctcaccttcgctgatcacaattgctacaaaattccttggtaaacgagagttcatttatgaaggtattgagatagttttaaattgtatacagtttatttctcatcaaaacgaggatacaggaaacgtcaataccttcaataggcgtggcaatcaaagaaataggaatggtgaaagacttatggtcttgcattctgataaattattgttctcagaggagaacgttctggtagatatgaatgatatcgttgactgtttctttatattccctgaaaatgatagcaatttcggtaattacgtggtaaaatttatgaagctttgcatggtccaacagcttgagtatgtctgtcaacggatagttttgaaagaacaattctatgaacgaattgtggcgttctttggtttttattgtaacagtttattgattcaaattgatttactaaaattagtcaagacactattcacaagggcacttcactccaataatgaaagaagcaatatattggatagcttaaagactctcttggcattcctctctgaaaattgggatccactgaaaggaaataataaaggccaggtcggatataattctgtcttgatcaagcaattatgtagcgatatcgcagcgctgctatcctatagaccaaatacaaaacggagtaatggtcttgatcatttgggggtttcacaatttgcattagataagaacattacatcctcgggtcctgttgttgatagaggtagattaccagtaccaagacctgagtttaatacgtga

SEQ ID NO: 128142 - protein, 1076 aa, Candida glabrata CBS 138
MADRISVTPAQQFRKEHKSVQYQLRQIIGRGSYGVVYKATNKKTAQEVAIKEVNYQDDDELVDIMSEIDLLKNLNHINIVKYHGFIQKQHNLYIILEYCAKGSLKNLISRNRPMSEHEAKPYVRQTLNGLNYLHEQGVIHRDIKAANILLDSENVVKLADFGVSTKVNNTAMTLAGSLNWMAPEIIGNRGASTLSDIWSLGATVVELLTGNPPFHNLIDMNIYYAIENDSYFPPSSLSSGAKDFLQQCFAKNMYKRPTAVQLLQHNWLENDNSKDSTMDKQVIPSVEKLNLYQEKFEDSDLCWDDDFEEKDLNLSSPSKKDLVKTKIPSDEFIPDVFNISEVNQGNQGNQGNQGNQGNQGNQGNQGNDPIKNEQARSNNNIVIQSQLERSSTPFTMDRNKGNADFLQNSSLDEDNLLQIVKSGKSIENVDYFFQKCSIDMLALTLIELTMNKKDMIREHLAPSNHELNLYKFFEYDEKKNKSKLKRKFIQLGGLPSLFHYEKLLSIFFVDDFVDDLIRAGIIPYVRDYKNGSLVLSIINKHMELMSIQSWCKWCNFNLPIDIILENLIARKAQSILLKISTYGSKEFKLEILKNIVNYNYNSSNQKILLDSQVMYVIFKSVFYILRSLHLNSGTSNNSAMLLNFHSHHISTTGSNTGNTPSLSSSPTKSPVSSWKTQSPPLSPTRTLSGKSQGYPSGVSNPPNALSSNNNGFIVPENVFLWMEEFLRSKYFCSLMDIHVWKYFNRAFYYTTYNNKPRLLKLLADDCYTRFCIRVADTVSDKNGRQVMGQASLVLMRMSNELLSSLHNNQILSGNKKISISPSLITIATKFLGKREFIYEGIEIVLNCIQFISHQNEDTGNVNTFNRRGNQRNRNGERLMVLHSDKLLFSEENVLVDMNDIVDCFFIFPENDSNFGNYVVKFMKLCMVQQLEYVCQRIVLKEQFYERIVAFFGFYCNSLLIQIDLLKLVKTLFTRALHSNNERSNILDSLKTLLAFLSENWDPLKGNNKGQVGYNSVLIKQLCSDIAALLSYRPNTKRSNGLDHLGVSQFALDKNITSSGPVVDRGRLPVPRPEFNT

SEQ ID NO: 128143 - DNA, 2394 bp, Kluyveromyces lactis NRRL Y-1140
  CDS (1)..(2394)
atggataattcaatagcccatggaacctatgcgctaaaacaagtgattggtcgcggggcttatggtgttgtgtacagagcagtgaaaagaggcacgaataaaccatgtgcgattaaacagatcgagtttgaagatgagagcgagttgaacgaacatatgcttgaaattgacttattgaagaaccttaggcaccaaaatatcgtggaataccggggctttatacagaaagctcatgagttgtacattatattggaatactgcgctcgtggttcactccgagatatattgaaacatggtccgttactggaagatgataccgtcaactacgttacacagactttgtatggattacaatacttgcacgagcaaggtgttatccatagggatatcaaagcagcgaaccttctattgactgaggaaggaattgttaaattagctgactttggtgtttctaccagaattaatagaatggctatgacttatgcggggtctcctaattggatggcacccgaagttatgacaggtcaaggtgcatcaactgttagtgatatctggtcgctcggagcgactgtcgtcgagctattgacgggaaatccgccatttcacaacctcgtgaatgaatctgcatgctatgcgatagtaaacgaagaatacataccacccttgacattatcagctgaatgcaaagacttcttatctcgatgtttccaaaaaaacatgtttaaacgtgccaccgcacaagaactactagctcatatatggttgaagaaaatacagaaacccaaatcgaagataaatttggcagaatatattgagaaagatggtaaatgggatgtggattttgttcttgattccaatactgatatgacaccatctcctacaaaatctccaattcaagaagatttagcccctgctgattttagaactttatctgtcgatcagcttttcatagaacattctacggactcgatagttgtggggttaataaaaaccttaaacgaactaaccgcgatcaaagctgatgctactgcgtctggttctttaagcaacagaacattcgagattctaaaatatgacaaacaattcaatcatactgctttgaaggaaaaatttattgataacggtggaacaccactacttatttcactacgttttgaatctgttttggctgcatttttcgaaaagagcgttaaactacttatacagtgcggtatactttcacattttgacagtttaaaaaattcacgattaacagtgttagtaagctattgttatagaactctcacttctcatgatatatggaaccagtggtgtcttagtcataaagataaaatatcagcatgtgtcaatgcggaattgacctcaaccaagtacattgaagcagaaaaactattaattcacgtttctatgataaaagatttcccattaagtgtaccaaaattaatgctatttgccaaaaaatataagcacttacaacactgcattttcacttccctcaataattccattaagagaacgatagtcaatgtaccaacctctaatttgatacacggtaaacttttttatgagaaatcaaactttccggtaactatacaagagtggttacttgaaatgatcactcacgtcaaacgaaaggctacggatcctttcgtagaattatgcttccacgtatgtcatttaaacaataaaagcattgaactacttatgaaagacggtcatttcttagctttaaccaaaaccctcctgaagtcatcaaatcattcttcattaccgtggtgtttaaatttgtgcagtgaatatacgaaaaatttaaaggctgaagatataggaacgatgatcgacatcggaatatcttcactacctatcgcaaactgtcttccaaacagtattgagatacttttaaattgtttcaatgttgctcaacaaattgagtcaccaatagtactccataacgaaagtgttacaattggtaatcataacatcccgttcagcctgctagttgcatctttctaccaagataacggaagatttgataagtatatcacaaagtacacaaaattatgctctctaccagtaggaggtaagatatgcagcgaagttctcaagcaagagagattcattggaagaatccatgaacttttcggtacgttcaagacatcactaataattcaaatcgatttactcaagtttttgaaggttttagtcatacagacaaacgaacaagggaagagttcatactttaacaaactcgaaaccttggcaaaattcctttcaagtaattggaaaaatacacaaacctttacaccaatcaaacagggtcaccaaaaagtaggggctgattcggtattaattcatcagctttgtcaagatatacagaatttgattgtcatgtag

SEQ ID NO: 128144 - protein, 797 aa, Kluyveromyces lactis NRRL Y-1140
MDNSIAHGTYALKQVIGRGAYGVVYRAVKRGTNKPCAIKQIEFEDESELNEHMLEIDLLKNLRHQNIVEYRGFIQKAHELYIILEYCARGSLRDILKHGPLLEDDTVNYVTQTLYGLQYLHEQGVIHRDIKAANLLLTEEGIVKLADFGVSTRINRMAMTYAGSPNWMAPEVMTGQGASTVSDIWSLGATVVELLTGNPPFHNLVNESACYAIVNEEYIPPLTLSAECKDFLSRCFQKNMFKRATAQELLAHIWLKKIQKPKSKINLAEYIEKDGKWDVDFVLDSNTDMTPSPTKSPIQEDLAPADFRTLSVDQLFIEHSTDSIVVGLIKTLNELTAIKADATASGSLSNRTFEILKYDKQFNHTALKEKFIDNGGTPLLISLRFESVLAAFFEKSVKLLIQCGILSHFDSLKNSRLTVLVSYCYRTLTSHDIWNQWCLSHKDKISACVNAELTSTKYIEAEKLLIHVSMIKDFPLSVPKLMLFAKKYKHLQHCIFTSLNNSIKRTIVNVPTSNLIHGKLFYEKSNFPVTIQEWLLEMITHVKRKATDPFVELCFHVCHLNNKSIELLMKDGHFLALTKTLLKSSNHSSLPWCLNLCSEYTKNLKAEDIGTMIDIGISSLPIANCLPNSIEILLNCFNVAQQIESPIVLHNESVTIGNHNIPFSLLVASFYQDNGRFDKYITKYTKLCSLPVGGKICSEVLKQERFIGRIHELFGTFKTSLIIQIDLLKFLKVLVIQTNEQGKSSYFNKLETLAKFLSSNWKNTQTFTPIKQGHQKVGADSVLIHQLCQDIQNLIVM

SEQ ID NO: 128145 - DNA, 24 bp, Artificial sequence
  primer
atgaacagtatggccgataccgat

SEQ ID NO: 128146 - DNA, 26 bp, Artificial sequence
  primer
ttatgtttgaaatgttgtaatgggga

SEQ ID NO: 128147 - protein, 1045 aa, Artificial sequence
  consensus sequence
  Variant (2)..(2): Xaa in position 2 is any amino acid
  Variant (4)..(4): Xaa in position 4 is any amino acid
  Variant (6)..(6): Xaa in position 6 is any amino acid
  Variant (11)..(11): Xaa in position 11 is any amino acid
  Variant (17)..(17): Xaa in position 17 is any amino acid
  Variant (19)..(22): Xaa in position 19 to 22 is any amino acid
  Variant (24)..(27): Xaa in position 24 to 27 is any amino acid
  Variant (31)..(38): Xaa in position 31 to 38 is any amino acid
  Variant (41)..(43): Xaa in position 41 to 43 is any amino acid
  Variant (45)..(45): Xaa in position 45 is any amino acid
  Variant (48)..(48): Xaa in position 48 is any amino acid
  Variant (54)..(54): Xaa in position 54 is any amino acid
  Variant (56)..(56): Xaa in position 56 is any amino acid
  Variant (60)..(60): Xaa in position 60 is any amino acid
  Variant (62)..(62): Xaa in position 62 is any amino acid
  Variant (66)..(66): Xaa in position 66 is any amino acid
  Variant (68)..(70): Xaa in position 68 to 70 is any amino acid
  Variant (74)..(74): Xaa in position 74 is any amino acid
  Variant (80)..(80): Xaa in position 80 is any amino acid
  Variant (84)..(93): Xaa in position 84 to 93 is any amino acid
  Variant (94)..(95): Xaa in position 94 to 95 is any or no amino acid
  Variant (97)..(101): Xaa in position 97 to 101 is any amino acid
  Variant (104)..(104): Xaa in position 104 is any amino acid
  Variant (108)..(108): Xaa in position 108 is any amino acid
  Variant (111)..(111): Xaa in position 111 is any amino acid
  Variant (115)..(116): Xaa in position 115 to 116 is any amino acid
  Variant (128)..(128): Xaa in position 128 is any amino acid
  Variant (131)..(135): Xaa in position 131 to 135 is any amino acid
  Variant (146)..(147): Xaa in position 146 to 147 is any amino acid
  Variant (149)..(150): Xaa in position 149 to 150 is any amino acid
  Variant (152)..(152): Xaa in position 152 is any amino acid
  Variant (154)..(154): Xaa in position 154 is any amino acid
  Variant (157)..(158): Xaa in position 157 to 158 is any amino acid
  Variant (165)..(169): Xaa in position 165 to 169 is any amino acid
  Variant (174)..(174): Xaa in position 174 is any amino acid
  Variant (187)..(187): Xaa in position 187 is any amino acid
  Variant (190)..(190): Xaa in position 190 is any amino acid
  Variant (194)..(194): Xaa in position 194 is any amino acid
  Variant (198)..(203): Xaa in position 198 to 203 is any amino acid
  Variant (206)..(207): Xaa in position 206 to 207 is any amino acid
  Variant (209)..(210): Xaa in position 209 to 210 is any amino acid
  Variant (212)..(212): Xaa in position 212 is any amino acid
  Variant (215)..(217): Xaa in position 215 to 217 is any amino acid
  Variant (219)..(221): Xaa in position 219 to 221 is any amino acid
  Variant (226)..(227): Xaa in position 226 to 227 is any amino acid
  Variant (230)..(230): Xaa in position 230 is any amino acid
  Variant (234)..(234): Xaa in position 234 is any amino acid
  Variant (237)..(237): Xaa in position 237 is any amino acid
  Variant (240)..(241): Xaa in position 240 to 241 is any amino acid
  Variant (244)..(244): Xaa in position 244 is any amino acid
  Variant (246)..(246): Xaa in position 246 is any amino acid
  Variant (248)..(254): Xaa in position 248 to 254 is any amino acid
  Variant (255)..(267): Xaa in position 255 to 267 is any or no amino acid
  Variant (269)..(279): Xaa in position 269 to 279 is any amino acid
  Variant (281)..(282): Xaa in position 281 to 282 is any amino acid
  Variant (285)..(285): Xaa in position 285 is any amino acid
  Variant (288)..(295): Xaa in position 288 to 295 is any amino acid
  Variant (296)..(296): Xaa in position 296 is any or no amino acid
  Variant (299)..(311): Xaa in position 299 to 311 is any amino acid
  Variant (312)..(383): Xaa in position 312 to 383 is any or no amino acid
  Variant (385)..(393): Xaa in position 385 to 393 is any amino acid
  Variant (394)..(412): Xaa in position 394 to 412 is any or no amino acid
  Variant (414)..(416): Xaa in position 414 to 416 is any amino acid
  Variant (418)..(425): Xaa in position 418 to 425 is any amino acid
  Variant (427)..(447): Xaa in position 427 to 447 is any amino acid
  Variant (448)..(454): Xaa in position 448 to 454 is any or no amino acid
  Variant (457)..(459): Xaa in position 457 to 459 is any amino acid
  Variant (461)..(463): Xaa in position 461 to 463 is any amino acid
  Variant (465)..(466): Xaa in position 465 to 466 is any amino acid
  Variant (470)..(471): Xaa in position 470 to 471 is any amino acid
  Variant (474)..(474): Xaa in position 474 is any amino acid
  Variant (476)..(480): Xaa in position 476 to 480 is any amino acid
  Variant (481)..(482): Xaa in position 481 to 482 is any or no amino acid
  Variant (484)..(488): Xaa in position 484 to 488 is any amino acid
  Variant (490)..(496): Xaa in position 490 to 496 is any amino acid
  Variant (497)..(497): Xaa in position 497 is any or no amino acid
  Variant (500)..(501): Xaa in position 500 to 501 is any amino acid
  Variant (504)..(510): Xaa in position 504 to 510 is any amino acid
  Variant (511)..(512): Xaa in position 511 to 512 is any or no amino acid
  Variant (514)..(527): Xaa in position 514 to 527 is any amino acid
  Variant (529)..(529): Xaa in position 529 is any amino acid
  Variant (531)..(533): Xaa in position 531 to 533 is any amino acid
  Variant (535)..(536): Xaa in position 535 to 536 is any amino acid
  Variant (539)..(547): Xaa in position 539 to 547 is any amino acid
  Variant (548)..(552): Xaa in position 548 to 552 is any or no amino acid
  Variant (554)..(560): Xaa in position 554 to 560 is any amino acid
  Variant (562)..(564): Xaa in position 562 to 564 is any amino acid
  Variant (566)..(568): Xaa in position 566 to 568 is any amino acid
  Variant (570)..(579): Xaa in position 570 to 579 is any amino acid
  Variant (580)..(580): Xaa in position 580 is any or no amino acid
  Variant (582)..(595): Xaa in position 582 to 595 is any amino acid
  Variant (596)..(606): Xaa in position 596 to 606 is any or no amino acid
  Variant (608)..(608): Xaa in position 608 is any amino acid
  Variant (610)..(616): Xaa in position 610 to 616 is any amino acid
  Variant (617)..(619): Xaa in position 617 to 619 is any or no amino acid
  Variant (621)..(621): Xaa in position 621 is any amino acid
  Variant (622)..(654): Xaa in position 622 to 654 is any or no amino acid
  Variant (656)..(668): Xaa in position 656 to 668 is any amino acid
  Variant (669)..(687): Xaa in position 669 to 687 is any or no amino acid
  Variant (690)..(690): Xaa in position 690 is any amino acid
  Variant (692)..(696): Xaa in position 692 to 696 is any amino acid
  Variant (697)..(711): Xaa in position 697 to 711 is any or no amino acid
  Variant (713)..(727): Xaa in position 713 to 727 is any amino acid
  Variant (728)..(733): Xaa in position 728 to 733 is any or no amino acid
  Variant (735)..(744): Xaa in position 735 to 744 is any amino acid
  Variant (746)..(751): Xaa in position 746 to 751 is any amino acid
  Variant (753)..(790): Xaa in position 753 to 790 is any amino acid
  Variant (792)..(801): Xaa in position 792 to 801 is any amino acid
  Variant (802)..(812): Xaa in position 802 to 812 is any or no amino acid
  Variant (814)..(817): Xaa in position 814 to 817 is any amino acid
  Variant (819)..(825): Xaa in position 819 to 825 is any amino acid
  Variant (826)..(833): Xaa in position 826 to 833 is any or no amino acid
  Variant (836)..(836): Xaa in position 836 is any amino acid
  Variant (840)..(869): Xaa in position 840 to 869 is any amino acid
  Variant (870)..(892): Xaa in position 870 to 892 is any or no amino acid
  Variant (894)..(895): Xaa in position 894 to 895 is any amino acid
  Variant (897)..(911): Xaa in position 897 to 911 is any amino acid
  Variant (912)..(914): Xaa in position 912 to 914 is any or no amino acid
  Variant (916)..(916): Xaa in position 916 is any amino acid
  Variant (918)..(934): Xaa in position 918 to 934 is any amino acid
  Variant (936)..(938): Xaa in position 936 to 938 is any amino acid
  Variant (940)..(942): Xaa in position 940 to 942 is any amino acid
  Variant (944)..(948): Xaa in position 944 to 948 is any amino acid
  Variant (951)..(951): Xaa in position 951 is any amino acid
  Variant (959)..(960): Xaa in position 959 to 960 is any amino acid
  Variant (962)..(984): Xaa in position 962 to 984 is any amino acid
  Variant (985)..(1006): Xaa in position 985 to 1006 is any or no amino acid
  Variant (1009)..(1010): Xaa in position 1009 to 1010 is any amino acid
  Variant (1013)..(1021): Xaa in position 1013 to 1021 is any amino acid
  Variant (1022)..(1022): Xaa in position 1022 is any or no amino acid
  Variant (1024)..(1027): Xaa in position 1024 to 1027 is any amino acid
  Variant (1030)..(1031): Xaa in position 1030 to 1031 is any amino acid
  Variant (1036)..(1036): Xaa in position 1036 is any amino acid
  Variant (1040)..(1040): Xaa in position 1040 is any amino acid
  Variant (1043)..(1044): Xaa in position 1043 to 1044 is any amino acid
YXLXQXIGRGXYGVVYXAXXXXTXXXXAIKXXXXXXXXELXXXMXEIXLLKNLXHXNIVXYXGFIXKXXXLYIXLEYCAXGSLXXXXXXXXXXXXEXXXXXYVXQTLXGLXYLHXXGVIHRDIKAANXLLXXXXXVKLADFGVSTXXNXXAXTXAGXXNWMAPEXXXXXGASTXSDIWSLGATVVEXLTXNPPXHNLXXXXXXYAXXNXXYXPPXXXSXXXKDFLXXCFXKNMXKRXTAXXLLXHXWXXXXXXXXXXXXXXXXXXXXKXXXXXXXXXXXDXXWDXDFXXXXXXXXXPSXXXXXXXXXXXXXXXXXXXXXXXXXXXXXXXXXXXXXXXXXXXXXXXXXXXXXXXXXXXXXXXXXXXXXXXXXXXXXXXXXXXXXDXXXXXXXXXXXXXXXXXXXXXXXXXXXXFXXXSXXXXXXXXIXXXXXXXXXXXXXXXXXXXXXXXXXXXXYDXXXNXXXLXXKFIXXGGXPXXXXXXXEXXXXXFXXXXXXXXLIXXGIXXXXXXXXXKXXXXXXXXXXXXXXLXSXXXWXXWCXXXXXXXXXXXXXXLXXXXXXXAXXXLXXXSXXXXXXXXXXXLXXXXXXXXXXXXXXXXXXXXXXXXXFXSXXXXXXXXXXNXXXXXXXXXXXXXXXXXXXXXXXXXXXXXXXXXXPXXXXXXXXXXXXXXXXXXXXXXXXXXXXXXXXSNXPXXXXXXXXXXXXXXXXXXXXWXXXXXXXXXXXXXXXXXXXXXFXXXXXXXXXXNXXXXXXLXXXXXXXXXXXXXXXXXXXXXXXXXXXXXXXXXXXXXXEXXXXXXXXXXXXXXXXXXXXXSXXXXAXXXXXXXXXXXXXXXEIXLNCXXXXXXXXXXXXXXXXXXXXXXXXXXXXXXXXXXXXXXXXXXXXXXXXXXXXXVXXFXXXXXXXXXXXXXXXXXXKXCXXXXXXXXXXXXXXXXXFXXXIXXXFXXXXXSLXIQIDLLKXXKXXXXXXXXXXXXXXXXXXXXXXXXXXXXXXXXXXXXXXXXXXXXXFLXXNWXXXXXXXXXXQXXXXVGXXSVLIXQLCXDIXXL

SEQ ID NO: 128148 - DNA, 1017 bp, Saccharomyces cerevisiae
  CDS (1)..(1017)
atgaaattatcaactgtcctattatctgccggtttagcctcgactactttggcccaattttccaacagtacatctgcttcttccaccgatgtcacttcctcctcttccatctccacttcctctggctcagtaactatcacatcttctgaagctccagaatccgacaacggtaccagcacagctgcaccaactgaaacctcaacagaggctccaaccactgctatcccaactaacggtacctctactgaagctccaaccactgctatcccaactaacggtacctctactgaagctccaactgatactactactgaagctccaaccaccgctcttccaactaacggtacttctactgaagctccaactgatactactactgaagctccaaccaccggtcttccaaccaacggtaccacttcagctttcccaccaactacatctttgccaccaagcaacactaccaccactcctccttacaacccatctactgactacaccactgactacactgtagtcactgaatatactacttactgtccagaaccaaccactttcaccacaaacggtaagacttacaccgtcactgaaccaaccacattgactatcactgactgtccatgcaccattgaaaagccaacaaccacatcaaccaccgaatacactgtagtcactgagtacactacttactgtccagaaccaaccactttcaccacaaacggtaagacttacaccgtcactgaaccaaccactttgactatcactgactgtccatgtactattgaaaagagcgaagcccctgagtcttctgtcccagttaccgaatctaagggcactaccaccaaagaaacaggtgttactaccaaacaaaccacagccaacccaagtctaaccgtctccacagtcgtcccagtttcatcctctgcttcttctcattccgttgtcatcaacagtaacggtgctaacgtcgtcgttccaggtgctttaggtttggctggtgttgctatgttattcttataa

SEQ ID NO: 128149 - protein, 338 aa, Saccharomyces cerevisiae
MKLSTVLLSAGLASTTLAQFSNSTSASSTDVTSSSSISTSSGSVTITSSEAPESDNGTSTAAPTETSTEAPTTAIPTNGTSTEAPTTAIPTNGTSTEAPTDTTTEAPTTALPTNGTSTEAPTDTTTEAPTTGLPTNGTTSAFPPTTSLPPSNTTTTPPYNPSTDYTTDYTVVTEYTTYCPEPTTFTTNGKTYTVTEPTTLTITDCPCTIEKPTTTSTTEYTVVTEYTTYCPEPTTFTTNGKTYTVTEPTTLTITDCPCTIEKSEAPESSVPVTESKGTTTKETGVTTKQTTANPSLTVSTVVPVSSSASSHSVVINSNGANVVVPGALGLAGVAMLFL

SEQ ID NO: 128150 - DNA, 1281 bp, Saccharomyces cerevisiae
  CDS (1)..(1281)
atgaaattatcaactgtcctattatctgccggtttagcctcgactactttggcccaattttccaacagtacatctgcttcttccaccgatgtcacttcctcctcttccatctccacttcctctggctcagtaactatcacatcttctgaagctccagaatccgacaacggtaccagcacagctgcaccaactgaaacctcaacagaggctccaaccactgctatcccaactaacggtacctctactgaagctccaactgatactactactgaagctccaaccaccgctcttccaactaacggtacttctactgaagctccaactgatactactactgaagctccaaccaccggtcttccaaccaacggtaccacttcagctttcccaccaactacatctttgccaccaagcaacacaaccaccactcctccttacaacccatctactgactacaccactgactacaccgtagtcactgaatatactacttactgtccagaaccaaccactttcaccacaaacggtaagacttacactgtcactgaaccaaccacattgactatcactgactgtccatgcaccattgagaagccaacaaccacatcaaccaccgaatacactgtagtcactgagtacactacttactgtccagaaccaaccactttcaccacaaacggtaagacttacactgtcactgaaccaaccacattgactatcactgactgtccatgcaccattgagaagccaacaaccacatcaaccaccgaatacactgtagtcactgagtacactacttactgtccagaaccaaccactttcaccacaaacggtaagacttacactgtcactgaaccaaccacattgactatcactgactgtccatgcaccattgagaagccaacaaccacatcaaccaccgaatacactgtagtcactgagtacactacttactgtccagaaccaaccactttcaccacaaacggtaagacttacactgtcactgaaccaaccactttgactatcactgactgtccatgtactattgaaaagagcgaagcccctgagtcttctgtcccagttaccgaatctaagggcactaccaccaaagaaacaggtgttactaccaaacaaaccacagccaacccaagtctaactgtctccacagtcgtcccagtttcatcctctgcttcttctcattccgttgtcatcaacagtaacggtgctaacgtcgtcgttccaggtgctttaggtttggctggtgttgctatgttattcttataa

SEQ ID NO: 128151 - protein, 426 aa, Saccharomyces cerevisiae
MKLSTVLLSAGLASTTLAQFSNSTSASSTDVTSSSSISTSSGSVTITSSEAPESDNGTSTAAPTETSTEAPTTAIPTNGTSTEAPTDTTTEAPTTALPTNGTSTEAPTDTTTEAPTTGLPTNGTTSAFPPTTSLPPSNTTTTPPYNPSTDYTTDYTVVTEYTTYCPEPTTFTTNGKTYTVTEPTTLTITDCPCTIEKPTTTSTTEYTVVTEYTTYCPEPTTFTTNGKTYTVTEPTTLTITDCPCTIEKPTTTSTTEYTVVTEYTTYCPEPTTFTTNGKTYTVTEPTTLTITDCPCTIEKPTTTSTTEYTVVTEYTTYCPEPTTFTTNGKTYTVTEPTTLTITDCPCTIEKSEAPESSVPVTESKGTTTKETGVTTKQTTANPSLTVSTVVPVSSSASSHSVVINSNGANVVVPGALGLAGVAMLFL

SEQ ID NO: 128152 - DNA, 909 bp, Zea mays
  CDS (1)..(909)
atgggtggcagcggcagggctgctctgctgctggccctggtggtggtggccgtgagcctggccgtggagatccaggccgacgccgggtacggttacggcggcgggtacaccccgacgccgacgccggccaccccgaccccgaagcccgagaagccccccaccaaggggccgaagccggacaagccgcccaaggagcacaagccgcccaaggagcacgggcccaagccggagaagccgcccaaggagcacaagccgacgccgcccacgtacaccccgagccccaaacccacgccgccgacgtacactcccaccccgacgccccccaagccgacgccacccacatacactcccgcccctacgccccacaaacccacaccaaaacccactcccactcctccgacgtacaccccgacccccaagcctccgacacctaagccgaccccgccgacgtacactccaagccccaaacctccgacgcccaagccgaccccaccgacgtacaccccttcccccaagcctccgacacctaagccgaccccgcctacgtacactccaagccctaagccaccggctaccaagcctcccacgcccaagccgaccccgccaacgtacaccccttcgccaaagcctccgacacccaagccgaccccgccgacgtacaccccttctcccaagcctccgacgcccaagccgaccccgccgacgtacacgccaagccccaagcctcccacacacccgacgcccaagccgaccccaccgacgtacaccccttccccaaagcctccgacacccaagccgaccccaccgacgtacactcccacaccgaagccgccggccaccaagccgcccacctacactccgacgccgccggtgtctcacacccccagcccgccgccaccatactactag

SEQ ID NO: 128153 - protein, 302 aa, Zea mays
MGGSGRAALLLALVVVAVSLAVEIQADAGYGYGGGYTPTPTPATPTPKPEKPPTKGPKPDKPPKEHKPPKEHGPKPEKPPKEHKPTPPTYTPSPKPTPPTYTPTPTPPKPTPPTYTPAPTPHKPTPKPTPTPPTYTPTPKPPTPKPTPPTYTPSPKPPTPKPTPPTYTPSPKPPTPKPTPPTYTPSPKPPATKPPTPKPTPPTYTPSPKPPTPKPTPPTYTPSPKPPTPKPTPPTYTPSPKPPTHPTPKPTPPTYTPSPKPPTPKPTPPTYTPTPKPPATKPPTYTPTPPVSHTPSPPPPYY

SEQ ID NO: 128154 - DNA, 1119 bp, Zea mays
  CDS (1)..(1119)
atgatgggtggcagcggcagggctgctctgctgctggccctggtggccgtgagcctggccgtggagatccaggccgacgccgggtacgggtacaccccgacgccgacgccggccaccccgaccccgaagccggagaagccccccaccaaggggcccaagccggagaagccgccaaaggagcacaagccgcccaaggagcacgggcccaagccggagaagccgcccaaggagcacaagccgacgccgcccacgtacaccccgagccccaaacccacgccgccgacgtacactcccaccccgacgccccccaagccgacgccacccacatacactcccgcccctacgccccacaaacccactcccactcctccgacgtacaccccttcccccaaacctccgacacctaagccgaccccgccgacgtacactccaagccccaagccaccggctagcaagcctcccacgcccaagccgaccccgccgacgtacaccccttctcccaagcctccgacacctaagccgaccccgcctacgtacactccaagccccaagccaccggctaccaagcctccgacgcccaagccgaccccaccgacgtacaccccttcccccaaacctccgacacctaagccgaccccgcctacgtacactccaagccccaagccaccggctaccaagcctcccacgcccaagccgaccccgccgacgtacaccccttctcccaagcctccgacacccaagccgaccccgccgacgtacaccccttcccccaagcctccgacgcccaagccgaccccgccgacgtacactccaagccccaagcctcccacacacccgacgcccaagccgaccccaccgacgtacaccccttccccaaagcctccgacacctaagccgaccccgccgacgtacacgccttcccccaagcctccgacacccaagccgaccccaccgacgtacactccaagccccaagccaccggctaccaagcctcccacgcccaagccgaccccaccgacgtacactcccacaccgaagccgccggccaccaagccgcccacctacactccgacgccgccggtgtctcacacccccagcccgccgccaccttactactag

SEQ ID NO: 128155 - protein, 372 aa, Zea mays
MMGGSGRAALLLALVAVSLAVEIQADAGYGYTPTPTPATPTPKPEKPPTKGPKPEKPPKEHKPPKEHGPKPEKPPKEHKPTPPTYTPSPKPTPPTYTPTPTPPKPTPPTYTPAPTPHKPTPTPPTYTPSPKPPTPKPTPPTYTPSPKPPASKPPTPKPTPPTYTPSPKPPTPKPTPPTYTPSPKPPATKPPTPKPTPPTYTPSPKPPTPKPTPPTYTPSPKPPATKPPTPKPTPPTYTPSPKPPTPKPTPPTYTPSPKPPTPKPTPPTYTPSPKPPTHPTPKPTPPTYTPSPKPPTPKPTPPTYTPSPKPPTPKPTPPTYTPSPKPPATKPPTPKPTPPTYTPTPKPPATKPPTYTPTPPVSHTPSPPPPYY

SEQ ID NO: 128156 - DNA, 27 bp, Artificial sequence
  primer
atgaaattatcaactgtcctattatct

SEQ ID NO: 128157 - DNA, 26 bp, Artificial sequence
  primer
ttataagaataacatagcaacaccag

SEQ ID NO: 128158 - protein, 483 aa, Artificial sequence
  consensus sequence
  Variant (2)..(2): Xaa in position 2 is any amino acid
  Variant (4)..(6): Xaa in position 4 to 6 is any amino acid
  Variant (9)..(11): Xaa in position 9 to 11 is any amino acid
  Variant (12)..(20): Xaa in position 12 to 20 is any or no amino acid
  Variant (22)..(26): Xaa in position 22 to 26 is any amino acid
  Variant (28)..(31): Xaa in position 28 to 31 is any amino acid
  Variant (33)..(36): Xaa in position 33 to 36 is any amino acid
  Variant (37)..(41): Xaa in position 37 to 41 is any or no amino acid
  Variant (43)..(47): Xaa in position 43 to 47 is any amino acid
  Variant (49)..(49): Xaa in position 49 is any amino acid
  Variant (51)..(52): Xaa in position 51 to 52 is any amino acid
  Variant (54)..(57): Xaa in position 54 to 57 is any amino acid
  Variant (59)..(60): Xaa in position 59 to 60 is any amino acid
  Variant (62)..(65): Xaa in position 62 to 65 is any amino acid
  Variant (67)..(68): Xaa in position 67 to 68 is any amino acid
  Variant (69)..(82): Xaa in position 69 to 82 is any or no amino acid
  Variant (84)..(86): Xaa in position 84 to 86 is any amino acid
  Variant (88)..(88): Xaa in position 88 is any amino acid
  Variant (90)..(96): Xaa in position 90 to 96 is any amino acid
  Variant (98)..(98): Xaa in position 98 is any amino acid
  Variant (100)..(101): Xaa in position 100 to 101 is any amino acid
  Variant (103)..(108): Xaa in position 103 to 108 is any amino acid
  Variant (109)..(110): Xaa in position 109 to 110 is any or no amino acid
  Variant (113)..(113): Xaa in position 113 is any amino acid
  Variant (115)..(115): Xaa in position 115 is any amino acid
  Variant (117)..(118): Xaa in position 117 to 118 is any amino acid
  Variant (120)..(123): Xaa in position 120 to 123 is any amino acid
  Variant (125)..(127): Xaa in position 125 to 127 is any amino acid
  Variant (129)..(132): Xaa in position 129 to 132 is any amino acid
  Variant (134)..(139): Xaa in position 134 to 139 is any amino acid
  Variant (141)..(142): Xaa in position 141 to 142 is any amino acid
  Variant (143)..(175): Xaa in position 143 to 175 is any or no amino acid
  Variant (177)..(177): Xaa in position 177 is any amino acid
  Variant (179)..(179): Xaa in position 179 is any amino acid
  Variant (181)..(181): Xaa in position 181 is any amino acid
  Variant (183)..(187): Xaa in position 183 to 187 is any amino acid
  Variant (189)..(194): Xaa in position 189 to 194 is any amino acid
  Variant (195)..(197): Xaa in position 195 to 197 is any or no amino acid
  Variant (200)..(200): Xaa in position 200 is any amino acid
  Variant (202)..(202): Xaa in position 202 is any amino acid
  Variant (204)..(206): Xaa in position 204 to 206 is any amino acid
  Variant (207)..(211): Xaa in position 207 to 211 is any or no amino acid
  Variant (213)..(215): Xaa in position 213 to 215 is any amino acid
  Variant (217)..(217): Xaa in position 217 is any amino acid
  Variant (220)..(226): Xaa in position 220 to 226 is any amino acid
  Variant (228)..(232): Xaa in position 228 to 232 is any amino acid
  Variant (234)..(234): Xaa in position 234 is any amino acid
  Variant (236)..(244): Xaa in position 236 to 244 is any amino acid
  Variant (246)..(248): Xaa in position 246 to 248 is any amino acid
  Variant (250)..(251): Xaa in position 250 to 251 is any amino acid
  Variant (253)..(253): Xaa in position 253 is any amino acid
  Variant (255)..(255): Xaa in position 255 is any amino acid
  Variant (257)..(257): Xaa in position 257 is any amino acid
  Variant (259)..(267): Xaa in position 259 to 267 is any amino acid
  Variant (268)..(370): Xaa in position 268 to 370 is any or no amino acid
  Variant (373)..(374): Xaa in position 373 to 374 is any amino acid
  Variant (376)..(376): Xaa in position 376 is any amino acid
  Variant (378)..(379): Xaa in position 378 to 379 is any amino acid
  Variant (381)..(388): Xaa in position 381 to 388 is any amino acid
  Variant (390)..(393): Xaa in position 390 to 393 is any amino acid
  Variant (395)..(402): Xaa in position 395 to 402 is any amino acid
  Variant (404)..(409): Xaa in position 404 to 409 is any amino acid
  Variant (411)..(416): Xaa in position 411 to 416 is any amino acid
  Variant (418)..(423): Xaa in position 418 to 423 is any amino acid
  Variant (424)..(460): Xaa in position 424 to 460 is any or no amino acid
  Variant (462)..(482): Xaa in position 462 to 482 is any amino acid
GXAXXXLAXXXXXXXXXXXXVXXXXXIXXXXGXXXXXXXXXPXXXXXTXTXXPXXXXTXXPXXXXPXXXXXXXXXXXXXXXXGXXXEXPXXXXXXXPXTXXPXXXXXXXXPTXTXTXXPXXXXPXXXTXXXXPXXXXXXPXXXXXXXXXXXXXXXXXXXXXXXXXXXXXXXXXXXTXPXYXPXXXXXTXXXXXXXXXTYXPXPXXXXXXXXTXXXTXPTXXXXXXXPXXXXXPXTXXXXXXXXXTXXXTXXPXPXTXTXXXXXXXXXXXXXXXXXXXXXXXXXXXXXXXXXXXXXXXXXXXXXXXXXXXXXXXXXXXXXXXXXXXXXXXXXXXXXXXXXXXXXXXXXXXXXXXXXXXXXXXXXXXXXXXXPTXXTXTXXPXXXXXXXXPXXXXPXXXXXXXXTXXXXXXTXXXXXXPXXXXXXXXXXXXXXXXXXXXXXXXXXXXXXXXXXXXXXXXXXXPXXXXXXXXXXXXXXXXXXXXXP

SEQ ID NO: 128159 - protein, 21 aa, Artificial sequence
  protein pattern
  Variant (2)..(2): Xaa in position 2 is Ala or Gly
  Variant (3)..(3): Xaa in position 3 is Asn or Ser
  Variant (4)..(4): Xaa in position 4 is Gly or Val
  Variant (5)..(5): Xaa in position 5 is any amino acid
  Variant (6)..(6): Xaa in position 6 is Ala or Val
  Variant (7)..(7): Xaa in position 7 is Ala or Pro
  Variant (8)..(8): Xaa in position 8 is Gly or Leu
  Variant (9)..(9): Xaa in position 9 is Ala or Leu
  Variant (11)..(11): Xaa in position 11 is Ala or Gly
  Variant (13)..(15): Xaa in position 13 to 15 is any or no amino acid
  Variant (17)..(17): Xaa in position 17 is any or no amino acid
  Variant (19)..(19): Xaa in position 19 is Ala or Ser
  Variant (20)..(20): Xaa in position 20 is Leu or Met
  Variant (21)..(21): Xaa in position 21 is Ala or Leu
GXXXXXXXXLXLXXXAXVXXX

SEQ ID NO: 128160 - protein, 55 aa, Artificial sequence
  protein pattern
  Variant (3)..(5): Xaa in position 3 to 5 is any amino acid
  Variant (6)..(9): Xaa in position 6 to 9 is any or no amino acid
  Variant (11)..(11): Xaa in position 11 is Pro or Thr
  Variant (12)..(12): Xaa in position 12 is any amino acid
  Variant (13)..(13): Xaa in position 13 is Ala or Pro
  Variant (14)..(14): Xaa in position 14 is Gln or Thr
  Variant (15)..(15): Xaa in position 15 is any amino acid
  Variant (16)..(16): Xaa in position 16 is Ala or Ser
  Variant (17)..(17): Xaa in position 17 is Asn or Thr
  Variant (18)..(18): Xaa in position 18 is Pro or Ser
  Variant (20)..(20): Xaa in position 20 is Pro or Ser
  Variant (21)..(21): Xaa in position 21 is any amino acid
  Variant (22)..(22): Xaa in position 22 is Pro or Ser
  Variant (23)..(23): Xaa in position 23 is Glu or Ser
  Variant (24)..(24): Xaa in position 24 is any amino acid
  Variant (25)..(25): Xaa in position 25 is Asp or Pro
  Variant (26)..(26): Xaa in position 26 is Pro or Val
  Variant (28)..(28): Xaa in position 28 is any amino acid
  Variant (29)..(29): Xaa in position 29 is Gly or Ser
  Variant (30)..(30): Xaa in position 30 is Pro or Ser
  Variant (31)..(31): Xaa in position 31 is any amino acid
  Variant (32)..(32): Xaa in position 32 is Ile or Pro
  Variant (33)..(33): Xaa in position 33 is Asp, Glu or Ser
  Variant (34)..(34): Xaa in position 34 is any amino acid
  Variant (35)..(36): Xaa in position 35 to 36 is Pro or Ser
  Variant (37)..(37): Xaa in position 37 is any amino acid
  Variant (38)..(38): Xaa in position 38 is Glu or Ser
  Variant (39)..(40): Xaa in position 39 to 40 is any amino acid
  Variant (41)..(41): Xaa in position 41 is Ile or Pro
  Variant (42)..(42): Xaa in position 42 is Pro or Thr
  Variant (43)..(43): Xaa in position 43 is any amino acid
  Variant (44)..(44): Xaa in position 44 is Glu or Ser
  Variant (45)..(45): Xaa in position 45 is Glu or His
  Variant (46)..(46): Xaa in position 46 is Ala or Gly
  Variant (48)..(48): Xaa in position 48 is Glu or Lys
  Variant (49)..(49): Xaa in position 49 is Pro or Ser
  Variant (50)..(50): Xaa in position 50 is Asp or Glu
  Variant (51)..(51): Xaa in position 51 is any amino acid
  Variant (52)..(52): Xaa in position 52 is Gly or Pro
  Variant (53)..(53): Xaa in position 53 is Pro or Thr
  Variant (54)..(54): Xaa in position 54 is any amino acid
  Variant (55)..(55): Xaa in position 55 is Glu or Thr
AGXXXXXXXTXXXXXXXXTXXXXXXXTXXXXXXXXXXXXXXXXXXXPXXXXXXXX

SEQ ID NO: 128161 - DNA, 411 bp, SACCHAROMYCES CEREVISIAE
  CDS (1)..(411)
atgggtagagttagaaccaagaccgtcaaacgtgcctccaaggctttgattgaacgttactatccaaagttgaccttggatttccaaactaacaagagactttgtgatgaaattgcaactatccaatccaagagattgagaaacaagattgctggttacactactcatttgatgaaaagaatccaaaagggtccagttagaggtatttctttcaaattgcaagaagaagaaagagaaagaaaggatcaatacgtcccagaagtctctgctttggacttgtctcgttctaacggtgttttgaacgttgacaaccaaacctctgacttggttaaatctttgggtttgaagttgccattatctgtcatcaacgtttccgctcaaagagacagacgttacagaaagagaaactaa

SEQ ID NO: 128162 - protein, 136 aa, SACCHAROMYCES CEREVISIAE
MGRVRTKTVKRASKALIERYYPKLTLDFQTNKRLCDEIATIQSKRLRNKIAGYTTHLMKRIQKGPVRGISFKLQEEERERKDQYVPEVSALDLSRSNGVLNVDNQTSDLVKSLGLKLPLSVINVSAQRDRRYRKRN

SEQ ID NO: 128163 - DNA, 429 bp, Zea mays
  CDS (1)..(429)
atgggtcgcgtccgcaccaagaccgtgaagaagacctccaggcaggtgatcgagaagtactactcccgcatgaccctcgacttccacaccaacaagaaggtgctggaagaggtctcgatcctcccctcgaagcgcctccgcaacaaggttgccggcttcaccacccacctgatgcgccgcatccagcggggccccgtccgtggcatctcgctcaagctgcaggaggaggagcgggagcgccgcatggacttcgtcccggagaagtcagcgctcgaggtcgaagagatccgcgtcgacaaggagaccatggagatgctcgcggcacttggcatggccgatctcccgggcgtagagcgccaggctgaggtctccagcgtccccgcctacggccgcccgcagtatggaggtccccgccgtgaccgcgtctag

SEQ ID NO: 128164 - protein, 142 aa, Zea mays
MGRVRTKTVKKTSRQVIEKYYSRMTLDFHTNKKVLEEVSILPSKRLRNKVAGFTTHLMRRIQRGPVRGISLKLQEEERERRMDFVPEKSALEVEEIRVDKETMEMLAALGMADLPGVERQAEVSSVPAYGRPQYGGPRRDRV

SEQ ID NO: 128165 - DNA, 429 bp, Zea mays
  CDS (1)..(429)
atgggtcgcgtccgcaccaagaccgtgaagaagacctccaggcaggtgatcgagaagtactactcccgcatgaccctcgacttccacaccaacaagaaggtgctcgaggaggtctcgattctgccctcgaagcgcctccgcaacaaggtggctggcttcagtacccacctgatgcgccgcatccagcgcggcccagtccgcggcatctcgctcaagctgcaggaggaggagcgcgagcgccgcatggacttcgtgccggagaagtccgcgctcgaggtcgaagagatccgcgtcgacaaggagaccatggagatgctcgctgccctcggcatggccgacctgcccggcgttgagcgccaggctgaggtctccaacgcccccgcctacggccgcccgcagtacggtggtccccgccgtgaccgcgtttag

SEQ ID NO: 128166 - protein, 142 aa, Zea mays
MGRVRTKTVKKTSRQVIEKYYSRMTLDFHTNKKVLEEVSILPSKRLRNKVAGFSTHLMRRIQRGPVRGISLKLQEEERERRMDFVPEKSALEVEEIRVDKETMEMLAALGMADLPGVERQAEVSNAPAYGRPQYGGPRRDRV

SEQ ID NO: 128167 - DNA, 435 bp, Oryza sativa
  CDS (1)..(435)
atggggcgcgtgcgcacgaagacggtgaagaagacgtctcggcaggtgatcgagaagtactactcgcggatgaccctggacttccacacgaacaagaaggtgctggaggaggtgtcgatcctgccgtcgaagcgcctccgcaacaaggtggccggcttcagcacccacctgatgcgccgcatccagcgcggccccgtccgcggcatctccctcaagctccaggaggaggagcgcgagcgccgcatggacttcgtcccggacaggtcggcgctcgaggtcgacgacatccgcgtcgacaaggagaccctcgacatgctcacctccctcggcatggccgacctccccggcgtcgtgcgccagcccgacgcctccacctccgccccgcagcagtacggcgccgcccgcctcccctacgcccgccgcgaccgcgcctag

SEQ ID NO: 128168 - protein, 144 aa, Oryza sativa
MGRVRTKTVKKTSRQVIEKYYSRMTLDFHTNKKVLEEVSILPSKRLRNKVAGFSTHLMRRIQRGPVRGISLKLQEEERERRMDFVPDRSALEVDDIRVDKETLDMLTSLGMADLPGVVRQPDASTSAPQQYGAARLPYARRDRA

SEQ ID NO: 128169 - DNA, 426 bp, Oryza sativa
  CDS (1)..(426)
atgggtcgcgtgcggaccaagacggtgaagaagacctcgaggcaggtgatcgagaagtactactcgcggatgacgctcgacttccacaccaacaagaaggtgctcgaggaggtgtccatcctgccgtcgaagcggctgcgcaacaaggtggccgggttcaccacccacctgatgcgccgcatccagcgcgggcccgtgcggggcatctcgctgaagctgcaggaggaggagcgcgagcgccgcatggacttcgtcccggagaagtcggcgctcgaggtggaggagatccgcgtcgacaaggagaccatggagatgctcgccgcgctcggcatggccgacctccccggcgtcgagcgccagcaagaggtctccgcgccgacctactcccgcccgccgtacggtggcccccgccgcgaccgcgtctag

SEQ ID NO: 128170 - protein, 141 aa, Oryza sativa
MGRVRTKTVKKTSRQVIEKYYSRMTLDFHTNKKVLEEVSILPSKRLRNKVAGFTTHLMRRIQRGPVRGISLKLQEEERERRMDFVPEKSALEVEEIRVDKETMEMLAALGMADLPGVERQQEVSAPTYSRPPYGGPRRDRV

SEQ ID NO: 128171 - DNA, 423 bp, Glycine max
  CDS (1)..(423)
atggggcgtgttcgcacgaagacggtgaagaaatcctcgcggcaagtgatagagaggtactactcccgcatgacgctggacttccacacgaacaagaaggttctggaagaggtggccatcattccctccaagaggctccgcaacaagatcgcggggttctccacccatctcatgaagcggatccagaagggtcccgtgcgtggaatctccctgaagctgcaggaggaggaacgcgagcgtcgcatggacttcgtccccgatgtctccgccatcaggaccgaccagatcgaggtcgacaaggagacgctcgacatgctcgccgccctcgggatgtccgaggttcctggcatcgttcaggtggatcctgttgccgtccaggcgcccctcggcttcggccgtggcggccctggaaggaggtactaa

SEQ ID NO: 128172 - protein, 140 aa, Glycine max
MGRVRTKTVKKSSRQVIERYYSRMTLDFHTNKKVLEEVAIIPSKRLRNKIAGFSTHLMKRIQKGPVRGISLKLQEEERERRMDFVPDVSAIRTDQIEVDKETLDMLAALGMSEVPGIVQVDPVAVQAPLGFGRGGPGRRY

SEQ ID NO: 128173 - DNA, 408 bp, Glycine max
  CDS (1)..(408)
atgggtcgcgtgagaacaaaaacggtgaagaaatcctcccgccaggtgattgagcgttactactcgcgcatgaccctcgacttccacacaaacaaaaagcttctcgaagaagtggccatcatcccttccaagaggctgcggaacaagatcgcgggtttctccacgcatctcatgaagcgcatccagaagggtcccgttcgcggcatctccctcaagctccaggaggaggagcgcgagcgccgcatggacttcgtccccgacgtctccgccatcaacaccgaccacatcgaagtcgacaaagaaacccttgacatgcttcattccctcggaatcaacgacatccccggcatcacacaggttgaccctgttcctgttcaacaggccttccccttcaccaggaggtactga

SEQ ID NO: 128174 - protein, 135 aa, Glycine max
MGRVRTKTVKKSSRQVIERYYSRMTLDFHTNKKLLEEVAIIPSKRLRNKIAGFSTHLMKRIQKGPVRGISLKLQEEERERRMDFVPDVSAINTDHIEVDKETLDMLHSLGINDIPGITQVDPVPVQQAFPFTRRY

SEQ ID NO: 128175 - DNA, 408 bp, Glycine max
  CDS (1)..(408)
atgggtcgagtgagaacgaagacggtgaagaaatcctctcggcaggtgatagagcgtcactactcgcgcatgaccctggacttccacacgaacaagaagcttctggaggaagtggcgataatcccgtcgaagaggctaaggaacaagatcgcggggttctcgacgcacctgatgaagcgcatccagaagggccctgtgcgcggcatctccctcaagctccaggaggaggagcgcgagcgccgcatggacttcgtccccgacgtctccgccatcaacaccgaccacatcgaggtcgacaaggaaaccctcgacatgctccactccctcggtatcaacgacatccccggcatcacccaggttgatcctgtccctgttcagcagaacttccccttcaccaggaggtactga

SEQ ID NO: 128176 - protein, 135 aa, Glycine max
MGRVRTKTVKKSSRQVIERHYSRMTLDFHTNKKLLEEVAIIPSKRLRNKIAGFSTHLMKRIQKGPVRGISLKLQEEERERRMDFVPDVSAINTDHIEVDKETLDMLHSLGINDIPGITQVDPVPVQQNFPFTRRY

SEQ ID NO: 128177 - DNA, 423 bp, Arabidopsis thaliana
  CDS (1)..(423)
atggggcgtgttagaaccaagacggtgaagaaatcttcacgtcaagtcattgagaagtactactctcgcatgactcttgactttcacactaacaagaagatccttgaagaggttgccatcatcccatcaaagagactccgcaacaagattgctggattctccacccacttgatgaaacgtatccagaagggaccagtccgtggaatctcactcaagcttcaagaagaagagcgtgaacgccgtatggactttgttcccgatgagtctgctatcaagactgatgagatcaaggtcgacaaagagactcttgagatgcttgcttctctaggaatgtctgacacatccggcatctctgcagtcgagccacaacaagctatggcaccaatcgctgctttcggcggcagggcacccagaagatactaa

SEQ ID NO: 128178 - protein, 140 aa, Arabidopsis thaliana
MGRVRTKTVKKSSRQVIEKYYSRMTLDFHTNKKILEEVAIIPSKRLRNKIAGFSTHLMKRIQKGPVRGISLKLQEEERERRMDFVPDESAIKTDEIKVDKETLEMLASLGMSDTSGISAVEPQQAMAPIAAFGGRAPRRY

SEQ ID NO: 128179 - DNA, 426 bp, Arabidopsis thaliana
  CDS (1)..(426)
atggggcgtgttagaaccaagactgtgaagaaatcttctcgtcaagtcatcgagaagtactactctcgcatgactcttgacttccacactaacaagaaaatccttgaagaggttgccatcatcccttcaaagagactccgcaacaagattgctggattctccacccacttgatgaaacgtatccagaagggaccagtccgtggaatctcactcaagcttcaggaagaggagcgtgaacgccgcatggactttgttcccgatgagtctgccatcaagactgatgagatcaaggtggacaaagagactcttgagatgcttgcttctctaggaatgtctgacactcccggcatctctgcagtcgagccacaacaagctatggcaccaatcgctgctttcggtggtggcagggcacccagaagatactga

SEQ ID NO: 128180 - protein, 141 aa, Arabidopsis thaliana [sequence omitted]

SEQ ID NO: 128181 - DNA, 402 bp, Bombyx mori
  CDS (1)..(402)
atgggtcgtgtccggactaaaaccgtcaagaaagcggcgaagattattattgaaaaatactatacaagattaacacttgattttgatacaaataaaagaatatgtgaagaaatcgctatcattcctaccaagcctcttaggaataaaattgctggatttgccacacatttaatgaggcgtctcagacactcgcaagtgcgaggaatctctatcaaacttcaggaagaggagcgtgagaggcgtgacaactatgtcccagaagtgtctgctctcgaacatgacatcatcgaagtagaccccgacaccaaggatatgttgaagatgctggacttcaacaatattaatggcctgcaactaacacagccagctacccagggtggctatggtggcaggcgtaattaa

SEQ ID NO: 128182 - protein, 133 aa, Bombyx mori
MGRVRTKTVKKAAKIIIEKYYTRLTLDFDTNKRICEEIAIIPTKPLRNKIAGFATHLMRRLRHSQVRGISIKLQEEERERRDNYVPEVSALEHDIIEVDPDTKDMLKMLDFNNINGLQLTQPATQGGYGGRRN

SEQ ID NO: 128183 - DNA, 393 bp, Acyrthosiphon pisum
  CDS (1)..(393)
atgggtcgcgtcaggacgaagactgtcaagaaggctgccagggtcatcatcgagaagtattacactcgattaacactagacttccacaccaacaagaggatatgtgaggaaatcgctatcatccccacaaagcccctgcgtaacaaaatcgctggatttgttactcacttaatgaaaagattgcgtacaagtcaagttcgtggtatttccattaaattgcaagaagaagaacgtgagaggagagacaactatgtaccagaagtttctgctcttgaacaagatgttattgaagttgatactgaaaccaaagacatgttgaaaatgctggatttccaaaacatctcaggattacaacttgtcctcagcggaacccagtaccccaagaggaattaa

SEQ ID NO: 128184 - protein, 130 aa, Acyrthosiphon pisum
MGRVRTKTVKKAARVIIEKYYTRLTLDFHTNKRICEEIAIIPTKPLRNKIAGFVTHLMKRLRTSQVRGISIKLQEEERERRDNYVPEVSALEQDVIEVDTETKDMLKMLDFQNISGLQLVLSGTQYPKRN

SEQ ID NO: 128185 - DNA, 429 bp, Zea mays
  CDS (1)..(429)
  misc_feature (382)..(382): s is g or c
atgggtcgcgtccgcaccaagaccgtgaagaagacctccaggcaggtgatcgagaagtactactcccgcatgaccctcgacttccacaccaacaagaaggtgctcgaggaggtctcgattctgccctcgaagcgcctccgcaacaaggtggctggcttcagtacccacctgatgcgccgcatccagcgcggcccagtccgcggcatctcgctcaagctgcaggaggaggagcgcgagcgccgcatggacttcgtgccggagaagtccgcgctcgaggtcgaagagatccgcgtcgacaaggagaccatggagatgctcgctgccctcggcatggccgacctgcccggcgttgagcgccaggctgaggtctccaacgcccccscctacggccgcccgcagtacggtggtccccgccgtgaccgcgtttag

SEQ ID NO: 128186 - protein, 142 aa, Zea mays
  misc_feature (128)..(128): The Xaa at location 128 stands for Ala, or Pro.
MGRVRTKTVKKTSRQVIEKYYSRMTLDFHTNKKVLEEVSILPSKRLRNKVAGFSTHLMRRIQRGPVRGISLKLQEEERERRMDFVPEKSALEVEEIRVDKETMEMLAALGMADLPGVERQAEVSNAPXYGRPQYGGPRRDRV

SEQ ID NO: 128187 - DNA, 411 bp, Saccharomyces cerevisiae S288c
  CDS (1)..(411)
atgggtagagttagaaccaagaccgtcaagcgtgcttctaaggctttgattgaacgttactatccaaagttgactttggatttccaaaccaacaagagactttgtgatgaaatcgccactatccaatccaagagattgagaaacaagattgctggttacaccacccatttgatgaagagaatccaaaagggtccagttagaggtatctctttcaaattgcaagaagaagaaagagaaagaaaggaccaatacgtcccagaagtctctgctttggacttgtctcgttctaacggtgttttgaacgttgacaaccaaacttctgacttggttaaatctttgggtttgaagttgccattatctgttatcaacgtttctgcccaaagagacagacgttacagaaagagagtttaa

SEQ ID NO: 128188 - protein, 136 aa, Saccharomyces cerevisiae S288c
MGRVRTKTVKRASKALIERYYPKLTLDFQTNKRLCDEIATIQSKRLRNKIAGYTTHLMKRIQKGPVRGISFKLQEEERERKDQYVPEVSALDLSRSNGVLNVDNQTSDLVKSLGLKLPLSVINVSAQRDRRYRKRV

SEQ ID NO: 128189 - DNA, 426 bp, Arabidopsis thaliana
  CDS (1)..(426)
atggggcgtgttagaaccaagaccgtgaagaaatcttctcgtcaagtcattgagaagtactactctcgcatgactcttgactttcacactaacaagaagatccttgaagaggttgccatcatcccatcaaagagactccgcaacaagattgctggattctccacccacttgatgaaacgtatccagaagggaccagtccgtggaatctcactcaagcttcaagaagaagagcgtgaacgccgtatggactttgttcccgatgagtctgctatcaagactgatgagatcaaggtcgacaaagagactcttgagatgcttgcttctctaggaatgtctgacactctcggcatctctgcagtcgacccacaacaagctatggcaccaatccctgctttcggcggcggcagggcacccagaagatactaa

SEQ ID NO: 128190 - protein, 141 aa, Arabidopsis thaliana
MGRVRTKTVKKSSRQVIEKYYSRMTLDFHTNKKILEEVAIIPSKRLRNKIAGFSTHLMKRIQKGPVRGISLKLQEEERERRMDFVPDESAIKTDEIKVDKETLEMLASLGMSDTLGISAVDPQQAMAPIPAFGGGRAPRRY

SEQ ID NO: 128191 - DNA, 423 bp, Arabidopsis thaliana
  CDS (1)..(423)
atgggtcgtgttcgtaccaaaacggttaagaagtcttcacgtcaggtgattgagaagtactactcacggatgacactagacttccacaccaacaagaagatcttggaagaagttgcaatcatcccatcgaaaaggctacgcaacaagattgctggattctccactcacttgatgaaacgtatccaaaagggtccagtccgtggaatctccctcaagctacaagaggaagagcgtgaaaggcgaatggactttgttcccgatgagtcagccattaaaatcgatgatgttaaggtggacaaagagacactagagatgcttgcttctttgggaatgtctgatattgctgggatttctcaagtggagacacaacaagctatggcacctgctgtgtttggacgtcccgcaggaagataccaacgctaa

SEQ ID NO: 128192 - protein, 140 aa, Arabidopsis thaliana
MGRVRTKTVKKSSRQVIEKYYSRMTLDFHTNKKILEEVAIIPSKRLRNKIAGFSTHLMKRIQKGPVRGISLKLQEEERERRMDFVPDESAIKIDDVKVDKETLEMLASLGMSDIAGISQVETQQAMAPAVFGRPAGRYQR

SEQ ID NO: 128193 - DNA, 393 bp, Caenorhabditis elegans
  CDS (1)..(393)
atgagtcgtgttcgtaccaagaccgtcaagaaggcttcccgtgtcctcatcgagaagtactacactcgcatgaccaatgacttccataacaacaagcgcgtctgtgacgaggttgccatcatcggaagcaagccactcagaaacaagatcgctggatacatcactcacttgatgagacgtatcgagagaggaccagtcagaggtatctccatcaagcttcaagaagaggagcgtgagcgcagagacaactacatgccagagatctccactgttgatccatctcaactcacctccatcaaggttgacactgataccagcgacatgctcaaggccgctggattcaaccttccaaacgtcaccgttgaggatcaaggaaagaacaagggaaagtaa

SEQ ID NO: 128194 - protein, 130 aa, Caenorhabditis elegans
MSRVRTKTVKKASRVLIEKYYTRMTNDFHNNKRVCDEVAIIGSKPLRNKIAGYITHLMRRIERGPVRGISIKLQEEERERRDNYMPEISTVDPSQLTSIKVDTDTSDMLKAAGFNLPNVTVEDQGKNKGK

SEQ ID NO: 128195 - DNA, 396 bp, Drosophila erecta
  CDS (1)..(396)
atgggtcgcgtacgaaccaagacggtgaagaaggccgctaaggttatcatcgagaagtactacactcgcctgacgttggacttccacaccaacaagcgcatctgcgaggaggtggccatcatccccaccaagcccctgcgcaacaagattgccggctatgtcacccatttgatgggccgtctgcgccactcccaggtgcgtggcatctccatcaagttgcaggaggaggagcgtgagcgtcgcgacaactacgtccccgccgtctccgctctggagcaggacatcatcgaggtcgacgccgacaccaaggagatgttgaagcttctggacttccacaacatccgtggcctgcagctcacccagcccaacaccaacaactttggtcgtcgcaactaa

SEQ ID NO: 128196 - protein, 131 aa, Drosophila erecta
MGRVRTKTVKKAAKVIIEKYYTRLTLDFHTNKRICEEVAIIPTKPLRNKIAGYVTHLMGRLRHSQVRGISIKLQEEERERRDNYVPAVSALEQDIIEVDADTKEMLKLLDFHNIRGLQLTQPNTNNFGRRN

SEQ ID NO: 128197 - DNA, 399 bp, Schizosaccharomyces pombe
  CDS (1)..(399)
atgggtcgtgtacgcaccaaaactacgaagagagcttctcgcgtagttatcgagaaatactaccctcgtcttacattggacttccaaaccaataagaggattgtcgatgaggttgctatcattgcttccaagcgtctccgcaacaagattgctggatacacgactcatcttatgaaacgtatccaacgcggtcctgtccgtggtatttccttcaagcttcaagaagaagagcgtgagcgcaaggatcaatacgttcctgaagtctctgagctcgagaaggacaagattaacgttgatcaagacaccaaggatatgcttaaagctcttggctacgactctatccctactgtcgttgtcgctgcctctcgccctgagcgtcccttccgttacagacactaa

SEQ ID NO: 128198 - protein, 132 aa, Schizosaccharomyces pombe
MGRVRTKTTKRASRVVIEKYYPRLTLDFQTNKRIVDEVAIIASKRLRNKIAGYTTHLMKRIQRGPVRGISFKLQEEERERKDQYVPEVSELEKDKINVDQDTKDMLKALGYDSIPTVVVAASRPERPFRYRH

SEQ ID NO: 128199 - DNA, 396 bp, Schizosaccharomyces pombe
  CDS (1)..(396)
atgggtcgtgtacgtaccaaaactaccaagagagcttcccgtgtggtaattgaaaaatattaccctcgtctcactcttgatttccaaaccaacaagagaattgttgacgaagtcgctatcatcgcctctaagcgtcttcgtaataaaattgccggttacacgactcacttaatgaaacgtattcaacgtggtcccgttcgtggtatctccttcaagcttcaagaagaggagcgtgaacgcaaggatcaatacgttcctgaagtttctgagcttgaggtcgatcgtgttaacgttgaccaagacaccaaggacatgcttaagtctcttggctacgatcaaattcccgtccgtgtgcttgctcctgcccctcaagagcgtttccgtcgcagacagtaa

SEQ ID NO: 128200 - protein, 131 aa, Schizosaccharomyces pombe
MGRVRTKTTKRASRVVIEKYYPRLTLDFQTNKRIVDEVAIIASKRLRNKIAGYTTHLMKRIQRGPVRGISFKLQEEERERKDQYVPEVSELEVDRVNVDQDTKDMLKSLGYDQIPVRVLAPAPQERFRRRQ

SEQ ID NO: 128201 - DNA, 411 bp, Ashbya gossypii ATCC 10895
  CDS (1)..(411)
atgggtagagtcagaaccaagaccgtcaagcgtgcctccaaggctttgatcgagcgttactatccaaagttgactttggacttccaaaccaacaagagattgtgtgacgagatcgccaccatccagtccaagagattgagaaacaagattgcgggctacaccacccacttgatgaagagaatccaaaagggcccagtcagaggtatctccttcaagttgcaggaggaggagagagagagaaaggaccagtacgtgccagctgtctctgccttggacttgtcccacaacaagggcatgttgaacgttgacaaccagaccgccgagttggtcaagactttgggcttgaagttgccaatgtccgtcaccaacgtttccagccagagagacagaagattcagaagaagaaactaa

SEQ ID NO: 128202 - protein, 136 aa, Ashbya gossypii ATCC 10895
MGRVRTKTVKRASKALIERYYPKLTLDFQTNKRLCDEIATIQSKRLRNKIAGYTTHLMKRIQKGPVRGISFKLQEEERERKDQYVPAVSALDLSHNKGMLNVDNQTAELVKTLGLKLPMSVTNVSSQRDRRFRRRN

SEQ ID NO: 128203 - DNA, 396 bp, Apis mellifera
  CDS (1)..(396)
atgagtcgcgtcaggaccaagacggtcaaaaaggccgcaaaacttatcatcgaaaaatactatactcgattaaccatggacttccatacaaataaaaggatatgcgaagaaatcgctattattcctagcaaatctttgcgaaacaaaatcgccggatttgttactcacttgatgaaacgtcttagacacagtcaagtacgtggtatttctatcaaattgcaagaagaagaaagggaacgcagagacaactatgttcctgaagtatctgctttggaacatgatattattgaagttgacccagaaaccaaggaaatgttacaaatgcttggatttaataatatcccaggacttcaacttacacaatctcaattaccaccatatagcagacgttcttaa

SEQ ID NO: 128204 - protein, 131 aa, Apis mellifera
MSRVRTKTVKKAAKLIIEKYYTRLTMDFHTNKRICEEIAIIPSKSLRNKIAGFVTHLMKRLRHSQVRGISIKLQEEERERRDNYVPEVSALEHDIIEVDPETKEMLQMLGFNNIPGLQLTQSQLPPYSRRS

SEQ ID NO: 128205 - DNA, 411 bp, Aspergillus terreus NIH2624
  CDS (1)..(411)
atgggtcgcgtccgtaccaagaccgtcaaacgctccgccaaaatcatcatcgagcgctactacccgcgtctcaccctcgacttcgagaccaacaagcgcgtctgcgatgaagtcgccatcatcgctagcaagcgtctgcgcaacaaggtgggtacccacccgatgagacgcatccagcgcggccccgtccgcggcatctccttcaagctgcaggaggaagagcgcgaacgcaaggaccagtacatccctgaggtctcggagttggatatcacccagactgaagaggggaagctcgaggtcgatcaggagacgaaggagttgctgaagagcctcggggtaggtgatcctgcgcttttgtggctatggatgctaacgtggatacgggctgtagttcgatgcgattccggttag

SEQ ID NO: 128206 - protein, 136 aa, Aspergillus terreus NIH2624
MGRVRTKTVKRSAKIIIERYYPRLTLDFETNKRVCDEVAIIASKRLRNKVGTHPMRRIQRGPVRGISFKLQEEERERKDQYIPEVSELDITQTEEGKLEVDQETKELLKSLGVGDPALLWLWMLTWIRAVVRCDSG

SEQ ID NO: 128207 - DNA, 420 bp, Aspergillus terreus NIH2624
  CDS (1)..(420)
atgggtcgcgtccgtactaagaccgtcaagcgctccgccaaggtcatcatcgagcgttactaccccaagcttacgctcgacttcgagaccaacaagcgtctgtgcgatgaggtcgctatcattgcctccaagcgcctgcgcaacaagattgctggctatgccacccaccttatgaagcgtatccagcgtggccctgtccgcggtatctccttcaagcttcaggaggaggagcgtgagcgtaaggatcagtacgttcctgagatctccgctctggatgtttcccagaccgagtctggtcagcttgatgtcgatgccgacaccaaggacctgctcaagagcatgggcttcgacaacctcaaggtcaacgttgtccctgtctcccagcagcagcaccaggaccgcccccgccgcttccggtaa

SEQ ID NO: 128208 - protein, 139 aa, Aspergillus terreus NIH2624
MGRVRTKTVKRSAKVIIERYYPKLTLDFETNKRLCDEVAIIASKRLRNKIAGYATHLMKRIQRGPVRGISFKLQEEERERKDQYVPEISALDVSQTESGQLDVDADTKDLLKSMGFDNLKVNVVPVSQQQHQDRPRRFR

SEQ ID NO: 128209 - DNA, 438 bp, Chaetomium globosum CBS 148.51
  CDS (1)..(438)
atgggtcgcgttcgtaccaagactgtcaagaagtccgccaaggtcatcattgagcggtactaccccaagctgacgctcgacttcgagaccaacaagcgggtgtgcgatgagattgccatcatcgcctccaagaggctgcgcaacaagattgccggctacacaacccacttgatgaagcgcattcagcgtggccccgtccgcggtatctccttcaagctccaggaagaggagcgtgagcgcaaggatcaatacgtccccgaggtttccgccctcgacttctccgaggctggccagctcgaggttgacgccgagaccaaggacctgctcaagcaccttggcttcgactccatccccgtcaacgtcacccccgttacccagaaccccgtcgtcgagcgcggcggcaggcggtttggcgaccgtccgcctcgtcgcgactaa

SEQ ID NO: 128210 - protein, 145 aa, Chaetomium globosum CBS 148.51
MGRVRTKTVKKSAKVIIERYYPKLTLDFETNKRVCDEIAIIASKRLRNKIAGYTTHLMKRIQRGPVRGISFKLQEEERERKDQYVPEVSALDFSEAGQLEVDAETKDLLKHLGFDSIPVNVTPVTQNPVVERGGRRFGDRPPRRD

SEQ ID NO: 128211 - DNA, 420 bp, Coccidioides immitis RS
  CDS (1)..(420)
atgggtcgcgttagaacgaagacagtcaagaagtccgccaaggtcattattgagcgctactaccctaagctcactctcgacttcgagaccaacaagcgaatttgcgatgagatcgccatcattgcgtccaagcgtcttcgtaacaagatcgctggctacactacccatctgatgaagcgtatccaacggggtccagtccgcggtatttccttcaagctgcaagaagaggagcgtgagcgcaaggatcaatacgtcccagagatctctgctttggacatctcccagaccgagagcggtcaactcgaggtcgatactgataccaaagatctcctcaagagcctcggtttcgattccctcaaggtcaacgttgttgctgttggccaggcccagcaggctgagcgcccacgccgcttcagataa

SEQ ID NO: 128212 - protein, 139 aa, Coccidioides immitis RS
MGRVRTKTVKKSAKVIIERYYPKLTLDFETNKRICDEIAIIASKRLRNKIAGYTTHLMKRIQRGPVRGISFKLQEEERERKDQYVPEISALDISQTESGQLEVDTDTKDLLKSLGFDSLKVNVVAVGQAQQAERPRRFR

SEQ ID NO: 128213 - DNA, 420 bp, Aspergillus clavatus NRRL 1
  CDS (1)..(420)
atgggtcgcgttagaaccaagacagtcaagaggtccgccaaggtcatcatcgagcgttactaccccaagttgacgctcgacttcgagaccaacaagcgcctttgcgatgagatcgccatcattgcctccaagcgtctccgcaacaagattgctggttacaccacccacctgatgaagcgtatccagcgtggtcccgtccgcggtatctctttcaagctgcaggaggaggagcgtgagcgcaaggatcagtacgttcctgaggtctccgctctggatgtttcccagaccgagtccggccagctcgacgttgatgccgataccaaggatctgctcaagagcatgggcttcgacaacctgaaggtcaacgttgtcaacgtttcccagcagcaggtccaggagcgcccccgccgcttccggtag

SEQ ID NO: 128214 - protein, 139 aa, Aspergillus clavatus NRRL 1
MGRVRTKTVKRSAKVIIERYYPKLTLDFETNKRLCDEIAIIASKRLRNKIAGYTTHLMKRIQRGPVRGISFKLQEEERERKDQYVPEVSALDVSQTESGQLDVDADTKDLLKSMGFDNLKVNVVNVSQQQVQERPRRFR

SEQ ID NO: 128215 - DNA, 396 bp, Drosophila pseudoobscura pseudoobscura
  CDS (1)..(396)
atgggtcgcgtcagaaccaagacgatcaagaaggccgctaaggtcatcattgagaagtactacactcggttgacgatggacttccacaccaacaagcgtatctgcgaggaggtcgctatcattcccaccaagcccctccgcaacaagattgccggttacgttacccacttgatgggccgtcttcgtcactcccaggtgcgtggtatttccatcaagctgcaggaggaggagcgtgagcgtcgcgacaactacgtcccagccgtgtccgccctggagcaagacatcatcgaggtcgatcccgacaccaaggagatgttgaagctgttggacttccacaacatccgtggtctccagctcacccagcccaacaccaacaactttggtcgtcgtaattaa

SEQ ID NO: 128216 - protein, 131 aa, Drosophila pseudoobscura pseudoobscura
MGRVRTKTIKKAAKVIIEKYYTRLTMDFHTNKRICEEVAIIPTKPLRNKIAGYVTHLMGRLRHSQVRGISIKLQEEERERRDNYVPAVSALEQDIIEVDPDTKEMLKLLDFHNIRGLQLTQPNTNNFGRRN

SEQ ID NO: 128217 - DNA, 414 bp, Scheffersomyces stipitis CBS 6054
  CDS (1)..(414): transl_table=12
atgggtcgtgttagaactaaaaccgttaagagagcttccaaggtcttgattgaacgtttctaccctaagttaaccttagacttcgaaaccaacaagagattgacctctgaaatcgctgtcatccaatccaagagattaagaaataagattgctggttacaccacccacttgatgaagagaattcaaaagggtccagttagaggtatttctttcaagttacaagaagaagaaagagaaagaaaagatcaatacgttccagaagtctctgctttggacttatctcacaccaacggtcaattggaagttgactctgaaaccgctgacttggtcaagaccttgggtttcaagatcccaatccaaaccgtctccatctctgctcaaagaggtccaagacgttttgctaagagaaactaa

SEQ ID NO: 128218 - protein, 137 aa, Scheffersomyces stipitis CBS 6054
MGRVRTKTVKRASKVLIERFYPKLTLDFETNKRLTSEIAVIQSKRLRNKIAGYTTHLMKRIQKGPVRGISFKLQEEERERKDQYVPEVSALDLSHTNGQLEVDSETADLVKTLGFKIPIQTVSISAQRGPRRFAKRN

SEQ ID NO: 128219 - DNA, 420 bp, Aspergillus niger CBS 513.88
  CDS (1)..(420)
atgggtcgcgtccgtaccaagacagtcaagcgttccgctaaggtcgttatcgagcgttactaccccaagttgacgctcgacttcgagaccaacaagcgtatctgcgatgagatcgctatcattgcctccaagcgtctccgcaacaagatcgctggttacaccacccaccttatgaagcgtatccagcgtggccctgtccgcggtatctccttcaagctccaggaggaggagcgtgagcgcaaggatcagtacgttcctgaggtctccgctctggatgtttcccagaccgagtccggccagctcgacgtcgactctgagaccaaggacctgctcaagagcatgggcttcgacaacctcaaggtcaacgtcatccccgtctcccagcagcaggctcaggagcgcccccgccgctaccggtag

SEQ ID NO: 128220 - protein, 139 aa, Aspergillus niger CBS 513.88
MGRVRTKTVKRSAKVVIERYYPKLTLDFETNKRICDEIAIIASKRLRNKIAGYTTHLMKRIQRGPVRGISFKLQEEERERKDQYVPEVSALDVSQTESGQLDVDSETKDLLKSMGFDNLKVNVIPVSQQQAQERPRRYR

SEQ ID NO: 128221 - DNA, 405 bp, Ostreococcus lucimarinus CCE9901
  CDS (1)..(405)
atgggtcgcgttcgcacgaagacggtgaaaaaggcgtctcgccaaatcatcgaaaagtattactcgaggctcacgctcgactttgcgacgaacaagcgcatcgcggatgatatcgcgatcattccgtccaagcgtttgcgtaacaagattgcgggtttcacgacgcacttgatgaagcgtatccaacgcggaccggtgcgcggtatctcgctcaagcttcaagaggaggagcgtgagcgccgcatggatttcgtgccggagaagtccgcgctcgagacggactccatcgaagtcgaccgggacacgatggatatgttgaagtcgatgaacatgggtaacttgcaaggcgtttctgtgtctagccgtgcgcactacaacaagggtccgcgacgtgatcgcgcgtaa

SEQ ID NO: 128222 - protein, 134 aa, Ostreococcus lucimarinus CCE9901
MGRVRTKTVKKASRQIIEKYYSRLTLDFATNKRIADDIAIIPSKRLRNKIAGFTTHLMKRIQRGPVRGISLKLQEEERERRMDFVPEKSALETDSIEVDRDTMDMLKSMNMGNLQGVSVSSRAHYNKGPRRDRA

SEQ ID NO: 128223 - DNA, 429 bp, Ajellomyces capsulatus NAm1
  CDS (1)..(429)
atgggtcgcgtccgcactaagaccgtcaagaagtccgctaaggtcatcatcgagcgttactatcctaagctcactctcgatttcgagaccaacaagcgcatctgcgatgaaatcgctatcattgcctccaagcgtcttcgaaacaagatcgccggttataccacccacttgatgaagcgtatccagcgtggccccgtccgtggcatttccttcaagcttcaggaagaggagcgtgagcgcaaggatcaatacgtccccgagatctctgctttggacgtttcgcagtccgagagcggacagctggatgtcgatgccgacaccaaggacctgctcaagagccttggtttcgataccctcaaagtcaacgttgtcccagtcagccagcagacgaccgatagccgccctcgccgttttggcggtgcccgttaa

SEQ ID NO: 128224 - protein, 142 aa, Ajellomyces capsulatus NAm1
MGRVRTKTVKKSAKVIIERYYPKLTLDFETNKRICDEIAIIASKRLRNKIAGYTTHLMKRIQRGPVRGISFKLQEEERERKDQYVPEISALDVSQSESGQLDVDADTKDLLKSLGFDTLKVNVVPVSQQTTDSRPRRFGGAR

SEQ ID NO: 128225 - DNA, 444 bp, Botryotinia fuckeliana B05.10
  CDS (1)..(444)
atgggtcgcgttcgtaccaagactgttaagaagtccgccaaggtcattatcgagagatattacccaaagttgactctcgatttcgagaccaacaagagaatctgtgatgagatcgccatcattgcttccaagagactccgcaacaagattgccggttacaccacccatttgatgaagcgtattcaacgtggaccagtccgtggtatctccttcaagctccaagaagaggagagagaacgtaaggatcaatacgttccagaggtttctgctctcgatgtttccagcactgagagcggacaactcgaggttgatgtcgagacaaaggacctcctcaagtcccttggtttcgattctatcccatgcaacgtcaccccagtcactcaagcacaaaccaccgagcgtggaccaagacgattcggcgacagacctgcccgcagagaataa

SEQ ID NO: 128226 - protein, 147 aa, Botryotinia fuckeliana B05.10
MGRVRTKTVKKSAKVIIERYYPKLTLDFETNKRICDEIAIIASKRLRNKIAGYTTHLMKRIQRGPVRGISFKLQEEERERKDQYVPEVSALDVSSTESGQLEVDVETKDLLKSLGFDSIPCNVTPVTQAQTTERGPRRFGDRPARRE

SEQ ID NO: 128227 - DNA, 444 bp, Sclerotinia sclerotiorum 1980 UF-70
  CDS (1)..(444)
atgggtcgcgttcgtaccaagacagttaagaagtccgccaaggtcattatcgagagatactacccaaagttgactctcgatttcgagaccaacaagagaatctgtgatgagatcgccatcattgcttccaagcgtctccgtaacaagatcgccggttacaccacccatttgatgaagcgtattcaacgtggaccagtccgtggtatctccttcaagcttcaagaagaagagagagaacgtaaggatcaatacgttccagaggtttctgctctcgatgtttccagcaccgagagcggacaacttgaggttgatgttgagacaaaggagctcctcaagagccttggtttcgattctatcccatgcaacgttaccccagttactcaagcacaaactaccgagcgtggaccaagacgattcggcgacagacctgcccgcagagaataa

SEQ ID NO: 128228 - protein, 147 aa, Sclerotinia sclerotiorum 1980 UF-70
MGRVRTKTVKKSAKVIIERYYPKLTLDFETNKRICDEIAIIASKRLRNKIAGYTTHLMKRIQRGPVRGISFKLQEEERERKDQYVPEVSALDVSSTESGQLEVDVETKELLKSLGFDSIPCNVTPVTQAQTTERGPRRFGDRPARRE

SEQ ID NO: 128229 - DNA, 396 bp, Nasonia vitripennis
  CDS (1)..(396)
atgggtcgcgttaggacgaagactatcaaaaaggctgctcgagtcatcatcgagaagtactatacaagattgactcttgacttccacactaacaaaagattatgtgaggaaatcgctatcattccaagcaagcccttgaagaacaagattgctggatttgttacccatctcatgaagaggcttcgtcacagccaagtacgtggtatttccatcaaattgcaagaagaagagagagaacgtagggataactacgttccagaagtttctgctttggagcacgacattattgaagttgatccagaaactaaggagatgctcaagatgttggagttcaccaatattcctggactacagatctcccaaccaacgccacatggatttggtagacgtgcttaa

SEQ ID NO: 128230 - protein, 131 aa, Nasonia vitripennis
MGRVRTKTIKKAARVIIEKYYTRLTLDFHTNKRLCEEIAIIPSKPLKNKIAGFVTHLMKRLRHSQVRGISIKLQEEERERRDNYVPEVSALEHDIIEVDPETKEMLKMLEFTNIPGLQISQPTPHGFGRRA

SEQ ID NO: 128231 - DNA, 402 bp, Nematostella vectensis
  CDS (1)..(402)
atgggtcgcgtcagaaccaagaccgttaagaaggctgctcgggtcattatcgagaagtactacacccgactaacactagatttccataccaacaagagggtatgcgaggaaatcgccatcattcccagcaaaaagctgaggaataaaattgctgggtttgttacccatctgatgaagcgtatccagaagggtgctgtacgtggcatctccatcaagctgcaggaggaggagcgcgagcgcagggacaactacgtcccggaggtgtctgccctggagcaagaactcattgaagttgaccctgagacaaaggaaatgttgaaggtcctggactttggcggcatccccaaccttcaggtgacgcagccaatcacggcaacacagaatttccgccctcgacagtag

SEQ ID NO: 128232 - protein, 133 aa, Nematostella vectensis
MGRVRTKTVKKAARVIIEKYYTRLTLDFHTNKRVCEEIAIIPSKKLRNKIAGFVTHLMKRIQKGAVRGISIKLQEEERERRDNYVPEVSALEQELIEVDPETKEMLKVLDFGGIPNLQVTQPITATQNFRPRQ

SEQ ID NO: 128233 - DNA, 411 bp, Vanderwaltozyma polyspora DSM 70294
  CDS (1)..(411)
atgggtagagttagaaccaagactgttaagcgtgcctccaaggctttgattgaacgttactatccaaagttgactttggatttccaaaccaacaagagattgtgtgatgaaatcgctaccatccaatccaagagattgagaaacaagatcgctggttacactacccacttgatgaagagaattcaaaagggtccagttagaggtatctctttcaagttacaagaagaagaaagagaaagaaaggatcaatacgtcccagaagtttctgctttggacttgtctcactctaacggtgttttgaacgttgacaaccaaactgctgatttggttaaatctttaggtttgaaattgccattatctgtcaccaaggtttcttctcaagccagcagacgtttcagaagaagagcttaa

SEQ ID NO: 128234 - protein, 136 aa, Vanderwaltozyma polyspora DSM 70294
MGRVRTKTVKRASKALIERYYPKLTLDFQTNKRLCDEIATIQSKRLRNKIAGYTTHLMKRIQKGPVRGISFKLQEEERERKDQYVPEVSALDLSHSNGVLNVDNQTADLVKSLGLKLPLSVTKVSSQASRRFRRRA

SEQ ID NO: 128235 - DNA, 393 bp, Aedes aegypti
  CDS (1)..(393)
atgggtcgtgttcgtacaaagaccgtcaagaaggcctctaaggtcattattgagaaatactacacccggttgacgatggatttccacacgaacaagcggatcgtcgaagaagtggccatcattccaacgaagcccctgcgcaataagatcgctggtttcgtgacacatctgatgaagcgcctgcgccactcccaggtccgtggtatctccatcaagctgcaggaggaggaacgtgagcgcagagacaactacgtgccggaagtgtccgccctggagcaggacatcatcgaagtcgacccggagaccaaggagatgttgaagcagctggacttcaacaacatcgttgtccaggtcaccaacccatcggcacagggctacagccgccggaactaa

SEQ ID NO: 128236 - protein, 130 aa, Aedes aegypti
MGRVRTKTVKKASKVIIEKYYTRLTMDFHTNKRIVEEVAIIPTKPLRNKIAGFVTHLMKRLRHSQVRGISIKLQEEERERRDNYVPEVSALEQDIIEVDPETKEMLKQLDFNNIVVQVTNPSAQGYSRRN

SEQ ID NO: 128237 - DNA, 420 bp, Chlamydomonas reinhardtii
  CDS (1)..(420)
atgggtcgtgtgcgcaccaagaccgtgaagaaggcttctcgtgttatcatcgagaagtactatggccgcctcaccatggacttcgacaccaacaagcgtgtcgttgaggaggtggctctgattgccaccaagcgcctgcgcaacaagattgccggcttcaccactcacctgatgaagcgcattcagcgcggccccgtgcgcggcatctccctgaagctccaggaggaggagcgcgagcgccgcatggacttcgtgcccgaggagtccgccatcaacaccctgtcgatcgaggtggacaaggacaccatggatatgctcaagtccatcaacatgggcaccctgtcgggcgtccagctggcgcagccccagaccaacttcaagccctacggcggcaaccgcggcggcaacaagcagcagtaa

SEQ ID NO: 128238 - protein, 139 aa, Chlamydomonas reinhardtii
MGRVRTKTVKKASRVIIEKYYGRLTMDFDTNKRVVEEVALIATKRLRNKIAGFTTHLMKRIQRGPVRGISLKLQEEERERRMDFVPEESAINTLSIEVDKDTMDMLKSINMGTLSGVQLAQPQTNFKPYGGNRGGNKQQ

SEQ ID NO: 128239 - DNA, 366 bp, Hemiselmis andersenii
  CDS (1)..(366)
atgggacgcgtgaaaaccaaaactgttaaaaaatcagctcgttttttgttagaaaaatactattctagcttgactcttgattttcaaacaaataaaaaaatatgtgacgaggttgcattgattccatcaaaaggcttaagaaataaaatagcaggctatgttactcacttgtcgaaaagaataaaaaaaggtccggtccgaggaatttctttgaaattacaagaaaatgaaaaagattcaaaaatagagccaaaaatttcagagttaattaagacaactgaaaccatagaagttgatattgaaaccaaatctttaattttttcattgtttgaaaattccccggaaactttaaaaatgtttaaataa

SEQ ID NO: 128240 - protein, 121 aa, Hemiselmis andersenii
MGRVKTKTVKKSARFLLEKYYSSLTLDFQTNKKICDEVALIPSKGLRNKIAGYVTHLSKRIKKGPVRGISLKLQENEKDSKIEPKISELIKTTETIEVDIETKSLIFSLFENSPETLKMFK

SEQ ID NO: 128241 - DNA, 435 bp, Physcomitrella patens subsp. patens
  CDS (1)..(435)
atgggtcgtgtgagaaccaaaaccgtgaagaaggcctcgagggtcatgatcgagaggtactactctcgcatgactctggacttccagaccaacaagaagattgccgaggaggtagcaatcattccgtcgaagagactccgcaacaagatcgccgggttcgccacccacttgatgaagcgcatccagagagggccagtgagaggaatctctctgaagttgcaggaggaggagcgcgagaggcgcatggacttcgtgccggaggagtcggccatcaagaccgacgtgattgaggtggacagggaaacgatcgagctgttggcacacttgaacatgccccagcttccaggagtggtacagcaagctgctcccaccacaggaggagggttcttcaagcctcaggggggaggttatcagggcaacaggaataggaattag

SEQ ID NO: 128242 - protein, 144 aa, Physcomitrella patens subsp. patens
MGRVRTKTVKKASRVMIERYYSRMTLDFQTNKKIAEEVAIIPSKRLRNKIAGFATHLMKRIQRGPVRGISLKLQEEERERRMDFVPEESAIKTDVIEVDRETIELLAHLNMPQLPGVVQQAAPTTGGGFFKPQGGGYQGNRNRN

SEQ ID NO: 128243 - DNA, 441 bp, Physcomitrella patens subsp. patens
  CDS (1)..(441)
atggaacagggacgtgtaaggaccaaaaccgtgaagaaggcctcaagggtcatgatcgagaggtactactctcgcatgaccctggacttccagaccaacaagaagattgccgaggaggtggcaatcatcccgtcgaagaggctccgcaacaagatcgccgggttcgccactcacctgatgaagcgcatccagagagggccagtgcgcggaatctctctgaagctgcaggaggaggagcgcgagaggcgcatggacttcgtgccggaggagtcagcgatcaagactgacgtgatcgaggtggatagggagacgatcgagctgttggctcacctgaacatgcctcagctgccgggagtggtgcagcaggcagcccctaccgcgggaggagggttcttcaagccccaggggggaggataccaaggcaacaggaacaggaattag

SEQ ID NO: 128244 - protein, 146 aa, Physcomitrella patens subsp. patens
MEQGRVRTKTVKKASRVMIERYYSRMTLDFQTNKKIAEEVAIIPSKRLRNKIAGFATHLMKRIQRGPVRGISLKLQEEERERRMDFVPEESAIKTDVIEVDRETIELLAHLNMPQLPGVVQQAAPTAGGGFFKPQGGGYQGNRNRN

SEQ ID NO: 128245 - DNA, 435 bp, Physcomitrella patens subsp. patens
  CDS (1)..(435)
atgggacgtgtaaggaccaaaaccgtgaagaaggcctcaagggtcatgatcgagaggtactactctcgcatgaccctggacttccagaccaacaagaagattgccgaggaggtggcaatcatcccgtcgaagaggctccgcaacaagatcgccgggttcgccactcacctgatgaagcgcatccagagagggccagtgcgcggaatctctctgaagctgcaggaggaggagcgcgagaggcgcatggacttcgtgccggaggagtcagcgatcaagactgacgtgatcgaggtggatagggagacgatcgagctgttggctcacctgaacatgcctcagctgccgggagtggtgcagcaggcagcccctaccgcgggaggagggttcttcaagccccaggggggaggataccaaggcaacaggaacaggaattag

SEQ ID NO: 128246 - protein, 144 aa, Physcomitrella patens subsp. patens
MGRVRTKTVKKASRVMIERYYSRMTLDFQTNKKIAEEVAIIPSKRLRNKIAGFATHLMKRIQRGPVRGISLKLQEEERERRMDFVPEESAIKTDVIEVDRETIELLAHLNMPQLPGVVQQAAPTAGGGFFKPQGGGYQGNRNRN

SEQ ID NO: 128247 - DNA, 441 bp, Phaeosphaeria nodorum SN15
  CDS (1)..(441)
atgggtcgcgttcgaacaaagaccgtcaagaagtccgccaaggtcatcattgagcgatactaccccaagttgtcgctggacttcgagaccaacaagaggatctgcgatgagatcgccatcattgcctccaagcgtctcaggaacaagattgccggatacacaacacatttgatgaagcgtatccagcgtggtcccgtccgcggtatctccttcaagctccaagaagaggagcgtgagcgcaaggatcaatacgtccccgagatctctgccctcgacttcacccagaacagcgagtctggtgctctcgacgtcgaccaggagaccaaggacctcctcaagagcctcggctttgactccatccccacaaacgtcattgcagtctcccagcaacaagttgtcgagcgtccccgccgcttcaacgaccgccctgcccgcacttag

SEQ ID NO: 128248 - protein, 146 aa, Phaeosphaeria nodorum SN15
MGRVRTKTVKKSAKVIIERYYPKLSLDFETNKRICDEIAIIASKRLRNKIAGYTTHLMKRIQRGPVRGISFKLQEEERERKDQYVPEISALDFTQNSESGALDVDQETKDLLKSLGFDSIPTNVIAVSQQQVVERPRRFNDRPART

SEQ ID NO: 128249 - DNA, 426 bp, Aspergillus oryzae RIB40
  CDS (1)..(426)
atgggtcgcgttcgcacaaagaccgtcaagcggtccgccaaggtcatcattgagcgttactaccccaagctcacccttgacttcgaggtcaacaagaagctttgcgatgaggtggccatcattgccagcaagcgcctgcgcaacaagattgccggatacaccactcacttgatgaagcgtatccagcgcggccctgttcgtggtatctccttcaagctccaggaggaggagcgtgagcgtaaggatcaatacgttcctgaggtctccgctctcgacttcagccagcactccgagactggcaagctcgacgttgaccaggacaccaaggatctccttaagagcattggtttcgactctatccccaccaacgtcatccaggtttcccagcagcaggtctccgaccgtccccgccgcttcgtccggtaa

SEQ ID NO: 128250 - protein, 141 aa, Aspergillus oryzae RIB40
MGRVRTKTVKRSAKVIIERYYPKLTLDFEVNKKLCDEVAIIASKRLRNKIAGYTTHLMKRIQRGPVRGISFKLQEEERERKDQYVPEVSALDFSQHSETGKLDVDQDTKDLLKSIGFDSIPTNVIQVSQQQVSDRPRRFVR

SEQ ID NO: 128251 - DNA, 435 bp, Coprinopsis cinerea okayama7#130
  CDS (1)..(435)
atgggtcgagttcgcacaaaaaccgtcaaaagggcttctcgtgtcttgatcgagaaatactacccccgcctcaccctcgatttccacaccaacaagcgaatcatcgatgaagtcgctgtcgttccctccaagcgtctgcgcaacaagatctccggcttcaccacccacttgatgaagcgaattcaaaagggccccgtccgtggtatctccttcaagctccaggaagaggagcgtgagcgcaaggacaactacatccccgaagtctccgctttggacacctctacgactggtctcgaggttgaccccgataccaaggctctccttgactcgctcaactttgacagcatccctgtcaacgtcgtccttcccgtctctgccctccccgagcgtgggcctcggcgagaccgaaggaacgtcccaggagctggccgataa

SEQ ID NO: 128252 - protein, 144 aa, Coprinopsis cinerea okayama7#130
MGRVRTKTVKRASRVLIEKYYPRLTLDFHTNKRIIDEVAVVPSKRLRNKISGFTTHLMKRIQKGPVRGISFKLQEEERERKDNYIPEVSALDTSTTGLEVDPDTKALLDSLNFDSIPVNVVLPVSALPERGPRRDRRNVPGAGR

SEQ ID NO: 128253 - DNA, 396 bp, Culex quinquefasciatus
  CDS (1)..(396)
atgggtcgcgttcgtaccaaaaccgtcaagaaggcctcgaaggtcatcatcgagaagtactacacccggctgaccatggacttccacacgaacaaacgcatcgtcgaggaggtggccatcattccgacgaagccactgcgcaacaagattgccggtttcgtgacgcatctgatgaagcgtctgcgccactcccaggtccgcggtatctcgatcaagctgcaggaggaggagcgcgaacgtcgcgacaactacgtgccggaggtgtccgcgctggagcacgacatcatcgaggtcgacccggagacgaaggagatgttgaagcatctggactttaacaacatcgtcgtccaggtcacgaacccgtccgcccagggctacaacagcaggcgaaactag

SEQ ID NO: 128254 - protein, 131 aa, Culex quinquefasciatus
MGRVRTKTVKKASKVIIEKYYTRLTMDFHTNKRIVEEVAIIPTKPLRNKIAGFVTHLMKRLRHSQVRGISIKLQEEERERRDNYVPEVSALEHDIIEVDPETKEMLKHLDFNNIVVQVTNPSAQGYNSRRN

SEQ ID NO: 128255 - DNA, 402 bp, Brugia malayi
  CDS (1)..(402)
atggtttgcggacgtgtacgaacaaaaaccgtgaagaaagcttcacgtgtaattattgagaagtattatactaagctgacacatgacttccatacaaataaacgaatttgcgaggaaattgcagttattccgagcaaaaaaatgaggaaccgcattgcgggttatataacacacttgatgaaacgtatcgaaaagggaccggttcgtggtatttcaatcaaattacaagaggaagaaagagagcgtcgcgataactacatgccggatatttctgtcgttgatccgcgaatgttgaccacaattgaagtagatacggaaaccaagcagatgattgagtcaatggaactgagtattccgatgaccgacaagacagcaagtacgggaatggctggtcgaagataa

SEQ ID NO: 128256 - protein, 133 aa, Brugia malayi
MVCGRVRTKTVKKASRVIIEKYYTKLTHDFHTNKRICEEIAVIPSKKMRNRIAGYITHLMKRIEKGPVRGISIKLQEEERERRDNYMPDISVVDPRMLTTIEVDTETKQMIESMELSIPMTDKTASTGMAGRR

SEQ ID NO: 128257 - DNA, 447 bp, Podospora anserina S mat+
  CDS (1)..(447)
atgggtcgcgttcgtaccaagactgtcaagaagtccgccaaggtcatcattgagcggtactaccccaagttgactctcgacttcgagaccaacaagcgtgtctgcgatgagatcgccatcattgcctccaagcgcctccgcaacaagattgccggctacaccacccacttgatgaagcgcattcagcgtggccccgtccgcggtatctccttcaagcttcaggaggaggagcgtgagcgcaaggatcagtacgttcccgaggtctccgctctcgacttcacccagaactccgagagcggccaactcgatgtcgataccgagactaaggacctccttaagcacctcggcttcgacgccatccccgtcaatgtcatccccgttacccagaaccccgctgttgagcgtggcccccgccgcttcggtggtgaccgcccccgccgcgactaa

SEQ ID NO: 128258 - protein, 148 aa, Podospora anserina S mat+
MGRVRTKTVKKSAKVIIERYYPKLTLDFETNKRVCDEIAIIASKRLRNKIAGYTTHLMKRIQRGPVRGISFKLQEEERERKDQYVPEVSALDFTQNSESGQLDVDTETKDLLKHLGFDAIPVNVIPVTQNPAVERGPRRFGGDRPRRD

SEQ ID NO: 128259 - DNA, 444 bp, Pyrenophora tritici-repentis Pt-1C-BFP
  CDS (1)..(444)
atgggtcgcgtccgaactaagaccgtcaagaagtccgccaaggtcatcattgagcgttactaccccaagttgtcgctcgacttcgagaccaacaagaggatctgcgatgagattgccatcatcgcctccaagaggctccgaaacaagatcgccggatacaccactcacttgatgaagcgtatccagcgtggtcccgtccgtggtatctcgttcaagcttcaagaagaggagcgtgagcgcaaggaccaatacgtccccgagatctctgctctcgacttcacccagaacagcgagtctggctcgctcgatgtcgaccaggagaccaaggacctcctcaagagcatgggcttcgacagcatccccaccaacgtcattgccgtctctcagcaacaggttgtcgagcgcggtccccgccgcttcaacgaccgccccggccgctcgtaa

SEQ ID NO: 128260 - protein, 147 aa, Pyrenophora tritici-repentis Pt-1C-BFP
MGRVRTKTVKKSAKVIIERYYPKLSLDFETNKRICDEIAIIASKRLRNKIAGYTTHLMKRIQRGPVRGISFKLQEEERERKDQYVPEISALDFTQNSESGSLDVDQETKDLLKSMGFDSIPTNVIAVSQQQVVERGPRRFNDRPGRS

SEQ ID NO: 128261 - DNA, 396 bp, Drosophila ananassae
  CDS (1)..(396)
atgggtcgtgtacgaaccaagaccgtgaagaaggccgctaaggtcatcattgagaagtactacacgcgtctgacgctggacttccacaccaacaagcgcatctgcgaggaggtggccatcattcccaccaagcccctccgcaacaagattgccggctatgtcacccacttgatgggtcgcctgcgtcactcccaggtgcgtggtatctccatcaagctgcaggaggaggagcgtgagcgtcgcgacaactacgtcccggccgtctccgctctggagcaggacatcatcgaggtcgatgccgacaccaaggagatgttgaagctgctggacttccacaacatccgtggactccaactcaccaaccccaacaccaacaactttggtcgtcgcaactaa

SEQ ID NO: 128262 - protein, 131 aa, Drosophila ananassae
MGRVRTKTVKKAAKVIIEKYYTRLTLDFHTNKRICEEVAIIPTKPLRNKIAGYVTHLMGRLRHSQVRGISIKLQEEERERRDNYVPAVSALEQDIIEVDADTKEMLKLLDFHNIRGLQLTNPNTNNFGRRN

SEQ ID NO: 128263 - DNA, 399 bp, Drosophila grimshawi
  CDS (1)..(399)
atggcaggtcgcgtcagaaccaagacagtgaagaaggccgctaaggtcatcattgagaagtactacacgcgcctgacgttggacttccacaccaacaagcgtatctgcgaggaggttgctatcattcccaccaagcccctccgcaacaagattgccggttatgttacccatctgatgggccgtctgcgtcactcccaggtgcgtggtatctccatcaagctgcaggaggaggagcgcgagcgtcgtgataattacgtgcccgccgtctctgccctggagcaggacatcatcgaggtcgatgccgataccaaggagatgttgaaactgttggacttccacaatattcgtggcctgcagctcacccagcccaataccaacaattttggacgtcgcaattag

SEQ ID NO: 128264 - protein, 132 aa, Drosophila grimshawi
MAGRVRTKTVKKAAKVIIEKYYTRLTLDFHTNKRICEEVAIIPTKPLRNKIAGYVTHLMGRLRHSQVRGISIKLQEEERERRDNYVPAVSALEQDIIEVDADTKEMLKLLDFHNIRGLQLTQPNTNNFGRRN

SEQ ID NO: 128265 - DNA, 402 bp, Drosophila virilis
  CDS (1)..(402)
atgtgcagcggtcgcgtcagaaccaagactgtgaagaaggccgccaaggtcatcattgagaagtactacacacgcctgacgttggatttccacaccaacaagcgtatctgcgaggaggttgccatcattcccaccaagcccctctgcaacaagattgccggctatgttacccacttgatgggccgtctgcgtcactcccaggtgcgcggtatttcgatcaagctgcaggaagaggagcgcgagcgtcgtgacaactacgttccggctgtctccgctctggagcaggacatcatcgatgtcgatgccgacaccaaggagatgttgaaactgttggacttccacaacattcgtggcctgcagcttacccagcccaacaccaacaactttggacgtcgcaattag

SEQ ID NO: 128266 - protein, 133 aa, Drosophila virilis
MCSGRVRTKTVKKAAKVIIEKYYTRLTLDFHTNKRICEEVAIIPTKPLCNKIAGYVTHLMGRLRHSQVRGISIKLQEEERERRDNYVPAVSALEQDIIDVDADTKEMLKLLDFHNIRGLQLTQPNTNNFGRRN

SEQ ID NO: 128267 - DNA, 408 bp, Drosophila willistoni
  CDS (1)..(408)
atgttgaacatttatggtcgcgtcagaaccaagacagtaaagaaggccgccaaggtcatcattgagaagtactacacacgtctcacattggacttccacaccaacaagcgcatctgcgaggaggttgctatcattcccaccaagcccctgcgcaacaagattgccggttatgttacccatttgatgggccgtctgcgtcactcccaggtgcgtggtatttccatcaaactgcaggaggaggagcgcgagcgtcgtgataactacgtgcccgccgtttccgctctggagcaggacatcatcgaggttgatcccgataccaaggagatgttgaagctgttggacttccacaacattcgtggtctgcagttgactcagcccaacaccaacaactttggacgtcgcaattag

SEQ ID NO: 128268 - protein, 135 aa, Drosophila willistoni
MLNIYGRVRTKTVKKAAKVIIEKYYTRLTLDFHTNKRICEEVAIIPTKPLRNKIAGYVTHLMGRLRHSQVRGISIKLQEEERERRDNYVPAVSALEQDIIEVDPDTKEMLKLLDFHNIRGLQLTQPNTNNFGRRN

SEQ ID NO: 128269 - DNA, 396 bp, Drosophila yakuba
  CDS (1)..(396)
atgggtcgcgtacgaaccaagacggtgaagaaggccgctaaggtcatcatcgagaagtactacactcgcctgacgttggacttccacaccaacaagcgcatctgcgaggaggtggccatcatccccaccaagcccctgcgcaacaagattgccggctatgtcacccatttgatgggccgtctgcgccactcccaggtgcgtggtatctccatcaagttgcaggaggaggagcgtgagcgtcgcgacaactacgtcccggccgtctccgctctggagcaggacatcatcgaggtcgacgccgacaccaaggagatgttgaagcttctggacttccacaacatccgtggcctgcagctcacccagcccaacaccaacaactatggtcgtcgcaactaa

SEQ ID NO: 128270 - protein, 131 aa, Drosophila yakuba
MGRVRTKTVKKAAKVIIEKYYTRLTLDFHTNKRICEEVAIIPTKPLRNKIAGYVTHLMGRLRHSQVRGISIKLQEEERERRDNYVPAVSALEQDIIEVDADTKEMLKLLDFHNIRGLQLTQPNTNNYGRRN

SEQ ID NO: 128271 - DNA, 408 bp, Trichoplax adhaerens
  CDS (1)..(408)
atgggtcgggtacgtacaaaaactgttaagaaggctgctagggtcatcatcgaaaaatattacacccgtttaaccttcgatttccataccaacaagaggatttgtgaagaggttgctatcattcctagcaagaaattacgaaacaagattgctggttttgctacacatttaatgaggcgcatccaacgtggaccagtccgtggtatttccatcaagttgcaggaagaagaaagagaaagaagggataattttgtacctgaagtttctgaattggctcaagaagttattgaagtcgactctgataccagggacttattgcgtgagatgaatgttatggatgacatcactaacttacaagttgtgcaacccattgagaactttagaggtgctattggtggaagacaataa

SEQ ID NO: 128272 - protein, 135 aa, Trichoplax adhaerens
MGRVRTKTVKKAARVIIEKYYTRLTFDFHTNKRICEEVAIIPSKKLRNKIAGFATHLMRRIQRGPVRGISIKLQEEERERRDNFVPEVSELAQEVIEVDSDTRDLLREMNVMDDITNLQVVQPIENFRGAIGGRQ

SEQ ID NO: 128273 - DNA, 420 bp, Ciona intestinalis
  CDS (1)..(420)
atgggtcgagtcagaaccaaaacagtaaaaaaggcggctagggttatcattgagaagtactacatgaaactaacccttgatttccacaccaacaagcgcgtatgcgaagaaatagcaattattccaagcaagaaattgcgaaaccaaatcgctggcttcgttacgcatttgatgaagcgaatccgtgtcggacccgtccgtggtatctccattaaactccaggaggaagaacgtgagcgacgtgacaactatgtgcccgatgtttctgctcttgaccaagatattattgaagttgacccaaccactaaagaaatgttgaaatctcttgatttcggaaacatcccgggtctgcagctcatgcagtctggaaacaacttcaacaaccagaaccgaggcaaccaaggataccaagctcgctaa

SEQ ID NO: 128274 - protein, 139 aa, Ciona intestinalis
MGRVRTKTVKKAARVIIEKYYMKLTLDFHTNKRVCEEIAIIPSKKLRNQIAGFVTHLMKRIRVGPVRGISIKLQEEERERRDNYVPDVSALDQDIIEVDPTTKEMLKSLDFGNIPGLQLMQSGNNFNNQNRGNQGYQAR

SEQ ID NO: 128275 - DNA, 420 bp, Penicillium marneffei ATCC 18224
  CDS (1)..(420)
atgggtcgcgtccgcacaaagaccgtcaagaagtccgccaaggtcatcatcgagcgttactaccccaagttgacgctcgacttcgagaccaacaagcgtctttgcgatgaaatcgccatcattgcctccaagcgtcttcgcaacaagattgctggttacaccacccatttgatgaagcgtatccagcgtggtcccgtccgcggtatctccttcaagctccaggaagaggagcgtgagcgcaaggatcaatacgttcctgagatctccgctttggacgtttctcagtccgagtctggccagcttgatgtcgatgctgataccaaggatctcctcaagagcctcggcttcgactccctcaaggtcaacgttgtccaagtctcccagcagcagcagactgagcgccctcgccgcttccggtaa

SEQ ID NO: 128276 - protein, 139 aa, Penicillium marneffei ATCC 18224
MGRVRTKTVKKSAKVIIERYYPKLTLDFETNKRLCDEIAIIASKRLRNKIAGYTTHLMKRIQRGPVRGISFKLQEEERERKDQYVPEISALDVSQSESGQLDVDADTKDLLKSLGFDSLKVNVVQVSQQQQTERPRRFR

SEQ ID NO: 128277 - DNA, 402 bp, Hydra magnipapillata
  CDS (1)..(402)
atgggtcgagtccgcacaaagaccgtcaaaaaggcttctagagttattattgaaaagtattacactcggctcactcatgatttccacactaataaaagaatttgtgaggaaattgcaattattccaagcaaaaagcttcgaaataaaatagcagggtttataactcatttgatgaaacgtatagagcttgggcctgttcgtgggatttctattaaactccaagaagaagaaagagaacgtcgtgataactatgttcctgaggtctctgctttggagcaagaagtaatagaagttgatccatatacaaaagaaatgcttaaagttcttgattttgcagatattcctaatttacaagtcactcaaccgatcactgctcccggtcttcgtcctgctcagaagtaa

SEQ ID NO: 128278 - protein, 133 aa, Hydra magnipapillata
MGRVRTKTVKKASRVIIEKYYTRLTHDFHTNKRICEEIAIIPSKKLRNKIAGFITHLMKRIELGPVRGISIKLQEEERERRDNYVPEVSALEQEVIEVDPYTKEMLKVLDFADIPNLQVTQPITAPGLRPAQK

SEQ ID NO: 128279 - DNA, 399 bp, Schizosaccharomyces japonicus yFS275
  CDS (1)..(399)
atgggtcgtgtgcgtaccaagactaccaagagagcttctcgcgtcgtcattgagaagtactacccccggttgaccttggacttccaaaccaacaagaagatcattgatgaggttgccatcattgcctccaagcgtctccgcaacaagatcgctggatacacgactcatttgatgaagcgtatccaacgtggccccgtccgcggcatctccttcaagcttcaagaggaggagcgtgagcgcaaggatcaatacgttcctgagcactctgagctcgacgtcgagaaggtcgacgttgaccaagagaccaaggacttgctccacgctcttggttacgaccaagtccctgtcaaggttgttgctcctgttgttcaagagcaacgtttccgtcgtagacagtaa

SEQ ID NO: 128280 - protein, 132 aa, Schizosaccharomyces japonicus yFS275
MGRVRTKTTKRASRVVIEKYYPRLTLDFQTNKKIIDEVAIIASKRLRNKIAGYTTHLMKRIQRGPVRGISFKLQEEERERKDQYVPEHSELDVEKVDVDQETKDLLHALGYDQVPVKVVAPVVQEQRFRRRQ

SEQ ID NO: 128281 - DNA, 405 bp, Schizosaccharomyces japonicus yFS275
  CDS (1)..(405)
atgaccggtcgcgtacgtaccaagactaccaagagagcctctcgcgttgtcattgagaagtactaccctcgtctcacgttggacttccaaaccaacaagaagatcattgatgaggttgccatcattgcctccaagcgtctccgcaacaagatcgctggatacacgactcatttgatgaagcgtatccaacgtggccccgtccgcggtatctccttcaagcttcaagaggaggagcgtgagcgcaaggatcaatacgttcccgagcactctgagctcgacgtcgagaaggttgaggttgaccaagagaccaaggacttgctccacgctcttggttacgaccaggtccctaccactgttgttgctcctgtccgtcaagagcgtaacttccgttacaacagacactag

SEQ ID NO: 128282 - protein, 134 aa, Schizosaccharomyces japonicus yFS275
MTGRVRTKTTKRASRVVIEKYYPRLTLDFQTNKKIIDEVAIIASKRLRNKIAGYTTHLMKRIQRGPVRGISFKLQEEERERKDQYVPEHSELDVEKVEVDQETKDLLHALGYDQVPTTVVAPVRQERNFRYNRH

SEQ ID NO: 128283 - DNA, 435 bp, Vitis vinifera
  CDS (1)..(435)
atgggaagagtgcggacaaaaacggtgaagaagtcctctcgccaagtgatcgaaaggtactattctcgaatgaccctcgattttcatactaacaagaaaatccttgaggaggtcgccatcatcccctcgaagcgcctccgcaacaagatcgccggattctccacccacctcatgaagcggatccaaaagggccctgttcgcggaatctctctaaagcttcaagaggaagagcgggagcgccgcatggacttcgtgccagatgagtcggccatcaagaccgatgtgattaaggttgataaggagaccatagacatgctgtcggcgcttggaatggctgagcttccgggtgttgttgagactgagccggaggtggtggctccggccatggtgttcggccgcggtggtgcaggcggtgccggtggaaggaggtactga

SEQ ID NO: 128284 - protein, 144 aa, Vitis vinifera
MGRVRTKTVKKSSRQVIERYYSRMTLDFHTNKKILEEVAIIPSKRLRNKIAGFSTHLMKRIQKGPVRGISLKLQEEERERRMDFVPDESAIKTDVIKVDKETIDMLSALGMAELPGVVETEPEVVAPAMVFGRGGAGGAGGRRY

SEQ ID NO: 128285 - DNA, 426 bp, Vitis vinifera
  CDS (1)..(426)
atggggcgcgtccgtaccaagacggtgaagaaatcctcaaggcaagtgattgaacgttactactcacgtatgactctggacttccatacaaataagaaggtccttgaagaagttgccatcattccctccaagcgtcttcgcaacaagatcgctggattctccactcatttgatgaagcggattcaaaagggtcccgtcagaggcatctcccttaagctccaagaagaagagcgcgagcgtcgcatggacttcgtgcctgacgtctccgccatcaacactgatgagattcctgtcgacaaggagactcttgatatgcttgctatgctagggatgaatgatcttccgggtgtggtcaaggcggagcccgttgtggtttcttctcagcctgcttttggccggagtattctagataggaagaggtattga

SEQ ID NO: 128286 - protein, 141 aa, Vitis vinifera
MGRVRTKTVKKSSRQVIERYYSRMTLDFHTNKKVLEEVAIIPSKRLRNKIAGFSTHLMKRIQKGPVRGISLKLQEEERERRMDFVPDVSAINTDEIPVDKETLDMLAMLGMNDLPGVVKAEPVVVSSQPAFGRSILDRKRY

SEQ ID NO: 128287 - DNA, 423 bp, Populus trichocarpa
  CDS (1)..(423)
atgggtcgtgttcgtactaagacagtgaagaagtcctcacgccaggttattgagaggtactactctaaaatgacattggatttccacaccaacaagaagattttggaagaggttgctatcatcccctccaagaggctccgcaacaagattgctgggttctctacccatctaatgaagcgtattcagaagggaccagtccgtggcatctcactgaaacttcaagaggaagagcgcgagcgtcgtatggactttgtgcctgaagagtctgccattaagatccaagagattaaagttgacaaagagaccattgacatgcttgctgcccttggtatgtcagactttcctgggattgttgaagttgaacctcagcctatggttcctacccagggctttggcagaggaggtggtgctaggaggtactag

SEQ ID NO: 128288 - protein, 140 aa, Populus trichocarpa
MGRVRTKTVKKSSRQVIERYYSKMTLDFHTNKKILEEVAIIPSKRLRNKIAGFSTHLMKRIQKGPVRGISLKLQEEERERRMDFVPEESAIKIQEIKVDKETIDMLAALGMSDFPGIVEVEPQPMVPTQGFGRGGGARRY

SEQ ID NO: 128289 - DNA, 414 bp, Candida dubliniensis CD36
  CDS (1)..(414): transl_table=12
atgggtcgtgttagaactaagactgttaaaagagcttccaaggttttgatcgaaagattttacccaaaattgactttggatttcgaaactaacaaaagattgacttctgaaattgctgtcattcaatctaaaagattaagaaacaagattgctggttacaccacccatttgatgaaaagaattcaaaaaggtccagttagaggtatttctttcaaattacaagaagaagaaagagaaagaaaggatcaatacgttccagaagtttctgctttggacttgtctcacactaatggtcaattagaaattgatgctgatactgctgatttggtcaaatctttgggtttcaagattccagttcaaactgtttcaatctctgctcaaagaggtccaagaagatttgctaaaagaaactaa

SEQ ID NO: 128290 - protein, 137 aa, Candida dubliniensis CD36
MGRVRTKTVKRASKVLIERFYPKLTLDFETNKRLTSEIAVIQSKRLRNKIAGYTTHLMKRIQKGPVRGISFKLQEEERERKDQYVPEVSALDLSHTNGQLEIDADTADLVKSLGFKIPVQTVSISAQRGPRRFAKRN

SEQ ID NO: 128291 - DNA, 396 bp, Pediculus humanus corporis
  CDS (1)..(396)
atgggtcgtgttaggacgaaaactgttaaaaaagcagctagaaatatcattgaaaaatattacacacgtttaacattggattttcacacaaataaaagaatatgcgaagaaattgccgtcattcctacaaaaccattgaggaataaaattgctggattcgtgacgcatttaatgaaaaggctacgtcacagtcaagttagaggtatttcaataaaacttcaagaagaagaacgtgaaagacgtgataattacgtaccggaagtatctgcacttgaacatgatattattgaagtagatccagaaactaaagatatgttaaagatgttggaattcagcaacatcagcggtttgcaactcacacaaccagctgctcaaacttttggacgaagaccttaa

SEQ ID NO: 128292 - protein, 131 aa, Pediculus humanus corporis
MGRVRTKTVKKAARNIIEKYYTRLTLDFHTNKRICEEIAVIPTKPLRNKIAGFVTHLMKRLRHSQVRGISIKLQEEERERRDNYVPEVSALEHDIIEVDPETKDMLKMLEFSNISGLQLTQPAAQTFGRRP

SEQ ID NO: 128293 - DNA, 429 bp, Sorghum bicolor
  CDS (1)..(429)
atgggtcgcgtccgcaccaagaccgtgaagaagacctccaggcaggtgatcgagaagtactactcccggatgaccctggacttccacaccaacaagaaggtgctggaggaggtctcgatcctgccctcaaagcgcctccgcaacaaggtggcggggttcaccacccacctgatgcgccgcatccagcgcggccccgtccgcggcatctccctcaagctgcaggaggaggagcgcgagcggcgcatggacttcgtcccggagaagtcggcgctcgaggtcgaggagatccgcgtcgacaaggagaccatggagatgctcgcggccctcggcatggccgacctccccggcgtcgagcgccagcaagaggtctccaacgcccccgcctacggccgcccgcagtacggtggtccccgccgtgaccgcgtctag

SEQ ID NO: 128294 - protein, 142 aa, Sorghum bicolor
MGRVRTKTVKKTSRQVIEKYYSRMTLDFHTNKKVLEEVSILPSKRLRNKVAGFTTHLMRRIQRGPVRGISLKLQEEERERRMDFVPEKSALEVEEIRVDKETMEMLAALGMADLPGVERQQEVSNAPAYGRPQYGGPRRDRV

SEQ ID NO: 128295 - DNA, 420 bp, Talaromyces stipitatus ATCC 10500
  CDS (1)..(420)
atgggtcgcgtcaggacaaagaccgttaagaagtccgccaaggtcatcattgaacgttactaccccaagttgacgctcgacttcgagaccaacaagcgtctttgcgatgagatcgccatcattgcctccaagcgtcttcgcaacaagattgctgggtacaccacccatttgatgaagcgtatccaacgtggtcccgtccgtggtatctccttcaagctccaggaagaagagcgtgagcgcaaggatcaatacgtccctgaaatctcggctttggatgtttctcagtccgagtctggtcagcttgatgttgatggtgataccaaggatctccttaagagcctcggcttcgactccctcaaggtcaatgtcgtccaagtctctcagcagcaggtcactgagcgccctcgccgattccggtaa

SEQ ID NO: 128296 - protein, 139 aa, Talaromyces stipitatus ATCC 10500
MGRVRTKTVKKSAKVIIERYYPKLTLDFETNKRLCDEIAIIASKRLRNKIAGYTTHLMKRIQRGPVRGISFKLQEEERERKDQYVPEISALDVSQSESGQLDVDGDTKDLLKSLGFDSLKVNVVQVSQQQVTERPRRFR

SEQ ID NO: 128297 - DNA, 411 bp, Pichia pastoris GS115
  CDS (1)..(411)
atgggacgcgtgagaacaaagacagtcaagagagcctctaaggttctgattgagcgttattatccaaagctcactttggactttgagaccaacaaacgcctgaccgctgaggtcgctgagattcagtcaaagcgtttaagaaataagattgctggttacaccacccacttgatgcgcagaatccaaaatggaccagttagaggtatttcttttaaattgcaagaagaggagagagagagaaaagaccaatacgttccagaagtttctgctttggacctttccaacaccaaggaccagttacacttggatgcagacactgaacaacttgtcaactcattgggtttcaaactgccaattgcagttgttcctgtttcttcaactagggctcctgctagaagactcagaaagtaa

SEQ ID NO: 128298 - protein, 136 aa, Pichia pastoris GS115
MGRVRTKTVKRASKVLIERYYPKLTLDFETNKRLTAEVAEIQSKRLRNKIAGYTTHLMRRIQNGPVRGISFKLQEEERERKDQYVPEVSALDLSNTKDQLHLDADTEQLVNSLGFKLPIAVVPVSSTRAPARRLRK

SEQ ID NO: 128299 - DNA, 411 bp, Zygosaccharomyces rouxii CBS 732
  CDS (1)..(411)
atgggtagagttagaactaagaccgttaagcgtgcctctaaggctttgattgaacgttactatccaaagttgagtttggaattccaaaccaacaagagattatgtgatgaaattgccaccatccaatccaagagattgagaaacaagatcgctggttacagtacccacttgatgaagagaatccaaaagggtcctgtcagaggtatctctttcaaattgcaagaagaagaaagagaaagaaaggaccaatacgttccagatgtctctgccttggacttgtctcactctaagggtgttttgaacgttgacaaccaaacttctgacttggttaagtctctaggtttgaaattgccattgtccgttaccaacgtttctgctcaaagagagagacgtttcagaagaagagtctaa

SEQ ID NO: 128300 - protein, 136 aa, Zygosaccharomyces rouxii CBS 732
MGRVRTKTVKRASKALIERYYPKLSLEFQTNKRLCDEIATIQSKRLRNKIAGYSTHLMKRIQKGPVRGISFKLQEEERERKDQYVPDVSALDLSHSKGVLNVDNQTSDLVKSLGLKLPLSVTNVSAQRERRFRRRV

SEQ ID NO: 128301 - DNA, 435 bp, Ricinus communis
  CDS (1)..(435)
atgggtcgtgtccgtacaaaaacagtgaagaaatcatcacgacaagtgatagaacggtactattcaaagatgacactcgattttcacacaaacaagaaaatcttggaagaagtagcaataatcccatcaaagcgtcttcgtaacaagattgctgggttttccacccatttgatgaaacggatccagaagggtccggtcagaggtatttcgctgaaacttcaagaggaagagagagagcgccgcatggactttgtgcctgaagtttcagccatcaaaactgatcagatcgaggttgataaggagactattgacatgcttgctgctcttggtatgggtgatatgcctggcctcgttcaggtggaccctgttgctgctgtgcccgtcgcccagtttgggtttggtagaggtgccggtggacctggcaggaggttttga

SEQ ID NO: 128302 - protein, 144 aa, Ricinus communis
MGRVRTKTVKKSSRQVIERYYSKMTLDFHTNKKILEEVAIIPSKRLRNKIAGFSTHLMKRIQKGPVRGISLKLQEEERERRMDFVPEVSAIKTDQIEVDKETIDMLAALGMGDMPGLVQVDPVAAVPVAQFGFGRGAGGPGRRF

SEQ ID NO: 128303 - DNA, 435 bp, Ricinus communis
  CDS (1)..(435)
atgggtcgtgttcgtacgaaaacagtgaagaaatcatcacgacaagtgatagaacggtattattcaaaaatgacactcgattttcacacaaacaagaaaatcttggaagaagtagcaataatcccatcaaagcgtcttcgtaacaagattgctgggttttccacccatttgatgaaacggatccagaagggtccggtcagaggtatttcgctgaaacttcaagaggaagagagagagcgtcgcatggactttgtgcctgaagtttcggctatcaaaactgatcagattgaggttgataaggagactattgacatgctttctgctcttggtatggctgatatgcctggtctcgtccaggtggaccctgttgctgctgtgcccgttgcccagtttgggtttggtagaggtgctggtggacctggcaggagattttga

SEQ ID NO: 128304 - protein, 144 aa, Ricinus communis
MGRVRTKTVKKSSRQVIERYYSKMTLDFHTNKKILEEVAIIPSKRLRNKIAGFSTHLMKRIQKGPVRGISLKLQEEERERRMDFVPEVSAIKTDQIEVDKETIDMLSALGMADMPGLVQVDPVAAVPVAQFGFGRGAGGPGRRF

SEQ ID NO: 128305 - DNA, 432 bp, Ricinus communis
  CDS (1)..(432)
atggggcgcgtacgcacaaagacggtgaagaaatcttcacggcaagtagtagaacgctattactctcgcatgactctggacttccacacgaataagaaaatcctggaagaggtagcaatcatcccatcgaagcgtctccggaacaagattgctggcttctctacccatctgatgaagcgtattcaaaagggtccagttcgcgggatctctttgaaacttcaagaagaagagcgtgaacgccgcatggactttgtccctgaagtatctgctatcaagactgatcagattgaggttgataaagagactatcgacatgctttctgctcttggtatgtccgatattcctggcattgtccaggttgatcccgttgctgttcttgttcctcagtttgggtttggacgtggtgccggtggccccggaaggaggttttga

SEQ ID NO: 128306 - protein, 143 aa, Ricinus communis
MGRVRTKTVKKSSRQVVERYYSRMTLDFHTNKKILEEVAIIPSKRLRNKIAGFSTHLMKRIQKGPVRGISLKLQEEERERRMDFVPEVSAIKTDQIEVDKETIDMLSALGMSDIPGIVQVDPVAVLVPQFGFGRGAGGPGRRF

SEQ ID NO: 128307 - DNA, 420 bp, Uncinocarpus reesii 1704
  CDS (1)..(420)
atgggtcgcgttagaacgaagacagtcaagaagtccgcaaaggtcatcattgagcgctactacccaaagctcaccctcgacttcgagaccaacaagcgaatttgcgatgagatcgctatcattgcttccaagcgtcttcgtaacaagattgccggatacaccacccatctgatgaagcgtatccaacggggtcctgtccgcggtatctccttcaagctccaagaagaagagcgtgagcgcaaggatcaatacgtcccagagatctctgctctggacatttcccagactgagactggccagctcgaggttgatgctgatactaaggatctcctcaagagcctcggtttcgattcactcaaagtcaacgtcgttgctgtcggtcaagctcaacagtcggaacgccctcgtcgctttagataa

SEQ ID NO: 128308 - protein, 139 aa, Uncinocarpus reesii 1704
MGRVRTKTVKKSAKVIIERYYPKLTLDFETNKRICDEIAIIASKRLRNKIAGYTTHLMKRIQRGPVRGISFKLQEEERERKDQYVPEISALDISQTETGQLEVDADTKDLLKSLGFDSLKVNVVAVGQAQQSERPRRFR

SEQ ID NO: 128309 - DNA, 411 bp, Lachancea thermotolerans CBS 6340
  CDS (1)..(411)
atgggtagagttagaaccaagaccgtcaagcgtgcctccaaggctttgatcgagcgttactatccaaagttgactttggacttccaaaccaacaagagaatgtgtgacgagatcgccaccatccagtccaagagattgagaaacaagattgctggttacaccacccacttgatgaagagaatccagaagggcccagtcagaggtatctctttcaagctacaagaggaggagagagagagaaaggaccagtacgtcccagctgtctctgctttggacttgtcccactctaagggtgtgttgaacgttgacaaccaaaccgccgacttggtcaagaacttgggtttgaagttgccattgtccgtctccaacgtttctgctcaaagagagagacgttacagaagaagaaactaa

SEQ ID NO: 128310 - protein, 136 aa, Lachancea thermotolerans CBS 6340
MGRVRTKTVKRASKALIERYYPKLTLDFQTNKRMCDEIATIQSKRLRNKIAGYTTHLMKRIQKGPVRGISFKLQEEERERKDQYVPAVSALDLSHSKGVLNVDNQTADLVKNLGLKLPLSVSNVSAQRERRYRRRN

SEQ ID NO: 128311 - DNA, 426 bp, Penicillium chrysogenum Wisconsin 54-1255
  CDS (1)..(426)
atgggtcgcgtccgtaccaagacagtcaagcgctccgctaaggtcatcatcgagcgttactaccccaagttgaccctcgacttcgagaccaacaagcgcatctgtgatgagatcgccatcattgcctccaagcgtcttcgcaacaagatcgctggttacactacccacttgatgaagcgcatccagcgtggtcccgtccgcggtatctccttcaagcttcaggaggaggagcgtgagcgcaaggatcagtacgttcctgaggtctccgctctcgacgtctcccagaccgagtccggccagctcgacgttgacgccgacaccaaggacctcctcaagtccatgggcttcgacaacctcaaggtcaacgttgttgctgtcagccagcagcagcaggccgagcgcccccgtcgtttcggtccccgctaa

SEQ ID NO: 128312 - protein, 141 aa, Penicillium chrysogenum Wisconsin 54-1255
MGRVRTKTVKRSAKVIIERYYPKLTLDFETNKRICDEIAIIASKRLRNKIAGYTTHLMKRIQRGPVRGISFKLQEEERERKDQYVPEVSALDVSQTESGQLDVDADTKDLLKSMGFDNLKVNVVAVSQQQQAERPRRFGPR

SEQ ID NO: 128313 - DNA, 363 bp, Schistosoma mansoni
  CDS (1)..(363)
atgggtcgagtccgaacaaagacagtgaagaaagcttcgaggtatataatcgaaaggttttactccaaactgacccgagacttccatacaaacaaattcgtttgtcaagacatcgcatgcatagggtcaaaaagattgcgaaacatgatcgcaggttatgtgactcatttgatgaagcgtttcgaagctggccctgtgcgtggtattagtattaagcttcaggaagaagaaagagaacgaagagacaactaccagccggaggtttcaatatttgattctatggcccttgaaattgaccccgtagcacaagaaatgttgcaaagcatgaacgttgctcatgcgaagaacatacgtttggtctaa

SEQ ID NO: 128314 - protein, 120 aa, Schistosoma mansoni
MGRVRTKTVKKASRYIIERFYSKLTRDFHTNKFVCQDIACIGSKRLRNMIAGYVTHLMKRFEAGPVRGISIKLQEEERERRDNYQPEVSIFDSMALEIDPVAQEMLQSMNVAHAKNIRLV

SEQ ID NO: 128315 - DNA, 429 bp, Ajellomyces dermatitidis SLH14081
  CDS (1)..(429)
atgggtcgcgtccgcactaagaccgtcaagaagtccgccaaggtcatcattgagcggtactatcccaagctcactctagacttcgagaccaacaagcgcatttgcgatgagatcgctattattgcctccaagcgtctgcgcaacaagattgccggctacaccacccacttgatgaagcgtatccagcgcggccctgtccgtggtatctccttcaagctgcaggaggaggagcgtgagcgcaaggatcaatacgtccccgagatctcggctttggacgtctcgcagaccgagagcggacagctggatgttgatgctgataccaaggacctgctcaagagcctcggttttgatgccctcaaggtcaacgtcgtcccagtcagccagcagacgagcgataaccgccctcgtcgctatggcggtggccgttaa

SEQ ID NO: 128316 - protein, 142 aa, Ajellomyces dermatitidis SLH14081
MGRVRTKTVKKSAKVIIERYYPKLTLDFETNKRICDEIAIIASKRLRNKIAGYTTHLMKRIQRGPVRGISFKLQEEERERKDQYVPEISALDVSQTESGQLDVDADTKDLLKSLGFDALKVNVVPVSQQTSDNRPRRYGGGR

SEQ ID NO: 128317 - DNA, 393 bp, Caenorhabditis briggsae
  CDS (1)..(393)
atgtctcgcgttcgtaccaagaccgtcaagaaggcttcccgtgtcctcatcgagaagtactacactcgcatgaccaatgacttccacaacaacaagcgcgtttgcgacgaggttgccatcatcggaagcaagccactcagaaacaagatcgccggatacatcacccatttgatgagacgtatcgagagaggaccagtcagaggtatctccatcaagcttcaagaggaggagcgtgagcgcagagataactacatgccagaaatctctactgtcgatccatcccaacttgtctccatcaaggtcgactctgacaccaatgacatgctcaaggccgctggattcaacctcccgaacgtcgtcgttgaggaccaaggaaagaacaagggaaagtaa

SEQ ID NO: 128318 - protein, 130 aa, Caenorhabditis briggsae
MSRVRTKTVKKASRVLIEKYYTRMTNDFHNNKRVCDEVAIIGSKPLRNKIAGYITHLMRRIERGPVRGISIKLQEEERERRDNYMPEISTVDPSQLVSIKVDSDTNDMLKAAGFNLPNVVVEDQGKNKGK

SEQ ID NO: 128319 - DNA, 405 bp, Saccoglossus kowalevskii
  CDS (1)..(405)
atgggtcgtgtcaggactaaaacaatcaagaaggcggcgcgtgtaattattgagaaatattacactcgcctgacacttgattttcacaccaataagagagtttgtgaagaaatagccatcattccgagcaagaagctacgaaacaagattgctgggtttgtgacccatcttatgaggcgtattcagcgtggtccagtcaggggtatatcaattaagcttcaagaagaggagcgagaaaggagagacaactttgtgccagatgtatccgctctcgaacaagacatcattgaagtggactctgatacaaaggagatgttgaaagttttggattttggcagtattaccaatctgcaagtgacacagccaatcacacctggtgtgagtttcaggggacccagaacgtaa

SEQ ID NO: 128320 - protein, 134 aa, Saccoglossus kowalevskii
MGRVRTKTIKKAARVIIEKYYTRLTLDFHTNKRVCEEIAIIPSKKLRNKIAGFVTHLMRRIQRGPVRGISIKLQEEERERRDNFVPDVSALEQDIIEVDSDTKEMLKVLDFGSITNLQVTQPITPGVSFRGPRT

SEQ ID NO: 128321 - DNA, 429 bp, Paracoccidioides brasiliensis Pb01
  CDS (1)..(429)
atgggtcgtgttcggactaagaccgtcaagaaatccgccaaggtcatcatcgagcggtactatcccaagcttaccctcgattttgagaccaacaagcgcatatgtgatgagatagctatcattgcctccaagcgtctgcgcaacaagattgctggatatactacacacctgatgaaacgtatccagcgcggtcccgtccgtggtatctccttcaagctgcaggaggaggagcgtgagcgcaaggatcaatatgtgcccgagatctccgctttggacgtctcgcagaccgagagtggacagttggatgttgatgctgataccaaggatctgctcaagagcctcggtttcgatgccctcaaggtcaacgtcgtccccgttacccaacagcagagcgaaaaccgccctcgtcgctttggaggtgcccgctaa

SEQ ID NO: 128322 - protein, 142 aa, Paracoccidioides brasiliensis Pb01
MGRVRTKTVKKSAKVIIERYYPKLTLDFETNKRICDEIAIIASKRLRNKIAGYTTHLMKRIQRGPVRGISFKLQEEERERKDQYVPEISALDVSQTESGQLDVDADTKDLLKSLGFDALKVNVVPVTQQQSENRPRRFGGAR

SEQ ID NO: 128323 - DNA, 444 bp, Tuber melanosporum Mel28
  CDS (1)..(444)
atgggtcgcgttcgcacaaagaccgtcaaaaagtcttccaagatcatcattgagagatactaccccaagcttacccttgacttcgagaccaacaagcgaatctgcgatgagatcgctattatcgcttccaagagattaaggaacaagatcgccggatacaccacccatttgatgaagcgtatcgagagaggtcccgtccgtggcatctccttcaagcttcaggaggaggagcgtgagaggaaggatcaatatgttcccgatatctcggctcttgactacgctgcgagtgatagcgctaccttggaagttgataccgaaaccaaggacttgttgaagcacttgggctttgacgctatccctgtcaccgtcatccctgtggctcaacaacaacctcaggacaacaggaggttcggcggtgggaacagacccccaaggagagattaa

SEQ ID NO: 128324 - protein, 147 aa, Tuber melanosporum Mel28
MGRVRTKTVKKSSKIIIERYYPKLTLDFETNKRICDEIAIIASKRLRNKIAGYTTHLMKRIERGPVRGISFKLQEEERERKDQYVPDISALDYAASDSATLEVDTETKDLLKHLGFDAIPVTVIPVAQQQPQDNRRFGGGNRPPRRD

SEQ ID NO: 128325 - DNA, 426 bp, Arthroderma otae CBS 113480
  CDS (1)..(426)
atgggtcgcgttaggacaaagaccgtcaagaaatccgccaagagcatcattgagcgatactatcccaagctcactcttgatttcgagaccaacaagcgtatctgcgatgagatcgctatcatttcctccaagcgcctccgcaacaagattgccggttacaccacgcacttgatgaagcgtatccagcgtggtccagtccgcggtatctccttcaagcttcaggaggaggagcgtgagcgcaaggatcaatacgttccagagatctctgcacttgacatctcccagaccgagagcggccagctcgacgttgacgccgataccaaggaccttctcaagagcctcggatttgatgccctcaaggtcaacgttatcccagtctctcagcaaacgcagaaccccgatggtcgacgattcgaccgtcgctaa

SEQ ID NO: 128326 - protein, 141 aa, Arthroderma otae CBS 113480
MGRVRTKTVKKSAKSIIERYYPKLTLDFETNKRICDEIAIISSKRLRNKIAGYTTHLMKRIQRGPVRGISFKLQEEERERKDQYVPEISALDISQTESGQLDVDADTKDLLKSLGFDALKVNVIPVSQQTQNPDGRRFDRR

SEQ ID NO: 128327 - DNA, 417 bp, Arabidopsis lyrata subsp. lyrata
  CDS (1)..(417)
atggggcgtgtaagaaccaagaccgtgaagaaatcttctcgtcaagtcattgagaagtactactctcgcatgactcttgactttcacactaacaagaagatccttgaagaggttgccatcatcccttcaaagagactccgcaacaagattgctggattctccacccacttgatgaaacgtattcagaagggaccagtccgtggaatctcactcaagcttcaagaagaagagcgtgaacgccgcatggactttgttcccgatgagtctgctatcagaaccgatgagatcaaggtcgacaaagagactcttgagatgcttgcttctctaggaatgtctgacactcccggcatctctgcagtcgagccacaaactatggcaccaatccctgctttcggcagagcacccagaagatactaa

SEQ ID NO: 128328 - protein, 138 aa, Arabidopsis lyrata subsp. lyrata
MGRVRTKTVKKSSRQVIEKYYSRMTLDFHTNKKILEEVAIIPSKRLRNKIAGFSTHLMKRIQKGPVRGISLKLQEEERERRMDFVPDESAIRTDEIKVDKETLEMLASLGMSDTPGISAVEPQTMAPIPAFGRAPRRY

SEQ ID NO: 128329 - DNA, 420 bp, Arabidopsis lyrata subsp. lyrata
  CDS (1)..(420)
atgggtcgcgttcgcacgaagactgtgaagaaatcatctcgtcaggtgatcgagaagtactactctcgcatgactcttgatttccacacgaacaagaagatcctcgaagaagtcgcaatcatcccatcgaagagactccgcaacaagatcgctggtttctccactcatctcatgaagaggatccaaaagggacctgtccgtggaatctccctcaagcttcaggaggaagagcgtgagcgccgtatggactttgtccctgacgaatccgccattaaaaccgatcacatcgaggtcgataaggagacgcttgagatgcttgcttccttgggaatgtctgagctaccaggtgttgttaaggtggatccagccgctgctgctccggttgctgcatttggattgggtcgtggaaggaggtactag

SEQ ID NO: 128330 - protein, 139 aa, Arabidopsis lyrata subsp. lyrata
MGRVRTKTVKKSSRQVIEKYYSRMTLDFHTNKKILEEVAIIPSKRLRNKIAGFSTHLMKRIQKGPVRGISLKLQEEERERRMDFVPDESAIKTDHIEVDKETLEMLASLGMSELPGVVKVDPAAAAPVAAFGLGRGRRY

SEQ ID NO: 128331 - DNA, 417 bp, Arabidopsis lyrata subsp. lyrata
  CDS (1)..(417)
atgggtcgtgttcgtaccaaaacagtgaagaagtcttcacgtcaggtgattgagaagtactactctcggatgactctggacttccacaccaacaaaaagatcttagaagaagttgcaatcatcccatctaaaaggctacgcaacaagattgctggattctccactcacttgatgaaacgtatccaaaagggtccagtccgtggaatctccctcaagctacaagaggaagagcgtgaaagacgcatggactttgtccccgatgagtcagccattaaaaccgatgatgttaaggtggacaaagagactctagagatgcttgcttctttgggaatgtctgatactcgtgggatttctcaagtggagacacaacaagctatggcacctgctgtgtttggacggccggcaagaagatactaa

SEQ ID NO: 128332 - protein, 138 aa, Arabidopsis lyrata subsp. lyrata
MGRVRTKTVKKSSRQVIEKYYSRMTLDFHTNKKILEEVAIIPSKRLRNKIAGFSTHLMKRIQKGPVRGISLKLQEEERERRMDFVPDESAIKTDDVKVDKETLEMLASLGMSDTRGISQVETQQAMAPAVFGRPARRY

SEQ ID NO: 128333 - DNA, 396 bp, Anopheles gambiae str. PEST
  CDS (1)..(396)
atgggtcgtgtacgtaccaagacgatcaagaaggcctcgaaggtcatcatcgagaagtactacactcgattgaccatggatttcgacactaacaagcgtattgtcgaagaagtggccatcattccgacgaaaccactgcgtaacaagattgctggttttgtaacccatctgatgaagcgcctgcgtcactcgcaagtgcgtggtatttccatcaagctccaggaagaagagcgtgagcgtcgcgataactatgtgccggatgtttcagcactggagcaggatatcattgaggtggatccagagacgaaggagatgttgaagcatcttgacttcaataacatcgttgtccagttgaccaacccgaccgctccaggatacagcaatcgacgcaactaa

SEQ ID NO: 128334 - protein, 131 aa, Anopheles gambiae str. PEST
MGRVRTKTIKKASKVIIEKYYTRLTMDFDTNKRIVEEVAIIPTKPLRNKIAGFVTHLMKRLRHSQVRGISIKLQEEERERRDNYVPDVSALEQDIIEVDPETKEMLKHLDFNNIVVQLTNPTAPGYSNRRN

SEQ ID NO: 128335 - DNA, 447 bp, Magnaporthe oryzae 70-15
  CDS (1)..(447)
atgggtcgcgttcgcaccaagaccgtcaagaagtccgccaaggtcatcattgagcgatactaccccaggctcaccctcgacttcgagaccaacaagcgtatctgcgatgagatcgccattatcgcctcgaagcgcctgcgcaacaagattgccggttacaccacccacttgatgaagcgtattcagcgtggtcccgtccgtggtatctccttcaagcttcaggaggaggagcgtgagcgcaaggatcagtttgttcccgaggtttccgctctcgacttcagccagtccgacagcggccagctcgatgttgacgtcgagaccaaggacctgctcaagcacctgggcttcgactcgaccatccccgtcaacgtcatccccgtgacccagactcaggtctccgagcgcagtggccgccgattcggcgacaggcccccccgccgcgactaa

SEQ ID NO: 128336 - protein, 148 aa, Magnaporthe oryzae 70-15
MGRVRTKTVKKSAKVIIERYYPRLTLDFETNKRICDEIAIIASKRLRNKIAGYTTHLMKRIQRGPVRGISFKLQEEERERKDQFVPEVSALDFSQSDSGQLDVDVETKDLLKHLGFDSTIPVNVIPVTQTQVSERSGRRFGDRPPRRD

SEQ ID NO: 128337 - DNA, 468 bp, Gibberella zeae PH-1
  CDS (1)..(468)
atgggtcgcgttcgtaccaagaccgtcaagaagtccgccaaggtcatcattgagcgatactaccccagattgaccctggacttcgagaccaacaagcgcatctgtgatgagatcgccatcatcgcttccaagcgtctccgcaacaagattgctggttacaccacccacttgatgaagcgaattcagcgtggccctgtccgtggtatctccttcaagcttcaggaggaggagcgtgagcgcaaggatcagttcgttcctgaggtctccgctctggacttcacccagaactccgagagcggccagctcgacgtcgacaccgagaccaaggatctcctcaagcaccttggcgtacgttctcccccgatattgacaccatttgagtctattcccgtcaatgtcatccctgtcactcagcagcagattcccgagcgtggacagcgatacggcaaccgccctcgccgcgactaa

SEQ ID NO: 128338 - protein, 155 aa, Gibberella zeae PH-1
MGRVRTKTVKKSAKVIIERYYPRLTLDFETNKRICDEIAIIASKRLRNKIAGYTTHLMKRIQRGPVRGISFKLQEEERERKDQFVPEVSALDFTQNSESGQLDVDTETKDLLKHLGVRSPPILTPFESIPVNVIPVTQQQIPERGQRYGNRPRRD

SEQ ID NO: 128339 - DNA, 411 bp, Candida glabrata CBS 138
  CDS (1)..(411)
atgggtagagttagaaccaagaccgtcaagcgtgcctccaaggctttgatcgaacgttactatccaaagttgaccatggatttccaaaccaacaagagattgtgtgacgaaatcgctactatccaatccaagagattgagaaacaagatcgctggttacactactcacttgatgagaagaatccaaaagggtccagttagaggtatctctttcaagttgcaagaagaagaaagagaaagaaaggaccaatacgtcccagatgtctctgctttggacttgtctcactctaagggtgtcttgaacgttgacaaccaaactgctgacttggtcaagtctttgggtttgaagttgccactatctgtcatcaacatctctgctcaaagagacagacgtttcagaaagagaaactaa

SEQ ID NO: 128340 - protein, 136 aa, Candida glabrata CBS 138
MGRVRTKTVKRASKALIERYYPKLTMDFQTNKRLCDEIATIQSKRLRNKIAGYTTHLMRRIQKGPVRGISFKLQEEERERKDQYVPDVSALDLSHSKGVLNVDNQTADLVKSLGLKLPLSVINISAQRDRRFRKRN

SEQ ID NO: 128341 - DNA, 414 bp, Debaryomyces hansenii CBS767
  CDS (1)..(414): transl_table=12
atgggtcgtgttagaactaaaactgttaagagagcctctaaggtcgtgattgaacgtttctaccctaaattaactttagatttcgaaaccaacaagagattaacctctgaaattgctgttatccaatctaagagattaagaaataagattgccggttacaccacccacttgatgaagcgtattcaaaagggtccagttagaggtatttctttcaagttacaagaagaagaaagagaaagaaaggatcaatacgttccagaagtttctgctttagacttgtcccacaccaacggtcaattagaagttgactctgaaactgctgatttagtcaagaccttaggtttcaaaattccaatccaaaccgttgctatctctgctcaaagaggtccaagacgtttcgttaagagaaactaa

SEQ ID NO: 128342 - protein, 137 aa, Debaryomyces hansenii CBS767
MGRVRTKTVKRASKVVIERFYPKLTLDFETNKRLTSEIAVIQSKRLRNKIAGYTTHLMKRIQKGPVRGISFKLQEEERERKDQYVPEVSALDLSHTNGQLEVDSETADLVKTLGFKIPIQTVAISAQRGPRRFVKRN

SEQ ID NO: 128343 - DNA, 417 bp, Yarrowia lipolytica CLIB122
  CDS (1)..(417)
atgggtcgagttcgaactaagactgtcaagcgggcctccaaggtcatgattgagcgatactaccccaagctcaccctcgacttcgagaccaacaagcgacttgctgatgagatcgctgttatcccctccaagcgactccgaaacaagatcgctggctacaccacccacctcatgaagcgaatccagaagggtcccgtccgaggtatctccttcaagcttcaggaggaggagcgagagcgaaaggaccagtacgtccccgagatctctgctcttgacctttctcacaccgacaaccagctccaggttgacaacgatactgccgacctcctcaagaccctcggattctcttcccttccccttaaggttgtccacgtttcccagcagtctgctgagcgacgattccgaaagcgaaactaa

SEQ ID NO: 128344 - protein, 138 aa, Yarrowia lipolytica CLIB122
MGRVRTKTVKRASKVMIERYYPKLTLDFETNKRLADEIAVIPSKRLRNKIAGYTTHLMKRIQKGPVRGISFKLQEEERERKDQYVPEISALDLSHTDNQLQVDNDTADLLKTLGFSSLPLKVVHVSQQSAERRFRKRN

SEQ ID NO: 128345 - DNA, 420 bp, Aspergillus nidulans FGSC A4
  CDS (1)..(420)
atgggtcgcgtcaggactaagaccgtcaagcgctccgccaaggtcgtcattgagcgttactaccccaagctcacgctcgacttcgagaccaacaagcgtgtctgcgatgagatcgctatcatcccctccaagcgtcttcgcaacaagatcgctggttacaccacccacctcatgaagcgtatccagcgtggccctgtccgcggtatctccttcaagctacaggaggaggagcgtgagcgtaaggaccagtacgttcctgagatctctgcgctcgacgtctcccagaccgagtccggtcagctcgatgtcgactccgacaccaaggatctcctcaagagcctcggcttcgacaacctcaaggtcaacgttgttgctgttacccagcagcagcccgagcgccctcgccgcttccgctcttag

SEQ ID NO: 128346 - protein, 139 aa, Aspergillus nidulans FGSC A4
MGRVRTKTVKRSAKVVIERYYPKLTLDFETNKRVCDEIAIIPSKRLRNKIAGYTTHLMKRIQRGPVRGISFKLQEEERERKDQYVPEISALDVSQTESGQLDVDSDTKDLLKSLGFDNLKVNVVAVTQQQPERPRRFRS

SEQ ID NO: 128347 - DNA, 432 bp, Cryptococcus neoformans var. neoformans B-3501A
  CDS (1)..(432)
atgggtcgagtcaggacaaagaccgtcaagcgatcttctcgaatcctcatcgagcgattctacccccgtctcactctcgacttccactccaacaagcgaatccttgatgaggtcgccactgttccctctaagaggttgaggaacaagatcgctggtttcaccacccacttgatgaagcgaatccagaagggtcctgtccgaggtatctctttcaggttgcaggaggaagagagggagcgaaaggaccagtacgtccccgaggtctctgcccttgcttcttccgaggagtctcctctcgaggtcgacgccgagaccaaggacctcctcaagtctttgggtatggacgacctttccgtcaacgtcatcaacgtctctgccaacgctccccgagagaggaagactcgattcatccctggtgcgggccgtgcttag

SEQ ID NO: 128348 - protein, 143 aa, Cryptococcus neoformans var. neoformans B-3501A
MGRVRTKTVKRSSRILIERFYPRLTLDFHSNKRILDEVATVPSKRLRNKIAGFTTHLMKRIQKGPVRGISFRLQEEERERKDQYVPEVSALASSEESPLEVDAETKDLLKSLGMDDLSVNVINVSANAPRERKTRFIPGAGRA

SEQ ID NO: 128349 - DNA, 441 bp, Neurospora crassa OR74A
  CDS (1)..(441)
atgggtcgcgttcgtaccaagactgtcaagaagtccgccaaggtcatcattgagcggtactaccccaagttgaccctcgacttcgagaccaacaagcgcatctgcgatgagatcgccatcattgcctccaagcgcctccgcaacaagattgccggctacaccacccacttgatgaagcgtatccagcgtggccccgtccgcggtatctccttcaagctgcaggaggaggagcgtgagcgcaaggaccagtacgttcccgaggtctctgctctcgacttcacccagaactccgagagcggtcagctcgacgtcgacaccgagaccaaggacctcctcaagcacctcggcttcgactccatccccgtcaacgtcatccccgtcacccaggcccagcctgtcgagcgcggccgccgcttcggcgaccgtccccgccgcgactaa

SEQ ID NO: 128350 - protein, 146 aa, Neurospora crassa OR74A
MGRVRTKTVKKSAKVIIERYYPKLTLDFETNKRICDEIAIIASKRLRNKIAGYTTHLMKRIQRGPVRGISFKLQEEERERKDQYVPEVSALDFTQNSESGQLDVDTETKDLLKHLGFDSIPVNVIPVTQAQPVERGRRFGDRPRRD

SEQ ID NO: 128351 - DNA, 396 bp, Tribolium castaneum
  CDS (1)..(396)
atgggtcgtgtccgtacaaaaacggtgaaaaaagcctcaaaagtcataatcgagaagtactacactcgcctaacccttgatttccacacaaacaagcgcatttgcgaggaaatcgccatcatcccgaccaagcctttgcgcaacaaaatcgcgggttttgtgacccatttgatgaaacggctccgtcattcccaagtccgtggcatttccatcaaactgcaggaggaagaaagggagagaagggacaacttcgtcccggaagtttccgctctggagcacgatattatcgaagtcgatccggagactaaggagatgttgaagatgctcgacttcaacaacatcagcgggttgcagctcacacaacccactgcaaacacgtttaatagacgcgcttaa

SEQ ID NO: 128352 - protein, 131 aa, Tribolium castaneum
MGRVRTKTVKKASKVIIEKYYTRLTLDFHTNKRICEEIAIIPTKPLRNKIAGFVTHLMKRLRHSQVRGISIKLQEEERERRDNFVPEVSALEHDIIEVDPETKEMLKMLDFNNISGLQLTQPTANTFNRRA

SEQ ID NO: 128353 - DNA, 390 bp, Maconellicoccus hirsutus
  CDS (1)..(390)
atgggtcgcgtacgtacgaaaaccgtgaaaaaagccgctcgggtaataatcgaaaaatattacaccaaattgactttagatttccacaccaacaaacggatatgtgaagaaatcgccattattccttcaaaacccttgagaaataaaatcgctggattcgtaactcatttaatgaaaagattacgaaacagccaagtacgtggtatttccattaagttgcaagaagaagaaagagaaagaagagataattacgtaccagaggtttctgccttggaacatgacgttattgaagtcgattctgatactaaggatatgttgaaaatgcttgatttttcaaatatttctggattgcaacttgtaccggtgcagccatatccaagacgtaattga

SEQ ID NO: 128354 - protein, 129 aa, Maconellicoccus hirsutus
MGRVRTKTVKKAARVIIEKYYTKLTLDFHTNKRICEEIAIIPSKPLRNKIAGFVTHLMKRLRNSQVRGISIKLQEEERERRDNYVPEVSALEHDVIEVDSDTKDMLKMLDFSNISGLQLVPVQPYPRRN

SEQ ID NO: 128355 - DNA, 456 bp, Vitis vinifera
  CDS (1)..(456)
  misc_feature (114)..(114): y is t or c
  misc_feature (153)..(153): y is t or c
  misc_feature (267)..(267): y is t or c
  misc_feature (330)..(330): r is g or a
atggggcgcgtccgtaccaagacggtgaagaaatcctcaaggcaagtgattgaacgttactactcacgtatgactctggacttccatacaaataagaaggtccttgaagaagtygccatcattccctccaagcgtcttcgcaacaagatcgcyggattctccactcatttgatgaagcggattcaaaagggtcccgtcagaggcatctcccttaagctccaagaagaagagcgcgagcgtcgcatggacttcgtgcctgacgtctcygccatcaacactgatgagattcctgtcgacaaggagactcttgatatgcttgctatgctaggratgaatgatcttccgggtgtggtcaaggcggagcccgttgtggtttcttctcagcctgcttttggccggagtttagatttaggcaaacttatcatgtgttatatgtctccttcggtagaaaaatga

SEQ ID NO: 128356 - protein, 151 aa, Vitis vinifera
MGRVRTKTVKKSSRQVIERYYSRMTLDFHTNKKVLEEVAIIPSKRLRNKIAGFSTHLMKRIQKGPVRGISLKLQEEERERRMDFVPDVSAINTDEIPVDKETLDMLAMLGMNDLPGVVKAEPVVVSSQPAFGRSLDLGKLIMCYMSPSVEK

SEQ ID NO: 128357 - DNA, 399 bp, Lygus lineolaris
  CDS (1)..(399)
atgggtcgtgttaggacgaaaaccgtcaagaaggcttctcgagtcatcattgagaagtactacactcgtctcacgttggacttccacactaacaagagaatttgcgaggagattgctatcattcccaccaagtctctcagaaataaaatcgctgggtttgtcacccatttgatgaagagactcaggcattcacaggtccgaggaatctccatcaaacttcaagaggaagaaagagaaaggagagataacttcgttcctgatgtatctgctcttgaacaggacgtcattgaagttgatcctgaaaccaaggacatgttgaaaatgctggatttcagcaacatctccggtcttcaactaatccagcccacaaaccaggcgtacggaggaaggcgtaattaa

SEQ ID NO: 128358 - protein, 132 aa, Lygus lineolaris
MGRVRTKTVKKASRVIIEKYYTRLTLDFHTNKRICEEIAIIPTKSLRNKIAGFVTHLMKRLRHSQVRGISIKLQEEERERRDNFVPDVSALEQDVIEVDPETKDMLKMLDFSNISGLQLIQPTNQAYGGRRN

SEQ ID NO: 128359 - DNA, 396 bp, Triatoma infestans
  CDS (1)..(396)
atgggtagagtcagaacaaaaacagtgaagaaagcttcaagagtgataatcgaaaaatattacaccaggcttactctggacttccatactaacaaacgcatatgtgaagaaattgctatcattcccacaaaatctctgagaaataaaattgctggattcgtcactcatctgatgaagaggcttagacattcacaagtgagaggtatttccattaaactgcaggaagaagaaagggaaagaagagataactatgtgcctgatgtttctgcattggaacaagatgtaatagaagtagatccagaaactaaggaaatgttgaagatgttggaattcacaaatatatcaggattacagcttattcagccaccaaatcaatcttatggacgacgtccataa

SEQ ID NO: 128360 - protein, 131 aa, Triatoma infestans
MGRVRTKTVKKASRVIIEKYYTRLTLDFHTNKRICEEIAIIPTKSLRNKIAGFVTHLMKRLRHSQVRGISIKLQEEERERRDNYVPDVSALEQDVIEVDPETKEMLKMLEFTNISGLQLIQPPNQSYGRRP

SEQ ID NO: 128361 - DNA, 402 bp, Heliconius melpomene
  CDS (1)..(402)
atgggtcgtgtcaggactaagaccgtcaaaaaagcagcgaaaatcattattgagaagtattacacaaagttgactcttgattttgatacaaacaagagaatatgtgaggaaatagcaatcattccaactaaatctcttcgtaacaaaattgctggttttgccacacacttaatgaggcgtctcagacattcacaagttcgtggcatctccatcaagctacaagaagaggagcgtgaaagacgtgacaactatgttccagaagtgtctgccctagaacatgacatcattgaagtagatcctgacactaaggaaatgttgaaaatgctggatttcaacaacatcaatggtcttcaactcacccaacctgctactcaaggaggttatggtggcagacgtaattaa

SEQ ID NO: 128362 - protein, 133 aa, Heliconius melpomene
MGRVRTKTVKKAAKIIIEKYYTKLTLDFDTNKRICEEIAIIPTKSLRNKIAGFATHLMRRLRHSQVRGISIKLQEEERERRDNYVPEVSALEHDIIEVDPDTKEMLKMLDFNNINGLQLTQPATQGGYGGRRN

SEQ ID NO: 128363 - DNA, 393 bp, Phlebotomus papatasi
  CDS (1)..(393)
atgggtcgcgtcaggacaaagacgattaaaaaggccgcaaaggtgataattgaaaaatactatacacgcctcacattggatttccatacaaacaagcgaatctgcgaggaagtggctattatccccacaaaacccctcaggaacaagattgccggatatgtaacacatgtgatgaagcggctccgtcactcccaggttcgagggatttcgattaagctgcaggaagaggaacgtgaacgtcgtgacaactacgttcccgatgtctctgctctggagcaggacataattgaggtggatcctgagaccaaggagatgttgaagatgttggacttccacaatctcactgggctccagctgacacagcccacaacaaccttcaacaggcgcaactaa

SEQ ID NO: 128364 - protein, 130 aa, Phlebotomus papatasi
MGRVRTKTIKKAAKVIIEKYYTRLTLDFHTNKRICEEVAIIPTKPLRNKIAGYVTHVMKRLRHSQVRGISIKLQEEERERRDNYVPDVSALEQDIIEVDPETKEMLKMLDFHNLTGLQLTQPTTTFNRRN

SEQ ID NO: 128365 - DNA, 405 bp, Spadella cephaloptera
  CDS (1)..(405)
atgggtcgcgtccgaacgaagactgtgaagaaggcggctcgggtgatcgtagagaagtactacacccgactgggctctgatttccacaccaacaagcggatcgcggaggaagtggccatcatccccagcaagcgactccggaatcagatcgccggcttcatgacccatctcatgaagcggatccagcggggacccgttagaggcatctctatcaagctccaagaggaggaacgagagcgtcgtgacaactacgtccctgagatttcctacatcgatgcccaggacgtgatcgaggttgaccctgacaccaaggaaatgctcaagtcgctcgacatggcaggcatctcaaacctccaggtggtgacgcaaacgtcgcaggccaactggagacaaccgaggaattaa

SEQ ID NO: 128366 - protein, 134 aa, Spadella cephaloptera
MGRVRTKTVKKAARVIVEKYYTRLGSDFHTNKRIAEEVAIIPSKRLRNQIAGFMTHLMKRIQRGPVRGISIKLQEEERERRDNYVPEISYIDAQDVIEVDPDTKEMLKSLDMAGISNLQVVTQTSQANWRQPRN

SEQ ID NO: 128367 - DNA, 408 bp, Spadella cephaloptera
  CDS (1)..(408)
atgggtcgcgtgagaaccaaaaccgtgaagaaggcggcgagggtcatcgtcgaaaagtattacaccaagttgggctccgactttcacaccaacaagcggatcgcggaagaggtggctatcattccttcgaagcggttgagaaatcaaatcgccggtttcacgactcacctcatgaagcgcatccaaaggggacccgtcagaggcatctccatcaagctgcaggaggaagagcgtgaacgacgcgacaactacgtcccggagatctcttggatcgaccaacagtcggacgtcctcgaggtcgaccccgacacgaaggagatgctaaagtccatggacatgggcaacatggccaatgtccaggtcgttcaacctacttccgtcatgaactggcgggaggcgaggaagtaa

SEQ ID NO: 128368 - protein, 135 aa, Spadella cephaloptera
MGRVRTKTVKKAARVIVEKYYTKLGSDFHTNKRIAEEVAIIPSKRLRNQIAGFTTHLMKRIQRGPVRGISIKLQEEERERRDNYVPEISWIDQQSDVLEVDPDTKEMLKSMDMGNMANVQVVQPTSVMNWREARK

SEQ ID NO: 128369 - DNA, 405 bp, Barentsia elongata
  CDS (1)..(405)
atgggtcgtgttaggaccaagactgttaagaaagctgcccgtgtgatcattgagaagtattacaccaggctgacactggacttccataccaacaagaggatatgtgaagaaattgcaatcatcccaagcaagcgtctgagaaaccagattgctgggtttgtgacacatttgatgaagcgcatccagcgtggccccgtgagaggcatctccatcaagctgcaggaggaggagagggagaggagagacaactatgtgcctgaggtttcggctctggaccgtgaggtgatcgaggtagacaccgacacccgcgagatgttgaagtacttggacttcagcggcatccagaacctgcagccgacacagacggtcggcggaaacactttccagtcccggcagcgcacgtaa

SEQ ID NO: 128370 - protein, 134 aa, Barentsia elongata
MGRVRTKTVKKAARVIIEKYYTRLTLDFHTNKRICEEIAIIPSKRLRNQIAGFVTHLMKRIQRGPVRGISIKLQEEERERRDNYVPEVSALDREVIEVDTDTREMLKYLDFSGIQNLQPTQTVGGNTFQSRQRT

SEQ ID NO: 128371 - DNA, 420 bp, Arenicola marina
  CDS (1)..(420)
atgggtcgtgttaggaccaagactgtcaagaaggcatccagggtcataatcgagaagtattatactcgattgacccttgatttccacacaaacaaacggatctgtgaggaaattgccatcattcccagcaagaagctgaggaacaagattgctggttttgcgacccatttgatgagacgcatccagaagggacctgtccgaggtatctccatcaagctgcaggaagaggagagggagaggagggacaactttgtgcccgagatttctgccattgagagcgatatcatcgaggtggacccagacaccaaggagatgttgaagcaaatggacatggccaacatccccggtctgcaggtgacgcagcccatggctaccaaccagaacttcggcggcaaccaaaacagaaaccagaggaactag

SEQ ID NO: 128372 - protein, 139 aa, Arenicola marina
MGRVRTKTVKKASRVIIEKYYTRLTLDFHTNKRICEEIAIIPSKKLRNKIAGFATHLMRRIQKGPVRGISIKLQEEERERRDNFVPEISAIESDIIEVDPDTKEMLKQMDMANIPGLQVTQPMATNQNFGGNQNRNQRN

SEQ ID NO: 128373 - DNA, 441 bp, Picea sitchensis
  CDS (1)..(441)
atggggcgtgttaggaccaaaacagtgaagaaatcctctcgtcagataatagagaggtactactctcgcatgacacttgacttccataccaacaagaaaattgttgaggaagtcgccattattccttccaagcgtctcagaaacaaaattgccggattttcaacgcatttgatgaagcgtattcaaaggggaccagtgaggggaatctcgttgaagcttcaagaggaggaacgagaaaggcgtatggactttgtacccgaggagtctgctatcaagacagaagttattgaggttgacaaagaaactatggatatgcttgcttcattaggcatgtctgatttacctggagttgttaagcaggcggatcccccagctggtggtggtggtttcatcaagccaggtggattccaaggtggtggtggaatgggcaggagatattag

SEQ ID NO: 128374 - protein, 146 aa, Picea sitchensis
MGRVRTKTVKKSSRQIIERYYSRMTLDFHTNKKIVEEVAIIPSKRLRNKIAGFSTHLMKRIQRGPVRGISLKLQEEERERRMDFVPEESAIKTEVIEVDKETMDMLASLGMSDLPGVVKQADPPAGGGGFIKPGGFQGGGGMGRRY

SEQ ID NO: 128375 - DNA, 438 bp, Picea sitchensis
  CDS (1)..(438)
atggggcgtgtgagaacgaaaaccgtgaagaaatcctctcggcaggtgctcgagaggtactattctcgcatgactctcgacttccacaccaacaagaagatcgtggaggaggtagccataatcccctcgaagcgcttgaggaataagattgcagggttcagcacccatctcatgaagcgcattcaaagaggcccagtgcgaggcatctctctcaaacttcaagaagaggagcgtgagaggcgtatggacttcgttcccgacgagtctgccatcaaaatcgatgttattgaggtggacaaagaaaccatggacatgcttgcttccttgggcatggctgatttacctggagttgtcaagcaggcagatccaccagcaggtggtggttttatgagaccaggaggtggttatctgggcggtgcaccagggaggagatattaa

SEQ ID NO: 128376 - protein, 145 aa, Picea sitchensis
MGRVRTKTVKKSSRQVLERYYSRMTLDFHTNKKIVEEVAIIPSKRLRNKIAGFSTHLMKRIQRGPVRGISLKLQEEERERRMDFVPDESAIKIDVIEVDKETMDMLASLGMADLPGVVKQADPPAGGGFMRPGGGYLGGAPGRRY

SEQ ID NO: 128377 - DNA, 429 bp, Populus trichocarpa
  CDS (1)..(429)
atgggtcgtgttcgtaccaagacagtgaagaagtcttcacgccaggtcattgagaggtactactctaaaatgaccttggatttccacaccaacaagaagattttggaagaggttgctatcatcccctcgaagcgtctccgcaacaagattgctgggttctctacccatctaatgaagcgtattcagaagggaccagttcgtggcatctcactgaaactacaagaggaagagcgtgagcgtcgcatggatttcgtgcctgaggagtctgccattaagatccatgagattaaggttgacaaagagaccattgacatgcttgccgctcttgggatgtcagatgttcctgggcttgttgaagttgagcctcagcctatgcttcccactcagggattcggtagaggaggtggtgctaggaggttcttgagttaa

SEQ ID NO: 128378 - protein, 142 aa, Populus trichocarpa
MGRVRTKTVKKSSRQVIERYYSKMTLDFHTNKKILEEVAIIPSKRLRNKIAGFSTHLMKRIQKGPVRGISLKLQEEERERRMDFVPEESAIKIHEIKVDKETIDMLAALGMSDVPGLVEVEPQPMLPTQGFGRGGGARRFLS

SEQ ID NO: 128379 - DNA, 423 bp, Populus trichocarpa
  CDS (1)..(423)
atgggtcgtgttcgtactaagacagtgaagaagtcctcacgccaggttattgagaggtactactctaaaatgacattggatttccacaccaacaagaagattttggaagaggttgctgtcatcccctcaaagaggctccgcaacaagattgctgggttctctacccatctaatgaagcgtattcagaagggaccagtccgtggcatctcactgaaacttcaagaggaagagcgcgagcgtcgtatggactttgtgcctgaagagtctgccattaagatccaagagattaaagttgacaaagagaccattgacatgcttgctgcccttggtatgtcagactttcctgggattgttgaagttgaacctcagcctatggttcctacacagggctttggcagaggaggtggtgctaggaggtactag

SEQ ID NO: 128380 - protein, 140 aa, Populus trichocarpa
MGRVRTKTVKKSSRQVIERYYSKMTLDFHTNKKILEEVAVIPSKRLRNKIAGFSTHLMKRIQKGPVRGISLKLQEEERERRMDFVPEESAIKIQEIKVDKETIDMLAALGMSDFPGIVEVEPQPMVPTQGFGRGGGARRY

SEQ ID NO: 128381 - DNA, 423 bp, Populus trichocarpa
  CDS (1)..(423)
atgggtcgtgttcgtactaagacagtgaagaagtcctcacgccaggttattgagaggtactactctaaaatgacattggatttccacaccaacaagaagattttggaagaggttgctatcatccgctcaaagaggctccgcaacaagattgctgggttctctacccatctaatgaagcgtattcagaagggaccagtccgtggcatctcactgaaacttcaagaggaagagcgcgagcgtcgtatggactttgtgcctgaagagtctgccattaagatccaagagattaaagttgacaaagagaccattgacatgcttgctgcccttggtatgtcagactttcctgggattgttgaagttgaacctcagcctatggttcctacacagggctttggcagaggaggtggtgctaggaggtactag

SEQ ID NO: 128382 - protein, 140 aa, Populus trichocarpa
MGRVRTKTVKKSSRQVIERYYSKMTLDFHTNKKILEEVAIIRSKRLRNKIAGFSTHLMKRIQKGPVRGISLKLQEEERERRMDFVPEESAIKIQEIKVDKETIDMLAALGMSDFPGIVEVEPQPMVPTQGFGRGGGARRY

SEQ ID NO: 128383 - DNA, 390 bp, Lycosa singoriensis
  CDS (1)..(390)
atgggtcgtgtgagaaccaaaacagttaagaaagcttctcgagtcatcatcgagaagtactacacccgattaactttagactttcacaccaataaaagaatatgtgaagaaatcgctatcatccctagtaaaaaactgaggaataaaatagctgggtttgttacacatttaatgaagcgtattcaaaggggaccagttcgaggcatttccatcaaattacaggaggaagaaagagaacgtcgtgacaactatgttccagaagtatctgctattgacatggatgtcattgaagtagatcctgatactgaagaaatgttgaaacagatggatgttggaaaaataccaggattgcaagttgcaatgccacttgcagctggaccgagggtgtag

SEQ ID NO: 128384 - protein, 129 aa, Lycosa singoriensis
MGRVRTKTVKKASRVIIEKYYTRLTLDFHTNKRICEEIAIIPSKKLRNKIAGFVTHLMKRIQRGPVRGISIKLQEEERERRDNYVPEVSAIDMDVIEVDPDTEEMLKQMDVGKIPGLQVAMPLAAGPRV

SEQ ID NO: 128385 - DNA, 396 bp, Flustra foliacea
  CDS (1)..(396)
atgggtcgggtcaggactaaaacagtcaagaaggcttctcgagtaatcatcgagaagtactacactcgtctaacacttgactttcacacaaacaagaggatatgtgaggaaattgccatcatccccagcaaacctctccgcaacaaaatcgctggttttgttacacatctgatgaaacgcatccagcgtggcccagttagaggaatctccattaagcttcaggaagaggagagagaaaggagagataattacgtgccagaggtttcatatatcgagcaggacatgattgaggtagacgcagagaccaaggaaatgttgaagttgttggatttcgggaacatgccaggacttcaggttactcagacacagctcagcaactattcaaggaaaccatag

SEQ ID NO: 128386 - protein, 131 aa, Flustra foliacea
MGRVRTKTVKKASRVIIEKYYTRLTLDFHTNKRICEEIAIIPSKPLRNKIAGFVTHLMKRIQRGPVRGISIKLQEEERERRDNYVPEVSYIEQDMIEVDAETKEMLKLLDFGNMPGLQVTQTQLSNYSRKP

SEQ ID NO: 128387 - DNA, 411 bp, Lineus viridis
  CDS (1)..(411)
atgggtcgcgtcaggacaaagacgatcaaaaaggctggccgagtcatcattgaaaaatactacccacgtctcactcttgatttccacacaaacaagaggatatgcgaggaaatcgctatcatcccaagcaaacgacttaggaacatgattgctgggtttgttacccatttgatgcagcgtatccagtgcggtgtgtccgtgcgtggtatctccatcaagctccaggaggaagagagagaaaggagggacaactacgtgccagacgtatcggctattgagaacgacatcattgaggtcgaccccgacaccaaggagatgttgaagatgttggactttgccaacatccctggcctccaggtaacacagcccatcacacagaccgctggtggattccgcacaccaagaccatga

SEQ ID NO: 128388 - protein, 136 aa, Lineus viridis
MGRVRTKTIKKAGRVIIEKYYPRLTLDFHTNKRICEEIAIIPSKRLRNMIAGFVTHLMQRIQCGVSVRGISIKLQEEERERRDNYVPDVSAIENDIIEVDPDTKEMLKMLDFANIPGLQVTQPITQTAGGFRTPRP

SEQ ID NO: 128389 - DNA, 396 bp, Anopheles darlingi
  CDS (1)..(396)
atgggtcgtgtacgtaccaagacggtcaaggaggcctcgaaggtcatcatcgagaagtactacactcgcttgacgatggatttcgataccaacaagcgcattgttgaggaagtggccatcattccgacgaaaccgctgcgaaacaagatcgccggttttgtgacccatttgatgaagcgtctgcgtcactcgcaagtgcgtggtatttccatcaagctgcaggaggaggagcgcgagcgtcgtgacaactacgtgccggacgtttccgcactggagcaggacatcatcgaggtcgatccggagacgaaggagatgttgaagcatctggatttcaacaacatcgtcgtccagctgaccaacccgaccgccccgggctacagcaaccgacgcaactaa

SEQ ID NO: 128390 - protein, 131 aa, Anopheles darlingi
MGRVRTKTVKEASKVIIEKYYTRLTMDFDTNKRIVEEVAIIPTKPLRNKIAGFVTHLMKRLRHSQVRGISIKLQEEERERRDNYVPDVSALEQDIIEVDPETKEMLKHLDFNNIVVQLTNPTAPGYSNRRN

SEQ ID NO: 128391 - DNA, 420 bp, Zea mays
  CDS (1)..(420)
atgggtcgcgtccgcaccaagaccgtgaagaagacctccaggcaggtgatcgagaagtactactcccgcatgaccctcgacttccacaccaacaagaaggtgctggaggaggtctcgattctgccctcgaagcgcctccgcaacaaggtggctggcttcagtacccacctgatgcgccgcatccagcgcggcccagtccgcggcatctcgctcaagctgcaggaggaggagcgcgagcgccgcatggacttcgtgccggagaagtccgcgctcgaggtcgaagagatccgcgtcgacaaggagaccatggagatgctcgctgccctcggcatggccgacctgcccggcgttgagcgccaggctgaggtctccaacgccccccgcctacggccgcccgcagtacggtggtccccgccgtga

SEQ ID NO: 128392 - protein, 139 aa, Zea mays
MGRVRTKTVKKTSRQVIEKYYSRMTLDFHTNKKVLEEVSILPSKRLRNKVAGFSTHLMRRIQRGPVRGISLKLQEEERERRMDFVPEKSALEVEEIRVDKETMEMLAALGMADLPGVERQAEVSNAPRLRPPAVRWSPP

SEQ ID NO: 128393 - DNA, 429 bp, Zea mays
  CDS (1)..(429)
  misc_feature (239)..(239): s is g or c
  misc_feature (369)..(369): y is t or c
  misc_feature (413)..(413): s is g or c
  misc_feature (426)..(426): y is t or c
atgggtcgcgtccgcaccaagaccgtgaagaagacctccaggcaggtgatcgagaagtactactcccgcatgaccctcgacttccacaccaacaagaaggtgctggaagaggtctcgatcctcccctcgaagcgcctccgcaacaaggttgccggcttcaccacccacctgatgcgccgcatccagcggggccccgtccgtggcatctcgctcaagctgcaggaggaggagcgggagcsccgcatggacttcgtcccggagaagtcagcgctcgaggtcgaagagatccgcgtcgacaaggagaccatggagatgctcgcggcacttggcatggccgatctcccgggcgtagagcgccaggctgaggtytccagcgtccccgcctacggccgcccgcagtatggaggtccccsccgtgaccgcgtytag

SEQ ID NO: 128394 - protein, 142 aa, Zea mays
  misc_feature (80)..(80): The Xaa at location 80 stands for Arg, or Pro.
  misc_feature (138)..(138): The Xaa at location 138 stands for Arg, or Pro.
MGRVRTKTVKKTSRQVIEKYYSRMTLDFHTNKKVLEEVSILPSKRLRNKVAGFTTHLMRRIQRGPVRGISLKLQEEEREXRMDFVPEKSALEVEEIRVDKETMEMLAALGMADLPGVERQAEVSSVPAYGRPQYGGPXRDRV

SEQ ID NO: 128395 - DNA, 435 bp, Medicago truncatula
  CDS (1)..(435)
atgggtcgtgtcagaaccaaaaccgtgaaaaaatcctcacaccaagtaatcgaacgttactactcaaaaatgaccctagatttccacacaaacaaaaagatcctcgaagaagttgcactgatcccatcaaagcgtcttcgcaacaagatcgctgggttttcaacccatctcatgaagcgtattcaaaagggaccagttcgtggaatctcgttgaagctacaagaggaagagcgtgaaaggaggatggatttcgttcctgatgtttctgctatcaggactgaccatattgaggttgataaggagactcttgatatgcttgctgctcttggtatgtccgagattcccggggttgttcaggttgatcctgttcctgttcaacaggtgccgtttggaagaggtgctggtgttgctgctggtggtggaagaaggttttaa

SEQ ID NO: 128396 - protein, 144 aa, Medicago truncatula
MGRVRTKTVKKSSHQVIERYYSKMTLDFHTNKKILEEVALIPSKRLRNKIAGFSTHLMKRIQKGPVRGISLKLQEEERERRMDFVPDVSAIRTDHIEVDKETLDMLAALGMSEIPGVVQVDPVPVQQVPFGRGAGVAAGGGRRF

SEQ ID NO: 128397 - DNA, 435 bp, Medicago truncatula
  CDS (1)..(435)
atgggtcgtgtcagaaccaaaaccgtgaaaaaatcctcacgccaagtaatcgaacgttactactcaaaaatgaccctagatttccacacaaacaaaaagatcctcgaagaagttgcactgatcccatcaaagcgtcttcgcaacaagatcgctgggttttcaacccatctcatgaagcgtattcaaaagggaccagttcgtggaatctcgttgaagctacaagaggaagagcgtgaaaggaggatggatttcgctcctgatggttctgctatcaggactgaccatattgaggttgataaggagactcttgatatgcttgctgctcttggtatgtccgagattcccggggttgttcaggttgatcctgttcctgttcaacaggtgccgtttgaaagaggtgctggtgttgctgctggtggtggaagaaggttttaa

SEQ ID NO: 128398 - protein, 144 aa, Medicago truncatula
MGRVRTKTVKKSSRQVIERYYSKMTLDFHTNKKILEEVALIPSKRLRNKIAGFSTHLMKRIQKGPVRGISLKLQEEERERRMDFAPDGSAIRTDHIEVDKETLDMLAALGMSEIPGVVQVDPVPVQQVPFERGAGVAAGGGRRF

SEQ ID NO: 128399 - DNA, 435 bp, Medicago truncatula
  CDS (1)..(435)
atgggtcgtgtcagaaccaaaaccgtgaaaaaatcctcacgccaagtaatcgaacgttactactcaaaaatgaccctagatttctacacaaacaaaaagatcctcgaagaagttgcactgatcccatcaaagcgtcttcgcaacaagatcgctgggttttcaacccatctcatgaagcgtattcaaaagggaccagttcgtggaatctcgttgaagctacaagagggagagcgtgaaaggaggatggatttcgttcctgatgtttctgctatcaggactgaccatattgaggttgataaggagactcttgatatgcttgctgctcttggtatgtccgagattcccggggttgttcaggttgatcctgttcctgttcaacaggtgccgtttggaagaggtgctggtgttgctgctggtggtggaagaaggttttaa

SEQ ID NO: 128400 - protein, 144 aa, Medicago truncatula
MGRVRTKTVKKSSRQVIERYYSKMTLDFYTNKKILEEVALIPSKRLRNKIAGFSTHLMKRIQKGPVRGISLKLQEGERERRMDFVPDVSAIRTDHIEVDKETLDMLAALGMSEIPGVVQVDPVPVQQVPFGRGAGVAAGGGRRF

SEQ ID NO: 128401 - DNA, 435 bp, Medicago truncatula
  CDS (1)..(435)
atgggacgagtccgaaccaaaaccgtgaagaaatcctctcgtcaagtcatcgagcgtaactaccctagaatgacactggatttccacaccaacaagaagatccttgaagaagttgctttgattccatcaaagcgtcttcgtaacaagatcgctggattctccacgcatcttatgaagcgtattcaaaagggacctgttcgcggaatttcattgaagctgcaagaggaggagcgtgaacgtcgtatggacttcgttcctgatgtttctgccattaggactgatcatattgaggttgataaggaaaccctggacatgcttgctgctcttggtatgtccgagattcctggtgttgttcaggttgatccagttcccgttcagcagatcccgttcggtcgtggtgctggtgctgctggaggtgctggaaggaggttttaa

SEQ ID NO: 128402 - protein, 144 aa, Medicago truncatula
MGRVRTKTVKKSSRQVIERNYPRMTLDFHTNKKILEEVALIPSKRLRNKIAGFSTHLMKRIQKGPVRGISLKLQEEERERRMDFVPDVSAIRTDHIEVDKETLDMLAALGMSEIPGVVQVDPVPVQQIPFGRGAGAAGGAGRRF

SEQ ID NO: 128403 - DNA, 396 bp, Dermacentor variabilis
  CDS (1)..(396)
atgggtcgcgttaggacgaagaccgtgaaaaaggcatcgcgcctcatcatcgagaaatactatacaaagcttacccttgacttccacaccaacaagcggatttgcgaagagatcgcccagattcccagcaaaaagttaaaaaacaagattgctgggtttgtgactcacctgatgaagcgcattcagcgtgggcctgtgcgcggcatctccatcaagcttcaggaagaagagagggagcggagggacaactatgtacccgagatttctgccctggagcaagacgtcattgaggtggacggtgacaccatggagatgatgaaggcattggacatggctggcatctctggcctgcagacaacacctctgggacctttccgcggtggacagcgcaactga

SEQ ID NO: 128404 - protein, 131 aa, Dermacentor variabilis
MGRVRTKTVKKASRLIIEKYYTKLTLDFHTNKRICEEIAQIPSKKLKNKIAGFVTHLMKRIQRGPVRGISIKLQEEERERRDNYVPEISALEQDVIEVDGDTMEMMKALDMAGISGLQTTPLGPFRGGQRN

SEQ ID NO: 128405 - DNA, 441 bp, Picea sitchensis
  CDS (1)..(441)
atggggcgtgttaggcccaaaacagtgaagaaatcctctcgtcagataatagagaggtactactctcgcatgacacttgacttccataccaacaagaaaattgttgaggaagtcgccattattccttccaagcgtctcagaaacaaaattgccggattttcaacgcatttgatgaagcgtattcaaaggggaccagtgaggggaatctcgttgaagcttcaagaggaggaacgagaaaggcgtatggactttgtacccgaggagtctgctatcaagacagaagttattgaggttgacaaagaaactatggatatgcttgcttcattaggcatgtctgatttacctggagttgttaagcaggcggatcccccagctggtggtggtggtttcatcaagccaggtggattccaaggtggtggtggaatgggcaggagatattag

SEQ ID NO: 128406 - protein, 146 aa, Picea sitchensis
MGRVRPKTVKKSSRQIIERYYSRMTLDFHTNKKIVEEVAIIPSKRLRNKIAGFSTHLMKRIQRGPVRGISLKLQEEERERRMDFVPEESAIKTEVIEVDKETMDMLASLGMSDLPGVVKQADPPAGGGGFIKPGGFQGGGGMGRRY

SEQ ID NO: 128407 - DNA, 429 bp, Paracoccidioides brasiliensis (strain Pb03)
  CDS (1)..(429)
atgggtcgtgttcggactaagaccgtcaagaaatccgccaaggttatcatcgagcggtactatcccaagcttaccctcgattttgagaccaacaagcgcatatgtgatgagatagctatcatcgcctccaagcgtctgcgcaacaagattgccggatacactacacacctgatgaaacgtatccaacgcggtcccgtccgtggtatctccttcaagctgcaggaggaggagcgtgagcgcaaggatcaatatgtgcccgagatctctgctttggacgtctcgcagaccgagagtggacagttggatgttgatgctgataccaaggatctgctcaagagcctcggtttcgataccctcaaggtcaacgtcgtccccgttacccaacagcagagcgacaaccgccctcgtcgctttggaggtgcccgctaa

SEQ ID NO: 128408 - protein, 142 aa, Paracoccidioides brasiliensis (strain Pb03)
MGRVRTKTVKKSAKVIIERYYPKLTLDFETNKRICDEIAIIASKRLRNKIAGYTTHLMKRIQRGPVRGISFKLQEEERERKDQYVPEISALDVSQTESGQLDVDADTKDLLKSLGFDTLKVNVVPVTQQQSDNRPRRFGGAR

SEQ ID NO: 128409 - DNA, 408 bp, Caligus rogercresseyi
  CDS (1)..(408)
atgggtcgcgtccgtacgaaaaccattaagaaggccgctcgggtcatcattgagaagtactacaccaagttgaacttggacttccacaccaacaagcgtatcattgaggaagtggctgtgattccgagcaagcccctccggaacaagattgcaggcttcatcacgcatctcatgaagcgtctccagcgctccaccgttcgtggcatctctatcaaactccaggaagaagagagggagcgcagagacaactacgtgcccgaggtctccgccctcgtccgagacatcatcgaaatcgactccgagaccaaggagatgctcaaggccatggactttaacaacatccctggcgttcagctgcccgctacccgtggaggaggagcacccgggaacaacaatttcagatcctaa

SEQ ID NO: 128410 - protein, 135 aa, Caligus rogercresseyi
MGRVRTKTIKKAARVIIEKYYTKLNLDFHTNKRIIEEVAVIPSKPLRNKIAGFITHLMKRLQRSTVRGISIKLQEEERERRDNYVPEVSALVRDIIEIDSETKEMLKAMDFNNIPGVQLPATRGGGAPGNNNFRS

SEQ ID NO: 128411 - DNA, 372 bp, Caligus clemensi
  CDS (1)..(372)
atgggtcgtgtgcgtaccaagaccgtgaagaaggccgctcgggtcatcatcgagaagtactacaccaagttgaacttggacttccacaccaacaagcgcatcatcgaggaagttgccctcattcccagcaagcctcttcggaacaagatcgcagggttcatcacccatttgatgaagcgccttcagcgctccacggtccgtggcatctccatcaaactccaggaagaggagcgtgagcgcagggataactacgtgccagaagtctctgcactcgtccgagacataatcgatattgacgttgagaccaaggagatgcttaaggccatggactttaacaacatccccggcgttcaactccctacgcgtgattaa

SEQ ID NO: 128412 - protein, 123 aa, Caligus clemensi
MGRVRTKTVKKAARVIIEKYYTKLNLDFHTNKRIIEEVALIPSKPLRNKIAGFITHLMKRLQRSTVRGISIKLQEEERERRDNYVPEVSALVRDIIDIDVETKEMLKAMDFNNIPGVQLPTRD

SEQ ID NO: 128413 - DNA, 450 bp, Nectria haematococca (strain 77-13-4 / FGSC 9596 / MPVI)
  CDS (1)..(450)
atgggtcgcgtccgtaccaagaccgtcaagaagtccgccaaggtcatcattgagcggtactaccccaagctcaccctcgacttcgagaccaacaagcgcatctgcgatgagatcgccatcatcgcctccaagcgccttcgcaacaagattgctggctacaccacccatctgatgaagcgaattcagcgtgggcccgtccgcggtatctccttcaagcttcaggaggaggagcgtgagcgcaaggatcagtacgttcctgaggtctccgctctggacttcacccagaactccgagagcggcggtcagctcgacgtcgacggcgagaccaaggatctcctcaagcaccttggcttcgagtccatccccgtcaacgtcatccccgtctctcagcagcaggtccccgagcgtggtggccgacgatacggcgaccgccctcctcgccgcgactaa

SEQ ID NO: 128414 - protein, 149 aa, Nectria haematococca (strain 77-13-4 / FGSC 9596 / MPVI)
MGRVRTKTVKKSAKVIIERYYPKLTLDFETNKRICDEIAIIASKRLRNKIAGYTTHLMKRIQRGPVRGISFKLQEEERERKDQYVPEVSALDFTQNSESGGQLDVDGETKDLLKHLGFESIPVNVIPVSQQQVPERGGRRYGDRPPRRD

SEQ ID NO: 128415 - DNA, 447 bp, Verticillium albo-atrum (strain VaMs.102)
  CDS (1)..(447)
atgggtcgcgttcgcaccaagaccgtcaagaagtccgccaaggtcatcattgagcggtactaccccaagctcaccctggacttcgagaccaacaagcgcatttgcgatgagatcgccatcatcgcctctaagcgcctccgcaacaagattgccggctacactacgcacttgatgaagcgtattcagcgtggtcctgtccgcggtatctcgttcaagctccaggaggaggagcgtgagcgcaaggatcaatacgtccccgaggtctctgctctcgacttcacccagaactccgagagcggccagctcgacgtcgacgtcgagaccaaggacctcctcaagcacctcggcttcgacgccatccccgtcaatgtcatccccgtctcccaggcccaggcccccgagcgtggtggccgtcgcttcggcgaccgcccccctcgccgcgactaa

SEQ ID NO: 128416 - protein, 148 aa, Verticillium albo-atrum (strain VaMs.102)
MGRVRTKTVKKSAKVIIERYYPKLTLDFETNKRICDEIAIIASKRLRNKIAGYTTHLMKRIQRGPVRGISFKLQEEERERKDQYVPEVSALDFTQNSESGQLDVDVETKDLLKHLGFDAIPVNVIPVSQAQAPERGGRRFGDRPPRRD

SEQ ID NO: 128417 - DNA, 396 bp, Chrysomela tremulae
  CDS (1)..(396)
atgggtcgtgtacgtacaaagacagtgaagaaggcttccaaagtcattatcgaaaaatactacactaggctgactctggatttccacacaaacaagcgtatttgcgaggaaattgcaattattcccactaaacccctccgcaacaaaattgctggttttgtgacacatttgatgaagcgtcttcgtcactcacaagtacgtggaatctctatcaagctgcaagaagaagagcgtgaaagacgagacaactatgttcctgaggtgtctgctttggaacatgacattattgaagttgacccagaaactaaggaaatgttgaaaatgttggacttcaataacattagcggtcttcaattgacccaacctaccaccaacacgtttaatagacgtacttga

SEQ ID NO: 128418 - protein, 131 aa, Chrysomela tremulae
MGRVRTKTVKKASKVIIEKYYTRLTLDFHTNKRICEEIAIIPTKPLRNKIAGFVTHLMKRLRHSQVRGISIKLQEEERERRDNYVPEVSALEHDIIEVDPETKEMLKMLDFNNISGLQLTQPTTNTFNRRT

SEQ ID NO: 128419 - DNA, 444 bp, Sordaria macrospora
  CDS (1)..(444)
atgggtcgcgttcgtaccaagactgtcaagaagtccgccaaggtcatcattgagcggtactaccccaagttgactctcgacttcgagaccaacaagcgcatctgcgatgagatcgccatcattgcctccaagcgcctccgcaacaagattgccggctacaccactcacttgatgaagcgtatccagcgtggccccgtccgcggtatctccttcaagctgcaggaggaggagcgtgagcgcaaggatcagtacgttcccgagatctccgctctcgacttcacccagaactccgagagcggtcagctcgacgtcgacaccgagaccaaggacctcctcaagcacctcggcttcgactccatccccgtcaacgtcatccccgttacccaggcccagcctgtcgagcgcggccgccgcttcggtggtgaccgtccccgccgcgactaa

SEQ ID NO: 128420 - protein, 147 aa, Sordaria macrospora
MGRVRTKTVKKSAKVIIERYYPKLTLDFETNKRICDEIAIIASKRLRNKIAGYTTHLMKRIQRGPVRGISFKLQEEERERKDQYVPEISALDFTQNSESGQLDVDTETKDLLKHLGFDSIPVNVIPVTQAQPVERGRRFGGDRPRRD

SEQ ID NO: 128421 - DNA, 393 bp, Solenopsis invicta
  CDS (1)..(393)
atgagtcgcgtacgaacgaagacggtcaaaaaggccgcgaagctcattatcgagaagtactacccacgtctcaccttggacttccatacgaacaagaggatatgcgaggaaatcgctattatccctagcaaatccttgcgcaacaagattgctggatttgtcactcacctgatgaagaggcttaggcacagtcaggtacgtggtatttccatcaagctgcaggaggaagagagggaacgcagagacaactatgttcccgaggtctccgctttggagcacgatatcatcgaggtcgatccagagaccaaggagatgttgaagatgctcgagttcaacaacatcactgggctccaacttacacagccagttccacagtttagcagacgttcttaa

SEQ ID NO: 128422 - protein, 130 aa, Solenopsis invicta
MSRVRTKTVKKAAKLIIEKYYPRLTLDFHTNKRICEEIAIIPSKSLRNKIAGFVTHLMKRLRHSQVRGISIKLQEEERERRDNYVPEVSALEHDIIEVDPETKEMLKMLEFNNITGLQLTQPVPQFSRRS

SEQ ID NO: 128423 - DNA, 423 bp, Lepeophtheirus salmonis (salmon louse)
  CDS (1)..(423)
atgggtcgtgttcgtactaaaacaatcaaaaaggccgctcgggtcatcatcgagaagtactacaccaagttgaacttggacttccacaccaataagcgtatcatcgaagaagtggcgatgattccgagcaagccactccggaacaagattgcaggcttcatcactcatctcatgaagcgtcttcagagatccacggttcgtggcatctccatcaagctccaagaagaggagagagagcgcagagataactacgtgcctgaagtgtctgctcttgtgcaagacatcatcgacatcgactctgagacgaaggacatgttgaaggccatggactttaacaacatccctggtgttcaactctccaccactcgtactggcggtggcggcggtggggctcccaacaataacaacaacttcagatcctaa

SEQ ID NO: 128424 - protein, 140 aa, Lepeophtheirus salmonis (salmon louse)
MGRVRTKTIKKAARVIIEKYYTKLNLDFHTNKRIIEEVAMIPSKPLRNKIAGFITHLMKRLQRSTVRGISIKLQEEERERRDNYVPEVSALVQDIIDIDSETKDMLKAMDFNNIPGVQLSTTRTGGGGGGAPNNNNNFRS

SEQ ID NO: 128425 - DNA, 426 bp, Trichophyton verrucosum (strain HKI 0517)
  CDS (1)..(426)
atgggtcgcgttaggacaaagaccgtcaagaaatccgcgaagagcatcattgagcgatactacccaaagctcactcttgatttcgagaccaacaagcgcatttgcgatgagatcgctatcatctcttccaagcgccttcgcaacaagattgctggttacactacccatttgatgaagcgtatccagcgtggcccagtccgcggtatctccttcaagcttcaggaggaggagcgtgagcgcaaggatcaatacgttccagagatctctgctcttgacatctcccagaccgagagcggccagctcgacgtggacgccgataccaaggatctcctcaagagcctcggattcgactctctcaaggtcaacgttaccccagtgtctcagcaaacccagaacattgatggccgtcgattcgaccgtcgttaa

SEQ ID NO: 128426 - protein, 141 aa, Trichophyton verrucosum (strain HKI 0517)
MGRVRTKTVKKSAKSIIERYYPKLTLDFETNKRICDEIAIISSKRLRNKIAGYTTHLMKRIQRGPVRGISFKLQEEERERKDQYVPEISALDISQTESGQLDVDADTKDLLKSLGFDSLKVNVTPVSQQTQNIDGRRFDRR

SEQ ID NO: 128427 - DNA, 405 bp, Ostreococcus tauri
  CDS (1)..(405)
atgggacgcgttcgcacgaagacggtgaagaaggcttcgcgccaaatcatcgagaagtattactctcgtctcacgcttgatttcgcgacgaacaagcgcatcgcggatgagatcgccatcatcccgtccaagcggttgcgtaacaagattgcgggttttaccacgcacttgatgaagcgcattcaacgtggcccggtgcgtggtatctctcttaagcttcaagaggaggagcgtgagcgacgcatggactttgttccggagaagtctgcgctcgacgtcgactcgatcgaggttgaccgcgacaccatggacatgttgaagtcgatgaacatgggcagcttgccgggcgtgaccgtgtccagccgctcgcactacaacaagggtccgcgtcgcgatcgcgcgtaa

SEQ ID NO: 128428 - protein, 134 aa, Ostreococcus tauri
MGRVRTKTVKKASRQIIEKYYSRLTLDFATNKRIADEIAIIPSKRLRNKIAGFTTHLMKRIQRGPVRGISLKLQEEERERRMDFVPEKSALDVDSIEVDRDTMDMLKSMNMGSLPGVTVSSRSHYNKGPRRDRA

SEQ ID NO: 128429 - DNA, 396 bp, Argas monolakensis
  CDS (1)..(396)
atgggtcgtgtaaggaccaagacagtgaaaaaggcttctcgcctgatcatcgagaagtactacaccagattgactctggacttccacaccaacaagaggatctgcgaagaaatcgcgatcatcccgagcaagaagttgaagaacaagattgcagggtttgtgacacatctcatgaagcgcatccagcgtggtccagtgcgtggcatttccatcaaattgcaagaagaagagagggaaaggagggacaactacgttcctgaggtgtctgcgctcgaacaggatgtgattgaagtggaccctgacaccatggagatgatgaaagcactggagatgtcgagcatcccaggcttacaagtcacaccgctcctgcccttccgagggggccctcgtgtctaa

SEQ ID NO: 128430 - protein, 131 aa, Argas monolakensis
MGRVRTKTVKKASRLIIEKYYTRLTLDFHTNKRICEEIAIIPSKKLKNKIAGFVTHLMKRIQRGPVRGISIKLQEEERERRDNYVPEVSALEQDVIEVDPDTMEMMKALEMSSIPGLQVTPLLPFRGGPRV

SEQ ID NO: 128431 - DNA, 399 bp, Diaphorina citri
  CDS (1)..(399)
atgggtcgtgtcagaaccaagactgtgaagaaagcttccagagttatcatcgagaaatactacactaagctcacactggatttccacaccaacaagaggatatgtgaagaaattgccatcattcccaccaaacccctgagaaataaaattgccggttttgtcacacatctgatgaagagactgcgacacagtcaagtgcgtggaatttccatcaaactgcaagaagaagaacgagaaagacgtgacaactatgttcccgaagtgtctgccctagaacaagatgtaattgaagttgactccgaaactaaggacatgttgagaatgctggacttcaacaacatcggtggactgcaactcattcaacctccagccaacacagctttcggccgaagaaactaa

SEQ ID NO: 128432 - protein, 132 aa, Diaphorina citri
MGRVRTKTVKKASRVIIEKYYTKLTLDFHTNKRICEEIAIIPTKPLRNKIAGFVTHLMKRLRHSQVRGISIKLQEEERERRDNYVPEVSALEQDVIEVDSETKDMLRMLDFNNIGGLQLIQPPANTAFGRRN

SEQ ID NO: 128433 - DNA, 435 bp, Solanum tuberosum
  CDS (1)..(435)
atgggtcgtgtacgcaccaagaccgtgaagaagtcttccagacaggtaattgagaggtactactccaagatgaccttggatttccacaccaacaagaagatattggaggaagttgccattattccttcaaagcgtctgcgcaacaagattgccgggttctccacccaccttatgaagcgtattcagaagggacctgttagaggcatctccctgaaattgcaagaggaggaacgtgagagacgtatggactttgttcctgatgagtctgccattaagaccgatctgattgaggttgacaaggagacccttgacatgctttcatcccttggcatgtctgaccttcccggtgttgtcaagcaggctgcagaaccacaagcagtagcagctctcccaacctttggtcgtggtgctggtggttttggcaggaaatactaa

SEQ ID NO: 128434 - protein, 144 aa, Solanum tuberosum
MGRVRTKTVKKSSRQVIERYYSKMTLDFHTNKKILEEVAIIPSKRLRNKIAGFSTHLMKRIQKGPVRGISLKLQEEERERRMDFVPDESAIKTDLIEVDKETLDMLSSLGMSDLPGVVKQAAEPQAVAALPTFGRGAGGFGRKY

SEQ ID NO: 128435 - DNA, 396 bp, Eucinetus sp. APV-2005
  CDS (1)..(396)
atgggtcgcgtccgaaccaagaccgtgaaaaaggcatccaaagtgatcatcgagaagtactacaccaggttgaccctggacttccacaccaacaaacgcatctgcgaggagatcgccatcatccccacgaagcccctgcgtaacaagatcgccggattcgtgacccacttgatgaaacgtctgcgtcactcccaagtcagaggtatttccatcaaactccaggaggaggaacgtgaaaggcgcgacaactacgttcccgaagtgtctgctctggaacacgacatcattgaagttgaccccgagaccaaggagatgttgaaaatgttggacttcaacaacatcaccggtttgcaattgacacagccggctaccaataccttcaacaggcgtaattag

SEQ ID NO: 128436 - protein, 131 aa, Eucinetus sp. APV-2005
MGRVRTKTVKKASKVIIEKYYTRLTLDFHTNKRICEEIAIIPTKPLRNKIAGFVTHLMKRLRHSQVRGISIKLQEEERERRDNYVPEVSALEHDIIEVDPETKEMLKMLDFNNITGLQLTQPATNTFNRRN

SEQ ID NO: 128437 - DNA, 408 bp, Suberites domuncula
  CDS (1)..(408)
atggggcgagtgaggacaaaaacagttaagaaggcctccagggtcattattgagaagtactatacaaagcttacaatggacttccatactaacaaacgtgtttgcgaagagattgctattatccctagtaaacgtctcaggaacaaaatcgctgggtttgttactcacttgatgaagcgaattcagaaaggtgctataagaggtatatccatcaagctgcaagaggaagagagagagagaagagacaactttgtacctgatgtatctgctcttgaacaagacataattgaagtagatccagagaccaaagagatgcttaaaacactggagtttggtaacatccctaatcttcaagtgactgcaccagtgtctggcggagctgcattcagatctggctttagacgttga

SEQ ID NO: 128438 - protein, 135 aa, Suberites domuncula
MGRVRTKTVKKASRVIIEKYYTKLTMDFHTNKRVCEEIAIIPSKRLRNKIAGFVTHLMKRIQKGAIRGISIKLQEEERERRDNFVPDVSALEQDIIEVDPETKEMLKTLEFGNIPNLQVTAPVSGGAAFRSGFRR

SEQ ID NO: 128439 - DNA, 393 bp, Lysiphlebus testaceipes
  CDS (1)..(393)
atgggtcgtgttagaaccaagacagtcaaaaaagccgcaaggctcatcatcgagaaatactacactcgtttgactcttgacttccacacaaacaaaagaatttgtgaagaaattgctattattcctagcaaaccattgaaaaacaaaatcgctggttttgtaacacacttgatgaaacgtcttcgtcacagtcaagtacgtggtatttcaatcaaactccaagaagaagaaagagaacgcagggacaactatgtacctgaagtatctgctctcgaacatgatgttattgaagctgatcctgacactaaagaaatgttaaaaatgttggatttcagtaacatctctgttcaaattgtacaaccacaagcacatcaatttacaagacgaaactaa

SEQ ID NO: 128440 - protein, 130 aa, Lysiphlebus testaceipes
MGRVRTKTVKKAARLIIEKYYTRLTLDFHTNKRICEEIAIIPSKPLKNKIAGFVTHLMKRLRHSQVRGISIKLQEEERERRDNYVPEVSALEHDVIEADPDTKEMLKMLDFSNISVQIVQPQAHQFTRRN

SEQ ID NO: 128441 - DNA, 378 bp, Schistosoma japonicum
  CDS (1)..(378)
atgggtcgagttcgaacaaagacagtaaaaaaggcttcgaggtttataatcgaaaggttttactcgaagctgacaagagattttcatacaaacaaaagagtttgtgaagatatcgcgtgcattgggtcaaaacgactgcgtaacatgatcgccggttatgtgacgcatttaatgaagcgtttcgaagtgggccccgtacgtggaatcagtattaagcttcaagaggaagaaagggaaaggagagacaactaccagccagaggtttctatatttgatactatggccctagagattgaccccgtggcacaggagatgttacagagcatgaacgtcgcccatgcaaagaacatacgtgcagttctacctgccgggaagtaa

SEQ ID NO: 128442 - protein, 125 aa, Schistosoma japonicum
MGRVRTKTVKKASRFIIERFYSKLTRDFHTNKRVCEDIACIGSKRLRNMIAGYVTHLMKRFEVGPVRGISIKLQEEERERRDNYQPEVSIFDTMALEIDPVAQEMLQSMNVAHAKNIRAVLPAGK

SEQ ID NO: 128443 - DNA, 378 bp, Schistosoma japonicum
  CDS (1)..(378)
atgggtcgagttcgaacaaagacagtaaaaaaagcttcgaggtttataatcgaaaggttttactcgaagctgacaagagattttcatacaaacaaaagagtttgtgaagatatcgcgtgcattgggtcaaaacgactgcgtaacatgatcgccggttatgtgacgcatttaatgaagcgtttcgaagtgggtcccgtacgtggaatcagtattaagcttcaagaggaagaaagggaaaggagagacaactaccagccagatgtttctatatttgatactatggccctagagattgaccccgtggcacaggagatgttacagagcatgaacgtcgcccatgcaaagaacatacgtgcagttctacctgccgggaagtaa

SEQ ID NO: 128444 - protein, 125 aa, Schistosoma japonicum
MGRVRTKTVKKASRFIIERFYSKLTRDFHTNKRVCEDIACIGSKRLRNMIAGYVTHLMKRFEVGPVRGISIKLQEEERERRDNYQPDVSIFDTMALEIDPVAQEMLQSMNVAHAKNIRAVLPAGK

SEQ ID NO: 128445 - DNA, 423 bp, Pectinaria gouldii
  CDS (1)..(423)
atgggtcgtgtcaggacaaagacagtcaagaaggcagctcgttatattgtggagaggtactacacatacctaaactatgacttccatcacaacaagaaattcattgaggaggtagccatcatcccttccaagaaactaaggaacaagattgcagggtttggcacccacttgatgaagcgtattgccaaggggcctgtgcgtggtatctctatcaagctgcaggaggaggagagggagaggcgtgataactacgtgcccgaggtgtctgcctttgatgcccaagtgattgaggttgaccccgagacaaaggagatgatcaagcaattcaacctggacatctctgaggccaagcttcaggtgacacagccccagtccggcaaccagggctacaggatgggaccccccggcgccaagcccaactaa

SEQ ID NO: 128446 - protein, 140 aa, Pectinaria gouldii
MGRVRTKTVKKAARYIVERYYTYLNYDFHHNKKFIEEVAIIPSKKLRNKIAGFGTHLMKRIAKGPVRGISIKLQEEERERRDNYVPEVSAFDAQVIEVDPETKEMIKQFNLDISEAKLQVTQPQSGNQGYRMGPPGAKPN

SEQ ID NO: 128447 - DNA, 411 bp, Kluyveromyces lactis
  CDS (1)..(411)
atgggtagagttagaaccaagaccgtcaagcgtgcctccaaggctttgattgaaaagtactatccaaagttgaccatggatttccaaaccaacaagagattgtgtgacgaaatcgctaccatccaatctaagagattgagaaacaagattgctggttacaccacccatttgatgaagagaatccaaaagggtccagttagaggtatttccttcaagttgcaagaagaagaaagagaaagaaaggatcaatacgttccagatgtctctgctttggacttgtctcactctaacgacgtcttgaacgttgacactcaaaccgctgaattggtcaactctttgggtttgaagttgccattatccgtttcctctgtttctgctgttagagacagaagattcagaaaaagaaactaa

SEQ ID NO: 128448 - protein, 136 aa, Kluyveromyces lactis
MGRVRTKTVKRASKALIEKYYPKLTMDFQTNKRLCDEIATIQSKRLRNKIAGYTTHLMKRIQKGPVRGISFKLQEEERERKDQYVPDVSALDLSHSNDVLNVDTQTAELVNSLGLKLPLSVSSVSAVRDRRFRKRN

SEQ ID NO: 128449 - DNA, 396 bp, Biphyllus lunatus
  CDS (1)..(396)
atgggtcgcgtacgtaccaagaccgttaagaaagcttctaaagtaattattgaaaaatattacacgcgtttgactctggattttcacacaaataaacgcatttgtgaagaaattgccatcattccaacgaagcctctccgcaacaaaattgctggtttcgttacacatttgatgaagcgtctccgtcactctcaagtccgtggtatttctattaaacttcaagaagaagaacgtgaaagacgtgataactacgtaccagaagtgtctgctttggaacatgatatcattgaggttgatccagaaactaaagatatgttgagagttctggatttcaataacattagtggattgcaacttactcaacccactacaaatacattcaatagacgagcttaa

SEQ ID NO: 128450 - protein, 131 aa, Biphyllus lunatus
MGRVRTKTVKKASKVIIEKYYTRLTLDFHTNKRICEEIAIIPTKPLRNKIAGFVTHLMKRLRHSQVRGISIKLQEEERERRDNYVPEVSALEHDIIEVDPETKDMLRVLDFNNISGLQLTQPTTNTFNRRA

SEQ ID NO: 128451 - DNA, 396 bp, Dascillus cervinus
  CDS (1)..(396)
atgggccgtgtacgtacaaagactgttaaaaaggcgtctaaagttattatagagaagtactacacacgcctaacattagatttccatacgaataaacgtatttgtgaggagatcgctatcattcccaccaaatcattgcgtaataagattgccggttttgttacccacttgatgaaacgtttacgccactctcaagtgcggggtatttccataaagttgcaagaagaagaacgtgagcgacgtgacaactacgttcctgaagtttcagctctcgagcacgatatcattgaggttgatccagaaacgaaagagatgttgaaacttttggagttcaacaatatttcaggcctgcaattgacgcagcccactactaattcattcaataggcgaacgtaa

SEQ ID NO: 128452 - protein, 131 aa, Dascillus cervinus
MGRVRTKTVKKASKVIIEKYYTRLTLDFHTNKRICEEIAIIPTKSLRNKIAGFVTHLMKRLRHSQVRGISIKLQEEERERRDNYVPEVSALEHDIIEVDPETKEMLKLLEFNNISGLQLTQPTTNSFNRRT

SEQ ID NO: 128453 - DNA, 396 bp, Carabus granulatus
  CDS (1)..(396)
atgggtcgtgtaagaacgaaaaccgtgaagaaggcttccaaagtgatcatcgagaaatactatacacggttgactctcgatttccacacaaacaagcgtatttgcgaagagatcgcaatcattccgaccaagcctctgcgtaataaaatcgctggcttcgttactcatttgatgaaacgtctccgtcactcccaagtgcgcggtatttccatcaaactgcaggaagaggaacgtgaaaggcgcgacaattacgtgcccgaagtatctgctctggaacacgacattattgaggtggatccagagaccaaggaaatgttgaaaatgttggaattcaacaatatcagtggtttacaattgacacagacaactacacagtccttcaacagacgcacgtaa

SEQ ID NO: 128454 - protein, 131 aa, Carabus granulatus
MGRVRTKTVKKASKVIIEKYYTRLTLDFHTNKRICEEIAIIPTKPLRNKIAGFVTHLMKRLRHSQVRGISIKLQEEERERRDNYVPEVSALEHDIIEVDPETKEMLKMLEFNNISGLQLTQTTTQSFNRRT

SEQ ID NO: 128455 - DNA, 396 bp, Plutella xylostella
  CDS (1)..(396)
atgggtcgtgtcaggaccaagaccgtcaagaaagcggcgaaaataatcattgagaagtactacacaaggttgactttggattttgataccaacaagaggatatgtgaggaaatcgctatcattcccaccaagcctcttcgtaacaagatcgctgggtttgccacccacttgatgaggcgtctccgacactcccaggtgcgtggtatctccatcaagcttcaagaggaggaacgtgagagacgtgacaactacgtcccagaggtttctgccctggaacatgacatcattgaggttgaccctgacaccaaggacatgttgaagatgctcgacttcaacaacatcaacggtcttcagctaactcagcctgccacctcaaactacgctggcagacgttaa

SEQ ID NO: 128456 - protein, 131 aa, Plutella xylostella
MGRVRTKTVKKAAKIIIEKYYTRLTLDFDTNKRICEEIAIIPTKPLRNKIAGFATHLMRRLRHSQVRGISIKLQEEERERRDNYVPEVSALEHDIIEVDPDTKDMLKMLDFNNINGLQLTQPATSNYAGRR

SEQ ID NO: 128457 - DNA, 438 bp, Capsicum annuum
  CDS (1)..(438)
atgggtcgtgtacgcaccaagaccgtgaagaagtcatcaagacaggtaattgagaggtactactcgaagatgaccttggatttccacacgaacaagaagatattggaggaggttgccataattccttcaaagcgtctccgcaacaagattgccgggttctccactcaccttatgaagcgaattcagaagggaccagttagaggcatctccctgaaattgcaagaggaggagcgtgagagacgtatggactttgtccctgatgagtctgccattaagactgatctgattgaggtcgacaaggagacccttgacatgctttcagcccttggcatggctgaacttcctggtgttgtcaagcaagctgcagaaccacaagcagtagcagctactctcccaacctttggtcgtggtgctggcggttttggcaggaaatactaa

SEQ ID NO: 128458 - protein, 145 aa, Capsicum annuum
MGRVRTKTVKKSSRQVIERYYSKMTLDFHTNKKILEEVAIIPSKRLRNKIAGFSTHLMKRIQKGPVRGISLKLQEEERERRMDFVPDESAIKTDLIEVDKETLDMLSALGMAELPGVVKQAAEPQAVAATLPTFGRGAGGFGRKY

SEQ ID NO: 128459 - DNA, 405 bp, Branchiostoma belcheri
  CDS (1)..(405)
atgggtcgcgttcgtacgaagacgatcaaaaaggcggcgcgggtgatcatcgaaaaatactacaccaggcttacgctcgacttccacacaaataagcggatatgtgaggagattgccattattcccagcaagaagctgaggaacaaggttgcagggtttgtaacccatctgatgaagcgtatccagcgaggaccagtccgtggtatctccatcaagctgcaggaggaggagagggagaggagagacaactacgttcctgaggtgtctgcaattgatcaggacatcattgaggtggatcctgacaccaaggagatgttgaaggcactggactttggtaacatctcgggtctgcaggtgacacagcctgttggtgtgcccggattcagagcacccaagaacccctag

SEQ ID NO: 128460 - protein, 134 aa, Branchiostoma belcheri
MGRVRTKTIKKAARVIIEKYYTRLTLDFHTNKRICEEIAIIPSKKLRNKVAGFVTHLMKRIQRGPVRGISIKLQEEERERRDNYVPEVSAIDQDIIEVDPDTKEMLKALDFGNISGLQVTQPVGVPGFRAPKNP

SEQ ID NO: 128461 - DNA, 423 bp, Aequipecten irradians
  CDS (1)..(423)
atggctcgcgtcaggacaaagaccgtcaagaaggccgccagagtcattattgagaaatactacaccaagttgaccctcgacttccacactaacaaaagagtatgtgaagaaatcgctattttgcctagcaagaagcttaggaacaaagtagcagggtttgtcacccatttgatgaagcgtatccaggctgggccagtccgaggtatctccatcaagctacaggaagaagagagggaaaggagggataactacgtcccagaggtttctcttttggaacaacatgacgttattgaagttgatcccgatacaaaggacatgttgaagtctctggactttggcaacatccccggcctgcaggttacccagcccatcacagcccagggaggattccgaccagggggtgctggtggaccaaggatgtaa

SEQ ID NO: 128462 - protein, 140 aa, Aequipecten irradians
MARVRTKTVKKAARVIIEKYYTKLTLDFHTNKRVCEEIAILPSKKLRNKVAGFVTHLMKRIQAGPVRGISIKLQEEERERRDNYVPEVSLLEQHDVIEVDPDTKDMLKSLDFGNIPGLQVTQPITAQGGFRPGGAGGPRM

SEQ ID NO: 128463 - DNA, 435 bp, Solanum lycopersicum
  CDS (1)..(435)
atgggtcgtgtgcgcaccaagaccgtgaagaagtcatctcgacaggtaattgagaggtactactccaaaatgacattggatttccacaccaacaagaagattttggaggaagttgctataattccttccaagcgtctccgcaacaagattgctggattctccactcacctcatgaagcgtatccagaagggaccagtccgtggtatctccctgaaactgcaagaggaggaacgtgagagacgcatggactttgttcctgatgaatctgccatcaagactgatctcattgaagttgacaaggagacccttgacatgctttcagccctcggcatgtctgaccttccaggcgttgtcaagcaggccgctgagccacaagcagtggcagctctcccatcatatggccgcggtggaggtggttttggacggaaatactaa

SEQ ID NO: 128464 - protein, 144 aa, Solanum lycopersicum
MGRVRTKTVKKSSRQVIERYYSKMTLDFHTNKKILEEVAIIPSKRLRNKIAGFSTHLMKRIQKGPVRGISLKLQEEERERRMDFVPDESAIKTDLIEVDKETLDMLSALGMSDLPGVVKQAAEPQAVAALPSYGRGGGGFGRKY

SEQ ID NO: 128465 - DNA, 420 bp, Brassica napus
  CDS (1)..(420)
atgggtcgtgttcgtaccaaaaccgtgaagaaatcatcacgtcaggtgatagagaagtactactcaaggatgacactagacttccacacgaacaagaagatcttggaggaagtcgcgatcatcccgtcgaaaagactacggaacaagatcgctggattctccacacacttgatgaaacgtatccaaaagggtccagtccgcgggatctcgctcaagctgcaagaggaggagcgcgaacggagaatggactttgtccccgacgagtcggcgattaaaacggatgacgttaaggtggataaagagacgctagagatgcttgcttcattggggatgtctgatgtttccgggttttctcaagtggagacacaagcagccgtggtaccgagcaatgcgtttggccgtggtggaagaagattctaa

SEQ ID NO: 128466 - protein, 139 aa, Brassica napus
MGRVRTKTVKKSSRQVIEKYYSRMTLDFHTNKKILEEVAIIPSKRLRNKIAGFSTHLMKRIQKGPVRGISLKLQEEERERRMDFVPDESAIKTDDVKVDKETLEMLASLGMSDVSGFSQVETQAAVVPSNAFGRGGRRF

SEQ ID NO: 128467 - DNA, 414 bp, Brassica napus
  CDS (1)..(414)
atgggacgcgtgcgcacgaagacggtgaagaagtcctctcgccaggtgatcgagaagtactactctcgcatgacgctcgatttccacacgaacaagaagatcctcgaggaagtcgcgatcattccttcgaagcgcctccgcaacaagatcgccggattctccactcatctgatgaagaggatccagaagggacccgtccgcgggatctccctcaagctccaggaggaggagcgcgagcgccgcatggacttcgtccccgacgagtccgccattaaaaccgatcgcatcgaggtcgataaggagacgctggacatgcttgcctccttggggatgggagatttgccaggtgtcgtcaaggtggagccggtctcggctgcccctatcgcaggctttggccgtggaaggaggttctag

SEQ ID NO: 128468 - protein, 137 aa, Brassica napus
MGRVRTKTVKKSSRQVIEKYYSRMTLDFHTNKKILEEVAIIPSKRLRNKIAGFSTHLMKRIQKGPVRGISLKLQEEERERRMDFVPDESAIKTDRIEVDKETLDMLASLGMGDLPGVVKVEPVSAAPIAGFGRGRRF

SEQ ID NO: 128469 - DNA, 423 bp, Glycine max
  CDS (1)..(423)
atggggcgtgttcgcacgaagacggtgaagaaatcctcgcggcaagtgatagagaggtactactcccgcatgacgctggacttccacacgaacaagaaggttctggaagaggtggccatcattccctccaagaggctccgcaacaagatcgcggggttctccacccatctcatgaagcggatccagaagggtcccgtgcgtggaatctccctgaagctgcaggaggaggaacgcgagcgtcgcatggacttcgtccccgatgtctccgccatcaggaccgaccagatcgaggtcgacaaggagacgcaaaaaatgctcgccgccctcgggatgtccgaggttcctggcatcgttcaggtggatcctgttgccgtccaggcgcccctcggtttcggccgtggcggccctggaaggaggtactaa

SEQ ID NO: 128470 - protein, 140 aa, Glycine max
MGRVRTKTVKKSSRQVIERYYSRMTLDFHTNKKVLEEVAIIPSKRLRNKIAGFSTHLMKRIQKGPVRGISLKLQEEERERRMDFVPDVSAIRTDQIEVDKETQKMLAALGMSEVPGIVQVDPVAVQAPLGFGRGGPGRRY

SEQ ID NO: 128471 - DNA, 408 bp, Brassica napus
  CDS (1)..(408)
atggggcgtgtccgaaccaagaccgtgaagaaatcatctcgccaagtcatcgagaagtactactctcgcatgacactcgacttccacaccaacaagaagatcctcgaagaagtcgccatcatcccttcgaagcgtctccgcaacaagatcgctggattctccacccacttgatgaagcgtatccagaagggaccggtccgtggcatctctctcaagcttcaagaggaagagcgcgagcgccgcatggactttgtccccgacgagtctgctatcaagaccgatgtgatcaaggtcgacaaggagactctggagatgcttgcttcccttggcatgtctgacactagtggcatctctgaagtcgagccacaggctgcacctactttcagcaggccaccaagaaggttctga

SEQ ID NO: 128472 - protein, 135 aa, Brassica napus
MGRVRTKTVKKSSRQVIEKYYSRMTLDFHTNKKILEEVAIIPSKRLRNKIAGFSTHLMKRIQKGPVRGISLKLQEEERERRMDFVPDESAIKTDVIKVDKETLEMLASLGMSDTSGISEVEPQAAPTFSRPPRRF

SEQ ID NO: 128473 - DNA, 411 bp, Brassica napus
  CDS (1)..(411)
atggggcgtgtccgtaccaagaccgtgaagaaatcttctcgccaagtcatcgagaagtattactctcgcatgacactcgacttccacacgaacaagaagatcctcgaagaagtcgcaatcatcccttcgaagcgtctccgcaacaagatcgccggattctccacccatttgatgaagaggatccagaagggaccagtccgtggtatctcgctcaagcttcaagaggaagagcgtgagcgccgcatggactttgtccccgatgagtctgctatcaagaccgatgtgatcaaggtggacaaggagactctagagatgcttgcttcccttggaatggctgacactcctggcttctctgaagtcgagactcaggctccggcacctgcttttggcaggcctcccagaaggttctga

SEQ ID NO: 128474 - protein, 136 aa, Brassica napus
MGRVRTKTVKKSSRQVIEKYYSRMTLDFHTNKKILEEVAIIPSKRLRNKIAGFSTHLMKRIQKGPVRGISLKLQEEERERRMDFVPDESAIKTDVIKVDKETLEMLASLGMADTPGFSEVETQAPAPAFGRPPRRF

SEQ ID NO: 128475 - DNA, 411 bp, Brassica napus
  CDS (1)..(411)
atggggcgtgtccgaaccaagaccgtgaagaaatcatcacgtcaagtgatcgagaagtactactctcgcatgacgctcgacttccacaccaacaagaagatcctcgaagaggtcgcaatcatcccttcgaagcgtctccgcaacaagattgctggattctccacccatttgatgaagaggatccagaagggaccggtgcgtggtatctcgctcaagcttcaggaggaagagcgtgagcgccgcatggactttgtgcccgatgagtctgctatcaagaccgatgagattaaggttgataaagagactcttgagatgcttgcttcccttgggatgtctgacgttcccggcgtctctgtggttgagcctcaggctgtggcacctgcttttggcaggccaccgagaaggtactga

SEQ ID NO: 128476 - protein, 136 aa, Brassica napus
MGRVRTKTVKKSSRQVIEKYYSRMTLDFHTNKKILEEVAIIPSKRLRNKIAGFSTHLMKRIQKGPVRGISLKLQEEERERRMDFVPDESAIKTDEIKVDKETLEMLASLGMSDVPGVSVVEPQAVAPAFGRPPRRY

SEQ ID NO: 128477 - DNA, 432 bp, Helianthus annuus
  CDS (1)..(432)
atgggtcgagtccgcaccaaaaccgtgaagaaatcctctcgtcaagtaatcgaacgctactactcaaaaatgacactcgatttccacacaaacaagaagatcttagaagaagttgcaatcattccgtcgaagcggctccggaacaagatcgctggattctcaacgcatctgatgaagcggatccagaaaggaccagtgagagggatctcgttgaagctgcaggaggaggagagagagaggcgtatggactttgttccggatgaatccgcaattaaagtggataggattgaggttgataaggagacgattgagttgttggcttcgcttgggatgagtgagatgccggggattgtgctcaaggaggatacgccggtggtttccgctgggattcctggtggttatggtggagcacgtggtggaaggaggtactga

SEQ ID NO: 128478 - protein, 143 aa, Helianthus annuus
MGRVRTKTVKKSSRQVIERYYSKMTLDFHTNKKILEEVAIIPSKRLRNKIAGFSTHLMKRIQKGPVRGISLKLQEEERERRMDFVPDESAIKVDRIEVDKETIELLASLGMSEMPGIVLKEDTPVVSAGIPGGYGGARGGRRY

SEQ ID NO: 128479 - DNA, 432 bp, Helianthus annuus
  CDS (1)..(432)
atgggtcgtgtacgaaccaaaaccgttaagaaatcctctagagtagtgatcgagaggtactacggaaaaatgactctcgacttccataccaacaagaagattctggaagaagtggctatcattccatcgaaacgtcttagaaacaagattgccggcttctccactcatctcatgaagcgaatccagaaaggacccgtgaggggtatatcattgaagctacaggaagaagagagggagagacgcatggactttgcgcctgatgagtctgctatcaaaactgatctgattgaagttgataaagagaccattgaaatgcttaatgctctgggaatgggtgatcttcctggtgttgtcaaggcttctgttgagccacaggctttgccgtcagatcccgcttttggtcggggcggtggtgcaacaagaagatattaa

SEQ ID NO: 128480 - protein, 143 aa, Helianthus annuus
MGRVRTKTVKKSSRVVIERYYGKMTLDFHTNKKILEEVAIIPSKRLRNKIAGFSTHLMKRIQKGPVRGISLKLQEEERERRMDFAPDESAIKTDLIEVDKETIEMLNALGMGDLPGVVKASVEPQALPSDPAFGRGGGATRRY

SEQ ID NO: 128481 - DNA, 408 bp, Glycine max
  CDS (1)..(408)
atgggtcgcgtgagaacaaaaacggtgaagaaatcctcccgccaggtgattgagcgttactactcgcgcatgaccctcgacttccacacaaacaaaaagcttctcgaagaagtggccatcatcccttccaagaggctgcggaacaagatcgcgggtttctccacgcatctcatgaagcgcatccagaagggtcccgttcgcggcatctccctcaagctccaggaggaggagcgcgagcgccgcatggacttcgtccccgacgtctccgccatcaacaccgaccacatcgaagtcgacccgggaatccttgacatgcttcattccctcggaatcaacgacatccccggcatcacacaggttgaccctgttcctgttcaacaggccttccccttcaccaggaggtactga

SEQ ID NO: 128482 - protein, 135 aa, Glycine max
MGRVRTKTVKKSSRQVIERYYSRMTLDFHTNKKLLEEVAIIPSKRLRNKIAGFSTHLMKRIQKGPVRGISLKLQEEERERRMDFVPDVSAINTDHIEVDPGILDMLHSLGINDIPGITQVDPVPVQQAFPFTRRY

SEQ ID NO: 128483 - DNA, 420 bp, Glycine max
  CDS (1)..(420)
atggggcgtgttcgcacaaagacagtgaagaagtcctcgcggcaagtgatcgagaggtactactctcgcatgacgctggacttccacacgaacaagaaggttctggaagaggtggccatcattccctccaagaggctccgcaacaagatcgcgggattctccacccacctcatgaagcggatccagaagggtcccgtacgtggaatctccctcaagctgcaggaggaggagcgcgagcgccgcatggacttcgtccccgatgtctccgccatcagaaccgaccagatcgaggtcgacaaggagacgctcgacatgctcgccgccctcggaatgtccgaggttcccggggttgttcaggtggatcctgttgctgtccaggcaccgctcggcttcggccgcggcgccggaaggaggtactag

SEQ ID NO: 128484 - protein, 139 aa, Glycine max
MGRVRTKTVKKSSRQVIERYYSRMTLDFHTNKKVLEEVAIIPSKRLRNKIAGFSTHLMKRIQKGPVRGISLKLQEEERERRMDFVPDVSAIRTDQIEVDKETLDMLAALGMSEVPGVVQVDPVAVQAPLGFGRGAGRRY

SEQ ID NO: 128485 - DNA, 444 bp, Glycine max
  CDS (1)..(444)
atgggtcgcgtgagaacaaaaacggtgaagaaatcctcccgccaggtgattgagcgttactactcgcgcatgagcctcgacttccacacaagcaaagagcttctcgaagaagtggccatcatcccttccaagaggctgcggaacaagatcgcgggtttctgcacgcatctcatgaagcgcatccaaaagggtcccgttcgcggcatctccctcaagctccaggaggaggagcgcgagcaccgcatggacttcgtccccgacgtctgcgccatcgacaccgaccacgtcgaagtcgacagagaagccgttgacatgcttcgttgcctaggaatcaacgacatgcccgggatgacacagggtgaccgctgtagctgtcagcaggcggttcgacttcagcagaaggagctgatgtggatagtgatgatggacgaggatggaggttga

SEQ ID NO: 128486 - protein, 147 aa, Glycine max
MGRVRTKTVKKSSRQVIERYYSRMSLDFHTSKELLEEVAIIPSKRLRNKIAGFCTHLMKRIQKGPVRGISLKLQEEEREHRMDFVPDVCAIDTDHVEVDREAVDMLRCLGINDMPGMTQGDRCSCQQAVRLQQKELMWIVMMDEDGG

SEQ ID NO: 128487 - DNA, 408 bp, Glycine max
  CDS (1)..(408)
atgggtcgcgtgagtacaaaaacggtcaaaaaatcctcccgccaggtgattgagcgttactactcgcgcatgaccctcgacttccacacaaccaaaaagcttctcgaagaagtggccatcatcccttccaagaggctgcggaacaagatcgcgggtttctccacgcatctcatgaagcgcatccagaagggtcccgttcgcggcatctccctcaagctccaggaggaggagcgcgagcgccgcatggacttcgtccccgacgtctccgccatcaacaccgaccacatcgaagtcgacaaagaaacccttgacatgcttcattccctcggaatcaacgacatccccggcatcacacaggttgaccctgttcctgttcaacaggccttccccttcaccaggaggtactga

SEQ ID NO: 128488 - protein, 135 aa, Glycine max
MGRVSTKTVKKSSRQVIERYYSRMTLDFHTTKKLLEEVAIIPSKRLRNKIAGFSTHLMKRIQKGPVRGISLKLQEEERERRMDFVPDVSAINTDHIEVDKETLDMLHSLGINDIPGITQVDPVPVQQAFPFTRRY

SEQ ID NO: 128489 - DNA, 432 bp, Helianthus annuus
  CDS (1)..(432)
atgggtcgagtccgcaccaaaaccgtgaagaaatcctctcgtcaagtaatcgaacggtactactcaaaaatgacactcgatttccacacaaacaagaagatcttagaagaagttgcaatcattccgtcgaaacggctccggaacaagatcgctggattctcaacgcatctgatgaagcggatccagaaaggtccggtgagagggatctcgttgaagctgcaggaggaggagagagagaggcgcatggactttgttccggatgaatccgcaattaaagtggataggattgaggttgataaggagacgattgagttgttggcttcgcttgggatgagtgagatgccggggattgtgctcaaggaggatacgccggtggtttccggtgggattcctggtggttatggtggtgcacgtggtggaaggaggtactga

SEQ ID NO: 128490 - protein, 143 aa, Helianthus annuus
MGRVRTKTVKKSSRQVIERYYSKMTLDFHTNKKILEEVAIIPSKRLRNKIAGFSTHLMKRIQKGPVRGISLKLQEEERERRMDFVPDESAIKVDRIEVDKETIELLASLGMSEMPGIVLKEDTPVVSGGIPGGYGGARGGRRY

SEQ ID NO: 128491 - DNA, 438 bp, Helianthus annuus
  CDS (1)..(438)
atgggtcgagtccgaaccaaaaccgtgaagaagtcctcacggaccgtaatcgagcgttactactcgaaaatgacactcgatttccacacaaacaagaagattctagaagaagtagccatcatcccgtcaaagcgtctccgaaacaagatcgcagggttctcaacgcatctgatgaagcggatccagaaaggaccggtgagaggcatctcgttgaagctgcaggaggaggagagagaacgccggatggactttgtgcctgatgagtctgctattagagttgataatattgaggttgataaggagacaattgagttgcttgcttcgcttgggatgagtgagcttccaggtgttgtgcttaaggaggagactccggtggtttctgcggtgattcccggagggtatggtgctggtcgtggtggtgctggaagaaggtattaa

SEQ ID NO: 128492 - protein, 145 aa, Helianthus annuus
MGRVRTKTVKKSSRTVIERYYSKMTLDFHTNKKILEEVAIIPSKRLRNKIAGFSTHLMKRIQKGPVRGISLKLQEEERERRMDFVPDESAIRVDNIEVDKETIELLASLGMSELPGVVLKEETPVVSAVIPGGYGAGRGGAGRRY

SEQ ID NO: 128493 - DNA, 453 bp, Helianthus annuus
  CDS (1)..(453)
atgggacgcgtccgcaccaaaaccgtgaagaaatcctcccgtcaggtaatcgaacgctactattccaaaatgacactcgatttccacaccaacaagaagattctagaagaagtagccatcatcccgtccaaaaggctccgtaacaagatcgcagggttctcaactcaccttatgaagaggatccagaaaggtccggtgagaggcatctcgctgaagctgcaggaggaggagagagagaggcgtatggactttgttccggatgaatccgccattaaagttgataggattgaggttgataaggagacgattgatttacttgcttcgttggggatgagtgagctgccggggattgtgttgaaggaggatgtgccggtggtttccggtgggattcctggtggttatggtggtggtggtcgtggtggatttggtggtggtgctggaaggaggtactga

SEQ ID NO: 128494 - protein, 150 aa, Helianthus annuus
MGRVRTKTVKKSSRQVIERYYSKMTLDFHTNKKILEEVAIIPSKRLRNKIAGFSTHLMKRIQKGPVRGISLKLQEEERERRMDFVPDESAIKVDRIEVDKETIDLLASLGMSELPGIVLKEDVPVVSGGIPGGYGGGGRGGFGGGAGRRY

SEQ ID NO: 128495 - DNA, 432 bp, Helianthus annuus
  CDS (1)..(432)
atgggtcgtgtacgaaccaaaaccgttaagaaatcctctagagtagtgatcgagaggtactacggaaaaatgactctcgacttccataccaacaagaagattctggaagaagtggctatcattccatcgaaacgtcttagaaacaagattgccggcttctccactcatctcatgaagcgaatccagaaaggacccgtgaggggtatatcattgaagctacaggaagaagagagggagagacgcatggactttgtgcctgatgagtctgctatcaaaactgatctgattgaagttgataaagagaccattgaaatgcttaatgctctgggaatgggtgatcttcctggtgttgtcaaggcttctgttgagccacaggctttgccgtcagttcccgcttttggtcggggcggtggtgcaacaagaagatattaa

SEQ ID NO: 128496 - protein, 143 aa, Helianthus annuus
MGRVRTKTVKKSSRVVIERYYGKMTLDFHTNKKILEEVAIIPSKRLRNKIAGFSTHLMKRIQKGPVRGISLKLQEEERERRMDFVPDESAIKTDLIEVDKETIEMLNALGMGDLPGVVKASVEPQALPSVPAFGRGGGATRRY

SEQ ID NO: 128497 - DNA, 435 bp, Oryza sativa
  CDS (1)..(435)
atggggcgcgtgcgcacgaagacggtgaagaagacgtctcggcaggtgatcgagaagtactactcgcggatgaccctggacttccacacgaacaagaaggtgctggaggaggtgtcgatcctgccgtcgaagcgcctccgcaacaaggtggccggcttcagcacccacctgatgcgccgcatccagcgcggccccgtccgcggcatctccctcaagctccaggaggaggagcgcgagcgccgcatggacttcgtcccggacaggtcggcgctcgaggtcgacgacatccgcgtcgacaaggagaccctcgacatgctcgcatccctcggcatggccgacctccccggagtagtgcgccagtccgacgcctccacctccgccccgcagcagtacggcgccgcccgcctcccctacgcccgccgcgaccgcgcctag

SEQ ID NO: 128498 - protein, 144 aa, Oryza sativa
MGRVRTKTVKKTSRQVIEKYYSRMTLDFHTNKKVLEEVSILPSKRLRNKVAGFSTHLMRRIQRGPVRGISLKLQEEERERRMDFVPDRSALEVDDIRVDKETLDMLASLGMADLPGVVRQSDASTSAPQQYGAARLPYARRDRA

SEQ ID NO: 128499 - DNA, 432 bp, Triticum aestivum
  CDS (1)..(432)
atgggtcgcgtccgcaccaagaccgtgaagaagacctcccgccaggtcatcgagaagtactactctcggatgaccctcgacttccacaccaacaagaaggtgctagaggaggtctccatcctccagtcgaagcgcctccgcaacaaggtggccggcttcaccacccatctgatgcgccgcatccagcgcggccccgtgcgcggcatctccctcaagctgcaggaggaggagcgtgagcgccgcatggacttcgtgccggagaagtcggcgctcgaggtcgacgagatccgcgtcgacaaggagaccatggacatgctggcgttcctcggcatggctgacctccccggcgtcgagcgcgcccccgaaaccacctctgccgccgccccctaccgccagcccttcaacggaccccgcggtggcaaccgcgcctag

SEQ ID NO: 128500 - protein, 143 aa, Triticum aestivum
MGRVRTKTVKKTSRQVIEKYYSRMTLDFHTNKKVLEEVSILQSKRLRNKVAGFTTHLMRRIQRGPVRGISLKLQEEERERRMDFVPEKSALEVDEIRVDKETMDMLAFLGMADLPGVERAPETTSAAAPYRQPFNGPRGGNRA

SEQ ID NO: 128501 - DNA, 432 bp, Triticum aestivum
  CDS (1)..(432)
atgggtcgcgtccgcaccaagaccgtgaagaagacctcccgccaggtcatcgagaagtactactctcggatgaccctcgacttccacaccaacaagaaggtgctcgaggaggtctccatcctccagtcgaagcgcctccgcaacaaggtggccggcttcaccacccatctgatgcgccgcatccagcgcggccccgtgcgcggcatctccctcaagctgcaggaggaggagcgtgagcgccgcatggacttcgtgccggagaagtcggcgctcgaggtcgacgagatccgcgtcgacaaggagaccatggacatgctggcgttcctcggcatggccgacctccccggcgttgagcgcgcccccgaggccacctctgccgctgcgccctaccgccagcccttcaacggaccccgcggtggcaatcgcgcctag

SEQ ID NO: 128502 - protein, 143 aa, Triticum aestivum
MGRVRTKTVKKTSRQVIEKYYSRMTLDFHTNKKVLEEVSILQSKRLRNKVAGFTTHLMRRIQRGPVRGISLKLQEEERERRMDFVPEKSALEVDEIRVDKETMDMLAFLGMADLPGVERAPEATSAAAPYRQPFNGPRGGNRA

SEQ ID NO: 128503 - DNA, 432 bp, Triticum aestivum
  CDS (1)..(432)
atgggtcgcgtccgcaccaagaccgtgaagaagacctcccgccaggtcatcgagaagtactattctcggatgaccctcgacttccacaccaacaagaaggtgctcgaggaggtctccatcctccagtcgaagcgcctccgcaacaaggtggccggcttcaccacccatctgatgcgccgcatccagcgcggccccgtgcgcggcatctccctcaagctgcaggaggaggagcgtgagcgccgcatggacttcgtgccggagaagtcggcgctcgaggtcgacgagatccgcgtcgacaaggagaccatggacatgctggcgttcctcggcatggccgacctccccggcgtcgagcgcgcccccgaagtcacctcctccgccgccccctaccgccagccgttcaacgggccccgtggtggcaaccgcgcctag

SEQ ID NO: 128504 - protein, 143 aa, Triticum aestivum
MGRVRTKTVKKTSRQVIEKYYSRMTLDFHTNKKVLEEVSILQSKRLRNKVAGFTTHLMRRIQRGPVRGISLKLQEEERERRMDFVPEKSALEVDEIRVDKETMDMLAFLGMADLPGVERAPEVTSSAAPYRQPFNGPRGGNRA

SEQ ID NO: 128505 - DNA, 24 bp, Artificial sequence
  primer
atgggtagagttagaaccaagacc

SEQ ID NO: 128506 - DNA, 25 bp, Artificial sequence
  primer
ttagtttctctttctgtaacgtctg

SEQ ID NO: 128507 - protein, 117 aa, Artificial sequence
  consensus sequence
  Variant (12)..(16): Xaa in position 12 to 16 is any amino acid
  Variant (19)..(19): Xaa in position 19 is any amino acid
  Variant (22)..(24): Xaa in position 22 to 24 is any amino acid
  Variant (29)..(29): Xaa in position 29 is any amino acid
  Variant (33)..(36): Xaa in position 33 to 36 is any amino acid
  Variant (38)..(38): Xaa in position 38 is any amino acid
  Variant (42)..(42): Xaa in position 42 is any amino acid
  Variant (45)..(45): Xaa in position 45 is any amino acid
  Variant (53)..(54): Xaa in position 53 to 54 is any amino acid
  Variant (61)..(63): Xaa in position 61 to 63 is any amino acid
  Variant (65)..(65): Xaa in position 65 is any amino acid
  Variant (66)..(66): Xaa in position 66 is any or no amino acid
  Variant (72)..(72): Xaa in position 72 is any amino acid
  Variant (82)..(83): Xaa in position 82 to 83 is any amino acid
  Variant (84)..(85): Xaa in position 84 to 85 is any or no amino acid
  Variant (88)..(89): Xaa in position 88 to 89 is any amino acid
  Variant (92)..(98): Xaa in position 92 to 98 is any amino acid
  Variant (99)..(105): Xaa in position 99 to 105 is any or no amino acid
  Variant (108)..(109): Xaa in position 108 to 109 is any amino acid
  Variant (111)..(113): Xaa in position 111 to 113 is any amino acid
  Variant (115)..(116): Xaa in position 115 to 116 is any amino acid
MGRVRTKTVKKXXXXXIEXYYXXXTLDFXTNKXXXXEXAIIXSKXLRNKIAGXXTHLMKRXXXGXXVRGISXKLQEEERERXXXXVPXXSAXXXXXXXXXXXXXXVDXXTXXXLXXL

SEQ ID NO: 128508 - protein, 42 aa, Artificial sequence
  protein pattern
  Variant (2)..(2): Xaa in position 2 is Lys or Arg
  Variant (5)..(6): Xaa in position 5 to 6 is any amino acid
  Variant (7)..(8): Xaa in position 7 to 8 is any or no amino acid
  Variant (10)..(11): Xaa in position 10 to 11 is any or no amino acid
  Variant (14)..(14): Xaa in position 14 is any amino acid
  Variant (18)..(18): Xaa in position 18 is Lys or Arg
  Variant (19)..(19): Xaa in position 19 is Ile, Leu, Met or Val
  Variant (20)..(20): Xaa in position 20 is any amino acid
  Variant (21)..(21): Xaa in position 21 is Ala, Asp or Glu
  Variant (23)..(23): Xaa in position 23 is Ile or Val
  Variant (25)..(25): Xaa in position 25 is any amino acid
  Variant (27)..(27): Xaa in position 27 is any amino acid
  Variant (28)..(28): Xaa in position 28 is Ser or Thr
  Variant (30)..(30): Xaa in position 30 is any amino acid
  Variant (32)..(32): Xaa in position 32 is any amino acid
  Variant (34)..(34): Xaa in position 34 is any amino acid
  Variant (38)..(38): Xaa in position 38 is Phe or Tyr
  Variant (39)..(39): Xaa in position 39 is any amino acid
  Variant (42)..(42): Xaa in position 42 is Leu or Val
EXYYXXXXLXXDFXTNKXXXXEXAXIXXKXLXNXIAGXXTHX

SEQ ID NO: 128509 - protein, 29 aa, Artificial sequence
  protein pattern
  Variant (2)..(4): Xaa in position 2 to 4 is any or no amino acid
  Variant (10)..(10): Xaa in position 10 is Phe, Ile or Leu
  Variant (20)..(20): Xaa in position 20 is Lys or Arg
  Variant (21)..(21): Xaa in position 21 is any amino acid
  Variant (22)..(22): Xaa in position 22 is Asp, Asn or Gln
  Variant (23)..(23): Xaa in position 23 is Phe or Tyr
  Variant (26)..(26): Xaa in position 26 is Asp or Glu
  Variant (27)..(27): Xaa in position 27 is any amino acid
  Variant (29)..(29): Xaa in position 29 is Ala or Glu
QXXXVRGISXKLQEEERERXXXXVPXXSX

SEQ ID NO: 128510 - protein, 15 aa, Artificial sequence
  protein pattern
  Variant (11)..(13): Xaa in position 11 to 13 is any or no amino acid
  Variant (15)..(15): Xaa in position 15 is Ala, Ser, Thr or Val
MGRVRTKTVKXXXKX

SEQ ID NO: 128511 - DNA, 1164 bp, Saccharomyces cerevisiae; identical to SEQ ID NO: 7752
  CDS (1)..(1164)

SEQ ID NO: 128512 - protein, 387 aa, Saccharomyces cerevisiae; identical to SEQ ID NO: 7753

SEQ ID NO: 128513 - DNA, 1445 bp, Zea mays; identical to SEQ ID NO: 7734
  CDS (182)..(1294)

SEQ ID NO: 128514 - protein, 370 aa, Zea mays; identical to SEQ ID NO: 7735

SEQ ID NO: 128515 - DNA, 1119 bp, Oryza sativa (japonica cultivar-group); identical to SEQ ID NO: 7748
  CDS (1)..(1119)

SEQ ID NO: 128516 - protein, 372 aa, Oryza sativa (japonica cultivar-group); identical to SEQ ID NO: 7749

SEQ ID NO: 128517 - DNA, 1035 bp, Arabidopsis thaliana; identical to SEQ ID NO: 7750
  CDS (1)..(1035)

SEQ ID NO: 128518 - protein, 344 aa, Arabidopsis thaliana; identical to SEQ ID NO: 7751

SEQ ID NO: 128519 - DNA, 1032 bp, Thermotoga maritima MSB8; identical to SEQ ID NO: 7754
  CDS (1)..(1032): transl_table=11

SEQ ID NO: 128520 - protein, 343 aa, Thermotoga maritima MSB8; identical to SEQ ID NO: 7755

SEQ ID NO: 128521 - DNA, 1002 bp, Escherichia coli O157:H7 EDL933; identical to SEQ ID NO: 7760
  CDS (1)..(1002): transl_table=11
  misc_feature (196)..(196): s is g or c

SEQ ID NO: 128522 - protein, 333 aa, Escherichia coli O157:H7 EDL933; identical to SEQ ID NO: 7761
  misc_feature (66)..(66): The Xaa at location 66 stands for Leu, or Val.

SEQ ID NO: 128523 - DNA, 1029 bp, Deinococcus radiodurans R1; identical to SEQ ID NO: 7762
  CDS (1)..(1029): transl_table=11

SEQ ID NO: 128524 - protein, 342 aa, Deinococcus radiodurans R1; identical to SEQ ID NO: 7763

SEQ ID NO: 128525 - DNA, 1002 bp, Salmonella typhimurium LT2; identical to SEQ ID NO: 7764
  CDS (1)..(1002): transl_table=11

SEQ ID NO: 128526 - protein, 333 aa, Salmonella typhimurium LT2; identical to SEQ ID NO: 7765

SEQ ID NO: 128527 - DNA, 1068 bp, Arabidopsis thaliana; identical to SEQ ID NO: 7766
  CDS (1)..(1068)

SEQ ID NO: 128528 - protein, 355 aa, Arabidopsis thaliana; identical to SEQ ID NO: 7767

SEQ ID NO: 128529 - DNA, 1041 bp, Thermoanaerobacter tengcongensis MB4; identical to SEQ ID NO: 7768
  CDS (1)..(1041): transl_table=11

SEQ ID NO: 128530 - protein, 346 aa, Thermoanaerobacter tengcongensis MB4; identical to SEQ ID NO: 7769

SEQ ID NO: 128531 - DNA, 1005 bp, Pseudomonas syringae pv. tomato str. DC3000; identical to SEQ ID NO: 7780
  CDS (1)..(1005): transl_table=11

SEQ ID NO: 128532 - protein, 334 aa, Pseudomonas syringae pv. tomato str. DC3000; identical to SEQ ID NO: 7781

SEQ ID NO: 128533 - DNA, 1077 bp, Arabidopsis thaliana; identical to SEQ ID NO: 7786
  CDS (1)..(1077)

SEQ ID NO: 128534 - protein, 358 aa, Arabidopsis thaliana; identical to SEQ ID NO: 7787

SEQ ID NO: 128535 - DNA, 1020 bp, Bordetella bronchiseptica RB50; identical to SEQ ID NO: 7788
  CDS (1)..(1020): transl_table=11

SEQ ID NO: 128536 - protein, 339 aa, Bordetella bronchiseptica RB50; identical to SEQ ID NO: 7789

SEQ ID NO: 128537 - DNA, 1029 bp, Chromobacterium violaceum ATCC 12472; identical to SEQ ID NO: 7790
  CDS (1)..(1029): transl_table=11

SEQ ID NO: 128538 - protein, 342 aa, Chromobacterium violaceum ATCC 12472; identical to SEQ ID NO: 7791

SEQ ID NO: 128539 - DNA, 1047 bp, Geobacter sulfurreducens PCA; identical to SEQ ID NO: 7796
  CDS (1)..(1047): transl_table=11

SEQ ID NO: 128540 - protein, 348 aa, Geobacter sulfurreducens PCA; identical to SEQ ID NO: 7797

SEQ ID NO: 128541 - DNA, 1056 bp, Yersinia pestis biovar Microtus str. 91001; identical to SEQ ID NO: 7800
  CDS (1)..(1056): transl_table=11

SEQ ID NO: 128542 - protein, 351 aa, Yersinia pestis biovar Microtus str. 91001; identical to SEQ ID NO: 7801

SEQ ID NO: 128543 - DNA, 1143 bp, Strongylocentrotus purpuratus; identical to SEQ ID NO: 7802
  CDS (1)..(1143)

SEQ ID NO: 128544 - protein, 380 aa, Strongylocentrotus purpuratus; identical to SEQ ID NO: 7803

SEQ ID NO: 128545 - DNA, 1140 bp, Magnaporthe grisea 70-15
  CDS (1)..(1140)
atggacagcgcgaccccaacccaaaatggcagccatccggccaagagcacatgggtgggctaccaaggtgctgccggtcttgacctgaggactatccagacgaccactctcctggacgatgttttcaaggaggatcccaccaccaacgaactcgaggagttttgtgccaaactcaccggcaaggaggctggtctttttgttctttcggggaccatgggcaacgtgcttgggctgcgcgccttgttgacccagccgccacacagcattctttgcgatcaccgctctcatattttcaaatacgaggctggcggtgtcacttccttgactggcgccatgctccacctcgtcacgcccaaaaacggcttgtatatgacgctggaggacatcaaggagaatatagttctcgactcagacatccactcgtgccccacgcgcgtcatcagcctggagaacactctgggaggtgtggtgatgcccttggaagaagcgagacgaattgccgattttgcacgccagacgggcaaagtccgcgtccactgtgacggtgcccgcctgtgggaggccgtcgcttccggggccggatcccttaaagaatatggcgcctgcttcgacaccatcaacctgtgcttctccaagggtctgggcgccccttgtggtagcatcctcgtcggcccaaaggacatcatcgaccatgcgcgttggatacgcaagtccatcggcggtgggctccggcagagcggtgtcctcacatccgccgcccgtgtcgccgtggaggagacttttggcaagggcgacagcggcgagggaggactactcaagcacacgcacgacttggccaaggaggtaggggccatgtggactgctctcggcggcaagttgacctacccggtgcacacaaacatgtgctggctggaccttgacgcggccggaatctcgggggccaggtttgtggagattggggaacaggagggcttgaagctgggacaagggaggattattacacactaccagatatggcagaacagggaagtggctgtccctaagctcaagcgcgtattcgagagggccatggcagagggaggtggcaagcctaatggccagagtgaagctgggtcaaagtcacagtacgcaaccaaatga

SEQ ID NO: 128546 - protein, 379 aa, Magnaporthe grisea 70-15
MDSATPTQNGSHPAKSTWVGYQGAAGLDLRTIQTTTLLDDVFKEDPTTNELEEFCAKLTGKEAGLFVLSGTMGNVLGLRALLTQPPHSILCDHRSHIFKYEAGGVTSLTGAMLHLVTPKNGLYMTLEDIKENIVLDSDIHSCPTRVISLENTLGGVVMPLEEARRIADFARQTGKVRVHCDGARLWEAVASGAGSLKEYGACFDTINLCFSKGLGAPCGSILVGPKDIIDHARWIRKSIGGGLRQSGVLTSAARVAVEETFGKGDSGEGGLLKHTHDLAKEVGAMWTALGGKLTYPVHTNMCWLDLDAAGISGARFVEIGEQEGLKLGQGRIITHYQIWQNREVAVPKLKRVFERAMAEGGGKPNGQSEAGSKSQYATK

SEQ ID NO: 128547 - DNA, 1146 bp, Nasonia vitripennis; identical to SEQ ID NO: 7804
  CDS (1)..(1146)

SEQ ID NO: 128548 - protein, 381 aa, Nasonia vitripennis; identical to SEQ ID NO: 7805

SEQ ID NO: 128549 - DNA, 1170 bp, Gibberella zeae PH-1
  CDS (1)..(1170)
atgcctagtcttgtagaaccccccgagtctctcttcacacccaaagtccaatccaaactctatgtcagtcgcgagaaagcatctcgggactttcgctccgatgttgtcaccgtccccatcgaggagatgatgactgccatcctggaagcatcagtcaacgatgatatctacgacccagaaggtgacccttccgtcaaagccctggaagctcgtcttgtagagatgacagggatggaagctgcgctgtgggccatctcaggcacccagggaaaccagatttgcttgaggacgcatcttacacagccaccgcatagtgttcttctggatcatcgtgcgcatgtgcattgttgggagtctggggctttgcctgtgatttctcaagcgagtgctacgacgatccatgcgaagaatggggttcatttgacgttggaagatattaagaagaatatcattgctgatgggaatattcacttcccacctaccagagttgtatctctagagaataccctctctggaacgattctaccacttgcagatgcacaagcaatctccaactatgttcgttcattcccagttccagaaggccagaaacccatcgccgtgcatcttgatggcgcccgtgtcttcgacggcgtgattggagaaggcgttgatctcaaggcgtatgcggcatgcttcgacagtatctccatctgtctagcaaagggcatcggcgccccaatgggtagtgttatcctcggcaagaagccttttatcgagcgggccaagtggttcaggaagatgctgggaggtggtactcgacagccaggaatgatggcggcggcagctctggcagctctggagtacagcattccaaggttcccatcggtgcacaagatgaccaaggaagctgccacgagacttgaagcggctgggtataagtttgtgcttccggtgcagactaacatgatcctgcccgatattgaagccgccggtattccgccggcagcctttgtcgagtattgtgccaaggaggaaattgcagtattcccaatggctagactcgttttccatcaccagacgtcagaggcagctgtcgatagcctggtgaaagcattgacaaggttgatggaagataagaagaacggagtggctctgaacaacggggaggcccacggaggatacagctaa

SEQ ID NO: 128550 - protein, 389 aa, Gibberella zeae PH-1
MPSLVEPPESLFTPKVQSKLYVSREKASRDFRSDVVTVPIEEMMTAILEASVNDDIYDPEGDPSVKALEARLVEMTGMEAALWAISGTQGNQICLRTHLTQPPHSVLLDHRAHVHCWESGALPVISQASATTIHAKNGVHLTLEDIKKNIIADGNIHFPPTRVVSLENTLSGTILPLADAQAISNYVRSFPVPEGQKPIAVHLDGARVFDGVIGEGVDLKAYAACFDSISICLAKGIGAPMGSVILGKKPFIERAKWFRKMLGGGTRQPGMMAAAALAALEYSIPRFPSVHKMTKEAATRLEAAGYKFVLPVQTNMILPDIEAAGIPPAAFVEYCAKEEIAVFPMARLVFHHQTSEAAVDSLVKALTRLMEDKKNGVALNNGEAHGGYS

SEQ ID NO: 128551 - DNA, 1296 bp, Gibberella zeae PH-1; identical to SEQ ID NO: 7806
  CDS (1)..(1296)

SEQ ID NO: 128552 - protein, 431 aa, Gibberella zeae PH-1; identical to SEQ ID NO: 7807

SEQ ID NO: 128553 - DNA, 1161 bp, Candida glabrata CBS 138; identical to SEQ ID NO: 7808
  CDS (1)..(1161)

SEQ ID NO: 128554 - protein, 386 aa, Candida glabrata CBS 138; identical to SEQ ID NO: 7809

SEQ ID NO: 128555 - DNA, 1188 bp, Kluyveromyces lactis NRRL Y-1140; identical to SEQ ID NO: 7810
  CDS (1)..(1188)

SEQ ID NO: 128556 - protein, 395 aa, Kluyveromyces lactis NRRL Y-1140; identical to SEQ ID NO: 7811

SEQ ID NO: 128557 - DNA, 1128 bp, Debaryomyces hansenii CBS767; identical to SEQ ID NO: 7812
  CDS (1)..(1128)

SEQ ID NO: 128558 - protein, 375 aa, Debaryomyces hansenii CBS767; identical to SEQ ID NO: 7813

SEQ ID NO: 128559 - DNA, 1104 bp, Debaryomyces hansenii CBS767
  CDS (1)..(1104)
atggatttctctaattattcagacctcagtccagcacacaatgagttcagaagtgatacatttacgaccccaacattatctatggttgcatcgctaacgaaggctactttaggagattctgtttataatgaagatgattctacaattcaattggaaaaaaaggttgctgacatgactgggaaggaagctggcctattctgtgtaagtgggacgttatctaatcagatctgtttacgtgttaatttaaaacagccaccatatagtatactatgcgattatagggcccatgtatacgtgaatgaagcaggggggatggcaacattatgtcaagcaatggcacaaccaattaaacctaagaatggtatttatttgactttagaagacgatatattgccaaacttcattccggacgatggagaaattcatggggctccaactaagcttatctccttagagaatactttacatggtatgcttttccccattgaagagattgctaaaatatccaaattttgcaaaaataacgatgtcaagcttcacttagatggtgccagattatggaatgcatcaattgccacagggatttctttaaaagagtattgttcgtattttgattctgtttccttatgtctttcaaagagtttgggggcacctatcggtacagtattaattgccgataaaaattttgttaagaaggccaatcacttcaagaagcaaagtggtggaggaattagacaatcgggtctcttggctactatggctatgaccgctattgacgaaaactttggaaagatacaaaggtcccatgatatggctaaagaattaggcaaactatgtgaagaaaatggaattgtcttagaacacccagttgacactaattttgtctttatcgactttgctaaaaacaaaatgagttctgacgttctaactaaattactgaaagaaaacggtatcaagctatatgctggcagagttgctttccactaccaggtatctctggaaagctttgagaaatgcaaaaaagtagtactcgaatgttataaagattcactacaaaacccttacattggtaagtcatcttcctcgtattaccaagccaagtaa

SEQ ID NO: 128560 - protein, 367 aa, Debaryomyces hansenii CBS767
MDFSNYSDLSPAHNEFRSDTFTTPTLSMVASLTKATLGDSVYNEDDSTIQLEKKVADMTGKEAGLFCVSGTLSNQICLRVNLKQPPYSILCDYRAHVYVNEAGGMATLCQAMAQPIKPKNGIYLTLEDDILPNFIPDDGEIHGAPTKLISLENTLHGMLFPIEEIAKISKFCKNNDVKLHLDGARLWNASIATGISLKEYCSYFDSVSLCLSKSLGAPIGTVLIADKNFVKKANHFKKQSGGGIRQSGLLATMAMTAIDENFGKIQRSHDMAKELGKLCEENGIVLEHPVDTNFVFIDFAKNKMSSDVLTKLLKENGIKLYAGRVAFHYQVSLESFEKCKKVVLECYKDSLQNPYIGKSSSSYYQAK

SEQ ID NO: 128561 - DNA, 1071 bp, Yarrowia lipolytica CLIB122
  CDS (1)..(1071)
atgactgcctgctctcacgatttcagatcggatacgatcacaaatcccaccaaagagatgatggaagccatcaccaactcgtactctgctcttggcgacgcagtgtacgaggaggacaccatcaccaccaactttgagagccgaatcaaggagctcaccggccacgaggctgctgtcttcgccgtctccggtacgatgactaaccagctggccatcagatcccacctgttccagcctccacactcgatcctgtgtgatcatcgagcacatgtgtacacctgcgaagctggtggcatagccacactgtctcaggccatggtgacccccgtcatcccctccaatggcatttacatgactctggaggacatcaaggccaagatcattgtcggagaagatgttcatgtcgcacctaccaagctcatctgtctggaaaacacaatgggtggcgccatttaccccattgaggagattcgtcgcatttcaaagtttgcacgggacaatgacatccctatccatctggatggcgccagactgtggaatgcaagcattgctacaggcgtgtcaatgcgggagtatggttcactctttgactcgatctctttatgtctatcaaaaggcttatgtgcccctgtaggcagtgtgcttgtggggtcaaagaagctgatcaagaccgctacctggtttaagaagcaggccggaggaggaattcggcagtccggtatcctgacatctgcagctaacgttgcattggaccaagtctggccctcaatggcaaaaactcatgctactgcgaaggagttcgccaactttgttacttctgacctgggcctcaagctcctttttcccgctgataccaactttgtttacattgatgaaacggacaaatttgattctgatgtctttgtcaagcttggagcggagcggggcatcaagttgctcggaggcagaatcgtcttccactaccatacttcacccgaggccattgagaccttgaaggaggtgcttcaagaggctatcaaacagtattctggggtaaaggaagacaagcttaagactagtggctacatctaa

SEQ ID NO: 128562 - protein, 356 aa, Yarrowia lipolytica CLIB122
MTACSHDFRSDTITNPTKEMMEAITNSYSALGDAVYEEDTITTNFESRIKELTGHEAAVFAVSGTMTNQLAIRSHLFQPPHSILCDHRAHVYTCEAGGIATLSQAMVTPVIPSNGIYMTLEDIKAKIIVGEDVHVAPTKLICLENTMGGAIYPIEEIRRISKFARDNDIPIHLDGARLWNASIATGVSMREYGSLFDSISLCLSKGLCAPVGSVLVGSKKLIKTATWFKKQAGGGIRQSGILTSAANVALDQVWPSMAKTHATAKEFANFVTSDLGLKLLFPADTNFVYIDETDKFDSDVFVKLGAERGIKLLGGRIVFHYHTSPEAIETLKEVLQEAIKQYSGVKEDKLKTSGYI

SEQ ID NO: 128563 - DNA, 1137 bp, Aspergillus nidulans FGSC A4; identical to SEQ ID NO: 7814
  CDS (1)..(1137)

SEQ ID NO: 128564 - protein, 378 aa, Aspergillus nidulans FGSC A4; identical to SEQ ID NO: 7815

SEQ ID NO: 128565 - DNA, 1110 bp, Candida albicans SC5314
  CDS (1)..(1110): transl_table=12
atggatttctctacttttgataaacaaagtccggctcataatgattttcgtagtgatacattcactactcccacaacatcaatgattcaatcattagctcaaaccacattaggcgatgctgtatataatgaagatttaaaaaccattgaattagaacaaaaagtagctgaattaactggtaaagaagcaggattatattgtgttagtggaacattatctaatcaaattgccattagaactaatctttatcaaccaccttttagtgttttatgtgattatcgagcacacgtttatgttcatgaagccggtggattatcgacattatctcaagctatggcacaaccaattaatcctaaaaatgggattcatttaactttagaagacgatattctaccaaattttataattgatgatggggaaattcatggtgctcctaccaaattaatatgtttagaaaatacattacatggaatgatattcccaattgaagaaattaaaaaaatttcgaaattttgtcaacaaaataatgttaaattacatttagatggtgcaagaatttggaatgcaagtgctgaaactggaatttcattaaaagaatattgttcatatttcgatagtgtatcactttgtttatcgaaaactttaggtgctcctataggtacagttttagtaagtgataaaaaatttattcttaaagctaatcatttcaaaaaacaaaatgggggtggcattagacaaagtggattattggcaagtatggcaattatcgccattgatgaaaatttctcaaaattgaaacaaactcatatttgggctaaagaattgggtaaattatgtgatgaaaatggaattattttggaacatccagtacaaacaaattttgtatttattgatattgctgctaataaaattaatccagaaaaattgataaaaatttctgataaatataatgttaaaatttattctggtagaatagctttccattatcaaatatctcaagaatcatttgaaaatgctaaaaaagttgttttagaagtaattcaatatgctaaagatcatccttatgaagagaaaactaattttaagttctatactagtgaaaataaatag

SEQ ID NO: 128566 - protein, 369 aa, Candida albicans SC5314
MDFSTFDKQSPAHNDFRSDTFTTPTTSMIQSLAQTTLGDAVYNEDLKTIELEQKVAELTGKEAGLYCVSGTLSNQIAIRTNLYQPPFSVLCDYRAHVYVHEAGGLSTLSQAMAQPINPKNGIHLTLEDDILPNFIIDDGEIHGAPTKLICLENTLHGMIFPIEEIKKISKFCQQNNVKLHLDGARIWNASAETGISLKEYCSYFDSVSLCLSKTLGAPIGTVLVSDKKFILKANHFKKQNGGGIRQSGLLASMAIIAIDENFSKLKQTHIWAKELGKLCDENGIILEHPVQTNFVFIDIAANKINPEKLIKISDKYNVKIYSGRIAFHYQISQESFENAKKVVLEVIQYAKDHPYEEKTNFKFYTSENK

SEQ ID NO: 128567 - DNA, 1122 bp, Candida albicans SC5314; identical to SEQ ID NO: 7816
  CDS (1)..(1122): transl_table=12

SEQ ID NO: 128568 - protein, 373 aa, Candida albicans SC5314; identical to SEQ ID NO: 7817

SEQ ID NO: 128569 - DNA, 2013 bp, Ustilago maydis 521
  CDS (1)..(2013)
atgttcgtttgcgtgtccattctcgcaacatctactcgctcagtcactcgctcagccgctcatcgcctgccgcgactcgtcacatctttgacaactcctttatctggctcgaacgtcgtgccgctgttccgcttcccattgcgcgacccacctcgagcttgcttttcgcttacacccacactagccagcgcttactccggtgaaggcgccgaggacgattccagcatcatgtccacctcctacccacttcagccctctgaaccagtcgatccggttcacggcccttcgaagacgcagaaacccatcaacgtcaacgctaacggcgatgcgaacggtgcctacatcacagatgctcattcccgtcagcaaaacaagacagctcctctcctaccagccgatccgctcaagggcaagatcgacaatgcaaaaaagcagcagctgctcgcgcgagatttccgctctgacaccatcacagcgcccaccgagtccatgatccgcgccatggcagaggcatctcgtggcgatgatgtatatggcgaggatgacaccaccaactcgttccaggccgagatcgccgcccttactggcaaagagtcggccatctttgttccttcgggcacgctttccaaccagcttgcgtttcgcacccatctccatcagccgccgcacactgtcctctgcgatactcgctcccatattcaccgctatgaagcaggtggcatcgctttccactgtggtgcttccaccgagattgtcgccccatccaacggtcaccatctacgatgggatcaagatatcaagccaaacctcaatctcagcgacgatattcacttttcgcccacacgcatcatctcgcttgaaaatactctcaacggaaccatttttcctcaagatgagattgtcaagatctcaacggaagcgcgcaagcttggcttgatcatgcacttggacggtgcgcgtgtctggaatgttgctgccgagacgggtctttcgctcaaggagctatgcgatcctttcgacacagtgtctttgtgcttgagcaaagggctgggtgctcctatcggaagtatcctcgtcggaccttctcagtttatcaaaaaggtgcgacacttccgtaagctctacggtgccggtgtacgacaggtcggaccgcttgttgcagccgcgcgtgtcggtgtgctagaaaactatccgaagcttcaagccacgcaccagctggcgcgctacgctggacaggagcttgaaaagcttggcgtgcgtctgacagctcctgtcgagacgagcatggttttcctcgacacttcgtctattggcattccgatttccgagcttgtttcgcgcgctgctgccttgccggctcccatccagctcggcggcggtcgaatggtggttcactaccagattgagaaacaggcgatcgacgacttgctcgacttgattcgcgtcatgaagaaggaaaaggctgacggaacgggacctgccaatgcagctgctgccgatagcggagcaggtctctactcgaacaacatgacgggcggaaacaccgcatctgccgccaccaccaagaccaacggctccctgtctcacgtccggtcgtcctcgagtagcgaaaatcgcggcctggtcttccagaccatcggcacatgttcacgcagaccttccgacgagatgcgacacagcgtctcgctcgtgctcccctttcccgaccgtcaatccgctctcaccctgcaacagtccatctcggtcgacaaggaactcaaacccaaagaggttcgaaaggaattcaccatcctcacgcgctcatcgtcttctgcaacggtcgagttgggcgtcaagatcttcgccaccaccgtgaggcagctgaggttgagcgtcaatgcgtttttggaggatgccagcttggtgtgtaggacaatggccgaattcgatccgttgcagaaaggcattgatgagctcagcaagatgcacttggaggacgagttggagcagggttccgtcggtgtggctggttaa

SEQ ID NO: 128570 - protein, 670 aa, Ustilago maydis 521
MFVCVSILATSTRSVTRSAAHRLPRLVTSLTTPLSGSNVVPLFRFPLRDPPRACFSLTPTLASAYSGEGAEDDSSIMSTSYPLQPSEPVDPVHGPSKTQKPINVNANGDANGAYITDAHSRQQNKTAPLLPADPLKGKIDNAKKQQLLARDFRSDTITAPTESMIRAMAEASRGDDVYGEDDTTNSFQAEIAALTGKESAIFVPSGTLSNQLAFRTHLHQPPHTVLCDTRSHIHRYEAGGIAFHCGASTEIVAPSNGHHLRWDQDIKPNLNLSDDIHFSPTRIISLENTLNGTIFPQDEIVKISTEARKLGLIMHLDGARVWNVAAETGLSLKELCDPFDTVSLCLSKGLGAPIGSILVGPSQFIKKVRHFRKLYGAGVRQVGPLVAAARVGVLENYPKLQATHQLARYAGQELEKLGVRLTAPVETSMVFLDTSSIGIPISELVSRAAALPAPIQLGGGRMVVHYQIEKQAIDDLLDLIRVMKKEKADGTGPANAAAADSGAGLYSNNMTGGNTASAATTKTNGSLSHVRSSSSSENRGLVFQTIGTCSRRPSDEMRHSVSLVLPFPDRQSALTLQQSISVDKELKPKEVRKEFTILTRSSSSATVELGVKIFATTVRQLRLSVNAFLEDASLVCRTMAEFDPLQKGIDELSKMHLEDELEQGSVGVAG

SEQ ID NO: 128571 - DNA, 1377 bp, Cryptococcus neoformans var. neoformans B-3501A
  CDS (1)..(1377)
atggtccgcggcgcttgctttaaatacgccagcttgccagtaaggatttccgcatctatcatctttccaacaagaacactagcgacgaccgcacctatcgccatgcccgtagcttcctccaagtcctcagcagacgtgacccccgacgttggtggacaagcaaacgtcgatcagttgcacagggtatctcgtgactttcgtagtgatactattaccattcctacagatgctcagctcctgtgctgtctgagagccacgagaggggacgatgtatacggtgaagatacttcgacaacagcgctcgaaaaacggatagcgaaactgaccggtaaggaggctgccatgtttgcagtcagtggtactatgacgaatcaactggccattagaacacacatgaagcaaccaccgcacagtgtcatcactgactggcgagcacatgtccacaagatggaagccggtggaattgccatgttttctcaggcgactacccatcagcttgtaccggaaaatggtttacacttgaccgtgcaggatatcgagccagctttgcagctgggcaccaatattcacattgctcctaccaagcttatttgccttgaaaatactttgtccggcatgattttcccgcaagaagagattgtaaagattggggaaatggcaagaaaacatgacattggtatgcatcttgatggcgcgaggatctggaacgtggctgccgatgtcatctcgaagagggggctaaatcccaacaaagaggaggatctgcagactgttcttacagaacttatcgctccctttgactcggcatcgctctgcctctccaagggcctaggtgcaccgatcggttctgcgttggtcggctctaaagaattcatcgatcgcgctaagtggttccgcaaggcttttgggggaggtatcaggcaagctggtgggatagctgcgtctgcggattacgcaataacccatcacttcccaagacttataaagacacatgaacttgcgtcgcgactggagcagggtttgagagagctaggctgtgatatcctggcgccagtggacaccagcatggtatttttccaatctaaatccattggactacccctggacgctgtcatggccaggctggctgctcttcctgatcccattgttattggtggtcaacgttgcgtcgtccaccatcagattagcccgcaagcgattgaagattttattggctgtatcgccgaaatgaagaaggaaaaagaagaaaagggggagtacaaggttactacgctagggcaggaggagaaagacaagttgtctagatttgtaagtccggagatcaaaaacgagacgagcgaagctagattgaggaaggaggctgctctggggtattaa

SEQ ID NO: 128572 - protein, 458 aa, Cryptococcus neoformans var. neoformans B-3501A
MVRGACFKYASLPVRISASIIFPTRTLATTAPIAMPVASSKSSADVTPDVGGQANVDQLHRVSRDFRSDTITIPTDAQLLCCLRATRGDDVYGEDTSTTALEKRIAKLTGKEAAMFAVSGTMTNQLAIRTHMKQPPHSVITDWRAHVHKMEAGGIAMFSQATTHQLVPENGLHLTVQDIEPALQLGTNIHIAPTKLICLENTLSGMIFPQEEIVKIGEMARKHDIGMHLDGARIWNVAADVISKRGLNPNKEEDLQTVLTELIAPFDSASLCLSKGLGAPIGSALVGSKEFIDRAKWFRKAFGGGIRQAGGIAASADYAITHHFPRLIKTHELASRLEQGLRELGCDILAPVDTSMVFFQSKSIGLPLDAVMARLAALPDPIVIGGQRCVVHHQISPQAIEDFIGCIAEMKKEKEEKGEYKVTTLGQEEKDKLSRFVSPEIKNETSEARLRKEAALGY

SEQ ID NO: 128573 - DNA, 1023 bp, Thermus thermophilus HB27; identical to SEQ ID NO: 7824
  CDS (1)..(1023): transl_table=11

SEQ ID NO: 128574 - protein, 340 aa, Thermus thermophilus HB27; identical to SEQ ID NO: 7825

SEQ ID NO: 128575 - DNA, 1005 bp, Pseudomonas syringae pv. syringae B728a
  CDS (1)..(1005): transl_table=11
gtgactgtcatcgatctgcgcagcgacacagtgactctgcccacggccggcatgctcgatgccatggcacgtgcgcccgttggcgatgatgtctacggcgaggaccctaccgtcaatctgctcgaagcgacgcttgccggacgcctcgggttcgatgccgcgctgttcgtgccgtcgggcaccatgagcaatctgctggcactgatggcgcactgtgagcgtggcgatgagtacatcgtcggtcagcaggcccacacctataagtacgagggtggtggtgcggcagtgctgggctccattcagccgcagccgctggaggtgcaggccgacggctctctggacctgcagcaggtgctcgacgccatcaaacccgatgactttcacttcgcccgcacgcgcctgctggccctggaaaacaccatgcagggcaaggtgctgcccttggactacctggctgccgcgcgtaccctgaccctggaaaaggggctcgccctgcatctggacggcgcgaggctgtacaacgccgcggtcaggctgggtgtcgatgtccatgagatcacccggcacttcgattcggtttcggtctgcctttccaaggggctgggcgcgccgatcggctcggtgctgtgcggttcgcagccgttgatcgccaaggcccgccgcttgcgcaagatgcttggcggtggcatgcgtcaggctggagggctggctgcggcagggctctatgcgctggatcatcaggtcgagcggttggcagatgatcatgccaacgcggcgtttctggctgaaggcctgagcgggctcggctaccctgtcgagccggtacagaccaatatggtctatgtgcagatcggcgaacgcgcggcatcgctcaaagcgttctgcgccgagcggggcatcgtactcacggccgcgtcgcggctacgcatggtgacccacctgaacgtgtcgcgcgctcaggtcgaacaggtcatcgccgcattcgcagcctttgaacattcatga

SEQ ID NO: 128576 - protein, 334 aa, Pseudomonas syringae pv. syringae B728a
MTVIDLRSDTVTLPTAGMLDAMARAPVGDDVYGEDPTVNLLEATLAGRLGFDAALFVPSGTMSNLLALMAHCERGDEYIVGQQAHTYKYEGGGAAVLGSIQPQPLEVQADGSLDLQQVLDAIKPDDFHFARTRLLALENTMQGKVLPLDYLAAARTLTLEKGLALHLDGARLYNAAVRLGVDVHEITRHFDSVSVCLSKGLGAPIGSVLCGSQPLIAKARRLRKMLGGGMRQAGGLAAAGLYALDHQVERLADDHANAAFLAEGLSGLGYPVEPVQTNMVYVQIGERAASLKAFCAERGIVLTAASRLRMVTHLNVSRAQVEQVIAAFAAFEHS

SEQ ID NO: 128577 - DNA, 1005 bp, Pseudomonas syringae pv. phaseolicola 1448A
  CDS (1)..(1005): transl_table=11
gtgactgtcatcgatctgcgcagcgacacagtgactctgcctacgcccggtatgcgggatgccatggcgcgtgcgcccgtcggcgatgacgtctatggtgaggaccccaccgtcaacctgctcgaagcgacgctcgccgagcgcctcgggtttgatgccgcgctgtttgtcccgtcaggcaccatgagcaatctgctggcactgatggcgcactgtgagcgtggcgatgaatacatcgttggccagcaggcccacacgtataagtacgaaggcggcggtgcagccgtgctgggttccatccagccacagccactggaggtgcaggccgatggctcccttgacctgcagcaggtgctcgacgccatcaaacccgatgactttcacttcgcccgcacacgcctgctggccctggaaaacaccatgcagggcaaggtgctaccgttggaatacctggccgccgcacgcacactgacgctggaaaaaggcctcgcccttcatctggacggcgcacggctgtataacgcatcggtcaggctgggcgtcgatgtccgcgagattacccggcacttcgattcggtatcggtgtgcctttccaagggcctgggcgcaccgatcggctcggtgctgtgcggatcgcagccgttgatcgccagagcgcgtcgcttgcgcaagatgctcggtggcggcatgcgtcaggccggagggctggctgccgcagggctctacgcgctggatcatcaggtcgagcggctggcggatgaccatgccaatgctgcgtttctggccgaaggcctgagcgggctcggctacgctgtcgagccggtgcagaccaacatggtctacgtgcagattggtgagcgcgctgcagcactcaaggcgttctgcgccgagcgtggcatcgtgctcacagccgcagcgcggctgcgcatggtgacccatctgaatgtgtcgcgtgcgcaggttgaacaggtcatcgctgcatttgcagcctttgaacactcatga

SEQ ID NO: 128578 - protein, 334 aa, Pseudomonas syringae pv. phaseolicola 1448A
MTVIDLRSDTVTLPTPGMRDAMARAPVGDDVYGEDPTVNLLEATLAERLGFDAALFVPSGTMSNLLALMAHCERGDEYIVGQQAHTYKYEGGGAAVLGSIQPQPLEVQADGSLDLQQVLDAIKPDDFHFARTRLLALENTMQGKVLPLEYLAAARTLTLEKGLALHLDGARLYNASVRLGVDVREITRHFDSVSVCLSKGLGAPIGSVLCGSQPLIARARRLRKMLGGGMRQAGGLAAAGLYALDHQVERLADDHANAAFLAEGLSGLGYAVEPVQTNMVYVQIGERAAALKAFCAERGIVLTAAARLRMVTHLNVSRAQVEQVIAAFAAFEHS

SEQ ID NO: 128579 - DNA, 1035 bp, Carboxydothermus hydrogenoformans Z-2901; identical to SEQ ID NO: 7832
  CDS (1)..(1035): transl_table=11

SEQ ID NO: 128580 - protein, 344 aa, Carboxydothermus hydrogenoformans Z-2901; identical to SEQ ID NO: 7833

SEQ ID NO: 128581 - DNA, 1020 bp, Geobacter metallireducens GS-15; identical to SEQ ID NO: 7836
  CDS (1)..(1020): transl_table=11

SEQ ID NO: 128582 - protein, 339 aa, Geobacter metallireducens GS-15; identical to SEQ ID NO: 7837

SEQ ID NO: 128583 - DNA, 1386 bp, Burkholderia thailandensis E264; identical to SEQ ID NO: 7838
  CDS (1)..(1386): transl_table=11

SEQ ID NO: 128584 - protein, 461 aa, Burkholderia thailandensis E264; identical to SEQ ID NO: 7839

SEQ ID NO: 128585 - DNA, 1080 bp, Acidobacteria bacterium Ellin345; identical to SEQ ID NO: 7840
  CDS (1)..(1080): transl_table=11

SEQ ID NO: 128586 - protein, 359 aa, Acidobacteria bacterium Ellin345; identical to SEQ ID NO: 7841

SEQ ID NO: 128587 - DNA, 1104 bp, Silicibacter sp. TM1040; identical to SEQ ID NO: 7842
  CDS (1)..(1104): transl_table=11

SEQ ID NO: 128588 - protein, 367 aa, Silicibacter sp. TM1040; identical to SEQ ID NO: 7843

SEQ ID NO: 128589 - DNA, 1014 bp, Shewanella sp. MR-7; identical to SEQ ID NO: 7850
  CDS (1)..(1014): transl_table=11

SEQ ID NO: 128590 - protein, 337 aa, Shewanella sp. MR-7; identical to SEQ ID NO: 7851

SEQ ID NO: 128591 - DNA, 1077 bp, Solibacter usitatus Ellin6076; identical to SEQ ID NO: 7854
  CDS (1)..(1077): transl_table=11

SEQ ID NO: 128592 - protein, 358 aa, Solibacter usitatus Ellin6076; identical to SEQ ID NO: 7855

SEQ ID NO: 128593 - DNA, 1014 bp, Shewanella sp. ANA-3
  CDS (1)..(1014): transl_table=11
atgatagatttacgcagtgataccgtgacccagccaacagaggcgatgcgcttagccatgtcgagggctgaagtgggtgatgatgtttatggtgatgatccgaccgtcaacagtttgcaagatatggccgcagagatgtttggttttgagagtgcgctgtttacggcatcgggcactcaggccaatttactcgcattgatggcacattgtgagcgcggggatgaatacctgtgcggccagcaggcgcataactataaatttgagggcggtggcgctgcggttctcggcagcattcagccacaaccgctgaccaatcagctggatggcactatcgccttgaccgatattgaagcggcgattaaacccgatgacattcactttgcgcgcacgcgcttactgagcctagaaaacactatcggcggtaaagtcttgccccagacttatcttgccaatgcgcaggcactggcatttcagcgtggcttaaaaattcatttagatggcgctagggtggccaatgccgccgtggcgcaggggatagggattgccgatattgcggggcattttgattcggtctccatctgtttatccaagggattatgcgcgcctgttggctcgctgctcctaggtgatgagcgcctaattaaaaaggccacgcgctggcgtaaaatgcttggcggcggcatgcgccaggcggggattttagcggcggcgggtaaattagcgctcatagagcaggttgagagacttggggaagaccatgaaaatgctgcgtatcttgcccagcaattgagtcagttgagtgagtttgaaatcgatttagccgccgttcaaaccaatatggtgtttgcaaacctcgcgaccaatgtcgatgagaaagcgctggcgaaacgttgccgtgaggcgggcattatcatcagccctggccgcacgctacgctttgtgacccataaagatgtgtcgcgtcaggatattgataaagtgctacaagtgtttaaattacatttgcaggcataa

SEQ ID NO: 128594 - protein, 337 aa, Shewanella sp. ANA-3
MIDLRSDTVTQPTEAMRLAMSRAEVGDDVYGDDPTVNSLQDMAAEMFGFESALFTASGTQANLLALMAHCERGDEYLCGQQAHNYKFEGGGAAVLGSIQPQPLTNQLDGTIALTDIEAAIKPDDIHFARTRLLSLENTIGGKVLPQTYLANAQALAFQRGLKIHLDGARVANAAVAQGIGIADIAGHFDSVSICLSKGLCAPVGSLLLGDERLIKKATRWRKMLGGGMRQAGILAAAGKLALIEQVERLGEDHENAAYLAQQLSQLSEFEIDLAAVQTNMVFANLATNVDEKALAKRCREAGIIISPGRTLRFVTHKDVSRQDIDKVLQVFKLHLQA

SEQ ID NO: 128595 - DNA, 996 bp, Nocardioides sp. JS614; identical to SEQ ID NO: 7858
  CDS (1)..(996): transl_table=11

SEQ ID NO: 128596 - protein, 331 aa, Nocardioides sp. JS614; identical to SEQ ID NO: 7859

SEQ ID NO: 128597 - DNA, 1014 bp, Pseudoalteromonas tunicata D2; identical to SEQ ID NO: 7862
  CDS (1)..(1014): transl_table=11

SEQ ID NO: 128598 - protein, 337 aa, Pseudoalteromonas tunicata D2; identical to SEQ ID NO: 7863

SEQ ID NO: 128599 - DNA, 1008 bp, Photobacterium sp. SKA34; identical to SEQ ID NO: 7864
  CDS (1)..(1008): transl_table=11

SEQ ID NO: 128600 - protein, 335 aa, Photobacterium sp. SKA34; identical to SEQ ID NO: 7865

SEQ ID NO: 128601 - DNA, 1023 bp, Flavobacteria bacterium BBFL7; identical to SEQ ID NO: 7866
  CDS (1)..(1023): transl_table=11

SEQ ID NO: 128602 - protein, 340 aa, Flavobacteria bacterium BBFL7; identical to SEQ ID NO: 7867

SEQ ID NO: 128603 - DNA, 1005 bp, Alteromonadales bacterium TW-7; identical to SEQ ID NO: 7870
  CDS (1)..(1005): transl_table=11

SEQ ID NO: 128604 - protein, 334 aa, Alteromonadales bacterium TW-7; identical to SEQ ID NO: 7871

SEQ ID NO: 128605 - DNA, 1239 bp, Ostreococcus tauri; identical to SEQ ID NO: 7874
  CDS (1)..(1239)

SEQ ID NO: 128606 - protein, 412 aa, Ostreococcus tauri; identical to SEQ ID NO: 7875

SEQ ID NO: 128607 - DNA, 1161 bp, Aedes aegypti; identical to SEQ ID NO: 7876
  CDS (1)..(1161)

SEQ ID NO: 128608 - protein, 386 aa, Aedes aegypti; identical to SEQ ID NO: 7877

SEQ ID NO: 128609 - DNA, 1053 bp, Aspergillus oryzae
  CDS (1)..(1053)
atgaccaaaccgaccatatcaatgctcgaagcgatcactcaaacaacgctccttgacgatgtcttctgtgaagacccggtgacaaacgacctccaggcctatgtagcccaacgcaccaaccacgaagatgcattgctcgtcatgtccggcacaatgggtaaccaggtcgcgattcgaactcacctcgtgcagccgccttattccgtgatatgcgatcgccgttcccatatcgtctgccacgaagcgggaggagtcagttcgttgaccggtgcgacggtccaacccatcgatgccaaaaatggcagctatctcaccctggaggatatccagaaatatgcagtgcttgacgacgacatccaccattgtcccacgaagctgatcagtctggaaaacaccttagacggcagggttttaccgctcgcggaggctcgtaggattacagaatgggcgcatgcgaacggaatcaaggtgcatttggacggggcaaggctctgggaagcggtagtgtccggggccggtagtttaccggagtatgccagtttgtttgacagcgtgagcttgtgtttctccaagggtctcggagcgcctattggtagtattattgttgggtccagggagtttattaagaaagctaggtggttccgcaaagctattggaggtggtgtccgacaagcaggggtactcgctgccgcagcccgggtggctctcgatgagacctttggcacagaccctcatggtcaggatggaaagctccgggaaacgcatactaaggcaaagaaagtcacggagatgtggcaaaacctaggcggcaagctgtcacagccaacagagactaacatggtgtggctggaccttgacgcggctgggctgggacccaatgacttgggagagataggaaaggaaaaggggctgaagctgttgggcaatcggattgttatccactaccaggtatcggaggaggccattgcgcgtctaggggaggtgtttgaattggctatgagtgggaactatcaacgtagcacagataaaagtttaccgtacggtagcaggtag

SEQ ID NO: 128610 - protein, 350 aa, Aspergillus oryzae
MTKPTISMLEAITQTTLLDDVFCEDPVTNDLQAYVAQRTNHEDALLVMSGTMGNQVAIRTHLVQPPYSVICDRRSHIVCHEAGGVSSLTGATVQPIDAKNGSYLTLEDIQKYAVLDDDIHHCPTKLISLENTLDGRVLPLAEARRITEWAHANGIKVHLDGARLWEAVVSGAGSLPEYASLFDSVSLCFSKGLGAPIGSIIVGSREFIKKARWFRKAIGGGVRQAGVLAAAARVALDETFGTDPHGQDGKLRETHTKAKKVTEMWQNLGGKLSQPTETNMVWLDLDAAGLGPNDLGEIGKEKGLKLLGNRIVIHYQVSEEAIARLGEVFELAMSGNYQRSTDKSLPYGSR

SEQ ID NO: 128611 - DNA, 1080 bp, Solanum tuberosum; identical to SEQ ID NO: 7878
  CDS (1)..(1080)

SEQ ID NO: 128612 - protein, 359 aa, Solanum tuberosum; identical to SEQ ID NO: 7879

SEQ ID NO: 128613 - DNA, 1077 bp, Arabidopsis thaliana; identical to SEQ ID NO: 7880
  CDS (1)..(1077)
  misc_feature (1031)..(1031): s is g or c

SEQ ID NO: 128614 - protein, 358 aa, Arabidopsis thaliana; identical to SEQ ID NO: 7881
  misc_feature (344)..(344): The Xaa at location 344 stands for Cys, or Ser.

SEQ ID NO: 128615 - DNA, 1059 bp, Arabidopsis thaliana; identical to SEQ ID NO: 7882
  CDS (1)..(1059)

SEQ ID NO: 128616 - protein, 352 aa, Arabidopsis thaliana; identical to SEQ ID NO: 7883

SEQ ID NO: 128617 - DNA, 1113 bp, Arabidopsis thaliana; identical to SEQ ID NO: 7884
  CDS (1)..(1113)

SEQ ID NO: 128618 - protein, 370 aa, Arabidopsis thaliana; identical to SEQ ID NO: 7885

SEQ ID NO: 128619 - DNA, 1149 bp, Ashbya gossypii
  CDS (1)..(1149)
atgaatcaggatatggaactaccagaggcgtacacgtcggtttcgaacgacttccgttcggacacgttcaccactccaacgcgcgaaatgatcgaggctgcgctaacggcgaccatcggtgacgccgtctaccaagaggacatcgacacgttgaagctagaacagcacgtcgccaagctggccggcatggaggccggtatgttctgcgtatctggtactttgtccaaccagattgctttgcggacccacctaactcagccaccatattcgattctttgcgactaccgtgcgcatgtgtacacgcacgaggctgcggggttggcaattttgtcccaggccatggtgacacctgtcattccttccaacggcaactacttgactttggaagacatcaagaagcactacattcctgatgatggcgacatccacggtgctccaacaaaggttatctcgttggaaaacaccttgcacggtatcattcacccactagaggagcttgttcggatcaaggcttggtgtatggagaacgacctcagactacactgcgatggtgcgagaatctggaacgcgtccgcagaatccggtgtgcctctaaaacagtacggagagctattcgactccatttccatctgcttgtccaagtccatgggtgccccaatgggctccattctcgtcgggtcgcacaagttcataaagaaggcgaaccacttcagaaagcagcaaggtggtggtgtcagacagtctggtatgatgtgcaagatggcgatggtggctatccagggtgactggaagggcaagatgaggcgttcgcacagaatggctcacgagctggccagattttgcgcagagcacggcatcccattggagtcgcctgctgacaccaactttgtctttttggacttgcagaagagcaagatgaaccctgacgtgctcgtcaagaagagtttgaagtacggctgcaagctaatgggcgggcgtgtctccttccactaccagatatctgaggagtcccttgagaagatcaagcaggccatcctagaggcgttcgagtactcgaagaagaacccttacgatgaaaacggccccacgaagatctacagaagtgagtccgctgacgctgtgggtgagatcaagacctacaagtattaa

SEQ ID NO: 128620 - protein, 382 aa, Ashbya gossypii
MNQDMELPEAYTSVSNDFRSDTFTTPTREMIEAALTATIGDAVYQEDIDTLKLEQHVAKLAGMEAGMFCVSGTLSNQIALRTHLTQPPYSILCDYRAHVYTHEAAGLAILSQAMVTPVIPSNGNYLTLEDIKKHYIPDDGDIHGAPTKVISLENTLHGIIHPLEELVRIKAWCMENDLRLHCDGARIWNASAESGVPLKQYGELFDSISICLSKSMGAPMGSILVGSHKFIKKANHFRKQQGGGVRQSGMMCKMAMVAIQGDWKGKMRRSHRMAHELARFCAEHGIPLESPADTNFVFLDLQKSKMNPDVLVKKSLKYGCKLMGGRVSFHYQISEESLEKIKQAILEAFEYSKKNPYDENGPTKIYRSESADAVGEIKTYKY

SEQ ID NO: 128621 - DNA, 1530 bp, Candida albicans
  CDS (117)..(1241): transl_table=12
aagcttttggtttgctattttggtttaatagattaataaccttttttcctttttcctttccttttcccttttttttgcatctatacgacacatattactcagcacaccacattaatatgacagcagacgaagaagaaacttttaccacctttaatgagttcagaagcgatacattcactgttccaactagggccatggttgaagatggatttatgaatgccacatttggtgattccgtataccaagaagacgaaaccacattacgtttggaaagtaaaatgtgtgagataactgggaaaccagcagctttattttgtgttagtggaaccatgtcaaatcaaattggattaagagctaatcttgttcaacctccatatagtatattatgtgactaccgtgctcatgtgtttttacatgaagctggtggattggctacattgagtcaagctatggtacatccagttcgaccatcaaatggaaattacttgacctttgaagatgttttgggcaatgtaacttatgatgatgatggagatattcatgctgctccaaccaaagtaatctcattggaaaataccttacacggaatcataattccaatagaagaaatacgtaaaatcagtgaattttgtcgtgaaaatgatatcaggttgcatttagacggggccagattatggaatgctagtgtggcaaccggaattagtattaaagaatactgttcatattttgacagtgtttcattgtgtttatccaagtcattgggagcaccaattggttcagtattggttggagatgaaaaattcattcgtaaagctaaccatttcaaaaaacaaagtggtggaggaataaggcaggccggtataatgtctgctatggccatacatgctattgattataatctttcaaaacttgaattatcacacaattatgctaaacaaattggcgacttttgccaagaacacggaatcaaattggaatcaccagtggataccagtcttgtgtttctcgatttgaaggccaataaaatggatccgaatagattagttgaattgggaagaacaaagtataacgtcaagcttatgggacaaagaatagcatgtcatttccaattgagtcaagaaagtgttgataatgtgaagaaatgtattttagagtgtttggaatatcatcaaaaacatcctcataaagatgatggtaggaataataagaagatgtatagtttggacgccattaaaaaataaatgaattgtaatgagtctattcttgtcgtagtattgtaaaactgtctcttgttgtttggttgcaattgcacgtggcaaatttaagttgtatgcttttttctttggggcaattgtcgtttttttttttgggtgacgcttcttggtgtaatttggtgtgtgtatctattgttgtttgttttttgggcaaatatatatttatcacttattattcatccatccatcgattaattagcaatcgtttattttactttatttcgagtttactttttcctttttttacttttctttt

SEQ ID NO: 128622 - protein, 374 aa, Candida albicans; identical to SEQ ID NO: 7887

SEQ ID NO: 128623 - DNA, 1131 bp, Schizosaccharomyces pombe; identical to SEQ ID NO: 7888
  CDS (1)..(1131)

SEQ ID NO: 128624 - protein, 376 aa, Schizosaccharomyces pombe; identical to SEQ ID NO: 7889

SEQ ID NO: 128625 - DNA, 1017 bp, Aeromonas jandaei; identical to SEQ ID NO: 7892
  CDS (1)..(1017): transl_table=11

SEQ ID NO: 128626 - protein, 338 aa, Aeromonas jandaei; identical to SEQ ID NO: 7893

SEQ ID NO: 128627 - DNA, 1170 bp, Cochliobolus carbonum
  CDS (1)..(1170)
atgtcgaacatggttttgaatggaaacattgacaaatccgataggaattccatactagacatacttcaatcgcttgagaatattgcatggggacaaccaggctctgcaaggtgcgattttaggagtgatgttattacacgccctagccttaggatgttgtccgcggtcctcaagactacactcggcgatgacgtatttcgagaagacctaacgactgcccacttcgaagcgcatgtggctgaaatcagcggccgagaagaaggcatgttcgtgatcacagggacgatggccaatcagctttgtttgcatgctctagtctcaactagaccgtgtgggattttacttagctcagagtcccatgccatacactatgaggcaggtggctcttcgatgcttagcggcgccatgcttcagcctgtgcagccgtcgaatggtaaatatctgagagtggaagatttggaggagcacgcaattctaaccgacgatgtccacaaatgccccacaagcattgtttctatggaaaatacagctggtggagcagtcgttcctgtccatgagctccgccgcatccgggattgggcaaagcaaaataacgtgaggactcacctggacggtgctagacttttcgaggctgttgctaccggtgctgggactctcaaagaatattgcagccttattgacctagtctccgtggattttagtaagaatcttggagccccaatgggcgcaatgattcttggtgacaaaaaattgattcagcagatgcgaagaactcgaaaagggattggaggaggaatgagacaaggaggggtaatcactgcagctgcacgggaggcactgtttgaaaactttggactgggagcggaaatcgaaagtcaaaccctattgcaagtgcacaaagtcgcaaagcgtctaggggaagaatggactagaaaaggtgggaagttgagcaaagagatcgagacaaatatcatatggctcgatcttgatgcggttggaattaagaaaagtcaatttattgataagggaagggaatatggggtgattctagacggctgtcgcattgtttgccatcaccagattgatatatatgcagtagaggctcttatcgacgtcttccatgatatactaaaagcagatcctatcaaaaacaagaatagcgatagatag

SEQ ID NO: 128628 - protein, 389 aa, Cochliobolus carbonum
MSNMVLNGNIDKSDRNSILDILQSLENIAWGQPGSARCDFRSDVITRPSLRMLSAVLKTTLGDDVFREDLTTAHFEAHVAEISGREEGMFVITGTMANQLCLHALVSTRPCGILLSSESHAIHYEAGGSSMLSGAMLQPVQPSNGKYLRVEDLEEHAILTDDVHKCPTSIVSMENTAGGAVVPVHELRRIRDWAKQNNVRTHLDGARLFEAVATGAGTLKEYCSLIDLVSVDFSKNLGAPMGAMILGDKKLIQQMRRTRKGIGGGMRQGGVITAAAREALFENFGLGAEIESQTLLQVHKVAKRLGEEWTRKGGKLSKEIETNIIWLDLDAVGIKKSQFIDKGREYGVILDGCRIVCHHQIDIYAVEALIDVFHDILKADPIKNKNSDR

SEQ ID NO: 128629 - DNA, 972 bp, Oryza sativa; identical to SEQ ID NO: 7894
  CDS (1)..(972)

SEQ ID NO: 128630 - protein, 323 aa, Oryza sativa; identical to SEQ ID NO: 7895

SEQ ID NO: 128631 - DNA, 1077 bp, Brassica napus; identical to SEQ ID NO: 7896
  CDS (1)..(1077)

SEQ ID NO: 128632 - protein, 358 aa, Brassica napus; identical to SEQ ID NO: 7897

SEQ ID NO: 128633 - DNA, 1083 bp, Glycine max
  CDS (1)..(1083)
atggtaactagaattgtggatcttcgttcagacacagttacaaagccaactgaagcaatgagagctgctatggcaagtgctgaagttgatgacgatgttctaggctatgatccaactgcttttcgcttagaaacagagatggcaaagacaatgggcaaagaagctgctctttttgttccatctggcactatggggaaccttgtatctgtacttgttcattgtgatgtcaggggaagtgaggttattcttggagacaattgccatatcaacatttttgagaatggaggcattgcaaccattgggggagtgcatccaagacaagtgaaaaataacgatgatggaaccatagacattgatttgattgaggctgctataagggacccaatgggggagctattctatccaaccaccaagcttatttgcttggaaaacactcatgcaaactctggtggcagatgcctctcagttgaatatacagacagagttggagagttagctaagaagcatggactgaagcttcacattgatggggcccgtatttttaacgcatcagttgcacttggtgttccagtggataggcttgtccaggcggctgattcagtttccgtttgcctatctaaaggtataggtgctccagttggatctgttattgttggttccaagaattttattgccaaggctagacgactccggaaaaccttaggaggtggaatgagacagattggcctcctttgtgccgctgcacttgttgccttgcaggaaaatgttgggaagctggaaagtgatcacaagaaagctagacttttggctgatggattaaaagaagttaaaggactgagagtggatgctggttctgtggagaccaatatggtatttattgacattgaagagggtacaaagactagggcagaaaagatatgcaagtacatggaagaacgtggtatccttgtgatgcaagagagttcatcaagaatgagagttgttctccaccaccaaatatcagcaagtgatgtgcaatatgcattgtcgtgctttcagcaagctctagctgtcaagggagtacaaaatgaaatgggcaactag

SEQ ID NO: 128634 - protein, 360 aa, Glycine max; identical to SEQ ID NO: 7741

SEQ ID NO: 128635 - DNA, 1077 bp, Brassica napus; identical to SEQ ID NO: 7898
  CDS (1)..(1077)

SEQ ID NO: 128636 - protein, 358 aa, Brassica napus; identical to SEQ ID NO: 7899

SEQ ID NO: 128637 - DNA, 1077 bp, Brassica napus; identical to SEQ ID NO: 7900
  CDS (1)..(1077)

SEQ ID NO: 128638 - protein, 358 aa, Brassica napus; identical to SEQ ID NO: 7901

SEQ ID NO: 128639 - DNA, 1134 bp, Zea mays; identical to SEQ ID NO: 7902
  CDS (1)..(1134)

SEQ ID NO: 128640 - protein, 377 aa, Zea mays; identical to SEQ ID NO: 7903

SEQ ID NO: 128641 - DNA, 1077 bp, Glycine max; identical to SEQ ID NO: 7904
  CDS (1)..(1077)

SEQ ID NO: 128642 - protein, 358 aa, Glycine max; identical to SEQ ID NO: 7905

SEQ ID NO: 128643 - DNA, 1119 bp, Zea mays; identical to SEQ ID NO: 7906
  CDS (1)..(1119)

SEQ ID NO: 128644 - protein, 372 aa, Zea mays; identical to SEQ ID NO: 7907

SEQ ID NO: 128645 - DNA, 1134 bp, Zea mays
  CDS (1)..(1134)
atggcgaccaaggtggtggtggacctgcggtccgacacggtcaccaagccttccgaggccatgcgcgcgtccatggccgcggccgacgtcgacgacgacgtccggggcgcggacccgaccgcgcgccgcttccaggaggagatggcggcgctcatgggcaaggaggccgcgctcttcgtcccgtcggggaccatgggcaacctcgtgtccgtcctcgcgcactgcgacgtccgcggcagcgaggtcatcctcggcgacgactcgcacatccacctctacgagaacggcggcatctccaccctcggcggcgtgcaccctaagaccgtcagaaacaactccgacggcaccatggacatcgacagcatcgtcgctgcaatcaggcctcccggcggtggcctgtattacccgaccaccaggctcatctgcttggagaacacacatgggaattccggagggaagtgtttatccgcagaatacactgaaaaggttggcgaaattgccaagagtcatggcctgaagcttcatatcgatggagctcgcattttcaacgcctctgtggcacttggagttcctgtggacagacttgtgagagctgcagattcagtttcggtatgcatttctaaaggtttaggcgcccccgttggatcagttattgttggctcgaaggccttcatcgacaaggccaaaattctccggaagaccctaggtggtggaatgaggcaggttggagttctctgtgctgctgctcatgttgccgttcgtgacaatgtgggaaagcttgcagatgaccacagaaaggctaaagctttggcagacggactgaataaaatcgaacagttcagagtggattcagcatcagtccagaccaatatggtattcttggacatcgtggattcacgcatatcatctaacaagctgtgccaggttctgggaacgcacaatgtgctcgcaagtccaaggagtccaaaaagtgtcaggcttgtccttcattaccaaatttcagatgatgatgttcaatatgcactgacgtgttttaagaaagctgctgaacagctactaatgggcagtactgaactcgagcatttggctgaacagctactgatgggcactaccaagaactcgtacgggcaatag

SEQ ID NO: 128646 - protein, 377 aa, Zea mays; identical to SEQ ID NO: 7737

SEQ ID NO: 128647 - DNA, 25 bp, Artificial sequence
  primer
atgactgaattcgaattgcctccaa

SEQ ID NO: 128648 - DNA, 26 bp, Artificial sequence
  primer
tcagtatttgtaggtttttatttcgc

SEQ ID NO: 128649 - protein, 376 aa, Artificial sequence
  consensus sequence
  Variant (2)..(2): Xaa in position 2 is any amino acid
  Variant (7)..(7): Xaa in position 7 is any amino acid
  Variant (9)..(9): Xaa in position 9 is any amino acid
  Variant (11)..(13): Xaa in position 11 to 13 is any amino acid
  Variant (15)..(16): Xaa in position 15 to 16 is any amino acid
  Variant (18)..(20): Xaa in position 18 to 20 is any amino acid
  Variant (21)..(22): Xaa in position 21 to 22 is any or no amino acid
  Variant (24)..(26): Xaa in position 24 to 26 is any amino acid
  Variant (30)..(32): Xaa in position 30 to 32 is any amino acid
  Variant (33)..(34): Xaa in position 33 to 34 is any or no amino acid
  Variant (36)..(40): Xaa in position 36 to 40 is any amino acid
  Variant (43)..(45): Xaa in position 43 to 45 is any amino acid
  Variant (47)..(49): Xaa in position 47 to 49 is any amino acid
  Variant (51)..(51): Xaa in position 51 is any amino acid
  Variant (57)..(58): Xaa in position 57 to 58 is any amino acid
  Variant (62)..(63): Xaa in position 62 to 63 is any amino acid
  Variant (65)..(70): Xaa in position 65 to 70 is any amino acid
  Variant (72)..(84): Xaa in position 72 to 84 is any amino acid
  Variant (85)..(85): Xaa in position 85 is any or no amino acid
  Variant (87)..(90): Xaa in position 87 to 90 is any amino acid
  Variant (92)..(92): Xaa in position 92 is any amino acid
  Variant (95)..(130): Xaa in position 95 to 130 is any amino acid
  Variant (131)..(135): Xaa in position 131 to 135 is any or no amino acid
  Variant (137)..(137): Xaa in position 137 is any amino acid
  Variant (139)..(140): Xaa in position 139 to 140 is any amino acid
  Variant (145)..(146): Xaa in position 145 to 146 is any amino acid
  Variant (147)..(149): Xaa in position 147 to 149 is any or no amino acid
  Variant (151)..(172): Xaa in position 151 to 172 is any amino acid
  Variant (173)..(179): Xaa in position 173 to 179 is any or no amino acid
  Variant (181)..(181): Xaa in position 181 is any amino acid
  Variant (186)..(187): Xaa in position 186 to 187 is any amino acid
  Variant (190)..(204): Xaa in position 190 to 204 is any amino acid
  Variant (205)..(218): Xaa in position 205 to 218 is any or no amino acid
  Variant (221)..(223): Xaa in position 221 to 223 is any amino acid
  Variant (233)..(233): Xaa in position 233 is any amino acid
  Variant (236)..(238): Xaa in position 236 to 238 is any amino acid
  Variant (240)..(243): Xaa in position 240 to 243 is any amino acid
  Variant (245)..(246): Xaa in position 245 to 246 is any amino acid
  Variant (248)..(250): Xaa in position 248 to 250 is any amino acid
  Variant (253)..(254): Xaa in position 253 to 254 is any amino acid
  Variant (258)..(258): Xaa in position 258 is any amino acid
  Variant (261)..(261): Xaa in position 261 is any amino acid
  Variant (263)..(263): Xaa in position 263 is any amino acid
  Variant (265)..(265): Xaa in position 265 is any amino acid
  Variant (268)..(270): Xaa in position 268 to 270 is any amino acid
  Variant (272)..(278): Xaa in position 272 to 278 is any amino acid
  Variant (279)..(286): Xaa in position 279 to 286 is any or no amino acid
  Variant (288)..(290): Xaa in position 288 to 290 is any amino acid
  Variant (292)..(293): Xaa in position 292 to 293 is any amino acid
  Variant (295)..(297): Xaa in position 295 to 297 is any amino acid
  Variant (299)..(301): Xaa in position 299 to 301 is any amino acid
  Variant (302)..(317): Xaa in position 302 to 317 is any or no amino acid
  Variant (320)..(345): Xaa in position 320 to 345 is any amino acid
  Variant (346)..(371): Xaa in position 346 to 371 is any or no amino acid
  Variant (373)..(373): Xaa in position 373 is any amino acid
  Variant (375)..(375): Xaa in position 375 is any amino acid
DXRSDTXTXPXXXMXXAXXXXXAXXXDDVXXXXXDXXXXXLEXXXAXXXGXEAALFXXSGTXXNXXXXXXHXXXXXXXXXXXXXXHXXXXEXGGXXXXXXXXXXXXXXXXXXXXXXXXXXXXXXXXXXXXXXXXXTXLXXLENTXXXXXGXXXXXXXXXXXXXXXXXXXXXXXXXXXXXHXDGARXXNAXXXXXXXXXXXXXXXXXXXXXXXXXXXXXDSXXXCLSKGLGAPXGSXXXGXXXXIXXAXXXRKXXGGGXRQXGXLXAAXXXAXXXXXXXXXXXXXXXLXXXHXXAXXXAXXXXXXXXXXXXXXXXXXXTNXXXXXXXXXXXXXXXXXXXXXXXXXXXXXXXXXXXXXXXXXXXXXXXXXXXXRXVXH

SEQ ID NO: 128650 - protein, 56 aa, Artificial sequence
  protein pattern
  Variant (2)..(3): Xaa in position 2 to 3 is any or no amino acid
  Variant (5)..(5): Xaa in position 5 is any amino acid
  Variant (6)..(7): Xaa in position 6 to 7 is any or no amino acid
  Variant (9)..(9): Xaa in position 9 is Phe, Ile or Leu
  Variant (12)..(12): Xaa in position 12 is Ala, Gly, Ser or Thr
  Variant (13)..(13): Xaa in position 13 is Ile, Leu or Met
  Variant (14)..(14): Xaa in position 14 is Ala, Cys, Gly or Ser
  Variant (17)..(17): Xaa in position 17 is Ile, Met or Val
  Variant (19)..(19): Xaa in position 19 is Ser or Thr
  Variant (20)..(20): Xaa in position 20 is Ala, Ile, Leu or Val
  Variant (21)..(21): Xaa in position 21 is Ile, Leu, Met or Val
  Variant (22)..(22): Xaa in position 22 is any amino acid
  Variant (23)..(23): Xaa in position 23 is Ala, Gly or Ser
  Variant (24)..(27): Xaa in position 24 to 27 is any amino acid
  Variant (28)..(28): Xaa in position 28 is Ile, Met or Val
  Variant (29)..(30): Xaa in position 29 to 30 is any amino acid
  Variant (31)..(31): Xaa in position 31 is Ala or Cys
  Variant (32)..(34): Xaa in position 32 to 34 is any amino acid
  Variant (35)..(35): Xaa in position 35 is Lys or Arg
  Variant (37)..(38): Xaa in position 37 to 38 is any amino acid
  Variant (39)..(39): Xaa in position 39 is Gly or Ser
  Variant (41)..(41): Xaa in position 41 is Gly or Ser
  Variant (42)..(42): Xaa in position 42 is any amino acid
  Variant (45)..(45): Xaa in position 45 is any amino acid
  Variant (47)..(47): Xaa in position 47 is any amino acid
  Variant (48)..(48): Xaa in position 48 is Ile, Leu or Met
  Variant (49)..(49): Xaa in position 49 is Ala, Cys, Ser or Thr
  Variant (50)..(51): Xaa in position 50 to 51 is any amino acid
  Variant (52)..(52): Xaa in position 52 is Ala, Cys or Gly
  Variant (53)..(54): Xaa in position 53 to 54 is any amino acid
  Variant (55)..(55): Xaa in position 55 is Ala, Asn or Ser
  Variant (56)..(56): Xaa in position 56 is Ile, Leu, Met or Val
DXXSXXXCXSKXXXAPXGXXXXXXXXXXXXXXXXXKXXXGXXRQXGXXXXXXXXXX

SEQ ID NO: 128651 - protein, 30 aa, Artificial sequence
  protein pattern
  Variant (2)..(6): Xaa in position 2 to 6 is any amino acid
  Variant (7)..(7): Xaa in position 7 is Phe or Leu
  Variant (8)..(8): Xaa in position 8 is Glu or Gln
  Variant (9)..(11): Xaa in position 9 to 11 is any amino acid
  Variant (13)..(15): Xaa in position 13 to 15 is any amino acid
  Variant (17)..(17): Xaa in position 17 is any amino acid
  Variant (19)..(19): Xaa in position 19 is any amino acid
  Variant (20)..(20): Xaa in position 20 is Ala or Gly
  Variant (21)..(21): Xaa in position 21 is Ile, Leu, Met or Val
  Variant (22)..(24): Xaa in position 22 to 24 is any amino acid
  Variant (25)..(25): Xaa in position 25 is Ser or Thr
  Variant (27)..(27): Xaa in position 27 is Ser or Thr
  Variant (28)..(28): Xaa in position 28 is any amino acid
  Variant (29)..(29): Xaa in position 29 is Ala, Gly, Ser or Thr
DXXXXXXXXXXAXXXGXEXXXXXXXGXXXN

SEQ ID NO: 128652 - protein, 21 aa, Artificial sequence
  protein pattern
  Variant (2)..(2): Xaa in position 2 is Phe or Leu
  Variant (7)..(7): Xaa in position 7 is Phe, Ile, Leu, Met or Val
  Variant (9)..(9): Xaa in position 9 is any amino acid
  Variant (11)..(11): Xaa in position 11 is Cys, Asp, Gly, Ser or Thr
  Variant (12)..(13): Xaa in position 12 to 13 is any amino acid
  Variant (15)..(16): Xaa in position 15 to 16 is any amino acid
  Variant (17)..(20): Xaa in position 17 to 20 is any or no amino acid
DXRSDTXTXPXXXMXXXXXXA

SEQ ID NO: 128653 - protein, 15 aa, Artificial sequence
  protein pattern
  Variant (2)..(2): Xaa in position 2 is any amino acid
  Variant (7)..(7): Xaa in position 7 is Ile, Leu or Val
  Variant (8)..(8): Xaa in position 8 is any amino acid
  Variant (11)..(14): Xaa in position 11 to 14 is any amino acid
  Variant (15)..(15): Xaa in position 15 is Asp, Gly or Asn
HXDGARXXNAXXXXX

SEQ ID NO: 128654 - protein, 9 aa, Artificial sequence
  protein pattern
  Variant (2)..(2): Xaa in position 2 is any amino acid
  Variant (3)..(4): Xaa in position 3 to 4 is Ile, Leu or Val
  Variant (5)..(5): Xaa in position 5 is Ala, Cys or Ser
TXXXXLENT

SEQ ID NO: 128655 - DNA, 1128 bp, Saccharomyces cerevisiae
  CDS (1)..(1128)
atgatgtctactatctaccgtcatttatctaccgctagaccggctttaactaaatacgcaaccaatgccgcagttaaatcgacaactgcatcctcagaagctagtactctgggtgctctacaatatgcattgtctttagatgaaccaagtcattcgtggacaaaatcgcaattaaaagaaatttatcataccccactgctcgaacttactcatgcagcacaattgcagcacagaaagtggcacgatccaaccaaagtgcaattgtgcacattgatgaacatcaaatctggtggttgttctgaggactgtaagtattgtgcgcagtcttcgagaaacgataccggtctaaaggctgagaaaatggttaaagtggatgaagtgattaaagaggcagaagaggccaaaagaaacggatctactagattctgcctaggtgctgcatggagagacatgaaaggtcgtaaatcagccatgaaaagaattcaggaaatggtgaccaaagtgaatgatatggggctagaaacgtgtgttactttaggtatggttgatcaagatcaagcaaagcaattgaaagatgcaggtttgactgcatacaaccataacatcgacacttccagagaacactatagtaaggtcatcaccacgagaacctacgacgacaggttacagaccatcaagaatgtccaagaatctggaataaaagcctgtaccggtggtattttgggtctcggtgaaagcgaagacgaccatataggattcatctacacattatccaatatgtctcctcatcctgagtccctaccaattaatagactagttgctatcaaagggactccaatggctgaggaacttgccgatccaaagagtaaaaagttgcaattcgacgaaattttgagaaccattgccacagcgagaatagttatgccaaaggccattataagacttgccgctggtcgttatacaatgaaagaaacagagcaatttgtctgtttcatggcaggttgtaacagtatcttcaccggtaagaaaatgctgacgacaatgtgtaacggttgggacgaagacaaggcaatgttggctaaatggggattgcaacctatggaggcatttaagtacgacagatcttga

SEQ ID NO: 128656 - protein, 375 aa, Saccharomyces cerevisiae
MMSTIYRHLSTARPALTKYATNAAVKSTTASSEASTLGALQYALSLDEPSHSWTKSQLKEIYHTPLLELTHAAQLQHRKWHDPTKVQLCTLMNIKSGGCSEDCKYCAQSSRNDTGLKAEKMVKVDEVIKEAEEAKRNGSTRFCLGAAWRDMKGRKSAMKRIQEMVTKVNDMGLETCVTLGMVDQDQAKQLKDAGLTAYNHNIDTSREHYSKVITTRTYDDRLQTIKNVQESGIKACTGGILGLGESEDDHIGFIYTLSNMSPHPESLPINRLVAIKGTPMAEELADPKSKKLQFDEILRTIATARIVMPKAIIRLAAGRYTMKETEQFVCFMAGCNSIFTGKKMLTTMCNGWDEDKAMLAKWGLQPMEAFKYDRS

SEQ ID NO: 128657 - DNA, 1345 bp, Zea mays
  CDS (40)..(1254)
ctcgaggccggccgggaacagccttctttctttttcacaatggctcagagaatgcttcttcgtgcaagtggcccacgccgagtctactatggcttcacccgctcttttagtactgttctcgacacgcctgtagatccgggcacgcagcaaatacgcctggcgacaccgcggacgacggtgtttgagaatgcactcaatgcaaaggcaccgcggacaaattggacaaaggaggagatttcagagatatacaacacttcgctgattgaccttacctatgcttcggccttggtccaccgccgattccatgaccccgctgccattcagatgtgtaccctcttcaacatcaagacgggcggctgcagtgaagactgttcctactgcgcccagtcatctcgctacgacaccggtctcaaagccacaaagctcagctctgtcgaatccgtcctcgaagctgcacgcatagctaaagaaaacggcagctcgagattctgcatgggcgccgcgtggagagacatgaggggtcgtaagacgaacctcaagaacatcaaagaaatgatcaagggcgtgcgcggcatgggcatggaggcatgcgtgacccttggcatggtcgatgctgctcaagcaaaggaactgaaagatgcgggcttgacggcttacaatcacaatgtcgatacgagccgcgagcactaccctagcgtcatcaccacacgtacgtacgacgagcgactcaacaccatcaagaatgtccaggaagcaggtattcacgtgtgcaccggcggtattcttggtctgggggaaaaagcccgtgaccacgtcggtctcatccacactgtagctacactacccgcccatccagagtccttccccgtcaacgcccttgtccccatcaaaggcaccccactaggagaaacccaagccatctcctttgatgccatcctcagaaccattgctactgcacgactcgtgcttcccaccaccatcatccgtctcgcagccggccgccacaccatgcgtgaggaaaaacagattctgtgcttccaggctggtgcaaacgccgtgttcactggcgagaagatgctcacaacggcgtgtaatgggtgggaagaagacaaggctatgtttcagaggtgggggcttaggccaatgaagatggaggagacgattggggagaagagaaaggtgccggggcaggaggaggccgaggcggttgttgcggcggcggaggcggaggcgacggtgcaggcacttgcttgagggggggagaggtagatgtagtgcttaggctctgtgatgatgagctcttcaatgtgctactgaagccgaatctatgtcttgtaacttgtag

SEQ ID NO: 128658 - protein, 404 aa, Zea mays
MAQRMLLRASGPRRVYYGFTRSFSTVLDTPVDPGTQQIRLATPRTTVFENALNAKAPRTNWTKEEISEIYNTSLIDLTYASALVHRRFHDPAAIQMCTLFNIKTGGCSEDCSYCAQSSRYDTGLKATKLSSVESVLEAARIAKENGSSRFCMGAAWRDMRGRKTNLKNIKEMIKGVRGMGMEACVTLGMVDAAQAKELKDAGLTAYNHNVDTSREHYPSVITTRTYDERLNTIKNVQEAGIHVCTGGILGLGEKARDHVGLIHTVATLPAHPESFPVNALVPIKGTPLGETQAISFDAILRTIATARLVLPTTIIRLAAGRHTMREEKQILCFQAGANAVFTGEKMLTTACNGWEEDKAMFQRWGLRPMKMEETIGEKRKVPGQEEAEAVVAAAEAEATVQALA

SEQ ID NO: 128659 - DNA, 1340 bp, Arabidopsis thaliana
  CDS (83)..(1216)
aaagctctagcacaaaccaaacaccaaatctcatttcttcttcttcttctttttccacattttctgattagcagatcaaatgatgcttgttcgatctgtatttcgatctcagttgcgaccctctgtctcgggtggtctgcaatctgcttcttgctattcttcattatctgctgcttcagctgaagctgagaggactatcagagaaggtcccagaaacgattggagtagagatgaaatcaagtctgtttatgattctcctcttcttgacctcctcttccatggagctcaggttcatagacatgttcataacttcagggaggtacaacaatgtaccctcctctccataaagactggtggctgtagtgaagactgttcatattgtcctcagtcttcgagatatagcactggagttaaggcacaaagactcatgtctaaggacgctgtcattgatgctgctaagaaggcaaaagaagctgggagcacacgtttttgcatgggtgctgcttggcgagatacaattggacggaaaaccaacttcagccagattcttgaatacatcaaagaaataagaggcatggggatggaagtttgctgcaccttaggcatgattgagaaacaacaagcactagagctaaagaaggctggcctcactgcttataaccacaatcttgatacttcaagagagtactacccaaacgtcatcactactagaagttatgacgatcgccttgaaactcttagccatgttcgtgatgctggaatcaacgtttgttcaggaggaatcatagggcttggtgaggcagaggaagacagaataggtttattacacacgctggcaacacttccttctcaccctgagagtgttcccattaatgctctacttgcagtgaaaggcactcctcttgaagaccagaagccagttgagatatgggagatgatcaggatgattggaaccgcacgtattgtaatgccaaaagcgatggtgagactgtctgctggtagagtccggttctcaatgtccgaacaagctctctgtttccttgctggtgcaaactctatcttcaccggagagaagcttttaaccacaccaaacaatgattttgacgctgaccagctcatgttcaagacattaggcctcattcctaaaccgccaagtttctctgaagatgattctgaatcagaaaactgcgagaaagttgcttccgcttctcactaatatcattatccactttttttttttgtttggagtcgggacactatagagcagtcccttttactatgtagcatggtttgacgattttgtgatatcatttttcgttaatcgttattcgaagatgtct

SEQ ID NO: 128660 - protein, 377 aa, Arabidopsis thaliana
MLVRSVFRSQLRPSVSGGLQSASCYSSLSAASAEAERTIREGPRNDWSRDEIKSVYDSPLLDLLFHGAQVHRHVHNFREVQQCTLLSIKTGGCSEDCSYCPQSSRYSTGVKAQRLMSKDAVIDAAKKAKEAGSTRFCMGAAWRDTIGRKTNFSQILEYIKEIRGMGMEVCCTLGMIEKQQALELKKAGLTAYNHNLDTSREYYPNVITTRSYDDRLETLSHVRDAGINVCSGGIIGLGEAEEDRIGLLHTLATLPSHPESVPINALLAVKGTPLEDQKPVEIWEMIRMIGTARIVMPKAMVRLSAGRVRFSMSEQALCFLAGANSIFTGEKLLTTPNNDFDADQLMFKTLGLIPKPPSFSEDDSESENCEKVASASH

SEQ ID NO: 128661 - DNA, 1313 bp, Zea mays subsp. mays
  CDS (70)..(1194)
atcgcccgctgctcctctatccctttactgctgctgctactaccttaagctatcactatcatggccttgatgctgctagcgcgcaacctgcgctcccgccgccgcccaccgctcgccgccgccgcggcgttctcgtcggccgcggcggaggcggagagggcgatacgggacgggccgcggaacgactggagccggcccgagatccaggccgtctacgactcaccgctcctcgacctcctctttcacggggctcaggtccacagaaatgtccataaattcagagaagtgcagcaatgcacacttctttcaatcaagactggtggatgcagtgaagattgttcttactgtcctcagtcatcaagatacaacactggattgaaggcccaaaaattgatgaacaaagatgctgtcttggaagcagcaaaaaaggcaaaagagtctgggagcacccgtttttgcatgggagctgcatggagagaaaccattggcaggaaatcaaacttcaaccagattcttgaatatgtcaaggaaataaggggtatggacatggaggtctgttgcacactaggcatgatagagaaacaacaagctgaagaactcaagaaggctggacttacagcatataatcataacctagatacatcaagagagtattatcccaacattattaccacaagatcatatgatgatagactgcagactcttgagcatgtccgtgaagctggaataagcatctgctcaggtggaatcattggtcttggtgaagcagaggaggaccgggtagggttgttgcataccctagctaccttgcctacacacccagagagcgttcctattaatgcattggttgctgtaaaaggcacacctcttgaggaccagaagcctgtagagatctgggaaatgatccgcatgatcgccactgctcggatcacgatgccaaaggcaatggtgaggctttcagcaggccgagtacggttctcgatgccagaacaagcgctgtgcttcctcgctggggccaactccatctttgccggcgagaaacttctcacaaccgcaaacaacgactttgatgcggaccaggcgatgttcaagatccttggcctgatccccaaggctccaagctttggcgaggaagaggcgtctgcggcggctcccacagaatccgagaggtctgagcaagctgcttcgatgtagaatatatacatatcattaccgattatccgtatcacggttggggcgaaactagaactaccgttgtagctagagcattggattgtagaaaccacaacatttcattattttgtaattgcttg

SEQ ID NO: 128662 - protein, 374 aa, Zea mays subsp. mays
MLLARNLRSRRRPPLAAAAAFSSAAAEAERAIRDGPRNDWSRPEIQAVYDSPLLDLLFHGAQVHRNVHKFREVQQCTLLSIKTGGCSEDCSYCPQSSRYNTGLKAQKLMNKDAVLEAAKKAKESGSTRFCMGAAWRETIGRKSNFNQILEYVKEIRGMDMEVCCTLGMIEKQQAEELKKAGLTAYNHNLDTSREYYPNIITTRSYDDRLQTLEHVREAGISICSGGIIGLGEAEEDRVGLLHTLATLPTHPESVPINALVAVKGTPLEDQKPVEIWEMIRMIATARITMPKAMVRLSAGRVRFSMPEQALCFLAGANSIFAGEKLLTTANNDFDADQAMFKILGLIPKAPSFGEEEASAAAPTESERSEQAASM

SEQ ID NO: 128663 - DNA, 1381 bp, Triticum aestivum
  CDS (102)..(1244)
agagcaaaatcgcactctcgctttccaacacaactccctcggcagtatcgcctagtgtagcagcgcctccgttccggccagctctgctcgccgagccggccatgatgctgctgctcgcgcgcagcctccgctcccgcgtccggccccccctcgcctccgccgttagcgccgctcccttctcatcggtatcggcggccgcggcggaggcagagcgggcggtgcgggacgggcccaggaacgactggacccgtcccgagatccaggccatctacgactccccgctcctcgacctcctcttccacggggctcaggtccataggaatgtccataaatttagagaagtgcagcaatgcacacttctttcaataaagactggtgggtgcagcgaagattgttcatactgcccacagtcttcaagatacagtactggattgaaggccgagaaattaatgaagaaagatgctgtcctagaagcagcaaaaaaggcaaagcaggctgggagcacccggttttgcatgggagccgcatggagagagacaattggcaggaaaacaaatttcaaccagattcttgaatatgtcaaggacataagaggtatgggcatggaggtctgttgcaccctgggtatgctagagaaacaacaagctgaagaactcaagaaggctggacttacagcttataatcataacctagatacatcaagggaatattaccccaacattatttctacaagatcgtacgatgatagattacagactcttcagcacgtccgtgaagctggaataagcgtctgctcaggtggaattattggtcttggagaggcggaggaagaccgtgtagggctgttgcatacactggccactttgccaacacacccagagagcgttcctatcaatgcattgattgctgtcaaaggcacgcctcttcaggatcagaagcctgtagagatatgggaaatgatccgcatgattgccagcgctcggattgtgatgccaaaggcaatggtgagactttcggcagggcgagtacggttctccatgccagaacaagctctctgctttctcgctggggccaactcgatcttcgccggtgaaaagctcctgacaactgcgaacaatgactttgatgcggaccaggcaatgttcaagatccttggcctgattcccaaggctccaaactttggcgatgaagaggccacggtagcagcacccacggagagatgtgagcaagccgcttcgatgtaaaatgccgctatagattctcaagaccatatccggtgcaaaactggcaccattatctccagctagagctttgtactgtagagatcatgatattttgtagtaacttcagattcatcgaaataaaatagggggttctctgc

SEQ ID NO: 128664 - protein, 380 aa, Triticum aestivum
MMLLLARSLRSRVRPPLASAVSAAPFSSVSAAAAEAERAVRDGPRNDWTRPEIQAIYDSPLLDLLFHGAQVHRNVHKFREVQQCTLLSIKTGGCSEDCSYCPQSSRYSTGLKAEKLMKKDAVLEAAKKAKQAGSTRFCMGAAWRETIGRKTNFNQILEYVKDIRGMGMEVCCTLGMLEKQQAEELKKAGLTAYNHNLDTSREYYPNIISTRSYDDRLQTLQHVREAGISVCSGGIIGLGEAEEDRVGLLHTLATLPTHPESVPINALIAVKGTPLQDQKPVEIWEMIRMIASARIVMPKAMVRLSAGRVRFSMPEQALCFLAGANSIFAGEKLLTTANNDFDADQAMFKILGLIPKAPNFGDEEATVAAPTERCEQAASM

SEQ ID NO: 128665 - DNA, 1381 bp, Triticum aestivum; identical to SEQ ID NO: 128663
  CDS (105)..(1244)

SEQ ID NO: 128666 - protein, 379 aa, Triticum aestivum
MLLLARSLRSRVRPPLASAVSAAPFSSVSAAAAEAERAVRDGPRNDWTRPEIQAIYDSPLLDLLFHGAQVHRNVHKFREVQQCTLLSIKTGGCSEDCSYCPQSSRYSTGLKAEKLMKKDAVLEAAKKAKQAGSTRFCMGAAWRETIGRKTNFNQILEYVKDIRGMGMEVCCTLGMLEKQQAEELKKAGLTAYNHNLDTSREYYPNIISTRSYDDRLQTLQHVREAGISVCSGGIIGLGEAEEDRVGLLHTLATLPTHPESVPINALIAVKGTPLQDQKPVEIWEMIRMIASARIVMPKAMVRLSAGRVRFSMPEQALCFLAGANSIFAGEKLLTTANNDFDADQAMFKILGLIPKAPNFGDEEATVAAPTERCEQAASM

SEQ ID NO: 128667 - DNA, 1340 bp, Glycine max
  CDS (216)..(1340)
ctagtactgctccctctgcgacttcgtttcgtagagggattttggccgccaaataaacagtctcaccataaactccaaagtcccaacgctaaacgaaaccaaaccccaaacacaaataccgttgttgtctgttgtctctgtcgtgtctatattcgcagatctctcactcattctctgttgtttctctgcccaacttcgaattcgaaagcaaaaacatgtttttggcgagacccattttccgagcaccctccctttgggcgttgcactcttcctacgcgtattcctctgcctcagcagctgcaattcaagctgagagagccatcaaagaaggacccagaaacgattggagccgagaccaagtcaaatccatctacgactctcccattctcgatcttctcttccatggggctcaagttcacagacatgctcataacttcagggaagttcaacagtgtactcttctgtctatcaaaacaggagggtgcagtgaagattgttcctattgtcctcaatcctctaagtatgatacaggagtcaaaaggccaagccttatgaacaaggaagctgttctccaggctgcaaagaaggcaaaagaggctgggagcactcgcttttgtatgggtgctgcgtggagggatacactaggaagaaagaccaacttcaaccagatccttgaatatgtgaaagacataagggacatgggaatggaggtttgttgcacccttggcatgctggagaaacagcaggctgttgaactcaagaaggcaggtctcactgcttataatcacaatcttgacacttcaagggagtattatccaaacataatcacaacaaggacttatgatgagcgtcttcaaacccttgagtttgttcgggatgcagggatcaatgtttgttctggaggaattatagggcttggagaagcagaggaggatcgtgtaggtttgttacatacattgtcaacacttcccacccatccagagagtgttcctattaatgcacttgttgctgtaaagggaacccctcttgaggatcagaagcctgttgaaatatgggagatgattcgcatgatagcaactgcacgtatcgtaatgccaaaagcaatggtcaggttatcagctggcagagttcgattctccatgcctgagcaggcattgtgctttcttgctggtgcaaattctatattcactggtgaaaagcttctcactactcctaacaatgattttgatgctgatcaactcatgtttaaagttcttggacttctcccaaaagctccaagcttacatgaaggtgaaactagtgtgacagaagattataaggaagcagcttcttctagttga

SEQ ID NO: 128668 - protein, 374 aa, Glycine max
MFLARPIFRAPSLWALHSSYAYSSASAAAIQAERAIKEGPRNDWSRDQVKSIYDSPILDLLFHGAQVHRHAHNFREVQQCTLLSIKTGGCSEDCSYCPQSSKYDTGVKRPSLMNKEAVLQAAKKAKEAGSTRFCMGAAWRDTLGRKTNFNQILEYVKDIRDMGMEVCCTLGMLEKQQAVELKKAGLTAYNHNLDTSREYYPNIITTRTYDERLQTLEFVRDAGINVCSGGIIGLGEAEEDRVGLLHTLSTLPTHPESVPINALVAVKGTPLEDQKPVEIWEMIRMIATARIVMPKAMVRLSAGRVRFSMPEQALCFLAGANSIFTGEKLLTTPNNDFDADQLMFKVLGLLPKAPSLHEGETSVTEDYKEAASSS

SEQ ID NO: 128669 - DNA, 1515 bp, Zea mays
  CDS (131)..(1264)
ggccccagccgacgaggcgaggagcgtgcaattccgtagctgcaactgcaacgaactccctccctccctcgaccgtatcgcccgctgctcctctatccctttcctgctgctgctactaccttaagctatcatggccttgatgctgctagcgcgcaacctgcgctcccgcctccgcccaccgctcgccgccgccgcggcgttctcgtcggccgcggcggaggcggagagggcgatacgggacgggccgcggaacgactggagccggcccgagatccaggccgtctacgactcaccgctcctcgacctcctctttcacggggctcaggtccacagaaatgtccataaattcagagaagtgcagcaatgcacacttctttcaatcaagactggtggatgcagtgaagattgttcttactgtcctcagtcatcaagatacaacactggattgaaggcccaaaaattgatgaacaaagatgctgtcttggaagcagcaaaaaaggcaaaagagtctgggagcacccgtttttgcatgggagctgcatggagagaaaccattggcaggaaatcaaacttcaaccagattcttgaatatgtcaaggaaataaggggtatgggcatggaggtctgttgcacactaggcatgatagagaaacaacaagctgaagaactcaagaaggctggacttacagcatataatcataacctagatacatcaagagagtattatcccaacattattaccacaagatcatatgatgatagactgcagactcttgagcatgtccgtgaagctggaataagcatctgctcaggtggaatcattggtcttggtgaagcagaggaggaccgggtagggttgttgcataccctagctaccttgcctacacacccagagagcgttcctattaatgcattggttgctgtaaaaggcacacctcttgaggaccagaagcctgtagagatctgggaaatgatccgcatgatcgccactgctcggatcacgatgccaaaggcaatggtgaggctttcagcaggccgagtacggttctcgatgccagaacaagcgctgtgcttcctcgctggggccaactccatctttgccggcgagaaacttctcacaaccgcaaacaacgactttgatgcggaccaggcgatgttcaagatccttggcctgatccccaaggctccaagctttggcgaggaagaggtgtctgcggcggctcccgcagaatccgagaggtctgagcaagctgcttcgatgtagaatatatacatatcattaccgattatccgtatcacggttggggcgaaactagaactaccgttgtagctagagcattggattgtagaaaccacaacatttcattattttgtaattgcttgagactgaatgggggatacccatgtcgggctagatcaaaaaaaaaaaaaaaaaaaaaaaaaaaaaaaaaaaaaaaaaaaaaaaaaaaaaaaaaaaaaaaaaaaaaaaaaaaaaaaaaaaaaaaaaaaaaaaaa

SEQ ID NO: 128670 - protein, 377 aa, Zea mays
MALMLLARNLRSRLRPPLAAAAAFSSAAAEAERAIRDGPRNDWSRPEIQAVYDSPLLDLLFHGAQVHRNVHKFREVQQCTLLSIKTGGCSEDCSYCPQSSRYNTGLKAQKLMNKDAVLEAAKKAKESGSTRFCMGAAWRETIGRKSNFNQILEYVKEIRGMGMEVCCTLGMIEKQQAEELKKAGLTAYNHNLDTSREYYPNIITTRSYDDRLQTLEHVREAGISICSGGIIGLGEAEEDRVGLLHTLATLPTHPESVPINALVAVKGTPLEDQKPVEIWEMIRMIATARITMPKAMVRLSAGRVRFSMPEQALCFLAGANSIFAGEKLLTTANNDFDADQAMFKILGLIPKAPSFGEEEVSAAAPAESERSEQAASM

SEQ ID NO: 128671 - DNA, 1439 bp, Zea mays
  CDS (115)..(1248)
gcacgagggcgaggagcgtgcaattccgtagctgcaacgaactccctcgaccgtatcgcccgctgctcctctatccctttcctgctgctgctactaccttaagctatcactatcatggccttgatgctgctagcgcgcaacctgcgctcccgcctccgcccaccgctcgccgccgccgcggcgttctcgtcggccgcggcggaggcggagagggcgatacgggacgggccgcggaacgactggagccggcccgagatccaggccgtctacgactcaccgctcctcgacctcctctttcacggggctcaggtccacagaaatgtccataaattcagagaagtgcagcaatgcacacttctttcaatcaagactggtggatgcagtgaagattgttcttactgtcctcagtcatcaagatacaacactggattgaaggcccaaaaattgatgaacaaatatgctgtcttggaagcagcaaaaaaggcaaaagagtctgggagcacccgtttttgcatgggagctgcatggagagaaaccattggcaggaaatcaaacttcaaccagattcttgaatatgtcaaggaaataaggggtatgggcatggaggtctgttgcacactaggcatgatagagaaacaacaagctgaagaactcaagaaggctggacttacagcatataatcataacctagatacatcaagagagtattatcccaacattattaccacaagatcatatgatgatagactgcagactcttgagcatgtccgtgaagctggaataagcatctgctcaggtggaatcattggtcttggtgaagcagaggaggaccgggtagggttgttgcataccctagctaccttgcctacacacccagagagcgttcctattaatgcattggttgctgtaaaaggcacacctcttgaggaccagaagcctgtagagatctgggaaatgatccgcatgatcgccactgctcggatcacgatgccaaaggcaatggtgaggctttcagcaggccgagtacggttctcgatgccagaacaagcgctgtgcttcctcgctggggccaactccatctttgccggcgagaaacttctcacaaccgcaaacaacgactttgatgcggaccaggcgatgttcaagatccttggcctgatccccaaggctccaagctttggcgaggaagaggcgtctgcggcggctcccacagaatccgagaggtctgagcaagctgcttcgatgtagaatatatacatatcattaccgattatccgtatcacggttggggcgaaactagaactaccgttgtagctagagcattggattgtagaaaccacaacatttcattattttgtaattgcttgagactgaatgggggatacccatgtcgggctagatcaatggacaacttccacacaaaaaaaaaaaaaaaaaaa

SEQ ID NO: 128672 - protein, 377 aa, Zea mays
MALMLLARNLRSRLRPPLAAAAAFSSAAAEAERAIRDGPRNDWSRPEIQAVYDSPLLDLLFHGAQVHRNVHKFREVQQCTLLSIKTGGCSEDCSYCPQSSRYNTGLKAQKLMNKYAVLEAAKKAKESGSTRFCMGAAWRETIGRKSNFNQILEYVKEIRGMGMEVCCTLGMIEKQQAEELKKAGLTAYNHNLDTSREYYPNIITTRSYDDRLQTLEHVREAGISICSGGIIGLGEAEEDRVGLLHTLATLPTHPESVPINALVAVKGTPLEDQKPVEIWEMIRMIATARITMPKAMVRLSAGRVRFSMPEQALCFLAGANSIFAGEKLLTTANNDFDADQAMFKILGLIPKAPSFGEEEASAAAPTESERSEQAASM

SEQ ID NO: 128673 - DNA, 1659 bp, Glycine max
  CDS (47)..(1300)
aaagagtgtatacagatagatttccaaactccactcactcaccactatggcgactctcagaacttccctatcacgatccctcatcctccttcgctccaatacccctaaactcgcacctatctcttcctctgttcgtcttcaagttcaaaagtcgagaaactatggtaccgtatcatctgttcctcctcaagctacagaaacatcaagcacatcacctagtaaggatgtctaccaagaagcactcaacgcaactgaaccccgcagcaattggacaagagaagaaatcaaggcgatctatgataagccattgatggagttatgttggggtgctggtagtttgcacaggaaattccatatacctggggctattcagatgtgtacattgttgaacatcaagacgggtggttgctcggaggattgttcttactgcgcccaatcatcccgctaccaaaccggtctcaaagcctccaaaatggtctccgtcgaatctgtcctcgcagccgcccgcatcgccaaagacaacggtagtacacgtttctgcatgggagccgcgtggcgcgatatgcgtggacgaaaaaccaatctcaaaaatgtcaaaacaatggttagcgagattcgcggaatgggtatggaagtatgtgtcacgcttggtatgattgatgcagagcaagctcaggaactcaaagaagccggtctcacggcttataatcataatgtggatacgtcgagggatttctatcccaaggttatcacgaccaggacttatgatgagagattggataccattaagaatgtgagagaggccggaatcaatgtttgtacgggtggaatcctcggattaggagaaaataagtctgaccatattggacttttggagacggttgctacgttgccttcgcatccggaatcatttcctgtgaacatgttagtggctatcaaaggaacaccactggaaggaaacaagaaggtggaatttgagaatatgttgagaatggttgcgacggctagaatcgtcatgcctaaaaccatcgtgcgtttggcagctggaagaggagaattgagcgaggaacaacaggtcttatgtttcatggccggagccaatgccgttttcacaggagaaacaatgttaaccacaccagccgttggatggggtgtcgattccgtcgttttcaacagatggggattaagacccatggaaagtttcgaggttgaagccttgaagaacgataaacctgccactactaatacggaaataccggtagaggcaagtaaggcagagatgccaggtacagttgcttgattgattgtttgatttggatacccagggcgtttggtgcgctcatcatctcgagtttttgcaaggagattcgaacagtggaagtgccgttgcgccaccattgggattggcgtatcggactgagattgactgtgccacgaaaatgttttgcgctatcgtgtgttgtcatctcgtgggaatttagcgttgtttgttttgtttttggttttgtttgatgtgagagaatgattgtttagaaggggagaatgtatatacggaacagtagaatatattcttgtctataagattatataggataaatatatataagcttatcctcaaaaaaaaaaaaaaaaaaaaaaaaaaaaaaaaaaaaaaaaaaa

SEQ ID NO: 128674 - protein, 417 aa, Glycine max
MATLRTSLSRSLILLRSNTPKLAPISSSVRLQVQKSRNYGTVSSVPPQATETSSTSPSKDVYQEALNATEPRSNWTREEIKAIYDKPLMELCWGAGSLHRKFHIPGAIQMCTLLNIKTGGCSEDCSYCAQSSRYQTGLKASKMVSVESVLAAARIAKDNGSTRFCMGAAWRDMRGRKTNLKNVKTMVSEIRGMGMEVCVTLGMIDAEQAQELKEAGLTAYNHNVDTSRDFYPKVITTRTYDERLDTIKNVREAGINVCTGGILGLGENKSDHIGLLETVATLPSHPESFPVNMLVAIKGTPLEGNKKVEFENMLRMVATARIVMPKTIVRLAAGRGELSEEQQVLCFMAGANAVFTGETMLTTPAVGWGVDSVVFNRWGLRPMESFEVEALKNDKPATTNTEIPVEASKAEMPGTVA

SEQ ID NO: 128675 - DNA, 1017 bp, Klebsiella pneumoniae subsp. pneumoniae MGH 78578
  CDS (1)..(1017): transl_table=11
atgtcgcaagtaacggaattatttaataaaccgctgatcgatctgctattcgaagcgcagcaaatccatcgtcaacactttgatccgcgccaggtgcaggtcagcaccctgctgtcgatcaaaaccggcgcctgcccggaagattgtaaatattgcccgcagagcgcacgctacaaaaccggcctcgaagccgagcgcctgatggaggttgagcaggtgctggaatcagcgcgccaggcgaaaaacgccggctccacccgcttctgcatgggcgcggcgtggaaaaaccccaatgaccgcgatatgccttacctggagcagatggtgaaaggggtgaaggcgctggggctggagtcctgtatgacgctcggcaccctgaccgacagtcaggcgcagcgcctggccgaagcgggcctcgattactacaaccacaaccttgatacctcgccggaattttacggcaacatcatcaccactcgcacctaccaggagcgcctggatacgctggacaaagtgcgtgatgctgggatcaaagtctgctccggcggcatcgtcgggctgggagagagcgtaaaagatcgcgccggactgctgctgcaactggctaatctgccgacgccgccggagagcgtaccgatcaacatgttggtgaaggtcaagggcacgccgctggcggataacgacgacgtcgacgctttcgatttcatccgcactatcgccatcgcgcgcatcatgatgcccacctcctacgtgcgtctctccgccggccgcgagcagatgaacgagcagacccaggcgatgtgctttatggccggggcgaactcgattttctacggctgcaagctgctgaccacgccgaacccggaagaggacaaagacctgcagctgttccgcaagctggggatcaacccgcagcagacggcggtgctggaaggcgacaatgagcagcagcagcgtctggagcaggccttacttaccccggacactgaggaatattacaacgcggcggcgctatga

SEQ ID NO: 128676 - protein, 338 aa, Klebsiella pneumoniae subsp. pneumoniae MGH 78578
MSQVTELFNKPLIDLLFEAQQIHRQHFDPRQVQVSTLLSIKTGACPEDCKYCPQSARYKTGLEAERLMEVEQVLESARQAKNAGSTRFCMGAAWKNPNDRDMPYLEQMVKGVKALGLESCMTLGTLTDSQAQRLAEAGLDYYNHNLDTSPEFYGNIITTRTYQERLDTLDKVRDAGIKVCSGGIVGLGESVKDRAGLLLQLANLPTPPESVPINMLVKVKGTPLADNDDVDAFDFIRTIAIARIMMPTSYVRLSAGREQMNEQTQAMCFMAGANSIFYGCKLLTTPNPEEDKDLQLFRKLGINPQQTAVLEGDNEQQQRLEQALLTPDTEEYYNAAAL

SEQ ID NO: 128677 - DNA, 1038 bp, Xanthobacter autotrophicus Py2
  CDS (1)..(1038): transl_table=11
atgaccacgagcaccggcacgaccaccgggaccggaaccgcccgcgcggcggaggggagcctgctgcgctccgactggaccgaggccgaggcccgtgcgctctacgacctgcccttccccgagctgatgttccgcgcccagagcgtgcaccgccgccacttcgatcccaccacggtggagacggcgacgctgctctccatcaagaccggcggctgcgccgaggattgcggctactgctcccagagcgcccaccacgagaccggcctgaaggccaccaagctcatgggcgtggaagaggtgctgtcgcaggcccagaaggccaaggacggcggcgccacccgcttctgcatgggcgccgcctggcgcagccccaaggatcgcgacctcgacgccgtctgcgccatgatctcgggcgtgaaggccatgggccttgaagcctgcgtgaccctgggcatgctcaccccggatcaggtgacccgcctcggcgccgccggcctcgactattacaaccacaacatcgacacctcgcccgccttctaccccgagatcgtcaccacccggaccatggacgaccgcctcgacaccctcgcctcggtgcgggcgggcggcatccggctgtgcaccggcggcatcgtcggcatgggcgagagcgtggacgaccgcatcgccatgctgctggtgctcgccaccctcgatccccatcccgagagcgtgccgatcaacatgtggaatgagatcgagggcaccccggtgatgggcaaggccgacaagccggaccccatcgccttcgtgcgcctgatcgcgctggcgcgccttctgatgccgcagagcatcgtgcgcctctccgccggccgggacgccatgagcgacgagatgcaggccctgtgcttccttgccggggccaattccatcttcaccggcgacgtgctgctcaccaccgccaacccggagcgggacaaggacgcggcgctgttcgcccgcctcggtatccgcgccgccgcccccgccgccacggagatgcgctccgccgcggagtga

SEQ ID NO: 128678 - protein, 345 aa, Xanthobacter autotrophicus Py2
MTTSTGTTTGTGTARAAEGSLLRSDWTEAEARALYDLPFPELMFRAQSVHRRHFDPTTVETATLLSIKTGGCAEDCGYCSQSAHHETGLKATKLMGVEEVLSQAQKAKDGGATRFCMGAAWRSPKDRDLDAVCAMISGVKAMGLEACVTLGMLTPDQVTRLGAAGLDYYNHNIDTSPAFYPEIVTTRTMDDRLDTLASVRAGGIRLCTGGIVGMGESVDDRIAMLLVLATLDPHPESVPINMWNEIEGTPVMGKADKPDPIAFVRLIALARLLMPQSIVRLSAGRDAMSDEMQALCFLAGANSIFTGDVLLTTANPERDKDAALFARLGIRAAAPAATEMRSAAE

SEQ ID NO: 128679 - DNA, 939 bp, Mesorhizobium loti MAFF303099
  CDS (1)..(939): transl_table=11
atgtggaccctggataaggctcaggcgcttcacgacgctcccttcaacaatctgctgttcctggcgcacaccgtgcaccgccagaatttcgatcccaacaaggtccagctcagccggctcttgagcatcaagacaggcggatgtccggaggattgcggctattgcagccagtcggcgcatcacgaaaccggcctgaaggcgtcgaagctgatggaggtcaggcgcgtcatcgccgaggcaaccaaggcgcgcgatgccggcgccacccgctattgcatgggtgctgcctggcgaaatcccaagccgcgcgacatggatgcggtcgtggcgatggtcgaaggcgtcaaggcgctgggcatggaaacctgcatgacactcggcatgctcgatctcggccaggcgcagcaactgaaacaggctggtctcgattattacaaccacaacatcgatacgtcggaacgctactatagcgagatcatcagcacgcgcagctttgccgaccggctcgatacgctcgaacaggttcgccaatccggcatcaaggtctgttgcggcggcattgtcggcatgggcgaagagccggtggaccggatcgacatgctggtgacactggccaatctgccggagcatccgcaaagcgttccgatcaacatgctgatcccgatcgaaggcaccccgcttgccgaaaccaggccgatcgagccgatcgaattcgtgcgcgtgatcgcgctggcacgcatcatgatgccgaaatcgcatgtgcgcctttcggccggccgcaccgccatgaccgacgagatgcaggcgctgtgcttctttgccggcgccaactcgatcttcgtcggcgacacgctgctgacggcggacaatcccggcgaggacgaagataccgcgctgttccggcgtctcggcatccagcgcatggaacgtgaaacataa

SEQ ID NO: 128680 - protein, 312 aa, Mesorhizobium loti MAFF303099
MWTLDKAQALHDAPFNNLLFLAHTVHRQNFDPNKVQLSRLLSIKTGGCPEDCGYCSQSAHHETGLKASKLMEVRRVIAEATKARDAGATRYCMGAAWRNPKPRDMDAVVAMVEGVKALGMETCMTLGMLDLGQAQQLKQAGLDYYNHNIDTSERYYSEIISTRSFADRLDTLEQVRQSGIKVCCGGIVGMGEEPVDRIDMLVTLANLPEHPQSVPINMLIPIEGTPLAETRPIEPIEFVRVIALARIMMPKSHVRLSAGRTAMTDEMQALCFFAGANSIFVGDTLLTADNPGEDEDTALFRRLGIQRMERET

SEQ ID NO: 128681 - DNA, 996 bp, Mesorhizobium loti MAFF303099
  CDS (1)..(996): transl_table=11
atgaacgaactcagcccagacctgacctcggatccaatcggttgggcgcttcccccttggacgcgagcggaagcccaagcgctccacgacgcgccattcaacgaccttttgtttcaggcgcagaccgttcaccggcagaacttcgatcccaacaaggtccagctgagccggcttctcagcatcaagaccggcggatgcccggaggattgcggctattgcagccaatcggcacatcacgaaagcgggttgaaggcgtcaaagctgatggaggtccggcgcgtcatcgccgaggcgaccaaggcacgcgatgccggcgccacccgctattgcatgggcgcggcctggcgaaacccgaaggcgcgcgacatggacgcggtggtggcgatggtcgagggtgtcaaggcactcggcatggagacctgcatgacgctcggcatgctcgatcttgagcaggccgctcgtctgaaacaggccggtctcgactactacaaccacaacatcgacacctccgagcgctattactcagagatcatctcgacccgcacgtttgccgaccggctggatacgctcgccaatgtccgcgacagcggcattaaggtctgttgcggcggcattgtcggcatgggcgaagagccggtggaccggatcgacatgctggtgacgctggccaacctgccggagcatcccgaaagcgttccgatcaacatgctgatcccgatcgagggcaccccgctggccgaggccaaacccatcgagccgatcgaattcgtgcgcgtgatcgcgctggcccgcatcatgatgccgaagtcgcacgtgcgtctttccgccggccgcaccgccatgaccgatgaaatgcaggcgctgtgcttttttgccggcgccaactcgatcttcgtcggcgacacactgctgacggcggacaatcccggcgaagacaaggatactctgctgttccagcgtctcggcatcgagccgatggaaatcggcacgcaatga

SEQ ID NO: 128682 - protein, 331 aa, Mesorhizobium loti MAFF303099
MNELSPDLTSDPIGWALPPWTRAEAQALHDAPFNDLLFQAQTVHRQNFDPNKVQLSRLLSIKTGGCPEDCGYCSQSAHHESGLKASKLMEVRRVIAEATKARDAGATRYCMGAAWRNPKARDMDAVVAMVEGVKALGMETCMTLGMLDLEQAARLKQAGLDYYNHNIDTSERYYSEIISTRTFADRLDTLANVRDSGIKVCCGGIVGMGEEPVDRIDMLVTLANLPEHPESVPINMLIPIEGTPLAEAKPIEPIEFVRVIALARIMMPKSHVRLSAGRTAMTDEMQALCFFAGANSIFVGDTLLTADNPGEDKDTLLFQRLGIEPMEIGTQ

SEQ ID NO: 128683 - DNA, 1269 bp, Mesorhizobium loti MAFF303099
  CDS (1)..(1269): transl_table=11
atgcctgaaggtcacaccttcgatggccaccagatgtggaccctggagaaggctcgggctctacacgacgctcccttcaacaatctcctcttcctggcgcaaaccgtgcaccgcgagaacttcgatcccaacaaggtccagctgagccggcttctcagcatcaagacgggcggctgcccggaggattgcggctattgcagccagtcggcgcatcacgaaagcgggttgaaggcgtcgaagctgatggaggtccggcgcgtcatcgccgaggcgaccaaggcacgcgatgccggcgccacccgctattgcatgggcgcggcctggcgaaacccgaaggcgcgcgacatggacgcggtggtggcgatggtcgagggtgtcaaggcactcggcatggagacctgcatgacgctcggcatgctcgatcttgagcaggccgctcgtctgaaacaggccggtctcgactactacaaccacaacatcgacacctccgagcgctattactcagagatcatctcgacccggacatttgccgaccggctggacacgctcgccaatgtccgcgacagcggcatcaaggtctgttgcggcggcattgtcggcatgggcgaagagccggtggaccggatcgacatgctggtgacgctggccaacctgccggagcatcccgaaagcgttccgatcaacatgctgatcccgatcgagggcaccccgcttgccgaagccaagcccatcgagccgatcgaattcgtgcgcgtgatcgccctggcgcgcatcatgatgccgaaatcgcatgtgcgtctttccgccggccgcaccgccatgaccgacgagatgcaggcactgtgtttctttgccggcgccaattcgatcttcgtcggcgacacgctgctgacggcggacaatcccggcgaggacaaggacattctgctgtttcggcgcctcggcatggagccaatgggcgcaatgaacggggcgcttcttgcccggtatggccggtccttgcgcggactggcgcgcaaggaccggctgcggacgctggcaccgcgcgccgggctcgacttctcgtcgaacgactatctcggacttgcctcctgcaaaagacttggcgaggcggttgcggcggcgattgcgcggggcacgccggtgggcgccaccggatcggcaacgcgccggaacacgaggcgctggagtcggacgctgcggcgtttttcggagccgatcgcgccctgttcttcggcagcggctacatcgccaacttcgctctgctga

SEQ ID NO: 128684 - protein, 422 aa, Mesorhizobium loti MAFF303099
MPEGHTFDGHQMWTLEKARALHDAPFNNLLFLAQTVHRENFDPNKVQLSRLLSIKTGGCPEDCGYCSQSAHHESGLKASKLMEVRRVIAEATKARDAGATRYCMGAAWRNPKARDMDAVVAMVEGVKALGMETCMTLGMLDLEQAARLKQAGLDYYNHNIDTSERYYSEIISTRTFADRLDTLANVRDSGIKVCCGGIVGMGEEPVDRIDMLVTLANLPEHPESVPINMLIPIEGTPLAEAKPIEPIEFVRVIALARIMMPKSHVRLSAGRTAMTDEMQALCFFAGANSIFVGDTLLTADNPGEDKDILLFRRLGMEPMGAMNGALLARYGRSLRGLARKDRLRTLAPRAGLDFSSNDYLGLASCKRLGEAVAAAIARGTPVGATGSATRRNTRRWSRTLRRFSEPIAPCSSAAATSPTSLC

SEQ ID NO: 128685 - DNA, 1011 bp, Pasteurella multocida subsp. multocida str. Pm70
  CDS (1)..(1011): transl_table=11
atgacaacggcaacggcatttgagattcgtacactgactcctcacccgaccttagaatattggtctgtgtgtaaaattgaagccctgtttgagaccccatttttagatttggtttatcgggctgcgcaagtgcaccgagaaaactttaatcctaaagccattcaattatccactttaatgtcgattaaaacggggggatgtccagaggattgtggctactgtccgcagtcagcacgttatcatactggagtagaaaagcagcaattactcgatgtggaagaaattgttgaaaaagccaaaattgccaaagcacgtggtgcagggcgcttttgtatgggggctgcatggcgtggaccgaaaccgaaagacattgaaaaagttaccgcaatcattaaagcggtgaaagaactgggcttagaaacctgtggtacctttggtttattgcaagatgggatggcagaagatttaaaagaagcgggtttggattattataaccataatctcgatacagccccagaacactacggtaatgtgattggtacccgtcaatttgatgatcgtattaatacgttaggtaaagtgcgtaaagccggcttaaaagtgtgctgtggcgggattattggcatgaatgaaacccgtaaagaaagagcaggattaattgctagcttagctaatttagacccgcaacccgaatcggtgccgattaatcaattagtgaaagtggaaggtacccctttagccgatgcggcagaattagactggacagaatttgtgcgcactattgcggtggcgcgtattactatgccgaaaagctatgtacgtttatcagcagggcgtcaaggcatgtcggaagaaatgcaagccatgtgctttatggctggcgcgaattcaatcttctatggcgataaattactcgtgacgggtaacccagaagaagacggcgatcagcgcttaatggcgaaattagatttagaaccagaaacagaagagaatcgttaccgtgcggaataa

SEQ ID NO: 128686 - protein, 336 aa, Pasteurella multocida subsp. multocida str. Pm70
MTTATAFEIRTLTPHPTLEYWSVCKIEALFETPFLDLVYRAAQVHRENFNPKAIQLSTLMSIKTGGCPEDCGYCPQSARYHTGVEKQQLLDVEEIVEKAKIAKARGAGRFCMGAAWRGPKPKDIEKVTAIIKAVKELGLETCGTFGLLQDGMAEDLKEAGLDYYNHNLDTAPEHYGNVIGTRQFDDRINTLGKVRKAGLKVCCGGIIGMNETRKERAGLIASLANLDPQPESVPINQLVKVEGTPLADAAELDWTEFVRTIAVARITMPKSYVRLSAGRQGMSEEMQAMCFMAGANSIFYGDKLLVTGNPEEDGDQRLMAKLDLEPETEENRYRAE

SEQ ID NO: 128687 - DNA, 1053 bp, Neisseria meningitidis MC58
  CDS (1)..(1053): transl_table=11
atgaccgtatcccccgtcgccttgcgccgtaagaccgagtgcaagcctcatcccaccgcgcgctattggaaaaaatgcgatgtcgaagccctgttcggacttcccttcctcgacctcatttaccaagccgccgaaatccaccgccaaaatttcaacccgcgcgaaatccagctttccacgctgttgtccatcaaaaccggcggttgtcccgaagactgcgcctattgtccgcaatcggcgcaccacaataccaatctgggcaaagagcagatgatggatgtggatgaaatcgtcgaaaaagccaaaatcgccaaatcgcgcggcgcaagccggttttgtatgggcgcggcgtggcgcggccctaaacccaaagacgtggagacggtttccgcaatcatcaaagccgtcaagggcttgggtatggaaacctgcggcacgttcggtatgctcgaagaaggtatggcggaagacttgaaagaggcgggcttggattattacaaccacaacctcgacaccgaccccgaccgctacaacgacatcatccacacccgccaacacgaagaccgaatggacaccttgggcaaagtccgcaacgccggtttgaaagtctgctgcggcggcatcgtcgggatgaacgaaacccgcgccgaacgtgccgggctgattgccagtctcgccaatctcgacccgcagcccgaaagcgtgccgattaaccggttggtcaaagtggaaggcacgccgcttgccgatgccgaagatttggactggacggaatttgtccgcaccatcgccgtggcgcggattacgatgccgcaaagttatgtccggctgtcggcagggcgcagcaatatgcctgaagcaatgcaggcgatgtgctttatggcgggcgcgaactcgattttttacggcgacaagctgctgaccacgggcaatcctgatgaggacggcgacagaatcctgatggaaaagctcaacctgtatcccttgcagtttgaaccggaaggcgaggtcgccgaagtggaaaaagcctctgggattaaagtggattattga

SEQ ID NO: 128688 - protein, 350 aa, Neisseria meningitidis MC58
MTVSPVALRRKTECKPHPTARYWKKCDVEALFGLPFLDLIYQAAEIHRQNFNPREIQLSTLLSIKTGGCPEDCAYCPQSAHHNTNLGKEQMMDVDEIVEKAKIAKSRGASRFCMGAAWRGPKPKDVETVSAIIKAVKGLGMETCGTFGMLEEGMAEDLKEAGLDYYNHNLDTDPDRYNDIIHTRQHEDRMDTLGKVRNAGLKVCCGGIVGMNETRAERAGLIASLANLDPQPESVPINRLVKVEGTPLADAEDLDWTEFVRTIAVARITMPQSYVRLSAGRSNMPEAMQAMCFMAGANSIFYGDKLLTTGNPDEDGDRILMEKLNLYPLQFEPEGEVAEVEKASGIKVDY

SEQ ID NO: 128689 - DNA, 1041 bp, Escherichia coli O157:H7 EDL933
  CDS (1)..(1041): transl_table=11
  misc_feature (376)..(376): k is g or t
atggctcaccgcccacgctggacattgtcgcaagtcacagaattatttgaaaaaccgttgctggatctgctgtttgaagcgcagcaggtgcatcgccagcatttcgatcctcgtcaggtgcaggtcagcaccttgctgtcgattaagaccggagcttgtccggaagattgcaaatactgcccgcaaagctcgcgctacaaaaccgggctggaagccgagcggttgatggaagttgaacaggtgctggagtcggcgcgcaaagcgaaagcggcaggatcgacgcgcttctgtatgggcgcggcgtggaagaatccccacgaacgcgatatgtcatacctggaacaaatggtgcagggagtaaaagcgatggggctgkaggcgtgtatgacgctgggtacgttgagtgaatctcaggcgcagcgccttgcgaatgccgggctggattactacaaccataacctcgacacctcgccggagttttacggcaatatcatcaccacacgtacttatcaggaacgccttgatacgctggaaaaagtgcgcgatgccgggatcaaagtctgctcaggtggcattgtgggtttaggcgaaacggtaaaagatcgcgccggattattactgcaactggcaaacctgccgacgccgccggaaagcgtgccaatcaacatgctggtgaaggtgaaaggtactccactggcagataacgatgatgtcgatgcctttgattttattcgcaccattgccgtagcgcggatcatgatgccgacctcttacgtgcgcctttctgccggacgcgagcagatgaacgaacagactcaggcgatgtgctttatggcaggcgcaaactcgattttctacggttgcaaactgctaaccacgcccaatccggaagaagataaagacctgcaactgtttcgcaaactggggctaaatccgcagcaaactgccgtgctggcaggggataacgaacaacagcagcgtctggagcaggcactgatgaccccggacactgacgaatattacaacgcggcagcactatga

SEQ ID NO: 128690 - protein, 346 aa, Escherichia coli O157:H7 EDL933
  misc_feature (126)..(126): The Xaa at location 126 stands for Stop, or Glu.
MAHRPRWTLSQVTELFEKPLLDLLFEAQQVHRQHFDPRQVQVSTLLSIKTGACPEDCKYCPQSSRYKTGLEAERLMEVEQVLESARKAKAAGSTRFCMGAAWKNPHERDMSYLEQMVQGVKAMGLXACMTLGTLSESQAQRLANAGLDYYNHNLDTSPEFYGNIITTRTYQERLDTLEKVRDAGIKVCSGGIVGLGETVKDRAGLLLQLANLPTPPESVPINMLVKVKGTPLADNDDVDAFDFIRTIAVARIMMPTSYVRLSAGREQMNEQTQAMCFMAGANSIFYGCKLLTTPNPEEDKDLQLFRKLGLNPQQTAVLAGDNEQQQRLEQALMTPDTDEYYNAAAL

SEQ ID NO: 128691 - DNA, 1026 bp, Xylella fastidiosa 9a5c
  CDS (1)..(1026): transl_table=11
atgtcctctatcatccgctacgactggactgccgaagagttacatgcgctgttcgatttgtcgttgccagaacttctttatcgggccgctagtgtgcatcgtcagcatttcgatcctgctgagattcaggtgtctacattgttgtcggttaagactggcggctgtccggaagattgttcttattgtccacaggcgcagcgttatgacactggtgtgacagcgcagaagttgatggacgttgatgcagtcgttgcgaaggcacgacaagcgaagttggccggtgcgtcccgtttttgcatgggggccgcttggcgctcacccaaggatcgggatattccaaaaattgcggcgatgattcgggaagttaaagcacttggcctggaaacgtgtgccacgctaggcatgctcaatacgtgtcaggcgcaggcgctcaaggatgctggtctggattactacaatcataatgtggatacatcgccggatttttacgattcggtcatccacactcggcaatatcaggatcggctggatactttggcccatgtgcgtgatgttggtttgaaaacgtgttgtggtggcattgtcggcatgggcgagacgcgtcagcatcgcgttggtttgctgctgactctagctactttgccagcgcatcctgattctgtgccggtcaatcttttggttcaagtagctgggactcctctgcatggtacacagacgcttgatccgtttgagtttgtacgcatgattgcagtggcacggatcactatgcccaggtcgatggtacgtctgtccgcagggcgggagtcgatgagtgatgaattacagttgctttgctttatggctggtgccaactcgattttctacggtgagaaactgttgaccacggctaatccggagactgaacgggatcaagctctgttccagcgcctgggattgcgtccaatgcatctcatggagaatgtttctaaccaagatcagcatcacggtaatgtacatgctgatatcgcttgcaaacatgttgtttga

SEQ ID NO: 128692 - protein, 341 aa, Xylella fastidiosa 9a5c
MSSIIRYDWTAEELHALFDLSLPELLYRAASVHRQHFDPAEIQVSTLLSVKTGGCPEDCSYCPQAQRYDTGVTAQKLMDVDAVVAKARQAKLAGASRFCMGAAWRSPKDRDIPKIAAMIREVKALGLETCATLGMLNTCQAQALKDAGLDYYNHNVDTSPDFYDSVIHTRQYQDRLDTLAHVRDVGLKTCCGGIVGMGETRQHRVGLLLTLATLPAHPDSVPVNLLVQVAGTPLHGTQTLDPFEFVRMIAVARITMPRSMVRLSAGRESMSDELQLLCFMAGANSIFYGEKLLTTANPETERDQALFQRLGLRPMHLMENVSNQDQHHGNVHADIACKHVV

SEQ ID NO: 128693 - DNA, 1020 bp, Agrobacterium tumefaciens str. C58
  CDS (1)..(1020): transl_table=11
atggaccagcttgcgacgcaaattgacggaaaaccagcctcgattccggcggttgaaaccagctcctctcttgaggaggcaaaaattatctataatttgccatttaacgacctgctattccgtgcgcagcaggtgcaccgctgtcatttcgacgcgaacgcgatccagatgagccggctcttgtcgatcaagactggcggctgccctgaagattgcagctattgcagccagtccgcccgcaatccgactggtctcaaggcttccaagctcatggaagtggaacgggtgctggccgaggcgcgcaaggcgaaggagggcggggcgacgcgttattgcatgggggcggcctggcgtaatcctaaggagcgcgacatggaggccgtggtcgccatggtcgagggcgtgaaggcgctcgacatggaaacctgcatgacgctcggcatgctgacgccggaacaatccgaacggctggccgatgccggcctggactattacaatcacaacgtcgatacgtcagagcggttttattccgagatcatcaccacccgcaccttcgaggaccggctggagacgctcgccaatgtccgcgatgccggcatcaaggtctgtgccggtggtattctcggcatgggggaaacggtcgaagaccggatttcgatgctggtaacgcttgccaacctgccggttccgccggaaagcgtgccgatcaacatgctgatcccgatcccgggctcgaaactggccaatgccgatcccgtcgacccgatcgattttgtgcgcaccattgcgctcgcgcgcatcctgatgccgcgttcgcatgtgcggctttcggccgggcgcacggaaatgagtgatgagacgcaggcgctgtgtttcctcgccggcgccaattccatcttcatcggcgaaacgctgctgacggcagataatccgggggaggatcacgatacggcgctcttccggcggctcggcctgaagccgatggagctgcaatcttccgaggcgggaggctgccggtga

SEQ ID NO: 128694 - protein, 339 aa, Agrobacterium tumefaciens str. C58
MDQLATQIDGKPASIPAVETSSSLEEAKIIYNLPFNDLLFRAQQVHRCHFDANAIQMSRLLSIKTGGCPEDCSYCSQSARNPTGLKASKLMEVERVLAEARKAKEGGATRYCMGAAWRNPKERDMEAVVAMVEGVKALDMETCMTLGMLTPEQSERLADAGLDYYNHNVDTSERFYSEIITTRTFEDRLETLANVRDAGIKVCAGGILGMGETVEDRISMLVTLANLPVPPESVPINMLIPIPGSKLANADPVDPIDFVRTIALARILMPRSHVRLSAGRTEMSDETQALCFLAGANSIFIGETLLTADNPGEDHDTALFRRLGLKPMELQSSEAGGCR

SEQ ID NO: 128695 - DNA, 1026 bp, Caulobacter crescentus CB15
  CDS (1)..(1026): transl_table=11
atgagtgagatcaccgcttccccccgccacgactggacgcttgccgaggtcgaggccctgttcgccctgccgttcatggagctggtgttccaggcggccaacgtgcaccgcgcgcacttcgatccctccgagatccagctgtcgcagcttttgtcggtcaagaccggcggctgcgccgagaactgcggctattgcagccagtcggcccatttcaagaccggtctgaaggccgacaagctgatggccgccgacgacgtggtggccaaggcccgcgcggcccgcgacggcggcgcccagcgcttctgcatgggcgcggcctggcgcgagctgaaggaccgcgacctgcccaagctgaccgaaatgatcggcgaggtgaaggcgctgggcctggagacctgcgccaccctgggcatgctgaccgctgatcaggccaaggccctgaaggccgccggcctcgactactacaaccacaacctcgacaccggccccgactactacaaggacgtggtgaccacgcgcacctatcaggagcgcctcgacaccctggcccatgtgcgcgacgccggcatgagcacctgctgcggcggcattgtcggcatgggcgagcagcgccgcgaccgcgccggcctcctgcaccagctggccaccctgccggcccaccccgacagcctgccgatcaatggcctcgtccccatcagcggcaccccgctgggcgacaaggtgctgtcggaaggcaaggccatcgacgccatcgaattcgtccgcaccatcgccgtggcccgcatcgtctgccccaagtcgatggtccgcctgtcggccggccgcgagggcatgagccgcgagctgcaggccctgtgcttcatggccggcgccaactcgatcttcgtcggcggcaagctcttgaccaccccgctgcccggccaggacgaggacagccagctgttccaggacctggacttgaagcccatgggcggcgccgtccgggtcgaggccaaggccgacgccgcgatggtggcggcggagtag

SEQ ID NO: 128696 - protein, 341 aa, Caulobacter crescentus CB15
MSEITASPRHDWTLAEVEALFALPFMELVFQAANVHRAHFDPSEIQLSQLLSVKTGGCAENCGYCSQSAHFKTGLKADKLMAADDVVAKARAARDGGAQRFCMGAAWRELKDRDLPKLTEMIGEVKALGLETCATLGMLTADQAKALKAAGLDYYNHNLDTGPDYYKDVVTTRTYQERLDTLAHVRDAGMSTCCGGIVGMGEQRRDRAGLLHQLATLPAHPDSLPINGLVPISGTPLGDKVLSEGKAIDAIEFVRTIAVARIVCPKSMVRLSAGREGMSRELQALCFMAGANSIFVGGKLLTTPLPGQDEDSQLFQDLDLKPMGGAVRVEAKADAAMVAAE

SEQ ID NO: 128697 - DNA, 1041 bp, Salmonella enterica subsp. enterica serovar Typhi str. CT18
  CDS (1)..(1041): transl_table=11
atggctcgccacccacgctggacactgtcgcaagtaaccgaattatttgaaaaaccactgctggaattgctgtttgaagcgcagcaaattcatcgccagcatttcgatccgcagcaggtacaggttagtacgctgttgtcgatcaaaaccggcgcctgcccggaggattgtaaatactgcccgcagagctcgcgctataaaaccgggctggaagccgagcgtttaatggaggtagagcaggtactggactccgcccgtaaagcgaaaaacgccggttcgacccgcttctgtatgggggcggcctggaagaatccgcatgaacgcgatatgccttatctggagaagattgtacagggcgtcaaagcgatggggctggaaacctgtatgacgctcggcatgttgaacgagagccaggcgcagcgtctggctaacgccgggctggattactacaaccacaacctcgatacctcgccggagttttacggcaatatcatcactacccgtacctatcaggagcgcctcgacacgctggaaaaagtccgtgaagcagggattaaagtgtgctccggcggcattgtgggtctgggcgaaacggttaccgatcgcgccggactgttgttgcagttggcgaacctgcctacgccgccggaaagcgtgccaatcaacatgctggtgaaggtaaaaggcacgccgcttgcggataacgatgacgtggatgcgtttgattttattcgtactatcgccgtagcgcgcatcatgatgccgacctcatacgtgcgtctttccgcaggacgtgaacagatgaacgagcagacccaggcgatgtgctttatggccggggcgaactcgattttctatggctgcaaattgttaactacgccaaatccggcagaggacaaggatctgcagttattccgtaagctggggctgaatccgcagcagaccagggtgctggcgggcgataacgagcagcagcaacgtctggagcagacgctgatgacgcctgacaccgatgattattacaacgcggcagccttatga

SEQ ID NO: 128698 - protein, 346 aa, Salmonella enterica subsp. enterica serovar Typhi str. CT18
MARHPRWTLSQVTELFEKPLLELLFEAQQIHRQHFDPQQVQVSTLLSIKTGACPEDCKYCPQSSRYKTGLEAERLMEVEQVLDSARKAKNAGSTRFCMGAAWKNPHERDMPYLEKIVQGVKAMGLETCMTLGMLNESQAQRLANAGLDYYNHNLDTSPEFYGNIITTRTYQERLDTLEKVREAGIKVCSGGIVGLGETVTDRAGLLLQLANLPTPPESVPINMLVKVKGTPLADNDDVDAFDFIRTIAVARIMMPTSYVRLSAGREQMNEQTQAMCFMAGANSIFYGCKLLTTPNPAEDKDLQLFRKLGLNPQQTRVLAGDNEQQQRLEQTLMTPDTDDYYNAAAL

SEQ ID NO: 128699 - DNA, 1008 bp, Nostoc sp. PCC 7120
  CDS (1)..(1008): transl_table=11
atgtcggtgggaagaatacgctacgattggcacaaagcagagattcgcgcagtatatgatacgccattgctagagttgatttatcaagctgctagtgtacatcggcagtttcataatcctaaacaaatacaagtatgtaagctgatatcgattaaaacaggtgcgtgtcctgaagattgtagttactgcgcccagtcttctcgttatcaaactgaagtcaaaccccaagcactccttgataagcaaacggttgtggaaattgcccaaaacgctaaacaaaagggtgtcagccgtgtctgtatgggtgcggcttggcgggaggtgcgagataattctcaatttgaccgagttctagaaatggtcaaagatgttacagacatgggtttagaagtgtgctgtactctgggaatgctgacatctgagcaagccaagaagttggagacagcaggattgtatgcttataaccataacttggatacttcctctgactactacagcactattattaccacgagaacttatggcgatcgcctaaacactatcgaaaacgtccgacagactaatgttaccgtatgttctggcggcattctcggtttaggtgaaagcatagatgaccgtgtggcaatgttacaaaccttagccaccctcaatcctcatccagaatccgtaccaattaatattctctcccaagtagaaggcacacctctagaagatcaaccagatgtacctgtttgggatgtagtcagaatgattgcaactgcacgtatagttatgcccacatcggatgtgcgtttaagtgctggtagggcgagactttctcaagtggaacaagccttttgttttatggcaggagcaaattccatcttttccagcgacgataataaaatgctgacggtgacaacaccttgtccagattacgatgctgatcaggaaatgctcaacctactcggcttagaaatgcgtcctccgtcccaaagaccacaacctgtagtcatgggtaattcataa

SEQ ID NO: 128700 - protein, 335 aa, Nostoc sp. PCC 7120
MSVGRIRYDWHKAEIRAVYDTPLLELIYQAASVHRQFHNPKQIQVCKLISIKTGACPEDCSYCAQSSRYQTEVKPQALLDKQTVVEIAQNAKQKGVSRVCMGAAWREVRDNSQFDRVLEMVKDVTDMGLEVCCTLGMLTSEQAKKLETAGLYAYNHNLDTSSDYYSTIITTRTYGDRLNTIENVRQTNVTVCSGGILGLGESIDDRVAMLQTLATLNPHPESVPINILSQVEGTPLEDQPDVPVWDVVRMIATARIVMPTSDVRLSAGRARLSQVEQAFCFMAGANSIFSSDDNKMLTVTTPCPDYDADQEMLNLLGLEMRPPSQRPQPVVMGNS

SEQ ID NO: 128701 - DNA, 1083 bp, Ralstonia solanacearum GMI1000
  CDS (1)..(1083): transl_table=11
atgcaacacgccccgctcaacttcgttcccgatgccgccaaggtgccgcccacgcccggccagagcccgaacgcgcgctggagccgcgaggccatcgaagcgctgttcgcgctgccgttcaacgacctgctgttccaggcgcagcaggtgcaccgcgcccacttcgacgccaacgcggtgcagctctccacgctgctgtcgatcaagaccggcggctgccccgaggattgctcctactgcccgcaatcggcccgctacgacaccggcgtcgaggccgagaagctgatgccgatcgacaccgtgctcgaagccgccgcccgcgccaagcagaacggcgccagccgcttctgcatgggcgcggcctggcgcaaccccaagccgcaccagctcgatgccgtggccgacatggtgcgcggggtcaaggcgatgggcctggagacctgcgtcacgctcggcatgctcaagcaggagcaggcccagcagctcaaggatgccggcctcgactactacaaccacaacctcgacaccgcgcccgagttctacggcgagatcatcaccacgcgcacctaccaggaccgcctcgacaccctcgagcacgtgcgcgacgccggcatcaacgtgtgctgcggtggcatcgtcggcctgggcgaatcgcgccacgagcgcgcggggctggtcgccgagctggccaacatggagccgtatccggattcggtgccgatcaacaacctggtcaaggtcgaaggcacgccgctggcgggcaacgaagcgctcgacccattcgagttcgtgcgcaccatcgccgtggcgcggatcaccatgcccaaggccatggtgcggctgtccgccggccgcgaagcgatggacgacgcgctgcaggcgctgtgcttcatggcgggggccaactcgatcttctacggcgagaagctgctgacgaccgacaacccggaagccgatgccgatcgcaagctgctggcgcggctggggatgcgggtggaggtgcaggatcatctgcatcaggcggagggggcgcagcattcgcattcgtcgcattgtcatatcgacattacgccggctgattga

SEQ ID NO: 128702 - protein, 360 aa, Ralstonia solanacearum GMI1000
MQHAPLNFVPDAAKVPPTPGQSPNARWSREAIEALFALPFNDLLFQAQQVHRAHFDANAVQLSTLLSIKTGGCPEDCSYCPQSARYDTGVEAEKLMPIDTVLEAAARAKQNGASRFCMGAAWRNPKPHQLDAVADMVRGVKAMGLETCVTLGMLKQEQAQQLKDAGLDYYNHNLDTAPEFYGEIITTRTYQDRLDTLEHVRDAGINVCCGGIVGLGESRHERAGLVAELANMEPYPDSVPINNLVKVEGTPLAGNEALDPFEFVRTIAVARITMPKAMVRLSAGREAMDDALQALCFMAGANSIFYGEKLLTTDNPEADADRKLLARLGMRVEVQDHLHQAEGAQHSHSSHCHIDITPAD

SEQ ID NO: 128703 - DNA, 960 bp, Clostridium perfringens str. 13
  CDS (1)..(960): transl_table=11
atggattttattttaaaaatgaaggataagtctttaaaaaatataaaattaactagagaagaagggttaaggctttttaatagtaatctagaggaattgattaaagaagctaacaacataagaaaagagattcatggtgatggtattgatttatgttcaataattaatgggaaaagtggaaggtgtggagaggattgtgctttttgtgcccaatctaagtatcataagactaatataagtgaataccctcttcttgattatgaaaagataaaaaaagttgctaaggaaaatgaagatgaaggagttcatagattttctatagttacctcaggaagaggactttatggtgaggagtttgagagagtaattacttattattcaaatttaaataaagagcttaaaataaatctttgtgcttcccatggaataataaataaagagtctttaataaaattaaagaaagctggagtaaaaagatatcatcataatttagagacatctagaaactactatgacaaaatatgcaaaactcattcttatgaggaaagagtaaagactataaaaaatgctaaggaagctggtttagaagtatgctcaggaggaataattggccttggagaaacaattttagatagaatagatttagctattacccttagagaattagaaataaaatcaattccaataaatgttttaagtgctattaagggaactaagcttcagaatatgattcctttaaatgaagaagaaattcttaggacaatagctgtttttagatttataaatccagaagctaaaataagattggcaggagggaggtatttgcttaaaaactttggtgaaaatgcttttaaagcaggagcaaatgctactataacagggaatttattaactacatgtggaaataagataaaagacgataaaagattaatagagaatattgggatgaggattttttag

SEQ ID NO: 128704 - protein, 319 aa, Clostridium perfringens str. 13
MDFILKMKDKSLKNIKLTREEGLRLFNSNLEELIKEANNIRKEIHGDGIDLCSIINGKSGRCGEDCAFCAQSKYHKTNISEYPLLDYEKIKKVAKENEDEGVHRFSIVTSGRGLYGEEFERVITYYSNLNKELKINLCASHGIINKESLIKLKKAGVKRYHHNLETSRNYYDKICKTHSYEERVKTIKNAKEAGLEVCSGGIIGLGETILDRIDLAITLRELEIKSIPINVLSAIKGTKLQNMIPLNEEEILRTIAVFRFINPEAKIRLAGGRYLLKNFGENAFKAGANATITGNLLTTCGNKIKDDKRLIENIGMRIF

SEQ ID NO: 128705 - DNA, 1224 bp, Streptomyces coelicolor A3(2)
  CDS (1)..(1224): transl_table=11
atggacctgctgaacacgctggtggacaaggggcttcggcgcgagacgccgacccgcgaggaggcgctcgccgtcctcgtcacttccgacgacgacctgctcgacgtggtggccgcggccggaaaggtgcgccgccactggttcggccgacgggtgaaactcaactacctcgtcaacctcaagtcgggcctgtgccccgaggactgctcctactgctcgcagcggctgggctccaaggcggagatcctcaagtacacctggctcaagcccgaccaggcctcggcggccgccgcggccggagtgtccgggggcgccaagcgcgtgtgcctggtggccagcggacgcggtccgaccgaccgggacgtggaccgcgtctcggacaccatcaaggccatcaaggagcagaacgagtccgtggaggtctgcgcctgcctcgggctgctctccgacggccaggcggagcggctgcgggaggccggggccgacgcctacaaccacaacctcaacacctccgagtcgacgtacggcgacatcaccaccacgcacacgtacgccgaccgggtggacaccgtgaacaaggcacacgcggccgggctgtccgcctgctcggggctcatcgcgggcatgggcgagagcgacgaggacctggtcgacgtggtcttctcgctgcgcgaactggacccggactcggtgccggtcaacttcctgatcccgatggagggcacgccgctggccaaggagtggcacctgaccccgcagcggtgcctgcgcatcctggcgatgacgcggttcgtctgcccggacgtcgaagtgcgcatcgccggcgggcgcgaggtccatctgcgcacgatgcagccgctcgcgctgcacctggccaactcgatcttcctcggcgactacctcaccagcgagggccaggcgggccacgcggacctggagctgatcgccgacgccggcttcgaggtggagggcgccggcgaggtcacgctgccggagcaccgcgcgtcggtgcggggcgggggctgcggctcgcacgagggtggcggcgcctgcggctcgcacgacggcgccgacggcgacgcgggctgcgggtcgcacgccggtggcggagtgtgcgcccccgcgcccgcggccacgacgccgcgccccgccgaggagccccgcacggacctggtggcggtacgccgccgcggcgccgggacggacctcgcgcccaatgcctga

SEQ ID NO: 128706 - protein, 407 aa, Streptomyces coelicolor A3(2)
MDLLNTLVDKGLRRETPTREEALAVLVTSDDDLLDVVAAAGKVRRHWFGRRVKLNYLVNLKSGLCPEDCSYCSQRLGSKAEILKYTWLKPDQASAAAAAGVSGGAKRVCLVASGRGPTDRDVDRVSDTIKAIKEQNESVEVCACLGLLSDGQAERLREAGADAYNHNLNTSESTYGDITTTHTYADRVDTVNKAHAAGLSACSGLIAGMGESDEDLVDVVFSLRELDPDSVPVNFLIPMEGTPLAKEWHLTPQRCLRILAMTRFVCPDVEVRIAGGREVHLRTMQPLALHLANSIFLGDYLTSEGQAGHADLELIADAGFEVEGAGEVTLPEHRASVRGGGCGSHEGGGACGSHDGADGDAGCGSHAGGGVCAPAPAATTPRPAEEPRTDLVAVRRRGAGTDLAPNA

SEQ ID NO: 128707 - DNA, 1083 bp, Thermosynechococcus elongatus BP-1
  CDS (1)..(1083): transl_table=11
atgaactccatcagcgcatccgcgatagtcttgtggaaaaatacgccgttacccttcgtagttaagagctaccccatgagtactttgacgaccgactggcagcaccttgccaatttggcccttgccgatgagtgcctcagccgcgatcaggcgcgagcggtgctccaagcccccgatacagaactcctgaatcaactggcggcagcctatcgggtccgctaccactactggggcaatcgggtacggctgcactatctcctgaatgcccaaagtggtctgtgtccggaagactgtcactactgctcccagtccaaaatttcgacggctgagattgaaaagtatcccctcctctcccaggaaaaaatccttgctgctgctgatcgcgctgcccacctcaaggccggtacattttgcatggtgatttccgggcgatcgcccagtgaaaaggtctttgagcaagtgctcgccgctattcgagcggtcaaggaacgctatcccctgaaaatttgtgcctgcttgggcttactcacccctgagcaaacggcacggctggcggcagcgggtgtagatcgcgtcaatcacaacctgaatacctcggaaaacttctacagtgaaatttgtaccacccacacctttagggatcgcgaccagaccttagccaatatccaagccgctggaattacaacctgctctgggggcatcttaggcatgggggaatccgatgacgatgtgattgatcttgccctcttcctgcggcagcgtcaggtcaccagtgtaccagtgaactttttgattcccattccggggacgccccttggcgaacagcacaccctcaatccgcgccactgtttacgcattctcgtgctgtttcgtttcctcttgccgcgccaagagatccgcattgccggtggccgcgaagtgcacctgcgatcgctccaaccccttggcctctacgccgccaactctatgtttattggcgactatctgaccacccccgggcaagctccccaccaagattggcaaatgattgccgatgccggctttgtgcttgaagaccccgaagggcgggcgatcgccccgtga

SEQ ID NO: 128708 - protein, 360 aa, Thermosynechococcus elongatus BP-1
MNSISASAIVLWKNTPLPFVVKSYPMSTLTTDWQHLANLALADECLSRDQARAVLQAPDTELLNQLAAAYRVRYHYWGNRVRLHYLLNAQSGLCPEDCHYCSQSKISTAEIEKYPLLSQEKILAAADRAAHLKAGTFCMVISGRSPSEKVFEQVLAAIRAVKERYPLKICACLGLLTPEQTARLAAAGVDRVNHNLNTSENFYSEICTTHTFRDRDQTLANIQAAGITTCSGGILGMGESDDDVIDLALFLRQRQVTSVPVNFLIPIPGTPLGEQHTLNPRHCLRILVLFRFLLPRQEIRIAGGREVHLRSLQPLGLYAANSMFIGDYLTTPGQAPHQDWQMIADAGFVLEDPEGRAIAP

SEQ ID NO: 128709 - DNA, 1059 bp, Pseudomonas putida KT2440
  CDS (1)..(1059): transl_table=11
atgagcgccagcacaactgcaacaacacgtcacgattgggccctggccgaggtcaaggcgctgttccagcaaccgttcaatgacttgctgttccaggcgcagaccgtgcaccgcgcgcatttcgaccccaaccgcgtgcaggtttcgacgttgctgtcgatcaagaccggcgcctgcccggaagattgcaaatattgtccgcagtccggtcactacaacaccggcctggagaaacagaagctgatggaagtgcagaaggtgctggaagaagctgcccgcgccaaagccatcggttctacccgtttctgcatgggggcggcgtggaagcacccgtcggccaaagacatgccctacgtgctggagatggtcaaaggcgtcaaggccatgggcctggaaacctgcatgaccctcggcaaactcgaccaggagcagaccaaggccctggcccaggctggtctggactactacaaccacaacctcgacacctcgccggagttctacggcagcatcatcaccacgcgtacctacagcgagcgcctgcagaccctggcctacgtgcgcgacgccgggatgaaaatctgctctggtggcattctgggcatgggtgaatcgctggatgaccgcgccggcctgctgatccagctggccaacctgccggaacacccggagtcggtgccgatcaacatgctggtcaaggtggccggcacgccgctggctgaggaagaggacgtcgacccgttcgactttatccgtatgctggccgtggcccggatcctcatgcccaagtctcacgtgcgcctgtccgccggccgcgagcagatgaacgagcagatgcaggccctggccttcatggcgggcgccaactcgatcttctacggcgaaaagctgctgaccaccgccaacccccaggccgacaaggacatgcagctgttcgcacgcctgggcatcaagcccgaagcgcgtgaagagcacgccgacgaagtgcaccaggcagccatcgagcaagcgctggtcgagcagcgcagcagcgagatgttctacgacgccgcgacagcctga

SEQ ID NO: 128710 - protein, 352 aa, Pseudomonas putida KT2440
MSASTTATTRHDWALAEVKALFQQPFNDLLFQAQTVHRAHFDPNRVQVSTLLSIKTGACPEDCKYCPQSGHYNTGLEKQKLMEVQKVLEEAARAKAIGSTRFCMGAAWKHPSAKDMPYVLEMVKGVKAMGLETCMTLGKLDQEQTKALAQAGLDYYNHNLDTSPEFYGSIITTRTYSERLQTLAYVRDAGMKICSGGILGMGESLDDRAGLLIQLANLPEHPESVPINMLVKVAGTPLAEEEDVDPFDFIRMLAVARILMPKSHVRLSAGREQMNEQMQALAFMAGANSIFYGEKLLTTANPQADKDMQLFARLGIKPEAREEHADEVHQAAIEQALVEQRSSEMFYDAATA

SEQ ID NO: 128711 - DNA, 1053 bp, Vibrio vulnificus CMCP6
  CDS (1)..(1053): transl_table=11
gtggaagtacgtcataactggactcatgcgcaagttcgtgagttgatggaaatgccttttatggatttgttgtttgaagcgcagcaagttcatcgtcaataccaccctaagaactatgtgcaagtgagtaccttgctttcgattaaaaccggtgcttgtccagaagattgcaaatactgcccgcaaagcgctcgttatcaaacggatgttgaaaaagagcgattaatgaaagtggagcgtgttctggatgccgcgcaaaaggccaaaaatgccggttcgactcgtttttgtatgggagcagcttggaagaatccgaaagaacgcgacatgccgctgctgactgacatgatcaaaggcgtcaaagatatggggctggaaacctgtatgactctgggcatgttaaccccagaacaagctaagcaactggcaagcgcgggtttggattattacaaccacaacctcgatacctcaccggagtattacggtaacattattaccacacgcacttatcaagatcgcctagataccttatctcatgtccgtgacgcaggcatgaagatctgctctggcggtatcatcggtatgggggaaagcgcgaatgaccgcgctgggttgcttgttgagttggccaatctgcctacgcatccagaaagtgttcctatcaacatgctggttaaggtgaaagggacacctttagaaacggctgaagaggttgacccgtttgatttcatccgcctaatcgccgttgctcgtattatgatgccgacctcagccgttcgtttgtcggcagggcgtgaaaacatgaatgagcaaatgcaaaccttgtgttttatggcgggcgccaattcaatcttttacggctgtaagctgctcacaacaccaaacccttccgaagataaagacatgcagctgtttaacaagctgggtattaacagtcagcaagtctcacaaaaacctgatgaaattacagaaaacgaattgttagatcgcgtagtcgaaagcgtggctgctcgcccaacaaaagacgatctgttttatgacgcaagcctttaa

SEQ ID NO: 128712 - protein, 350 aa, Vibrio vulnificus CMCP6
MEVRHNWTHAQVRELMEMPFMDLLFEAQQVHRQYHPKNYVQVSTLLSIKTGACPEDCKYCPQSARYQTDVEKERLMKVERVLDAAQKAKNAGSTRFCMGAAWKNPKERDMPLLTDMIKGVKDMGLETCMTLGMLTPEQAKQLASAGLDYYNHNLDTSPEYYGNIITTRTYQDRLDTLSHVRDAGMKICSGGIIGMGESANDRAGLLVELANLPTHPESVPINMLVKVKGTPLETAEEVDPFDFIRLIAVARIMMPTSAVRLSAGRENMNEQMQTLCFMAGANSIFYGCKLLTTPNPSEDKDMQLFNKLGINSQQVSQKPDEITENELLDRVVESVAARPTKDDLFYDASL

SEQ ID NO: 128713 - DNA, 996 bp, Bradyrhizobium japonicum USDA 110
  CDS (1)..(996): transl_table=11
atggatgctgctgtgcaagtccaacgaaagaaagctagcaacggggcgcaggttcgtaatcattggaacgtcgaagaggctaaggcgctctacgaccttccttttgccgacctgatgcttcaggcgcagcgcgctcatcgcaagaacttcgatccaaaccacgtcgaaactgcgagcctgctcagcatcaagaccggcggctgtccggaggactgcggctactgctcgcaaagcgcgcattacgcgaccggcctgaaagcgacccgtctgatgcgttgcgccgatgtggttgcgaccgcacagcgcgcgaaggatgccggcgctacgcgcttctgcatggccgcggcctggcgcacgccaaaagatcgcgatcttgattccgtctgcgacatggtcaacgcggtcaaaggtctcggcatggaaacgtgtgtcacgctcggcacgctgacaccgaagcatgccgcgcgcctcgccgaggccggccttgacttctacaatcacaacgtcgacacatcgcccgagttttacagcaagatcatcaccacccgcagcctccaggaccgcatcgatacgctggcgcatgtgcgcgatgccggcatcaagatctgctgcggcgggattatcggcatgggcgagcgcgtcgaggaccgcctaggtatgctcgtgttgctcgccaatcttcccaactatcccgaaagcgtgccgatcaacctgtggaacaagattgagggcgtaccggtggaagacaccgcggagcctcccgatccgatcgcgctggtccggctgctggcgaccgcgcgggtcatgatgccgaggagtgtggttcgcttgtccgccgggcggcaatacatgaccgatgaattgcaggcgctttgcttcttggccggcgcaaattcaatcttcgtcggcgacgtgctcttgaccaccaataacccgaaagttgatcgcgacgcggatctgctggcccggctcggcatcacgtccgggctcgcctga

SEQ ID NO: 128714 - protein, 331 aa, Bradyrhizobium japonicum USDA 110
MDAAVQVQRKKASNGAQVRNHWNVEEAKALYDLPFADLMLQAQRAHRKNFDPNHVETASLLSIKTGGCPEDCGYCSQSAHYATGLKATRLMRCADVVATAQRAKDAGATRFCMAAAWRTPKDRDLDSVCDMVNAVKGLGMETCVTLGTLTPKHAARLAEAGLDFYNHNVDTSPEFYSKIITTRSLQDRIDTLAHVRDAGIKICCGGIIGMGERVEDRLGMLVLLANLPNYPESVPINLWNKIEGVPVEDTAEPPDPIALVRLLATARVMMPRSVVRLSAGRQYMTDELQALCFLAGANSIFVGDVLLTTNNPKVDRDADLLARLGITSGLA

SEQ ID NO: 128715 - DNA, 1026 bp, Xylella fastidiosa Temecula1
  CDS (1)..(1026): transl_table=11
atgtcctctatcatccgctacgactggactgccgaagagttacatgcgctgttcgatttgtcgttgccagaacttctttatcgggccgctagtgtgcatcgtcagcatttcgaccctgctgagattcaggtgtctacattgttgtcggttaagactggcggctgtccggaagattgttcttattgtccacaggcgcagcgttatgacactggtgtgacagcgcagaagttgatggacgttgatgcagtcgttgcgaaggcacgacaagcgaagttggccggtgcgtcccgtttttgcatgggggccgcttggcgctcacccaaggatcgggatattccaaaaattgcgtcgatgattcgggaggttaaagcacttggcctggaaacgtgtgccacgctaggcatgctcaatacgtgtcaggcgcaggcgctcaaggatgctggtctggattactacaatcataatgtggatacatcgccggatttttacgattcggtcatccacactcggcaatatcaggatcggctggatactttggcccatgtgcgtgatgttggtttgaaaacgtgttgtggtggcattgtcggcatgggcgagacgcgtcagcatcgcgttggtttgctgctgactctagctactctgccagcgcatcctgattctgtgccggtcaatcttttggttcaagtagctgggactcctctgcatggtacacagacgcttgatccgtttgagtttgtacgcatgattgcagtggcacggatcactatgcccaggtcgatggtacgtctttccgcagggcgggagtcgatgagtgatgagttacagttgctttgctttatggctggtgccaactcgattttctacggtgagaaactgttgaccactgctaatccggagactgaacgggatcaagctctgttccagcgcctgggattgcgtccaatgcatctcatggagaatgtttctaacaaagatcagcatcacggtaatgtacatgctgatatcgcttgcaaacatgttgtttga

SEQ ID NO: 128716 - protein, 341 aa, Xylella fastidiosa Temecula1
MSSIIRYDWTAEELHALFDLSLPELLYRAASVHRQHFDPAEIQVSTLLSVKTGGCPEDCSYCPQAQRYDTGVTAQKLMDVDAVVAKARQAKLAGASRFCMGAAWRSPKDRDIPKIASMIREVKALGLETCATLGMLNTCQAQALKDAGLDYYNHNVDTSPDFYDSVIHTRQYQDRLDTLAHVRDVGLKTCCGGIVGMGETRQHRVGLLLTLATLPAHPDSVPVNLLVQVAGTPLHGTQTLDPFEFVRMIAVARITMPRSMVRLSAGRESMSDELQLLCFMAGANSIFYGEKLLTTANPETERDQALFQRLGLRPMHLMENVSNKDQHHGNVHADIACKHVV

SEQ ID NO: 128717 - DNA, 978 bp, Clostridium tetani E88
  CDS (1)..(978): transl_table=11
atgaaaaatatcattttagaaatagaagaaaaaatttattcagatgaagacattactttcaatgaggccattacactttttcaatcaagttatgataaaaatttaaataatttattagatgcggcaaatagaattcgtaataaatttaatggaaatatagtagatctctgctcaattatgaatgctaaatccggaaggtgctctgaggattgtaaattttgtgctcaatcagaacattataatacaaatataaaaaaatataacatgataaatatgtcagatgctcttaatttagcaaaagaaaataaagaacatggaataaacagattttctttagtaactagtggaaaggcactaacaagtaatgattttgaaaaagctttagaaatatataaagagataaacaaaagagtaaatataaatctatgtgcatcattgggtattttatcctataatcaattattacagcttaaaaatgtaggagttacaatgtaccatcataatttagaaactagtagagaatactataataagatatgtacaacccactcttatgatgaaagaatagaaacaataaacaatgcaaaaaaagcaggtcttatggtatgttcaggtggaattattggtatgggtgaaactataactgatagaataaaactagcttttgagcttaaaagtcttcaaatacagtccattccgataaatattttaaaccctgtaaaaggcactcctcttgaatatactaaaagattagaacaaaatgatatattgaaaaccatagctatatttagatttataaatccaaaagcatctataagattagctgggggcagaaatcttatagataatttcggtaagggttgttttagagctggagctaatgctactatatctgggaattacttaactacatcaggtaataaaataaatgatgatattgaaatgatcaaatcactaggtttatctttagatatttaa

SEQ ID NO: 128718 - protein, 325 aa, Clostridium tetani E88
MKNIILEIEEKIYSDEDITFNEAITLFQSSYDKNLNNLLDAANRIRNKFNGNIVDLCSIMNAKSGRCSEDCKFCAQSEHYNTNIKKYNMINMSDALNLAKENKEHGINRFSLVTSGKALTSNDFEKALEIYKEINKRVNINLCASLGILSYNQLLQLKNVGVTMYHHNLETSREYYNKICTTHSYDERIETINNAKKAGLMVCSGGIIGMGETITDRIKLAFELKSLQIQSIPINILNPVKGTPLEYTKRLEQNDILKTIAIFRFINPKASIRLAGGRNLIDNFGKGCFRAGANATISGNYLTTSGNKINDDIEMIKSLGLSLDI

SEQ ID NO: 128719 - DNA, 1053 bp, Vibrio parahaemolyticus RIMD 2210633
  CDS (1)..(1053): transl_table=11
gtggaagttcgtcataactggacgcatgctgaagtgcgcgatctcatggaaaagccattcatggatctcctatttgaagcgcagcttgttcatcgtcaataccaacaaaccaaccatgttcaagtaagcacgcttctgtcgattaagacgggtgcttgtccagaagattgtaagtactgtcctcagagcgctcgttacaccacagacatcgaaaaagagcgtctgatggaagtcgaacgtgtactcgacgctgctcaaaaagcgaaaaatgcaggttcgacgcgattctgtatgggcgctgcgtggaagaacccgaaagagcgcgacatgccgcatttgaccgatatgatcaaaggcgtaaaagacatgggtttggaaacctgtatgacgttaggtatgttaacgccagagcaggcgaagcagctggcgaacgcaggtctggattactataaccacaacctcgatacgtcgcctgagttctacggcaacatcattaccactcgtacttaccaagaccgtttggatacgctgtctcacgttcgtgatgctggtatgaagatttgttcaggcggtatcatcggcatgggtgaaagtgccaacgatcgtgcaggtttgttggttgaattggcgaatcttcctacacaccctgagagcgtgccaatcaatatgctggtaaaagtgaagggtacaccgctggagactgtggacgatgttgatccgttcgactttatccgcctgattgcaatcgcacgaatcatgatgcctcaatcggctgtgcgtttgtctgctggtcgcgaaaacatgaacgaacagatgcaagccctgtgttttatggcaggtgcaaactcagtattctatggctgcaaacttctaacgaccccaaacccttctgaagacaaagacatgatgctgtttaagaagctgggtattaacagccaagaagtgtctcaaaaacctgatgaaatcgaagaaaacgaattgctggatcgcgtggtagagcgcgttgctgcacgtccaactaaagacgatcttttctacgatgccagcgtttaa

SEQ ID NO: 128720 - protein, 350 aa, Vibrio parahaemolyticus RIMD 2210633
MEVRHNWTHAEVRDLMEKPFMDLLFEAQLVHRQYQQTNHVQVSTLLSIKTGACPEDCKYCPQSARYTTDIEKERLMEVERVLDAAQKAKNAGSTRFCMGAAWKNPKERDMPHLTDMIKGVKDMGLETCMTLGMLTPEQAKQLANAGLDYYNHNLDTSPEFYGNIITTRTYQDRLDTLSHVRDAGMKICSGGIIGMGESANDRAGLLVELANLPTHPESVPINMLVKVKGTPLETVDDVDPFDFIRLIAIARIMMPQSAVRLSAGRENMNEQMQALCFMAGANSVFYGCKLLTTPNPSEDKDMMLFKKLGINSQEVSQKPDEIEENELLDRVVERVAARPTKDDLFYDASV

SEQ ID NO: 128721 - DNA, 1167 bp, Streptomyces avermitilis MA-4680
  CDS (1)..(1167): transl_table=11
atggacctgctgaacacgctggtggaaaaggggcttcggcgcgagctgccgagccgagccgaggcgctcgccgtccttgccacctccgacgacgacgtgctcgatgtggtggccgcggccggcaaggtgcgcaggcactggttcggccgacgggtgaaactcaactatctcgtcaacctcaagtcgggcctgtgccccgaggactgctcctactgctcccagcggctcggctccaaggccgagatcctgaagtacacctggctcaagccggacgaggcctcgcaggccgcggcggccgggctggccggcggcgccaagcgggtctgcctggtggccagcggccgcggcccgacggaccgggacgtggaccgggtctccgacaccatcaaggcgatcaaggaccagaacgagggcgtcgaggtgtgcgcctgcctcggtctgctctccgacggccaggccgaccggctgcgcgaggcgggcgcggacgcctacaaccacaacctcaacacgtccgaggggacgtacggggacatcacgaccacccacacgtacgccgaccgggtggagaccgtacagaaggcgcacgcggcgggcctgtcggcctgctcggggctgatcgccggcatgggcgagacggacgaggacctggtcgacgtggtctactcgctgcgcgagctggacccggactccgttccggtcaacttcctgatcccgttcgagggcaccccgctcgccaaggagtggaacctgacgcctcagcggtgtctgcgcatcctcgcgatggtccggttcgtctgcccggacgtcgaggtccgcatcgcgggcggccgcgaggtccacctccgtacgatgcagccgctcgcgctgcacctcgccaactcgatcttcctcggcgactacctcaccagcgagggccaggcgggcaaggcggacctggagatgatcgcggacgccgggttcgaggtggagggggccgaccaggtgacgctgccggagcaccgggcgccggccggcggctgcgggtctgagcagagcgcggggtgcgggtcgcacgagggcggcggagcctgcggttccgctcccgcgccgcggaccgacgaggcccgtacggacctggtcgccgtacgccgccggggtgccggaacggacctcgcgcccaatgcctga

SEQ ID NO: 128722 - protein, 388 aa, Streptomyces avermitilis MA-4680
MDLLNTLVEKGLRRELPSRAEALAVLATSDDDVLDVVAAAGKVRRHWFGRRVKLNYLVNLKSGLCPEDCSYCSQRLGSKAEILKYTWLKPDEASQAAAAGLAGGAKRVCLVASGRGPTDRDVDRVSDTIKAIKDQNEGVEVCACLGLLSDGQADRLREAGADAYNHNLNTSEGTYGDITTTHTYADRVETVQKAHAAGLSACSGLIAGMGETDEDLVDVVYSLRELDPDSVPVNFLIPFEGTPLAKEWNLTPQRCLRILAMVRFVCPDVEVRIAGGREVHLRTMQPLALHLANSIFLGDYLTSEGQAGKADLEMIADAGFEVEGADQVTLPEHRAPAGGCGSEQSAGCGSHEGGGACGSAPAPRTDEARTDLVAVRRRGAGTDLAPNA

SEQ ID NO: 128723 - DNA, 999 bp, Bacillus cereus ATCC 14579
  CDS (1)..(999): transl_table=11
atgaaacaagtacaaacaaaaagggattggaaaaaacttgcatacgacgtagtggaagagaagatgattacaaaagaagatgcaatagcgatattagaagctgatgatacagaagttttagaaattatgaatgcggcttacattattcgccatcatcactttggtaagaaagtaaaattgaatatgattattaatacgaaatctggattatgtcctgaagattgtggatattgctcacagtctattatttcagaagcaccgattgataaatatgcatggttaacgcaggagaagattgtagaaggggcacatgaagcaatacgccgtaaagcaggtacatattgtattgtagcgtctggtcgtcgtccgacggataaagaggtaaatcacgtaattggagcagttaaggaaattcgtgaaacgacagacttgaagatttgttgttgtttaggtttcttaaatgaagatcaagcaggacgtttagcggaagcaggcgtgcaccgttataaccacaacttagatacacatgcaaataattacgatagtatttgttcaactcatacgtatgatgatcgtgttgatacagttcaaaaagcaaaacaagcgggcatttccccatgctctggagcgatttttggcatgggagaaacaattgaagagcgtgctgaaattgcatttgaattacaacgtatagatgcagattctatcccttgtaatttccttgttgctgtaaaggggacacctcttgaagggcaaaaagagttaacgccagtagaatgtttaaaagtactggcaatgatgcgttttgtaaacccgacaaaagaaattcgtatttcaggaggacgtgaaatcaatttacgttctgtacagccaatcggtttatttgcagcaaattctatttttgtcggggactacttaacgacagctggacaagagccgactgcagactggggtatgattgcagatttaggatttgagattgaagagtgtgcattataa

SEQ ID NO: 128724 - protein, 332 aa, Bacillus cereus ATCC 14579
MKQVQTKRDWKKLAYDVVEEKMITKEDAIAILEADDTEVLEIMNAAYIIRHHHFGKKVKLNMIINTKSGLCPEDCGYCSQSIISEAPIDKYAWLTQEKIVEGAHEAIRRKAGTYCIVASGRRPTDKEVNHVIGAVKEIRETTDLKICCCLGFLNEDQAGRLAEAGVHRYNHNLDTHANNYDSICSTHTYDDRVDTVQKAKQAGISPCSGAIFGMGETIEERAEIAFELQRIDADSIPCNFLVAVKGTPLEGQKELTPVECLKVLAMMRFVNPTKEIRISGGREINLRSVQPIGLFAANSIFVGDYLTTAGQEPTADWGMIADLGFEIEECAL

SEQ ID NO: 128725 - DNA, 1020 bp, Nitrosomonas europaea ATCC 19718
  CDS (1)..(1020): transl_table=11
atgatcatggaatccgcaaccagtttgatttctgaaaaacagtgcgaatgtgcacatcccaactctgattcggcagtacaggggtcatcattgcgctggtcgatcgcagcgatcgaatcgctgctggatctgccattttctgatctgatttttcaggcacagacagtgcatcgccagtatcacgatgctaatgccgtgcaactgtccacgctgatttccgtaaaaaccggtggatgttcagaggattgtgcctattgtccgcaggcggcgcgttaccacaccggggtggagaatcaggcgattctgtcgcgtgaggaagtcgtggcggcagccactcaggccaaggaaagcggtgccacccgtttctgtatgggggcggcatggcgcggaccgaagcagcgcgatatcgagtacatgaccgaagtcatcagtgcagtcaaggcattggggatggagacctgtgccacactgggcattctgaagccaggtcaggctactcagctcaaacaggctggactggattactataatcacaatctcgatactgcccccgagttttatggcgaaatcattaccacgcgtgaatatcaggatcggctggatacactggaggaagtgcgtggcgccaatatcaacgtgtgttgtggcggtatcgtcggcctgggggaatctcgcatggcccgggcaggattgattgcacaactggccaatctcgatccttatcctgaatcggtgccgatcaattatctggttcaggtagagggtacacccttgtacggcacgcctgagctcgatccattcgaattcgtccgtaccattgcggcagcgcgtattaccatgcccaaagcgatggtcagactttccgccggccgccggcaaatgccggaagccatccaggcactgtgttttctggcgggtgccaattccatcttctacggcgataaactgctgacgacgggtaacccggatacggaaaaagatctggcgttgtttgaaaaactggggctgcatgcattgtag

SEQ ID NO: 128726 - protein, 339 aa, Nitrosomonas europaea ATCC 19718
MIMESATSLISEKQCECAHPNSDSAVQGSSLRWSIAAIESLLDLPFSDLIFQAQTVHRQYHDANAVQLSTLISVKTGGCSEDCAYCPQAARYHTGVENQAILSREEVVAAATQAKESGATRFCMGAAWRGPKQRDIEYMTEVISAVKALGMETCATLGILKPGQATQLKQAGLDYYNHNLDTAPEFYGEIITTREYQDRLDTLEEVRGANINVCCGGIVGLGESRMARAGLIAQLANLDPYPESVPINYLVQVEGTPLYGTPELDPFEFVRTIAAARITMPKAMVRLSAGRRQMPEAIQALCFLAGANSIFYGDKLLTTGNPDTEKDLALFEKLGLHAL

SEQ ID NO: 128727 - DNA, 1080 bp, Rhodopirellula baltica SH 1
  CDS (1)..(1080): transl_table=11
atgagcgttgctgattccagtgctgctgattctgttgctgccccggacactgccgacacgtcatcgtccgtcggtgtgttttcgcctccgggatactacgacgcgttagctcaacaagtcctcgatggcacgccgatcacccgagagcaagctctggcgatgttggaagcgtccgatttggacgtgcccgcgatcatctcggctggctaccgaatccgtcatcagtactttggcaacaccgtccagctgtactttttgatgaacgccaagagtggattgtgccctgaggattgtcattactgcagccaatccaaggtctccgacgctcccgttcccaagtacaacattctcaaacgcgatgcgttgatggacgccgccaaggtcgctgccgaacgaggtgcaaagacctactgtttggtgatctccgcccgtggacccaacgaacgtgagatgaaagcggtcgaggagatcgttcccgagatcaagcaaaagtacaacttggacatctgtgcctgcttgggtttgctggatgaatctcaagcggctcgactgaaggcttgcggtgtcgaccgagtcaatcacaacctcaacagcagcgaatcgcactacgagaagatctgcacaacgcacacatacgaagaccgcgttcaaacgctgcgtcacgttcgcgatgcgggcatggaaatgtgcagtggcggcatcatcgggatgggcgaatccaaatccgacatcgtgtcgatggcgttcgatctgaatgagctcggtgtgcaatcgattcccgttaacattcttaacgcgatcgatggcacgcctttggaaggaaccgccgccctcacgcctcaagacgcgctcaaagctttggcgatgttccgattcgtgaaccccgatcgcgaactgcggatcgctggcggtcgtgaactgcacctgcgtcagttgcaaccgatggggctgtacgttgccaacagcgtgttcgttggcgactacctgacaacacaagggcaggcccctcaagcggattacgacatgattcgcgaccttggcttcgacgtcaccggttcgtgcgaagagatgagcatctga

SEQ ID NO: 128728 - protein, 359 aa, Rhodopirellula baltica SH 1
MSVADSSAADSVAAPDTADTSSSVGVFSPPGYYDALAQQVLDGTPITREQALAMLEASDLDVPAIISAGYRIRHQYFGNTVQLYFLMNAKSGLCPEDCHYCSQSKVSDAPVPKYNILKRDALMDAAKVAAERGAKTYCLVISARGPNEREMKAVEEIVPEIKQKYNLDICACLGLLDESQAARLKACGVDRVNHNLNSSESHYEKICTTHTYEDRVQTLRHVRDAGMEMCSGGIIGMGESKSDIVSMAFDLNELGVQSIPVNILNAIDGTPLEGTAALTPQDALKALAMFRFVNPDRELRIAGGRELHLRQLQPMGLYVANSVFVGDYLTTQGQAPQADYDMIRDLGFDVTGSCEEMSI

SEQ ID NO: 128729 - DNA, 1170 bp, Wigglesworthia glossinidia endosymbiont of Glossina brevipalpis
  CDS (1)..(1170): transl_table=11
atgccatatataataacgatcaaaattaacttcattaatgttcatataatattcctaattaaatttaaaataaatatatttgacaatataatattattatataaacttaataatatcatatttaaaataattctaataaattttatgaaaaacaaatcaatttggaatttaaaaaatacgaaaaaattattttataaacctttctttgacctcatgtttaaagctcaaaaaatacatagaaaaaatttttcttcaaataaaattcaaataagcacattattgtctataaaaactggattatgcccagaagattgtaaatattgctctcaaagctcaagatataaaactggactagtaagtgaaaaattaattaaaatagaaaaagtaataaatgctgcaaaaaaagctaaaaaatcaggagtaactagattttgcatgggagctgcatggaaaaatccaaaagataaagatattccactattagaagaaatgattaaatctgttaaaaaacttggattggaaacttgtatgacccttggaatgttaaatgattatcaagcaaatcgcttgcataatgcaggattagattattataaccataatttagatacatctaaagaattttataagaaaattataactactagaaaatatgaagatagaatatctacaatacaaaatgttagaaatgcaggaataaaagtttgctctggaggtattttaggattaggagaaagtgataaagatagaataaaattattaatacagttagcaaatttacctaaaccgccagaaagcgttcctattaatatgttagtaagaataaaaggaacaccaatggaaaaaaacaaagatgttgatgcatttgattttattagaataatagcattagctagaataatgatgcctaaatctaggataagattatcagctggaagagaaaatatgaacgaacaaactcaagcattatgttttatggcaggagtaaattcaatattttatggatgtaaattattaacaactactaattcttcttctaaaagagatgcgttattgtttaaaaaattaaatatgaaaatggaaaaaattaaaaacaaagaaaaatattttaataaaaaacaaaattctgatttgtatgaaaataaaaattattacaatgcagtatgttaa

SEQ ID NO: 128730 - protein, 389 aa, Wigglesworthia glossinidia endosymbiont of Glossina brevipalpis
MPYIITIKINFINVHIIFLIKFKINIFDNIILLYKLNNIIFKIILINFMKNKSIWNLKNTKKLFYKPFFDLMFKAQKIHRKNFSSNKIQISTLLSIKTGLCPEDCKYCSQSSRYKTGLVSEKLIKIEKVINAAKKAKKSGVTRFCMGAAWKNPKDKDIPLLEEMIKSVKKLGLETCMTLGMLNDYQANRLHNAGLDYYNHNLDTSKEFYKKIITTRKYEDRISTIQNVRNAGIKVCSGGILGLGESDKDRIKLLIQLANLPKPPESVPINMLVRIKGTPMEKNKDVDAFDFIRIIALARIMMPKSRIRLSAGRENMNEQTQALCFMAGVNSIFYGCKLLTTTNSSSKRDALLFKKLNMKMEKIKNKEKYFNKKQNSDLYENKNYYNAVC

SEQ ID NO: 128731 - DNA, 1005 bp, Haemophilus ducreyi 35000HP
  CDS (1)..(1005): transl_table=11
atgacaacctacaatttacgcttaaaagcaaaagatgaactcacgcctcatcctagcgtgcaatattggcgtaaatgccaagtagaagaattatttgccatgccatttatggagcttgtttttaaagcagcacaagtacaccgtgaacactttgatcctcaagctattcagctatcgacattactgtcaattaaaaccggtggttgtccagaagagtgtgaatattgtcctcaatctgcacgttatgatacagggcttgaaaagcaagttatgctagatattgaagaaattgtggagaaagcaaaaattgctaaacaacgaggtgctagtcgcttttgtatgggggccgcttggcgagggcctaaacctaaggatattaaagtggtttccgaaattattggtgcagttaaagcgttaggtttagaaacgtgtggtacttttggactcttagaagatggaatggcagaagatctcaaacaagcgggattagattattataatcataatttagatactgatcccgaacgttatagcaaagtggttcatacccgcagtcatgatgatcgaatggataccttaggtaaagttcgtcatgcaggactaaaagtttgctgtggtggtattgttggcatgaatgaaacccgccctgaacgtgcaggtttaattgccagtttagcaaatttagatccacagccagaaagtgtgccaattaatcaattaattaaagtagaaggcacaccaatggctgaagcagaagacctagattggacggaatttgttcgcactattgctgttgcgcgtatcactatgccaaaaagctatgtacgattatcagccggccgaacagcaatgtccgaagctatgcaaacactctgttttatagcgggagcgaactctattttctatggtgaaaaactgctcacaacttgcaatccagaggaagatgcagattgtttattgatgcaaaaacttgatttatatccattacaatatcaagaatgctaa

SEQ ID NO: 128732 - protein, 334 aa, Haemophilus ducreyi 35000HP
MTTYNLRLKAKDELTPHPSVQYWRKCQVEELFAMPFMELVFKAAQVHREHFDPQAIQLSTLLSIKTGGCPEECEYCPQSARYDTGLEKQVMLDIEEIVEKAKIAKQRGASRFCMGAAWRGPKPKDIKVVSEIIGAVKALGLETCGTFGLLEDGMAEDLKQAGLDYYNHNLDTDPERYSKVVHTRSHDDRMDTLGKVRHAGLKVCCGGIVGMNETRPERAGLIASLANLDPQPESVPINQLIKVEGTPMAEAEDLDWTEFVRTIAVARITMPKSYVRLSAGRTAMSEAMQTLCFIAGANSIFYGEKLLTTCNPEEDADCLLMQKLDLYPLQYQEC

SEQ ID NO: 128733 - DNA, 996 bp, Chlamydophila pneumoniae TW-183
  CDS (1)..(996): transl_table=11
atgcgtgaagaaactgtatcctggtcattagaagacatccgcgaaatttatcacactcccgtatttgagctgattcacaaagccaatgccatattgcgtagtaatttcctccattcagaactgcagacttgctatctgatttcgattaaaactggtggatgcgttgaagattgcgcctactgtgcccaatcttcccgctatcatacccacgtcacaccagaacctatgatgaaaattgtagacgttgtggaaagggcaaaacgtgctgtagagctaggcgccactcgtgtgtgtcttggggctgcctggcgcaatgctaaggacgatcgatactttgatagagtcctcgctatggtgaaaagtatcacagatctcggagccgaggtttgttgtgctttaggcatgctctccgaagagcaagctaaaaaactgtatgatgcaggactttatgcctacaatcataatttagactcttctccggaattctatgaaactataatcacaacacgttcttatgaagatcgcctcaacactcttgatgtagtaaataaatctggcattagtacatgctgcggtggtattgtaggtatgggagaatctgaagaagaccgtataaagcttcttcatgttcttgcaacaagagatcatatcccagaatccgtacctgtaaatttactttggccgattgacggcacgcctttgcaagaccagcctccgatttctttctgggaagtcttgcgaaccatagcaacggcacgggttgttttccccagatccatggtacgacttgctgcaggacgcgctttcctcacagtagaacaacaaaccttatgttttctagccggtgccaactccatattctatggagataaactgttgactgtagaaaacaatgatatagatgaagatgctgaaatgatcaaacttttaggcttaatccctcgcccttcatttggaatagaaagaggtaacccatgttatgccaacaattcctaa

SEQ ID NO: 128734 - protein, 331 aa, Chlamydophila pneumoniae TW-183
MREETVSWSLEDIREIYHTPVFELIHKANAILRSNFLHSELQTCYLISIKTGGCVEDCAYCAQSSRYHTHVTPEPMMKIVDVVERAKRAVELGATRVCLGAAWRNAKDDRYFDRVLAMVKSITDLGAEVCCALGMLSEEQAKKLYDAGLYAYNHNLDSSPEFYETIITTRSYEDRLNTLDVVNKSGISTCCGGIVGMGESEEDRIKLLHVLATRDHIPESVPVNLLWPIDGTPLQDQPPISFWEVLRTIATARVVFPRSMVRLAAGRAFLTVEQQTLCFLAGANSIFYGDKLLTVENNDIDEDAEMIKLLGLIPRPSFGIERGNPCYANNS

SEQ ID NO: 128735 - DNA, 1023 bp, Bordetella pertussis Tohama I
  CDS (1)..(1023): transl_table=11
atggagccccgccccatgcatacggcctacgttcccgtccccgctcccgtccgtccgcccagcgccgagcgctggcccctggcggcggtcgccgaattgttcgagctgccgttcctggacctgctgcatcgcgcccagcaggtgcatcgccagcacttcgacgccaacacggtgcagctgtccagcctgctgtcgatcaagaccggcggctgcccggaggattgcgcgtactgtccgcaatcggcccactacgataccggcgtggacgccgacaagctgatgccgctggacgaggtggtgcgcgcggcgcgcgcggcgcaggccaacggcgcgcaacgcttctgcatgggcgcggcctggcgcagccccaaaccgcatcacctggaagcggtggccgaaatgatcggcgcggtcaaggcgctgggcatggaaacctgcgtcacgctgggcatgctgcgcgacggccaggccgagcaattgaaagccgccgggctggattactacaaccacaacctggataccgcgcccgagttctacggcaagatcatttcgacgcgcacctaccaggaccgcctggatacgctgcaacaggtgcgcgaggccggcatcaatgtgtgctgcggcggcatcgtcggcatgggcgaatcgcgccgcgaccgcgccggcctggtcgcccagctgacgaacatggagccctatccggagtcggtgcccatcaacaacctggtgcaagtcgaaggcacgccgctggcgggcgccgaaacgctggatccgttcgagttcatccgcaccatcgccgtggcgcgcatcaccatgccgctggccaaggtgcgcctgtcggcgggccgcgagaccatgagcgacagcgagcaggcgctgtgcttcatggccggcgccaactcgatcttctatggcgatgtgctgctgaccaccggcaacccgcaggtcgaggccgaccggcgactgctgcaacgcctgggcatgcgcgccgagggcctgccctgcgcggcgggccaggcatga

SEQ ID NO: 128736 - protein, 340 aa, Bordetella pertussis Tohama I
MEPRPMHTAYVPVPAPVRPPSAERWPLAAVAELFELPFLDLLHRAQQVHRQHFDANTVQLSSLLSIKTGGCPEDCAYCPQSAHYDTGVDADKLMPLDEVVRAARAAQANGAQRFCMGAAWRSPKPHHLEAVAEMIGAVKALGMETCVTLGMLRDGQAEQLKAAGLDYYNHNLDTAPEFYGKIISTRTYQDRLDTLQQVREAGINVCCGGIVGMGESRRDRAGLVAQLTNMEPYPESVPINNLVQVEGTPLAGAETLDPFEFIRTIAVARITMPLAKVRLSAGRETMSDSEQALCFMAGANSIFYGDVLLTTGNPQVEADRRLLQRLGMRAEGLPCAAGQA

SEQ ID NO: 128737 - DNA, 1008 bp, Bordetella bronchiseptica RB50
  CDS (1)..(1008): transl_table=11
atgcatacggcctacattcccgtccccactcccgtccgtccgcccagcgccgagcgctggcccctggcggcggtcgccgaattgttcgagctgccgttcctggacctgctgcatcgtgcccagcaggtgcaccgccagcacttcgacgccaacacggtgcagttgtccagcctgctgtcgatcaagaccggcggctgcccggaggattgcgcgtactgtccgcaatcggcccactacgataccggcgtggacgccgacaagctgatgccgctggacgaggtggtgcgcgcggcgcgcgcagcgcaggccaacggcgcgcaacgcttctgcatgggcgcggcctggcgcagccccaaaccgcatcacctggaagcggtggccgaaatgatcggcgcggtcaaggcgctgggcatggaaacctgcgtcacgctgggcatgctgcgcgacggccaggccgaacagttgaaggccgccgggctggattactacaaccacaacctggataccgcgcccgagttctacggcaagatcatttcgacgcgcacctaccaggaccgcctggatacgctgcaacaggtgcgcgaggccggcatcaacgtgtgctgcggcggcatcgtcggcatgggcgaatcgcgccgcgaccgcgccggcctggtcgcccagctggcgaacatggagccctatccggagtcggtgcccatcaacaacctggtgcaagtcgaaggcacgccgctggcgggcgccgagacgctggatccgttcgagttcatccgcaccatcgccgtggcgcgcatcaccatgccgctggccaaggtgcgcctgtcggcgggccgcgagaccatgagcgacagcgaacaggcgctgtgcttcatggccggcgccaactcgatcttctatggcgatgtgctgctgaccaccggcaacccgcaggtcgaggccgaccggcggctgctgcaacgcctgggcatgcgcgccgagggcctgccctgcgcggcgggccaggcgtga

SEQ ID NO: 128738 - protein, 335 aa, Bordetella bronchiseptica RB50
MHTAYIPVPTPVRPPSAERWPLAAVAELFELPFLDLLHRAQQVHRQHFDANTVQLSSLLSIKTGGCPEDCAYCPQSAHYDTGVDADKLMPLDEVVRAARAAQANGAQRFCMGAAWRSPKPHHLEAVAEMIGAVKALGMETCVTLGMLRDGQAEQLKAAGLDYYNHNLDTAPEFYGKIISTRTYQDRLDTLQQVREAGINVCCGGIVGMGESRRDRAGLVAQLANMEPYPESVPINNLVQVEGTPLAGAETLDPFEFIRTIAVARITMPLAKVRLSAGRETMSDSEQALCFMAGANSIFYGDVLLTTGNPQVEADRRLLQRLGMRAEGLPCAAGQA

SEQ ID NO: 128739 - DNA, 1008 bp, Prochlorococcus marinus subsp. pastoris str. CCMP1986
  CDS (1)..(1008): transl_table=11
atgattaattctgataatcaaaaatttagcgaaataagatttgattgggaaagagacgagattttggaaattttaaattacccattaatagatttaatgtgggaagctcaaattattcatagaagatttaatcaatataaagtccaactagcttctcttttcagtgtaaaaactggcgggtgtgaagagaactgttcttactgtagccaatcaatttatagctctagtcaaattaagagtcaccctcaatttgaagttgaagctgttttaaatagagctaaaacagcaaaaaaagaaggtgctgatagattttgtatgggttgggcttggagagaaattagagatggcaaacctttcaactcaatgatagaaatggtcaaaggtgtaaaagaacttggaatggaggcatgtgtaactgcagggatgctcacagatgagcaggccttgaaacttgccgatgccgggctaaccgcatacaaccataatctcgatacaagtcctgaatactataaaaatattattacgacaagaacttatcaggatagattagaaactattaaaagagtaagaaatgcaggtataaatgtatgttgtggaggaattataggtttaggagaagataatggagatagagcatctcttttagaagtcctctcaaacatgaatcctcaccctgaaagtgtcccaatcaattctctggtagccatagaaggaacaggtttggaggggggaaaagaaattgattctattgagatgataagaatgatcgctactgctcgaattcttatgccaaaaagcaaaataagattaagtgctggaagggagaacttaactaaagaagctcagattctttgttttcaatgcggagcaaactctattttttatggagatgaattattgacaacctcaaatccatcttttcaagatgatagaaaactacttaaggatgtaggagttttatttaataaagactttgaatattgtgataaaactgtttctacagtatga

SEQ ID NO: 128740 - protein, 335 aa, Prochlorococcus marinus subsp. pastoris str. CCMP1986
MINSDNQKFSEIRFDWERDEILEILNYPLIDLMWEAQIIHRRFNQYKVQLASLFSVKTGGCEENCSYCSQSIYSSSQIKSHPQFEVEAVLNRAKTAKKEGADRFCMGWAWREIRDGKPFNSMIEMVKGVKELGMEACVTAGMLTDEQALKLADAGLTAYNHNLDTSPEYYKNIITTRTYQDRLETIKRVRNAGINVCCGGIIGLGEDNGDRASLLEVLSNMNPHPESVPINSLVAIEGTGLEGGKEIDSIEMIRMIATARILMPKSKIRLSAGRENLTKEAQILCFQCGANSIFYGDELLTTSNPSFQDDRKLLKDVGVLFNKDFEYCDKTVSTV

SEQ ID NO: 128741 - DNA, 984 bp, Chromobacterium violaceum ATCC 12472
  CDS (1)..(984): transl_table=11
atgcattctgccacgatggtgttcaagcgcgcggccaccccgcacccggaaaaagccgaatggagcgtggacgacgtggaggctttgctggggctgcccttcatggagctggtgtttcgcgccgccgaaatccaccgccagttcttcgacccgaccaaggtccagctgtcgacgctggtgtcgatcaagaccggcggctgtccggaagactgcggctactgcccgcagtccgttcatcacgacacgccggtggccgaccagccgatgatgacggtggacgaggtggtggcggcggcgcgccaggccaaggccaacggcgccggccgcttctgcatgggcgcggcctggcgcggacccaaggacgccgatctgcagaagacgctggacatggtgcgcgaagtgaaggcgctgggcctggagacctgcgccactttcggcctgctgcgcgacggccaggccgagcagttgaaggacgccggcctcgactattacaaccataacctggacaccgcgccggacaagtacggcgacatcatccagacccgggagtacgaggaccggctggacacgctgggcaaggtgcgcaaggccgggctgtcggtatgctgcgggggcatcgtcggcatgaatgaaacccgccgcgaccgcgccggtctgatcgtgcagctggccaatctggatccgcagccggagtcggtgccggtcaacaacctggtgcaggtggtcggcacgccgctcgagggcgccgagcgcctggactggacggaattcgtgcgcaccatcgcggtggcgcggatcacgatgccggccagctacgtcaggctgtcggcgggccgccgcgaaatggacgaagccacccaggcgctgtgtttcctggccggcgccaactccatcttctacggcgacaagctgttgacgaccggcaatccggacgtggtggccgaccaatcgctgatggctaagctgaatttacagccgttgtaa

SEQ ID NO: 128742 - protein, 327 aa, Chromobacterium violaceum ATCC 12472
MHSATMVFKRAATPHPEKAEWSVDDVEALLGLPFMELVFRAAEIHRQFFDPTKVQLSTLVSIKTGGCPEDCGYCPQSVHHDTPVADQPMMTVDEVVAAARQAKANGAGRFCMGAAWRGPKDADLQKTLDMVREVKALGLETCATFGLLRDGQAEQLKDAGLDYYNHNLDTAPDKYGDIIQTREYEDRLDTLGKVRKAGLSVCCGGIVGMNETRRDRAGLIVQLANLDPQPESVPVNNLVQVVGTPLEGAERLDWTEFVRTIAVARITMPASYVRLSAGRREMDEATQALCFLAGANSIFYGDKLLTTGNPDVVADQSLMAKLNLQPL

SEQ ID NO: 128743 - DNA, 957 bp, Gloeobacter violaceus PCC 7421
  CDS (1)..(957): transl_table=11
atgtgccgtgcgccgatgccctcgaccgtctccgagatttcgcggatctatcaccagccgctgcccgatttgctcttcgaagcccagcgcgtccaccgtgcccaccatgatccgcgcgaagtgcagctttgtaccctcagcaacatcaaaaccggtctgtgccccgaaaattgtggctactgctcccagagcgttcaccacaaaagcggcctggcagcccaggaactcagttccctcgacgcggtaatggccgaggcgcaggcagccaaggcggcgggttcgactcgattttgcatgggggctgcctggcgagaaatcaaagacggtccgccgttcgagcgggtgttggagatggtgcgctcggtggcggcactggacatggaagtctgctgcaccctcggtatggtcaaaccgcatcaggccgaacgcctgaagcaggcaggactcaccgcctacaaccacaatctcgacaccggccccggctactacccgcaggtggtgaccacccgcacctacaaggaccggctcgaaacgatccgggcggtgggtgcggcgggtatttctgtgtgctgcggcggcatcctgggcatgggtgaatcgctcacagaccgcttcgagctactcgaatcgctcggcagcctcgacccaactcccgagtcgatcccgatcaactgcctagtaccggtggcgggcacccctctggccgactcgtcgcccgtcgaaccgctcgacctggtgcggatggttgccacgacccgtattctttttccagatgccatggtgcgcctttcggcagggcgcctgcagatgagcgaggaactgcaggccctttgcttcctggccggggccaattcgatatttaccggcccgaaactgctcaccacccccaaccccgagcactcccacgatcagaagctgcttgaaaaattgggtatggagccaaagacgacccagtga

SEQ ID NO: 128744 - protein, 318 aa, Gloeobacter violaceus PCC 7421
MCRAPMPSTVSEISRIYHQPLPDLLFEAQRVHRAHHDPREVQLCTLSNIKTGLCPENCGYCSQSVHHKSGLAAQELSSLDAVMAEAQAAKAAGSTRFCMGAAWREIKDGPPFERVLEMVRSVAALDMEVCCTLGMVKPHQAERLKQAGLTAYNHNLDTGPGYYPQVVTTRTYKDRLETIRAVGAAGISVCCGGILGMGESLTDRFELLESLGSLDPTPESIPINCLVPVAGTPLADSSPVEPLDLVRMVATTRILFPDAMVRLSAGRLQMSEELQALCFLAGANSIFTGPKLLTTPNPEHSHDQKLLEKLGMEPKTTQ

SEQ ID NO: 128745 - DNA, 1038 bp, Photorhabdus luminescens subsp. laumondii TTO1
  CDS (1)..(1038): transl_table=11
gtgattgagcgtaagcaatggacaattaagcaggcgcaagagctgtttgataaaccttttttcgaattattatttcaagcacagcaggttcatcgtatttactttgacccacagcaagtacaggtcagtacactactttccatcaaaaccggggcttgcccggaagattgcaaatattgcccgcaaagctcccgttacaaaacaggtcttgaaaaagagcggttgatggaagtggaacaggtgattgattctgctcgtaaggctaaaaatgcgggttcaacacgtttttgtatgggtgccgcgtggaaaaatccccatgagagggatatgccttatctggagaaaatggttaaggaagtcaaagcattgggaatggaaacctgcatgacactgggcatgctcaatggcttacaagcacagcggttggcggatgcagggttagattactacaaccacaacctggatacctccccggaattttatggcaacatcattacaactcggacctatcaggacagattggataccctggataaagtacgggaggccggaataaaagtgtgttctggtggtattgttggtctgggtgaggcgatacgtgatcgggccgcattattggtacaactggcaaatctgccaaaaccgccggagagtgtacccatcaacatgttggttaaagtcaaaggtacgccattggctgagaacgaagatgtagatcctttcgattttatccgcacgattgctgttgccaggatcatgatgccgtcttctcatgttcggttatccgcaggtcgtgaacagatgaacgagcagacacaggcaatgtgttttatggctggcgctaattctattttctatggctgtaagttgctcactacacctaacccggcggaagataaagatttacaactatttcgcaagttgggcattaatcttcagcagactcagacagcatttggtgataatcagcaacagcagcatttggcggaagccattatcaatgcggataacgaacaattttataatgcggcattataa

SEQ ID NO: 128746 - protein, 345 aa, Photorhabdus luminescens subsp. laumondii TTO1
MIERKQWTIKQAQELFDKPFFELLFQAQQVHRIYFDPQQVQVSTLLSIKTGACPEDCKYCPQSSRYKTGLEKERLMEVEQVIDSARKAKNAGSTRFCMGAAWKNPHERDMPYLEKMVKEVKALGMETCMTLGMLNGLQAQRLADAGLDYYNHNLDTSPEFYGNIITTRTYQDRLDTLDKVREAGIKVCSGGIVGLGEAIRDRAALLVQLANLPKPPESVPINMLVKVKGTPLAENEDVDPFDFIRTIAVARIMMPSSHVRLSAGREQMNEQTQAMCFMAGANSIFYGCKLLTTPNPAEDKDLQLFRKLGINLQQTQTAFGDNQQQQHLAEAIINADNEQFYNAAL

SEQ ID NO: 128747 - DNA, 1146 bp, Vibrio vulnificus YJ016
  CDS (1)..(1146): transl_table=11
ttgatttatttgctagtgttgacagtttatcgggactcggtagactgtcaacagaacaaaaatagcaagttaactattacgcaaggaatacacgtggaagtacgtcataactggactcatgcgcaagttcgtgagttgatggaaatgccttttatggatttgttgtttgaagcgcagcaagttcatcgtcaataccaccctaagaactatgtgcaagtgagtaccttgctttcgattaaaaccggtgcttgtccagaagattgcaaatactgcccgcaaagcgctcgttatcaaacggatgttgaaaaagagcgattaatggaagtggagcgtgttctggatgccgcgcaaaaggccaaaaatgccggttcgactcgtttttgtatgggagcagcttggaagaatccgaaagaacgcgacatgccgctgctgactgacatgatcaaaggcgtcaaagatatggggctggaaacctgtatgactctgggcatgttaaccccagaacaagctaagcaactggcaagcgcgggtttggattattacaaccacaacctcgatacctcaccggagtattacggtaacattattaccacacgcacttatcaagatcgcctagataccttatctcatgtacgtgacgcaggcatgaagatctgctctggcggtatcatcggtatgggtgaaagcgctaatgatcgcgctgggttgcttgttgagttggccaatctgcctactcacccagaaagtgttcctatcaacatgctggttaaggtgaaagggacacctttagaaacggctgaagaggttgacccgtttgacttcatccgtttaattgccgttgctcgtattatgatgccgacttcagccgttcgtttgtctgcagggcgtgaaaacatgaatgaacaaatgcaaaccttgtgttttatggcgggcgccaattctatcttttacggctgtaagctgctcacaacgccaaacccttccgaagataaagacatgcagctgtttaacaagctgggtattaacagtcagcaagtctcacaaaaacctgatgaaattacagaaaacgaattgttagatcgcgtagtcgaaagcgtggctgctcgcccaacaaaagacgatctgttttatgacgcaagcctttaa

SEQ ID NO: 128748 - protein, 381 aa, Vibrio vulnificus YJ016
MIYLLVLTVYRDSVDCQQNKNSKLTITQGIHVEVRHNWTHAQVRELMEMPFMDLLFEAQQVHRQYHPKNYVQVSTLLSIKTGACPEDCKYCPQSARYQTDVEKERLMEVERVLDAAQKAKNAGSTRFCMGAAWKNPKERDMPLLTDMIKGVKDMGLETCMTLGMLTPEQAKQLASAGLDYYNHNLDTSPEYYGNIITTRTYQDRLDTLSHVRDAGMKICSGGIIGMGESANDRAGLLVELANLPTHPESVPINMLVKVKGTPLETAEEVDPFDFIRLIAVARIMMPTSAVRLSAGRENMNEQMQTLCFMAGANSIFYGCKLLTTPNPSEDKDMQLFNKLGINSQQVSQKPDEITENELLDRVVESVAARPTKDDLFYDASL

SEQ ID NO: 128749 - DNA, 1011 bp, Rhodopseudomonas palustris CGA009
  CDS (1)..(1011): transl_table=11
ttgaactcgattgcccattccacgcttgccgccgccagccccaccatccgccacgactggacccgcgaggaagccgcggcgatctatcacgcgccgttcgccgatctgatgttccgggcgcagaccatccaccgccagaccttcgatcccaaccaggtccagtgcaatcagctgctcaacgtcaagaccggcggctgcgccgaggattgcggctattgcagccagtccgcccatcacgacaccgccctgcccgcctccaagctgatggagccggccaaggtgatcgaagccgccaaggccgctcgcgacgccggcgcgacgcgctattgcatgggcgcggcatggcgctcgccgaaggagcgcgacatggctccggtgatcgagatggtgaagggcgtcaaggcgctcggcatggaagcctgcatgacgctcgggatgctgacggatgatcaggccaagcagctcgccgacgccggcctcgactactacaaccacaacatcgacacctcggaagagttttacgcctcggtggtgaagagccgcagcttcggcgaccgcctcgacacgctggagaaggtgcaggatgccggcatcaaggtgtgctgcggcggcatcctcggcctcggcgagaagccgaccgaccgcgtcgagatgctgcgcacccttgccaacctgccgcagcatccggagagcgtgccgatcaacatgctgatcccgatcgaaggcaccccgatcgccaagaccgcgacgccggtcgatccgttcgaattcgtccgcaccatcgcgctggcgcggatcatgatgccgaaatcggacgtccgcctcgccgccggccgcaccgcgatgagtgacgaaatgcaggcgctatgcttcctcgccggcgccaactcgatcttcatcggcgacaccttgctgaccaccccgaacccgggcgacagcaaggaccgggcgctgttcaaccgcctcggcatcaccccgcgcgacgacctcggcgtccacgcgcacagctga

SEQ ID NO: 128750 - protein, 336 aa, Rhodopseudomonas palustris CGA009
MNSIAHSTLAAASPTIRHDWTREEAAAIYHAPFADLMFRAQTIHRQTFDPNQVQCNQLLNVKTGGCAEDCGYCSQSAHHDTALPASKLMEPAKVIEAAKAARDAGATRYCMGAAWRSPKERDMAPVIEMVKGVKALGMEACMTLGMLTDDQAKQLADAGLDYYNHNIDTSEEFYASVVKSRSFGDRLDTLEKVQDAGIKVCCGGILGLGEKPTDRVEMLRTLANLPQHPESVPINMLIPIEGTPIAKTATPVDPFEFVRTIALARIMMPKSDVRLAAGRTAMSDEMQALCFLAGANSIFIGDTLLTTPNPGDSKDRALFNRLGITPRDDLGVHAHS

SEQ ID NO: 128751 - DNA, 1140 bp, Kluyveromyces lactis NRRL Y-1140
  CDS (1)..(1140)
atgttcgttagaagattttcaactagtttgattcgtgctggtgcaggcgccacagcactcaaagaaagtgttgccggcgaaaatgtttctgcaattagttatgcactatctttgaacgaaccacagcatgtgtggaccaaagaacaattagcggagatttatcacacgccattgatggaattgatgcatcaggcacaattacaacataggaaatggcatgatcctaccaaggtgcaactgtgtacattgatgaacatcaaggcaggtggatgttcagaagattgtaagtattgtgcgcaatcttcacgttacgatacaggtcttaaagcagagaagatgatatctgtcgaagaagtgatcaaggaggcacaaattgccaaagaaaatgggtcgacgagattttgtcttggtgctgcttggagagaaatgcgtggtagaaaatctgcattgaaaaggattggagaaatgattggaaagattaacgagatggggatggaatcctgcgtgacattgggaatggtggatgaaactcaagcgaaacagttgaaggacgctggtttgactgcttataaccataacatcgatacctcgagggaacattacccaaaggtgatctctaccagatcatatgacgatagattgcaaaccattaaaaatgtgcaagatgcaggtattaaagcttgcacaggtgggatcttgggtcttggtgaaactgaagatgatcacattgggttcgttcacactttggcaaatatgagtccacatccagaatctttacctattaatagattagtttccattaaaggtacaccaatgcatgaggaacttaagaaggtcagcagtaagaaattggaattcgatgagatcttaagaaccgtggcactagccagaattgtaatgccacaagcgattatcagattagctgcaggtcgttacacgatgaaggaaactgaacaattcttatgcttcatggcaggttgtaatgccatctttgtcggtaaaaagatgttaacaactatgtgtacaggctgggatgaagacaaagcaatgctttcgaaatggggtctacaaccaatggaatcgttttcatattccgctaataaggctccagctgaggcagcgtgtgccgggggccaataa

SEQ ID NO: 128752 - protein, 379 aa, Kluyveromyces lactis NRRL Y-1140
MFVRRFSTSLIRAGAGATALKESVAGENVSAISYALSLNEPQHVWTKEQLAEIYHTPLMELMHQAQLQHRKWHDPTKVQLCTLMNIKAGGCSEDCKYCAQSSRYDTGLKAEKMISVEEVIKEAQIAKENGSTRFCLGAAWREMRGRKSALKRIGEMIGKINEMGMESCVTLGMVDETQAKQLKDAGLTAYNHNIDTSREHYPKVISTRSYDDRLQTIKNVQDAGIKACTGGILGLGETEDDHIGFVHTLANMSPHPESLPINRLVSIKGTPMHEELKKVSSKKLEFDEILRTVALARIVMPQAIIRLAAGRYTMKETEQFLCFMAGCNAIFVGKKMLTTMCTGWDEDKAMLSKWGLQPMESFSYSANKAPAEAACAGGQ

SEQ ID NO: 128753 - DNA, 1281 bp, Debaryomyces hansenii CBS767
  CDS (1)..(1281)
atggcttctaagtatataatcaaacgttctttctcctctcagctgttacgagttttagcaccatcaaatacgattccgttaaatgctcagagagctaatgccgtggaagttgattcttcaattaacttcaatatcaacactagctcagacactggccacgagtcaaatatgaaggctattgaattagcattacagacccctagaccgttgaactcatggaccaaagaccaaatccgtgagatatacaatacgccgctaatggaactagtttttcaatctcaaattcaacataggaaatatcacaaccctcaagaggttcagttatgtactttgttatcaatcaagactggcggttgtaccgaagattgcaagtattgtgcccaatcgaccagatatgatactggaaccaaggctgagaggatgatttcagtagatgaagttatgaaggctgctagaactgcaaaagcaaatggatctactagattctgtatgggagctgcatggagagacatgacaggtcgtaagtcaggattgaagcgtatttcccaaatggttacccaaattaatcaagagctagggatggaaacatgtgtgacactaggaatggttgataagaaacaggcggcagacttagctgatgcaggtttgactgcctacaaccataacatcgatacatctagagagcattatccaaaggttatttcaactagaagttacgatgagaggttgcaaacaatcaggaatgttcaagatgctggtattaaagcatgtactggaggtatccttggacttggtgaaactgaggaagatcatattggtttcttatacaccttatcaaccatggaaaagcatcccgaatctttgcctattaaccgtttagtgccaataaaaggaactcccatggaaaaagagatatccagtttacctcgtgaatcaggcagacgtttaaaatttgaacacattttaaaaaccattgctactgctagattaattatgccagagtcaatcattaggctcgctgctggacgttataccatgaaagaacatgagcaattcttatgtttcatgagtggttgtaacgctatcttcaccggtgagaaaatgttaacaacaatgtgtaatgggtgggatgaagacattcaaatgttaaaaaaatggggtttgaggcctatgaagagctttaataaaagccatatgccagtaacggataatctgagtccaacattaaagccaaccgtcgatcagactacagaaaaattttctgaagcgtgcgttctgtaa

SEQ ID NO: 128754 - protein, 426 aa, Debaryomyces hansenii CBS767
MASKYIIKRSFSSQLLRVLAPSNTIPLNAQRANAVEVDSSINFNINTSSDTGHESNMKAIELALQTPRPLNSWTKDQIREIYNTPLMELVFQSQIQHRKYHNPQEVQLCTLLSIKTGGCTEDCKYCAQSTRYDTGTKAERMISVDEVMKAARTAKANGSTRFCMGAAWRDMTGRKSGLKRISQMVTQINQELGMETCVTLGMVDKKQAADLADAGLTAYNHNIDTSREHYPKVISTRSYDERLQTIRNVQDAGIKACTGGILGLGETEEDHIGFLYTLSTMEKHPESLPINRLVPIKGTPMEKEISSLPRESGRRLKFEHILKTIATARLIMPESIIRLAAGRYTMKEHEQFLCFMSGCNAIFTGEKMLTTMCNGWDEDIQMLKKWGLRPMKSFNKSHMPVTDNLSPTLKPTVDQTTEKFSEACVL

SEQ ID NO: 128755 - DNA, 1155 bp, Yarrowia lipolytica CLIB122
  CDS (1)..(1155)
atgctccgaacaactcttcctaaagtgtccacgcgtgtttttgtgcgaaacctcgcctcccatgcaagcttccaacccaccacatcttctgctatcagaaccaactggaccagagatgaggtgtccaaaatctacaacatgcctttgatggatcttgttttcaaggccgccaccgtgcacagacaacaccacaaccctgcagaggtgcaactttgcactctttacaacatcaagagtggaggatgcactgaggactgcaagtactgcgctcagtcatccagatacactactggtgttgaggccgagaaggcagtcaagccagctgaggttattgccgctgcaaaggaggccaaggccaatggttctacgagattctgtatgggagccgcctggcgagacatgaagggtcgaaagaacgccctaaagaacgtcaaggagatgattggtgctgtgcacgagctcggcatggaatcctgcgtgactctcggaatggttgacaaggctcaggctgaagagctacgaagagctggactcactgcctacaaccataacattgacacttctcgagaacactaccctaaggtgatcaccactcgaactttcgatgagcgtcttcagactattgaaaacgttagagaagcaggcgtcagcgtgtgctctggtggtattcttggtctgggtgaaacagctgatgaccacgttggattcctgtgggctctggctactatgccctctcatcctgagtcccttcctatcaaccgtcttgtccccatcaagggcacacctcttggagacgaccctgccatgaaggagaagcaactcacctatgacactgttgttcgaactgttgctactgctcgagtggtgatgcctggctctaaaatcagacttgctgctggacgatacaccatgaaggaacctgagcaggccatgtgcttcatggctggagccaacgccatctttacaggcaagaagatgctgactaccatgtgcaacggctgggacgaggataaggccatgctggagaagtggggactgaagcccatgaagagctttgagcgagttgacaagcatctcggtgaacagagccatgattccaaggagaagaagcagtgcggtggaggctgcaacagtgccacagaggtgagactgtaa

SEQ ID NO: 128756 - protein, 384 aa, Yarrowia lipolytica CLIB122
MLRTTLPKVSTRVFVRNLASHASFQPTTSSAIRTNWTRDEVSKIYNMPLMDLVFKAATVHRQHHNPAEVQLCTLYNIKSGGCTEDCKYCAQSSRYTTGVEAEKAVKPAEVIAAAKEAKANGSTRFCMGAAWRDMKGRKNALKNVKEMIGAVHELGMESCVTLGMVDKAQAEELRRAGLTAYNHNIDTSREHYPKVITTRTFDERLQTIENVREAGVSVCSGGILGLGETADDHVGFLWALATMPSHPESLPINRLVPIKGTPLGDDPAMKEKQLTYDTVVRTVATARVVMPGSKIRLAAGRYTMKEPEQAMCFMAGANAIFTGKKMLTTMCNGWDEDKAMLEKWGLKPMKSFERVDKHLGEQSHDSKEKKQCGGGCNSATEVRL

SEQ ID NO: 128757 - DNA, 1182 bp, Aspergillus nidulans FGSC A4
  CDS (1)..(1182)
atgtctgtctcgtttacgcggtcctttcctagggccttcataaggtcatatggcaccgtccagtcgtcgcccacggccgcttcctttgcgagcagaatccccccggctctccaggaggctgttgcagccactgccccgcgcaccaattggactcgcgatgaagtccagcagatttacgagaccccgttgaatcaattaacctacgctgctgccgctgtccaccgccgctttcatgacccgtccgcaatccaaatgtgcacgttgatgaacatcaagaccggtggatgcagtgaagattgctcctactgtgcacagtcttctcggtacagcactggcctcaaggccaccaaaatgagccccgtcgacgacgtcctcgagaaggcgaggattgccaaagcgaacgggagcacgcgtttctgtatgggagcggcgtggcgtgatatgcggggtcgtaagacgagtttgaagaatgtcaagcagatggtatctggcgttcgggaaatgggaatggaagtctgcgtcacactaggcatgattgatgctgatcaggctaaggagctgaaagatgccggcctgacagcctacaaccacaacctcgatacttcgcgcgaattctaccccacaatcatcacaacccgatcgtacgacgaacgactaaagaccttgtctcatgtccgtgatgcgggcattaacgtctgctctggtggtattctaggtcttggtgaggctgactctgaccgcatcggcctcatccacacggtttcgtcacttccctcgcacccggagtcttttcccgtcaacgccttggttccaatcaagggtaccccgttgggtgacaggaaaatgatctctttcgataagctcctccgcactgtcgcgactgcacggatcgtccttcccgcaaccatcgtccgcctcgccgccggccgcatttctctcacagaggagcagcaggttgcctgcttcatggctggtgcaaacgctgtcttcactggagagaagatgttgactactgactgcaacggctgggacgaggaccgcgccatgtttgaccgatggggcttctaccccatgcgcagctttgagaaagagactaacgctgccaccccccagcagcatgttgactctgttgctcacgagtccgagaagaaccccgctgcgccggccgcagaagccctatga

SEQ ID NO: 128758 - protein, 393 aa, Aspergillus nidulans FGSC A4
MSVSFTRSFPRAFIRSYGTVQSSPTAASFASRIPPALQEAVAATAPRTNWTRDEVQQIYETPLNQLTYAAAAVHRRFHDPSAIQMCTLMNIKTGGCSEDCSYCAQSSRYSTGLKATKMSPVDDVLEKARIAKANGSTRFCMGAAWRDMRGRKTSLKNVKQMVSGVREMGMEVCVTLGMIDADQAKELKDAGLTAYNHNLDTSREFYPTIITTRSYDERLKTLSHVRDAGINVCSGGILGLGEADSDRIGLIHTVSSLPSHPESFPVNALVPIKGTPLGDRKMISFDKLLRTVATARIVLPATIVRLAAGRISLTEEQQVACFMAGANAVFTGEKMLTTDCNGWDEDRAMFDRWGFYPMRSFEKETNAATPQQHVDSVAHESEKNPAAPAAEAL

SEQ ID NO: 128759 - DNA, 1125 bp, Candida albicans SC5314
  CDS (1)..(1125): transl_table=12
atgtctgttaaaagatttttctccatgaacgccaaagctttacgagcttttggctccacagttacatccacagccagtgggttcaagccaatgccaatgacagtatctaatgcagctgatactttggccaaagccagatcttcaaaacctagatctgactggaccaaagatgaaattagcaaaatttacaatgctccattgatggatttgattttcaacgctcaattgaaacatcgtgagtaccaaaaacctgctgaagtccaattatgtactcttgttaacattaagcagggtggatgtaccgaaaactgttcttactgttctcaatcatcgaaacatgatactggagttcaagctgaaaaactcgacttggatgctgtgatggacattgctagagatgcgaaagcacgaggtggtactagagtttgccttggttccgcttggagagatatgcaaggaagaaagtctgccttagacaaaatcagtaaagttgttaaacaaatcaacgacgagttgaagttggaaacttgtgttactctcgggatgatcaacgaaaagcaggctgaaattttaaaacagaatggtttgactgcctacaaccacaacattgacacttcaagagaacattatccaaacgtcgtcaccacccgtacatacgacgaaagattagaaaccattaaaaacgtccaaaaagctggtatcaaagcttgtaccggtggtattctcggattgggagaaaccgcacaagatcatgtttcgtttttgtacactttgtccaacatgagtccgcacccagaatcattgccaatcaacagattagttccaatccagggtactccaattgttgaagtgttgaaaaatgcaccaaaggaaagacaattggaatttgatgctattttgagaactattgctactgctagattgattatgcctgaatccatcattagattggccgccggtcgatacaccatgaaggaacacgagcagttcttgtgtttcatgagtggggtcaatgctattttcaccggtaagagaatgttgactacaatgtgtaatggttgggatgaagatatcgccatgttgaagaaatggggtttgaaaccaatggaaagtttcactaagtag

SEQ ID NO: 128760 - protein, 374 aa, Candida albicans SC5314
MSVKRFFSMNAKALRAFGSTVTSTASGFKPMPMTVSNAADTLAKARSSKPRSDWTKDEISKIYNAPLMDLIFNAQLKHREYQKPAEVQLCTLVNIKQGGCTENCSYCSQSSKHDTGVQAEKLDLDAVMDIARDAKARGGTRVCLGSAWRDMQGRKSALDKISKVVKQINDELKLETCVTLGMINEKQAEILKQNGLTAYNHNIDTSREHYPNVVTTRTYDERLETIKNVQKAGIKACTGGILGLGETAQDHVSFLYTLSNMSPHPESLPINRLVPIQGTPIVEVLKNAPKERQLEFDAILRTIATARLIMPESIIRLAAGRYTMKEHEQFLCFMSGVNAIFTGKRMLTTMCNGWDEDIAMLKKWGLKPMESFTK

SEQ ID NO: 128761 - DNA, 1311 bp, Ustilago maydis 521
  CDS (1)..(1311)
atgtcgcttcttcgacagactaacgccggccatctgggccgtcccttggcgggcctgatcggcacctccgctcgacagtgtgctcaacccgtcgcttcggcacgccctactccggcttcgtgtcgtggacgcgcaacagcggtcgacccgaacgatgtcgccgcaaacggcggtgtcgcctcttctttgtcagttgcctccgcttcgacagcagctacttctctgccaagcaacgaaggcgccatccgacataattggtcccgcaaggaagtgcaacggatctacgactctcccttgcttgaactcgtcttccgctccgccaacgttcaccgcatgcatcatcctgtcaaccgtgtccagctttgtaccctgatgaacatcaaggagggcggatgttccgaagactgcggatactgctctcagtcctctaaatacgaaacgccttccaacgcttccaagctcgaagaccttgaaaccgtgctcactgaagcacgcaaggccaaggccaacggaagcacgcgcttctgcatgggtgctgcatggagggaagtcggtggtcgcaagcgcggattcaaccgtatcctcgacatggtccgcgagatccgtggcatgggcatggaagtctgcaccacgcttggtatgttgactccggagcaagccaagcagctcaaggaagccggtttgaccgcttacaaccacaacctcgacacttcgcgcgagtactacggtaaagtggtcaccacccgcagctacgacgaccgtattggaaccatcgccaacgttcgcgaggctggcatctcggtttgctccggtggcatcctcggcttgggcgaagagcacgaagatcgcgttggtctcatctgggagatgagtacgcttcccgagcatccggaaagcttccccgtcaacgcccttgtcgctatccccggtacacccatggagcagaacaagccgatcacattccaagagatgcttcgcaccgttgctacggctcgtatcgtcctgcctggctccatcattcgtctcgctgcaggtcgtcatctgttcaccgagtccgaacaggccatggctttcctcgccggagccaacgctatcttcacaggcgaacgcatgcttacgactccaacctcttcctgggacgaagacaaggctatgctcggtcgttggggtctgcgaggcatgcaaagtttcgaggacaagaccatggcttcacacagcgccgtcacccttgactcgtcccctgctgacgctagcgcaatcgagcaacgtcgtgcaaaggcaaaggccagcgaagccttccagtcggcttag

SEQ ID NO: 128762 - protein, 436 aa, Ustilago maydis 521
MSLLRQTNAGHLGRPLAGLIGTSARQCAQPVASARPTPASCRGRATAVDPNDVAANGGVASSLSVASASTAATSLPSNEGAIRHNWSRKEVQRIYDSPLLELVFRSANVHRMHHPVNRVQLCTLMNIKEGGCSEDCGYCSQSSKYETPSNASKLEDLETVLTEARKAKANGSTRFCMGAAWREVGGRKRGFNRILDMVREIRGMGMEVCTTLGMLTPEQAKQLKEAGLTAYNHNLDTSREYYGKVVTTRSYDDRIGTIANVREAGISVCSGGILGLGEEHEDRVGLIWEMSTLPEHPESFPVNALVAIPGTPMEQNKPITFQEMLRTVATARIVLPGSIIRLAAGRHLFTESEQAMAFLAGANAIFTGERMLTTPTSSWDEDKAMLGRWGLRGMQSFEDKTMASHSAVTLDSSPADASAIEQRRAKAKASEAFQSA

SEQ ID NO: 128763 - DNA, 1167 bp, Cryptococcus neoformans var. neoformans B-3501A
  CDS (1)..(1167)
atgtcttttgcacgctcgctccgcccagtcctcagaagcacggctcccacagcttcccgtggccatgctgtcgcggtcgacgcccctttcctccctccttcgccctcagttcagcagtcagagaagcgaaggtatgtcgatggcgacgttaggcatgactggcgaaggagcgagatccagaaggtctttgatgctccattgatggagatcatctaccgagcggctactgtgcacaggctgcaccaggacgcctctaggatccagctttgtactcttatgaatatcaaaaccggtggatgcactgaaaactgcaaatactgctcccaatcatcctcctacaagacacccacaaaagcttcccggctcgtcagcattgagcctgtgcttgaagctgctcgtcaagccaaggccaacggctccactagattctgcatgggtgctgcttggagagacttggccggtagaaagagtggattcgaaaagatcttggaaatggttaaagaggtcaggggtatgggaatggaggtctgcacgactttgggtatgctctctcctgagcaagctatccggctcaaggaagctggtctcagcgcctataaccacaaccttgacacttctcgagaattctatcccgaggttgtcacctcacgatcatacgatgatcgattgagcaccattgctgccgtgcgagaagctggtatctcagtctgttctggtggcatcctcggtttgggagagcgggatgaggatcgtgtcggattgatccacgaggtttccaggatgcccgagcaccctgagtctttccccgtcaacacacttgtccctatccctggtactcccctcgaaggcaacgagcctgtcaaggtccacaccgtcctccgaaccatcgctactgcccgtatcgttcttcccaagaccatcattcgtctcgccgctggccgacacgaattcagcgagaccgaacaagccatggccttcatggccggtgccaatgccatcttcactggcgagaagatgctcaccaccccttgctccggatgggatgaggacaaggctatgttggacaggtggggtctcaggggccagagaagctttgaggacaaggagagtttggaagtgcctttgaaggctgatcaggtggagactggcgcgagcgctgtgatttag

SEQ ID NO: 128764 - protein, 388 aa, Cryptococcus neoformans var. neoformans B-3501A
MSFARSLRPVLRSTAPTASRGHAVAVDAPFLPPSPSVQQSEKRRYVDGDVRHDWRRSEIQKVFDAPLMEIIYRAATVHRLHQDASRIQLCTLMNIKTGGCTENCKYCSQSSSYKTPTKASRLVSIEPVLEAARQAKANGSTRFCMGAAWRDLAGRKSGFEKILEMVKEVRGMGMEVCTTLGMLSPEQAIRLKEAGLSAYNHNLDTSREFYPEVVTSRSYDDRLSTIAAVREAGISVCSGGILGLGERDEDRVGLIHEVSRMPEHPESFPVNTLVPIPGTPLEGNEPVKVHTVLRTIATARIVLPKTIIRLAAGRHEFSETEQAMAFMAGANAIFTGEKMLTTPCSGWDEDKAMLDRWGLRGQRSFEDKESLEVPLKADQVETGASAVI

SEQ ID NO: 128765 - DNA, 1008 bp, Prochlorococcus marinus str. AS9601
  CDS (1)..(1008): transl_table=11
atgataaattcgaataatcaggtcttaagtgaaattaggttcgattggaataaaaaggagatattagaaattcttaatatgcctctgatcgatttaatgtgggaatcacaaatcgttcacaggaaattcaacagctataacattcaattagcatcattgttcagcgtaaaaactggtggatgtgaggaaaattgttcatattgtagccaatcaatttatagtgctagcgaaataaaaagtcatccacaatttcaagttgaagaggttttagcaagagctaaaatagcaaaaaatgagggtgcagataggttttgtatgggttgggcatggagagaaattagagatggaaaatcttttaatgcaatgttagagatggttagcggtgtaagagatttaggaatggaagcatgcgttactgctgggatgcttacagaagaacaagcttcccgactggctgatgcaggtttaacagcgtacaaccacaatcttgatactagccctgagcattataaaaatattattacgacaagaacttatcaagacagactagatactatcaaaagagtgagaaatgcaggaataaatgtttgttgtggaggaataataggcttgggtgagactaatggcgatagagcatctcttttggaagtgctttcaaacatgaatccacaccctgaaagtgttccaataaattcattagtagctattgaaggtactggtttagaagataatcaagaaattgattctattgagatgataaggatgatagctacagccagaattcttatgcctaaaagtaaaataagattaagtgcaggaagagaaaagctctcaaaagaagcccaaatcttatgttttcaatgcggtgcaaattccattttttacggagatgagttactcactacttcaaatccatcttttcagtcagacagaaaacttctcaaagaggttggagtatcatttaacaaagattttgaaacttgtgaaaaaacattatcttctttatga

SEQ ID NO: 128766 - protein, 335 aa, Prochlorococcus marinus str. AS9601
MINSNNQVLSEIRFDWNKKEILEILNMPLIDLMWESQIVHRKFNSYNIQLASLFSVKTGGCEENCSYCSQSIYSASEIKSHPQFQVEEVLARAKIAKNEGADRFCMGWAWREIRDGKSFNAMLEMVSGVRDLGMEACVTAGMLTEEQASRLADAGLTAYNHNLDTSPEHYKNIITTRTYQDRLDTIKRVRNAGINVCCGGIIGLGETNGDRASLLEVLSNMNPHPESVPINSLVAIEGTGLEDNQEIDSIEMIRMIATARILMPKSKIRLSAGREKLSKEAQILCFQCGANSIFYGDELLTTSNPSFQSDRKLLKEVGVSFNKDFETCEKTLSSL

SEQ ID NO: 128767 - DNA, 1008 bp, Prochlorococcus marinus str. MIT 9515
  CDS (1)..(1008): transl_table=11
atgattaattcagataatcaaaaatttagcaaaattagatttgactgggcaagggatgagattttggaaatattaaattacccattagtagatttaatgtgggaagctcaaattattcatagaagatttaatgaatataaagttcaactagcatctcttttcagtgtgaaaacaggcggatgtgaagaaaattgttcttactgtagccaatcaatttatagctctagtcaaataaagagtcaccctcaatttgaagttgaagctgttttaaacagagccaaaacagcaaaaaaagaaggggctgataggttttgtatgggttgggcttggagagaaattagagatggcaaacctttcaactcaatgcttgaaatggttaaaggtgtaaaagaacttggaatggaggcatgtgtaactgcagggatgcttacagatgagcaggccttgagacttgctgatgcgggactaactgcatacaaccataatcttgatacgagtcccgaatactataaaaatattattacgacaagaacttatcaagacagattagaaactattaaaagagtcagaaatgcaggtataaatgtatgttgcggtggaataataggtcttggagaaaataatggagatagagcatctcttttagaagttctatcaaacatgaatcctcaccctgaaagtgtcccaatcaattctttggtagctatagaaggaacaggtttggaggaaaaaaaagaaattgattccattgagatgataagaatgattgctactgctcggatacttatgccaaaaagtaaaataagattaagtgcgggaagggagaagttaacaaaagaagctcagattatttgttttcaatgtggagcaaactctattttttatggagacgaattactgaccacatcgaatccatcttttcaagatgaccggaaactacttaaggatgtaggagtcttatttaataaagattttgaatattgtgataaaactgtctcgacagtatga

SEQ ID NO: 128768 - protein, 335 aa, Prochlorococcus marinus str. MIT 9515
MINSDNQKFSKIRFDWARDEILEILNYPLVDLMWEAQIIHRRFNEYKVQLASLFSVKTGGCEENCSYCSQSIYSSSQIKSHPQFEVEAVLNRAKTAKKEGADRFCMGWAWREIRDGKPFNSMLEMVKGVKELGMEACVTAGMLTDEQALRLADAGLTAYNHNLDTSPEYYKNIITTRTYQDRLETIKRVRNAGINVCCGGIIGLGENNGDRASLLEVLSNMNPHPESVPINSLVAIEGTGLEEKKEIDSIEMIRMIATARILMPKSKIRLSAGREKLTKEAQIICFQCGANSIFYGDELLTTSNPSFQDDRKLLKDVGVLFNKDFEYCDKTVSTV

SEQ ID NO: 128769 - DNA, 1038 bp, Prochlorococcus marinus str. NATL1A
  CDS (1)..(1038): transl_table=11
atgactctaattaatcctaatatccaggaatctaataaactcaagttcaaagacgaatcatatttagattttaattccataaatggtggagatattagacatgattggtcttcagaagaaatcaaagaaatacttgatttgccgttaatggatttgttgtggagagctcaaatagttcataggtcttacaatcccggttataaagttcagcttgcttctcttctaagtgtgaagacaggtggatgctcagaagactgtgcatattgtcctcaatctgttcacaatgaaacaactgttcaacctaatcctgtaattgaagttgagtcagttcttgatagagcaagagctgcaaaagatgcaggagcagatagattttgcatgggttgggcttggcgtgagatcaaagacggaaacgcattcgattcaatgcttgaaatggtaagaggtgttagagagcttggccttgaggcatgtgtcaccgctggaatgattactgattctcaagcctctagattggcagaagcaggtttaacagcctataaccataatttagatactagtcctgagcattattccaaaatcatttcaacaagaacatatcaagatcgacttgaaacattgagaagagtacgcatggctggaattacagtgtgctgtggtgggattattggcatgggggaatctgtttcagatagagcatctttacttaaggttttagcaactttagacccgcatcctgaaagtgtacctattaatgcgttggttgcagtggaggggacacccatggaggatttgtcttctatcgatccattagagatggttcgtatggtcgcgacggcaagggttattatgcctaaaagccgaataagacttagcgcagggagacaacaattaggtagggaagctcagattctatgtctacaatctggagctgattctatattttatggagatacacttttaactacaagcaatccggaggtggaagcagaccgtaagcttttagcggatgctggaattacggctaatttctcttaa

SEQ ID NO: 128770 - protein, 345 aa, Prochlorococcus marinus str. NATL1A
MTLINPNIQESNKLKFKDESYLDFNSINGGDIRHDWSSEEIKEILDLPLMDLLWRAQIVHRSYNPGYKVQLASLLSVKTGGCSEDCAYCPQSVHNETTVQPNPVIEVESVLDRARAAKDAGADRFCMGWAWREIKDGNAFDSMLEMVRGVRELGLEACVTAGMITDSQASRLAEAGLTAYNHNLDTSPEHYSKIISTRTYQDRLETLRRVRMAGITVCCGGIIGMGESVSDRASLLKVLATLDPHPESVPINALVAVEGTPMEDLSSIDPLEMVRMVATARVIMPKSRIRLSAGRQQLGREAQILCLQSGADSIFYGDTLLTTSNPEVEADRKLLADAGITANFS

SEQ ID NO: 128771 - DNA, 978 bp, Clostridium difficile 630
  CDS (1)..(978): transl_table=11
atggaaaaatacataataaaattaaaaaataaagtattgagagaaaaagaaataagttatgaagaagctcttaatttaataagccttgatacaaataataaaaacgattttgatattctattaaaatctgcaaatgaaataagagaatattttatgggaagaaaagcagatttatgtacgataatgaatgctaaatctggcaaatgtagtgaagactgtaaattttgtgctcagtcttcttattataaaactggtgtagaagaatattcattattagattacaatgaaatcttaaatagagctaaagagatggagagtaaaggagtgcatagattctcattggttacaagtggtaaaggtatgtcaggaaaggagtttaataatattttaaatatctatgaaggattgagggaaaatactaatttaaaattatgtgcatctttaggtattatagattatgagcaagctaaaatgttgaagtcagcaggtgtgactacatatcaccacaatgttgagacgtgtagagataattttcataatatatgtacaacacacacatataaagataggataaaaactataaaagatgctaaaaaagctgggctagatgtatgtgtaggcggtataattggaatgaatgagagtgaagaacagagactaaaaatggcttttgaaatacgagaattaaatgtaaaatcatttccaataaacattttaaatcctattaagaatacaccaatggaaaattatgatgtattagaaccaatggaaatactaaaaacaacagcagtatttaggtttataattcctaatgtgtacataaggtatgctggtggaaggctatcattaaagggatatgacaaagttggatttaatgggggagtaaattctgcaattgttggtgattatttgacaactgttggaagtgggattgaaaatgataaaaaaatgattatagagcaaggatttgaactttaa

SEQ ID NO: 128772 - protein, 325 aa, Clostridium difficile 630
MEKYIIKLKNKVLREKEISYEEALNLISLDTNNKNDFDILLKSANEIREYFMGRKADLCTIMNAKSGKCSEDCKFCAQSSYYKTGVEEYSLLDYNEILNRAKEMESKGVHRFSLVTSGKGMSGKEFNNILNIYEGLRENTNLKLCASLGIIDYEQAKMLKSAGVTTYHHNVETCRDNFHNICTTHTYKDRIKTIKDAKKAGLDVCVGGIIGMNESEEQRLKMAFEIRELNVKSFPINILNPIKNTPMENYDVLEPMEILKTTAVFRFIIPNVYIRYAGGRLSLKGYDKVGFNGGVNSAIVGDYLTTVGSGIENDKKMIIEQGFEL

SEQ ID NO: 128773 - DNA, 1020 bp, Herminiimonas arsenicoxydans
  CDS (1)..(1020): transl_table=11
atgtcgtcgcaacccgttacttttcaggcgcctgtcgctcccatcgttccgacagcatggccggttgacgacgtcttggccctgttcaatctgccattcaacgaattgatgttccgtgcgcaaaccgtgcaccgcgaacatttcgatccgtcggaagtggaactggcaaccctgttgtcgatcaagaccggcggctgcccggaagattgcggctattgcccgcaagccgcgcgttacgacaccggcgtgacggcacaaaaaatcctgcctctggaagaagtattgactgcggcgcgcgaagccaaggcgcacggcgcaacgcgtttctgcatgggcgcggcatggcgtgaaccgaaagatcgcgatctggaaaaagtcgaagagatggtgcgcgaagtaaaagcgatggggatggaaacctgcgccacgctcggcatgctgggcgaaggccaggctgagaaactgaaaaacgccggccttgattactacaatcataatctcgacaccgcgcctgaattctattccaacgtgatctcgacccgcgattaccagaaccgcatcgatacattggcgcgcgtgcgcaatgtgggtatcaaggtctgctgcggcggcatcgtcggcatgggcgaatcgcgtttgcagcgcgccggcctgatcgcgcaattgtgcaatatggacccgtatcctgagtcggtgccggtcaacaatctggtgcaggtcgaaggcacgcctttgcacggtaccgaccctatcgatccgctggaattcgtgcgtaccgttgcggtagcgcgcatcacgatgccgaaggcgcgcgtgcgtttgtccgccggtcggcgtgaaatgggcgaagcgatacaggcgctgtgcttcgttgctggcgcaaactcgattttctacggcgacaagttgctgacgaccggcaatccggaagcgctggccgatcaggagttgctggaaaaactcggcatgcacacacgcagcaccgccatcgatgcgcgttgcgatgtgacgccttcgtaa

SEQ ID NO: 128774 - protein, 339 aa, Herminiimonas arsenicoxydans
MSSQPVTFQAPVAPIVPTAWPVDDVLALFNLPFNELMFRAQTVHREHFDPSEVELATLLSIKTGGCPEDCGYCPQAARYDTGVTAQKILPLEEVLTAAREAKAHGATRFCMGAAWREPKDRDLEKVEEMVREVKAMGMETCATLGMLGEGQAEKLKNAGLDYYNHNLDTAPEFYSNVISTRDYQNRIDTLARVRNVGIKVCCGGIVGMGESRLQRAGLIAQLCNMDPYPESVPVNNLVQVEGTPLHGTDPIDPLEFVRTVAVARITMPKARVRLSAGRREMGEAIQALCFVAGANSIFYGDKLLTTGNPEALADQELLEKLGMHTRSTAIDARCDVTPS

SEQ ID NO: 128775 - DNA, 1005 bp, Bradyrhizobium sp. ORS278
  CDS (1)..(1005): transl_table=11
gtgcagggcgccccgcttcgccatgactggacgcgcgaggaggccgaggtgctctacgcactgccgttccccgacctgatgtttctcgctcaggccacgcatcgccgtcacttcgatccgacgcggctggagaccgcgagtctgctcagcatcaagacgggtggctgtccggaggattgcggctactgctcgcagagcgcgcactacgacaccggtctcaaggcgacgaagctgatggaccaggacgcggtcgtcgcgacggcgcggcgtgccaaagaggccggcgccgatcggttctgcatggccgccgcctggcgcaatccgaaagaccgtgatctcgaccaggtctgcgacatggtcagtgcggtgaaggatcttgggatggagacctgcgtcacgctggggatgctgacgccgccacaggcggcgcggctcaagcaggccgggctcgactactacaaccacaatgtcgatacctcgcccgagttctacgatcgcatcatcaccacgcgcaccatgcaggatcgcatcgatacgctggcgaatgtccgcgaggccggcatcaaggtgtgctgcggcggcatcatcggcatgggcgaggaggtcgacgaccggctcggcatgctggtgctgctggccaatctcgatgcgcatccggacagcgtgccgatcaacatgtggaacgaggtcaagggcgtgcctgtcaacgacacggcggagcggcctgacggaatcgcgctggcgcggctgatcgcggtcgcgcgcatcatgatgccccgcagcgtggtgcggctgtcggccggacggcaatatatgagcgacgagctgcagagcctgtgcctgctcgccggcgccaactcgatcttcatcggcgacgtgctgctgacgacagccaatccgcaggcggagcgcgatgccgatctgctcacgcggctcggcatgacatcgtcattgtcggcgcgctcggttgcagcggtcgacgagaacgtgtccgcgaacgcctga

SEQ ID NO: 128776 - protein, 334 aa, Bradyrhizobium sp. ORS278
MQGAPLRHDWTREEAEVLYALPFPDLMFLAQATHRRHFDPTRLETASLLSIKTGGCPEDCGYCSQSAHYDTGLKATKLMDQDAVVATARRAKEAGADRFCMAAAWRNPKDRDLDQVCDMVSAVKDLGMETCVTLGMLTPPQAARLKQAGLDYYNHNVDTSPEFYDRIITTRTMQDRIDTLANVREAGIKVCCGGIIGMGEEVDDRLGMLVLLANLDAHPDSVPINMWNEVKGVPVNDTAERPDGIALARLIAVARIMMPRSVVRLSAGRQYMSDELQSLCLLAGANSIFIGDVLLTTANPQAERDADLLTRLGMTSSLSARSVAAVDENVSANA

SEQ ID NO: 128777 - DNA, 978 bp, Synechococcus sp. WH 7803
  CDS (1)..(978): transl_table=11
atgagcgaacaggtagacctacgccacgactggacgttggcagagattgaagcgcttctccagagccccttgatggatctgctctggaaggcccaggctgtgcaccgttcggccaatcccggctacaaagtgcagttggcttcgctgctcagtgtcaaaacgggggggtgcgaggaagactgtgcctactgcccgcagtcgatgcatcacagcagtgatgtcacaggccagcctgacctcgaggtgaaggccgtcctcgacagggcccgcgtggctgctgaggccggtgctgatcgcttctgcatgggctgggcctggcgagagatccgcgaggggcctgcgttcgaatcgatgttgtcgatggtgcgtggcgtgcgggagcttggccttgaggcttgcgtgaccgccggcatgctcaccgactcgcaggctgaacgcttggcggaggccgggctcacggcctacaaccacaacctggacaccagtccggagcactacgacagcatcatcaccacgcgcacatatcaggagcgtttggagacgctgcaaagggtccgacaggcaggggtgacgctctgttgtggcggcatcatcggcatgggcgagtcggtgcgtgatcgcgcctcaatgctgcaggtgttggcgtgtctcgatccccatcctgagagtgttccgatcaatgcgctcgttgccgtcgaggggaccccactggaagcccaacccagcatcgaccccctggagcttgtgcgcatggtggctgtcgcccggattctgatgccccagagccgcgtgcggctcagtgccggtcgcgagcaactcaatcgcgaagcccagatcctttgcttgcaggcgggtgccgactcgatcttctatggagactctcttctcaccaccagcaaccccgcggttgagtccgaccgtgcccttctcgctgcggccggagtgcaggccagttggcatgagagtgccgcagcatga

SEQ ID NO: 128778 - protein, 325 aa, Synechococcus sp. WH 7803
MSEQVDLRHDWTLAEIEALLQSPLMDLLWKAQAVHRSANPGYKVQLASLLSVKTGGCEEDCAYCPQSMHHSSDVTGQPDLEVKAVLDRARVAAEAGADRFCMGWAWREIREGPAFESMLSMVRGVRELGLEACVTAGMLTDSQAERLAEAGLTAYNHNLDTSPEHYDSIITTRTYQERLETLQRVRQAGVTLCCGGIIGMGESVRDRASMLQVLACLDPHPESVPINALVAVEGTPLEAQPSIDPLELVRMVAVARILMPQSRVRLSAGREQLNREAQILCLQAGADSIFYGDSLLTTSNPAVESDRALLAAAGVQASWHESAAA

SEQ ID NO: 128779 - DNA, 1014 bp, Acinetobacter sp. ADP1
  CDS (1)..(1014): transl_table=11
atgcaatcatcatggactatgacaatgacattacgtaatgattggactcgtgacgaaatccaagcactctacgatcaaccttttttagatttggtatttcaggcacaacaagtgcatcgtgagcatttttctgccaacacgattcaagtaagtacgttattatcaatcaagacaggaaaatgccctgaagattgtaaatattgttctcaatctgcacattatgattccaaattagaagcagaaaagcgtattgctgtagataaagtaatttctgaagcaaaagctgcaaaagattcaggttcatctcgcttctgtatgggtgcagcgtggcgtaaccctcatgaacgcgatatgccttatgtgttggaaatggtacgagaagtaaaagcgttaggcttggaaacatgtatgacactgggtatgctgaatcaatcacaagccgagcgtttaagtgatgctggattggattattacaatcataatttagatacttcacgtgaatattacaataacattattagtactcgtacttttgatgatcgtttaaatacgctagatcatgtccgcagcgcaggcatgaaagtatgtagtggtggtattgtgggcttgggtgaacagaaacaagaccgaattggtttgttacatgagcttgctacgcttccaattcatcctgagtctgtaccaatcaatatgttggttccaattgaaggcaccccattggctgacgtagaaaaactagatgtaactgagtggattcgcacaattgcagttgcacgtattatcatgccgtatagctatattcgcctttctgctggccgtgaatctttgagcgattcagatcaagcgcttgcttttatggctggtgctaactcattattctctggcgataagttactgacgacaccaaatgcaggtgaaggtaaagatcaggtcttgtttgcaaaattaggccttgttgcagaaaaaccaaaagtatctgtgcgcgctatggctgtcgatgcaatgtcagcttaa

SEQ ID NO: 128780 - protein, 337 aa, Acinetobacter sp. ADP1
MQSSWTMTMTLRNDWTRDEIQALYDQPFLDLVFQAQQVHREHFSANTIQVSTLLSIKTGKCPEDCKYCSQSAHYDSKLEAEKRIAVDKVISEAKAAKDSGSSRFCMGAAWRNPHERDMPYVLEMVREVKALGLETCMTLGMLNQSQAERLSDAGLDYYNHNLDTSREYYNNIISTRTFDDRLNTLDHVRSAGMKVCSGGIVGLGEQKQDRIGLLHELATLPIHPESVPINMLVPIEGTPLADVEKLDVTEWIRTIAVARIIMPYSYIRLSAGRESLSDSDQALAFMAGANSLFSGDKLLTTPNAGEGKDQVLFAKLGLVAEKPKVSVRAMAVDAMSA

SEQ ID NO: 128781 - DNA, 1038 bp, Erwinia carotovora subsp. atroseptica SCRI1043
  CDS (1)..(1038): transl_table=11
atggctgaccgcatttactggacgcttgagcaagcgcaagacttatttaataaacctttcctggaactgatgtttgaagcacagcagatccaccgtcagcattttgatccccgtcaggtgcaggtgagcacgttactgtctattaaaaccggctcctgccctgaagactgcaaatattgcccacagagctcccgctatcggacggggattgataccgagcgcttgatgcaggtcgaacaagtgctggattccgcccgtcaggcgaaagccgctgggtcgacgcgcttttgtatgggcgcagcgtggaaaaatccgcacgagcgtgacatgccttatctggaacagatggtgcaaggcgtcaaagcgatggggatggaaacctgtatgacgctggggatgctacaccacgatcaggctgagcgtttggcctctgccgggctggatttctataaccataacctcgacacctcgccagagttttacggcagcattatcactacccgtacctatcaggagcgtctggatacgctggataaagtgcgcggtgcgggcattaaagtctgttccggcggcattgttgggctgggtgaaaccgtgcgcgatcgcgccgggctgctggtgcagttggctaatttgccgacgccgccggaaagcgtgccgatcaacatgttggtcaaggtgaaagggacaccattggcggataatgaggacgtcgatccgtttgatttcattcgtaccattgccgtagcgcgtatcatgatgccggcctcttatgtgcgcctgtccgccggacgcgagcagatgagtgaacaaacgcaggcaatgtgttttatggctggcgcgaactccattttctacggttgcaaactcttaacgacgccaaacccgaaagaagataaagatctggcgctgttcctcaagttaggtctgaatcctcagcaaacagggaccgaatttggcgacaaccaacagcagcagcgcttggcagaacaactgattaatgctgatagcgagcaattttataatgctgcagtatag

SEQ ID NO: 128782 - protein, 345 aa, Erwinia carotovora subsp. atroseptica SCRI1043
MADRIYWTLEQAQDLFNKPFLELMFEAQQIHRQHFDPRQVQVSTLLSIKTGSCPEDCKYCPQSSRYRTGIDTERLMQVEQVLDSARQAKAAGSTRFCMGAAWKNPHERDMPYLEQMVQGVKAMGMETCMTLGMLHHDQAERLASAGLDFYNHNLDTSPEFYGSIITTRTYQERLDTLDKVRGAGIKVCSGGIVGLGETVRDRAGLLVQLANLPTPPESVPINMLVKVKGTPLADNEDVDPFDFIRTIAVARIMMPASYVRLSAGREQMSEQTQAMCFMAGANSIFYGCKLLTTPNPKEDKDLALFLKLGLNPQQTGTEFGDNQQQQRLAEQLINADSEQFYNAAV

SEQ ID NO: 128783 - DNA, 1167 bp, Propionibacterium acnes KPA171202
  CDS (1)..(1167): transl_table=11
atggactacattgaatcccgttcaatcctgaacggcgttcaggacgtctccagtctcggaaggaccagagtattgctgaatctagccgacatgaccgaacgcggcctgaggggggagtccattacccgcgaggaggccctcgagattcttcgcagcagtgatgatgagctcatgtcaatcatcgccgccgccggaaaagtgcgtcgccactttttcgataaccgggttcgcctcaactacctggtcaacctcaagtccggcctgtgtcccgaagactgctcctattgctcgcagcgtctgggatcgcgtgccgagatcatgaaatactcctgggccgatccgcagaaggtacacgacgccgtcgaggctgggattgccggtggtgcacgtcgcgtctgcatggtggcctccggtcatggtccatctcggcgagacgtcgagcgcgtcaatggcatggtacgttccctcaaagccgaccaccccgacgttgaggtttgtgtctgtttggggtttgtcgacgacgagaaggccgcttccatcaaggaggcgggcgccgacgcctacaaccacaatgccaataccgctcgctctcattacggcaagatctgcagtacccactcctacgaggacaggatggataccgtcgaagtcctcaagcgcaatggtctgtcgccctgctccggagttattgccggcatgggcgagaccgacgaggaattcgtcgatgttatcttcgacctgcgcaagcatggggtcgattcggtgccggtgaatttcttgctccccttcgagggcactccgctggccggtggagcccagcacatcaccccacagtggtgcctcaagcgtctagccatggtgcgctttgctcaccccgactccgaggtgcgcgccgctgccgggcgtgagcaacacatccgtaccatgcagccgctagcccttgaggtcgtcaactcgatcttcctgggggactacctcaccagtgaaggggctgccggcgccgccgacctgcagatgatcgaggatggtggattcattccggagggggccgacggtcaaccgatggttcacaccgacgtcaattcgcatcattcagcaaacctgcccgtcaacgcggtcccgatccgtcatcgcggcatcggaaccgaagttccggcgaacgcctaa

SEQ ID NO: 128784 - protein, 388 aa, Propionibacterium acnes KPA171202
MDYIESRSILNGVQDVSSLGRTRVLLNLADMTERGLRGESITREEALEILRSSDDELMSIIAAAGKVRRHFFDNRVRLNYLVNLKSGLCPEDCSYCSQRLGSRAEIMKYSWADPQKVHDAVEAGIAGGARRVCMVASGHGPSRRDVERVNGMVRSLKADHPDVEVCVCLGFVDDEKAASIKEAGADAYNHNANTARSHYGKICSTHSYEDRMDTVEVLKRNGLSPCSGVIAGMGETDEEFVDVIFDLRKHGVDSVPVNFLLPFEGTPLAGGAQHITPQWCLKRLAMVRFAHPDSEVRAAAGREQHIRTMQPLALEVVNSIFLGDYLTSEGAAGAADLQMIEDGGFIPEGADGQPMVHTDVNSHHSANLPVNAVPIRHRGIGTEVPANA

SEQ ID NO: 128785 - DNA, 1011 bp, Mannheimia succiniciproducens MBEL55E
  CDS (1)..(1011): transl_table=11
atgaaaacaacattacaactttattcgaatacacctcatcctcaggtggaatattggtctgtttgtaaggtggaggcgcttttcgaaacgccgtttttagaattagtgcatcgtgcggctttagttcatcgtgaaaattttaatccgcaagccattcaactctcgaccttaatgtcaatcaaaaccggcggttgtccggaagattgcggttattgtccccaatccgctcgctatcaaaccggcgtgcagaagcaggaattattaaatgtcgaagatattgttgaaaaagctaaaattgctaagtcccgcggtgcaagccgtttctgtatgggggccgcttggcggggacctaaaccgaaagacatcgccaaaatgaccgaaattattaaagcggtgaaagcattggggttagaaacctgcggaactttcggattattagatgatggtatggcggaagatttaaaagaggcgggattagattattacaaccataatttagatacttctccggaacattataataaagtaataggtacccgcggttttgacgatcgcttaaataccctggggaaagtacgtaaagccgggttaaaagtgtgttgcggcggtattatcgggatgaatgagagccgtaaagagcgggcgggctttattgcaagcctggctaatttagatccgcaaccggaatccgtgccgattaatcaattggttaaagtcgaaggtacgccgctttcggatgcgcaggaattggattggaccgaatttgtccgcacggttgcggttgcaagaataaccatgccaaaaagttatgtgcgtttatccgccgggcgacaaggcatgtcggaggaaatgcaggcgatgtgttttatggcgggtgccaactccattttttatggcgataaattgctggttaccggcaatgcggaagaagattgcgatagactgctaatggaaaaattggatttagaaccggaaaccactgaaaaccgttacctttcgcaaaataattaa

SEQ ID NO: 128786 - protein, 336 aa, Mannheimia succiniciproducens MBEL55E
MKTTLQLYSNTPHPQVEYWSVCKVEALFETPFLELVHRAALVHRENFNPQAIQLSTLMSIKTGGCPEDCGYCPQSARYQTGVQKQELLNVEDIVEKAKIAKSRGASRFCMGAAWRGPKPKDIAKMTEIIKAVKALGLETCGTFGLLDDGMAEDLKEAGLDYYNHNLDTSPEHYNKVIGTRGFDDRLNTLGKVRKAGLKVCCGGIIGMNESRKERAGFIASLANLDPQPESVPINQLVKVEGTPLSDAQELDWTEFVRTVAVARITMPKSYVRLSAGRQGMSEEMQAMCFMAGANSIFYGDKLLVTGNAEEDCDRLLMEKLDLEPETTENRYLSQNN

SEQ ID NO: 128787 - DNA, 1002 bp, Bacillus licheniformis ATCC 14580
  CDS (1)..(1002): transl_table=11
atgaatcagtggatggaacttgcagaacgtgtgctggatggcggggaagtaactgaaaaagaggcgctttccatcttggaatgcccggatgacgacgttcttctgcttatgcatgccgcttttcaaatcagaaaacgctactacggaaaaaaagtaaagctcaatatgattatgaatgcaaaatccggcctttgtccggaaaactgcggctactgctcgcagtcttcgatatcaaaagcgccgatcgacagctaccggatggtcgacaaaacgaccttgcttgaaggcgcaaagcgtgcgcacgatttaaatatcggaacatactgcatcgtggcgagcggcagaggaccgtccaacagagaagtcgatcaagtggtcgacgccgttaaagaaatcaaagaaacgtacggtttaaaaatctgcgcatgcctcggactgctaaagcccgggcaagccgagcggctgaaggaagccggagtagaccggtacaatcacaacatcaatacatcaaaaaccaaccattcaaatattacaacgtcccacacgtatgatgacagggtgaacactgtggaaacagccaaaaaatccgggatgtccccatgttcgggcgtcatcgtcgggatgaaagagacgaagcaggatgtcgttgatatggcgaaaagcttaaaggcgctggatgccgactcgattccagttaattttttgcatgcgatcgacgggactccgctggaaggggtcaatgaattgaatccgctttattgtttaaaggttttagctttgttccgctttatcaacccgacaaaggaaatccgcatttcaggggggcgcgaagtcaacctccgctccttgcagccgttggggctgtatgccgccaattcaatcttcgtcggagactatttaacgacggcaggacagaatgaaacagaggaccataagatgcttcatgatttagggttcgaagtcgaatcggtcgaagaaatgaaagccagtttacagcggtag

SEQ ID NO: 128788 - protein, 333 aa, Bacillus licheniformis ATCC 14580
MNQWMELAERVLDGGEVTEKEALSILECPDDDVLLLMHAAFQIRKRYYGKKVKLNMIMNAKSGLCPENCGYCSQSSISKAPIDSYRMVDKTTLLEGAKRAHDLNIGTYCIVASGRGPSNREVDQVVDAVKEIKETYGLKICACLGLLKPGQAERLKEAGVDRYNHNINTSKTNHSNITTSHTYDDRVNTVETAKKSGMSPCSGVIVGMKETKQDVVDMAKSLKALDADSIPVNFLHAIDGTPLEGVNELNPLYCLKVLALFRFINPTKEIRISGGREVNLRSLQPLGLYAANSIFVGDYLTTAGQNETEDHKMLHDLGFEVESVEEMKASLQR

SEQ ID NO: 128789 - DNA, 948 bp, Legionella pneumophila subsp. pneumophila str. Philadelphia 1
  CDS (1)..(948): transl_table=11
gtgtctgaagaaaaaaaacagtggtcaatttctgatattgaagcaatttatcaacaaccatttaatgatttgctttatcaagcacataccattcataggacatatcacgatcctaattctttacaatttgcaaccttgttaagcattaaaacgggcgcatgcccagaagattgtggctattgctctcaaagtggtcactataaaacgcatgtagaaaaagaaaaattgatgtcagttgaagaggtattgcaatgtgccaaagaagcaaaggagggtggggcaaaacgtttttgtatgggagctgcatggcgttgtccacctgataaagcaattccgcagctaaaagaaatgatagaaggagtaaaatctttagggcttgaaacctgtatgactttaggcatgcttaccaaagaacaggcctctcatttaaaggaggctggattggattattataaccataatattgatacctcaccatcctattacgataaggtggtaaccactcgaaaattcagtgatcgattagatactttaaataacgttcgttcagcgggaattaatgtatgttgtggtggtattttaggattgggggaaaccagagaagatcgaatcgaatttttattaacattagctaatatggaaactcctccggaaagtgtgccaattaatcgtttaattccagtggagggaacacctttagcccaagctgagagagtagaagggattgaattggtaagaaccattgctacagcaagaattttaatgcctaaaagtgctattagattgacagctggtcgaaccgaaatgagcgacgagttacaagcactttgctattttgccggagctaattctgtgtttattggcgataaattattgacagaagataatccccagcgcttcaaagacaaaactctttttaacaaactgggtttgactgagatggtataa

SEQ ID NO: 128790 - protein, 315 aa, Legionella pneumophila subsp. pneumophila str. Philadelphia 1
MSEEKKQWSISDIEAIYQQPFNDLLYQAHTIHRTYHDPNSLQFATLLSIKTGACPEDCGYCSQSGHYKTHVEKEKLMSVEEVLQCAKEAKEGGAKRFCMGAAWRCPPDKAIPQLKEMIEGVKSLGLETCMTLGMLTKEQASHLKEAGLDYYNHNIDTSPSYYDKVVTTRKFSDRLDTLNNVRSAGINVCCGGILGLGETREDRIEFLLTLANMETPPESVPINRLIPVEGTPLAQAERVEGIELVRTIATARILMPKSAIRLTAGRTEMSDELQALCYFAGANSVFIGDKLLTEDNPQRFKDKTLFNKLGLTEMV

SEQ ID NO: 128791 - DNA, 969 bp, Burkholderia mallei ATCC 23344
  CDS (1)..(969): transl_table=11
gtggccgcgcccgccgcgccgcgctggcgcgtcgccgacgtgatcgcgctctacgagctgccgttcaacgatctgctgttccgcgcgcagcagacgcaccgcgagcacttcgacgcgaacgcgatccagctctcgacgctgctgtcgatcaagacgggcggctgcgaggaggactgcggctactgctcgcagtccgcgcatcacgacaccggcctgaaggcggagaagctgatggaggtggacgcggtgctcgccgccgcgcgcaccgcgaaggaaaacggcgcgacgcgcttctgcatgggcgccgcgtggcgcaacccgaaggatcgccacatcgagccgatcaaggagatgatccgcggcgtgaaggacatgggcctcgagacgtgcgtgacgctcggcatgctcgaggaacaccaggcgaaggcgctggcggaggcgggcctcgactattacaaccacaacctcgacacgtcgcccgaattctatgggcagatcatctcgacgcgcacgtaccaggatcgcctcgacacgctcgagcgcgtgcgcgacgcgggcatcaacgtatgctgcggcgggatcatcgggatgggcgaatcgcgccgcgagcgcgcgggcctgatcgcgcagctcgcgaacatgaacccgtatccggaatcggtgccgatcaacaatctcgtcgcgatcgaaggcacgccgctcgagaacgcgcaggcgctcgatccgttcgagttcgtgcgtacgatcgcggtcgcgcgcatcacgatgcccaaggcgatggtgcgcttgtcggcgggccgcgagcagctcgacgacgcgatgcaggcgctgtgcttcctcgccggcgcgaattcgatgttctacggcgacgtgctgctcacgaccggcaatccgcgcgcggaagcggaccgcaagctgctcgcgcggctcggcatgtcggcaagcgaggcgtcgcagttgagcgcctga

SEQ ID NO: 128792 - protein, 322 aa, Burkholderia mallei ATCC 23344
MAAPAAPRWRVADVIALYELPFNDLLFRAQQTHREHFDANAIQLSTLLSIKTGGCEEDCGYCSQSAHHDTGLKAEKLMEVDAVLAAARTAKENGATRFCMGAAWRNPKDRHIEPIKEMIRGVKDMGLETCVTLGMLEEHQAKALAEAGLDYYNHNLDTSPEFYGQIISTRTYQDRLDTLERVRDAGINVCCGGIIGMGESRRERAGLIAQLANMNPYPESVPINNLVAIEGTPLENAQALDPFEFVRTIAVARITMPKAMVRLSAGREQLDDAMQALCFLAGANSMFYGDVLLTTGNPRAEADRKLLARLGMSASEASQLSA

SEQ ID NO: 128793 - DNA, 1020 bp, Burkholderia pseudomallei K96243
  CDS (1)..(1020): transl_table=11
atgaccgacatgactgaagctcaaaccgcttgcgcgacgaccgaaacaccggtggccgcgcccgccgcgccgcgctggcgcgtcgccgacgtgatcgcgctctacgagctgccgttcaacgatctgctgttccgcgcgcagcagacgcaccgcgagcacttcgacgcgaacgcgatccagctctcgacgctgctgtcgatcaagacgggcggctgcgaggaggactgcggctactgctcgcagtccgcgcatcacgacaccggcctgaaggcggagaagctgatggaggtggacgcggtgctcgccgccgcgcgcaccgcgaaggaaaacggcgcgacgcgcttctgcatgggcgccgcgtggcgcaacccgaaggatcgccacatcgagccgatcaaggaaatgatccgcggcgtgaaggacatgggcctcgagacgtgcgtgacgctcggcatgctcgaggaacaccaggcgaaggcgctggcggaggcgggcctcgactattacaaccacaacctcgacacgtcgcccgaattctatgggcagatcatctcgacgcgcacgtaccaggatcgcctcgacacgctcgagcgcgtgcgcgacgcgggcatcaacgtatgctgcggcgggatcatcgggatgggcgaatcgcgccgcgagcgcgcgggcctgatcgcgcagctcgcgaacatgaacccgtatccggaatcggtgccgatcaacaatctcgtcgcgatcgaaggcacgccgctcgagaacgcgcaggcgctcgatccgttcgagttcgtgcgtacgatcgcggtcgcgcgcatcacgatgccgaaggcgatggtgcgcttgtcggcgggccgcgagcagctcgacgacgcgatgcaggcgctgtgcttcctcgccggcgcgaattcgatgttctacggcgacgtgctgctcacgaccggcaatccgcgcgcggaagcggaccgcaagctgctcgcgcggctcggcatgtgggcaagcgaggcgtcgcagttgagcgcctga

SEQ ID NO: 128794 - protein, 339 aa, Burkholderia pseudomallei K96243
MTDMTEAQTACATTETPVAAPAAPRWRVADVIALYELPFNDLLFRAQQTHREHFDANAIQLSTLLSIKTGGCEEDCGYCSQSAHHDTGLKAEKLMEVDAVLAAARTAKENGATRFCMGAAWRNPKDRHIEPIKEMIRGVKDMGLETCVTLGMLEEHQAKALAEAGLDYYNHNLDTSPEFYGQIISTRTYQDRLDTLERVRDAGINVCCGGIIGMGESRRERAGLIAQLANMNPYPESVPINNLVAIEGTPLENAQALDPFEFVRTIAVARITMPKAMVRLSAGREQLDDAMQALCFLAGANSMFYGDVLLTTGNPRAEADRKLLARLGMWASEASQLSA

SEQ ID NO: 128795 - DNA, 975 bp, Anaplasma marginale str. St. Maries
  CDS (1)..(975): transl_table=11
gtgataagaaataattggacgcttgaggaggcattggagcttttccgtatgccgtttagcgacctcatactcaaggcccactcagtacatgtgcagaatttccgaaataatgaggtccaagtcgcggcgctcatgaacatcaaaaccgggagctgtccggaaaactgccgctattgcgcccagagtgcacactacaacacaggccttgaaaagaaatccctatccactgttgaagaagtcaaaacagctgcgaagagggcaaaagaaattggggctgacagattttgcttcgcggcagcgtggcgaaatttgcatgacagagatttagaaaagatctgccaattcgtagaagcaataaaaagcgaagggttggagagctgcgcgtccctgggcatgttaaagctcgatcaagcacaaaaactaaaggagtcgggcctagatttttataaccacaacgtggacacttcccgcgaattctatcacaacgtggtcaccacacgtacgtacgaggagaggctggagaccgtgcgcaatgtccagcaagcgggcatcaaagtctgctgtggaggaatactgggtatgggtgaaagcaccgaggatagggcaagtatgttggtgactctagcaaatttggagcaacatccactctctgtaccaatcaatcgtctcgttccgatcgagggcacccctatggaaggcaacccgaagattgacaatattgatttcgtccgcaccatcgcggttgcgcgcatcatgatgcccgcgtcctacgtgcgccttgcagcaggaaggggggaaatgtcggaagagatgcaggcgctgtgtatgttggcaggagcgaactccatattttgtggcgagaagcttctaaccacgccaaatgccagaccagaagacgaccagcggctgttttcgcagttaggaatcacgccttcccgtgcggcttgcaccacttccgatgcgcagcttgcgtga

SEQ ID NO: 128796 - protein, 324 aa, Anaplasma marginale str. St. Maries
MIRNNWTLEEALELFRMPFSDLILKAHSVHVQNFRNNEVQVAALMNIKTGSCPENCRYCAQSAHYNTGLEKKSLSTVEEVKTAAKRAKEIGADRFCFAAAWRNLHDRDLEKICQFVEAIKSEGLESCASLGMLKLDQAQKLKESGLDFYNHNVDTSREFYHNVVTTRTYEERLETVRNVQQAGIKVCCGGILGMGESTEDRASMLVTLANLEQHPLSVPINRLVPIEGTPMEGNPKIDNIDFVRTIAVARIMMPASYVRLAAGRGEMSEEMQALCMLAGANSIFCGEKLLTTPNARPEDDQRLFSQLGITPSRAACTTSDAQLA

SEQ ID NO: 128797 - DNA, 987 bp, Azoarcus sp. EbN1
  CDS (1)..(987): transl_table=11
atgacaatgacttcagcgcccgctgccgaacgcccggccgccccggccgtaccccgcatcaagtggaccgtggtcgaagccgtcgagctgttcgaacagcctttcatggacctgctcttccgcgcgcagcaggtgcatcgcgcacatttcgacccgaacgcggtgcagcgctcgacgctgctgtcgatcaagaccggcggctgctcggaagactgcggctactgctcgcaatcgacgcgccacaataccgggctagaccgtgaacagctgctgaaagtggccgaagtcgtcgagcacgcgaaagcggcgaaagcgaagggagcgtcgcgcttctgcatgggcgcggcgtggcgcgggcccaaagacaaggacatggagacggtgctggcgatggtgcgcgaggtcaaggcgctcggcctcgagacctgcgtgaccctcggcatgctcaaaggcgaccaggcgctgcagctcaaggaagccggcctcgactactacaaccacaatctcgacaccgcgccggagttctatggccaagtcatcacgacgcacaccctggcggaccgcctcgacacgctcgaacaggtgcgtggcgccggcatcaacgtctgttccggcggcatcgtcggcatgggcgagggacggcgcagccgggccggcctgctggtgcaactcgcgaacatggcgtcgccgccggaatcggtgccgatcaacaacctcgtaccggtgcccggcacgccgctcgaaaacgtcgacaagatcgatccgttcgaattcgtccgcacgatcgccgcggcccgcatcatgatgccgacgagtttcgtgcgcctgtccgccgggcgccagcagatgagcgacgagctgcaggcgctgtgcttcatggccggtgcgaactcgatcttctacggcgaccgcctgctgacgaccgacaatcccgacaccgaccgcgacgaggcgctgttcgcgcgcctcggcctgcgtcccgtctga

SEQ ID NO: 128798 - protein, 328 aa, Azoarcus sp. EbN1
MTMTSAPAAERPAAPAVPRIKWTVVEAVELFEQPFMDLLFRAQQVHRAHFDPNAVQRSTLLSIKTGGCSEDCGYCSQSTRHNTGLDREQLLKVAEVVEHAKAAKAKGASRFCMGAAWRGPKDKDMETVLAMVREVKALGLETCVTLGMLKGDQALQLKEAGLDYYNHNLDTAPEFYGQVITTHTLADRLDTLEQVRGAGINVCSGGIVGMGEGRRSRAGLLVQLANMASPPESVPINNLVPVPGTPLENVDKIDPFEFVRTIAAARIMMPTSFVRLSAGRQQMSDELQALCFMAGANSIFYGDRLLTTDNPDTDRDEALFARLGLRPV

SEQ ID NO: 128799 - DNA, 957 bp, Silicibacter pomeroyi DSS-3
  CDS (1)..(957): transl_table=11
atggctgaggcgatccgctctgactggagcgtggacgaggtggaggcgctgttgcgccttcccctgctcgacctggtggggcgcgccaatggggtgcatcgcgcccatcacgcgcccgatgacatccaaaaggccagcctgctcagcatcaagaccggcggttgccccgaggattgcgcctattgcccgcaatcggcccatcaccgcgaggtcgagctgacccgggaaaagctgatgaaccccgatcacgtggtctctctggcgcggcgggcacagcgggccggggccgaacggttctgcatgggtgcggcctggcggcaggtgcgcgatggcgccgagttcgacaatgtgctggccatggtgcgcggggtgcgcgccctggggatggaggcctgcgtgacactgggcatgttgcggccccatcaggcgcagcgactggccgaggcggggctgacggcgtataaccacaacctcgacacttcgcccgagttctatggccagatcatcggcacccgcacctatcaggaccggctcgatacgctggcctattgccgcgatgccgggattgagctgtgttgcgggggcatcatcggcatgggtgagagcctgcgcgaccgcgccgcgatgttgcaggtgctggcgaatttcgcgccccatcccgaaagcgtaccgatcaacgcgctgatccccatcgaaggcacgccgctggcgcatcgcgagcgggtaggcatctttgatctggtgcgcatggtcgccacggcgcggatcatcatgccgctgacacgggtgcggctgtcggcgggccgctcggatttcagcgccgccgagcaggcgctgtgctttctggccggggccaattcggtgttttatggcgacgtgttgctgaccgcgcccaatgccgggaccggcgccgatgccgagttgttcgccgccctgggcgcgctggaaacggcctga

SEQ ID NO: 128800 - protein, 318 aa, Silicibacter pomeroyi DSS-3
MAEAIRSDWSVDEVEALLRLPLLDLVGRANGVHRAHHAPDDIQKASLLSIKTGGCPEDCAYCPQSAHHREVELTREKLMNPDHVVSLARRAQRAGAERFCMGAAWRQVRDGAEFDNVLAMVRGVRALGMEACVTLGMLRPHQAQRLAEAGLTAYNHNLDTSPEFYGQIIGTRTYQDRLDTLAYCRDAGIELCCGGIIGMGESLRDRAAMLQVLANFAPHPESVPINALIPIEGTPLAHRERVGIFDLVRMVATARIIMPLTRVRLSAGRSDFSAAEQALCFLAGANSVFYGDVLLTAPNAGTGADAELFAALGALETA

SEQ ID NO: 128801 - DNA, 969 bp, Ehrlichia ruminantium str. Welgevonden
  CDS (1)..(969): transl_table=11
atgtgtacttcaataagacatgattggcagctacctgaagtattagagctctttaatcttccatttaacgatttaatattgaatgctcatctaatacataggaagttttttaatagtaatgagatacagattgctggattgttaaatattaagactggtggatgcccggaaaactgtaaatattgctcacagagtgctcactataaaacacaacttaaaaaagaagatttactcaacattgaaactataaaggaagcaataaaaaaagctaaagtaaatggtatagataggttttgttttgcagcagcttggcgtcaaatacgagacagagatatagaatatatttgcaacattattagcttaataaaaagtgaaaacctagaaagctgtgcttcattaggaatggttactctggaacaagcaaaaaaattaaaaacagcaggtttagatttctataatcataacatcgatacttcacgtgatttttactataatgtcaccaccacacgcagctatgatgacagattatcaagtttaaataacattagtgaagcagaaattaatatatgctccggtggtatactaggacttggagaaagtattgaagatagagcaaaaatgctcttaactttagcaaatttaaaaaagcatccaaagtctgttcctataaatagactagttccaataaaaggaacaccttttgaaaataatccaaaaataagcaatatagattttattagaactattgctgtagctcgtattttgatgccagaatcatatgtacgtcttgctgcagggcgtgaaagtatgtcacacgagatgcaagcattatgcttatttgctggagcaaattctttgttttatggagaaaaattacttacaaccccaaatgcagattgtaatgatgacaagaatctgttatcaaaacttggagtcaaaacaaaacaagccgtcttttttgattcataa

SEQ ID NO: 128802 - protein, 322 aa, Ehrlichia ruminantium str. Welgevonden
MCTSIRHDWQLPEVLELFNLPFNDLILNAHLIHRKFFNSNEIQIAGLLNIKTGGCPENCKYCSQSAHYKTQLKKEDLLNIETIKEAIKKAKVNGIDRFCFAAAWRQIRDRDIEYICNIISLIKSENLESCASLGMVTLEQAKKLKTAGLDFYNHNIDTSRDFYYNVTTTRSYDDRLSSLNNISEAEINICSGGILGLGESIEDRAKMLLTLANLKKHPKSVPINRLVPIKGTPFENNPKISNIDFIRTIAVARILMPESYVRLAAGRESMSHEMQALCLFAGANSLFYGEKLLTTPNADCNDDKNLLSKLGVKTKQAVFFDS

SEQ ID NO: 128803 - DNA, 1053 bp, Neisseria gonorrhoeae FA 1090
  CDS (1)..(1053): transl_table=11
atgaccgtatcccccgtcgccttgcgccgtaagaccgagtgcaagcctcatcccaccgcgcgctattggaaaaaatgcgatgtcgaggcacttttcggactgccgtttttagaacttgtctatcaggcggcagaagtccaccgccaaaatttcaacccgcgcgaaatccagctttccacgctgttgtccatcaaaaccggcggttgtcccgaagattgcgcctactgtccgcaatcagcgcaccacaacaccaatttgggcaaagagcagatgatggatgtggatgaaatcgtcgaaaaagccaaaatcgccaaatcgcgcggcgcaagccggttttgtatgggcgcggcatggcgcggccccaaacccaaagacgtggagacggtttccgcaatcatcaaagccgtcaagggcttaggtatggaaacctgcggcacgttcggtatgctcgaagaaggtatggcggaagacttgaaagaggcgggcttggattattacaaccacaacctcgacaccgaccccgaccgctacaacgacatcatccacacacgccggcacgaagaccgtatggataccttgggcaaagtccgcaacgccggtttgaaagtctgctgcggcggcatcgtcgggatgaacgaaacccgcgccgaacgcgccgggctgattgccagcctcgccaacctcgacccgcagcccgaaagcgtgccgattaaccggttggtcaaagtggaaggcacgccgcttgccgatgccgaagatttggattggaccgaatttgtccgtacggtttccgtagcgcggattacgatgccgcaaagttatgtccgcctctcggcagggcgcagcaatatgcctgaagcgatgcaggcgatgtgcttcatggcgggtgcgaactcgattttttacggcgacaagctgttgaccacaggcaatcctgatgaggacggcgatagaatcctgatggaaaagcttaacctgtatcccttgcagtttgagccggaaggcgaggtcgccgaagtggaaaaagcctccgggattaaagcggattattga

SEQ ID NO: 128804 - protein, 350 aa, Neisseria gonorrhoeae FA 1090
MTVSPVALRRKTECKPHPTARYWKKCDVEALFGLPFLELVYQAAEVHRQNFNPREIQLSTLLSIKTGGCPEDCAYCPQSAHHNTNLGKEQMMDVDEIVEKAKIAKSRGASRFCMGAAWRGPKPKDVETVSAIIKAVKGLGMETCGTFGMLEEGMAEDLKEAGLDYYNHNLDTDPDRYNDIIHTRRHEDRMDTLGKVRNAGLKVCCGGIVGMNETRAERAGLIASLANLDPQPESVPINRLVKVEGTPLADAEDLDWTEFVRTVSVARITMPQSYVRLSAGRSNMPEAMQAMCFMAGANSIFYGDKLLTTGNPDEDGDRILMEKLNLYPLQFEPEGEVAEVEKASGIKADY

SEQ ID NO: 128805 - DNA, 996 bp, Chlamydophila abortus S26/3
  CDS (1)..(996): transl_table=11
atggaaacacactctgaattatggtcattagaagctattaaagaagtatataacactcctatttttgagttaatccatagggcgaacgctatattaagaagtaattttcctcactccgaattacagacatgttatcttgtgtcgataaaaacaggtggttgcactgaagattgcgcttattgcgcacagtcttcacgttaccaaacacatgttaaaccagaaccaatgatgaaaatcacagaagttttggatagggcaaaacaggctatacgtgctggagccacgcgcgtatgtcttggagctgcttggagagaagtcaaagataaccatcaatttgatcgcacgttagaaatgatcaaaggcattaccgatatgggtgctgaggtatgttgtactcttggtatgctcactccaagtcaagcagaaaagctctttgaagccggcctctatgcttataatcacaacttagattcttctgaaggtttttacaagacaatcattaccacacgcaaatatgaagatcgtttacgcactttggatatcgttgaaaaatctggacttcatgtttgttgtggtgggattattggcatgggagagactgttgaagatcgtgtcgagctgcttcataatctcgcacgtcgagaacgtatgccagaatcggtacctgtcaatgtgctttggccgataaaaggaactcccctatacgatcaagcatcgatatctttttgggagatcttacgtacgatagctacagcacgtattgtgtttccccaatccatggtacgcctggccgcaggacgtgcttttctttctgtggaacaacaaactctatgtttcattgccggagcgaattcgattttctatggtgagaaactcctcactgtagataacaacgatatggatgcagacactgccatgttgaatttacttggcatgcgccaccgtccatcattttcaatggaaagagggcaaccatgccaatctgtgacctgttag

SEQ ID NO: 128806 - protein, 331 aa, Chlamydophila abortus S26/3
METHSELWSLEAIKEVYNTPIFELIHRANAILRSNFPHSELQTCYLVSIKTGGCTEDCAYCAQSSRYQTHVKPEPMMKITEVLDRAKQAIRAGATRVCLGAAWREVKDNHQFDRTLEMIKGITDMGAEVCCTLGMLTPSQAEKLFEAGLYAYNHNLDSSEGFYKTIITTRKYEDRLRTLDIVEKSGLHVCCGGIIGMGETVEDRVELLHNLARRERMPESVPVNVLWPIKGTPLYDQASISFWEILRTIATARIVFPQSMVRLAAGRAFLSVEQQTLCFIAGANSIFYGEKLLTVDNNDMDADTAMLNLLGMRHRPSFSMERGQPCQSVTC

SEQ ID NO: 128807 - DNA, 1158 bp, Pseudomonas fluorescens Pf-5
  CDS (1)..(1158): transl_table=11
ttgacagtgcatgactcttccttaaatatgccgaacatccgtgtcgcggctgtgggctttcctgtcctgcgccgcttgccaagcataatcaaggaatcgcccatgagcgccagcaccaccgccaccctgcgtcatgactggactttggctgaagtcaaagccctgttcgtccagcctttcaatgacttgctgttccaggcgcagacggtgcaccgcgcgcatttcgacgccaatcgggtccaggtttccacgctgctgtcgatcaagaccggcgcctgcccggaagattgcaaatattgtccgcagtccggtcactacaacaccggcctggaaaaggaaaagctccttgaggtgcagaaggtcctggaagaggccgcccgggccaaggccatcggttctacccgtttctgcatgggcgcggcctggaagcacccttcggccaaggacatgccctatgtgctggagatggtcaaaggcgtgaaggccatgggcctggaaacctgcatgaccctgggccgtctcgatcaggaccagaccgaggcgctggccaaggccggcctggactactacaaccacaacctcgatacctcgccggagttctacggcaacatcatcaccacccgcacctacagcgagcgcctgcagaccctggcctatgtgcgtgacgcgggcatgaagatctgttccggcggcattctcggcatgggcgaatccctggatgaccgcgccggcctgctgatccagctggccaacctgccggagcatccggagtcggtgccgatcaacatgctggtgaaggtggcgggtacgccgctggaaaatgccgaagaggtagaccccttcgactttatccgcatgctcgcggtggcgcggattctcatgccgcaatcccatgtgcggctatcggccggccgtgaggcgatgaacgagcagatgcaggccctggcgttcttcgctggcgccaactcgattttctatggcgacaagttgctgaccaccgccaacccgcaggccgacaaggacatgcagttgttcgcgcgcctgggcatccagcccgaagcccgcgaagaacacgccgacgaggtgcaccaggccgccatcgaacaggccctggtggagcagaaaagcagcgagcagttctacaacgccgccgtctga

SEQ ID NO: 128808 - protein, 385 aa, Pseudomonas fluorescens Pf-5
MTVHDSSLNMPNIRVAAVGFPVLRRLPSIIKESPMSASTTATLRHDWTLAEVKALFVQPFNDLLFQAQTVHRAHFDANRVQVSTLLSIKTGACPEDCKYCPQSGHYNTGLEKEKLLEVQKVLEEAARAKAIGSTRFCMGAAWKHPSAKDMPYVLEMVKGVKAMGLETCMTLGRLDQDQTEALAKAGLDYYNHNLDTSPEFYGNIITTRTYSERLQTLAYVRDAGMKICSGGILGMGESLDDRAGLLIQLANLPEHPESVPINMLVKVAGTPLENAEEVDPFDFIRMLAVARILMPQSHVRLSAGREAMNEQMQALAFFAGANSIFYGDKLLTTANPQADKDMQLFARLGIQPEAREEHADEVHQAAIEQALVEQKSSEQFYNAAV

SEQ ID NO: 128809 - DNA, 1137 bp, Psychrobacter arcticus 273-4
  CDS (1)..(1137): transl_table=11
atgtcagcactacttaatatcacagagccaaataacaacactaataccaagaacgatcattttttagcgtcattaacgactgatgccacacaatctactgccagtaaatacagtcgcgagcaaattgctcaattattcgatttgccattgatggacttgttattacaagcacaaaccatacatcgtcagaactttactgccaatgaagtacaaatcagtaccttgttgtccatcaagactggcaactgccctgaagattgcggctactgctcacaatctggtcaccaccgcgataaaactgagctagttgctgaaaaacgcatagaggtgagtaaagtgattgccgctgccaaacgcgcaaaagccactggttcatcgcgattttgtatgggcgctgcatggaagcaccccagcgcgaaagacatgccttatgtggtggaactggtcaaagaagtcaaagccttaggacttgagacctgcatgaccctaggtatgctagatactgatcaagccgcgcagttggcaaatgctggactggattactacaatcataatttggatacttctagaagttactacgagcaagtagtcagtacgcgcagctatgatgagcgtctagataccattgcaaacgtacgcaactcaggtatcaatgtctgtagcggtaatatcgttggtatgggtgaaagccgtgacgaccgcatcgactgggtacatgagctgctaaaaatgcctaaagcaccagagtcaattccagtcaacttactggtgccgattcaaggaactccaatcggtgataaggtcttggcagaaggtcaattgtcagtccttgagtggattcgcaccattgctgtgacgcgtatttgctgtccaagtagctatgtacgtctatctgctgggcgcgaaagcttatccgacgctgagcaagcattagcatttatggcgggtgccaattcattcttttatggtgataaacttctgacaactggcaatgccagtcaatcaggtgatgatagattgatgcgtgagcttggtttaaccaagcagttttctgcccctcgtctaccaaagcaagtgcccgttctggatgctatgagcggtcatcaatcacaagtcattttggctagtttgagctga

SEQ ID NO: 128810 - protein, 378 aa, Psychrobacter arcticus 273-4
MSALLNITEPNNNTNTKNDHFLASLTTDATQSTASKYSREQIAQLFDLPLMDLLLQAQTIHRQNFTANEVQISTLLSIKTGNCPEDCGYCSQSGHHRDKTELVAEKRIEVSKVIAAAKRAKATGSSRFCMGAAWKHPSAKDMPYVVELVKEVKALGLETCMTLGMLDTDQAAQLANAGLDYYNHNLDTSRSYYEQVVSTRSYDERLDTIANVRNSGINVCSGNIVGMGESRDDRIDWVHELLKMPKAPESIPVNLLVPIQGTPIGDKVLAEGQLSVLEWIRTIAVTRICCPSSYVRLSAGRESLSDAEQALAFMAGANSFFYGDKLLTTGNASQSGDDRLMRELGLTKQFSAPRLPKQVPVLDAMSGHQSQVILASLS

SEQ ID NO: 128811 - DNA, 1104 bp, Colwellia psychrerythraea 34H
  CDS (1)..(1104): transl_table=11
atgtcagatttatatatgtcagaagccgtactaacaccaccgttatcaacacaagcacaatcgttgaattctatccttcgtcacaattggaatttaaaagaagtagaagcattatttgctatgccttttaacgacctcatgtttaaagcacagacgattcatagagaaaactttaaccctaatgaagtacaagtcagtactttattatcgattaaaactggtgcttgcccagaagattgcaaatactgttctcaaagtgcacgtaataaaactgacctagaaaaagaaagtttattagccgttgaaaaagtattagaagcagcgcaaagagccaaagaaatgggttcaacccgtttttgtatgggtgctgcttggcgcaaccctaaagaacgcgatatgccttatgtactcgatatggttaagagtgttaaagcgcttggtatggaaacatgcatgacgttaggtatgttatcgggcgatcaagctgatcaattaaatggcgctggtttagattattacaaccataaccttgatacttctcctgagcattataatcaaataatcactacccgtacctttcaagatagacttgatactttgagtaatgttcgcagtgccggtatgaaagtatgtagtggtggtattgttggtttgggtgaaaaagcggttgatcgctcatctttattaatacaacttgcaaatttaaacccacaacctgaaagtgtacccattaacatgttggtaaaagtggaaggtacacctttagctgatattgatgatttagagagttttgactttatccgttgtattgccgtggcccgcatcatgatgccacatagccatgtgagattatctgcaggacgtacggcgatgaatgagcagatgcaagcgatgtgtttccttgccggtgctaactcaatcttttatggttgtaaattgcttactgcagaaaaccctgaaacgaatcaagatattgctctgtttgaaaaactaggcataaatactgaaacagtggctggcgatactgagcgttcagataatattgttaaaacagcgattgttgatcaacaaaacagtgacttgttttacaacgcatcagcataa

SEQ ID NO: 128812 - protein, 367 aa, Colwellia psychrerythraea 34H
MSDLYMSEAVLTPPLSTQAQSLNSILRHNWNLKEVEALFAMPFNDLMFKAQTIHRENFNPNEVQVSTLLSIKTGACPEDCKYCSQSARNKTDLEKESLLAVEKVLEAAQRAKEMGSTRFCMGAAWRNPKERDMPYVLDMVKSVKALGMETCMTLGMLSGDQADQLNGAGLDYYNHNLDTSPEHYNQIITTRTFQDRLDTLSNVRSAGMKVCSGGIVGLGEKAVDRSSLLIQLANLNPQPESVPINMLVKVEGTPLADIDDLESFDFIRCIAVARIMMPHSHVRLSAGRTAMNEQMQAMCFLAGANSIFYGCKLLTAENPETNQDIALFEKLGINTETVAGDTERSDNIVKTAIVDQQNSDLFYNASA

SEQ ID NO: 128813 - DNA, 1059 bp, Pseudomonas syringae pv. phaseolicola 1448A
  CDS (1)..(1059): transl_table=11
atgagcgccagcaccaccgacactttgcgtcacgactggactttagccgaggtcagggcgctgttcgtacagccattcaatgacctgctgtttcaggcgcaaacggtgcaccgcgctcatttcgacgccaaccgtgtgcaggtttccacgctgctgtcgatcaagacaggcgcttgcccggaagactgcaagtactgtccgcagtccggtcactacaacaccggtcttgagaaagaaaaactgctggaagtgcagaaggtgcttgaggaagcagcgcgtgccaaagccattggttcgacccgtttctgcatgggcgcggcctggaagcatccttccgccaaggacatgccttacgtgctggagatggtcaaaggcgtgaaagccatgggcatggaaacctgcatgaccctcggccgtctcgatcaggagcagaccgaagcgctggccactgccgggctggactactacaaccacaacctcgacacctcgccggagttctacggcagcatcatcaccacccggacctacagcgagcgcctgcaaaccctggcctacgtgcgcgatgccgggatgaagatctgctcgggcggcattctgggcatgggcgagtccctcgatgaccgcgccgggctgctgatccagctggcaaacctgccggagcacccggagtcggtgccgatcaacatgctggtcaaggttgccggtacgccgctggaaaacgccgaagacgtcgacccgttcgacttcatccgcatgctcgcggtggcacggattctcatgccgcagtcccacgtgcggttgtctgccgggcgcgaagcgatgaacgagcaaatgcaggcgctggccttcttcgccggtgccaactcgattttctatggcgacaagctgctgaccaccgccaacccgcaagccgacaaggacatgctgttgttctcgcgtctgggcatcaagcccgaagcgggcgaaggccatgctgatgaagtgcatcaggctgccatcgaacaggcgctggtcgaacagcaaagcagttcgatgttctacgacgctgcctctgcctga

SEQ ID NO: 128814 - protein, 352 aa, Pseudomonas syringae pv. phaseolicola 1448A
MSASTTDTLRHDWTLAEVRALFVQPFNDLLFQAQTVHRAHFDANRVQVSTLLSIKTGACPEDCKYCPQSGHYNTGLEKEKLLEVQKVLEEAARAKAIGSTRFCMGAAWKHPSAKDMPYVLEMVKGVKAMGMETCMTLGRLDQEQTEALATAGLDYYNHNLDTSPEFYGSIITTRTYSERLQTLAYVRDAGMKICSGGILGMGESLDDRAGLLIQLANLPEHPESVPINMLVKVAGTPLENAEDVDPFDFIRMLAVARILMPQSHVRLSAGREAMNEQMQALAFFAGANSIFYGDKLLTTANPQADKDMLLFSRLGIKPEAGEGHADEVHQAAIEQALVEQQSSSMFYDAASA

SEQ ID NO: 128815 - DNA, 984 bp, Dechloromonas aromatica RCB
  CDS (1)..(984): transl_table=11
atgcaagctagctccctcgccgccgtttcctctgcttccccgtccgcccctgcccgtcgctggacggttgaggaagtgcttggtctttacgacatgcctctgatggatttgatctggcgtgcccaaggcgtgcaccgcgaaaatttcgacccgaatgccattcaacgctcgacgctgttgtccgtcaagaccggaggttgctccgaagattgcagctactgctcgcaatcggctcgctacgataccgataccgagcgcgagcgcctgatgccgctcgaccaggtcgttgctgcggccaaggccgccaaggacaagggcgcctcccgtttctgcatgggcgctgcctggaaggggccaaaggacaatgacctcgaccgcgtgctcgacatggtgcgcgaagtgaaggcgctcggcatgcaaacctgtgtgacgctgggcatgctgaaggatggccaggctgaaaagctgaaggacgccggtctcgattattacaaccataatctcgataccgacaaggaattctacggtcaggtcatcaagagccatacgcatgacgaccgtctcgatacgctggatcaggtgcgtgatgccggcatcaacgtctgctcgggtggcattatcggcatgggcgaatcgcgcaagaatcgcgccgcactgatcgtccaactggccaacctgccgaaaccgccggaatccgtgccgatcaacaatctggtgccgattcccggtacgccgctggctgacaatccgcgtctcgatcctttcgagttcgtgcggacgatcgctgcagcccgtatcgccatgccgacttcctgggttcgcctgtcggccggccgtcaggaaatgagtgacgagctgcaggccatgtgtttcctggctggtgccaactcgatgttctacggcgacttcctgctcactaccggcaatccggatatcgagcgcgatgatgcgttgttcgcccgcctgggtgtcaaggcaatttga

SEQ ID NO: 128816 - protein, 327 aa, Dechloromonas aromatica RCB
MQASSLAAVSSASPSAPARRWTVEEVLGLYDMPLMDLIWRAQGVHRENFDPNAIQRSTLLSVKTGGCSEDCSYCSQSARYDTDTERERLMPLDQVVAAAKAAKDKGASRFCMGAAWKGPKDNDLDRVLDMVREVKALGMQTCVTLGMLKDGQAEKLKDAGLDYYNHNLDTDKEFYGQVIKSHTHDDRLDTLDQVRDAGINVCSGGIIGMGESRKNRAALIVQLANLPKPPESVPINNLVPIPGTPLADNPRLDPFEFVRTIAAARIAMPTSWVRLSAGRQEMSDELQAMCFLAGANSMFYGDFLLTTGNPDIERDDALFARLGVKAI

SEQ ID NO: 128817 - DNA, 1038 bp, Prochlorococcus marinus str. NATL2A
  CDS (1)..(1038): transl_table=11
atgactctaattaatcctaatatccaggaatctaataaactcaagttcaaagacgaatcatatttagattttaattccataaaaggtggagatattagacatgattggtcttcagaagaaatcaaagaaatacttgatttgccattaatggatttgttgtggagagctcaaatagttcataggtcttacaatcccggttataaagttcagcttgcttctcttctaagtgtgaagacaggtggatgctcagaagactgtgcatattgtccccaatctgttcacaatgaaacaactgttcaacctaatcctgtaattgaagttgagtcagttcttgatagagcaagagcggcaaaagatgcaggagcagatcgattttgcatgggttgggcttggcgtgagatcaaagacggaaacgcattcgattcaatgcttgaaatggtaaaaggtgttagagagcttggccttgaggcatgtgtcaccgctggaatgattactgattctcaagcctctagattggcagaagcaggtttaacagcctataaccacaatttagatactagtcctgagcattattccaaaatcatttcaacaagaacatatcaagatcgacttgaaacattgagaagagtacgcatggctggaattacagtttgctgtggtgggattattggcatgggagaatctgtttcagatagagcatctttacttaaagttttagcaactttagacccgcatcctgaaagtgtacctattaatgcattggttgcagtggaggggacacccatggaggatttgtcttctattgatccattagagatggttcgtatggtcgcgacagcaaggattatcatgcctaaaagccgaataagacttagtgcagggagacaacaattaggtagggaagctcagattctatgtctacaatctggagctgattctatattctatggagatacacttttaactacaagcaatccggaggtggaagcagaccgtaagcttttagcggatgctggaattacggctaatttctcttaa

SEQ ID NO: 128818 - protein, 345 aa, Prochlorococcus marinus str. NATL2A
MTLINPNIQESNKLKFKDESYLDFNSIKGGDIRHDWSSEEIKEILDLPLMDLLWRAQIVHRSYNPGYKVQLASLLSVKTGGCSEDCAYCPQSVHNETTVQPNPVIEVESVLDRARAAKDAGADRFCMGWAWREIKDGNAFDSMLEMVKGVRELGLEACVTAGMITDSQASRLAEAGLTAYNHNLDTSPEHYSKIISTRTYQDRLETLRRVRMAGITVCCGGIIGMGESVSDRASLLKVLATLDPHPESVPINALVAVEGTPMEDLSSIDPLEMVRMVATARIIMPKSRIRLSAGRQQLGREAQILCLQSGADSIFYGDTLLTTSNPEVEADRKLLADAGITANFS

SEQ ID NO: 128819 - DNA, 1029 bp, Ralstonia eutropha JMP134
  CDS (1)..(1029): transl_table=11
atgaaccaagccgctcaaaccgtcgccaccatctccgccgaagcgctgcgccagaccgcgcgcaacacccatgcattgccggaagacgcccgctggcgcgtcgacgacgtggccgcgctgttcgcgctgccgttcaacgacctgctgttccgcgcgcagcaggtgcatcgcgagaacttcgacgccaacaccgtgcagctttccacgctgctgtcgatcaagaccggcggctgcgaagaggattgcggctactgcccgcaaagcgcgcaccacgacgccggcgtcaaggccgaaaagctgatggaactcgatgaagtgctcgaagccgcccgcgctgccaaggccaacggcgctacgcgcttttgcatgggagccgcctggcgcagcccgaaggaccgccacctggagccggtcatggacatggtgcgcgaggtcaaggccatgggcctggaaacctgcgtgacgctcggcatgctgaaggccgagcaggcgcagcagctcaaggacgcgggcctggattattacaaccacaacctcgatacctcgcccgagttctacggcaagatcatcaccacgcgcacgtaccaggatcgtctcgatacgatcggccatgtgcgcgacgccggcatcaacgtgtgctgcggcggcatcgtcggcatgggggaatcacgcgaggcgcgtgccgggctgatcgcgcagctcgccaatatggatccgtatccggaatcggtgcccatcaacaacctggtgcaggtcgaaggcacgccgctggccggcaccgaggcgctggacccgttcgagtttgtccgtacgatcgccgtggcccgcatcaccatgccgggcgcgatggtgcgcctctccgccggccgcgaggcgatggacgaggcgctgcaggcgttgtgcttcatggcgggcgccaactccatcttctacggcgaaaagctgctgaccacgggcaatccgcaggctgaccgcgaccgcgcgctgctggcgcgactcgacatccgtgcggaaggctacgcaggctaa

SEQ ID NO: 128820 - protein, 342 aa, Ralstonia eutropha JMP134
MNQAAQTVATISAEALRQTARNTHALPEDARWRVDDVAALFALPFNDLLFRAQQVHRENFDANTVQLSTLLSIKTGGCEEDCGYCPQSAHHDAGVKAEKLMELDEVLEAARAAKANGATRFCMGAAWRSPKDRHLEPVMDMVREVKAMGLETCVTLGMLKAEQAQQLKDAGLDYYNHNLDTSPEFYGKIITTRTYQDRLDTIGHVRDAGINVCCGGIVGMGESREARAGLIAQLANMDPYPESVPINNLVQVEGTPLAGTEALDPFEFVRTIAVARITMPGAMVRLSAGREAMDEALQALCFMAGANSIFYGEKLLTTGNPQADRDRALLARLDIRAEGYAG

SEQ ID NO: 128821 - DNA, 975 bp, Ehrlichia canis str. Jake
  CDS (1)..(975): transl_table=11
atgagtacattcactcctactagaaatgactggcaattagatgaaatattagagctattccatactgcatttaatgatttaatactacagtctcatttgttgcatagacagtttttcagcaataacgaagtacaaatctcctcattactcaatattaaaactggtggttgcccagaaaattgtaagtattgctcacaaagtgcacattataaaacagacctaaaaaaagaatctttacttgacatcgaatccataaaaaaagcaatacaaacagcaaaaaagaatggagcagatagattttgctttgcagcagcatggcgccaagtaagagacagggatcttgaatacatttgtgatattatcgacttaataaaaagtgaaaatctagaaagttgtgcttcactaggtatggtaactttagaacaagcaaaaaaactaaaaaatgctggtctagatttttataatcacaatattgatacatcacgtgatttttatcccaatgtaactactacacgtagctacgatgatagactaacaagcttgaataacatacatgaagcaggaattaatatatgttctggtggtattttaggacttggtgaaagcgtagaagatagagcaaaaatgttattaacactagctaatctaaaggaacacccactttctgtaccaattaatagactagtcccaataaaaggtacaccttttgaaaataatgccaaaatagacaatatagatttcataaaaacaatagctgtagcacgtattttaatgccaaagtcatacatacgtcttgctgcaggtcgaatgagtatgtcagaagaaatgcaagcactatgtttatttgcaggagcaaattcaatattctatggagaaaaactattaacaacacccaatgctgattgcaatgatgataggaatttattatcaaaacttggagcaaaaacaaaagaacctgttttttttaattcataa

SEQ ID NO: 128822 - protein, 324 aa, Ehrlichia canis str. Jake
MSTFTPTRNDWQLDEILELFHTAFNDLILQSHLLHRQFFSNNEVQISSLLNIKTGGCPENCKYCSQSAHYKTDLKKESLLDIESIKKAIQTAKKNGADRFCFAAAWRQVRDRDLEYICDIIDLIKSENLESCASLGMVTLEQAKKLKNAGLDFYNHNIDTSRDFYPNVTTTRSYDDRLTSLNNIHEAGINICSGGILGLGESVEDRAKMLLTLANLKEHPLSVPINRLVPIKGTPFENNAKIDNIDFIKTIAVARILMPKSYIRLAAGRMSMSEEMQALCLFAGANSIFYGEKLLTTPNADCNDDRNLLSKLGAKTKEPVFFNS

SEQ ID NO: 128823 - DNA, 1008 bp, Anabaena variabilis ATCC 29413
  CDS (1)..(1008): transl_table=11
atgtcggtgggaagaatacgctacgattggcacacagcagagattcgcgcagtatatgatatgccattgctagagttgatttatcaagctgctagtgtacatcggcaatttcataatcctaaacaaatacaagtatgtaagttgatatcgattaaaacaggcgggtgtcctgaagattgtagttactgcgcccagtcttctcgttatcaaactgaagtcaaaccccaagcactccttgataagcaaacggttgtggaaattgcccaaaatgctaaacaaaagggtgtcagccgtgtttgtatgggtgcagcttggcgggaagtgcgagataattctcagtttgaccgagtgctagaaatggtcaaagatgtcacagacatgggtttagaagtgtgctgtactctgggaatgctgacaactgaccaagccaaaaagttggagacagcaggattgtacgcttataaccataacttggatacatcctctgactactacagcactattattaccacgagaacttatagcgatcgcctaaacaccatcgaaaatgtgcggcagactaatgttaccgtatgttctggcggcattctcggtttaggtgaaagcatagatgaccgtgtggcaatgttacaaaccttagccaccctcaatcctcatccagaatccgtaccaattaatattctctcccaagtagaaggtacacctctagaagatcaaccagatgtacctgtttgggatgtggtgagaatgattgcgactgcacgtatagttatgcccacctcagatgtgcgtttaagtgctggtagggcgagactttctcaagtggaacaagccttttgttttatggcaggagcaaattccatcttttccagcgacgataataaaatgctgacggtgacaacaccctgtccagattacgatgctgaccaggaaatgctcaacctacttggcttagaaatgcgtcccccgtcccaaagaccacaacctgtagtcatgggtaattcataa

SEQ ID NO: 128824 - protein, 335 aa, Anabaena variabilis ATCC 29413
MSVGRIRYDWHTAEIRAVYDMPLLELIYQAASVHRQFHNPKQIQVCKLISIKTGGCPEDCSYCAQSSRYQTEVKPQALLDKQTVVEIAQNAKQKGVSRVCMGAAWREVRDNSQFDRVLEMVKDVTDMGLEVCCTLGMLTTDQAKKLETAGLYAYNHNLDTSSDYYSTIITTRTYSDRLNTIENVRQTNVTVCSGGILGLGESIDDRVAMLQTLATLNPHPESVPINILSQVEGTPLEDQPDVPVWDVVRMIATARIVMPTSDVRLSAGRARLSQVEQAFCFMAGANSIFSSDDNKMLTVTTPCPDYDADQEMLNLLGLEMRPPSQRPQPVVMGNS

SEQ ID NO: 128825 - DNA, 987 bp, Rhodobacter sphaeroides 2.4.1
  CDS (1)..(987): transl_table=11
atgatccgccccgccctcaggaccgactggaccttggaggaagcgagggcgatccacgccctgcccttccccgagctgatgcaccgtgcccagacgctccaccgtgcgcatttcgaccccactgcgatcgagaccgcgagccttctgagcatcaagaccggcggctgccccgaggattgcggctattgctcgcagtccgcccatcacgacaccggggtgaaggccacgaaactgatggggacggaggaggttctggccgccgccaggcgcgccaaggccgccggcgcgcagcgcttctgcatgggggctgcctggcgcagccccaaggaccgcgacatggacaggctctgcgacatggtgcggggcgtggccgatctggggctcgagacctgcatgacgctggggatgctctcgcccgggcaggtcgcgcggctaaaggcggcgggcctcgacttctacaaccacaacatcgacacctcgcccgcctattacgcgcggatcgccagcacgcggacgatggaggatcgcctcgagaccgtcgagcaggtccgcaggggcggcatcaaggtctgctgcggcggcatcctcggcatgggagaggccgaggaagaccgcatcgccttgctggtgacgctggcgaccctccccgcgcatcccgacagcgtgccggtgaacctctggaacgagatcgagggcgttccggtgcagggccgcgcgcaggcggtcgatcccttcgcgctggtgcggatcgtggcgctggcccgcatcctgatgccggcctcggtcgtgcggctgtcggccgggcgcacggagatgagcgacgagctgcaggcgctgtgtttcctcgcgggcgcaaattcgatcttcgtgggcgaccagttgctgaccaccggcaatccggcggcgtggaaggatcgggaccttctgagccggctcggcctgcatgtggcccccgcgcgggcccgccccccggtcgcggcggactag

SEQ ID NO: 128826 - protein, 328 aa, Rhodobacter sphaeroides 2.4.1
MIRPALRTDWTLEEARAIHALPFPELMHRAQTLHRAHFDPTAIETASLLSIKTGGCPEDCGYCSQSAHHDTGVKATKLMGTEEVLAAARRAKAAGAQRFCMGAAWRSPKDRDMDRLCDMVRGVADLGLETCMTLGMLSPGQVARLKAAGLDFYNHNIDTSPAYYARIASTRTMEDRLETVEQVRRGGIKVCCGGILGMGEAEEDRIALLVTLATLPAHPDSVPVNLWNEIEGVPVQGRAQAVDPFALVRIVALARILMPASVVRLSAGRTEMSDELQALCFLAGANSIFVGDQLLTTGNPAAWKDRDLLSRLGLHVAPARARPPVAAD

SEQ ID NO: 128827 - DNA, 1023 bp, Burkholderia sp. 383
  CDS (1)..(1023): transl_table=11
atgacccaagcccagactgccgccaccgtgcaacccgacgcgattcccgtggccgctccggtctcgcagcgctggcgcgtcgccgacgtcgtcgcgctgttcgagctgccgttcaacgacctgctgttccgcgcgcagcaggtgcaccgcgagcacttcgacgcgaacgcggtgcagctgtcgacgctgctgtcgatcaagacgggcggctgcgaggaagattgcggctactgctcgcagtcgtcgcaccacgacacgggcctgaaggccgagaagctgatggacgtcgacgcggtgctcgatgccgcgcgcgcggcgaaggcgaacggcgcgagccgcttctgcatgggcgccgcgtggcgcaacccgaaggagcgccacatgccggcgctgacggagatggtgcgcggcgtgaaggaactcggcctcgagacctgcatgacgctcggcatgctggaagacgagcaggcgcaggaactcgcgagcgcgggcctcgactactacaaccacaacctcgacacgtcgccggagttctacggccaggtgatctcgacgcgcacctaccaggatcgcctcgacacgctcgaccgcgtgcgtgacgcgggcatcaacgtgtgctgcggcggcatcatcgggatgggcgaatcgcgccgcgaacgcgcgggcctgatctcgcagctcgcgaacctgaacccgtatccggattcggtgccgatcaacaacctcgtcgcgatcgaaggcacgccgctcgaaggcaccgcgccgctcgacccgttcgaattcgtgcgcacgatcgcggtggcgcggatcacgatgccgaaggccgtcgtgcgcctgtcggccggccgcgagcagctcgacgacggcctgcaggcgatgtgcttcctcgccggcgcgaactcgatgttctacggcgaccagctgctgacgacgagcaacccgcagtcgcagaaggaccgtgcgctgttcgagcgcctcggcatccggtcgagcgatgcggacgcgatgtcggcgaacgcgtaa

SEQ ID NO: 128828 - protein, 340 aa, Burkholderia sp. 383
MTQAQTAATVQPDAIPVAAPVSQRWRVADVVALFELPFNDLLFRAQQVHREHFDANAVQLSTLLSIKTGGCEEDCGYCSQSSHHDTGLKAEKLMDVDAVLDAARAAKANGASRFCMGAAWRNPKERHMPALTEMVRGVKELGLETCMTLGMLEDEQAQELASAGLDYYNHNLDTSPEFYGQVISTRTYQDRLDTLDRVRDAGINVCCGGIIGMGESRRERAGLISQLANLNPYPDSVPINNLVAIEGTPLEGTAPLDPFEFVRTIAVARITMPKAVVRLSAGREQLDDGLQAMCFLAGANSMFYGDQLLTTSNPQSQKDRALFERLGIRSSDADAMSANA

SEQ ID NO: 128829 - DNA, 1008 bp, Prochlorococcus marinus str. MIT 9312
  CDS (1)..(1008): transl_table=11
atgcctaattcgaataatcagttattaaaagaaattaggttcgattggaataaagaggagatattggaaatacttgatatgcctcttattgatttaatgtgggaatcacaaactgttcacaggaaatttaacaaatacaacattcaattagcatctttgttcagcgtaaaaactggtggatgtgaggaaaattgttcgtactgtagccaatcaatttatagtgctagcgaaatcaaaagtcatccacaatttcaagttgaggaggttatggcaagagctaaaatagcaaaaaatgagggcgcagatagattttgtatgggttgggcgtggagagaaattagagatgggaaatcttttaatgcaatgttagagatggttagcggtgtaagagatttagggatggaagcatgcgttactgctgggatgcttacagaagaacaagcttccaggctggctgatgcaggtttgaccgcttataaccacaatcttgatactagtcctgagcattataaaaatattattactactagaacttatcaagatagactagatactataaaaagagtaaggaatgcaggaataaatgtttgttgtggagggataataggcttgggtgaaactaatggcgatagagcatcccttttggaagtactttcaaacatgaatccacaccctgaaagtgttcctataaattcattagtagctattgaaggtactggtttagaagataatcaagaaattgattcgattgaaatgataaggatgatagctacggcaagaattcttatgcctaaaagtaaaataagattaagtgcagggcgagagaagctttcaaaagaagcccaaattttatgttttcaatgtggggcaaattcaattttctatggagatgagttactcacaacttcaaatccatcatttcaatcagacagaaaacttcttaaagaggtaggagtatcatttaacaaagattttgaaactcgtgaaaaaacattattttctttatga

SEQ ID NO: 128830 - protein, 335 aa, Prochlorococcus marinus str. MIT 9312
MPNSNNQLLKEIRFDWNKEEILEILDMPLIDLMWESQTVHRKFNKYNIQLASLFSVKTGGCEENCSYCSQSIYSASEIKSHPQFQVEEVMARAKIAKNEGADRFCMGWAWREIRDGKSFNAMLEMVSGVRDLGMEACVTAGMLTEEQASRLADAGLTAYNHNLDTSPEHYKNIITTRTYQDRLDTIKRVRNAGINVCCGGIIGLGETNGDRASLLEVLSNMNPHPESVPINSLVAIEGTGLEDNQEIDSIEMIRMIATARILMPKSKIRLSAGREKLSKEAQILCFQCGANSIFYGDELLTTSNPSFQSDRKLLKEVGVSFNKDFETREKTLFSL

SEQ ID NO: 128831 - DNA, 963 bp, Synechococcus elongatus PCC 7942
  CDS (1)..(963): transl_table=11
atggaagctatccgccacgactggactctcgaagaaatcgaagatctcctcaacacgccgctcctcgagttagttcatcgcgcgcagacggttcaccgcgactatcaaccggctaacgccatccaactggcgaccttgctcagcgtcaagaccggcggttgcagcgaaaactgcgcctactgccctcagtcggctcactacaacactgaggtcgatcctcagtccaccctgccaatcgaaacggttttagaacaggcagaacgggccaaggccgctggtgccagtcgtttttgcatgggctgggcttggcgggaaatccgggatggggcgcagttcgacgccatgctggaaatggtgcaaggcgtccgccaattaggactcgaagcttgcgtcaccgctggtatgctcagcgatcgccaagcggaacggctggctgaggctggtttgacggcctataaccacaacctcgacaccagccccgagttctacggcgagattatttcgacgcgcacctatgccgatcgccttgccacgctggaacgggtgcggcaggccggcattagtgtttgctgcggcggcatcattggcatgggagaagggcagcgcgatcgcgccggattgctgcaggtactcgcaaccctcaatcctcatcccgaaagtgtgccaatcaatgccctagtgccagttgaaggaacgcctttaggcgatcgcgatcgcctcgatccgttggatttggtgcggatgtgcgccgtcgctcggattttgatgcccaaagcgcgggttcgcctcagtgcgggtcgcaccgccctcagccgcgaagcccaagtcctttgcttcctggcaggggctaactcgatcttctacggcgataccttgctgaccacagcgaatcctgtctgtgaggccgatcgccaactgctcgccgacatcggtgccgaagcgcttgaagtggtgacggcttag

SEQ ID NO: 128832 - protein, 320 aa, Synechococcus elongatus PCC 7942
MEAIRHDWTLEEIEDLLNTPLLELVHRAQTVHRDYQPANAIQLATLLSVKTGGCSENCAYCPQSAHYNTEVDPQSTLPIETVLEQAERAKAAGASRFCMGWAWREIRDGAQFDAMLEMVQGVRQLGLEACVTAGMLSDRQAERLAEAGLTAYNHNLDTSPEFYGEIISTRTYADRLATLERVRQAGISVCCGGIIGMGEGQRDRAGLLQVLATLNPHPESVPINALVPVEGTPLGDRDRLDPLDLVRMCAVARILMPKARVRLSAGRTALSREAQVLCFLAGANSIFYGDTLLTTANPVCEADRQLLADIGAEALEVVTA

SEQ ID NO: 128833 - DNA, 1020 bp, Burkholderia thailandensis E264
  CDS (1)..(1020): transl_table=11
atgaccgacatgactgaagctcaaaccgcttgcccgacgaccgaaacgccggtggccgcgcccgtcgcgccgcgctggcgcgtcgccgacgtgatcgcgctctacgagctgccgttcaacgatctgctgttccgcgcgcagcagacgcaccgcgagcacttcgacgcgaacgcgatccagctgtcgacgctgctatcgatcaagacgggcggatgcgaggaggattgcggctactgctcgcaatccgcgcatcacgacaccggcctgaaggcggagaaactgatggaagtggacgccgtgctcgccgccgcgcgcaccgcgaaggaaaacggcgcgacgcgcttctgcatgggcgccgcgtggcgcaacccgaaggatcgccacatcgagccgatcaaggagatgatccgcggcgtgaaggacatgggcctcgagacgtgcgtgacgctcggcatgctcgaagaacaccaggcgaaggcgctggcggaggcgggcctcgactattacaaccacaacctcgacacgtcgcccgagttctacggccagatcatctcgacgcgcacgtaccaggatcgcctcgacacgctcgagcgcgtgcgcgacgcgggcatcaacgtgtgctgcggcgggatcatcgggatgggcgaatcgcgccgcgagcgcgcaggcctcatcgcgcagctcgcgaacatgaacccgtatccggaatcggtgccgatcaacaatctcgtcgcgatcgagggcacgccgctcgagaacgcgcaagcgctcgatccgttcgagttcgtgcgcacgatcgcggtcgcgcgcatcacgatgccgaaggcaatggtgcgcttgtcggcaggccgcgagcagctcgacgattcgatgcaggcgctgtgcttcctcgccggcgcgaattcgatgttctacggcgacgtgctgctcacgaccggcaatccgcgcgccgaagcggatcgcaagctgctcgcgcggctcgggatgtcggcgaccgaagcgacgcagttgagcgcctga

SEQ ID NO: 128834 - protein, 339 aa, Burkholderia thailandensis E264
MTDMTEAQTACPTTETPVAAPVAPRWRVADVIALYELPFNDLLFRAQQTHREHFDANAIQLSTLLSIKTGGCEEDCGYCSQSAHHDTGLKAEKLMEVDAVLAAARTAKENGATRFCMGAAWRNPKDRHIEPIKEMIRGVKDMGLETCVTLGMLEEHQAKALAEAGLDYYNHNLDTSPEFYGQIISTRTYQDRLDTLERVRDAGINVCCGGIIGMGESRRERAGLIAQLANMNPYPESVPINNLVAIEGTPLENAQALDPFEFVRTIAVARITMPKAMVRLSAGREQLDDSMQALCFLAGANSMFYGDVLLTTGNPRAEADRKLLARLGMSATEATQLSA

SEQ ID NO: 128835 - DNA, 1092 bp, Frankia sp. CcI3
  CDS (1)..(1092): transl_table=11
atgacggacatggacctgtcagccactctgaacagccttgtcagcaagggggtgagtggtcaggctccgacccgggacgaggccctggccgtcctgcgcagtgacgacgacgatctcttggacgtcgtcgccgccgcctaccggctccggcggaggtacttcggcaggcgtgtcaagctgaactttctggtgaacctcaagagcggactctgtccggaggactgttcctattgctcgcagcggctcggttcgaacacgggaatcctgaagtacacctggctcaagcccgaggaggccgccgcgacggccggcgccggcatctcgggcggtgcccgccgggtgtgcctggtcgcgagcggccgcgggccgacggaccgggacgtcgaccgcgtggcggacacgatcggcgcgatcaagaccgcgcatccggacgtggaggtgtgcgcgtgcctcggcctgctgtccgacgggcaggccgcacagctgcgggcggccggtgcggacgcctacaaccacaacctgaacacggccggtgagaagtacgcagacatctgcacgacgcacacctacaacgaccgggtcgacacggtgcaggaagccaggcacgccggcctctcaccctgctcgggtatcatcgccggcatgggggagagcgacgaggacctcgtcgacgtcgccttcgcgctgcgcgagctcgccccggactccatcccggtcaacttcctcatgccattcgagggcacgcccctgggggcggaatggaacctcaacccccggcagtgcctgcgcattctcgccatggtccggttcgtcaaccccacggccgaggtgcggctctcgggcggccgggagattcatctcggctcgatgcagcccctcgccctctcggtggtgaactccatcttccttggtgactacctgaccagtgagggtcaggagggccaccaggacctgaagatgatcgccgaggcgggattcacggtggaaggcctcaacaccgacgccgaggcggcgctggccatgggcgcgggcctggagcgggtcgcgctacgtcagcgcggtgccggcaccgacctgccgcccaacgcctga

SEQ ID NO: 128836 - protein, 363 aa, Frankia sp. CcI3
MTDMDLSATLNSLVSKGVSGQAPTRDEALAVLRSDDDDLLDVVAAAYRLRRRYFGRRVKLNFLVNLKSGLCPEDCSYCSQRLGSNTGILKYTWLKPEEAAATAGAGISGGARRVCLVASGRGPTDRDVDRVADTIGAIKTAHPDVEVCACLGLLSDGQAAQLRAAGADAYNHNLNTAGEKYADICTTHTYNDRVDTVQEARHAGLSPCSGIIAGMGESDEDLVDVAFALRELAPDSIPVNFLMPFEGTPLGAEWNLNPRQCLRILAMVRFVNPTAEVRLSGGREIHLGSMQPLALSVVNSIFLGDYLTSEGQEGHQDLKMIAEAGFTVEGLNTDAEAALAMGAGLERVALRQRGAGTDLPPNA

SEQ ID NO: 128837 - DNA, 1071 bp, Novosphingobium aromaticivorans DSM 12444
  CDS (1)..(1071): transl_table=11
gtgcaggaaaccgcgcttcttgagcgagaatcggctggaaccggcaacgcccccgtccgcaccgactggacgcgcgaggaaatcgccgcgctgttcgacctgccattcaccgaactcctgttccgggctgccgaggtacaccgcgcgcaccatcgcgcaggcgaggtgcagctctgcacgctgctgtcgatcaagaccggcgggtgccctgaagattgcggctactgttcgcaatcggtgaaggcagacagcggcgtcgaggcgacgaaactgatggaagtgcagaaggtcctgcaatccgccgcgcaggccaaggacaatggctccaagcgcttctgcatgggcgccgcctggcgcaaccccaaggaccgagacatgccggcgatcatctccatgatcaagggcgtgcgcgagatgggcatggaaacctgcatgacgcttggcatgctgacgccttcgcaggcagcgcagctcgccgacgcgggtctcgactactacaaccataacatcgacacctcgcccgaacgctacgaggaagtcatcaccacccgcacttttgcggaccgcctgcagacgctcgacaacgtgcgcaacgccgggatcaacgtgtgctcgggcggcatcgtcggcatgggcgagactcgcgccgaccgcgtcggcttcgttcacgccctcgccacgcttgaacagcatccggaaagcgttcccgtgaacgccctcgtcccgatcaagggcaccgtgctgggcgacatgctggccgataccccgctcgcgaagatcgacgacatcgagttcgttcgcaccgtggccgtcgcgcgcatcaccatgccgctctctatggttcgcctgtccgccggacgcgaatcgatgtcggaggccacgcaggcgctgtgcttcatggcaggcgccaactcgatcttcaccggcgacaagctgcttaccgctgccaacgccggcgacgatgccgatgccgccatgttcaagcgcctcggtctcaagccgatggaaggcgaggaacccatgcgggcgatgaagtccgtcggaggctgctccggaggctgcgcggcgtaa

SEQ ID NO: 128838 - protein, 356 aa, Novosphingobium aromaticivorans DSM 12444
MQETALLERESAGTGNAPVRTDWTREEIAALFDLPFTELLFRAAEVHRAHHRAGEVQLCTLLSIKTGGCPEDCGYCSQSVKADSGVEATKLMEVQKVLQSAAQAKDNGSKRFCMGAAWRNPKDRDMPAIISMIKGVREMGMETCMTLGMLTPSQAAQLADAGLDYYNHNIDTSPERYEEVITTRTFADRLQTLDNVRNAGINVCSGGIVGMGETRADRVGFVHALATLEQHPESVPVNALVPIKGTVLGDMLADTPLAKIDDIEFVRTVAVARITMPLSMVRLSAGRESMSEATQALCFMAGANSIFTGDKLLTAANAGDDADAAMFKRLGLKPMEGEEPMRAMKSVGGCSGGCAA

SEQ ID NO: 128839 - DNA, 969 bp, Anaplasma phagocytophilum HZ
  CDS (1)..(969): transl_table=11
gtgataaggaataattggactcttgaagaaacgttagagctctttggcctaccgtttaatgatttgctattcaaggctcatatggtgcatagggagtactttcgtcacaacgaggtacaggtttgtgcactggcaaatattaaagcgggtggttgtccggagaactgttgttattgttcccagagcgcacataacaaaactggccttaccaagaaggggctatcaagtgttgaggaagtgcgtactgcggcgcggcgtgccaaagatgttggggtacacaggttttgttttgctgcagcatggcgtaacctgcatgatcgggatgttgaccgtatctgcgagtttgtcaaagctataaaagaagagggtctggagagctgtgcatctctaggcatgttgaagcttgaacaggcgcagaagctcaaggaagctggtttagacttttataatcataatgttgatacctcgcgggcttactatcataacatagttaccacacgaacgtacgatgagcggctagacacgatcaataatgtgcaagaggctgggattaatgtatgctgtggtggcatattaggaatgggtgagagcacagaggatcgggctcagatgctattaacccttgcaaaccttaaacagcatccacgttctgtaccaatcaacagacttgtggcattcaaaggtactcctttagagggtgcaaagaaagtcaatagcgttgattttgttcgtaccatagcggttgctcgtataatgatgccagcatcatatgtacgtcttgctgctggtaggtcagacatgacggaagagatgcatgctttatgcttttttgcaggtgcaaactctatcttttacggtgaacagctactcactactgaaaatgctacaccggaatttgatcaaaatttgctttctaggcttggtgttgtagcaacaccttccggagcacatgagtcttgtgcttgttag

SEQ ID NO: 128840 - protein, 322 aa, Anaplasma phagocytophilum HZ
MIRNNWTLEETLELFGLPFNDLLFKAHMVHREYFRHNEVQVCALANIKAGGCPENCCYCSQSAHNKTGLTKKGLSSVEEVRTAARRAKDVGVHRFCFAAAWRNLHDRDVDRICEFVKAIKEEGLESCASLGMLKLEQAQKLKEAGLDFYNHNVDTSRAYYHNIVTTRTYDERLDTINNVQEAGINVCCGGILGMGESTEDRAQMLLTLANLKQHPRSVPINRLVAFKGTPLEGAKKVNSVDFVRTIAVARIMMPASYVRLAAGRSDMTEEMHALCFFAGANSIFYGEQLLTTENATPEFDQNLLSRLGVVATPSGAHESCAC

SEQ ID NO: 128841 - DNA, 1002 bp, Neorickettsia sennetsu str. Miyayama
  CDS (1)..(1002): transl_table=11
atggcaccggttccagcaggtattatggcgaaagtttggcaattctctgaggctgaggagttattccaccttccttttttagatcttctttattctgctcaacatgtgcatagggaaaattttccacataatgaggtgcagctcgctatgttgctcagtgttaagactggtgggtgtccggaaaattgctcctactgtccacagtctgcacactatgacacaggactgagaaaggaacccgtaatgcatgtcgaaaaggtacttgaggcagcgaagagagctgttgagcttggtgccacgagattctgtattggtgctgcctggcgcggaccgcgtgggaaagatttggatatagtctgtgaaatgatttccagaatcaagaagctcggattagaaacttgcgcttcgctgggccttctctcttacgaacaagctgtttccctgaaagcagctggtttggatttttacaaccacaatattgatacctcacaggaatattattctaaaataataactaccagaaggttcagcgacaggatagaaaccctagagaatgttgcgaaagctggtttaaaaatctgctctggaggtattttagggatgggtgagagtaatgaagaccgcataaagatgcttgttgagctttctcacctgagttttccacccgaatcaatacccataaataagctcattccgattccggggactccactagcggaaaaaaatgctgttgatcctttagatttcgtaaggattatcgcgcttgcgaggattatgtttcctaaatcctatgtgaggctttctgcaggtagggaaagcatgtcagatgaattacaaactttatgttttattgccggtgctaattccattttctatggtgagaagcttcttacatctgccaactctgacccagagagcgacgagaaactcttattgaaattaggtcttctgagagagaaaagtaaaacagctgttgattgttccattaatttgggatcatag

SEQ ID NO: 128842 - protein, 333 aa, Neorickettsia sennetsu str. Miyayama
MAPVPAGIMAKVWQFSEAEELFHLPFLDLLYSAQHVHRENFPHNEVQLAMLLSVKTGGCPENCSYCPQSAHYDTGLRKEPVMHVEKVLEAAKRAVELGATRFCIGAAWRGPRGKDLDIVCEMISRIKKLGLETCASLGLLSYEQAVSLKAAGLDFYNHNIDTSQEYYSKIITTRRFSDRIETLENVAKAGLKICSGGILGMGESNEDRIKMLVELSHLSFPPESIPINKLIPIPGTPLAEKNAVDPLDFVRIIALARIMFPKSYVRLSAGRESMSDELQTLCFIAGANSIFYGEKLLTSANSDPESDEKLLLKLGLLREKSKTAVDCSINLGS

SEQ ID NO: 128843 - DNA, 981 bp, Ehrlichia chaffeensis str. Arkansas
  CDS (1)..(981): transl_table=11
atgaatacatgtactacaataagaaacaactggcaattagatgaaatattagagcttttcaatactccatttaatgacttaatattacgatctcatttaacacatagacagttttttaataacaatgaaatacaacttgctgcattattaaatatcaaaactggtggatgtccagaaaactgtagatattgttcacaaagtgcacattataaaacagacctacaaaaagaagctctacttgatgttgaaaacataaaaaaagctatacaaacagccaaaaatagcggagcagacagattttgtttcgcagcagcatggcgtcaattaagagataaagatatagaatatatttgcaatatcatcaacctaataaaaagtgaaaaactagagagctgtgcttctttaggcatgataactttggaccaagcaaaaaaattaaaaaatgcaggtttagatttttataatcataatattgatacatctcgtgatttttattccaatgtaactactacacgcaactacgatgataggctagctagtttaaataacatatatgaagcaggaattaatatatgttctggtggtattctaggacttggtgaaagtattgaagatagagcaaagatgctattaactttagcaaatttaaaggaacatccgcgttctgtaccaatcaataggctagttccaataaaaggaacaccttttgaaaataacataaaagtagataacatagattttatcaagactatagctgtaactcgcattttaatgccaaaatcatatgtacgtcttgctgcaggaagaaaagatatgtcagaagaaatgcaagcactatgcttatttgcaggagcaaactctatattctacggagaaaagttattaacaactcctaattctaattgtgatgatgataaaaacctattatccaagcttggaattaaaacaaaagaacctgtacttctcaattcacaaaattaa

SEQ ID NO: 128844 - protein, 326 aa, Ehrlichia chaffeensis str. Arkansas
MNTCTTIRNNWQLDEILELFNTPFNDLILRSHLTHRQFFNNNEIQLAALLNIKTGGCPENCRYCSQSAHYKTDLQKEALLDVENIKKAIQTAKNSGADRFCFAAAWRQLRDKDIEYICNIINLIKSEKLESCASLGMITLDQAKKLKNAGLDFYNHNIDTSRDFYSNVTTTRNYDDRLASLNNIYEAGINICSGGILGLGESIEDRAKMLLTLANLKEHPRSVPINRLVPIKGTPFENNIKVDNIDFIKTIAVTRILMPKSYVRLAAGRKDMSEEMQALCLFAGANSIFYGEKLLTTPNSNCDDDKNLLSKLGIKTKEPVLLNSQN

SEQ ID NO: 128845 - DNA, 942 bp, Francisella tularensis subsp. holarctica
  CDS (1)..(942): transl_table=11
atgacattacaacaaatcaaagaaatttacttaagaccattaacagaattaattttaaaagctttagagattcataataaaaattttggtaatgatatcgagttatgctcactaaaaagtatcaaaactggtacttgcccagaagactgtaaatattgtcctcaaagtggtcattataatactagtatcgaaaagcataaactattagataaagatagtatattggcagaagcaaaaaatgctaaagatgctggatctaaaaggttctgtatgggcgctgcttggaaacacattcctaaaaaagactttgatcaagttgctgagattatcactgaagtcaaaaaccttggcttagaaacatgtgtgactctcggaagtattaatgctgatgaagcaactaaactaaagcaagcaggattggattactacaatcataatcttgatacttcaagagaattttatccggaaataattaccacacgtaaatttgaagaaagaattgaaactattagaaatgttgctaacgccaatataaatgtctgttgtggtggtatattgggtatgggcgaatccctagatgatagatttaatttattactagagttattacaactacctgctgctccaaaaagtattcctatcaatacattaatacctgttaaaggaactcctttaggagataagtatacaaatgcacaaattgatagttttgaattagtaagatttattgcaactacaagaatactatttccacaagcacgcctaaggttatcagcaggtagagaaaatatgtctttggaaactcaaactctatgtttccttgctggtattaactcaatattttatggtaataagttattaacagaaaataatgctactgttaattctgataattttttattagctaagcttggcttaaaatcaaatgctgaattatgttaa

SEQ ID NO: 128846 - protein, 313 aa, Francisella tularensis subsp. holarctica
MTLQQIKEIYLRPLTELILKALEIHNKNFGNDIELCSLKSIKTGTCPEDCKYCPQSGHYNTSIEKHKLLDKDSILAEAKNAKDAGSKRFCMGAAWKHIPKKDFDQVAEIITEVKNLGLETCVTLGSINADEATKLKQAGLDYYNHNLDTSREFYPEIITTRKFEERIETIRNVANANINVCCGGILGMGESLDDRFNLLLELLQLPAAPKSIPINTLIPVKGTPLGDKYTNAQIDSFELVRFIATTRILFPQARLRLSAGRENMSLETQTLCFLAGINSIFYGNKLLTENNATVNSDNFLLAKLGLKSNAELC

SEQ ID NO: 128847 - DNA, 1053 bp, Saccharophagus degradans 2-40
  CDS (1)..(1053): transl_table=11
atgagcaacccttccttagttcgcagtaattggacccgtaaagaagtggaggccttgtttgccttgccctttaacgatttattgtttgaggcgcaaaccatccaccgccaattttttaacgcgaatgaagtgcaagtaagcaccttgtgttcgattaaaaccggggcctgcccagaagactgcgcctattgtccgcaaagtgcccgttacgataccggcctcgagcgcgaaaaattgatggcggtagaaaaggtattagaagaagccaaggctgcgaaagactctggcgcaacccgcttttgtatgggcgctgcgtggcgttcacccaagaaaaaagacatgccttacgtaaccgctatggtaaagggcgtaaaagaaatgggcttagaagcctgtatgaccctaggcatgatcgataaagatcaagctaccgaattggccgaagctggtttggattactacaaccacaacctcgatacatcgcctgaatactatggcgacattatcaccacgcgcacttaccaagatcgactcgataccctcgacaacgtgcgtcacgccggtatgaaagtatgctgcggcggtattatgggtatgggcgaagatgagtccgaccgtgtaggtttgttattgcagttggcaaatatgccgcagcacccagaatctgtgccaattaatatgttggttgccgtagaaggtacaccgcttgagcagcaagaagcgttagaccctttcgattttattcgcactattgccgttgcgcggattcttatgccgcaatcccacgtacgtttatcggctgggcgtgaagatatgaacgatcaaacccaagccttggcgttccacgccggtgccaactctattttttatggcgaaaaattattaactaccgccaacccagaatctaataaagatatgcagttgtttaagcgtttgggcatcaacccagaaaaacgtgaagagcacaaaaccgagcaagagcaagtagagcaaataaaccaacaggttgccgaagctgcgctcgataaagtgttttacaacgccgcctcttaa

SEQ ID NO: 128848 - protein, 350 aa, Saccharophagus degradans 2-40
MSNPSLVRSNWTRKEVEALFALPFNDLLFEAQTIHRQFFNANEVQVSTLCSIKTGACPEDCAYCPQSARYDTGLEREKLMAVEKVLEEAKAAKDSGATRFCMGAAWRSPKKKDMPYVTAMVKGVKEMGLEACMTLGMIDKDQATELAEAGLDYYNHNLDTSPEYYGDIITTRTYQDRLDTLDNVRHAGMKVCCGGIMGMGEDESDRVGLLLQLANMPQHPESVPINMLVAVEGTPLEQQEALDPFDFIRTIAVARILMPQSHVRLSAGREDMNDQTQALAFHAGANSIFYGEKLLTTANPESNKDMQLFKRLGINPEKREEHKTEQEQVEQINQQVAEAALDKVFYNAAS

SEQ ID NO: 128849 - DNA, 1008 bp, Methylobacillus flagellatus KT
  CDS (1)..(1008): transl_table=11
atgcgagactcagtgattgacatacgcggccttgaccgtgtccaacgtgcaagggtgcaggcgaaggaagaagcgccaaaacgctggagtgtggatgatattgtggcattgttcgagttgccattttcagatctgatgcacagggcacagtccgtgcatcgcgagaatttcgatcccaatggtgtgcaggtcagtaccttgctttccatcaagaccggtggttgttctgaggactgtggctattgtcctcaggccgcccgctaccacaccgatgtggaaaagcaggatttgatgcagctggaagaggtactcgcggcagcgcgtgctgccaaggagaatggcgccagccgtttctgcatgggcgctgcatggcgcagccccaagcagcgcgacctcgagcccgtgctggccatgattcgcgaagtgaaagccatgggcctggaaacttgcgctactcttggaatgctgaaagatgggcaggccgagcaattgaaggaagcgggcctcgactactacaaccataacttggacactgcgcctgaatactacggcgaagtcatcacgacccgcacctaccaggaccgcctggatacgctggatcgtgtgcgcgaacaggacatcaacgtctgctgtggcggcattatcggcatgggggagtcccgcgtccagcgtgccggactgctggcgcagcttgccaatatggagcgtccgcccgaaagcgtgccgatcaacctgctgacgcaggtggaaggcacaccgatgtatggcatggacgagctggacccgtttgaattcgtgcgcacgatcgcggctgcccgcatcacgatgccgcagagtttcgtgcggttgtccgctggccgccaaagcatgcatgagggcatccaggccttgtgcttcctggctggtgccaactcgattttctatggtgagaagctgctgaccacgggcaaccctgaagccgaagctgaccgcaagttattcgacaaactcggcatccatccgctttaa

SEQ ID NO: 128850 - protein, 335 aa, Methylobacillus flagellatus KT
MRDSVIDIRGLDRVQRARVQAKEEAPKRWSVDDIVALFELPFSDLMHRAQSVHRENFDPNGVQVSTLLSIKTGGCSEDCGYCPQAARYHTDVEKQDLMQLEEVLAAARAAKENGASRFCMGAAWRSPKQRDLEPVLAMIREVKAMGLETCATLGMLKDGQAEQLKEAGLDYYNHNLDTAPEYYGEVITTRTYQDRLDTLDRVREQDINVCCGGIIGMGESRVQRAGLLAQLANMERPPESVPINLLTQVEGTPMYGMDELDPFEFVRTIAAARITMPQSFVRLSAGRQSMHEGIQALCFLAGANSIFYGEKLLTTGNPEAEADRKLFDKLGIHPL

SEQ ID NO: 128851 - DNA, 1083 bp, Burkholderia xenovorans LB400
  CDS (1)..(1083): transl_table=11
atgacgcaactgaacatcgctccggcgtccaccgacacggccgccgccagcaacaacaacgccgcagccggcacgaagcagctcgcgcgctggcgcgtggcggacatcgtctcgttgtacgaactgccgttcaacgacctgatgttccaggcgcagcaaacccatcgcgagcatttcgacgcgaacaccgtgcaactgtccacgctgctgtcgatcaagaccggcggctgcgaggaagattgcgcgtattgtccgcagtcggtgcatcacgacacgggcctgcaagccgacaagctgatgccggtcgacgaagtgctcgccgccgcgaaggtcgccaaggaaaacggcgcgacgcgtttctgcatgggcgccgcgtggcgcaacccgaaagaccgtcacctcgaaccgatcaaggacatgatccgcggcgtgaaggcaatgggccttgaaacctgcgtgacgctcggcatgctcgaaacgcatcaggcgcaagggctgcgcgaagcgggcctcgactactacaaccacaatctcgatacgtcgccggagttctacggtcagatcatttcgacgcgcacgtatcaggaccgcctcgacacgctcgaacgcgtgcgcgacgcgggcatcaacgtatgctgcggcgggatcgtcggtctgggcgagtcgcgccgtgaacgcgcgggcctgatcgcgcaactggcgaacatggatccgtatccggaatcggtgcccatcaacaatctggttcaggtggaaggcacgccgctgaccggcaccgaagcgatcgacccgttcgaattcgtgcgcacgatcgcgattgcgcgcatcaccatgccgcgcgcaatggtgcgtctgtcggccggccgcgaacaaatgaacgaagcgttgcaggccatgtgtttcctcgcgggcgcgaactcgattttctacggcgatcaattgctgaccacgagcaacccgcaagccgaagccgaccgcaaactgctcgaacgtctcggcattcgcgccgaggccgcgcagcagatgccactcgatcaaagcggctgcgaacatggctgcgataaacacgctgcgccgaactga

SEQ ID NO: 128852 - protein, 360 aa, Burkholderia xenovorans LB400
MTQLNIAPASTDTAAASNNNAAAGTKQLARWRVADIVSLYELPFNDLMFQAQQTHREHFDANTVQLSTLLSIKTGGCEEDCAYCPQSVHHDTGLQADKLMPVDEVLAAAKVAKENGATRFCMGAAWRNPKDRHLEPIKDMIRGVKAMGLETCVTLGMLETHQAQGLREAGLDYYNHNLDTSPEFYGQIISTRTYQDRLDTLERVRDAGINVCCGGIVGLGESRRERAGLIAQLANMDPYPESVPINNLVQVEGTPLTGTEAIDPFEFVRTIAIARITMPRAMVRLSAGREQMNEALQAMCFLAGANSIFYGDQLLTTSNPQAEADRKLLERLGIRAEAAQQMPLDQSGCEHGCDKHAAPN

SEQ ID NO: 128853 - DNA, 1077 bp, Ralstonia metallidurans CH34
  CDS (1)..(1077): transl_table=11
gtggccaaaccgaatccactaccgaaccccataccgatcatgacgcaacaagccaaccagaccgtcgccaccatttccgccgaagccctgcgccagtcggcccgcaatatcgcggccgccgcgccgaaggagggcgatgcatggcgtgtcgacgatgtcgccgcactgttcgcactgccgttcaacgacctgctgttccgcgcccagcaagtgcatcgcgagcacttcgatgccaacaccgtgcagctttccacgctgctgtcgatcaagactggtggttgcgaggaggactgcggctactgcccgcagagcgcccaccacgatgcgggcgtgaaggctgaaaagctgatggaccttgaggccgtgctcgacgccgccaaggcggccaaggccaacggcgccacgcgcttctgcatgggcgcggcatggcgcgagccgaaggaacgccacctcgagcccgtgatcgacatggtgcgcgaggtcaaggcgatgggcctggaaacctgcgtgacgctggggatgctcaaggccgaacaggcgcagcgtctgaaggacgcgggcctcgactactacaaccacaacctcgatacctcgcccgagttctacggcaagatcatcaccacgcgcacgtaccaggatcggctggacaccatcggccatgtgcgcgaagccggcatcaacgtctgctgtggcggcatcgtcggcatgggcgaagcccgagaggcgcgtgccggcctgatcgcgcaactggccaatatggacccgtacccggagtcggtgcccatcaacaacctggtacaggtggaaggcacgccgctggcgggcaccgaggcgctggacccgttcgagtttgtccgcacgatcgcggtggcgcgtatcacgatgccgcgcgcgatggtgcgtctgtccgctggccgcgaagccatggatgaggcgctgcaggcactgtgcttcatggccggcgcgaactcgatcttctacggcgagaagctgctgaccaccggcaatccccaggctgaccgcgaccgcgcgctgctggcgcgtctggatatccgcgccgagggctacgcggggtaa

SEQ ID NO: 128854 - protein, 358 aa, Ralstonia metallidurans CH34
MAKPNPLPNPIPIMTQQANQTVATISAEALRQSARNIAAAAPKEGDAWRVDDVAALFALPFNDLLFRAQQVHREHFDANTVQLSTLLSIKTGGCEEDCGYCPQSAHHDAGVKAEKLMDLEAVLDAAKAAKANGATRFCMGAAWREPKERHLEPVIDMVREVKAMGLETCVTLGMLKAEQAQRLKDAGLDYYNHNLDTSPEFYGKIITTRTYQDRLDTIGHVREAGINVCCGGIVGMGEAREARAGLIAQLANMDPYPESVPINNLVQVEGTPLAGTEALDPFEFVRTIAVARITMPRAMVRLSAGREAMDEALQALCFMAGANSIFYGEKLLTTGNPQADRDRALLARLDIRAEGYAG

SEQ ID NO: 128855 - DNA, 1041 bp, Myxococcus xanthus DK 1622
  CDS (1)..(1041): transl_table=11
atgcccgataccgccactgtctccagcgagagcgagttctctggtcacgcccacgtcgccgcgccgccaccggcgggcgtggacgtgcgccatgactggtcgctgtcggaggtgagggccctctacgaactcccgctgctggacctggtgcacaaggcccagacggtccaccgggccgtgttcgtggacaacaaggtccagctctgttcgctgctgtccatcaagacgggcggctgcccggaggactgctcgtactgcccgcaggcggctcgctacaagacgggcgtcaaggcggagaagctgatggccgtgccggacgtgctggatgccgcgtccaaggcccgcgccgccggagccacccgcttctgcatgggcgccgcgtggcgcgaggtgaaggacggtccgcagttcgacagcgtgctggagatggtgcgcggcgtgcgcgcgctgggcatggaggcgtgtgccaccctgggcatgctctccgagagccaggcgaagcgcctgcgcgaggccggcctgtccgcgtacaaccacaacctggacacgtcgcccgagcactacggcgacatcatctccacccgcacctatgaagaccgcctgcgcacgctcaaccgcgtgcgcgacgccggcatctccgtgtgctgcggcggcatcattggcatgggcgagtcggtggatgaccgctgcaacctgctgcgcaccctggccaaccaggagcaccacccggagtcggtgcccatcaacgcgctggtggccgtggagggcacgccgctgcaggagcagcagcgcgtggagacggtggacatggtgcgcaccatcgccaccgcgcgcatcctgatgccccagtccatggtgcgcctgtccgcgggccggcagcagatgaacgaagaggcgcaactgctgtgcatgatggcgggcgccaactcactcttcttcggcgagaagctgctcaccaccggcaaccccgagtacacccaggacatggccctgctggagaaggcgggaatccgccccctggagccgcgtcaggaaggctga

SEQ ID NO: 128856 - protein, 346 aa, Myxococcus xanthus DK 1622
MPDTATVSSESEFSGHAHVAAPPPAGVDVRHDWSLSEVRALYELPLLDLVHKAQTVHRAVFVDNKVQLCSLLSIKTGGCPEDCSYCPQAARYKTGVKAEKLMAVPDVLDAASKARAAGATRFCMGAAWREVKDGPQFDSVLEMVRGVRALGMEACATLGMLSESQAKRLREAGLSAYNHNLDTSPEHYGDIISTRTYEDRLRTLNRVRDAGISVCCGGIIGMGESVDDRCNLLRTLANQEHHPESVPINALVAVEGTPLQEQQRVETVDMVRTIATARILMPQSMVRLSAGRQQMNEEAQLLCMMAGANSLFFGEKLLTTGNPEYTQDMALLEKAGIRPLEPRQEG

SEQ ID NO: 128857 - DNA, 1014 bp, Cytophaga hutchinsonii ATCC 33406
  CDS (1)..(1014): transl_table=11
atgacagaaattcgcaataactggacaaaagaagaaatttcagcaatctacaacagcccaatattggatttaatgtatcgtggtgctacagtacaccgtgaattccatgatccgcaagaagtacaggtttgtacattgttgtctatcaaaacgggggggtgcccggaagactgctcttattgcccgcaggctgcccgctatcacacagatgtgaaagtagagaagttgatggatgtgaaagatgtattgaactcagcattggaagcgaaggaatccggaagcacacgtttttgtatgggtgctgcctggagagaagtcagagataataaagactttgataaagtgattgatatggtgaaaggagtaagtacaatgggtatggaagtatgctgtacacttggtatgttaactcctgaacaggctgataaattaaaagacgccggtttgtatgcatacaatcacaacctggatacaagcgcagagcactacgataaagtaattacaaccagaacatacgacgaccggttggaaacattggataacgtgcgtaatgcaaaaatatctgtatgttccggaggtatcatcggtatgggcgaaagccacggtgaccgcgtaggtatgctgcatacgttagctaatatggttgagcatccggaatctgttcccgtaaatgcactggtacctgttgaaggtacaccattagaagatcagccccgtgtttctgtttgggaaatggttcgtatgatcgctacagcacgtatcatcatgccgaaagcaatggtacgtttatctgccggccgcgtgcgtatgaatacagaagaacaggcattgtgcttcctggcaggtgctaattcaatctttgccggtgataaattgcttactacaccaaatcctgaagtaaacgccgataaagaaatgtttcaggtattaaatctaaaaccgcgtcaatcgtttaagaacggcgacgcgccaaagattaaatttgaacagatcccaagtgcattggtaaaataa

SEQ ID NO: 128858 - protein, 337 aa, Cytophaga hutchinsonii ATCC 33406
MTEIRNNWTKEEISAIYNSPILDLMYRGATVHREFHDPQEVQVCTLLSIKTGGCPEDCSYCPQAARYHTDVKVEKLMDVKDVLNSALEAKESGSTRFCMGAAWREVRDNKDFDKVIDMVKGVSTMGMEVCCTLGMLTPEQADKLKDAGLYAYNHNLDTSAEHYDKVITTRTYDDRLETLDNVRNAKISVCSGGIIGMGESHGDRVGMLHTLANMVEHPESVPVNALVPVEGTPLEDQPRVSVWEMVRMIATARIIMPKAMVRLSAGRVRMNTEEQALCFLAGANSIFAGDKLLTTPNPEVNADKEMFQVLNLKPRQSFKNGDAPKIKFEQIPSALVK

SEQ ID NO: 128859 - DNA, 960 bp, Clostridium perfringens ATCC 13124
  CDS (1)..(960): transl_table=11
atggattttgttttaaaaatgaaggataagtctttaaaaaatagaaagctaactagagaagaagggttaaggctttttaatagtaatctagaggaattgattaaagaagctaacaacataagaaaagagattcatggtgatggtattgatttatgttcaataattaatgggaaaagtggaaggtgtggagaggattgtgctttttgtgcccaatctaagtatcataagactaatataagtgaataccctcttcttgattatgaaaagataaaaaaagttgctaaggaaaatgaagatgaaggagttcatagattttctatagttacctcaggaagaggactttatggtgaggagtttgagagagtaattacttattattcaaatttaaataaagagcttaaaataaatctttgtgcttcccatggaataataaataaagagtctttaataaaattaaagaaagctggagtaaaaagatatcatcataatttagagacatctagaaactgctatgacaaaatatgcaaaactcattcttatgaggaaagagtaaagactataaaaaatgctaaggaagctggtttagaagtatgctcaggaggaataattggccttggagaaacaattatagatagaatagatttagctattacccttagagaattagaaataaaatcaattccaataaatgttttaagtgctattaagggaactaagcttcagcatatgattcctttaaatgaagaggaaattcttaggacaatagctgtttttagatttataaatccagaagctaaaataagattagcaggaggaaggtatttgcttaaaaactttggtgaaaatgcttttaaagcaggagcaaatgctactataacagggaatttattaactacatgtggaaataagataaaagacgataaaagattaatagagaatattgggatgaggattttttag

SEQ ID NO: 128860 - protein, 319 aa, Clostridium perfringens ATCC 13124
MDFVLKMKDKSLKNRKLTREEGLRLFNSNLEELIKEANNIRKEIHGDGIDLCSIINGKSGRCGEDCAFCAQSKYHKTNISEYPLLDYEKIKKVAKENEDEGVHRFSIVTSGRGLYGEEFERVITYYSNLNKELKINLCASHGIINKESLIKLKKAGVKRYHHNLETSRNCYDKICKTHSYEERVKTIKNAKEAGLEVCSGGIIGLGETIIDRIDLAITLRELEIKSIPINVLSAIKGTKLQHMIPLNEEEILRTIAVFRFINPEAKIRLAGGRYLLKNFGENAFKAGANATITGNLLTTCGNKIKDDKRLIENIGMRIF

SEQ ID NO: 128861 - DNA, 1053 bp, Shewanella sp. MR-4
  CDS (1)..(1053): transl_table=11
atgtcgcagttgcaagttcgtcatgattggaagcgggaagaaatcgaagccttatttgcgctgccgatgaatgacttattatttaaagcacacagtatccatcgtgaagtgtacgatcctaacgaagtgcagatcagccgattactgtcgattaaaaccggtgcttgtcctgaggattgtaaatattgtccgcagagtgcgcgttacgacactggccttgaaaaagagcgcctattggcgatggaaaccgtattgacggaagcgcgcagtgctaaagccgcgggcgcttcacgtttctgtatgggcgccgcttggcgtaacccgaaagataaagacatgccatacctcaagcaaatggtgcaagaggttaaagccctcggcatggaaacctgcatgaccttaggcatgcttagtgccgagcaagccaatgagctggccgatgcgggccttgactattacaaccacaatttagatacctcgcctgaatattacggcgatgtgatcaccacccgtacctatcaaaaccgtttagataccttaagccacgtgcgtgcatcgggcatgaaagtttgctctggcggtattgttggcatgggcgaaaaggccacagacagagcgggtttattgcaacaactggcgaatttgcctcagcatcccgattctgtgcccattaacatgttggtcaaagtggcgggcacccccttcgaaaaactcgatgatttagatccgctggagtttgtccgtaccatcgccgtggcgcgtattttaatgcctaagtcccgtgtgcgtttatctgcgggccgtgaaaacatgactgacgaactgcaggccatgtgtttctttgcgggcgctaactcgattttctacggctgtaagttactgactacgccaaaccctgaagaaagtgatgatatgggcctgttccgccgtcttggcttacgtcctgagcagggtgctgctgcaactatcgatgatgagcaggcggtcttagccaaagctgcggctcaccaagataaagcctcggcacctttttatgatgcggcggcgctgtaa

SEQ ID NO: 128862 - protein, 350 aa, Shewanella sp. MR-4
MSQLQVRHDWKREEIEALFALPMNDLLFKAHSIHREVYDPNEVQISRLLSIKTGACPEDCKYCPQSARYDTGLEKERLLAMETVLTEARSAKAAGASRFCMGAAWRNPKDKDMPYLKQMVQEVKALGMETCMTLGMLSAEQANELADAGLDYYNHNLDTSPEYYGDVITTRTYQNRLDTLSHVRASGMKVCSGGIVGMGEKATDRAGLLQQLANLPQHPDSVPINMLVKVAGTPFEKLDDLDPLEFVRTIAVARILMPKSRVRLSAGRENMTDELQAMCFFAGANSIFYGCKLLTTPNPEESDDMGLFRRLGLRPEQGAAATIDDEQAVLAKAAAHQDKASAPFYDAAAL

SEQ ID NO: 128863 - DNA, 1014 bp, Alkalilimnicola ehrlichei MLHE-1
  CDS (1)..(1014): transl_table=11
atgggagccaccaaatcaatgaccgccacaacccaaacaccccgccacgactggtctaaagacgaagtcctggccctgttcgagcagcccttcaacgacctgctccaccaagcccagaccacccaccgggcccacttcgaccccaacaccgtccaggtcagcaccctgctcagcatcaagaccggcgcctgcccggaggactgcaaatactgcccccagagcgtgcgctacgacaccggcctggaacgcgagcaaatcctggccgtggaagaggtggtggcggccgcccgccgggcccgggacgccggtgctacccgcttctgtatgggcgccgcctggcgctcgcccaaagaccgcgacctggagaccgtcgaggccatggtgcgcgaggtcaaggccctgggcctcgagacctgcctcaccctcggcatgctccgcgacggccaggccgaacgcctgcgcgaggccgggctcgactactacaaccacaacctcgacacctccgaggactactacgacgaaatcatcaccacccgcagctaccaggaccgcctcgacaccctcgcccgggtgcgcgacgccggcctcaagacctgctgcggcggcatcatcggcatgggcgaaacccgccaggaccgcgccgaactgctgcgtaccctggccagcctgccggtgcagccgcagagcgtccccatcaaccagctcgtccaggtccccggcaccccgctgcacggcgtcgagccccccgaccccttcgaattcgtccgcaccatcgccgtcgcccgcatcctcatgccggccagctacgtccgcctctccgccggccgcgagcagatgtccgacgaactgcaggccctctgcttcctggccggcgccaacagcatcttctacggcgacaagctgctcaccaccggcaacccggaggccgacaaggaccgccgcctgctggcccgtctgggcatggggtttgaggcgcacgcctgcgcccaggccgaggccgaggacctgggatga

SEQ ID NO: 128864 - protein, 337 aa, Alkalilimnicola ehrlichei MLHE-1
MGATKSMTATTQTPRHDWSKDEVLALFEQPFNDLLHQAQTTHRAHFDPNTVQVSTLLSIKTGACPEDCKYCPQSVRYDTGLEREQILAVEEVVAAARRARDAGATRFCMGAAWRSPKDRDLETVEAMVREVKALGLETCLTLGMLRDGQAERLREAGLDYYNHNLDTSEDYYDEIITTRSYQDRLDTLARVRDAGLKTCCGGIIGMGETRQDRAELLRTLASLPVQPQSVPINQLVQVPGTPLHGVEPPDPFEFVRTIAVARILMPASYVRLSAGREQMSDELQALCFLAGANSIFYGDKLLTTGNPEADKDRRLLARLGMGFEAHACAQAEAEDLG

SEQ ID NO: 128865 - DNA, 963 bp, Hyphomonas neptunium ATCC 15444
  CDS (1)..(963): transl_table=11
atgacgtcttctgacctcaccccccgccagaactggacccgcgaagagattgcggcaatctatgatctgcccctcgatcagcttttcgcccgcgcgctcgccgtgaaggcagcccattgggcagacggcgccgtgcaaaagtcgcagctcctgtcgatcaagaccggcggctgcgccgagaattgcggttattgcagccagtcagcgagcttcaagacaggccttaaggctgagaagctgctcccggttgaagaagttgttgatgctgctcgccgcgcaaaggccaacggcgcggaccgtttctgcatgggcgccgcctggcgctcgctgaaagatcgcgacctgccaaaagtggcagagatgatctcggctgtgaaggcagaaggccttgagacctgcgtcacgctcggcatgcttgaagaaggccaggctgaagcgctgaaagaagcgggcctcgactattacaatcacaacctcgacacctcgcgcgagtattacagcacggtcgtcacgacacggacgtttgacgaccggatcgaaacgctcggccgtgcgcgacaggccggcatcaagctctgctgtggcggcatcctcggcatgggcgagtcgcgctctgaccgggtaggcctcatccatgagctttccctgcttagcccccatccagaaagcgtaccggtcaacaagctcgtgcccatcgagggcacacctctggccaatagcgaagagctcgatacgctcgagctcgcccgcgccattgcggtctgccgcatcgtattcccgaaaagctgggtgcgcctctctgccgggcgcgaaacgatgagcgccgaaggccaggccctctgcatcctcgccggcgccaactcaatttttgtgggcgaccgcctgctgacaactgccaatcccgccatggacaaggacgcgcgcctgctcgaatccgtggggggtggttgctcgaagtgctag

SEQ ID NO: 128866 - protein, 320 aa, Hyphomonas neptunium ATCC 15444
MTSSDLTPRQNWTREEIAAIYDLPLDQLFARALAVKAAHWADGAVQKSQLLSIKTGGCAENCGYCSQSASFKTGLKAEKLLPVEEVVDAARRAKANGADRFCMGAAWRSLKDRDLPKVAEMISAVKAEGLETCVTLGMLEEGQAEALKEAGLDYYNHNLDTSREYYSTVVTTRTFDDRIETLGRARQAGIKLCCGGILGMGESRSDRVGLIHELSLLSPHPESVPVNKLVPIEGTPLANSEELDTLELARAIAVCRIVFPKSWVRLSAGRETMSAEGQALCILAGANSIFVGDRLLTTANPAMDKDARLLESVGGGCSKC

SEQ ID NO: 128867 - DNA, 1059 bp, Pseudomonas aeruginosa UCBPP-PA14
  CDS (1)..(1059): transl_table=11
atgagtgcaaccgcttccgtcgccacccgtcacgactggtccctcgccgaagtccgtgccctgttcgagcagccgttcaacgacctgctgttccaggcgcagacggtgcatcgcgcgtacttcgacccgaaccgcgtacaggtctcgacgctgctgtcgatcaagaccggcgcctgtcccgaggactgcaagtactgcccgcagtccggccactacaacaccggcctggacaaggagaagctgatggaggtgcagaaggtcctcgaggcggcggccgaggccaaggccatcggttcgacccgcttctgcatgggcgctgcctggaagcacccgtcggccaaggacatgccctacgtcctggagatggtcaagggcgtgaagaagctcggcctggagacctgcatgaccctcggccgcctgacccaggaacagacccaggcgctggcggacgccggcctcgactactacaaccacaacctggatacctcgccggagttctacggcaacatcatcaccacccgcacctacagcgagcgcctgcagaccctggcctacgtgcgcgaggcggggatgaagatctgctccggcggcatcctcggcatgggcgagtcggtggacgaccgcgccggcctgctgatccagttggcgaacctgccggagcacccggagtcggtgccgatcaacatgctggtgaaggtcaagggcacgcccctggcggaagagaaggacgtcgatcccttcgacttcatccgcaccctggcggtggcccggatcatgatgccgaagtcccacgtgcgcctgtccgccggccgcgagcagatgaacgagcagatgcaggcgctggccttcatggccggggccaactcgatcttttacggcgaaaagctgctgaccacgaagaacccgcaggccgaaaaggacatgcagttgttcgcccgtctcggcatcaagccggaagagcgcgaagagcacgccgacgaagtgcaccaggccgccatcgagcaggcgttggtggaacaacgcgaatcgaagctgttctataacgccgcttccgcctga

SEQ ID NO: 128868 - protein, 352 aa, Pseudomonas aeruginosa UCBPP-PA14
MSATASVATRHDWSLAEVRALFEQPFNDLLFQAQTVHRAYFDPNRVQVSTLLSIKTGACPEDCKYCPQSGHYNTGLDKEKLMEVQKVLEAAAEAKAIGSTRFCMGAAWKHPSAKDMPYVLEMVKGVKKLGLETCMTLGRLTQEQTQALADAGLDYYNHNLDTSPEFYGNIITTRTYSERLQTLAYVREAGMKICSGGILGMGESVDDRAGLLIQLANLPEHPESVPINMLVKVKGTPLAEEKDVDPFDFIRTLAVARIMMPKSHVRLSAGREQMNEQMQALAFMAGANSIFYGEKLLTTKNPQAEKDMQLFARLGIKPEEREEHADEVHQAAIEQALVEQRESKLFYNAASA

SEQ ID NO: 128869 - DNA, 1062 bp, Mycobacterium smegmatis str. MC2 155
  CDS (1)..(1062): transl_table=11
atgttcgaggtgttccgagatcttttcaacccgcaggaggacggcgtgacgcaggcggccatcaacggcacagatgtactggacgtggcgcgcgagcaggtgctggagcgcggcgtcggcctcgaccaggcgcagaccctgcaggtgctgcagttgcccgatgagcgcctcgacgacctgctctcgctggcccacgaggtgcggatgcgctggtgcggtcccgacgtcgaggtcgagggcatcatcagcctcaagaccggcggctgcccggaggactgccacttctgctcgcagtcaggacttttcgcctcgcccgtgcgcagcgcgtggctcgacgtgccgagcctggtggaggcggccaagcagaccgcaaagaccggtgccaccgaattctgcatcgtggccgccgtgcgcgggcccgatgagcgtctgctggcacaggtcgccgcgggcatcgaggccatccgcaacgaggtcgacatccagatcgcgtgctcgctgggcatgctcaccgaggagcaggtgcagcgcctggcggacatgggcgtgcaccgctacaaccacaacctggagaccgcgcgctcgttcttccccaacgtcgtcaccacccacacctgggaggagcgctgggacaccctcaacatggtccgcgaggcaggcatggaggtgtgctgcggcggcatcctcggcatgggggagaccctcgaacagcgcgccgaattcgcggccaacctcgccgaactgaatccgcacgaggtgccgctcaacttcctcaacccgcgcccgggcacaccgttcggtgacctcgaggtgctgccggcctccgaggcgctcaaggccgtcgcggcgttccgtctcgcgctgccgcgcaccatgctgcgattcgccggcggacgcgagatcaccctgggcgacctcggcgccaagaagggcatcctcggcggcatcaacgccgtcatcgtcggtaactacctgaccacgctgggccgaccggccgaggccgacctgcaattgctcgacgatttgcagatgcccatcaaggcgctcaacgccaccctgtaa

SEQ ID NO: 128870 - protein, 353 aa, Mycobacterium smegmatis str. MC2 155
MFEVFRDLFNPQEDGVTQAAINGTDVLDVAREQVLERGVGLDQAQTLQVLQLPDERLDDLLSLAHEVRMRWCGPDVEVEGIISLKTGGCPEDCHFCSQSGLFASPVRSAWLDVPSLVEAAKQTAKTGATEFCIVAAVRGPDERLLAQVAAGIEAIRNEVDIQIACSLGMLTEEQVQRLADMGVHRYNHNLETARSFFPNVVTTHTWEERWDTLNMVREAGMEVCCGGILGMGETLEQRAEFAANLAELNPHEVPLNFLNPRPGTPFGDLEVLPASEALKAVAAFRLALPRTMLRFAGGREITLGDLGAKKGILGGINAVIVGNYLTTLGRPAEADLQLLDDLQMPIKALNATL

SEQ ID NO: 128871 - DNA, 981 bp, Azoarcus sp. BH72
  CDS (1)..(981): transl_table=11
atgacaacgaccttgaccgcccccacccccgccgccgcggaggcgccccgcaagaaatggacggtggccgaggtgcaggcgctgttcgacctgcccttcctcgacttggtgttccaggcccagcaggttcaccgcgcgcacttcgccgccaacgaggtgcagcgctccacgttgctgtcgatcaagacgggtggctgctcggaagactgcggctactgttcgcagtcggcacgctacgacaccgggctggaacgcgaacgtctgctgccgctggacgaggtgctcgagcacgcgcgcgcggccaaggccaagggctcgtcccgcttctgcatgggtgccgcgtggcgtggtcccaaggacaaggacatggcgccggtgctggagatggtgcgcgaagtcaagaagctggggctggaaacctgcgtcacgctcggcatgttgaaggagggacaggccgagcagctcgcggaagccggactggactattacaaccacaacatcgacaccgcgcccgagttctacggccagatcgtcaccacccatacgctgcaggaccgcctcgacacgctcgacaaggtgcgcgatgccggcatcaacgtgtgctgcggcggcatcgtcgggatgggtgaaacccagaccagccgcgccggcctgatcgcccagctggccaacatgaccccgccgcccgactcggtgccgatcaacaacctggtcgcgatccccggcacgccgctcgccgacggcggcacgatcgacggcttcgacttcgtccgcaccatcgccgcggcccgcatcaccatgcccaccagctacgtgcggctctccgccgggcgccagcagatgagcgacgagatgcaggcgctgtgcttcatggccggcgccaactcgatcttctacggcgaacgcctgctgaccaccgacaatccggaatccgaccgcgacgacgtgctgttcgcacgcctcggcctgcgttcggtgtga

SEQ ID NO: 128872 - protein, 326 aa, Azoarcus sp. BH72
MTTTLTAPTPAAAEAPRKKWTVAEVQALFDLPFLDLVFQAQQVHRAHFAANEVQRSTLLSIKTGGCSEDCGYCSQSARYDTGLERERLLPLDEVLEHARAAKAKGSSRFCMGAAWRGPKDKDMAPVLEMVREVKKLGLETCVTLGMLKEGQAEQLAEAGLDYYNHNIDTAPEFYGQIVTTHTLQDRLDTLDKVRDAGINVCCGGIVGMGETQTSRAGLIAQLANMTPPPDSVPINNLVAIPGTPLADGGTIDGFDFVRTIAAARITMPTSYVRLSAGRQQMSDEMQALCFMAGANSIFYGERLLTTDNPESDRDDVLFARLGLRSV

SEQ ID NO: 128873 - DNA, 1251 bp, Neisseria meningitidis FAM18
  CDS (1)..(1251): transl_table=11
atgccgtctgaaagcccttcagacggcatcgtccggctgcgcggcacaaaggcggaaaaaccgtttgccccgtattttcaaacgcgttacacttgccgccgctgttttcagccatttgattacccgcaaccgccgtcattgcgccggcggtttgcctgtcagcgtcattgcgccgctgtaaatacgaaagaacacattatgaccgtatcccccgtcgccttgcgccgtaagaccgagtgcaagcctcatcccaccgcgcgctattggaaaaaatgcgatgtcgaggcacttttcggactgccgtttttagaacttgtccatcaggcggcagaagtccaccgccaaaatttcaacccgcgcgaaatccagctttccacgctgttgtccatcaaaaccggcggttgtcccgaagattgcgcctactgtccgcaatcggcgcaccacaataccaatctgggcaaagagcagatgatggatgtggatgaaatcgtcgaaaaagccaaaatcgccaaatcgcgcggcgcaagccggttttgtatgggcgcggcatggcgcggccccaaacccaaagacgtggagacggtttccgcaatcatcaaagccgtcaagggcttgggtatggaaacctgcggcacgttcggtatgctcgaagaaggtatggcggaagacttgaaagaggcgggcttggattattacaaccacaacctcgacaccgaccccgaccgctacaacgacatcatccatacacgccggcatgaagaccgtatggacaccttgggcaaagtccgcaacgccggtttgaaagtctgctgcggcggcatcgtcgggatgaacgaaacccgcgccgaacgcgcagggctgattgccagcctcgccaacctcgacccgcagcccgaaagcgtgccgattaaccggttggtcaaagtggaaggtacgccgcttgccgatgccgaggatttggactggacggaatttgtccgcaccatcgccgtggcgcggattacgatgccgcaaagttatgtccgactgtcggcagggcgcagcaatatgccggaagcgatgcaggcgatgtgctttatggcgggcgcgaactcgattttttacggcgacaagctgctgaccacgggcaatccggatgaagacggcgacagaatcctgatggaaaagctcaacctgtatcccttacagtttgagctggaaggcgaggtcgccgaagtggaaaaagcctctgggattaaagtggattattga

SEQ ID NO: 128874 - protein, 416 aa, Neisseria meningitidis FAM18
MPSESPSDGIVRLRGTKAEKPFAPYFQTRYTCRRCFQPFDYPQPPSLRRRFACQRHCAAVNTKEHIMTVSPVALRRKTECKPHPTARYWKKCDVEALFGLPFLELVHQAAEVHRQNFNPREIQLSTLLSIKTGGCPEDCAYCPQSAHHNTNLGKEQMMDVDEIVEKAKIAKSRGASRFCMGAAWRGPKPKDVETVSAIIKAVKGLGMETCGTFGMLEEGMAEDLKEAGLDYYNHNLDTDPDRYNDIIHTRRHEDRMDTLGKVRNAGLKVCCGGIVGMNETRAERAGLIASLANLDPQPESVPINRLVKVEGTPLADAEDLDWTEFVRTIAVARITMPQSYVRLSAGRSNMPEAMQAMCFMAGANSIFYGDKLLTTGNPDEDGDRILMEKLNLYPLQFELEGEVAEVEKASGIKVDY

SEQ ID NO: 128875 - DNA, 1053 bp, Acidovorax sp. JS42
  CDS (1)..(1053): transl_table=11
atgacctcagccacgacagccccgcatacaacccagacattgcagtttcatcctcgcgttgccgagagtgttgcgacgcagcgaggggagggctggagcattcaagcggtacaggagctcctcgatcttccattcatggaactgctctggcgcgcgcaggccacgcaccgtacacattggccccagggcgacatcgaattggccacgctgctgtccgtgaaaacaggcggctgtccggaaaactgcggctactgcccccagtcggcggagttcgataccggcgtgaaggccgaaaaactcatgaacgtccaggaggtaacccaggcagcgcaagccgccaaggacgccggcgcgacgcgcttttgcatgggcgccgcctggcgagcaccgaaggaccgcgacatcgaaaagataagcgagctgatcaccgccgtgaaagacctaggcttgcagacctgcgccacgctgggcatgttgcagtcgcaccaggcccaggcgctgaaggatgccggactggactactacaaccacaacctggacacggcccccgagtactacagcgacgtggtcagcacgcgccagtaccaggaccggctggatacgctgcgccatgtgcgcgacgccggcatcaacgtgtgctgcggcggcatcgttggcatgggcgaagcgccggtgcaccgcgcgggtctcatcgcgcagttggccaacctaaacccgtatccggagtcggtgcccatcaacagcctggtgcgtgttgccggaacaccgttggccgacagcgagccggtagacccgctggacttcgtgcgcgtgatcgcggtggcccgcatcaccatgcccaaggctcgcgtacgcctgtccgccggacgccagcagcttggcgacgcggtgcaggctttgtgcttcttggcgggtgccaattccatcttctatggcgacaagctgctcgtgacgggcaacccggatgtagaggccgacacccaattgctggccaaactggggttgaagggtacgcccaaccaaaccaccacagaaactgcttgcggtgcttaa

SEQ ID NO: 128876 - protein, 350 aa, Acidovorax sp. JS42
MTSATTAPHTTQTLQFHPRVAESVATQRGEGWSIQAVQELLDLPFMELLWRAQATHRTHWPQGDIELATLLSVKTGGCPENCGYCPQSAEFDTGVKAEKLMNVQEVTQAAQAAKDAGATRFCMGAAWRAPKDRDIEKISELITAVKDLGLQTCATLGMLQSHQAQALKDAGLDYYNHNLDTAPEYYSDVVSTRQYQDRLDTLRHVRDAGINVCCGGIVGMGEAPVHRAGLIAQLANLNPYPESVPINSLVRVAGTPLADSEPVDPLDFVRVIAVARITMPKARVRLSAGRQQLGDAVQALCFLAGANSIFYGDKLLVTGNPDVEADTQLLAKLGLKGTPNQTTTETACGA

SEQ ID NO: 128877 - DNA, 1026 bp, Xylella fastidiosa Ann-1
  CDS (1)..(1026): transl_table=11
atgtcctctgtcatccgctacgactggactgccgaagagttacatgccctgttcgatttgtcgttgccagaacttctttatcgggccgctagtgtgcatcgtcagcatttcgaccctgctgagattcaggtgtctacattgttgtcggttaagactggcggctgtccggaagattgttcttattgtccacaggcgcagcgttatgacactggtgtgacagcgcagaagttgatggacgttgatgcagtcgttgcgaaggcacgacaagcgaagttggccggtgcgtcccgtttttgcatgggagccgcttggcgctcacccaaggatcgggatattccaaaaattgcgtcgatgattcgggaggttaaagcacttggcctggaaacgtgtgccacgctaggtatgctcaatacgtgtcaggcgcaggcgctcaaggatgctggtctggattactacaatcataatgtggatacatcgccggatttttacgattcggtcatccacactcggcaatatcaggatcggctggatactttggcccatgtgcgtgatgttggtttgaaaacgtgttgtggtggcattgtcggcatgggcgagacgcgtcagcatcgcgttggtttgctgctgactctagctactctgccagcgcatcctgattctgtgccggtcaatcttttggttcaagtagctgggactcctctgcatggtacacagacgcttgatccgtttgagtttgtacgcatgattgcagtggcacggatcactatgcccaggtcgatggtacgtctgtccgcagggcgggagtcgatgagtgatgagttacagttgctttgctttatggctggtgccaactcgattttctacggtgagaaactgttgaccactgctaatccggagactgaacgggatcaagctctgttccagcgcctgggattgcgtccaatgcatctcatggagaatgtttctaaccaagatcagcatcacggtaatgtacatgctgatatcgcttgcaaacatgttgtttga

SEQ ID NO: 128878 - protein, 341 aa, Xylella fastidiosa Ann-1
MSSVIRYDWTAEELHALFDLSLPELLYRAASVHRQHFDPAEIQVSTLLSVKTGGCPEDCSYCPQAQRYDTGVTAQKLMDVDAVVAKARQAKLAGASRFCMGAAWRSPKDRDIPKIASMIREVKALGLETCATLGMLNTCQAQALKDAGLDYYNHNVDTSPDFYDSVIHTRQYQDRLDTLAHVRDVGLKTCCGGIVGMGETRQHRVGLLLTLATLPAHPDSVPVNLLVQVAGTPLHGTQTLDPFEFVRMIAVARITMPRSMVRLSAGRESMSDELQLLCFMAGANSIFYGEKLLTTANPETERDQALFQRLGLRPMHLMENVSNQDQHHGNVHADIACKHVV

SEQ ID NO: 128879 - DNA, 1026 bp, Xylella fastidiosa Ann-1
  CDS (1)..(1026): transl_table=11
atgtcctctatcatccgctacgactggactgccgaagagttacatgcgctgttcgatttgtcgttgccagaacttctttatcgggccgctagtgtgcatcgtcagcatttcgaccctgctgagattcaggtgtctacattgttgtcggttaagactggcggctgtccggaagattgttcttattgtccacaggcgcagcgttatgacactggtgtgacagcgcagaagttgatggacgttaatgcagtcgttgcgaaggcacgacaagcgaagttggccggtgcgtcccgtttttgcatgggggctgcttggcgctcacccaaggatcgggatattccaaaaattgtgtcgatgattcgggaggttaaagcacttggcctggaaacctgtgccacgctaggcatgctcaatacgtgtcaggcgcaggcgctcaaggatgctggcctagattactacaatcataatgtggatacatcgccggatttttacgattcgatcatccacactcggcaatatcaggatcggctggatactttggcccatgtgcgtgatgttggtttgaaaacgtgttgtggtggcattgtcggcatgggcgagacgcgtcagcatcgcgttggtttgctgctgactctagctactctgccagcgcatcctgattctgtgccggtcaatcttttggttcaagtagctgggactcctctgcatggtgcacagacgcttgatccgtttgagtttgtacgcatgattgcagtggcacggatcactatgcccaggtcgatggtacgtctttccgcagggcgggagacgatgagtgatgagttacagttgctttgctttatggctggcgccaactcgattttctacggtgagaaactgttgaccactgctaatccggagactgaacgggatcaagctctgttccagcgcctgggattgcgtccaatgcatctcatggagaatgtttctaaccaagatcagcatcacggtagtgtacatgctgatatcgcttgcaaacatgttgtttga

SEQ ID NO: 128880 - protein, 341 aa, Xylella fastidiosa Ann-1
MSSIIRYDWTAEELHALFDLSLPELLYRAASVHRQHFDPAEIQVSTLLSVKTGGCPEDCSYCPQAQRYDTGVTAQKLMDVNAVVAKARQAKLAGASRFCMGAAWRSPKDRDIPKIVSMIREVKALGLETCATLGMLNTCQAQALKDAGLDYYNHNVDTSPDFYDSIIHTRQYQDRLDTLAHVRDVGLKTCCGGIVGMGETRQHRVGLLLTLATLPAHPDSVPVNLLVQVAGTPLHGAQTLDPFEFVRMIAVARITMPRSMVRLSAGRETMSDELQLLCFMAGANSIFYGEKLLTTANPETERDQALFQRLGLRPMHLMENVSNQDQHHGSVHADIACKHVV

SEQ ID NO: 128881 - DNA, 1089 bp, Croceibacter atlanticus HTCC2559
  CDS (1)..(1089): transl_table=11
atgacgactaaacacaactggactatagaagaaattcttgacatttataataaaccctttatggatttgctgtatgaagcagcaactgtacatagagaattccatgaccctaatacggtacaagtatcaacattactttcaattaaaacaggtggttgcccagaagactgtggctattgtcctcaagcagcgcgctatcatacagatatagaaggaaatgatcttatgggtgtgcagcaagtaaaagcacaagcattaagagcaaaagcaagtggctcttccagagtatgtatgggagcagcttggcgtaatgtaaaagacggcgaagagtttgagcaagttttagaaatggttcgtactattaataaacttgaaatggaagtttgctgtacgttaggaatgcttaccgaaaatcaggcacaccgattggcagaagctggtttatatgcctataaccacaatttagattcctctgaagaatattacaaagaagtaatttctactagaggttttgaagaccgcttaaaaacaatagataacgtaagaaaaacaaatgttactgtgtgtagtggcggtattattggaatgggtgaaagtactaaagaccgtgcaggaatgttggtagctttagcaacgttaaacccacagccagaatctgtacctataaatgcattagtagctgtagatggtacgccattggaagatcaagagccaatacctatttgggatatggtgcgtatggtggcaacgacacgtattgtaatgccacaaacgcaagtacgtttatctgctggaagaacacaaatgagtagagagggacaagcaatgtgtttctttgcaggtgccaattctatatttgcaggagataagctattaacaacgcctaatccagatgttaatgaagacatggaaatgtttaaagcattaggtcttaatcctcaaaagccttttgtaaagaaatctcagccagaaactgtggagtctcaagattcaaagtaccaagcattgggagaaaagccaaaatggtctcgtcctggtcataaaattgaacgtaacgaagaggcaaaaggtaaggctaaagcagtataa

SEQ ID NO: 128882 - protein, 362 aa, Croceibacter atlanticus HTCC2559
MTTKHNWTIEEILDIYNKPFMDLLYEAATVHREFHDPNTVQVSTLLSIKTGGCPEDCGYCPQAARYHTDIEGNDLMGVQQVKAQALRAKASGSSRVCMGAAWRNVKDGEEFEQVLEMVRTINKLEMEVCCTLGMLTENQAHRLAEAGLYAYNHNLDSSEEYYKEVISTRGFEDRLKTIDNVRKTNVTVCSGGIIGMGESTKDRAGMLVALATLNPQPESVPINALVAVDGTPLEDQEPIPIWDMVRMVATTRIVMPQTQVRLSAGRTQMSREGQAMCFFAGANSIFAGDKLLTTPNPDVNEDMEMFKALGLNPQKPFVKKSQPETVESQDSKYQALGEKPKWSRPGHKIERNEEAKGKAKAV

SEQ ID NO: 128883 - DNA, 984 bp, Sulfitobacter sp. EE-36
  CDS (1)..(984): transl_table=11
atgatccgcacggactggaccctcgacgaagcggcagcgatccacgcgctgcccttccccgacctgatccatcaggcgcaaacgctgcaccgtgcgcatttcgaccccacggcgatcgaaaccgccagcctgctgagcatcaagaccggcggctgccccgaggattgcggttattgttcgcaatcggcgcattacgacaccggcgtcaaagcgaccaaactgatgggcgcggaggaagtcatcgccgccgccaaacgtgccaaggatgcgggcgcgcagcggttctgcatgggggctgcatggcgcagccccaaggaccgcgacatggacaagctgaccgatatggtgcgcggcgtggccgatctggggctcgagacctgcatgacgctggggatgctgtcgcccgagcaggtgaccaagcttaaggatgccgggctcgatttctacaaccacaacatcgatacctcgcccgagtattacgccgagatcgcctcgacccgcacgatggaagaccgccttgaaacggtggaacatgtgcgcaagggcgggatcaaggtctgctgcggcggtatccttgggatgggcgaggcagaggcggaccggatcagcatgctggtcaccctcgccacgctgcccagccacccagacagcgtgccggtgaacctgtggaacgcggtcaaaggcgtgccggtgcagggaaaatccgaaaaggtcgacccttttgcgctggtccggctggtggccttggcgcgtatcctgatgcccgcctcggtcgtgcgcctctccgcagggcgcacggggatgagcgacgagctgcaatcgctgtgctttctggcgggtgcgaattcgatctttgtgggcaaccagttgctgaccaccgaaaaccccgccacgtggaaagacaacgaccttctgcaacggctcggcatgcatgtggcaccggccaagcccgcgtccagatcggccaagatcgcggcgcagtag

SEQ ID NO: 128884 - protein, 327 aa, Sulfitobacter sp. EE-36
MIRTDWTLDEAAAIHALPFPDLIHQAQTLHRAHFDPTAIETASLLSIKTGGCPEDCGYCSQSAHYDTGVKATKLMGAEEVIAAAKRAKDAGAQRFCMGAAWRSPKDRDMDKLTDMVRGVADLGLETCMTLGMLSPEQVTKLKDAGLDFYNHNIDTSPEYYAEIASTRTMEDRLETVEHVRKGGIKVCCGGILGMGEAEADRISMLVTLATLPSHPDSVPVNLWNAVKGVPVQGKSEKVDPFALVRLVALARILMPASVVRLSAGRTGMSDELQSLCFLAGANSIFVGNQLLTTENPATWKDNDLLQRLGMHVAPAKPASRSAKIAAQ

SEQ ID NO: 128885 - DNA, 1008 bp, Erythrobacter sp. NAP1
  CDS (1)..(1008): transl_table=11
atgacgactttgcgcaccgactggacccgcgaagagattgcggacctgttcgacctgcctttcaccgaactgctttttcgtgcggccagcgttcaccgtgaaaatcatccgccagagcagatccagctttgcacgctgctgagcatcaaaactggcggttgtcctgaggactgcggttactgctcgcaaagcgtaaaggctgacagcggtgtcgaagcgaccaaactgatggacgtgcaggcggtgcttcaacgcgccgcgcaggcgaaggatgcaggctctcagcgcttctgcatgggcgcagcctggcgcaatccgaaggaccgcgacatgcccaagatcgtcgagatcgtgaaaggcgtgcgcgacatgggacttgagacgtgcatgacgcttggcatgctcgagccgcatcaggccgacatgctcgccgaagcgggtctcgattattacaaccacaacatcgacagcagcccggagtattacgagcgggtgatctcgacgcgcgattttcagtgccgccttgatacgctcgatcatgtgcgcacagctggcatcaatgtttgcagcggaggaattgtggggatgggtgaaacgcgcgaggatcgcgtggggttcgtccacacgctcgcgacgctgcccgagcatcccgaaagcgtgccggtgaatgcgctcgtgccggtgaagggcacggtgctgggcgatatgctcgcagatacgccgatggcgaagatcgacgacattgagtttgtccgcacggtggcggtggctcgcatcacgatgccgatgagcatggtgcgcctatcagctggacgagaaagcatgagcgaggcgacgcaggcgctgtgtttctttgcgggcgcgaactcgattttcacaggcgacaagctgctgaccgctcccaatgctggcgatgacagcggcggcgcactcttcgccaagcttggcctcacatcccttcagggcgacgagccagcgcgcgcctgcaaggttagcgaaccggcatag

SEQ ID NO: 128886 - protein, 335 aa, Erythrobacter sp. NAP1
MTTLRTDWTREEIADLFDLPFTELLFRAASVHRENHPPEQIQLCTLLSIKTGGCPEDCGYCSQSVKADSGVEATKLMDVQAVLQRAAQAKDAGSQRFCMGAAWRNPKDRDMPKIVEIVKGVRDMGLETCMTLGMLEPHQADMLAEAGLDYYNHNIDSSPEYYERVISTRDFQCRLDTLDHVRTAGINVCSGGIVGMGETREDRVGFVHTLATLPEHPESVPVNALVPVKGTVLGDMLADTPMAKIDDIEFVRTVAVARITMPMSMVRLSAGRESMSEATQALCFFAGANSIFTGDKLLTAPNAGDDSGGALFAKLGLTSLQGDEPARACKVSEPA

SEQ ID NO: 128887 - DNA, 999 bp, Synechococcus sp. WH 5701
  CDS (1)..(999): transl_table=11
ttgaccaccaccgctcgcccctcagccgctgccaccacctcggcccctgacctgcgccacgactggagccgcgcggagatccaggggctgctggagatgccgctgatcgacctgctctggcgagctcagagcgtgcaccgggctgccaaccccggctaccgggtgcagctggcctccctgctcagcgtcaagaccggcggttgcgaggaagactgcgcctactgcccccagtcgatgcacaacagcagcgacgtgagcggtcggccggagctggaggtggagccggtgctggcgcgggcccgggccgccaaggcggccggtgcccatcgcttctgcatgggctgggcgtggcgcgacatccgcgatggtgcccccttcgaggcgatgctggcgatggtgcgcggtgtgcgtgagctggggctggaggcctgcgtgaccgccggcatgctcaccgacgcccaggccgagcgcctggcggcggcgggcctgaccgcctacaaccacaacctcgacaccagccccgagcactacgagcggatcatcaccacccgcagctaccaggagcggctggaaaccctggagcgggtgcggcaggcgggcatcaccctctgctgcggcggcatcatcggcctgggggagaccaccagcgatcgcgccggtctgctgcaggtgctggccagcctcgaccctcatcccgagagcgtgccgatcaacgccctggtggcggtggagggcacaccgctggagcatcagccaccggtggatccgctcgaactggtgcgcatggtggccacggcccgcatcctgatgccgttcagccgggtgcgcctcagtgccggccgcgagcagctcagccgtgaggcccagatcctctgcctgcaggcgggcgccgattcgatcttctacggcgacaccctgctcaccaccggcaaccccgatgtggccgccgaccgggcgctgctggcggcggcgggggtgagtgtggagctggcggtttga

SEQ ID NO: 128888 - protein, 332 aa, Synechococcus sp. WH 5701
MTTTARPSAAATTSAPDLRHDWSRAEIQGLLEMPLIDLLWRAQSVHRAANPGYRVQLASLLSVKTGGCEEDCAYCPQSMHNSSDVSGRPELEVEPVLARARAAKAAGAHRFCMGWAWRDIRDGAPFEAMLAMVRGVRELGLEACVTAGMLTDAQAERLAAAGLTAYNHNLDTSPEHYERIITTRSYQERLETLERVRQAGITLCCGGIIGLGETTSDRAGLLQVLASLDPHPESVPINALVAVEGTPLEHQPPVDPLELVRMVATARILMPFSRVRLSAGREQLSREAQILCLQAGADSIFYGDTLLTTGNPDVAADRALLAAAGVSVELAV

SEQ ID NO: 128889 - DNA, 978 bp, Synechococcus sp. WH 7805
  CDS (1)..(978): transl_table=11
atgagcgaacaggtagatcaacgccatgactggactctgggggagattgaagaccttctccagagccctttgatggatcttctttggagtgctcagggtgtccacagggccgccaatcccggctacagagtgcaactggcttcactgctcagcgtcaagaccggaggctgcgaggaggactgtgcgtactgccctcagtcgatgcatcacagcagtgatgtcaccggtcagccggatcttgaggtgagggcggttctggacagggcccgtgtggccgccgaggccggtgcggatcgcttttgtatgggatgggcttggcgtgagatacgtgaggggcctgcattcgaatcgatgctggccatggtgcgtggtgtacgggagcttggcctcgaggcctgcgtgaccgcgggcatgctcactgacatgcaggctcagcgactggcggaggctgggctcacggcctacaaccacaacctcgacaccagcccggagcactacgacaacatcatcacgactcgcacctatcaggagcgtttggaaacgcttcagagggttcgtcaggcgggcgtgacgctctgctgtggcggaattatcggcatgggcgaatcgctgcgggatcgcgcctcaatgctgcaggtgttggcgtgtctggatccccatcctgagagtgtgccgatcaatgcgctcgttgctgtggagggaaccccactggaggcccaaccgagcatcgaccccttggagcttgtgcgcatggtggctgtcgcccgcatcttgatgccccacagcagggtacggctgagtgctgggcgtgagcagctcaatcgagaagctcagatcctctgtctgcaggcgggagccgactcgattttttatggagattccctgctcaccaccagcaacccagcggttgagtccgaccgtgcccttctcgctgcagctggagtgcaggccagctggcaggagcgctctgtcgcatga

SEQ ID NO: 128890 - protein, 325 aa, Synechococcus sp. WH 7805
MSEQVDQRHDWTLGEIEDLLQSPLMDLLWSAQGVHRAANPGYRVQLASLLSVKTGGCEEDCAYCPQSMHHSSDVTGQPDLEVRAVLDRARVAAEAGADRFCMGWAWREIREGPAFESMLAMVRGVRELGLEACVTAGMLTDMQAQRLAEAGLTAYNHNLDTSPEHYDNIITTRTYQERLETLQRVRQAGVTLCCGGIIGMGESLRDRASMLQVLACLDPHPESVPINALVAVEGTPLEAQPSIDPLELVRMVAVARILMPHSRVRLSAGREQLNREAQILCLQAGADSIFYGDSLLTTSNPAVESDRALLAAAGVQASWQERSVA

SEQ ID NO: 128891 - DNA, 1044 bp, Pseudoalteromonas tunicata D2
  CDS (1)..(1044): transl_table=11
atgcaacacgccatcgtccgtcatgattggacacttagccaagttaaagaattattcgaacaaccattcaacgatttattatttcaagctgcctcagtacaccgccaaaactttaaaccaaatgaagtgcaaatttcgacattgttgtcgattaaaaccggtgcatgccctgaagactgtaaatattgcccgcaatcaggccattacaagactgatcttgaacgtgagcgtttaatggaagtagaaaaggtgattgagcaagctaaattagctaaagacaaaggtgcaacccgtttttgtatgggcgctgcatggtctgatccaaaagatcgtgatatgccttatatcgaacaaatggtgaaaggggtcaaagagttaggccttgaaacctgcatgacgcttggcatgctcgataatcacaaagcgcatgcacttaaaagtgcaggccttgactattataatcacaaccttgatacctcagcagaatattatgagcaaatcattactacgcgtacctatcaagaccgtttagataccattgatcacgtacgtgatgcaggaatgaaagtatgttctggtggtattgtggggatgggcgaagaagctaaagatcgttttggtttattaatgagtcttgcgaatttaccgcaacaaccagaaagtgtgccaattaacatgctagttaaagtaaaaggtacgccgcttgagaatgttgatgatcttgatcattttgagtttattcgcaccattgctgttgcgcgtattatgatgccaaaaagttatgtacgtctttctgcaggtcgaactgcaatgaatgaacagatgcaatctatgtgtttctttgctggtgcaaattcgattttttacggtgataaattactcactactgaaaatcctgaagcagatgctgatatgcaattgctgaaaaaattaggcatgaagccagaaacccatcaagattattcagatgaagcctatgaagcgtcgttatcttctgcaattgccgataaagaaacggcagggcttttttacgaagcacgctaa

SEQ ID NO: 128892 - protein, 347 aa, Pseudoalteromonas tunicata D2
MQHAIVRHDWTLSQVKELFEQPFNDLLFQAASVHRQNFKPNEVQISTLLSIKTGACPEDCKYCPQSGHYKTDLERERLMEVEKVIEQAKLAKDKGATRFCMGAAWSDPKDRDMPYIEQMVKGVKELGLETCMTLGMLDNHKAHALKSAGLDYYNHNLDTSAEYYEQIITTRTYQDRLDTIDHVRDAGMKVCSGGIVGMGEEAKDRFGLLMSLANLPQQPESVPINMLVKVKGTPLENVDDLDHFEFIRTIAVARIMMPKSYVRLSAGRTAMNEQMQSMCFFAGANSIFYGDKLLTTENPEADADMQLLKKLGMKPETHQDYSDEAYEASLSSAIADKETAGLFYEAR

SEQ ID NO: 128893 - DNA, 1053 bp, Photobacterium sp. SKA34
  CDS (1)..(1053): transl_table=11
gtggaagtacgtaataattggacagtagaggaagtccaagctttattcgataaaccatttatggatttagtctttgaagcacagcaagtacatcgtcaatatcatcagcctaatcaagtacaagtcagtactttgctttcgattaaaacaggcgcgtgccctgaagattgtaagtattgcccacagagtgctcattaccgtacagatgtagataaggaacgcttattggaagttgagcgtgtcctagacgctgcaacgaaagcaaagcaatcaggcgcaacccgtttctgtatgggagcagcttggaaaaacccgaaagagcgcgacatgccgtatctactcgatatggttaaaggcgtaaaagaaatgggtttagagacgtgtatgacgctgggtatgatcaccagtgatcaagccgatacgcttgccggtgctggtttagattattacaaccataaccttgatacatcccctgaatactacggcaatattatcaccacacgtacttaccaagatcgacttgatacgttatctcatgttcgtgatgctgggatgaaaatttgttctggtgggatcattggaatgggtgaaagctcacgtgatcgcgctggattattggttgagctagcgaacctgcctgttcaccctgaaagtgtaccgattaatatgttagttaaagtgaaagggacaccgttagaaagtgttgatgatgtcgatccttttgactttattcgtattattgccgttgcccgtattattatgccaatgtcagcggtacgtttatctgccggtcgtgaagacatgaatgagcagatgcaagcgctttgtttcatggcgggtgctaattccgtgttctatggttgtaaattactgacaacaccaaacccaggtgaagataaagacatgcagttgtttgctaagttagggattaacagtgagcaacaagcagcgaaacctgatgaagttcaagagcatgaattattaggcaaagtagcacaacgtgtggcatcgcgcccgactaaagatgacatcttttacgatgcctctgtttag

SEQ ID NO: 128894 - protein, 350 aa, Photobacterium sp. SKA34
MEVRNNWTVEEVQALFDKPFMDLVFEAQQVHRQYHQPNQVQVSTLLSIKTGACPEDCKYCPQSAHYRTDVDKERLLEVERVLDAATKAKQSGATRFCMGAAWKNPKERDMPYLLDMVKGVKEMGLETCMTLGMITSDQADTLAGAGLDYYNHNLDTSPEYYGNIITTRTYQDRLDTLSHVRDAGMKICSGGIIGMGESSRDRAGLLVELANLPVHPESVPINMLVKVKGTPLESVDDVDPFDFIRIIAVARIIMPMSAVRLSAGREDMNEQMQALCFMAGANSVFYGCKLLTTPNPGEDKDMQLFAKLGINSEQQAAKPDEVQEHELLGKVAQRVASRPTKDDIFYDASV

SEQ ID NO: 128895 - DNA, 1044 bp, Oceanospirillum sp. MED92
  CDS (1)..(1044): transl_table=11
atgcaacagttgggtgaaatccgtcacgactggagtgaagcagaggttaaagcgctttttgagctaccgtttaatgacctgatgtttcatgcgcatagcgtacaccgtcagaactttgatcccaatgaggttcaggtcagtacgctgctatccatcaaaactggctcctgcccggaagattgtaaatattgtccacagagtgcgcactacagcacaggcctggaaaaagaacgtttgatggaagttgagcgtgtagttgagaaagcaaagcaggctaaggcgactggatccactcgtttctgtatgggggctgcctggaagcatcctcatgaaagagatatgccatatgtattggatatggtgcgacaggttaaagagctaggccttgagacctgtatgacgctaggtatgttggatcaggataaagctgatcgtctgtctgacgctggacttgattattacaatcacaatctggacacctcacctgagttttacgacaaaattatcacaactcgtagctatcaggatcgacttgataccctacagaatgttcgcgattccggaatgaaaatctgtagtggcggtattctgggtatgggtgaaacggctaaagatcgttatggtcttctgatgcagctggccaatatgcctgtgcagcctgagagtgttccaatcaacatgctggttaaggtcgaaggcacaccactagagaatgttgatgatctcgatcatctggagttcattcgtacgattgcggtcgcgcgtatcatgatgccaaaatctcatgtgcgtttgtcggcagggcgcgagaaaatgagtgacgaaatgcaggccatgactttctttgccggcgcgaactcaatcttctacggtgagtgtctgttgacgacaccaaaccctgaaacccatcgtgaccttcagctgtttaagaaattgggtatcaatatggaacagcgtatttctgattctgatgagactcaggaagcggcactgatgaatgatctgcaaaaacagcaggacagctcacacttctacgaagcttaa

SEQ ID NO: 128896 - protein, 347 aa, Oceanospirillum sp. MED92
MQQLGEIRHDWSEAEVKALFELPFNDLMFHAHSVHRQNFDPNEVQVSTLLSIKTGSCPEDCKYCPQSAHYSTGLEKERLMEVERVVEKAKQAKATGSTRFCMGAAWKHPHERDMPYVLDMVRQVKELGLETCMTLGMLDQDKADRLSDAGLDYYNHNLDTSPEFYDKIITTRSYQDRLDTLQNVRDSGMKICSGGILGMGETAKDRYGLLMQLANMPVQPESVPINMLVKVEGTPLENVDDLDHLEFIRTIAVARIMMPKSHVRLSAGREKMSDEMQAMTFFAGANSIFYGECLLTTPNPETHRDLQLFKKLGINMEQRISDSDETQEAALMNDLQKQQDSSHFYEA

SEQ ID NO: 128897 - DNA, 1089 bp, Flavobacteria bacterium BBFL7
  CDS (1)..(1089): transl_table=11
atgagacacgactggactaaagaagaagttttagaaatatataacaagccattaatgcaccttttatatgaggcggcaacaatacatagagaatcacataaccctaaccaggtacaagtctctacattactatctataaaaacaggtggatgtccagaagattgtggttattgcccacaagcagctcgctatcatactgatgtagaaggaaatgacttaatgtctgttcaacaggtaaaagcgcaagctttacgcgctaaatctagtggaagttcgcgtgtatgtatgggagcagcatggcgaaatgtaaaggacggaccagaatttgaccaagtgctagagatggtacgtactattaacaaactagatatggaagtttgttgcacgctaggtatgattacagaaaaccaagctcatagacttgcagaggctggattgtatgcatacaatcacaacttagatagtagtgaagagtattataaagaagtaatctctactagaggttatcaagaccgtttagatactattgataacgtgcgtaaaactaatgtaaccgtttgtagtggtggaattataggtatgggagaaagtgctgaagatcgcgcaggtatgttagtggcactagcaagcttaagtccacaaccagaaagcactcctataaatgcactagttgctgtagaaggaacgcctctagaagaacaagtaccagtttctatatgggatatggtgcgcatggtggcaacaacacgaattgtaatgccgcaaacgcaggtgcgtttaagtgcaggtcgtactcaaatgactagagaaggacaggcaatgtgtttctttgcaggtgctaattctatatttgcaggagataaattattaacgactcctaatcctgatgtaaatgaggatatggaaatgtttaaactactaggtctagagcctatgaaaccttttgtaaagaaggcacaaccagaaacggtagaagcacaatactcggaatataaagcattaggtgaaaagcctaaatggacgcgaccagatcacaaaattgagcgtaatgaagaagcaaaacttgctgcaaaagcagcaaaaagctag

SEQ ID NO: 128898 - protein, 362 aa, Flavobacteria bacterium BBFL7
MRHDWTKEEVLEIYNKPLMHLLYEAATIHRESHNPNQVQVSTLLSIKTGGCPEDCGYCPQAARYHTDVEGNDLMSVQQVKAQALRAKSSGSSRVCMGAAWRNVKDGPEFDQVLEMVRTINKLDMEVCCTLGMITENQAHRLAEAGLYAYNHNLDSSEEYYKEVISTRGYQDRLDTIDNVRKTNVTVCSGGIIGMGESAEDRAGMLVALASLSPQPESTPINALVAVEGTPLEEQVPVSIWDMVRMVATTRIVMPQTQVRLSAGRTQMTREGQAMCFFAGANSIFAGDKLLTTPNPDVNEDMEMFKLLGLEPMKPFVKKAQPETVEAQYSEYKALGEKPKWTRPDHKIERNEEAKLAAKAAKS

SEQ ID NO: 128899 - DNA, 1059 bp, Oceanobacter sp. RED65
  CDS (1)..(1059): transl_table=11
atgaatgcgcaactagaccctcagattcgccatgactggaatgagcaagaagtacaagctttgttcgatttgccgtttaatgatctgctattccgtgcacagagcatccatcgcacttatttcgatcccaatgaagtacaagtcagtactctattaagcattaaaaccggtgcttgcccagaagactgtaaatattgcccgcagtcggctcactacaatacaggcctagaaaaacagcgcttgatggaagtagaagccgtattaaacaaagccaaagaagccaaagccaagggatcaacgcgtttttgcatgggcgcagcgtggaaaaacccaaataaacgcgatatgccctacgttctagaaatggtaaaaggcgtaaaggcgatggggttagaaacctgcatgaccttggggatgctaaatgaagaacaggcgggtgagttggctgaagccggattggattattacaaccacaatttggatacgagtccagattattatgatcaaattattacgacgcgcacgtacagcgatcgattagatacactgcagcacgttcgtgatagtggtatgaaaatctgttccggtggcatcatcggtatgggtgaacgcaagaaagatcgcattgggttgctggcacaattagcgaacttacctgtgcatccagagagtgtgccgatcaacatgttggtgaaagtgaaaggcacaccactcgaggatgtagaagatttagatcctatcgattttgtgcgctgcatcgctgtggcgcgtattctcatgcccaaatcccatgtgcgtctcagtgcaggccgcgaagatatgagtgacgagatgcaagcaatgtgcttcatggccggtgctaattctattttctatggcgaatgccttttaaccacaccgaatcctgaagcccacaaggacatgcaattgtttaagcgtttaggcctacgtccagagcaagccattgttgatcacaatgacgatgagcaagctgaagtgcttagcaaacaggtgcaaaagaacgatcaaaaccaacctttctacgacgcatccgtatag

SEQ ID NO: 128900 - protein, 352 aa, Oceanobacter sp. RED65
MNAQLDPQIRHDWNEQEVQALFDLPFNDLLFRAQSIHRTYFDPNEVQVSTLLSIKTGACPEDCKYCPQSAHYNTGLEKQRLMEVEAVLNKAKEAKAKGSTRFCMGAAWKNPNKRDMPYVLEMVKGVKAMGLETCMTLGMLNEEQAGELAEAGLDYYNHNLDTSPDYYDQIITTRTYSDRLDTLQHVRDSGMKICSGGIIGMGERKKDRIGLLAQLANLPVHPESVPINMLVKVKGTPLEDVEDLDPIDFVRCIAVARILMPKSHVRLSAGREDMSDEMQAMCFMAGANSIFYGECLLTTPNPEAHKDMQLFKRLGLRPEQAIVDHNDDEQAEVLSKQVQKNDQNQPFYDASV

SEQ ID NO: 128901 - DNA, 978 bp, Synechococcus sp. RS9916
  CDS (1)..(978): transl_table=11
atgacggactcggttgccttgcgccacgactggagcgtggaggagatccaggagatccttgatgccccgctgatggagctgctttggcgtgcccaggcagtgcaccgggcggcgaatccgggttatcgcgtgcagttggcctcgttgctgagcgttaaaaccggaggctgtgaggaagactgtgcttattgcccccagtcgatgcatcacagcagtgatgtcaccggccagcccgagttggatgtggagcctgtgttggctcgtgctcgtgcagccaaggacgccggtgctgatcgcttctgcatgggctgggcctggcgggaaatccgtgatggcgccccgtttgaagcgatgctttcgatggtgcgtggtgtccgggagctggggcttgaagcctgcgtgaccgctggcatgctcaccgatgatcaggccacgcgcctggcggatgcaggcctgacggcttacaaccacaacctcgacaccagccccgagcactacgaccggatcattaccacccgctcgtaccaggagcgtctggagacgctgcagcgggtgcgtaatgcaggggtcaccctctgctgtggcgggattatcgggatgggggaaacccaccgtgatcgggcatcgatgctccaggtgctggccacgatgcaaccccacccggaaagtgtccccatcaatgccctcgtggccgtggaaggcacgcccctcgaagagcaaacaccggtcgaccctttggagttggtgcgcatggtggcaacggcgcggatcctgatgccccacagccgggtgcgcctcagcgcgggccgcgagacgttgagccaggaggcgcagatcctgtgtcttcaggctggtgcagattcgatcttctatggcgagaccctgctcaccacgggaaatcctgaagtggaagccgatcgtgccctcttggctgctgctggtgtgcaggccagctggcaagactgcccagcggcatga

SEQ ID NO: 128902 - protein, 325 aa, Synechococcus sp. RS9916
MTDSVALRHDWSVEEIQEILDAPLMELLWRAQAVHRAANPGYRVQLASLLSVKTGGCEEDCAYCPQSMHHSSDVTGQPELDVEPVLARARAAKDAGADRFCMGWAWREIRDGAPFEAMLSMVRGVRELGLEACVTAGMLTDDQATRLADAGLTAYNHNLDTSPEHYDRIITTRSYQERLETLQRVRNAGVTLCCGGIIGMGETHRDRASMLQVLATMQPHPESVPINALVAVEGTPLEEQTPVDPLELVRMVATARILMPHSRVRLSAGRETLSQEAQILCLQAGADSIFYGETLLTTGNPEVEADRALLAAAGVQASWQDCPAA

SEQ ID NO: 128903 - DNA, 1041 bp, Alteromonadales bacterium TW-7
  CDS (1)..(1041): transl_table=11
atggaacttgcacctgttcgccacaattggacccatagcgaagttaaagcattatttgaaatgccgtttaacgatttactttttaaggcggcgtcggttcaccgtgctaacttcaacccaaatgaagtgcaaatttctaccctgttatcaattaaaactggggcatgcccagaagattgcaagtattgcccacagtcagggcactataaaaccgacctagagcgcgagcgacttattgaagtagaaaaagtagtagagcaagcgcgtttagctaaacaaaaaggcgcaacacgtttttgtatgggcgctgcgtggtcagatcctaaagacagagacatgccttacatttcgaaaatggtaaaagaagtaaaagagcttggccttgaaacctgcatgacgctgggcaaactcacaaacgaaaaagcgcacgaactcagcagtgcaggtttagattactacaatcataatcttgatacatcacctgaatactacgagcaaattatatcaacccgtacctttgaagatcgattgaacaccatagatcatgtacgcgatgccggtatgaaagtctgttcaggcggtatagtcggtatgggcgagcaagcagctgaccgttatgggttacttatgcaattggctaacttgccacaacaaccagaaagtgtacctattaatatgctagttaaagtaaaaggtaccccacttgaaaacgttgacgatttagaccattttgagtttatacgcactattgctactgcaagaataatgatgccacacagctatgtacgtttgtcggcagggcgtaacgccatgaacgagcaaatgcaatcaatgtgtttttttgcaggtgctaactctatattttatggtgacaagctgcttaccacagaaaacccagaagcggatgccgatatgaacctaattaaaaagctaggaatgaacccagaaacgcgtgaagattattcagatgaagctgtagcagcgtcgctttcatcgcaagttgcagataaagcaacgtctgaattattttacgaagcctaa

SEQ ID NO: 128904 - protein, 346 aa, Alteromonadales bacterium TW-7
MELAPVRHNWTHSEVKALFEMPFNDLLFKAASVHRANFNPNEVQISTLLSIKTGACPEDCKYCPQSGHYKTDLERERLIEVEKVVEQARLAKQKGATRFCMGAAWSDPKDRDMPYISKMVKEVKELGLETCMTLGKLTNEKAHELSSAGLDYYNHNLDTSPEYYEQIISTRTFEDRLNTIDHVRDAGMKVCSGGIVGMGEQAADRYGLLMQLANLPQQPESVPINMLVKVKGTPLENVDDLDHFEFIRTIATARIMMPHSYVRLSAGRNAMNEQMQSMCFFAGANSIFYGDKLLTTENPEADADMNLIKKLGMNPETREDYSDEAVAASLSSQVADKATSELFYEA

SEQ ID NO: 128905 - DNA, 1059 bp, Pseudomonas putida GB-1
  CDS (1)..(1059): transl_table=11
atgagcgccagcacaactgcaacaacacgtcacgactggtccctggccgaggtcaaggcgctgttccagcaaccgttcaatgacttgctgttccaggcgcagaccgtacaccgcgcgcatttcgacccaaaccgcgtgcaggtttcgactttgctgtcgatcaagaccggtgcctgcccggaagattgcaaatattgtccccagtccggccactacaacaccgggctggaaaaacagaaactgatggaagtgcagaaggtgctggaagaggccgcccgggccaaagccatcggttctacccgcttctgcatgggcgcggcttggaagcacccgtcggccaaagacatgccctacgtgttggagatggtcaaaggtgtgaaggccatgggcctggaaacctgcatgaccctcggcaagctcgaccaggatcagaccctggccctggcccaggctggcctggactactacaaccacaacctcgacacctcgccggagttctacggcagcatcatcaccacccgcacctatggcgagcgcctgcagaccctggcctacgtgcgcgatgctggaatgaagatctgctccggtggcatcctgggcatgggcgagtcgctggacgaccgcgccggcctgctgatccagctggccaacctgcccgagcacccggaatcggtaccgatcaacatgctggtcaaggtggccggcacaccgctggccgaggaagaagacgtcgacccgttcgacttcattcgcatgctggccgtggcccgtatcctcatgcccaagtcgcacgtgcgtctgtccgcaggccgcgagcagatgaacgagcagatgcaggccttggccttcatggctggcgccaactcgattttctacggcgaaaaactgctgactaccgccaacccgcaggccgacaaggacatgcaactgttcgcacgcctgggcatcaagcccgaagcgcgggaagagcacgccgatgaagtgcatcaggcggcgatcgagcaggcgctggtcgaacagcgcagcagcgagatgttctacaacgctgcatcggcctga

SEQ ID NO: 128906 - protein, 352 aa, Pseudomonas putida GB-1
MSASTTATTRHDWSLAEVKALFQQPFNDLLFQAQTVHRAHFDPNRVQVSTLLSIKTGACPEDCKYCPQSGHYNTGLEKQKLMEVQKVLEEAARAKAIGSTRFCMGAAWKHPSAKDMPYVLEMVKGVKAMGLETCMTLGKLDQDQTLALAQAGLDYYNHNLDTSPEFYGSIITTRTYGERLQTLAYVRDAGMKICSGGILGMGESLDDRAGLLIQLANLPEHPESVPINMLVKVAGTPLAEEEDVDPFDFIRMLAVARILMPKSHVRLSAGREQMNEQMQALAFMAGANSIFYGEKLLTTANPQADKDMQLFARLGIKPEAREEHADEVHQAAIEQALVEQRSSEMFYNAASA

SEQ ID NO: 128907 - DNA, 1065 bp, Marinobacter sp. ELB17
  CDS (1)..(1065): transl_table=11
atgagcgccaatgaactccgtcacgactggacactgcaacaggcccggacattattcgagctgccattcagcgacctgctgtttcgtgcccagactttacaccgccagtacttcgatcctaacgaggtgcaaattagcaccctgctgtcgataaaaaccggcgcttgcccggaagactgcaagtattgcccccagagcggccattacaacaccgggctgaaaaaagaaaagctgctggacgttgaaaaagtcgtcgccgaggcacgtgcggccaaggccaagggcgcttcgcgcttttgcatgggcgctgcctggcgcagtccgtccaaaaaagacatgccttatgtgttggacatggttaaacaggtgaaatcaatgggcatggaaacctgcatgaccctgggcatgctcaaatccgagcaggccgacgagctggcagcggccgggctggattattacaaccacaacctggacacctcggaaagattctacagccatatcattaccacgcgcacctatcaggatcgcctggataccctgagcaacgtgcgtaactccggcatgaaagtctgctgcggcggtattctgggcatgggtgaagacgatgacgaccgcatgggcctgctgatgcagttggccaacctgccccagcatccggaaagtgttccggtgaatatgctggtgaaggtgaagggtacgccattggaaaacgtggccgatctggacccgtttgattttgtgcgcatgattgcggttgcgcggattatgatgcctgcctcccacgtgcgcctttccgctggccgggaggatatgaacgagcaaatgcaggctttgtgctttatggccggtgccaattccatattttatggtgaaaaactgctcaccaccgccaacccggaagccgatgccgacatggccctgttccgccgcttggggattcgcccggagcagcgcgagcagtgcggcacagagcaacagcacgaagaggtgctgacagaggccgtcaaccaggaagcaacgcgccatctgttttacgatgcggcccgcgaaccagcgtcggcctga

SEQ ID NO: 128908 - protein, 354 aa, Marinobacter sp. ELB17
MSANELRHDWTLQQARTLFELPFSDLLFRAQTLHRQYFDPNEVQISTLLSIKTGACPEDCKYCPQSGHYNTGLKKEKLLDVEKVVAEARAAKAKGASRFCMGAAWRSPSKKDMPYVLDMVKQVKSMGMETCMTLGMLKSEQADELAAAGLDYYNHNLDTSERFYSHIITTRTYQDRLDTLSNVRNSGMKVCCGGILGMGEDDDDRMGLLMQLANLPQHPESVPVNMLVKVKGTPLENVADLDPFDFVRMIAVARIMMPASHVRLSAGREDMNEQMQALCFMAGANSIFYGEKLLTTANPEADADMALFRRLGIRPEQREQCGTEQQHEEVLTEAVNQEATRHLFYDAAREPASA

SEQ ID NO: 128909 - DNA, 1026 bp, Erythrobacter sp. SD-21
  CDS (1)..(1026): transl_table=11
ttgagtcagaaagaagctacggcactacgcaccgactggacccgcgaggaaatcgcggaccttttcaaccttccctttaccgagctgctcttccgagccgccaccgtccaccgcgagtaccacccgcccgagcagatccagctctgcacgctgctcagcatcaagactggcggttgtccggaggattgcggctattgctcgcagtcggtgaaggccgacagcggtgtcgaggcgaccaagctgatggaggtgcaatcggtcctccagcgcgcggcgcaagcaaaggatcagggaagccagcgcttctgcatgggcgcggcatggcgcaatcccaaggaccgcgacatgcccgcgatcgtcgagatcgtgaagggcgtgcgcgccatggggctggagacctgcatgacgctgggcatgctgacgccgaaacaggcggatatgctcaaggaagcgggcctcgattattacaaccacaatgtcgacaccgggccggaatattacgagcgcgtgatctcgacccgcaattaccaggaccggctcgacacgctccagaacgtgcgcgatgcgggcatcaacgtgtgcagcggcgggatcgtaggcatgggcgaaacgcgcgaggaccgggtgggcttcgtccacacgctcgccacgctcgaacgccatcccgaaagcgtgccggtcaatgcgctggtgccggtcaagggcacggtgctgggcgacatgctggccgacacgccgctggccaagattgacgacatcgagttcgtgcgcaccgttgcggtggcgcgcatgaccatgccgatgagcatggttcgtctctccgcaggtcgtgagtcgatgtccgaagccacgcaggcgctgtgcttcatggccggcgcgaactcgatcttcaccggcgacaagctcctcaccgcgcccaacgcgggcgacgacagcgacgcggcgctgttcgcgaagctgggcctgacggctttgacgcaggaagagccgatgcgggcgtgcaaagcggtggaacctgcggagtga

SEQ ID NO: 128910 - protein, 341 aa, Erythrobacter sp. SD-21
MSQKEATALRTDWTREEIADLFNLPFTELLFRAATVHREYHPPEQIQLCTLLSIKTGGCPEDCGYCSQSVKADSGVEATKLMEVQSVLQRAAQAKDQGSQRFCMGAAWRNPKDRDMPAIVEIVKGVRAMGLETCMTLGMLTPKQADMLKEAGLDYYNHNVDTGPEYYERVISTRNYQDRLDTLQNVRDAGINVCSGGIVGMGETREDRVGFVHTLATLERHPESVPVNALVPVKGTVLGDMLADTPLAKIDDIEFVRTVAVARMTMPMSMVRLSAGRESMSEATQALCFMAGANSIFTGDKLLTAPNAGDDSDAALFAKLGLTALTQEEPMRACKAVEPAE

SEQ ID NO: 128911 - DNA, 1083 bp, Moritella sp. PE36
  CDS (1)..(1083): transl_table=11
atgactaacagcgttcgccatgactggcaaattgatgagattgaagcactatttaaccaaccgtttaatgatttgatgtttcaggctcaaacggtgcatcgtcagaattttgatccaaacagtgtgcaaatcagtacgctgttatcaatcaagaccggtgcttgtcctgaggattgtaagtactgcccacagagcgcacgctatacaacgggtattgagaaagaacgcttgatgcaagtagaaacagtgcttaaacgcgctgtcgaagcgaaagagaatggcgccagtcgtttttgtatgggggcggcttggaaaaatccacataagcgtgatatgccgtatttaattgatatggttaaaggcgttaaagccatgggactggaaacttgcatgacgttaggcatgttagcgcccgaacaagcacaatcactttctgcagcgggtttagattactacaaccataatcttgatacgtcagaagaatactacgaacaaattattaccacgcgtacttatcaagaccgtttagataccttagatcatgttcgtgacgctggcatgaaagtatgctcgggcggtatcgttggcatgggtgagcaacaacttgatcgtattggtctactcaaatcactggctaacttagcgcaccaccctgaaagtgtgccaattaacatgttagttaaagtggcaggaacaccgcttgaagatacacccgatttagacgaaatagagtttgtacgtaccattgctactgcacgtatattaatgcctaaatcgtatgtccgtttatctgctggccgtgagacgatgagcgaacaaacgcaagcactttgctttatggctggtgctaattcaatcttttatggttgtaaattgttaacgacggacaatccggatgaaggcagtgataagcgtttatttaagaaacttggattgcatcctgcacgtatccgtgaagccagtgatgaagcacaatccgcgcagctactcgatgaaatagcagagcaggcgtcaccgtcactgttttatgacgcgacagctgttaataaaaataatgttggcgcgaaaagtgcggtactttaa

SEQ ID NO: 128912 - protein, 360 aa, Moritella sp. PE36
MTNSVRHDWQIDEIEALFNQPFNDLMFQAQTVHRQNFDPNSVQISTLLSIKTGACPEDCKYCPQSARYTTGIEKERLMQVETVLKRAVEAKENGASRFCMGAAWKNPHKRDMPYLIDMVKGVKAMGLETCMTLGMLAPEQAQSLSAAGLDYYNHNLDTSEEYYEQIITTRTYQDRLDTLDHVRDAGMKVCSGGIVGMGEQQLDRIGLLKSLANLAHHPESVPINMLVKVAGTPLEDTPDLDEIEFVRTIATARILMPKSYVRLSAGRETMSEQTQALCFMAGANSIFYGCKLLTTDNPDEGSDKRLFKKLGLHPARIREASDEAQSAQLLDEIAEQASPSLFYDATAVNKNNVGAKSAVL

SEQ ID NO: 128913 - DNA, 1134 bp, Medicago truncatula
  CDS (1)..(1134)
atgttttggttgagacccattttgcgttcacaatcaagatcttcaatttgggtgttacagcattgtaattccttttcaacttcatcagcagctgcaattcaagctgagaaaaccatacaaaatggccctagaaacgattggaccaaagatgaagtcaaatccatctatgattctcccattcttgatcttctcttccacggggctcaggttcatagacatgctcataactttagggaagtgcaacagtgtactcttctctctgtgaaaactggggggtgtagtgaggattgttcttattgccctcaatcctctagatatgatacaggtcttaaaggtcaaaagcttttgaacaaggatgctgttcttcaggccgcagtcaaggctaaagaggctgggagtactcgcttttgtatgggcgctgcatggagggatacaataggaagaaagaccaacttcaaccagatacttgaatatgtcaaagaaataaagggtatggggatggaggtgtgttgcacccttggcatgctggataaagatcaggctggtgagctcaagaaggcaggtcttactgcatacaatcacaatcttgacacttcaagggaatactatccaaacatcatcacaacaaggacttatgatgagcgcctaaaaactctcgagtttgttcgtgacgcagggattaatgtttgtagtggtggaattatcgggcttggagaagcagaggacgaccgtgtaggtttgttacatacattatcaacacttcctacacatccagagagtgttcctattaatgcacttattgctgtaaagggaacccctcttcaggatcagaagcctgttgaaatatgggagatgatccgcatgattgcaacggcacgtatcacaatgcctaaagcaatggttaggttatctgccggcagagttcggttctccgtgcctgagcaggcattgtgctttctagctggtgccaattctatctttgccggtgaaaagcttcttactactgctaacaacgattttgatgctgatcaactcatgtttaaagttcttggtttgcttccaaaagctccaagcttggatgatgatgaaactaatgaggcagagaactataaagaagctgcttcttctagttga

SEQ ID NO: 128914 - protein, 377 aa, Medicago truncatula
MFWLRPILRSQSRSSIWVLQHCNSFSTSSAAAIQAEKTIQNGPRNDWTKDEVKSIYDSPILDLLFHGAQVHRHAHNFREVQQCTLLSVKTGGCSEDCSYCPQSSRYDTGLKGQKLLNKDAVLQAAVKAKEAGSTRFCMGAAWRDTIGRKTNFNQILEYVKEIKGMGMEVCCTLGMLDKDQAGELKKAGLTAYNHNLDTSREYYPNIITTRTYDERLKTLEFVRDAGINVCSGGIIGLGEAEDDRVGLLHTLSTLPTHPESVPINALIAVKGTPLQDQKPVEIWEMIRMIATARITMPKAMVRLSAGRVRFSVPEQALCFLAGANSIFAGEKLLTTANNDFDADQLMFKVLGLLPKAPSLDDDETNEAENYKEAASSS

SEQ ID NO: 128915 - DNA, 975 bp, Magnetospirillum gryphiswaldense
  CDS (1)..(975): transl_table=11
gtgaaccaagcggcgcagatcaagcctttgggcgacgggctcagacacgactggcaggcggaggaggtgcaggcctttttcgccatgccgttcatggacttgatgttccaggcccagcaggtgcaccgggccaatttcgacgccaacaagatccaggtgtcgcggctgatttccatcaagaccggctcgtgccccgaggattgcacctactgcccgcaatccgcccactacgccaccggcctggaaaaggaaaagctgatggcggtggaagaggtggtcgccgccgcccgccaggccaaggaagaaggcgcctcgcgcttttgcatgggggccgcctggcgcggccccaagggcgacgatttcgaggtggcggtggccatgatcgagggcgtcaaggccctgggcatgcagacctgcgccaccttcggcctgctcgacaagtggcaggcccagcgtctcaaggatgccggcctggattattacaaccacaacatcgacaccagccccgagcactacaaggaagtcatcaccacccggaccttccaggatcgcctggataccctggataccgtgcgtgaagtcggcctgcatgtgtgttccggcggcatcgtcggcctgggcgagaccaacaatgaccgtgccaagatgctgctgaccctggccaacatggagaagcatcccgacagcgtgccgattaacctgttgatcgccatccccggcacgccgttggaaaatgccgagaagcccgataatttcgacttcatccgcaccatcgccgccgcccgtatcatgatgccccaatcctatgtccgcctgtcggcgggccgcgagggcatgagcgaggaaatgcaggccttgtgcttcatggccggcgccaattccatcttctgcggccacaagctgctgaccgccaagaacgcggcgccgggttcggacaaaagtctgttcgggcgtctggggctgtcgccgctgtaa

SEQ ID NO: 128916 - protein, 324 aa, Magnetospirillum gryphiswaldense
MNQAAQIKPLGDGLRHDWQAEEVQAFFAMPFMDLMFQAQQVHRANFDANKIQVSRLISIKTGSCPEDCTYCPQSAHYATGLEKEKLMAVEEVVAAARQAKEEGASRFCMGAAWRGPKGDDFEVAVAMIEGVKALGMQTCATFGLLDKWQAQRLKDAGLDYYNHNIDTSPEHYKEVITTRTFQDRLDTLDTVREVGLHVCSGGIVGLGETNNDRAKMLLTLANMEKHPDSVPINLLIAIPGTPLENAEKPDNFDFIRTIAAARIMMPQSYVRLSAGREGMSEEMQALCFMAGANSIFCGHKLLTAKNAAPGSDKSLFGRLGLSPL

SEQ ID NO: 128917 - DNA, 1128 bp, Brassica rapa subsp
  CDS (1)..(1128)
atggatggccgactctcaactcctccaagattaactcagaacacagcaaaccgaggacaatctgcttcttactcctctgcttccgcagcctcggctgaagccgaaagaacgatccgtgaaggtccgagaaatgactggagtaaagatgaaatcaaagccgtctatgactctcctgttcttgacctcctcttccacggagctcaggttcataggcatgttcataactttagggaagtgcagcaatgtactctcctctccataaagactggagggtgcagtgaggactgttcttattgtcctcagtcctccagatatgacactggagtcaaggcccaaagactcatgtccaaggacgctgtcattgttgctgctaagaaggcaaaagaagctggaagcacacggttttgcatgggtgctgcgtggcgagatacaataggacgcaaaaccaatttcaatcagatacttgagtacatcaaagagataagaggaatggggatggaggtttgctgcacattgggcatgattgagaagcagcaagcgttagagcttaagaaggctggcctcactgcttataaccacaatcttgatacttcgagagagtactaccccaacgtcatcactactagaagttacgatgaacgccttgaaactcttgagcatgtgcgtgatgctggaatcaacgtctgttcaggaggaataattgggcttggggaggcagaagaggacagagtaggattattacacacattggcaacacttccttctcaccctgagagtgttcccatcaacgctcttcttgcagtgaaaggcactcctcttgaagaccagaagccggttgagatatgggagatgatcaggatgattggaacagcaagaatcgtgatgccaaaagcaatggtgaggctatctgccggtagagtccggttctcgatgcccgagcaagccttgtgttttctcgctggtgcaaactctatcttcactggagagaagcttttgacaacgccaaacaatgattttgacgcggaccagctcatgttcaagacgctaggactcattcctaaacccccaagtttctctgaagatgattctgagtcagagaattgcgagaaagttgcttcttctcactga

SEQ ID NO: 128918 - protein, 375 aa, Brassica rapa subsp
MDGRLSTPPRLTQNTANRGQSASYSSASAASAEAERTIREGPRNDWSKDEIKAVYDSPVLDLLFHGAQVHRHVHNFREVQQCTLLSIKTGGCSEDCSYCPQSSRYDTGVKAQRLMSKDAVIVAAKKAKEAGSTRFCMGAAWRDTIGRKTNFNQILEYIKEIRGMGMEVCCTLGMIEKQQALELKKAGLTAYNHNLDTSREYYPNVITTRSYDERLETLEHVRDAGINVCSGGIIGLGEAEEDRVGLLHTLATLPSHPESVPINALLAVKGTPLEDQKPVEIWEMIRMIGTARIVMPKAMVRLSAGRVRFSMPEQALCFLAGANSIFTGEKLLTTPNNDFDADQLMFKTLGLIPKPPSFSEDDSESENCEKVASSH

SEQ ID NO: 128919 - DNA, 1125 bp, Glycine max
  CDS (1)..(1125)
  misc_feature (642)..(642): n is a, g, c or t
  misc_feature (653)..(653): n is a, g, c or t
  misc_feature (730)..(730): n is a, g, c or t
  misc_feature (763)..(763): n is a, g, c or t
  misc_feature (798)..(798): n is a, g, c or t
  misc_feature (1054)..(1054): n is a, g, c or t
atgtttttggcgagacccattttccgagcaccctccctttgggcgttgcactcttcctacgcgtattcctctgcctcagcagctgcaattcaagctgagagagccatcaaagaagggcccagaaacgattggagccgagaccaagtcaaatccatctacgactctcccattctcgatcttctcttccacggggctcaagttcacagacatgctcataacttcagggaagttcaccagtgtactcttctgtctatcaaaacaggagggtgcagtgaagattgttcctattgtcctcaatcctctaagtatgatacaggagtcaaaggccaacgccttatgaacaaggaagctgttctccaggctgcaaagaaggcaaaagaggctgggagcactcgcttttgtatgggtgctgcgtggagggatacactaggaagaaagaccaacttcaaccagatccttgaatatgtgaaagacataagggacatgggaatggaggtttgttgcacccttggcatgctggagaaacagcaggctgttgaactcaagaaggcaggtctcactgcttataatcacaatcttgacacttcaagggagtattatccaaacataatcacaacaaggacttatgatgagcgtcttcanacccttgagtntgttcgggatggcaggatcaatgtttgttctggaggaattatagggcttggagaagcagaggaggatcgtgtaggtntgttacatacattgtcaacacttcccacccatncagagagtgttcctattaatgcactttgtgctgtnaagggaacccctcttgaggatcagaagcctgttgaaatatgggagatgattcgcatgatagcgactgcacgtatcataatgccaaaagcaatggtaagattatcagctggcagagttcgattctccatgcctgagcaggcattgtgctttctggccggtgcaaattctatattcactggtgaaaagcttctcactactcctaataatgattttgatgctgatcaactcatgtttaaagttcttggactcctcccanaagctccaagcttaaatgaaggtgaaactaatgtgacagaagattataaggaagcagctttttctagttga

SEQ ID NO: 128920 - protein, 374 aa, Glycine max
  misc_feature (214)..(214): The Xaa at location 214 stands for Gln, or His.
  misc_feature (218)..(218): The Xaa at location 218 stands for Cys, Phe, Ser, or Tyr.
  misc_feature (244)..(244): The Xaa at location 244 stands for Leu, Met, or Val.
  misc_feature (255)..(255): The Xaa at location 255 stands for Ala, Pro, Ser, or Thr.
  misc_feature (352)..(352): The Xaa at location 352 stands for Stop, Gln, Glu, or Lys.
MFLARPIFRAPSLWALHSSYAYSSASAAAIQAERAIKEGPRNDWSRDQVKSIYDSPILDLLFHGAQVHRHAHNFREVHQCTLLSIKTGGCSEDCSYCPQSSKYDTGVKGQRLMNKEAVLQAAKKAKEAGSTRFCMGAAWRDTLGRKTNFNQILEYVKDIRDMGMEVCCTLGMLEKQQAVELKKAGLTAYNHNLDTSREYYPNIITTRTYDERLXTLEXVRDGRINVCSGGIIGLGEAEEDRVGXLHTLSTLPTHXESVPINALCAVKGTPLEDQKPVEIWEMIRMIATARIIMPKAMVRLSAGRVRFSMPEQALCFLAGANSIFTGEKLLTTPNNDFDADQLMFKVLGLLPXAPSLNEGETNVTEDYKEAAFSS

SEQ ID NO: 128921 - DNA, 1107 bp, Xanthomonas oryzae pv
  CDS (1)..(1107): transl_table=11
ttgacgttgacagcatctcccatgctcaccagactgccttgctttcaagccgctgactgtcaggaaactccgatgtctgttgtcgtccgccatgactgggatcacaaagagctgcaggcgctgttcgatctgccgtttccggagctgctgcaccgcgccgccagcgtgcatcgcgcccatttcgatccggctgaagtgcaggtctccacactgctgtcggtcaagaccggcggttgcccggaagactgcgcgtattgcccgcaggcgcagcgctacgacaccggcgtgaccgcgcagaagctgctggagaccgaagaggtcgtggccaaggcgcgtcaggccaaggcggctggcgcctcgcgtttctgcatgggcgccgcctggcgctcgcccaaggagcgcgacatccccaaggtggccgcgatgatccgcgaggtgaaagccatgggtctggaaacctgcgccacgctcggcatgctcgacgccggccaggcgcgtgcgctcaaggatgccgggctggactactacaaccacaatctggacaccgcgccggattattacgacaccatcattcacacccgccagtaccaggaccgcctgaacacgctggagcatgtccgcgatgtcggtctgaagacctgctgcggcggcatcgtcggcatgggcgaaacccgcgaccaccgcatcggcctgctgctggcgctggccacgctgccggcgcatccggattcggtgccgatcaatcagctggtgcaggtgcccggtactccactgcacggcacccagcagctggacccgttcgagttcgtgcgcatgatcgcggttgcgcgcatcgccatgcccaagtcgatggtgcgcctgtccgccggccgcgaagcaatgagcgacgaactgcaggcgctgtgcttcctggccggtgccaattcgatcttctacggcgaaaaactgctcaccaccggcaacccggataccgagcgcgaccagacgctgttccagcgcctgggtctgcgcccgatgcagatcaccgtcgatgcggccgagcacgatcaccccgctaccgtgcatgcggagatcacccgcagcgcggcctgcgagcataccgcctga

SEQ ID NO: 128922 - protein, 368 aa, Xanthomonas oryzae pv
MTLTASPMLTRLPCFQAADCQETPMSVVVRHDWDHKELQALFDLPFPELLHRAASVHRAHFDPAEVQVSTLLSVKTGGCPEDCAYCPQAQRYDTGVTAQKLLETEEVVAKARQAKAAGASRFCMGAAWRSPKERDIPKVAAMIREVKAMGLETCATLGMLDAGQARALKDAGLDYYNHNLDTAPDYYDTIIHTRQYQDRLNTLEHVRDVGLKTCCGGIVGMGETRDHRIGLLLALATLPAHPDSVPINQLVQVPGTPLHGTQQLDPFEFVRMIAVARIAMPKSMVRLSAGREAMSDELQALCFLAGANSIFYGEKLLTTGNPDTERDQTLFQRLGLRPMQITVDAAEHDHPATVHAEITRSAACEHTA

SEQ ID NO: 128923 - DNA, 1137 bp, Arabidopsis thaliana
  CDS (1)..(1137)
atgatgcttgttcgatctgtatttcgatctcagttgcgaccctctgtctcgggtggtctgcaatctgcttcttgctattcttcattatctgctgcttcagctgaagctgagaggactatcagagaaggtcccagaaacgattggagtagagatgaaatcaagtctgtttatgattctcctcttcttgacctcctcttccatggagctcaggttcatagacatgttcataacttcagggaggtacaacaatgtaccctcctctccataaagactggtggctgtagtgaagactgttcatattgtcctcagtcttcgagatatagcactggagttaaggcacaaagactcatgtctaaggacgctgtcattgatgctgctaagaaggcaaaagaagctgggagcacacgtttttgcatgggtgctgcttggcgagatacaattggacggaaaaccaacttcagccagattcttgaatacatcaaagaaataagaggcatggggatggaagtttgctgcaccttaggcatgattgaggaacaacaagcactagagctaaagaaggctggcctcactgcttataaccacaatcttgatacttcaagagagtactacccaaacgtcatcactactagaagttatgacgatcgccttgaaactcttagccatgttcgtgatgctggaatcaacgtttgttcaggaggaatcatagggcttggtgaggcagaggaagacagaataggtttattacacacgctggcaacacttccttctcaccctgagagtgttcccattaatgctctacttgcagtgaaaggcactcctcttgaagaccagaagccagttgagatatgggagatgatcaggatgattggaaccgcacgtattgtaatgccaaaagcgatggtgagactgtctgctggtagagtccggttctcaatgtccgaacaagctctctgtttccttgctggtgcaaactctatcttcaccggagagaagcttttaaccacaccaaacaatgattttgacgctgaccagctcatgttcaagacattaggcctcattcctaaaccgccaagtttctctgaagatgattctgaatcagaaaactgcgagaaagttgcttccgcttctcactaa

SEQ ID NO: 128924 - protein, 378 aa, Arabidopsis thaliana
MMLVRSVFRSQLRPSVSGGLQSASCYSSLSAASAEAERTIREGPRNDWSRDEIKSVYDSPLLDLLFHGAQVHRHVHNFREVQQCTLLSIKTGGCSEDCSYCPQSSRYSTGVKAQRLMSKDAVIDAAKKAKEAGSTRFCMGAAWRDTIGRKTNFSQILEYIKEIRGMGMEVCCTLGMIEEQQALELKKAGLTAYNHNLDTSREYYPNVITTRSYDDRLETLSHVRDAGINVCSGGIIGLGEAEEDRIGLLHTLATLPSHPESVPINALLAVKGTPLEDQKPVEIWEMIRMIGTARIVMPKAMVRLSAGRVRFSMSEQALCFLAGANSIFTGEKLLTTPNNDFDADQLMFKTLGLIPKPPSFSEDDSESENCEKVASASH

SEQ ID NO: 128925 - DNA, 1008 bp, Bacillus subtilis
  CDS (1)..(1008): transl_table=11
atgaatcaatggatggaactcgcaaaccgggtgctggctggagcagaagtgactgacgaagaggcgctttcaatattacattgtcctgatgaagatattttgctattaatgcatggagcttttcatatcagaaaacacttttatggaaaaaaagtaaagctcaatatgattatgaatgcgaaatccgggctctgcccggaaaactgcggctattgttcacagtctgcgatttcgaaagcgccgattgagtcttatcggatggtgaataaggaaacgctgcttgaaggcgcgaagcgggcgcacgatctgaatatcggcacatattgtatcgtggcaagcggcagagggccgtctaacagagaagtggatcaggtcgtagatgcggttcaggaaattaaagagacgtatggactgaaggtttgtgcgtgtctcggactgttgaagccagagcaggcgaagcggctcaaagatgccggagtagaccgctataatcataatttgaatacgtcacagaggaaccattcaaacatcacgacctcacatacatacgatgacagagtcaatacggttgaaatcgcaaaagaatcggggctgtctccgtgttcaggcgccattatcgggattaaggagacgaaacaggatgtcattgacatcgccaaaagcttgaaggcccttgacgcggattccattcctgtgaattttttgcatgcaattgatggcacgccgttagaaggcgtcaacgaattaaacccgctgtattgtttaaaagtgctggcgctgttccgttttatcaatccatcaaaagaaattcgcatttccggaggaagagaggtcaatctccgctcattgcagccattagggctttacgccgcaaactccatttttgtcggagactacttaacaactgccgggcaagaggagacggaggatcataaaatgctgagtgatttaggctttgaagttgaatcagtcgaagaaatgaaggccagtttaagtgcgaaaagctga

SEQ ID NO: 128926 - protein, 335 aa, Bacillus subtilis
MNQWMELANRVLAGAEVTDEEALSILHCPDEDILLLMHGAFHIRKHFYGKKVKLNMIMNAKSGLCPENCGYCSQSAISKAPIESYRMVNKETLLEGAKRAHDLNIGTYCIVASGRGPSNREVDQVVDAVQEIKETYGLKVCACLGLLKPEQAKRLKDAGVDRYNHNLNTSQRNHSNITTSHTYDDRVNTVEIAKESGLSPCSGAIIGIKETKQDVIDIAKSLKALDADSIPVNFLHAIDGTPLEGVNELNPLYCLKVLALFRFINPSKEIRISGGREVNLRSLQPLGLYAANSIFVGDYLTTAGQEETEDHKMLSDLGFEVESVEEMKASLSAKS

SEQ ID NO: 128927 - DNA, 990 bp, Acinetobacter calcoaceticus
  CDS (1)..(990): transl_table=11
atgaccttacgtaatgactggactcgtgatgaaatccaagctttatatgatcaaccctttttagacttagtatttgaagcgcaaagcgttcatcgtcaacatttccaagcaaatacgattcaggtcagcacccttctttcgattaaaacgggtaaatgtccagaggattgtaaatattgctctcagtcagcacattacgactctaaattagaagcagaaaaacgtattgcagttgataaagtgattagcgaagcacaagctgcaaaagaatcaggttcatctcgtttctgtatgggggctgcatggcgtaacccgcatgaaagagatatgccttatgtcttagaaatggttcgtgaagtaaaagccttaggtttagaaacttgcatgacgttaggtatgctcaaccaatcgcaagctgagcgtttgaaagatgctggtttagattattacaaccacaacctagatacatcacgcgaatattattcgcatatcattagcactcgtacttttgatgatcgtttaaatacacttgatcatgtacgtcatgcgggtatgaaagtgtgtagcggcggtattgtcggtttaggtgaaagtcgtaacgaccgtattggtctattgcaagagcttgctacgatgccagtacaccctgaatctgtaccaatcaacatgcttgtacctatcgaaggcacaccactcgctgaagtggaaaaattagatgtgactgagtggattcgtacaattgctgtcgcacgtatcatcatgccacatagctatattcgattatcagcaggtcgtgaatcccttagtgactcggatcaagcacttgcatttatggcaggtgcaaattcattgttctctggtgaaaaactgttaacgacaccaaacgcgggggaaggcaaagatcagatcttatttgcaaaactcggcttaactgctgaaaaagcaaaacctacagttgcagaactctccgtagatgctatgagcgcataa

SEQ ID NO: 128928 - protein, 329 aa, Acinetobacter calcoaceticus
MTLRNDWTRDEIQALYDQPFLDLVFEAQSVHRQHFQANTIQVSTLLSIKTGKCPEDCKYCSQSAHYDSKLEAEKRIAVDKVISEAQAAKESGSSRFCMGAAWRNPHERDMPYVLEMVREVKALGLETCMTLGMLNQSQAERLKDAGLDYYNHNLDTSREYYSHIISTRTFDDRLNTLDHVRHAGMKVCSGGIVGLGESRNDRIGLLQELATMPVHPESVPINMLVPIEGTPLAEVEKLDVTEWIRTIAVARIIMPHSYIRLSAGRESLSDSDQALAFMAGANSLFSGEKLLTTPNAGEGKDQILFAKLGLTAEKAKPTVAELSVDAMSA

SEQ ID NO: 128929 - DNA, 996 bp, Rhizobium loti
  CDS (1)..(996): transl_table=11
atgaacgaactcagcccagacctgacctcggatccaatcggttgggcgcttcccccctggacgcgagcggaagcccaggcggtctacgacctgcctttcaacgaccttttgtttcaggcgcagacccttcaccggcacaatttcgatcccaacaaggtccagctcagccggcttctcagcatcaaaacaggcggatgcccggaggattgcggctattgcagccaatcggcacatcacgaaagcgggttgaaggcgtcaaagctgatggaggtccggcacgtcatcgccgaggcgaccaaggcccgtgacgccggcgccacccgctattgcatgggcgctgcctggcgaaacccgaaggcgcgcgacatggacgcggtggtggcgatggtcgagggtgtcaaggcactcggtatggagacctgcatgacgctcggcatgctcgatcttgagcaggccgctcgtctgaaagaggccggtctcgactactacaaccacaacatcgacacctccgagcgctattactcagagatcatctcgacgcgcacgtttgccgaccggctggatacgctcgccaatgtccgcgacagcggcattaaggtctgttgcggcggcattgtcggcatgggcgaagagccggtggaccggatcgacatgctggtgacgctggccaacctgccggagcacccggaaagcgtgccgatcaacatgctcatcccgatcgagggcaccccgcttgccgaggctaaacccatcgagccgatcgaattcgtgcgcgtcatcgcgctggcgcgcatcatgatgccgaaatcgcatgtccgactctccgccggccgcaccgccatgaccgatgagatgcaggcgctgtgcttttttgccggcgccaactcgatcttcgtcggcgacacactgctgacggcggacaatcccggcgaagacaaggatactctgctgttccagcgtctcggcatcgagccgatggacctcgagacgcaatga

SEQ ID NO: 128930 - protein, 331 aa, Rhizobium loti
MNELSPDLTSDPIGWALPPWTRAEAQAVYDLPFNDLLFQAQTLHRHNFDPNKVQLSRLLSIKTGGCPEDCGYCSQSAHHESGLKASKLMEVRHVIAEATKARDAGATRYCMGAAWRNPKARDMDAVVAMVEGVKALGMETCMTLGMLDLEQAARLKEAGLDYYNHNIDTSERYYSEIISTRTFADRLDTLANVRDSGIKVCCGGIVGMGEEPVDRIDMLVTLANLPEHPESVPINMLIPIEGTPLAEAKPIEPIEFVRVIALARIMMPKSHVRLSAGRTAMTDEMQALCFFAGANSIFVGDTLLTADNPGEDKDTLLFQRLGIEPMDLETQ

SEQ ID NO: 128931 - DNA, 1059 bp, Pichia jadinii
  CDS (1)..(1059)
atggaagaagtggcttcacaggagaagaagccaaacccattggaatatgcattgtcagtgaagacaccagtcaacacctggaccaaagaagaaattaaagctatatatgacacaccactcatggacttgatgcactatgctcaggtgcaacacagaaggttccaacaaccttcagaggttcaattgtgcactcttatgaatatcaaaactggtggttgtaccgaggactgtaagtactgtgcccaatcacagcgttacaacactggtgtcaaggctgaaagaatcatccaagttgatgaggtgattgaagctgcaaaggaggcaaaggccaatggatctacaaggttctgtatgggtgctgcttggagagagatgaaaggtagaaagtcaaacttgaagaaaatcaaagagatgatcactgctgtccatgaccttggaatggagagttgtgtcaccctgggaatggttgataaagaccaagccactgaattgaaaagtgctgggttgacggcgtacaaccataacattgatacttacaaggaacactatccaaaggtgatctccacaagaagctttgatgatagattgaaaacattcaaaaacgttcaaggatctggattaaaggcatgcacaggtggtattcttggtcttggtgagacccaagaggaccgtgtatctttcctctacaccttggccacaatggatcagcatccagagtctcttccaatcaacagactggtcccaatcaagggcacgccaatgtatgaagaagttaagaacaagcaagttgaagttgatgagattgtcagaaccattgctactgcaagattggtcatgccaacgtctattatcagattggctgcaggaagatatacaatgaaagaggcagaacaggtgatgtgcttcatggctggttgtaatgccatcttcacaggtaagaaaatgctcacaacaatgtgtaacggctgggatgaggataaagccatgttggctaaatggggtctgaaaccaatggagagtttcaaatacaaaccaagggaggttgcattcggtgcttga

SEQ ID NO: 128932 - protein, 352 aa, Pichia jadinii
MEEVASQEKKPNPLEYALSVKTPVNTWTKEEIKAIYDTPLMDLMHYAQVQHRRFQQPSEVQLCTLMNIKTGGCTEDCKYCAQSQRYNTGVKAERIIQVDEVIEAAKEAKANGSTRFCMGAAWREMKGRKSNLKKIKEMITAVHDLGMESCVTLGMVDKDQATELKSAGLTAYNHNIDTYKEHYPKVISTRSFDDRLKTFKNVQGSGLKACTGGILGLGETQEDRVSFLYTLATMDQHPESLPINRLVPIKGTPMYEEVKNKQVEVDEIVRTIATARLVMPTSIIRLAAGRYTMKEAEQVMCFMAGCNAIFTGKKMLTTMCNGWDEDKAMLAKWGLKPMESFKYKPREVAFGA

SEQ ID NO: 128933 - DNA, 1188 bp, Pichia jadinii
  CDS (1)..(1188)
atgtcgtttatattgactgctattagtcgtccgattgctctttccacttctagagtagcttctagggctactctggcaacaggtgctactgctgctgcggagatcttggaagatgtgttcacggaacaaatggaagaagtggcttcacaggagaagaagccaaacccattggaatatgcattgtcagtgaagacaccagtcaacacctggaccaaagaagaaattaaagctatatatgacacaccactcatggacttgatgcactatgctcaggtgcaacacagaaggttccaacaaccttcagaggttcaattgtgcactcttatgaatatcaaaactggtggttgtaccgaggactgtaagtactgtgcccaatcacagcgttacaacactggtgtcaaggctgaaagaatcatccaagttgatgaggtgattgaagctgcaaaggaggcaaaggccaatggatctacaaggttctgtatgggtgctgcttggagagagatgaaaggtagaaagtcaaacttgaagaaaatcaaagagatgatcactgctgtccatgaccttggaatggagagttgtgtcaccctgggaatggttgataaagaccaagccactgaattgaaaagtgctgggttgacggcgtacaaccataacattgatacttacaaggaacactatccaaaggtgatctccacaagaagctttgatgatagattgaaaacattcaaaaacgttcaaggatctggattaaaggcatgcacaggtggtattcttggtcttggtgagacccaagaggaccgtgtatctttcctctacaccttggccacaatggatcagcatccagagtctcttccaatcaacagactggtcccaatcaagggcacgccaatgtatgaagaagttaagaacaagcaagttgaagttgatgagattgtcagaaccattgctactgcaagattggtcatgccaacgtctattatcagattggctgcaggaagatatacaatgaaagaggcagaacaggtgatgtgcttcatggctggttgtaatgccatcttcacaggtaagaaaatgctcacaacaatgtgtaacggctgggatgaggataaagccatgttggctaaatggggtctgaaaccaatggagagtttcaaatacaaaccaagggaggttgcattcggtgcttga

SEQ ID NO: 128934 - protein, 395 aa, Pichia jadinii
MSFILTAISRPIALSTSRVASRATLATGATAAAEILEDVFTEQMEEVASQEKKPNPLEYALSVKTPVNTWTKEEIKAIYDTPLMDLMHYAQVQHRRFQQPSEVQLCTLMNIKTGGCTEDCKYCAQSQRYNTGVKAERIIQVDEVIEAAKEAKANGSTRFCMGAAWREMKGRKSNLKKIKEMITAVHDLGMESCVTLGMVDKDQATELKSAGLTAYNHNIDTYKEHYPKVISTRSFDDRLKTFKNVQGSGLKACTGGILGLGETQEDRVSFLYTLATMDQHPESLPINRLVPIKGTPMYEEVKNKQVEVDEIVRTIATARLVMPTSIIRLAAGRYTMKEAEQVMCFMAGCNAIFTGKKMLTTMCNGWDEDKAMLAKWGLKPMESFKYKPREVAFGA

SEQ ID NO: 128935 - DNA, 1137 bp, Arabidopsis thaliana
  CDS (1)..(1137)
atgatgcttgttcgatctgtatttcgatctcagttgcgaccctctgtctcgggtggtctgcaatctgcttcttgctattcttcattatctgctgcttcagctgaagctgagaggactatcagagaaggtcccagaaacgattggagtagagatgaaatcaagtctgtttatgattctcctcttcttgacctcctcttccatggagctcaggttcatagacatgttcataacttcagggaggtacaacaatgtaccctcctctccataaagactggtggctgtagtgaagactgttcatattgtcctcagtcttcgagatatagcactggagttaaggcacaaagactcatgtctaaggacgctgtcattgatgctgctaagaaggcaaaagaagctgggagcacacgtttttgcatgggtgctgcttggcgagatacaattggacggaaaaccaacttcagccagattcttgaatacatcaaagaaataagaggcatggggatggaagtttgctgcaccttaggcatgattgagaaacaacaagcactagagctaaagaaggctggcctcactgcttataaccacaatcttgatacttcaagagagtactacccaaacgtcatcactactagaagttatgacgatcgccttgaaactcttagccatgttcgtgatgctggaatcaacgtttgttcaggaggaatcatagggcttggtgaggcagaggaagacagaataggtttattacacacgctggcaacacttccttctcaccctgagagtgttcccattaatgctctacttgcagtgaaaggcactcctcttgaagaccagaagccagttgagatatgggagatgatcaggatgattggaaccgcacgtattgtaatgccaaaagcgatggtgagactgtctgctggtagagtccggttctcaatgtccgaacaagctctctgtttccttgctggtgcaaactctatcttcaccggagagaagcttttaaccacaccaaacaatgattttgacgctgaccagctcatgttcaagacattaggcctcattcctaaaccgccaagtttctctgaagatgattctgaatcagaaaactgcgagaaagttgcttccgcttctcactaa

SEQ ID NO: 128936 - protein, 378 aa, Arabidopsis thaliana
MMLVRSVFRSQLRPSVSGGLQSASCYSSLSAASAEAERTIREGPRNDWSRDEIKSVYDSPLLDLLFHGAQVHRHVHNFREVQQCTLLSIKTGGCSEDCSYCPQSSRYSTGVKAQRLMSKDAVIDAAKKAKEAGSTRFCMGAAWRDTIGRKTNFSQILEYIKEIRGMGMEVCCTLGMIEKQQALELKKAGLTAYNHNLDTSREYYPNVITTRSYDDRLETLSHVRDAGINVCSGGIIGLGEAEEDRIGLLHTLATLPSHPESVPINALLAVKGTPLEDQKPVEIWEMIRMIGTARIVMPKAMVRLSAGRVRFSMSEQALCFLAGANSIFTGEKLLTTPNNDFDADQLMFKTLGLIPKPPSFSEDDSESENCEKVASASH

SEQ ID NO: 128937 - DNA, 999 bp, Bacillus sphaericus
  CDS (1)..(999): transl_table=11
gtgaattggttacaattagcagatgaagtgattgcaggcaaggtaattagcgatgatgaggcacttgccattttaaatagtgatgatgatgatattttaaagctaatggacggcgcatttgccattcgtaagcactattacggtaaaaaagtaaagttaaatatgattatgaatgctaaaagtggctattgcccagaggattgtggctattgctcgcagtcatctaaatcgaccgctcctattgagaaatatccgttcattacaaaagaagaaatattagcgggggcaaagcgtgcgtttgaaaataaaattggtacgtattgcatcgtcgcaagcggacgtgggccgactcgtaaagatgtcaatgtagtgagtgaagccgttgaagaaattaaagcaaaatatggcttaaaagtttgcgcttgcttaggtttactaaaagaagaacaagcacaacaattaaaagaagcgggtgttgatcgctacaatcataacttaaatacatcagagcgtcaccattcctatattacgacgacgcacacatatgaggatcgtgttaataccgttgaggttgtaaagaaacatggtatttccccatgttctggagccattattgggatgaaagaaacgaaaatggatgtcgtggaaattgcacgcgcattgcatcagttggacgcggattcaattccagttaacttcttacatgcaattgatggaacgaaacttgaaggaacacaggacttaaatcctcgctattgcttaaaagtattagcgttattccgctacatgaatccttcgaaggaaattagaatttccggtggtcgcgaagtcaatttaggattccttcagccatttggactgtatgcagcaaatagtatttttgttggggattacttaactactgaaggacaagaagccaatagcgattatcgtatgcttgaagatttgggctttgaaatcgagctgacacaaaagcaagaagaagcattttgttcttaa

SEQ ID NO: 128938 - protein, 332 aa, Bacillus sphaericus
MNWLQLADEVIAGKVISDDEALAILNSDDDDILKLMDGAFAIRKHYYGKKVKLNMIMNAKSGYCPEDCGYCSQSSKSTAPIEKYPFITKEEILAGAKRAFENKIGTYCIVASGRGPTRKDVNVVSEAVEEIKAKYGLKVCACLGLLKEEQAQQLKEAGVDRYNHNLNTSERHHSYITTTHTYEDRVNTVEVVKKHGISPCSGAIIGMKETKMDVVEIARALHQLDADSIPVNFLHAIDGTKLEGTQDLNPRYCLKVLALFRYMNPSKEIRISGGREVNLGFLQPFGLYAANSIFVGDYLTTEGQEANSDYRMLEDLGFEIELTQKQEEAFCS

SEQ ID NO: 128939 - DNA, 1008 bp, Bacillus subtilis
  CDS (1)..(1008): transl_table=11
atgaatcaatggatggaactcgcagaccgggtgctggctggagcagaagtgactgacgaagaggcgctttcaatattacattgtcctgatgaagatattttgctattaatgcacggggcttttcacatcagaaaacacttttacggaaaaaaagtaaagctcaatatgattatgaatgcgaaatccgggctctgcccggaaaactgcggctattgttcacagtctgcgatttcgaaagcgccgattgagtcttaccggatggtgaataaggaaacgctgcttgaaggcgcgaagcgggcgcacgatctgaatatcggcacatattgtatcgtggcaagcggcagaggtccgtctaacagagaagtggatcaggtcgtagatgcggttcaggaaattaaagagacgtatggactgaagatttgtgcatgtcttggactgttgaagccagagcaggcgaagcggctcaaagatgcaggagtagaccgctataatcataatttgaatacgtcacagagaaaccattcaaacatcacaacctcacatacatacgatgacagagtcaatacggttgaaatcgcaaaagaatcggggctgtctccgtgttcaggcgccattatcgggatgaaggagacgaaacaggatgtcattgacatcgccaaaagcttgaaggctcttgacgcggattccattcctgtgaattttttgcatgcaattgatggcacgccgttagaaggcgtcaacgaattaaacccgctgtattgtttaaaagtgctggcgctgttccgttttatcaatccatcaaaagaaattcgcatttccggaggaagagaggtcaatctccgcacattgcagccattagggctttacgccgcaaactccatttttgtcggagactacttaacaactgccgggcaagaggagacggaggatcataaaatgctgagtgatttaggctttgaagttgaatcagtcgaagaaatgaaggctagtttaagtgcgaaaagctga

SEQ ID NO: 128940 - protein, 335 aa, Bacillus subtilis
MNQWMELADRVLAGAEVTDEEALSILHCPDEDILLLMHGAFHIRKHFYGKKVKLNMIMNAKSGLCPENCGYCSQSAISKAPIESYRMVNKETLLEGAKRAHDLNIGTYCIVASGRGPSNREVDQVVDAVQEIKETYGLKICACLGLLKPEQAKRLKDAGVDRYNHNLNTSQRNHSNITTSHTYDDRVNTVEIAKESGLSPCSGAIIGMKETKQDVIDIAKSLKALDADSIPVNFLHAIDGTPLEGVNELNPLYCLKVLALFRFINPSKEIRISGGREVNLRTLQPLGLYAANSIFVGDYLTTAGQEETEDHKMLSDLGFEVESVEEMKASLSAKS

SEQ ID NO: 128941 - DNA, 1041 bp, Escherichia coli
  CDS (1)..(1041): transl_table=11
atggctcaccgcccacgctggacattgtcgcaagtcacagaattatttgaaaaaccgttgctggatctgctgtttgaagcgcagcaggtgcatcgccagcatttcgatcctcgtcaggtgcaggtcagcacgttgctgtcgattaagaccggagcttgtccggaagattgcaaatactgcccgcaaagctcgcgctacaaaaccgggctggaagccgagcggttgatggaagttgaacaggtgctggagtcggcgcgcaaagcgaaagcggcaggatcgacgcgcttctgtatgggcgcggcgtggaagaatccccacgaacgcgatatgccgtacctggaacaaatggtgcagggggtaaaagcgatggggctggaggcgtgtatgacgctgggcacgttgagtgaatctcaggcgcagcgcctcgcgaacgccgggctggattactacaaccacaacctggacacctcgccggagttttacggcaatatcatcaccacacgcacttatcaggaacgcctcgatacgctggaaaaagtgcgcgatgccgggatcaaagtctgttctggcggcattgtgggcttaggcgaaacggtaaaagatcgcgccggattattgctgcaactggcaaacctgccgacgccgccggaaagcgtgccaatcaacatgctggtgaaggtgaaaggcacgccgcttgccgataacgatgatgtcgatgcctttgattttattcgcaccattgcggtcgcgcggatcatgatgccaacctcttacgtgcgcctttctgccggacgcgagcagatgaacgaacagactcaggcgatgtgctttatggcaggcgcaaactcgattttctacggttgcaaactgctgaccacgccgaatccggaagaagataaagacctgcaactgttccgcaaactggggctaaatccgcagcaaactgccgtgctggcaggggataacgaacaacagcaacgtcttgaacaggcgctgatgaccccggacaccgacgaatattacaacgcggcagcattatga

SEQ ID NO: 128942 - protein, 346 aa, Escherichia coli
MAHRPRWTLSQVTELFEKPLLDLLFEAQQVHRQHFDPRQVQVSTLLSIKTGACPEDCKYCPQSSRYKTGLEAERLMEVEQVLESARKAKAAGSTRFCMGAAWKNPHERDMPYLEQMVQGVKAMGLEACMTLGTLSESQAQRLANAGLDYYNHNLDTSPEFYGNIITTRTYQERLDTLEKVRDAGIKVCSGGIVGLGETVKDRAGLLLQLANLPTPPESVPINMLVKVKGTPLADNDDVDAFDFIRTIAVARIMMPTSYVRLSAGREQMNEQTQAMCFMAGANSIFYGCKLLTTPNPEEDKDLQLFRKLGLNPQQTAVLAGDNEQQQRLEQALMTPDTDEYYNAAAL

SEQ ID NO: 128943 - DNA, 1002 bp, Haemophilus influenzae
  CDS (1)..(1002): transl_table=11
atgttagcggaaaaattacaaattaactctattacacctcatccaagtgtagaatattggtctgtttgcaaagttgaggcgttatttgaaacgccatttttggaattagtttaccgagcaacgcaagttcatcgtaagcattttaatcctcgcgcgattcagttatccacgttaatgtctatcaaaacggggggatgcccagaagattgtagttattgccctcaatcagcccgttatcatactggcgtacaaaatcagcagttattagatgttgatgagatcgtcgctaaagcaaaaattgcgaaagcacgtggtgcagggcgtttctgtatgggggctgcttggcgaggccctaagccaaaagatattgagaaagtcacagaaattattaaagccgtgaaatcacttggtttagaaacttgcggtacctttggtttattgcaagacggtatggcggaagatttaaaagaagctggattagattattacaatcataatcttgataccgcaccagaacattatgcagaagtgattggtactcgccgttttgatgatcgccttagcaccttaggaaaagtgcgcaaagctggattaaaagtgtgttgtggtggcattgtagggatgaatgaaactcgcaaagaacgggctggattaatcgcgagccttgcaaatcttgatccgcaacctgagtcagtgccgattaatcaactcgttaaggttgaaggtacgccgttagccgatgcggaagaattagattggacggagtttgtgcgaacgattgctgttgcacgtattactatgccaaaaagttatgttcgcctttctgcaggtcgcagtggtatgactgaagaaatgcaagcgatgtgttttatggcgggtgcaaattctattttctatggcgataaattacttgttacagataatccagaagaagatggcgatcagttattgatggcaaaattagatttagagccagaaactgcagaaaataaaaagttgtag

SEQ ID NO: 128944 - protein, 333 aa, Haemophilus influenzae
MLAEKLQINSITPHPSVEYWSVCKVEALFETPFLELVYRATQVHRKHFNPRAIQLSTLMSIKTGGCPEDCSYCPQSARYHTGVQNQQLLDVDEIVAKAKIAKARGAGRFCMGAAWRGPKPKDIEKVTEIIKAVKSLGLETCGTFGLLQDGMAEDLKEAGLDYYNHNLDTAPEHYAEVIGTRRFDDRLSTLGKVRKAGLKVCCGGIVGMNETRKERAGLIASLANLDPQPESVPINQLVKVEGTPLADAEELDWTEFVRTIAVARITMPKSYVRLSAGRSGMTEEMQAMCFMAGANSIFYGDKLLVTDNPEEDGDQLLMAKLDLEPETAENKKL

SEQ ID NO: 128945 - DNA, 1041 bp, Salmonella typhimurium
  CDS (1)..(1041): transl_table=11
atggctcgccacccacgctggacactgtcgcaagtaaccgaattatttgaaaaaccactgctggaattgctgtttgaagcgcagcaaattcatcgccagcatttcgatccgcagcaggtacaggttagtacgctgttgtcgatcaaaaccggcgcctgcccggaggattgtaaatactgcccgcagagctcgcgctataaaaccgggctggaagccgagcgtttaatggaagtagagcaggtactggactccgcccgtaaagcgaaaaacgctggttcgacccgcttctgtatgggggcggcctggaggaatccgcatgaacgcgatatgccttatctggagaagattgtacagggcgtcaaagcgatggggctggaaacctgtatgacgctcggcatgttgaacgagagccaggcgcagcgtctggctaacgccgggctggattactacaaccacaacctcgatacctcgccggagttttacggcaatatcatcactacccgtacctatcaggagcgcctcgacacgctggaaaaagtccgtgaagcagggattaaagtgtgctccggcggcattgtgggtctgggcgaaacggttaccgatcgcgccggactgttgttgcagttggcgaacctgccgacaccgccggaaagcgtgccaatcaacatgctggtgaaggtaaaaggcacgccgcttgcggataacgatgacgtggatgcgtttgattttattcgtactatcgccgtggcgcgcatcatgatgccgacctcatacgtgcgtctttccgcagggcgtgaacagatgaacgagcagacccaggcgatgtgctttatggccggggcgaactcgattttctatggctgcaaattgttaactacgccaaatccggcagaggacaaggatctgcagttattccgtaagctggggctgaatccgcagcagaccagggtgctggcgggcgataacgagcagcagcaacgtctggagcagacgctgatgacgcctgacaccgatgattattacaacgcggcagccttatga

SEQ ID NO: 128946 - protein, 346 aa, Salmonella typhimurium
MARHPRWTLSQVTELFEKPLLELLFEAQQIHRQHFDPQQVQVSTLLSIKTGACPEDCKYCPQSSRYKTGLEAERLMEVEQVLDSARKAKNAGSTRFCMGAAWRNPHERDMPYLEKIVQGVKAMGLETCMTLGMLNESQAQRLANAGLDYYNHNLDTSPEFYGNIITTRTYQERLDTLEKVREAGIKVCSGGIVGLGETVTDRAGLLLQLANLPTPPESVPINMLVKVKGTPLADNDDVDAFDFIRTIAVARIMMPTSYVRLSAGREQMNEQTQAMCFMAGANSIFYGCKLLTTPNPAEDKDLQLFRKLGLNPQQTRVLAGDNEQQQRLEQTLMTPDTDDYYNAAAL

SEQ ID NO: 128947 - DNA, 1092 bp, Schizosaccharomyces pombe
  CDS (1)..(1092)
atgtttactagaacaattaggcaacagattaggagatcttctgccctttctttagtgcgaaacaattggactcgtgaagaaattcaaaaaatttacgacacaccattgatcgatttgatttttagagccgcttccatacatagaaaattccacgaccccaagaaagttcaacaatgcactttactttctattaaaacaggtggatgtacagaagattgcaaatattgtgcgcaatcttcccgctacaataccggtgtcaaggccactaagctcatgaaaattgacgaagttttggaaaaggctaaaattgcaaaggctaaaggaagcactagattttgtatgggaagtgcctggcgtgatttgaatggtcgcaatcgcacctttaaaaatattttggaaatcatcaaagaggttcgcagcatggatatggaagtttgcgtaacccttggtatgttaaatgaacagcaagccaaggaactaaaggatgcaggcttgacggcatacaatcataatcttgatacctctcgcgaatattactcaaagattatcagcactaggacatatgatgaacggttaaatactattgacaatcttcggaaagctgggttgaaggtttgtagcggtggtattttgggtctaggggagaaaaagcatgatcgtgtaggattgattcactcgttagcaactatgccaacacatcctgaatctgtaccctttaatcttttggtcccgattcctggcacccctgtaggagacgctgtaaaagagagacttccgattcatcctttccttcgctccattgcaacagctcgtatttgcatgccaaagactatcattcgttttgcagctggacgtaacacgtgctccgagtccgagcaagcacttgctttcatggctggtgctaatgcagtttttaccggtgaaaaaatgcttactactcctgctgtttcttgggactcagacagtcagcttttttacaattggggtttggaaggaatgcaaagctttgaatatggaacttctactgagggagaagatggcactttcacccttcccccgaaagagcgccttgctcctagccctagtctttaa

SEQ ID NO: 128948 - protein, 363 aa, Schizosaccharomyces pombe
MFTRTIRQQIRRSSALSLVRNNWTREEIQKIYDTPLIDLIFRAASIHRKFHDPKKVQQCTLLSIKTGGCTEDCKYCAQSSRYNTGVKATKLMKIDEVLEKAKIAKAKGSTRFCMGSAWRDLNGRNRTFKNILEIIKEVRSMDMEVCVTLGMLNEQQAKELKDAGLTAYNHNLDTSREYYSKIISTRTYDERLNTIDNLRKAGLKVCSGGILGLGEKKHDRVGLIHSLATMPTHPESVPFNLLVPIPGTPVGDAVKERLPIHPFLRSIATARICMPKTIIRFAAGRNTCSESEQALAFMAGANAVFTGEKMLTTPAVSWDSDSQLFYNWGLEGMQSFEYGTSTEGEDGTFTLPPKERLAPSPSL

SEQ ID NO: 128949 - DNA, 1041 bp, Serratia marcescens
  CDS (1)..(1041): transl_table=11
atgatggccgaccgcattcactggacagtagggcaagcccaggccctgtttgataaaccgctgctggaactgctgttcgaagcgcaaaccgtacaccgccagcacttcgacccgcgtcaggtgcaggtcagcacgctgctgtcgatcaagaccggcgcttgcccggaagactgcaaatactgcccgcagagtccacgctacaagaccggcctggagtcggagcggctgatgcaggtcgagcaggtgctggaatcggcacgcaaggccaaggcgaacggttcgacccgtttttgcatgggcgcggcgtggaagaacccgcacgagcgcgatatgccttatctgcagcaaatggtgcagggcgtgaaagcgatgggcatggaaacctgcatgacgctgggcacattggatggcacccaggccgagcggctggcggaggccgggctggattactacaaccataacctcgacacctcgccggagttctacggcagcatcatcaccacccgcagctaccaggagcgcctggatacgctcgacaaggtgcgcgacgccggcatcaaagtgtgctccggcggcatcgtcgggctgggtgaaacggtgcgcgatcgcgccgggctgctggtgcagctggccaacctgccaaaaccaccggagagcgtgccgatcaacatgttggtgaaggtgaaaggcacgccgctggcggataacgatgacgtcgatccgtttgatttcatccgcaccatcgcggtggcgcgcatcatgatgccatcttcttatgtccgtctctccgcaggccgcgaacagatgaacgaacagacgcaggcgatgtgcttcatggccggcgccaactcgatcttctacggttgcaagctgctgaccacgccgaatccggaagaagacaaagacctgcagctgttccgcaagctggggctcaacccgcagcagaccgcaaccgaacacggcgacaaccagcaacagcaggtgctggccaagcaactgctgaacgccgataccgccgagttttacaacgcggcgccgtga

SEQ ID NO: 128950 - protein, 346 aa, Serratia marcescens
MMADRIHWTVGQAQALFDKPLLELLFEAQTVHRQHFDPRQVQVSTLLSIKTGACPEDCKYCPQSPRYKTGLESERLMQVEQVLESARKAKANGSTRFCMGAAWKNPHERDMPYLQQMVQGVKAMGMETCMTLGTLDGTQAERLAEAGLDYYNHNLDTSPEFYGSIITTRSYQERLDTLDKVRDAGIKVCSGGIVGLGETVRDRAGLLVQLANLPKPPESVPINMLVKVKGTPLADNDDVDPFDFIRTIAVARIMMPSSYVRLSAGREQMNEQTQAMCFMAGANSIFYGCKLLTTPNPEEDKDLQLFRKLGLNPQQTATEHGDNQQQQVLAKQLLNADTAEFYNAAP

SEQ ID NO: 128951 - DNA, 1146 bp, Oryza sativa
  CDS (1)..(1146)
atgatgctgctcgcccgcgccgtcctccgctcccgcctccgctgcccgccgctgtctgctgcggcggcgtcgacggcggcgttctcgtcggccccgtcgccggcggcggcggaggcggagcgcgcggtacgggacgggcccaggaacgactggagccggcccgagatccaggccgtctacgactcccctctcctcgacctcctcttccacggggctcaagtccatagaagtgtccataaattcagagaagtgcaacagtgcactcttctttcaataaagacaggtgggtgcagcgaagattgttcatactgcccccagtcctcaagatacagtacaggattgaaggcacaaaaattaatgaataaagatgctgtcttagaagcagcaaaaaaggcaaaggaggctgggagcacccgcttttgcatgggagcagcatggagagaaaccattgggaggaaaacaaattttaatcagatccttgaatatgtcaaggacattagaggtatgggcatggaggtctgttgcactcttggcatgctagagaagcaacaagctgaagaactcaagaaggctgggcttacagcatataatcataatttagatacatcaagagaatattaccccaacattatttccacaagatcatatgacgatagactgcagactcttgagcatgtccgtgaagctggaataagcatatgctcaggtggaattattggtcttggagaggcagaggaggaccgtgtaggattgttgcatacactggctactttgcctgcacacccagagagtgttcctattaatgcattggttgctgtcaaaggcacgccccttcaagatcagaagcctgtagagatctgggaaatgatccgcatgattgccacagctcgaattgtgatgccgaaggcaatggtgaggctttcagcaggacgagtacgtttctccatgccagagcaagcgctctgcttcctagctggggccaactccatcttcgctggtgagaaacttctaacaaccacaaacaacgactttgatgcagaccaggcgatgttcaagatccttggtctgattcccaaggctccaagctttggtgatgaagcaccagctgcagacactgagagatgtgaggaagctgcatcaatgtag

SEQ ID NO: 128952 - protein, 381 aa, Oryza sativa
MMLLARAVLRSRLRCPPLSAAAASTAAFSSAPSPAAAEAERAVRDGPRNDWSRPEIQAVYDSPLLDLLFHGAQVHRSVHKFREVQQCTLLSIKTGGCSEDCSYCPQSSRYSTGLKAQKLMNKDAVLEAAKKAKEAGSTRFCMGAAWRETIGRKTNFNQILEYVKDIRGMGMEVCCTLGMLEKQQAEELKKAGLTAYNHNLDTSREYYPNIISTRSYDDRLQTLEHVREAGISICSGGIIGLGEAEEDRVGLLHTLATLPAHPESVPINALVAVKGTPLQDQKPVEIWEMIRMIATARIVMPKAMVRLSAGRVRFSMPEQALCFLAGANSIFAGEKLLTTTNNDFDADQAMFKILGLIPKAPSFGDEAPAADTERCEEAASM

SEQ ID NO: 128953 - DNA, 1134 bp, Zea mays
  CDS (1)..(1134)
atggccttgatgctgctagcgcgcaacctgcgctcccgcctccgcccaccgctcgccgccgccgcggcgttctcgtcggccgcggcggaggcggagagggcgatacgggacgggccgcggaacgactggagccggcccgagatccaggccgtctacgactcaccgctcctcgacctcctctttcacggggctcaggtccacagaaatgtccataaattcagagaagtgcagcaatgcacacttctttcaatcaagactggtggatgcagtgaagattgttcttactgtcctcagtcatcaagatacaacactggattgaaggcccaaaaattgatgaacaaagatgctgtcttggaagcagcaaaaaaggcaaaagagtctgggagcacccgtttttgcatgggagctgcatggagagaaaccattggcaggaaatcaaacttcaaccagattcttgaatgtgtcaaggaaataaggggtatgggcatggaggtctgttgcacactaggcatgatagagaaacaacaagctgaagaactcaagaaggctggacttacagcatataatcataacctagatacatcaagagagtattatcccaacattattaccacaagatcatatgatgatagactgcagactcttgagcatgtccgtgaagctggaataagcatctgctcaggtggaatcattggtcttggtgaagcagaggaggaccgggtagggttgttgcataccctagctaccttgcctacacacccagagagcgttcctattaatgcattggttgctgtaaaaggcacacctcttgaggaccagaagccggtagagatctgggaaatgatccgcatgatcgccactgctcggatcacgatgccaaaggcaatggtgaggctttcagcaggccgagtacggttctcgatgccagaacaagcgctgtgcttcctcgctggggccaactccatctttgccggcgagaaacttctcacaaccgcaaacaacgactttgatgcggaccaggcgatgttcaagatccttggcctgatccccaaggctccaagctttggcgaggaagaggcgtctgcggcggctcccacagaatccgagaggtctgagcaagctgcttcgatgtag

SEQ ID NO: 128954 - protein, 377 aa, Zea mays
MALMLLARNLRSRLRPPLAAAAAFSSAAAEAERAIRDGPRNDWSRPEIQAVYDSPLLDLLFHGAQVHRNVHKFREVQQCTLLSIKTGGCSEDCSYCPQSSRYNTGLKAQKLMNKDAVLEAAKKAKESGSTRFCMGAAWRETIGRKSNFNQILECVKEIRGMGMEVCCTLGMIEKQQAEELKKAGLTAYNHNLDTSREYYPNIITTRSYDDRLQTLEHVREAGISICSGGIIGLGEAEEDRVGLLHTLATLPTHPESVPINALVAVKGTPLEDQKPVEIWEMIRMIATARITMPKAMVRLSAGRVRFSMPEQALCFLAGANSIFAGEKLLTTANNDFDADQAMFKILGLIPKAPSFGEEEASAAAPTESERSEQAASM

SEQ ID NO: 128955 - DNA, 1128 bp, Brassica napus
  CDS (1)..(1128)
atgatgcttgctcgattcgtatttcgatctcagctcagaccttctctctccgcccgacaatctgcttcttactcctctgcttccgcagcctcagctgaagccgaaagaacgatccgtgaaggtccgagaaatgactggagcaaagatgaaatcaaagccgtctatgactctcccgttcttgacctcctcttccatggagcacaggttcataggcatgttcataacttcagggaagtgcagcaatgtactctcctctccataaagactggagggtgcagtgaggactgttcttattgtcctcagtcctccagatatgacactggagtcaaggcccaaagactcatgtccaaggacgctgtcattgttgctgctaagaaggcaaaagaagctggaagcacacggttttgcatgggtgctgcgtggagagatacaataggacgcaaaaccaatttcaagcagatacttgagtacatcaaagagataagaggcatggggatggaggtttgctgcacattgggcatgattgagaagcaacaagcgttagagctgaagaaggccggcctcactgcttataaccacaatcttgatacttcaagagagtactaccccaacgtcatcactactagaagttatgatgaacgtcttgaaactcttgagcatgttcgtgatgctggtatcaacgtctgctcaggaggaataatacggcttggagaggcagaggaggacagagtaggattactacacacactagcaacacttccttctcaccctgagagtgttcccatcaacgctctgcttgcagtgaaaggcactcctcttgaagaccagaagccggttgagatatgggagatgatcaggatgattggaacagcaagaatcgtgatgccaaaagcaatggtgaggctatctgctggtagagtccggttctcgatgcccgagcaagccctgtgttttctcgctggtgcaaactctatcttcactggagagaagcttttgacaacacccaacaatgattttgacgcagaccagctcatgttcaagacgctgggactcactcctaaacccccaagcttctctgaagatgattctgagtcagaaaactgcgagaaagttgcttcttctcattaa

SEQ ID NO: 128956 - protein, 375 aa, Brassica napus
MMLARFVFRSQLRPSLSARQSASYSSASAASAEAERTIREGPRNDWSKDEIKAVYDSPVLDLLFHGAQVHRHVHNFREVQQCTLLSIKTGGCSEDCSYCPQSSRYDTGVKAQRLMSKDAVIVAAKKAKEAGSTRFCMGAAWRDTIGRKTNFKQILEYIKEIRGMGMEVCCTLGMIEKQQALELKKAGLTAYNHNLDTSREYYPNVITTRSYDERLETLEHVRDAGINVCSGGIIRLGEAEEDRVGLLHTLATLPSHPESVPINALLAVKGTPLEDQKPVEIWEMIRMIGTARIVMPKAMVRLSAGRVRFSMPEQALCFLAGANSIFTGEKLLTTPNNDFDADQLMFKTLGLTPKPPSFSEDDSESENCEKVASSH

SEQ ID NO: 128957 - DNA, 1125 bp, Glycine max
  CDS (1)..(1125)
atgtttttggcgagacccattttccgagcaccctccctttgggcgttgcactcttcctacgcgtattcctctgcctcagcagctgcaattcaagctgagagagccatcaaagaaggacccagaaacgattggagccgagaccaagtcaaatccatctacgactctcccattctcgatcttctcttccatggggctcaagttcacagacatgctcataacttcagggaagttcagcagtgtactcttctgtctatcaaaacaggagggtgcagtgaagattgttcctattgtcctcaatcctctaagtatgatacaggagtcaaaggccaacgccttatgaacaaggaagctgttctacaggctgcaaagaaggcaaaagaggctgggagcactcgcttttgtatgggtgctgcatggagggatacactgggaagaaagaccaacttcaaccagatccttgaatatgtgaaagacataagggacatgggaatggaggtttgttgcacccttggcatgctggagaaacagcaggctgttgaactcaagaaggcaggtctcactgcctataatcacaatcttgacacttcaagggagtattatccaaacataatcacaacaaggacttatgatgagcgtcttcaaacccttgagtttgttcgtgatgcagggatcaatgtttgttctggaggaattatagggcttggagaagcagaggaggatcgtgtaggtttgttacatacattgtcaacacttcccacccatccagagagtgttcctattaatgcacttgttgctgtaaagggaacccctcttgaggatcagaagcctgttgaaatatgggagatgattcgcatgatagcaactgcacgtatcgtaatgccaaaagcaatggtcaggttatcagctggcagagttcgattctccatgcctgagcaggcattgtgctttcttgctggtgcaaattctatattcactggtgaaaagcttctcactactcctaacaatgattttgatgctgatcaactcatgtttaaagttcttggacttctcccaaaagctccaagcttacatgaaggtgaaactagtgtgacagaagattataaggaagcagcttcttctagttga

SEQ ID NO: 128958 - protein, 374 aa, Glycine max
MFLARPIFRAPSLWALHSSYAYSSASAAAIQAERAIKEGPRNDWSRDQVKSIYDSPILDLLFHGAQVHRHAHNFREVQQCTLLSIKTGGCSEDCSYCPQSSKYDTGVKGQRLMNKEAVLQAAKKAKEAGSTRFCMGAAWRDTLGRKTNFNQILEYVKDIRDMGMEVCCTLGMLEKQQAVELKKAGLTAYNHNLDTSREYYPNIITTRTYDERLQTLEFVRDAGINVCSGGIIGLGEAEEDRVGLLHTLSTLPTHPESVPINALVAVKGTPLEDQKPVEIWEMIRMIATARIVMPKAMVRLSAGRVRFSMPEQALCFLAGANSIFTGEKLLTTPNNDFDADQLMFKVLGLLPKAPSLHEGETSVTEDYKEAASSS

SEQ ID NO: 128959 - DNA, 25 bp, Artificial sequence
  primer
atgatgtctactatctaccgtcatt

SEQ ID NO: 128960 - DNA, 25 bp, Artificial sequence
  primer
tcaagatctgtcgtacttaaatgcc

SEQ ID NO: 128961 - protein, 328 aa, Artificial sequence
  consensus sequence
  Variant (2)..(12): Xaa in position 2 to 12 is any amino acid
  Variant (14)..(16): Xaa in position 14 to 16 is any amino acid
  Variant (17)..(21): Xaa in position 17 to 21 is any or no amino acid
  Variant (23)..(29): Xaa in position 23 to 29 is any amino acid
  Variant (32)..(38): Xaa in position 32 to 38 is any amino acid
  Variant (39)..(39): Xaa in position 39 is any or no amino acid
  Variant (41)..(43): Xaa in position 41 to 43 is any amino acid
  Variant (45)..(47): Xaa in position 45 to 47 is any amino acid
  Variant (51)..(51): Xaa in position 51 is any amino acid
  Variant (53)..(53): Xaa in position 53 is any amino acid
  Variant (57)..(57): Xaa in position 57 is any amino acid
  Variant (60)..(60): Xaa in position 60 is any amino acid
  Variant (63)..(78): Xaa in position 63 to 78 is any amino acid
  Variant (79)..(81): Xaa in position 79 to 81 is any or no amino acid
  Variant (83)..(85): Xaa in position 83 to 85 is any amino acid
  Variant (87)..(88): Xaa in position 87 to 88 is any amino acid
  Variant (90)..(92): Xaa in position 90 to 92 is any amino acid
  Variant (94)..(95): Xaa in position 94 to 95 is any amino acid
  Variant (105)..(124): Xaa in position 105 to 124 is any amino acid
  Variant (125)..(127): Xaa in position 125 to 127 is any or no amino acid
  Variant (129)..(129): Xaa in position 129 is any amino acid
  Variant (130)..(130): Xaa in position 130 is any or no amino acid
  Variant (132)..(132): Xaa in position 132 is any amino acid
  Variant (134)..(134): Xaa in position 134 is any amino acid
  Variant (138)..(142): Xaa in position 138 to 142 is any amino acid
  Variant (145)..(146): Xaa in position 145 to 146 is any amino acid
  Variant (148)..(149): Xaa in position 148 to 149 is any amino acid
  Variant (153)..(154): Xaa in position 153 to 154 is any amino acid
  Variant (159)..(159): Xaa in position 159 is any amino acid
  Variant (163)..(165): Xaa in position 163 to 165 is any amino acid
  Variant (167)..(171): Xaa in position 167 to 171 is any amino acid
  Variant (174)..(177): Xaa in position 174 to 177 is any amino acid
  Variant (180)..(180): Xaa in position 180 is any amino acid
  Variant (182)..(184): Xaa in position 182 to 184 is any amino acid
  Variant (186)..(188): Xaa in position 186 to 188 is any amino acid
  Variant (190)..(192): Xaa in position 190 to 192 is any amino acid
  Variant (194)..(194): Xaa in position 194 is any amino acid
  Variant (198)..(198): Xaa in position 198 is any amino acid
  Variant (200)..(200): Xaa in position 200 is any amino acid
  Variant (203)..(206): Xaa in position 203 to 206 is any amino acid
  Variant (208)..(213): Xaa in position 208 to 213 is any amino acid
  Variant (215)..(218): Xaa in position 215 to 218 is any amino acid
  Variant (219)..(220): Xaa in position 219 to 220 is any or no amino acid
  Variant (222)..(222): Xaa in position 222 is any amino acid
  Variant (226)..(226): Xaa in position 226 is any amino acid
  Variant (228)..(228): Xaa in position 228 is any amino acid
  Variant (230)..(233): Xaa in position 230 to 233 is any amino acid
  Variant (238)..(249): Xaa in position 238 to 249 is any amino acid
  Variant (250)..(258): Xaa in position 250 to 258 is any or no amino acid
  Variant (260)..(261): Xaa in position 260 to 261 is any amino acid
  Variant (263)..(263): Xaa in position 263 is any amino acid
  Variant (267)..(267): Xaa in position 267 is any amino acid
  Variant (270)..(273): Xaa in position 270 to 273 is any amino acid
  Variant (276)..(276): Xaa in position 276 is any amino acid
  Variant (280)..(286): Xaa in position 280 to 286 is any amino acid
  Variant (288)..(289): Xaa in position 288 to 289 is any amino acid
  Variant (291)..(291): Xaa in position 291 is any amino acid
  Variant (293)..(293): Xaa in position 293 is any amino acid
  Variant (301)..(301): Xaa in position 301 is any amino acid
  Variant (303)..(303): Xaa in position 303 is any amino acid
  Variant (304)..(306): Xaa in position 304 to 306 is any or no amino acid
  Variant (311)..(317): Xaa in position 311 to 317 is any amino acid
  Variant (318)..(319): Xaa in position 318 to 319 is any or no amino acid
  Variant (321)..(327): Xaa in position 321 to 327 is any amino acid
WXXXXXXXXXXXPXXXXXXXXLXXXXXXXHRXXXXXXXXQXXXLXXXKTGXCXEDCXYCXQSXXXXXXXXXXXXXXXXXXXVXXXAXXAXXXGXXRFCMGAAWRXXXXXXXXXXXXXXXXXXXXXXXGXXEXCXTLGXXXXXQAXXLXXAGLXXYNHNXDTSXXXYXXXXXTRXXXXRLXTXXXVXXXGXXXCXGGIXGXGEXXXXRXXXXXXLXXXXXXPXSVPXNXLXXXXGTPLXXXXXXXXXXXXXXXXXXXXXRXXAXARIXMPXXXXRLXAGRXXXXXXXQXXCXFXAGANSIFXGXXXXLLTTXXXXXXXXXDXXXXXXXG

SEQ ID NO: 128962 - protein, 56 aa, Artificial sequence
  protein pattern
  Variant (2)..(3): Xaa in position 2 to 3 is any amino acid
  Variant (7)..(8): Xaa in position 7 to 8 is any amino acid
  Variant (13)..(13): Xaa in position 13 is Ile, Leu or Val
  Variant (16)..(18): Xaa in position 16 to 18 is any amino acid
  Variant (19)..(19): Xaa in position 19 is any or no amino acid
  Variant (21)..(22): Xaa in position 21 to 22 is any amino acid
  Variant (23)..(23): Xaa in position 23 is Ile or Val
  Variant (24)..(25): Xaa in position 24 to 25 is any amino acid
  Variant (28)..(30): Xaa in position 28 to 30 is any amino acid
  Variant (31)..(31): Xaa in position 31 is Asp, Glu or Asn
  Variant (33)..(33): Xaa in position 33 is Ile, Leu or Met
  Variant (34)..(34): Xaa in position 34 is any amino acid
  Variant (35)..(35): Xaa in position 35 is Ser or Thr
  Variant (36)..(36): Xaa in position 36 is Phe, Ile, Leu or Val
  Variant (37)..(43): Xaa in position 37 to 43 is any amino acid
  Variant (44)..(44): Xaa in position 44 is Ile, Leu, Met or Val
  Variant (45)..(46): Xaa in position 45 to 46 is any amino acid
  Variant (48)..(48): Xaa in position 48 is Ala, Cys, Ser or Thr
  Variant (52)..(52): Xaa in position 52 is Ile, Leu, Met or Val
  Variant (54)..(54): Xaa in position 54 is Leu or Met
  Variant (55)..(55): Xaa in position 55 is Gly or Asn
LXXAGLXXYNHNXDTXXXXYXXXXXTRXXXXRXXXXXXXXXXXXXXCXGGIXGXXE

SEQ ID NO: 128963 - protein, 21 aa, Artificial sequence
  protein pattern
  Variant (2)..(5): Xaa in position 2 to 5 is any amino acid
  Variant (8)..(8): Xaa in position 8 is Ile, Leu or Val
  Variant (9)..(9): Xaa in position 9 is any amino acid
  Variant (10)..(10): Xaa in position 10 is Phe, Leu or Met
  Variant (12)..(12): Xaa in position 12 is any amino acid
  Variant (13)..(13): Xaa in position 13 is Ala, Ser or Thr
  Variant (14)..(14): Xaa in position 14 is any amino acid
  Variant (15)..(15): Xaa in position 15 is Ile or Val
  Variant (18)..(18): Xaa in position 18 is Ala or Ser
RXXXXARXXXPXXXXRLXAGR

SEQ ID NO: 128964 - protein, 18 aa, Artificial sequence
  protein pattern
  Variant (2)..(2): Xaa in position 2 is any amino acid
  Variant (3)..(4): Xaa in position 3 to 4 is any or no amino acid
  Variant (6)..(7): Xaa in position 6 to 7 is any amino acid
  Variant (9)..(9): Xaa in position 9 is Lys or Arg
  Variant (10)..(11): Xaa in position 10 to 11 is any amino acid
  Variant (13)..(13): Xaa in position 13 is Ala, Ser or Val
  Variant (14)..(14): Xaa in position 14 is any amino acid
  Variant (16)..(16): Xaa in position 16 is any amino acid
  Variant (18)..(18): Xaa in position 18 is Phe, Leu or Met
VXXXAXXAXXXGXXRXCX

SEQ ID NO: 128965 - protein, 15 aa, Artificial sequence
  protein pattern
  Variant (3)..(3): Xaa in position 3 is any amino acid
  Variant (5)..(5): Xaa in position 5 is Ala or Ser
  Variant (6)..(6): Xaa in position 6 is Phe, Ile, Leu, Met or Val
  Variant (8)..(8): Xaa in position 8 is any amino acid
  Variant (10)..(11): Xaa in position 10 to 11 is any amino acid
  Variant (12)..(12): Xaa in position 12 is any or no amino acid
  Variant (14)..(14): Xaa in position 14 is any amino acid
AGXNXXFXGXXXLXT

SEQ ID NO: 128966 - protein, 20 aa, Artificial sequence
  protein pattern
  Variant (2)..(2): Xaa in position 2 is any amino acid
  Variant (3)..(5): Xaa in position 3 to 5 is any or no amino acid
  Variant (7)..(7): Xaa in position 7 is Phe, Ile, Leu or Val
  Variant (9)..(9): Xaa in position 9 is Ile or Val
  Variant (11)..(11): Xaa in position 11 is any amino acid
  Variant (13)..(14): Xaa in position 13 to 14 is any amino acid
  Variant (15)..(15): Xaa in position 15 is Phe, Ile or Val
  Variant (16)..(16): Xaa in position 16 is any amino acid
  Variant (20)..(20): Xaa in position 20 is Phe, Ile, Leu or Met
PXXXXSXPXNXLXXXXGTPX

SEQ ID NO: 128967 - DNA, 1272 bp, Saccharomyces cerevisiae; identical to SEQ ID NO: 128013
  CDS (1)..(1272)

SEQ ID NO: 128968 - protein, 423 aa, Saccharomyces cerevisiae; identical to SEQ ID NO: 128014

SEQ ID NO: 128969 - DNA, 1191 bp, Vibrio cholerae O1 biovar eltor str. N16961; identical to SEQ ID NO: 127997
  CDS (1)..(1191): transl_table=11

SEQ ID NO: 128970 - protein, 396 aa, Vibrio cholerae O1 biovar eltor str. N16961
MQCGLLKHRLLKFFSTEAIMTTNQRSIKAPQTVVVKLGTSVLTGGTLALDRAHMVELARQCAELKKQGHSVVIVTSGAIAAGREHLGYPALPNAISSKQLLAAVGQSRLIQVWESLFAIYGIKIGQMLLTRADLDDRERFLNARDTINALVENGIVPVVNENDAVATNEIKVGDNDNLSALVGILCGADKLLLLTDQKGLFTADPRKDPNAQLIKEVTTIDDTLRKIAGGSGTTLGTGGMATKLQAADIARRAGIEVIIAAGRAPNVIFDSLSDEPQGTRFLALEEALENRKRWILAGPAASGDIVIDDGAVKAVQTKGSSLLAKGVVRVQGQFARGEVVRVLDKQSHLIARGIAAYSNDELAQIAGKHSKEIIDILGYDHGSEVIHRDDMVVIQE

SEQ ID NO: 128971 - DNA, 1158 bp, Xanthomonas axonopodis pv. citri str. 306; identical to SEQ ID NO: 127531
  CDS (1)..(1158): transl_table=11

SEQ ID NO: 128972 - protein, 385 aa, Xanthomonas axonopodis pv. citri str. 306; identical to SEQ ID NO: 127532

SEQ ID NO: 128973 - DNA, 1191 bp, Vibrio vulnificus YJ016; identical to SEQ ID NO: 127543
  CDS (1)..(1191): transl_table=11

SEQ ID NO: 128974 - protein, 396 aa, Vibrio vulnificus YJ016; identical to SEQ ID NO: 127544

SEQ ID NO: 128975 - DNA, 1347 bp, Magnaporthe grisea 70-15
  CDS (1)..(1347)
atggacctgaagggcgccgtcacgcattccgatccttcgatgaaggctccgaaatcattgggcactgtggtgatcaagctaggcaccagctccatcgtcgatgagacgacaaaaaaacctctcctctccatcttgaccctaattgttgagacggccgtcaagttaagggaagatggacacaaagtcgtcatcgtctcgtcgggtgccatcggcgttgggcttcgccgtatggacatagccgtaaggcccaagaagcacatgtccaagttgcaggctttggcagcaataggacaatgccgcctcatgagtctatgggacagtctcttcacacaattgagacagccaatcgcacaaattcttctcaccaggaatgatattgcggacaggtccaggtacctaaatgcccagaatacagtcatggagctccttgacatgggcgttatccccatcgtaaacgagaacgacactctcgccgtctcggaaatcaagtttggcgacaatgacacactatccgctattactgcagctatggttcatgcagaaatgctattcctcatgacggacgtagattgtctatatgacaagaatccccgagctcacccagatgccaaggctatcgaggtggtagaggatatcggagccttatctgctgatggcaagtccgccccttacttgtccaaagattcaaggcttgccacctctgcaggagtcaccaccatcatcgccagggcgtcaaatccgggcaatattctcaacattgtgaaatggattgaggcaaacccagctgccacatcgtccaggatcagtgtaaatgaccacacagactctttcatgcccaggaacgaatcaggaattcagcctccattacacacacgattccttccctcaacagacccaatcagggaccggtcattctggatccttcacggcctcaagccacacggcacagtctacatagaccaaggcgcgtaccaagcactgttggataaggctggcctactacctgtgggtgtagtggatgtcgaaggacactttgcacagcaggaagccgtccggatcgtggtggtcgagaagaaactctcaacgccaacccctgacggaaagtactgggagggttctaccaacgaggttggccgagctttggtgaactactcatcggccgagatcgccaggatcaagggtcaccaaagcacagatatcaaggatctactcggctacgctgacagcgagtacgtcgttcaccgagcgcagatcagcttcttcaggagggaaagcagaccggtctccccaacaatggagatggaacccatcacccgcggaattggaagctacgaggtcacacactaa

SEQ ID NO: 128976 - protein, 448 aa, Magnaporthe grisea 70-15
MDLKGAVTHSDPSMKAPKSLGTVVIKLGTSSIVDETTKKPLLSILTLIVETAVKLREDGHKVVIVSSGAIGVGLRRMDIAVRPKKHMSKLQALAAIGQCRLMSLWDSLFTQLRQPIAQILLTRNDIADRSRYLNAQNTVMELLDMGVIPIVNENDTLAVSEIKFGDNDTLSAITAAMVHAEMLFLMTDVDCLYDKNPRAHPDAKAIEVVEDIGALSADGKSAPYLSKDSRLATSAGVTTIIARASNPGNILNIVKWIEANPAATSSRISVNDHTDSFMPRNESGIQPPLHTRFLPSTDPIRDRSFWILHGLKPHGTVYIDQGAYQALLDKAGLLPVGVVDVEGHFAQQEAVRIVVVEKKLSTPTPDGKYWEGSTNEVGRALVNYSSAEIARIKGHQSTDIKDLLGYADSEYVVHRAQISFFRRESRPVSPTMEMEPITRGIGSYEVTH

SEQ ID NO: 128977 - DNA, 1239 bp, Gibberella zeae PH-1; identical to SEQ ID NO: 127545
  CDS (1)..(1239)

SEQ ID NO: 128978 - protein, 412 aa, Gibberella zeae PH-1; identical to SEQ ID NO: 127546

SEQ ID NO: 128979 - DNA, 1458 bp, Candida glabrata CBS 138; identical to SEQ ID NO: 127547
  CDS (1)..(1458)

SEQ ID NO: 128980 - protein, 485 aa, Candida glabrata CBS 138; identical to SEQ ID NO: 127548

SEQ ID NO: 128981 - DNA, 1284 bp, Candida glabrata CBS 138; identical to SEQ ID NO: 127549
  CDS (1)..(1284)

SEQ ID NO: 128982 - protein, 427 aa, Candida glabrata CBS 138; identical to SEQ ID NO: 127550

SEQ ID NO: 128983 - DNA, 1257 bp, Kluyveromyces lactis NRRL Y-1140; identical to SEQ ID NO: 127551
  CDS (1)..(1257)

SEQ ID NO: 128984 - protein, 418 aa, Kluyveromyces lactis NRRL Y-1140; identical to SEQ ID NO: 127552

SEQ ID NO: 128985 - DNA, 1275 bp, Debaryomyces hansenii CBS767; identical to SEQ ID NO: 127553
  CDS (1)..(1275)

SEQ ID NO: 128986 - protein, 424 aa, Debaryomyces hansenii CBS767; identical to SEQ ID NO: 127554

SEQ ID NO: 128987 - DNA, 1272 bp, Candida albicans SC5314
  CDS (1)..(1272): transl_table=12
atgacaaagcaattcaccatagtcattaaacttgggacctcatcccttgtagatgaggttaccagagaaccaagaatagccaacatgtcgcttatagtcgaaacgatggttagactacgccgccagggccacaaaatcgtcattgtctcgtctggggcaattgcatgtggaatgaaacaagttggattagaagaaaaacctgcaaatttatcagcagtgcaggctttggcttctatcggacaagtgcgacttattagaacctttgatgatttattccggcaattagaacaaccgatagcccagattttactcacaagaaacgacataatggacttcactcaatacaagaacgctcaaaatacattgaatgagttgatggatatggggatcattcctatagtcaatgaaaacgatacattatcagtttctgaaatcaagtttggtgataacgatagtttgtcggccatcacagccgggatcattcatgccgattatttgtttctcatgaccgacgtcgagtgtttgtataccgacaacccaagaaccaacccagacgcacaacctatattggtagtcgacaagattgatgatttgcatgtgaagactgataccgagtctggtgctggatctaaagtcgggactggtgggatgaccacgaaattgattgctgccgatttagcaaccaatgctggtgtgaccacgatcataacattatcgagtcaaccatattacattattgatattgttgcccatatacaggctcatgcagatacattatcggttgaaaaccagcgtcttgcgttacaaaaggatatccaacagggtaaaattccattgcatacaagatttttgagcaagccccaagatacattaatcaaatctgatcgcagattctggttattacatggattaaaaactaagggagcattagtcatcgaccaagggtgtttccaagcattgacaagacgtaatcgtgcaggattattaccggttggtatacttcatgttgtggggaattttcaccaaagtgaatgtgtatcgatcaaagttgtccctgataagaatggtgctattgatgatgcagttgaagtgggccattgcagagtaaattacctggccccagaaatcaccctaattaaaggtcataaaagtagtgaaattgaagcaattctaggttatgctgatagtgaatatgtggcacatagagataatttagcattcccaccagtcatgccaccttcaacagattcgttgatctcggatagtttatag

SEQ ID NO: 128988 - protein, 423 aa, Candida albicans SC5314
MTKQFTIVIKLGTSSLVDEVTREPRIANMSLIVETMVRLRRQGHKIVIVSSGAIACGMKQVGLEEKPANLSAVQALASIGQVRLIRTFDDLFRQLEQPIAQILLTRNDIMDFTQYKNAQNTLNELMDMGIIPIVNENDTLSVSEIKFGDNDSLSAITAGIIHADYLFLMTDVECLYTDNPRTNPDAQPILVVDKIDDLHVKTDTESGAGSKVGTGGMTTKLIAADLATNAGVTTIITLSSQPYYIIDIVAHIQAHADTLSVENQRLALQKDIQQGKIPLHTRFLSKPQDTLIKSDRRFWLLHGLKTKGALVIDQGCFQALTRRNRAGLLPVGILHVVGNFHQSECVSIKVVPDKNGAIDDAVEVGHCRVNYSAPEITLIKGHKSSEIEAILGYADSEYVAHRDNLAFPPVMPPSTDSLISDSL

SEQ ID NO: 128989 - DNA, 1635 bp, Ustilago maydis 521; identical to SEQ ID NO: 127555
  CDS (1)..(1635)

SEQ ID NO: 128990 - protein, 544 aa, Ustilago maydis 521; identical to SEQ ID NO: 127556

SEQ ID NO: 128991 - DNA, 1155 bp, Desulfotalea psychrophila LSv54
  CDS (1)..(1155): transl_table=11
gtgatggtggacgttacagaggagttgcagcttcgtcgagagatatttgacaaggctcgtagggtagttgttaaggttggcagtgcaatcttaactaatgtcggtggcattcatacaagttttattgcagatcttgcccgggaaatttcttatctccgccaaagcggacatgaggttattttggtgtcatccggggctgttgctgcgggacgtaaaaaaatttcttggcaggatagtgccccgctgggcatgaaagaaaagcaggcccttgccgccattggtcaatctcatttgatgaggacctacgaagaggcctttggcttttacgagctggatgtggcccagatcctgcttacccatgccgatctttctcaccgggaccgctatctcaatatacgtaataccattcttaccctgcttaagtttggtgttacccctatcattaatgaaaatgatactgtctcggttgaagagttaaagtttggtgataatgataccctggctgctctattgaccaacctgcttgaagccgatatctgcatatgtctgacagatgtagatgccctctatgacaaaaatccccagaaagatccgacagctcgtcccctgcatattgtcacaaagatcagtccagagattgaggcaatggcggggaatagtaatagcctttttggcactggaggcatgcagagtaaaatacgtgccgccaagattgttttttcaggtggtgggacggcgataataggtcctggtcgtgctccgagagtgttacagcgtctttttgccggggaggatatcggtaccatttttcttccctgcaaagaacggatgaagagcaaaaaacagtggattgctcatgtgcttaagccaaaggggactcttttgcttgatgccggggcctgtaaggccctgttgcagggtggtaagagtttgctcccctccggtattgttggtatctccggtgaatttgatcgaggtgattctgtgaattgctgtcgtctcgatgggagtagaattgccgtcggtttggtgaactacgcctcggtggatgtgaacgccattaagggattgcagtcaagggagatagcctctgtgttgaagtgctgtgataacgaggaggttatccatcgggataatttagttattctgtcttaa

SEQ ID NO: 128992 - protein, 384 aa, Desulfotalea psychrophila LSv54; identical to SEQ ID NO: 127580

SEQ ID NO: 128993 - DNA, 1221 bp, Methanosarcina barkeri str. Fusaro; identical to SEQ ID NO: 127591
  CDS (1)..(1221): transl_table=11

SEQ ID NO: 128994 - protein, 406 aa, Methanosarcina barkeri str. Fusaro; identical to SEQ ID NO: 127592

SEQ ID NO: 128995 - DNA, 1110 bp, Trichodesmium erythraeum IMS101; identical to SEQ ID NO: 127599
  CDS (1)..(1110): transl_table=11

SEQ ID NO: 128996 - protein, 369 aa, Trichodesmium erythraeum IMS101; identical to SEQ ID NO: 127600

SEQ ID NO: 128997 - DNA, 1104 bp, Nostoc punctiforme PCC 73102; identical to SEQ ID NO: 127633
  CDS (1)..(1104): transl_table=11

SEQ ID NO: 128998 - protein, 367 aa, Nostoc punctiforme PCC 73102; identical to SEQ ID NO: 127634

SEQ ID NO: 128999 - DNA, 1107 bp, Haemophilus influenzae R2846
  CDS (1)..(1107): transl_table=11
atgaacaaaaaaacaatcgttgtgaaattcggtacaagcacgctaactcagggttcgccaaaactgaattcgccacatatgatggaaatcgttcgtcaaattgcacaattgcataatgatggatttcgtatagtgatcgtgacttctggtgcgattgcagcgggtcgtcattatttaaatcatcctcaattaccacctactatcgcctcaaagcaactgcttgcagcggttggtcaaagccaattaattcaggcttgggaaaaattatttgctatttatgatatccatatcgggcaacttttattaacccgtgcagatattgaagatcgcgaacgttttttaaatgcgcgagatactttacacgcacttttagataaccacattattcctgtgattaatgaaaatgacgcggtggcgactgcggaaattaaagtaggtgacaatgacaatttatcggcattagtcgctattcttgtgcaagcggaacagctttatttattgactgatcaacaaggtttatttgatagtgatccgcgtaaaaattctgaagcgaaattaattccaattgtagaacaaattaccgatcatattcgatcaattgcaggaggaagtggtacaaatcttggtactggtggaatgatgaccaaaatcattgctgccgatgttgcgactcgctctggaattgaaaccattattgctccaggtaatcgcccaaatgtaattgcagatcttgcttatgaaaaaaatattggtacaaaatttattgcacaccaatctgatcgattagaaagccgcaaacaatggcttttcgccgcaccatcggcaggtattattaccattgataacggtgcgcaaaatgccattcttgaacaaaataaatctttattacccgctggtattattaacgtggaagggcgtttttcgcgtggtgaagtagtcaaaatacgcactcaatcaggtaaagacattgcgctgggtatgccacgctataacagcgatgctctacaattaattaagggcagaaaatcagcagacattgagaatgttttaggctatgaatatggtgcggtggcaatgcatcgtgatgatatgattattttgtcataa

SEQ ID NO: 129000 - protein, 368 aa, Haemophilus influenzae R2846
MNKKTIVVKFGTSTLTQGSPKLNSPHMMEIVRQIAQLHNDGFRIVIVTSGAIAAGRHYLNHPQLPPTIASKQLLAAVGQSQLIQAWEKLFAIYDIHIGQLLLTRADIEDRERFLNARDTLHALLDNHIIPVINENDAVATAEIKVGDNDNLSALVAILVQAEQLYLLTDQQGLFDSDPRKNSEAKLIPIVEQITDHIRSIAGGSGTNLGTGGMMTKIIAADVATRSGIETIIAPGNRPNVIADLAYEKNIGTKFIAHQSDRLESRKQWLFAAPSAGIITIDNGAQNAILEQNKSLLPAGIINVEGRFSRGEVVKIRTQSGKDIALGMPRYNSDALQLIKGRKSADIENVLGYEYGAVAMHRDDMIILS

SEQ ID NO: 129001 - DNA, 1107 bp, Haemophilus influenzae R2866; identical to SEQ ID NO: 127637
  CDS (1)..(1107): transl_table=11

SEQ ID NO: 129002 - protein, 368 aa, Haemophilus influenzae R2866; identical to SEQ ID NO: 127638

SEQ ID NO: 129003 - DNA, 1113 bp, Crocosphaera watsonii WH 8501; identical to SEQ ID NO: 127641
  CDS (1)..(1113): transl_table=11

SEQ ID NO: 129004 - protein, 370 aa, Crocosphaera watsonii WH 8501; identical to SEQ ID NO: 127642

SEQ ID NO: 129005 - DNA, 1155 bp, Xylella fastidiosa Dixon; identical to SEQ ID NO: 127645
  CDS (1)..(1155): transl_table=11

SEQ ID NO: 129006 - protein, 384 aa, Xylella fastidiosa Dixon; identical to SEQ ID NO: 127646

SEQ ID NO: 129007 - DNA, 1113 bp, Pseudoalteromonas tunicata D2; identical to SEQ ID NO: 127671
  CDS (1)..(1113): transl_table=11

SEQ ID NO: 129008 - protein, 370 aa, Pseudoalteromonas tunicata D2; identical to SEQ ID NO: 127672

SEQ ID NO: 129009 - DNA, 1155 bp, Photobacterium sp. SKA34; identical to SEQ ID NO: 127673
  CDS (1)..(1155): transl_table=11

SEQ ID NO: 129010 - protein, 384 aa, Photobacterium sp. SKA34; identical to SEQ ID NO: 127674

SEQ ID NO: 129011 - DNA, 1140 bp, Vibrio sp. Ex25; identical to SEQ ID NO: 127687
  CDS (1)..(1140): transl_table=11

SEQ ID NO: 129012 - protein, 379 aa, Vibrio sp. Ex25; identical to SEQ ID NO: 127688

SEQ ID NO: 129013 - DNA, 1104 bp, Alteromonadales bacterium TW-7; identical to SEQ ID NO: 127691
  CDS (1)..(1104): transl_table=11

SEQ ID NO: 129014 - protein, 367 aa, Alteromonadales bacterium TW-7; identical to SEQ ID NO: 127692

SEQ ID NO: 129015 - DNA, 1251 bp, Aspergillus niger
  CDS (1)..(1251)
atggcttcaaaacgtctcacgatcgtcatcaaattagggacgagctccatcgtggatgagaacacccatgagcctatactgtctatattaaccttaattgtggagaccgccgcaaaacttcatcgcgacggacataatgttgtgctcgtttcgtccggtgctgtcggcgttggtttacggagaatggatatcgacgagaggccgaaacacttgccccgtatacaggccttggccgcggttggacaatgtagactgatgagtctttgggacggtcttttctcgcatctccgtctcccggtcgcacagatcttgttgaccagaaatgacattgcggataggacacaatatctcaatgcccaaaataccttcgcacagttattcgacatgggtgtgatccccatagtcaatgagaacgacactctcgctgtctcggaaatcaaattcggtgacaatgacacactgtcggcaataacagcagctatggtcaaagccgattacctcttcttaatgacggatgtcgactgtctatacacagctaacccacgccacaacccagatgcgaagcctatcgaggttgtcacggatatttcgtctttggaggccgatgtctcgtctgccggatcttctttagggacaggaggcatgagtaccaagattgtcgctgctaaattggggaccagtgcgggcgtgaccacaatcattaccaaaagctctaaaccgggtaatgtccatgaaattgtcagataccttcagcaaacggagcaacttggcctggagtctggagattctacgagctcgttagaattgcgcacaccgcccccactacacactcgattcattccttcgcaaaccccaattcagtcccgatctttctggctccttcatggcctgaaaccaagaggtacactatatatcgatcatggtgcttatagtgctctccagaaaaaggctggcttgctcccggcaggcgttgtgggggtggaaggtcatttcggccaacaggaagcagtgcgcttggttgtggttgagaagatctcgccagacgccctgaatggggagttcctacaccatggccaggagccgaaggaagttgggcgtgccctagtcaattacggcagcagtgaaatcgtccgcatcaagggccagagaagcacacatattcaatcactactcggttatgcagatagtgaatatgtggctcttcgagagaacatctctttcacacagagtaacgacagtccacgtcattga

SEQ ID NO: 129016 - protein, 416 aa, Aspergillus niger
MASKRLTIVIKLGTSSIVDENTHEPILSILTLIVETAAKLHRDGHNVVLVSSGAVGVGLRRMDIDERPKHLPRIQALAAVGQCRLMSLWDGLFSHLRLPVAQILLTRNDIADRTQYLNAQNTFAQLFDMGVIPIVNENDTLAVSEIKFGDNDTLSAITAAMVKADYLFLMTDVDCLYTANPRHNPDAKPIEVVTDISSLEADVSSAGSSLGTGGMSTKIVAAKLGTSAGVTTIITKSSKPGNVHEIVRYLQQTEQLGLESGDSTSSLELRTPPPLHTRFIPSQTPIQSRSFWLLHGLKPRGTLYIDHGAYSALQKKAGLLPAGVVGVEGHFGQQEAVRLVVVEKISPDALNGEFLHHGQEPKEVGRALVNYGSSEIVRIKGQRSTHIQSLLGYADSEYVALRENISFTQSNDSPRH

SEQ ID NO: 129017 - DNA, 1257 bp, Aspergillus oryzae; identical to SEQ ID NO: 127705
  CDS (1)..(1257)

SEQ ID NO: 129018 - protein, 418 aa, Aspergillus oryzae; identical to SEQ ID NO: 127706

SEQ ID NO: 129019 - DNA, 1560 bp, Cryptococcus neoformans; identical to SEQ ID NO: 127557
  CDS (1)..(1560)

SEQ ID NO: 129020 - protein, 519 aa, Cryptococcus neoformans; identical to SEQ ID NO: 127558

SEQ ID NO: 129021 - DNA, 1110 bp, Anabaena variabilis; identical to SEQ ID NO: 127763
  CDS (1)..(1110): transl_table=11

SEQ ID NO: 129022 - protein, 369 aa, Anabaena variabilis; identical to SEQ ID NO: 127764

SEQ ID NO: 129023 - DNA, 1119 bp, Carboxydothermus hydrogenoformans; identical to SEQ ID NO: 127805
  CDS (1)..(1119): transl_table=11

SEQ ID NO: 129024 - protein, 372 aa, Carboxydothermus hydrogenoformans; identical to SEQ ID NO: 127806

SEQ ID NO: 129025 - DNA, 1122 bp, Dehalococcoides ethenogenes; identical to SEQ ID NO: 127821
  CDS (1)..(1122): transl_table=11

SEQ ID NO: 129026 - protein, 373 aa, Dehalococcoides ethenogenes; identical to SEQ ID NO: 127822

SEQ ID NO: 129027 - DNA, 1122 bp, Geobacter metallireducens; identical to SEQ ID NO: 127843
  CDS (1)..(1122): transl_table=11

SEQ ID NO: 129028 - protein, 373 aa, Geobacter metallireducens; identical to SEQ ID NO: 127844

SEQ ID NO: 129029 - DNA, 1122 bp, Geobacter sulfurreducens; identical to SEQ ID NO: 127845
  CDS (1)..(1122): transl_table=11

SEQ ID NO: 129030 - protein, 373 aa, Geobacter sulfurreducens; identical to SEQ ID NO: 127846

SEQ ID NO: 129031 - DNA, 1110 bp, Gloeobacter violaceus; identical to SEQ ID NO: 127847
  CDS (1)..(1110): transl_table=11

SEQ ID NO: 129032 - protein, 369 aa, Gloeobacter violaceus; identical to SEQ ID NO: 127848

SEQ ID NO: 129033 - DNA, 1104 bp, Pasteurella multocida
  CDS (1)..(1104): transl_table=11
atgaaaatcgacaaaacactcgttgtgaaatttggaaccagtacgcttacgcaaggatcggcgaagttaaatttacctcatatgatggatattgtgcgtcagctcgcacagcttcatcaagcgggctttcgtttagtgattgtcacctcaggggcgattgcggcaggtcgtcattatttaaatcacccgcaattgccgccgacgattgcctcgaaacaattattggctgcggtaggacaaagtcagctcattcaaacgtgggaaaaattgtttgccatttatgatattcatattgggcagattttattgacccgtgccgacattgaagatcgtgaacgttttttaaatgccagagatactttgcgcgccttattagataatcagattattccagtgattaatgaaaatgacgctgtcgctacgtcagaaattaaagtaggcgataacgataatttatccgcgttagtggcgattttagtgcaagcagaacagttgtatttgcttactgatcagcaaggtttgtttgatcgtgatccgcgcaaacatccagacgccaaattgatcgccgacgtggacaaaattaccgatcatattcgcgcgattgcgggcggaagtggcacctcgttaggcacaggcggcatgtccaccaaaatcagtgccgcggatgtggcaacccgctccggcattgaaactattattgcaccgggtaatcgcccgaatgtgattgtggacttagcttatgggcaagccattggcaccaaatttagtgtgcaagcagatcgcttagaaagtcgtaaacaatggctatatgcggcgccgtcagccggtattattaccattgatgcgggggcggaaaacgcgatgttaatgcaacataaatcgttattgcctgctgggattgtgaacgtggaaggacgcttttcacgcggtgaagtggtaaaaattcgtactcagcaaggtaaggatgtcgccttagggatgccacgttataacagcgatgcactccatttaattcaaggcaaacattcgcaagatatcgaacaggttctcggttatgaatatggggcggttgcggtacaccgcgacgatatgattgtgttataa

SEQ ID NO: 129034 - protein, 367 aa, Pasteurella multocida; identical to SEQ ID NO: 127902

SEQ ID NO: 129035 - DNA, 1137 bp, Photobacterium profundum; identical to SEQ ID NO: 127905
  CDS (1)..(1137): transl_table=11

SEQ ID NO: 129036 - protein, 378 aa, Photobacterium profundum; identical to SEQ ID NO: 127906

SEQ ID NO: 129037 - DNA, 1104 bp, Salmonella paratyphi; identical to SEQ ID NO: 127949
  CDS (1)..(1104): transl_table=11

SEQ ID NO: 129038 - protein, 367 aa, Salmonella paratyphi; identical to SEQ ID NO: 127950

SEQ ID NO: 129039 - DNA, 1209 bp, Schizosaccharomyces pombe; identical to SEQ ID NO: 127951
  CDS (1)..(1209)

SEQ ID NO: 129040 - protein, 402 aa, Schizosaccharomyces pombe; identical to SEQ ID NO: 127952

SEQ ID NO: 129041 - DNA, 1119 bp, Shewanella oneidensis; identical to SEQ ID NO: 127955
  CDS (1)..(1119): transl_table=11

SEQ ID NO: 129042 - protein, 372 aa, Shewanella oneidensis; identical to SEQ ID NO: 127956

SEQ ID NO: 129043 - DNA, 1104 bp, Shigella flexneri; identical to SEQ ID NO: 127957
  CDS (1)..(1104): transl_table=11

SEQ ID NO: 129044 - protein, 367 aa, Shigella flexneri; identical to SEQ ID NO: 127958

SEQ ID NO: 129045 - DNA, 1113 bp, Thermus thermophilus; identical to SEQ ID NO: 127989
  CDS (1)..(1113): transl_table=11

SEQ ID NO: 129046 - protein, 370 aa, Thermus thermophilus; identical to SEQ ID NO: 127990

SEQ ID NO: 129047 - DNA, 1134 bp, Vibrio cholerae
  CDS (1)..(1134): transl_table=11
atgaccacaaatcaacgaagcatcaaagctccacaaacggttgttgtgaagctgggaaccagtgttctgaccggcggtactcttgcgctggatcgtgctcatatggttgagctcgctcgccagtgtgctgaactcaaaaagcaaggtcactcagtagtgatcgtgacctcgggcgccattgcggctggccgtgagcatttaggttaccctgcgctgcccaacgcgatttccagcaagcaactgctggcagcggttgggcaaagtcgtttgattcaggtctgggaatcgttatttgcgatttatggcatcaaaattggtcagatgctgctcacccgtgctgatcttgatgaccgtgagcgtttcctcaatgcgcgtgacaccatcaatgcgttagttgaaaacggcattgtgcctgtagtcaacgaaaacgatgcggtagcaaccaatgaaatcaaagtcggtgacaacgataacttatcggcgctggtcggtattttgtgtggcgcggataagctgctgctgttgaccgatcaaaaaggcttgttcaccgccgacccgcgtaaagatcccaatgcgcaactgatcaaagaagtgaccaccattgatgacacactgcgcaaaattgctggtggcagtggcactacactcggtacgggcggcatggccaccaagctgcaagcggcggacattgctcgtcgtgctggtattgaagtcatcattgcggcaggtcgtgcgcccaatgtgatttttgactccttaagtgatgagccacaaggcacgcgcttcttagctttggaagaagcgttagaaaaccgcaaacgctggattttggcaggcccagcggcatcgggtgatatcgtgattgacgatggcgcagtgaaagcggtgcaaaccaagggcagcagcttgctcgccaaaggtgtggtgcgagtgcaaggtcagttcgcccgtggtgaagtggtgcgggtactggacaagcaaagtcatctgattgcgcgcggcatcgcggcctactccaatgacgagttggcgcaaattgctggtaagcacagtaaagagatcatcgatattttaggctacgatcacggctcagaagtgatccaccgcgacgacatggtcgtgattcaagaataa

SEQ ID NO: 129048 - protein, 377 aa, Vibrio cholerae; identical to SEQ ID NO: 127998

SEQ ID NO: 129049 - DNA, 1140 bp, Vibrio parahaemolyticus; identical to SEQ ID NO: 127999
  CDS (1)..(1140): transl_table=11

SEQ ID NO: 129050 - protein, 379 aa, Vibrio parahaemolyticus; identical to SEQ ID NO: 128000

SEQ ID NO: 129051 - DNA, 1140 bp, Vibrio vulnificus; identical to SEQ ID NO: 128001
  CDS (1)..(1140): transl_table=11

SEQ ID NO: 129052 - protein, 379 aa, Vibrio vulnificus; identical to SEQ ID NO: 128002

SEQ ID NO: 129053 - DNA, 1287 bp, Saccharomyces cerevisiae
  CDS (1)..(1287)
atgaaggatgctaatgagagtaaatcgtatactatagtgatcaaattaggctcttcatcgctagtagatgaaaaaaccaaagaacctaagttagctatcatgtcgcttattgtcgaaactgtagtcaaattgagaagaatgggacacaaagttatcatcgtgtccagtggtggtattgctgttggtttgaggactatgcgtatgaataaaagaccaaaacatttagcagaagttcaggccatcgcagctattgggcagggtagattgatcgggagatgggatcttctgttttcgcaatttgatcaacgtatcgctcaaattctattgaccagaaatgatattctggactggacccaatataagaacgctcaaaacacaattaatgaattgttgaacatgggcgttattcccattgtgaatgaaaacgacacactatctgttagagaaatcaaatttggtgacaatgacactttatcagcaattacttctgctttaatccatgcagattatcttttcttactgacagatgttgactgtttgtatactgataatccaaggacaaacccagatgccatgccgatcttagttgtcccagatctctcaaagggtttgcccggtgtgaatactgctggtggttcaggttctgacgttgggaccggtggtatggaaactaaattggttgctgcagatttggcaacgaatgccggtgttcatacgttgatcatgaaaagcgatacacctgcgaatataggtagaattgtcgagtatatgcaaactctagaacttgacgatgaaaataaagttaaacaagcatataatggcgatttaacggatttgcaaaaaagagaatttgagaaattaaaggctcttaacgttccactacatacgaagttcattgctaatgataataaacaccatctaaagaatagagagttttggattttacacggtcttgtctctaaaggcgctgttgttatagaccaaggtgcgtacgcagccttaacaaggaaaaataaggcgggattattgccagcaggtgttattgatgttcagggcactttccatgagttagaatgtgttgacataaaagttggtaaaaagttaccagatggcacgttagatccagattttcccttgcaaacagtaggcaaggcaagatgcaattacacgagttctgaattaactaaaattaaaggtttgcacagtgaccaaatcgaagaggaattgggctataatgacagcgaatatgtcgctcatagagaaaatttggcattcccacctcgttga

SEQ ID NO: 129054 - protein, 428 aa, Saccharomyces cerevisiae
MKDANESKSYTIVIKLGSSSLVDEKTKEPKLAIMSLIVETVVKLRRMGHKVIIVSSGGIAVGLRTMRMNKRPKHLAEVQAIAAIGQGRLIGRWDLLFSQFDQRIAQILLTRNDILDWTQYKNAQNTINELLNMGVIPIVNENDTLSVREIKFGDNDTLSAITSALIHADYLFLLTDVDCLYTDNPRTNPDAMPILVVPDLSKGLPGVNTAGGSGSDVGTGGMETKLVAADLATNAGVHTLIMKSDTPANIGRIVEYMQTLELDDENKVKQAYNGDLTDLQKREFEKLKALNVPLHTKFIANDNKHHLKNREFWILHGLVSKGAVVIDQGAYAALTRKNKAGLLPAGVIDVQGTFHELECVDIKVGKKLPDGTLDPDFPLQTVGKARCNYTSSELTKIKGLHSDQIEEELGYNDSEYVAHRENLAFPPR

SEQ ID NO: 129055 - DNA, 27 bp, Artificial sequence
  primer
atgacaaaagcttatactatcgttatc

SEQ ID NO: 129056 - DNA, 24 bp, Artificial sequence
  primer
tcaaaattgcggagggaaagcgat

SEQ ID NO: 129057 - protein, 591 aa, Artificial sequence
  consensus sequence
  Variant (2)..(2): Xaa in position 2 is any amino acid
  Variant (4)..(4): Xaa in position 4 is any amino acid
  Variant (6)..(6): Xaa in position 6 is any amino acid
  Variant (8)..(8): Xaa in position 8 is any amino acid
  Variant (10)..(29): Xaa in position 10 to 29 is any amino acid
  Variant (30)..(37): Xaa in position 30 to 37 is any or no amino acid
  Variant (39)..(41): Xaa in position 39 to 41 is any amino acid
  Variant (43)..(47): Xaa in position 43 to 47 is any amino acid
  Variant (49)..(49): Xaa in position 49 is any amino acid
  Variant (53)..(55): Xaa in position 53 to 55 is any amino acid
  Variant (57)..(65): Xaa in position 57 to 65 is any amino acid
  Variant (66)..(66): Xaa in position 66 is any or no amino acid
  Variant (68)..(72): Xaa in position 68 to 72 is any amino acid
  Variant (73)..(78): Xaa in position 73 to 78 is any or no amino acid
  Variant (80)..(81): Xaa in position 80 to 81 is any amino acid
  Variant (84)..(84): Xaa in position 84 is any amino acid
  Variant (87)..(88): Xaa in position 87 to 88 is any amino acid
  Variant (90)..(95): Xaa in position 90 to 95 is any amino acid
  Variant (98)..(102): Xaa in position 98 to 102 is any amino acid
  Variant (103)..(105): Xaa in position 103 to 105 is any or no amino acid
  Variant (107)..(107): Xaa in position 107 is any amino acid
  Variant (112)..(112): Xaa in position 112 is any amino acid
  Variant (114)..(116): Xaa in position 114 to 116 is any amino acid
  Variant (118)..(121): Xaa in position 118 to 121 is any amino acid
  Variant (122)..(124): Xaa in position 122 to 124 is any or no amino acid
  Variant (127)..(128): Xaa in position 127 to 128 is any amino acid
  Variant (130)..(132): Xaa in position 130 to 132 is any amino acid
  Variant (134)..(139): Xaa in position 134 to 139 is any amino acid
  Variant (140)..(141): Xaa in position 140 to 141 is any or no amino acid
  Variant (143)..(144): Xaa in position 143 to 144 is any amino acid
  Variant (149)..(153): Xaa in position 149 to 153 is any amino acid
  Variant (155)..(155): Xaa in position 155 is any amino acid
  Variant (156)..(158): Xaa in position 156 to 158 is any or no amino acid
  Variant (160)..(160): Xaa in position 160 is any amino acid
  Variant (165)..(165): Xaa in position 165 is any amino acid
  Variant (169)..(175): Xaa in position 169 to 175 is any amino acid
  Variant (177)..(178): Xaa in position 177 to 178 is any amino acid
  Variant (180)..(182): Xaa in position 180 to 182 is any amino acid
  Variant (185)..(187): Xaa in position 185 to 187 is any amino acid
  Variant (189)..(192): Xaa in position 189 to 192 is any amino acid
  Variant (195)..(196): Xaa in position 195 to 196 is any amino acid
  Variant (198)..(198): Xaa in position 198 is any amino acid
  Variant (200)..(200): Xaa in position 200 is any amino acid
  Variant (201)..(201): Xaa in position 201 is any or no amino acid
  Variant (203)..(203): Xaa in position 203 is any amino acid
  Variant (204)..(204): Xaa in position 204 is any or no amino acid
  Variant (206)..(221): Xaa in position 206 to 221 is any amino acid
  Variant (222)..(226): Xaa in position 222 to 226 is any or no amino acid
  Variant (232)..(232): Xaa in position 232 is any amino acid
  Variant (235)..(236): Xaa in position 235 to 236 is any amino acid
  Variant (239)..(240): Xaa in position 239 to 240 is any amino acid
  Variant (242)..(244): Xaa in position 242 to 244 is any amino acid
  Variant (246)..(249): Xaa in position 246 to 249 is any amino acid
  Variant (251)..(254): Xaa in position 251 to 254 is any amino acid
  Variant (255)..(255): Xaa in position 255 is any or no amino acid
  Variant (257)..(269): Xaa in position 257 to 269 is any amino acid
  Variant (270)..(333): Xaa in position 270 to 333 is any or no amino acid
  Variant (335)..(335): Xaa in position 335 is any amino acid
  Variant (337)..(344): Xaa in position 337 to 344 is any amino acid
  Variant (345)..(348): Xaa in position 345 to 348 is any or no amino acid
  Variant (350)..(351): Xaa in position 350 to 351 is any amino acid
  Variant (353)..(359): Xaa in position 353 to 359 is any amino acid
  Variant (360)..(360): Xaa in position 360 is any or no amino acid
  Variant (362)..(365): Xaa in position 362 to 365 is any amino acid
  Variant (367)..(367): Xaa in position 367 is any amino acid
  Variant (370)..(371): Xaa in position 370 to 371 is any amino acid
  Variant (373)..(378): Xaa in position 373 to 378 is any amino acid
  Variant (379)..(404): Xaa in position 379 to 404 is any or no amino acid
  Variant (407)..(408): Xaa in position 407 to 408 is any amino acid
  Variant (410)..(412): Xaa in position 410 to 412 is any amino acid
  Variant (414)..(414): Xaa in position 414 is any amino acid
  Variant (416)..(416): Xaa in position 416 is any amino acid
  Variant (418)..(438): Xaa in position 418 to 438 is any amino acid
  Variant (439)..(558): Xaa in position 439 to 558 is any or no amino acid
  Variant (560)..(566): Xaa in position 560 to 566 is any amino acid
  Variant (568)..(568): Xaa in position 568 is any amino acid
  Variant (570)..(571): Xaa in position 570 to 571 is any amino acid
  Variant (573)..(574): Xaa in position 573 to 574 is any amino acid
  Variant (576)..(578): Xaa in position 576 to 578 is any amino acid
  Variant (581)..(588): Xaa in position 581 to 588 is any amino acid
  Variant (589)..(589): Xaa in position 589 is any or no amino acid
VXKXGXSXLXXXXXXXXXXXXXXXXXXXXXXXXXXXXLXXXGXXXXXVXSGAXXXGXXXXXXXXXXPXXXXXXXXXXXQXXAAXGQXXLXXXXXXLFXXXXXXXXQXLLTRXDXXXRXXXXXXXNAXXTXXXLXXXXXXXXPXXNENDXXXXXEXXXXKXGDNDXLSAXXXXXXXAXXLXXXTDXXXLXXXXPRXXPXAXXIXXVXXXXXXXXXXXXXXXXXXXXXGTGGMXTKXXAAXXAXXXGXXXXIXXXXXPXXXXXXXXXXXXXXXXXXXXXXXXXXXXXXXXXXXXXXXXXXXXXXXXXXXXXXXXXXXXXXXXXXXXXXXXXXXXXTXFXXXXXXXXXXXXRXXWXXXXXXXXGXXXXDXGAXXAXXXXXXXXXXXXXXXXXXXXXXXXXXXXXXXXLLXXGXXXVXGXFXXXXXXXXXXXXXXXXXXXXXXXXXXXXXXXXXXXXXXXXXXXXXXXXXXXXXXXXXXXXXXXXXXXXXXXXXXXXXXXXXXXXXXXXXXXXXXXXXXXXXXXXXXXXXXXXXXXXXXXXXXXXXXXXXXXXXXXXXXXXXYXXXXXXXIXGXXSXXIXXXLGXXXXXXXXXHR

SEQ ID NO: 129058 - protein, 42 aa, Artificial sequence
  protein pattern
  Variant (4)..(4): Xaa in position 4 is Asn, Ser or Thr
  Variant (8)..(8): Xaa in position 8 is any amino acid
  Variant (9)..(9): Xaa in position 9 is Ala, Ser, Thr or Val
  Variant (10)..(10): Xaa in position 10 is Ala, Gly, Ser or Thr
  Variant (11)..(11): Xaa in position 11 is any amino acid
  Variant (12)..(12): Xaa in position 12 is Ile, Leu or Met
  Variant (13)..(14): Xaa in position 13 to 14 is any amino acid
  Variant (16)..(17): Xaa in position 16 to 17 is any amino acid
  Variant (19)..(19): Xaa in position 19 is any amino acid
  Variant (20)..(20): Xaa in position 20 is any or no amino acid
  Variant (22)..(22): Xaa in position 22 is any or no amino acid
  Variant (25)..(27): Xaa in position 25 to 27 is any amino acid
  Variant (28)..(28): Xaa in position 28 is Phe or Leu
  Variant (29)..(29): Xaa in position 29 is Phe or Tyr
  Variant (30)..(30): Xaa in position 30 is Asp, Glu, Ser or Thr
  Variant (31)..(31): Xaa in position 31 is any amino acid
  Variant (32)..(32): Xaa in position 32 is Asp or Asn
  Variant (35)..(36): Xaa in position 35 to 36 is any amino acid
  Variant (37)..(37): Xaa in position 37 is Ala, Pro or Ser
  Variant (38)..(38): Xaa in position 38 is Asp, Glu, Asn or Gln
  Variant (40)..(41): Xaa in position 40 to 41 is any amino acid
  Variant (42)..(42): Xaa in position 42 is Ile, Leu or Val
DNDXLSAXXXXXXXAXXLXXLXTDXXXXXXXXPRXXXXAXXX

SEQ ID NO: 129059 - protein, 15 aa, Artificial sequence
  protein pattern
  Variant (2)..(2): Xaa in position 2 is any or no amino acid
  Variant (4)..(4): Xaa in position 4 is any or no amino acid
  Variant (9)..(9): Xaa in position 9 is Ala or Thr
  Variant (10)..(10): Xaa in position 10 is any amino acid
  Variant (11)..(11): Xaa in position 11 is Ala, Ser or Val
  Variant (12)..(13): Xaa in position 12 to 13 is any amino acid
  Variant (15)..(15): Xaa in position 15 is Ile or Leu
PXVXNENDXXXXXEX

SEQ ID NO: 129060 - protein, 17 aa, Artificial sequence
  protein pattern
  Variant (2)..(2): Xaa in position 2 is any or no amino acid
  Variant (5)..(5): Xaa in position 5 is any amino acid
  Variant (6)..(6): Xaa in position 6 is Ala, Asp, Glu, Asn, Gln or Ser
  Variant (8)..(8): Xaa in position 8 is Ile, Leu, Met or Val
  Variant (9)..(13): Xaa in position 9 to 13 is any amino acid
  Variant (14)..(14): Xaa in position 14 is Phe or Tyr
  Variant (15)..(15): Xaa in position 15 is any amino acid
LXLTXXDXXXXXXXXNA

SEQ ID NO: 129061 - protein, 19 aa, Artificial sequence
  protein pattern
  Variant (6)..(6): Xaa in position 6 is any amino acid
  Variant (9)..(9): Xaa in position 9 is Ile or Leu
  Variant (10)..(10): Xaa in position 10 is any amino acid
  Variant (13)..(13): Xaa in position 13 is Asp, Glu, Lys or Arg
  Variant (14)..(14): Xaa in position 14 is any amino acid
  Variant (15)..(15): Xaa in position 15 is Ala or Gly
  Variant (16)..(18): Xaa in position 16 to 18 is any amino acid
GTGGMXTKXXAAXXXXXXG

SEQ ID NO: 129062 - protein, 24 aa, Artificial sequence
  protein pattern
  Variant (2)..(2): Xaa in position 2 is His, Lys or Arg
  Variant (3)..(4): Xaa in position 3 to 4 is any amino acid
  Variant (6)..(7): Xaa in position 6 to 7 is any amino acid
  Variant (8)..(8): Xaa in position 8 is any or no amino acid
  Variant (10)..(10): Xaa in position 10 is any amino acid
  Variant (11)..(11): Xaa in position 11 is any or no amino acid
  Variant (13)..(13): Xaa in position 13 is Ser or Thr
  Variant (16)..(16): Xaa in position 16 is Ala, Gly or Ser
  Variant (17)..(17): Xaa in position 17 is Ile or Val
  Variant (18)..(18): Xaa in position 18 is Ala or Gly
  Variant (19)..(19): Xaa in position 19 is any amino acid
  Variant (21)..(23): Xaa in position 21 to 23 is any amino acid
  Variant (24)..(24): Xaa in position 24 is Ile, Leu, Met or Val
LXXXGXXXVXXVXSGXXXXGXXXX

SEQ ID NO: 129063 - protein, 16 aa, Artificial sequence
  protein pattern
  Variant (2)..(2): Xaa in position 2 is Ala or Leu
  Variant (3)..(3): Xaa in position 3 is any amino acid
  Variant (6)..(6): Xaa in position 6 is Ile, Leu or Val
  Variant (9)..(10): Xaa in position 9 to 10 is any amino acid
  Variant (12)..(12): Xaa in position 12 is Ile or Met
  Variant (13)..(14): Xaa in position 13 to 14 is any amino acid
  Variant (15)..(15): Xaa in position 15 is Trp or Tyr
  Variant (16)..(16): Xaa in position 16 is Ala, Asp, Glu, Asn, Gln or Ser
QXXAAXGQXXLXXXXX

SEQ ID NO: 129064 - protein, 9 aa, Artificial sequence
  protein pattern
  Variant (2)..(2): Xaa in position 2 is Ile or Val
  Variant (4)..(4): Xaa in position 4 is Phe, Ile or Leu
  Variant (6)..(6): Xaa in position 6 is Ser or Thr
  Variant (8)..(8): Xaa in position 8 is any amino acid
  Variant (9)..(9): Xaa in position 9 is Ile or Leu
VXKXGXSXX

SEQ ID NO: 129065 - DNA, 1383 bp, Saccharomyces cerevisiae; identical to SEQ ID NO: 14245
  CDS (1)..(1383)

SEQ ID NO: 129066 - protein, 460 aa, Saccharomyces cerevisiae; identical to SEQ ID NO: 14246

SEQ ID NO: 129067 - DNA, 1329 bp, Arabidopsis thaliana; identical to SEQ ID NO: 14175
  CDS (1)..(1329)

SEQ ID NO: 129068 - protein, 442 aa, Arabidopsis thaliana; identical to SEQ ID NO: 14176

SEQ ID NO: 129069 - DNA, 1290 bp, Nasonia vitripennis; identical to SEQ ID NO: 14179
  CDS (1)..(1290)

SEQ ID NO: 129070 - protein, 429 aa, Nasonia vitripennis; identical to SEQ ID NO: 14180

SEQ ID NO: 129071 - DNA, 1968 bp, Magnaporthe grisea 70-15
  CDS (1)..(1968)
atggacgcaaggccacaacgtccctcccgtgctggagccctccagccgtctggcaacgagaacattgcaccggtcaaacaagttttgcatcagcgtcataagtcggccgggaatctgaagaccatctacaacccagctactgcgttcccggcaggtggtctcaacgttgcaccaaagcgagctgtcttcggcgagatgaacacgaacgccaagagcgcagctcaggatctgccctcaaagaaggcatccatggctccagtggtttcccatgtgggcaaggagaactctggtaaaccagcagctttgcaaaagcctgcacaacgatcgagtaaaagctacgcgatgctgcaccagcagccatccgcagctgatacccacggcgctgcacttcgcaaggccacggccgatgtactcactaagcctcaagtgaccaagaagaccactttcgtataccaagacacgactgctgcacaactcctgcccgagccgaatcagcatatgattgctgatcacccagtaatactcccaaagcccgacataatcaagaatccccgccattacaaaagccagcctcaacttaagccgaatcagcccgtcctccgccgaactcttagcagacagttcgccgaggtggcgagcttgatctcgtcagctctggcggaagaggcccaagatccaccatatgaggatgcgttggaagagattgccgacatcaatgggtcaaggggcgttccaatcaacatactaggtgactacatggaggagccaaacattgagattatctcgcatgatgctatagatgactaccccttggaggagcacgtcccagcaccgccaaccgcattcgagtccgaagacgggtgggaggaggaggacggcgatatggatgacgagcaaggttataccactgcccattcttaccgatcccatggcgaaaacaccacgggggggctcactgaactcctggcccccaaggcaacggccagagtgcaacaggaactggagcaggccaaagcaatcgtcgaggagtcgaggactattgaagaaatcgaagaggagcaatgggatgtcagcatggtggcagagtatggagaagagatctttgagtacatgcgcgagctcgagacccgtatgactcccgaccctcactacatggacatccaaacagagatacagtggtccatgcgctcagtcctgatcgattgggtcgttcaggttcaccaccgattcacgctcctccccgaaactctcttcctatgtgtcaactacatcgaccggttcctgtcacagaaggtcgtttccgttgccaagttgcaacttgtcggagccacggccatattcatcgcggccaagtacgaggagatcaactgcccctcggtcaatgagataatattcatggtcgacaacggcttctctgccgatgagattctcaaggctgagcgttttatgctcagcatgttacaattcgagcttgggtggcccggtcccatgagcttcttgcgccgaatcagcaaggccgatgactacgacctggagaccaggactctggcgaagtacttcctcgaagttactatcatggacgagagatttgttggctgcccgccaagcttcctggcagctggagcacactgcctctctcgaatgattcttgagaagggtgactgggcccacacctactggtcgggctacacctggtctcagctcaggccactggtggcgttgctatttgactgctgccagtaccccgagaagcaccatcaagccgtgtttgaaaagtactgcgaccgccgctataagggtgcgtcaacgtttgtccagagggccatcgcgcgcggctggacgccgcctttccccatccagcagccattcgttttggacgcaaactgcttcgcagagaccattgcctcatgcaggaacttctcttcaatggaagtgggacgcatgatggccaccgcgacgcaagcataa

SEQ ID NO: 129072 - protein, 655 aa, Magnaporthe grisea 70-15
MDARPQRPSRAGALQPSGNENIAPVKQVLHQRHKSAGNLKTIYNPATAFPAGGLNVAPKRAVFGEMNTNAKSAAQDLPSKKASMAPVVSHVGKENSGKPAALQKPAQRSSKSYAMLHQQPSAADTHGAALRKATADVLTKPQVTKKTTFVYQDTTAAQLLPEPNQHMIADHPVILPKPDIIKNPRHYKSQPQLKPNQPVLRRTLSRQFAEVASLISSALAEEAQDPPYEDALEEIADINGSRGVPINILGDYMEEPNIEIISHDAIDDYPLEEHVPAPPTAFESEDGWEEEDGDMDDEQGYTTAHSYRSHGENTTGGLTELLAPKATARVQQELEQAKAIVEESRTIEEIEEEQWDVSMVAEYGEEIFEYMRELETRMTPDPHYMDIQTEIQWSMRSVLIDWVVQVHHRFTLLPETLFLCVNYIDRFLSQKVVSVAKLQLVGATAIFIAAKYEEINCPSVNEIIFMVDNGFSADEILKAERFMLSMLQFELGWPGPMSFLRRISKADDYDLETRTLAKYFLEVTIMDERFVGCPPSFLAAGAHCLSRMILEKGDWAHTYWSGYTWSQLRPLVALLFDCCQYPEKHHQAVFEKYCDRRYKGASTFVQRAIARGWTPPFPIQQPFVLDANCFAETIASCRNFSSMEVGRMMATATQA

SEQ ID NO: 129073 - DNA, 1902 bp, Gibberella zeae PH-1
  CDS (1)..(1902)
atggacgccaagccttttagaccgcgcggcgccgaaaatgcacctcatcttcaacaacaacacaagtcaacgggaaatctggccaacatggccaagtccaccacagcagctgggttccgtgggcctgctaagcgagcagcgttcggcgatgtgaccaacgttagcaagcaaatcggacacactcgtgatgacggcaaatcaatcaaagtctacgctacgaatggtgtcagtcatggacttacaggcgtgcccgtgagcaaagagaacggtgcctacggcaaggaagccttctcccgtcccgctcaaagaatcgccaaccaagcatcaacacgaaccgcactcgaaaacaaaaactttgacgcgaacaagaagccttatgtgaggaaggatggccacgttgccaccaaacctcctgctccttcttcggtccagaatgcgccttccctccaacccagacatcacaagagtcagcctcagctcaagcctcaacagcagccgaacagtctacggcgcacacagagcaagcagctcgacaaggtcgtgcccaagccagatgccgatacgggccacaaggcgacgaatcctgcgggattccagcttcaggagacagaatatccctatgaccacgctgcgtatcttgactccatgtatctgcctattgaagctggtgccccccttgatgtgctccaaaaggaggagtacccggagctacctgccaaacttcccgaaatttctgaagatgatgctgccatccattctttcgaagaagcccacatgcccgccatgtcagaacctgaagaatgctgggaagaggatgaggatgaggattatgacgaccaggaccaagcatacacaacagcgcactcggttcgttcccgagatatgactgctggtggtgctacagagattgatcctctaccgcgtgtaacagcgcgagtccagcgcgaactcgaagacgcccgtgaggaggtggagcgaactcgcactacagacgagatcgaagaggagatgtgggatgttagcatggttgccgagtatggcgacgagatttttgagtatatgcgcgagctcgagatcaagatgctccccaacgcccattatatggatgaccagaccgagattcaatggtcaatgcgatctgttcttatggattggcttgtgcaggtccataaccgtttcggtctcttacctgaaactcttttcctgactgtcaactatatcgaccgtttcctttcccagaagatcgtgtcgattggcaagcttcaactcgtcggcgcgacagccatcttggtcgcctccaaatacgaagagattaactgtccttctctaggggagattgtatacatggtcgacaatgggtacaccgcggaagaagtcctcaaggccgagcgctttatgcttagtatgctgagcttcgagctgggctggcctggccccatgagctttttgcgacgcgtcagcaaggctgatgactatgacttggacactcgtactctcgcgaaatatttcctcgagttgaccatcatggacgagcgtttcgtggcttcacccccgagcttccttgctgcgggtgcgcactgcctttcacgactcattctcaagaagggtgactggactaagcagcatgtctactactcgggctatacttggggtcagttgaagagcctggttacgatgatgatcgaatgctgtgatcgtcctcacctacaccatgccgcagtgttcgacaagtacacagaccgtcggtacaaggaagcatctttgttggtgcagtcagcacttgatgccgggttcactcttcctcaccaagtggcacctgttcgtcaagagcttgacgcctaccgtgaagacagtgctgaattgcccattgcgcagcctcagctcattcccatcgagggttga

SEQ ID NO: 129074 - protein, 633 aa, Gibberella zeae PH-1
MDAKPFRPRGAENAPHLQQQHKSTGNLANMAKSTTAAGFRGPAKRAAFGDVTNVSKQIGHTRDDGKSIKVYATNGVSHGLTGVPVSKENGAYGKEAFSRPAQRIANQASTRTALENKNFDANKKPYVRKDGHVATKPPAPSSVQNAPSLQPRHHKSQPQLKPQQQPNSLRRTQSKQLDKVVPKPDADTGHKATNPAGFQLQETEYPYDHAAYLDSMYLPIEAGAPLDVLQKEEYPELPAKLPEISEDDAAIHSFEEAHMPAMSEPEECWEEDEDEDYDDQDQAYTTAHSVRSRDMTAGGATEIDPLPRVTARVQRELEDAREEVERTRTTDEIEEEMWDVSMVAEYGDEIFEYMRELEIKMLPNAHYMDDQTEIQWSMRSVLMDWLVQVHNRFGLLPETLFLTVNYIDRFLSQKIVSIGKLQLVGATAILVASKYEEINCPSLGEIVYMVDNGYTAEEVLKAERFMLSMLSFELGWPGPMSFLRRVSKADDYDLDTRTLAKYFLELTIMDERFVASPPSFLAAGAHCLSRLILKKGDWTKQHVYYSGYTWGQLKSLVTMMIECCDRPHLHHAAVFDKYTDRRYKEASLLVQSALDAGFTLPHQVAPVRQELDAYREDSAELPIAQPQLIPIEG

SEQ ID NO: 129075 - DNA, 1401 bp, Candida glabrata CBS 138; identical to SEQ ID NO: 14185
  CDS (1)..(1401)

SEQ ID NO: 129076 - protein, 466 aa, Candida glabrata CBS 138; identical to SEQ ID NO: 14186

SEQ ID NO: 129077 - DNA, 1332 bp, Candida glabrata CBS 138; identical to SEQ ID NO: 14187
  CDS (1)..(1332)

SEQ ID NO: 129078 - protein, 443 aa, Candida glabrata CBS 138; identical to SEQ ID NO: 14188

SEQ ID NO: 129079 - DNA, 1335 bp, Kluyveromyces lactis NRRL Y-1140; identical to SEQ ID NO: 14189
  CDS (1)..(1335)

SEQ ID NO: 129080 - protein, 444 aa, Kluyveromyces lactis NRRL Y-1140; identical to SEQ ID NO: 14190

SEQ ID NO: 129081 - DNA, 1620 bp, Kluyveromyces lactis NRRL Y-1140; identical to SEQ ID NO: 98459
  CDS (1)..(1620)

SEQ ID NO: 129082 - protein, 539 aa, Kluyveromyces lactis NRRL Y-1140; identical to SEQ ID NO: 98460

SEQ ID NO: 129083 - DNA, 1422 bp, Debaryomyces hansenii CBS767; identical to SEQ ID NO: 14191
  CDS (1)..(1422)

SEQ ID NO: 129084 - protein, 473 aa, Debaryomyces hansenii CBS767; identical to SEQ ID NO: 14192

SEQ ID NO: 129085 - DNA, 1293 bp, Yarrowia lipolytica CLIB122; identical to SEQ ID NO: 14193
  CDS (1)..(1293)

SEQ ID NO: 129086 - protein, 430 aa, Yarrowia lipolytica CLIB122; identical to SEQ ID NO: 14194

SEQ ID NO: 129087 - DNA, 1461 bp, Candida albicans SC5314; identical to SEQ ID NO: 14199
  CDS (1)..(1461): transl_table=12

SEQ ID NO: 129088 - protein, 486 aa, Candida albicans SC5314; identical to SEQ ID NO: 14200

SEQ ID NO: 129089 - DNA, 1314 bp, Tribolium castaneum
  CDS (1)..(1314)
atggcatcgataagaattcaccaggaccaggaaaaccgggtgccggaattgcgccgaaaaccgggaacgactgcccagcaaaaacggggcgttctgggcgagattgacagtaataaagttaataacgcagcccttaaaggaaaacagacgaagaagccaaccgttttgggaaaccgggtggaaaatgggcaaaaaaacgagaataagaagaatgtcgtggttccggtggcccagtttgaggcgtttactgtgtatgaggatgatgaatacagagcgagaatcgatgaaaggctcaaacttatcagtaagagtaatgtgtataaagggacggccgaggacaggtttatcacgaagacagaacttgccgaaattgaaaggaaaaagaatttggagaaattgaaggaaattactgcgcctcaacttaagagaaaatcggagattccgatgagcattgagaaatcagatgtggagaacattgagctcaaagagcaaacggtttccacaagtaccaatgctagagatgtcttttttgaaatggaggagtatagggatagcatttttgcttatctcaaagaacatgagctgcgacatcggccaaaacccggctacatcgtgaaacagcctgacgtaactgaaaacatgcgtgctgttttgatcgattggcttgtcgaagttactgaagagtacggtatgcaaacggaaaccctttatttggccgtaaatttcatcgaccgatttttaagttacatgtctgtagttagggccaaattgcaacttgtgggtacagctgcaatgtttattgcttctaaatacgaggaaatttttccaccagaagtcagcgaattcgtgtacatcactgacgacacttacgacaaacaccaaatgattagaatggaacagttaattctgagggtgttgggcttcgatttgtcggtgcccacaccacttactttcctaaacgccatttgcatttccacaaaacaaaccgaaaaagtgaagaatctcgcgatgtatttaagcgaatcggcgcttctggaggtcgaaccgtatttacagtttttgccgtcagttgtcgcgtcgtcggcgatagctctcagcagacacactttgggcgaagaagcgtggcctggcgacttgcaaaaatacacaggatataatttgaaaaaattagaatcttgtattggattcttgtataaaatgttcgccaaagcgccatctaatccacaacacgccattcgggacaagtacaaggcgccaaagtatatgcaagtttctaagattagtcccagcggtgagatgatttcgttcgattaa

SEQ ID NO: 129090 - protein, 437 aa, Tribolium castaneum
MASIRIHQDQENRVPELRRKPGTTAQQKRGVLGEIDSNKVNNAALKGKQTKKPTVLGNRVENGQKNENKKNVVVPVAQFEAFTVYEDDEYRARIDERLKLISKSNVYKGTAEDRFITKTELAEIERKKNLEKLKEITAPQLKRKSEIPMSIEKSDVENIELKEQTVSTSTNARDVFFEMEEYRDSIFAYLKEHELRHRPKPGYIVKQPDVTENMRAVLIDWLVEVTEEYGMQTETLYLAVNFIDRFLSYMSVVRAKLQLVGTAAMFIASKYEEIFPPEVSEFVYITDDTYDKHQMIRMEQLILRVLGFDLSVPTPLTFLNAICISTKQTEKVKNLAMYLSESALLEVEPYLQFLPSVVASSAIALSRHTLGEEAWPGDLQKYTGYNLKKLESCIGFLYKMFAKAPSNPQHAIRDKYKAPKYMQVSKISPSGEMISFD

SEQ ID NO: 129091 - DNA, 1377 bp, Hemicentrotus pulcherrimus
  CDS (1)..(1377)
atggccttctcaattggtaattcaaacgctagtgatattatggcgaatatggcacaaggaggacaacagtttggaaaaaaaaccaagcgagatgacaataccagcagaaacggaccacaggcttgcaaaagggcggcattgggaacgataacgaacgtttcatcaacaagagtacaaccatctcgagcggcaaagcattttagggtctctggagagaactcttttcctgtgtttcaagatgagaatgcacactctaggataccacagggcaagccattcggcattccatcagcgggcgcagcaccagccttttctattcacgtcgacacaacatcatcctacgtgcaatcaagtacatcaacatcaattaagagcacggacaaagaaaacgaacacattttgttggacaatgctctgtcactaccagtacctcaagctcaaaggattcccctgagaacattccctgatgtagaagataacaatgtcagtctcaatgaagaaagtttaacatcgtcagaattctctcctatgctgcttgatacatctctggatgcaaagtgcatatcaccccgaacagtagatataagagacttatccttaggagaaccagaatatgcagaggagatatatcagtacttgaagactgcagagtcaaagcacagacccaagcacgggtacatgaggaaacagccagacatcaccaacagcatgcgttgcatcctagtcgactggttggtcgaggtatcggaagaataccgtcttcacaacgagactctctacctggctgcggccttcatcgatagattcctttcacagatgagtgtactgagggcaaagctacagctggtcggcacagccagcatgttcgtagcctctaaatacgaggagatctacccacccgatgtgaaggagttcgtctacatcaccgacgacacctactccatcaagcaggtccttcgaatggagcacctgatcctcaaggtcttgtcctttgacctggccgcacccaccatcaactctttcttgccgaggttcatcaaagcagcgcaggcaaactcaaagacggaacatctcacgcagtaccttgctgagttgactctacaggagtacgacttcatcaagtatgccccatcgatgattgctgcatcagcagtctgccttgccaaccacaccctcaacaacgaagaatggaccccaaccatggcccactacactgactaccagctgggtgacatctatccctgtgtgcaagatcttcatcagctcttcatcaaggcacccaccatggaacaacaggctgtcagggagaagtacaagtctcaaaagtacagcggagcttccatgacaccagtccctaccactctccccacacaatga

SEQ ID NO: 129092 - protein, 458 aa, Hemicentrotus pulcherrimus
MAFSIGNSNASDIMANMAQGGQQFGKKTKRDDNTSRNGPQACKRAALGTITNVSSTRVQPSRAAKHFRVSGENSFPVFQDENAHSRIPQGKPFGIPSAGAAPAFSIHVDTTSSYVQSSTSTSIKSTDKENEHILLDNALSLPVPQAQRIPLRTFPDVEDNNVSLNEESLTSSEFSPMLLDTSLDAKCISPRTVDIRDLSLGEPEYAEEIYQYLKTAESKHRPKHGYMRKQPDITNSMRCILVDWLVEVSEEYRLHNETLYLAAAFIDRFLSQMSVLRAKLQLVGTASMFVASKYEEIYPPDVKEFVYITDDTYSIKQVLRMEHLILKVLSFDLAAPTINSFLPRFIKAAQANSKTEHLTQYLAELTLQEYDFIKYAPSMIAASAVCLANHTLNNEEWTPTMAHYTDYQLGDIYPCVQDLHQLFIKAPTMEQQAVREKYKSQKYSGASMTPVPTTLPTQ

SEQ ID NO: 129093 - DNA, 1738 bp, Candida albicans; identical to SEQ ID NO: 14209
  CDS (164)..(1687): transl_table=12

SEQ ID NO: 129094 - protein, 507 aa, Candida albicans; identical to SEQ ID NO: 14210

SEQ ID NO: 129095 - DNA, 1926 bp, Aspergillus oryzae; identical to SEQ ID NO: 14211
  CDS (1)..(1926)

SEQ ID NO: 129096 - protein, 641 aa, Aspergillus oryzae; identical to SEQ ID NO: 14212

SEQ ID NO: 129097 - DNA, 1962 bp, Neurospora crassa; identical to SEQ ID NO: 14223
  CDS (1)..(1962)

SEQ ID NO: 129098 - protein, 653 aa, Neurospora crassa; identical to SEQ ID NO: 14224

SEQ ID NO: 129099 - DNA, 1380 bp, Pneumocystis carinii; identical to SEQ ID NO: 14225
  CDS (1)..(1380)

SEQ ID NO: 129100 - protein, 459 aa, Pneumocystis carinii; identical to SEQ ID NO: 14226

SEQ ID NO: 129101 - DNA, 1290 bp, Arabidopsis thaliana
  CDS (1)..(1290)
atggttaatccagaggagaacaatcgtaatctcgttgtcaaacccattacagagattcttcaagatgatgataagagaagcagaaaattcggtgtagagatgaagagacagaacaggagagcattgggtgtgattaatcacaatctcgttggtgcaaaagcttatccttgtgttgttaacaagagaagaggcttatctcagagaaaacaagaaagctgtgacaagaagaagcttgattcattgcatccgtcaatttcaagatctcaggaagagactaagaagctgaaaccaagtggaaacgagtttggtgattgcatattcattgatgaagaagaggagaagaatgaagaagttacattggaccaacctatgccaatgtcattggaggaaccatacattgaatttgatccaatggaggaagaagttgagatggaggatatggaagaagaacaagaagaaccagttttggatatagacgaatacgatgcaaacaactctcttgcagctgttgaatacgtccaagatctttacgatttctaccgtaaaaccgagagatttagctgtgttcctctagattacatggcgcaacagtttgatatatctgacaaaatgagagcaatacttattgactggctcatcgaggtacatgataagtttgagctgatgaacgagacattgtttctaacagtcaatctgatagatagattcttgtccaagcaagctgttgcaagaaagaagcttcagcttgttggtttagttgcattgctcttagcttgcaagtacgaagaggtttcagtacctattgttgaagatttggtagtcatttcggacaaagcttatacgaggaccgatgttttagaaatggagaagattatgcttagtactttgcaattcaatatgtcgttaccaacgcaataccctttcttgaagaggttcctcaaggcagctcaatcagacaagaagcttgagatcttggcgtcgttcttgattgagcttgctcttgtggactacgaaatggttcggtatccaccatcgttactcgccgccactgccgtgtacacagctcaatgtacaatccatggcttcagtgaatggaacagcacttgtgaattccattgtcactactctgagaatcaactcctagaatgttgtagaagaatggtgagactacatcagaaagctgggactgataaactaacaggagtacatagaaaatacagctcctccaaattcggatacatagcaacaaagtatgaagctgcacactttcttgtgtcagattctcactaa

SEQ ID NO: 129102 - protein, 429 aa, Arabidopsis thaliana
MVNPEENNRNLVVKPITEILQDDDKRSRKFGVEMKRQNRRALGVINHNLVGAKAYPCVVNKRRGLSQRKQESCDKKKLDSLHPSISRSQEETKKLKPSGNEFGDCIFIDEEEEKNEEVTLDQPMPMSLEEPYIEFDPMEEEVEMEDMEEEQEEPVLDIDEYDANNSLAAVEYVQDLYDFYRKTERFSCVPLDYMAQQFDISDKMRAILIDWLIEVHDKFELMNETLFLTVNLIDRFLSKQAVARKKLQLVGLVALLLACKYEEVSVPIVEDLVVISDKAYTRTDVLEMEKIMLSTLQFNMSLPTQYPFLKRFLKAAQSDKKLEILASFLIELALVDYEMVRYPPSLLAATAVYTAQCTIHGFSEWNSTCEFHCHYSENQLLECCRRMVRLHQKAGTDKLTGVHRKYSSSKFGYIATKYEAAHFLVSDSH

SEQ ID NO: 129103 - DNA, 1281 bp, Patella vulgata
  CDS (1)..(1281)
atgtctatggttcacgggagttcgtttcaaattgcacaggacggtgaaaatgagaatcaaggtgttcaaagagtgaaaaaagctggattgactgcccgtggaaatgtagcagttgccaaacgatcagcactgggaacaataacgaaccaaaatattagagtacaaccatcaagggccgcaaagtcgggtaatgcagattgccaggatgaaaatgtttttgcaaaacagaagtcttttggatctagtaacaatgaaaacaaaggatttaaaattcatgttgatgaaccaacagtacaggtactcacaactgctacattgaaaactacaagacaaagtgaagacgaagacataaaattaaatgaccaagtgacatctttaccatctttacaagcattagaagacatccaagtagacaatgagaatggctcgcccatggtattggatgttactattgaagatgcagaaaagaaacccattgatagagaagctattatcctttcagttccagaatatgcagaagatatttataagcatctaagagaagcagagtcgagacaccgttctaagcccggctacatgaagaaacaaccagatataacaaattctatgagaagtattttggttgactggatggttgaagtttcggaagaatataaattacatcgagaaacccttttcctagctataaattatattgacagattcctctcacaaatgtctgtattaagaggcaaattacaacttgttggagcagctagtatgtttattgcatcgaaatatgaagaaatttacccaccagaggtttccgagtttgtatacattactgatgatacctatgaacagaaacaagtcctccgtatggaacatttaatattgaaggtcttgtcatttgatgtagctcaacctacgataaactggtttaccgatacctacgcaaaaatggctgatactgatgaaacaacgaaatctttatctatgtatttatctgaactaacattagtggatgccgacccttatttaaaatatttacccagtacaattgcagcagcatctttatgtttagcaaatatcacattaggcagtgaaccatggccttcaagtttagccaaagaatcaaagtatgaaattagtgaattttctgaatgtttacaagaaatgtatcagacatatttaaatgcaccaaatcatccacaacaagccattagagaaaaatacaagtcatcaaaatatcaacaggtatcatctatcagtcctccctccagtttgtccttcaccatgtag

SEQ ID NO: 129104 - protein, 426 aa, Patella vulgata
MSMVHGSSFQIAQDGENENQGVQRVKKAGLTARGNVAVAKRSALGTITNQNIRVQPSRAAKSGNADCQDENVFAKQKSFGSSNNENKGFKIHVDEPTVQVLTTATLKTTRQSEDEDIKLNDQVTSLPSLQALEDIQVDNENGSPMVLDVTIEDAEKKPIDREAIILSVPEYAEDIYKHLREAESRHRSKPGYMKKQPDITNSMRSILVDWMVEVSEEYKLHRETLFLAINYIDRFLSQMSVLRGKLQLVGAASMFIASKYEEIYPPEVSEFVYITDDTYEQKQVLRMEHLILKVLSFDVAQPTINWFTDTYAKMADTDETTKSLSMYLSELTLVDADPYLKYLPSTIAAASLCLANITLGSEPWPSSLAKESKYEISEFSECLQEMYQTYLNAPNHPQQAIREKYKSSKYQQVSSISPPSSLSFTM

SEQ ID NO: 129105 - DNA, 1248 bp, Schizosaccharomyces pombe; identical to SEQ ID NO: 14235
  CDS (1)..(1248)

SEQ ID NO: 129106 - protein, 415 aa, Schizosaccharomyces pombe; identical to SEQ ID NO: 14236

SEQ ID NO: 129107 - DNA, 1476 bp, Saccharomyces cerevisiae; identical to SEQ ID NO: 14241
  CDS (1)..(1476)

SEQ ID NO: 129108 - protein, 491 aa, Saccharomyces cerevisiae; identical to SEQ ID NO: 14242

SEQ ID NO: 129109 - DNA, 1449 bp, Schizosaccharomyces pombe; identical to SEQ ID NO: 14243
  CDS (1)..(1449)

SEQ ID NO: 129110 - protein, 482 aa, Schizosaccharomyces pombe; identical to SEQ ID NO: 14244

SEQ ID NO: 129111 - DNA, 1284 bp, Saccharomyces cerevisiae; identical to SEQ ID NO: 14171
  CDS (1)..(1284)

SEQ ID NO: 129112 - protein, 427 aa, Saccharomyces cerevisiae; identical to SEQ ID NO: 14172

SEQ ID NO: 129113 - DNA, 1248 bp, Glycine max
  CDS (1)..(1248)
atggagggctcaaaggaaaaccgtgtgcctccgcttccgctcataccctcttcgaatcttcaacaaggcggtggtccaagaatgaagcgcctactccatcaccatcaccggctgcctctcggcaacatcagtcagaatgttatgcctcattctcatgtcaacaaactagatcttgcccgcaagtttacgccacacacagttcagcaccacttccctcagccacatccacagcctcaagaaaataagaaacagaaccttttggccccgaccccgagttaccagttagattgtgatatcgtagatattgatgacgacgatggggatggcagtgatgatgccgttccggtatttgtcaagcacactgaagccatgcttgacgaaattgacaagatagaggaagttgaaatggaagatgtagaggaggaacctgttttggacatcgatgcctgtgataggaaagatacactggcagtggttgagtacatagatgatatatacagtttctacaaggacattgagaattcgagctgtgtctctccaaattacatgactagtcaacttgacattaatgagaggatgagggcaattcttattgactggcttattgaggttcactacaaatttgagcttttggaggagacgttgttccttactgtcaatctcatagacaggttcttggagcgtcaggcagtgatcagaaagaaacttcagttagttggtgtaacagccatgctaatagcttgtaagtatgaggaggtctcagttcctaccgttgaggattttattctcataacagacaaggcatatacaagaaatgaagttttagatatggagaaattaatgatgaacatcttgcaattcaagttgtctgtgcctactccatacatgttcatgagaagatttcttaaggcagctcattctgataaaaagctggagctcttgtccttcttcttggtcgagctttgcttggtagaatgcaaaatgctgaagttttcaccatctttgctggctgctgcagccatttacacagctcaatgtagtctgtaccagtttaagcaatggactaagactaccgagtggtacactgattactcagaagagaaacttcttgaatgctcaaggctgatggttactttccatcagaaagctggatcggggaaactcacaggtgtatatagaaagtacaatacatggaagtatggctgtgccgcgaaaatagaaccagccctgtttctactggataattaa

SEQ ID NO: 129114 - protein, 415 aa, Glycine max
MEGSKENRVPPLPLIPSSNLQQGGGPRMKRLLHHHHRLPLGNISQNVMPHSHVNKLDLARKFTPHTVQHHFPQPHPQPQENKKQNLLAPTPSYQLDCDIVDIDDDDGDGSDDAVPVFVKHTEAMLDEIDKIEEVEMEDVEEEPVLDIDACDRKDTLAVVEYIDDIYSFYKDIENSSCVSPNYMTSQLDINERMRAILIDWLIEVHYKFELLEETLFLTVNLIDRFLERQAVIRKKLQLVGVTAMLIACKYEEVSVPTVEDFILITDKAYTRNEVLDMEKLMMNILQFKLSVPTPYMFMRRFLKAAHSDKKLELLSFFLVELCLVECKMLKFSPSLLAAAAIYTAQCSLYQFKQWTKTTEWYTDYSEEKLLECSRLMVTFHQKAGSGKLTGVYRKYNTWKYGCAAKIEPALFLLDN

SEQ ID NO: 129115 - DNA, 1374 bp, Glycine max; identical to SEQ ID NO: 14259
  CDS (1)..(1374)

SEQ ID NO: 129116 - protein, 457 aa, Glycine max; identical to SEQ ID NO: 14260

SEQ ID NO: 129117 - DNA, 24 bp, Artificial sequence
  primer
atgatgcttgaagggtatacggta

SEQ ID NO: 129118 - DNA, 25 bp, Artificial sequence
  primer
ttaggcttctgtcgaaacaatccat

SEQ ID NO: 129119 - protein, 269 aa, Artificial sequence
  consensus sequence
  Variant (2)..(2): Xaa in position 2 is any amino acid
  Variant (5)..(7): Xaa in position 5 to 7 is any amino acid
  Variant (9)..(15): Xaa in position 9 to 15 is any amino acid
  Variant (17)..(20): Xaa in position 17 to 20 is any amino acid
  Variant (22)..(24): Xaa in position 22 to 24 is any amino acid
  Variant (27)..(27): Xaa in position 27 is any amino acid
  Variant (28)..(29): Xaa in position 28 to 29 is any or no amino acid
  Variant (31)..(36): Xaa in position 31 to 36 is any amino acid
  Variant (37)..(37): Xaa in position 37 is any or no amino acid
  Variant (39)..(40): Xaa in position 39 to 40 is any amino acid
  Variant (42)..(42): Xaa in position 42 is any amino acid
  Variant (45)..(47): Xaa in position 45 to 47 is any amino acid
  Variant (49)..(51): Xaa in position 49 to 51 is any amino acid
  Variant (53)..(53): Xaa in position 53 is any amino acid
  Variant (55)..(56): Xaa in position 55 to 56 is any amino acid
  Variant (60)..(60): Xaa in position 60 is any amino acid
  Variant (62)..(63): Xaa in position 62 to 63 is any amino acid
  Variant (65)..(65): Xaa in position 65 is any amino acid
  Variant (71)..(80): Xaa in position 71 to 80 is any amino acid
  Variant (81)..(81): Xaa in position 81 is any or no amino acid
  Variant (86)..(91): Xaa in position 86 to 91 is any amino acid
  Variant (93)..(93): Xaa in position 93 is any amino acid
  Variant (98)..(100): Xaa in position 98 to 100 is any amino acid
  Variant (102)..(110): Xaa in position 102 to 110 is any amino acid
  Variant (112)..(113): Xaa in position 112 to 113 is any amino acid
  Variant (115)..(122): Xaa in position 115 to 122 is any amino acid
  Variant (124)..(129): Xaa in position 124 to 129 is any amino acid
  Variant (131)..(131): Xaa in position 131 is any amino acid
  Variant (133)..(136): Xaa in position 133 to 136 is any amino acid
  Variant (138)..(138): Xaa in position 138 is any amino acid
  Variant (140)..(141): Xaa in position 140 to 141 is any amino acid
  Variant (146)..(147): Xaa in position 146 to 147 is any amino acid
  Variant (150)..(158): Xaa in position 150 to 158 is any amino acid
  Variant (159)..(163): Xaa in position 159 to 163 is any or no amino acid
  Variant (166)..(166): Xaa in position 166 is any amino acid
  Variant (168)..(169): Xaa in position 168 to 169 is any amino acid
  Variant (171)..(182): Xaa in position 171 to 182 is any amino acid
  Variant (183)..(183): Xaa in position 183 is any or no amino acid
  Variant (186)..(187): Xaa in position 186 to 187 is any amino acid
  Variant (190)..(190): Xaa in position 190 is any amino acid
  Variant (192)..(198): Xaa in position 192 to 198 is any amino acid
  Variant (200)..(203): Xaa in position 200 to 203 is any amino acid
  Variant (204)..(217): Xaa in position 204 to 217 is any or no amino acid
  Variant (219)..(222): Xaa in position 219 to 222 is any amino acid
  Variant (223)..(224): Xaa in position 223 to 224 is any or no amino acid
  Variant (226)..(227): Xaa in position 226 to 227 is any amino acid
  Variant (228)..(228): Xaa in position 228 is any or no amino acid
  Variant (230)..(256): Xaa in position 230 to 256 is any amino acid
  Variant (257)..(258): Xaa in position 257 to 258 is any or no amino acid
  Variant (261)..(268): Xaa in position 261 to 268 is any amino acid
VXEYXXXIXXXXXXXEXXXXPXXXYMXXXQXXXXXXXRXXLXDWXXXVXXXFXLXXETLXLXXNXIDRFLXXXXXXXXXXXQLVGXXXXXXAXKYEEXXXPXXXXXXXXXDXXYXXXXXXXXEXXXXXXLXFXXXXPXPXXFLRRXXKAXXXXXXXXXXXXXXLAXYXXEXXXXXXXXXXXXXPSXXAAXAXXXXXXXLXXXXXXXXXXXXXXXXXXWXXXXXXYXXXYXXXXXXXXXXXXXXXXXXXXXXXXXXXXXKYXXXXXXXXS

SEQ ID NO: 129120 - protein, 30 aa, Artificial sequence
  protein pattern
  Variant (2)..(2): Xaa in position 2 is any amino acid
  Variant (5)..(5): Xaa in position 5 is Ile, Leu, Met or Val
  Variant (6)..(6): Xaa in position 6 is Ile or Val
  Variant (7)..(7): Xaa in position 7 is Glu or Gln
  Variant (9)..(11): Xaa in position 9 to 11 is any amino acid
  Variant (12)..(12): Xaa in position 12 is Phe or Tyr
  Variant (13)..(13): Xaa in position 13 is any amino acid
  Variant (15)..(16): Xaa in position 15 to 16 is any amino acid
  Variant (20)..(20): Xaa in position 20 is Phe or Tyr
  Variant (22)..(22): Xaa in position 22 is Ala, Cys, Ser or Thr
  Variant (23)..(23): Xaa in position 23 is Ala, Ile or Val
  Variant (24)..(24): Xaa in position 24 is Ala or Asn
  Variant (25)..(25): Xaa in position 25 is any amino acid
  Variant (26)..(26): Xaa in position 26 is Ile or Val
  Variant (29)..(29): Xaa in position 29 is Phe or Tyr
LXDWXXXVXXXXXLXXETLXLXXXXXDRXL

SEQ ID NO: 129121 - protein, 56 aa, Artificial sequence
  protein pattern
  Variant (2)..(2): Xaa in position 2 is any amino acid
  Variant (5)..(5): Xaa in position 5 is any amino acid
  Variant (6)..(6): Xaa in position 6 is Ala, Thr or Val
  Variant (7)..(7): Xaa in position 7 is Ala, Cys or Ser
  Variant (8)..(8): Xaa in position 8 is Ile, Leu or Met
  Variant (9)..(9): Xaa in position 9 is Phe or Leu
  Variant (10)..(10): Xaa in position 10 is Ile, Leu or Val
  Variant (12)..(12): Xaa in position 12 is Ala, Cys or Ser
  Variant (17)..(17): Xaa in position 17 is Ile, Met or Val
  Variant (18)..(19): Xaa in position 18 to 19 is any amino acid
  Variant (21)..(21): Xaa in position 21 is any amino acid
  Variant (22)..(22): Xaa in position 22 is Ile, Leu, Met or Val
  Variant (23)..(24): Xaa in position 23 to 24 is any amino acid
  Variant (25)..(25): Xaa in position 25 is Phe, Ile, Leu, Met or Val
  Variant (26)..(29): Xaa in position 26 to 29 is any amino acid
  Variant (30)..(30): Xaa in position 30 is Asp or Glu
  Variant (31)..(31): Xaa in position 31 is any amino acid
  Variant (32)..(32): Xaa in position 32 is Ala, Cys, Gly or Thr
  Variant (33)..(36): Xaa in position 33 to 36 is any amino acid
  Variant (37)..(37): Xaa in position 37 is Asp, Glu or Gln
  Variant (38)..(38): Xaa in position 38 is Phe, Ile, Leu, Met or Val
  Variant (39)..(41): Xaa in position 39 to 41 is any amino acid
  Variant (43)..(44): Xaa in position 43 to 44 is any amino acid
  Variant (45)..(45): Xaa in position 45 is Ile, Met or Val
  Variant (46)..(46): Xaa in position 46 is Ile, Leu, Met or Val
  Variant (47)..(48): Xaa in position 47 to 48 is any amino acid
  Variant (50)..(50): Xaa in position 50 is Asp, Glu, Gly, Asn, Gln or Ser
  Variant (51)..(51): Xaa in position 51 is Phe or Tyr
  Variant (52)..(52): Xaa in position 52 is any amino acid
  Variant (53)..(53): Xaa in position 53 is Phe, Ile, Leu, Met or Val
  Variant (54)..(54): Xaa in position 54 is Ala, Gly, Asn or Ser
  Variant (55)..(55): Xaa in position 55 is any amino acid
QXVGXXXXXXAXKYEEXXXPXXXXXXXXXXXXXXXXXXXXXEXXXXXXLXXXXXXP

SEQ ID NO: 129122 - protein, 29 aa, Artificial sequence
  protein pattern
  Variant (2)..(2): Xaa in position 2 is any or no amino acid
  Variant (4)..(6): Xaa in position 4 to 6 is any amino acid
  Variant (7)..(7): Xaa in position 7 is any or no amino acid
  Variant (9)..(9): Xaa in position 9 is Ala, Asp or Gly
  Variant (10)..(15): Xaa in position 10 to 15 is any amino acid
  Variant (16)..(16): Xaa in position 16 is Glu, His or Arg
  Variant (17)..(17): Xaa in position 17 is any amino acid
  Variant (18)..(18): Xaa in position 18 is Leu or Val
  Variant (19)..(19): Xaa in position 19 is Ala or Thr
  Variant (20)..(20): Xaa in position 20 is any amino acid
  Variant (21)..(21): Xaa in position 21 is Phe or Tyr
  Variant (22)..(22): Xaa in position 22 is Phe or Leu
  Variant (23)..(23): Xaa in position 23 is any amino acid
  Variant (25)..(25): Xaa in position 25 is any amino acid
  Variant (26)..(26): Xaa in position 26 is Ala, Cys, Gly, Ser or Thr
  Variant (27)..(27): Xaa in position 27 is Ile or Leu
  Variant (28)..(28): Xaa in position 28 is any amino acid
  Variant (29)..(29): Xaa in position 29 is Asp, Glu or His
LXRXXXXAXXXXXXXXXXXXXXXEXXXXX

SEQ ID NO: 129123 - DNA, 723 bp, Saccharomyces cerevisiae
  CDS (1)..(723)
atgtcagggttcattaagagcacgttgcttggtctaggccaagattacttagaagatcaatatcaagagttcgcagaacagcatttccagccaaccagggatccgttttatgaaacgaataaagatggtaaaaagcaccgccgcagactgccatattattgcactaaggatgaaagtaaagcgtggaaaaaggtccaaaacaaagcctggctgcatgacaaatcactgtgcggatgctgttgctggacaaacactataggatgggcaccattacttgcacttctaccggttataggacccttattgatgtattgggtgcatgataagttgattgaattggcagatgacaggtataaattgcctgcggaaatcaaggtgaagatgcatggtaatatcgttatcgatttacttattagtttagttcctattctgggaagtgtttttgcatggttgcacgcatgttccacgagaaacgcagctatagtttacaattttgttggaaaaagggcattggaaagaaagcaagcggagctcatgcatcaaaaagaagaaaatgagaaacattccaatgccaatactgcacctccagtagttggtggcaacaaaaatgtgaatggaaacagaaataatagtaaaatgtataacagaccgcctgtgacagctccacctgcaccagcatacacgcgcagtactaacggtcgcccccaaagaggttacaggtga

SEQ ID NO: 129124 - protein, 240 aa, Saccharomyces cerevisiae
MSGFIKSTLLGLGQDYLEDQYQEFAEQHFQPTRDPFYETNKDGKKHRRRLPYYCTKDESKAWKKVQNKAWLHDKSLCGCCCWTNTIGWAPLLALLPVIGPLLMYWVHDKLIELADDRYKLPAEIKVKMHGNIVIDLLISLVPILGSVFAWLHACSTRNAAIVYNFVGKRALERKQAELMHQKEENEKHSNANTAPPVVGGNKNVNGNRNNSKMYNRPPVTAPPAPAYTRSTNGRPQRGYR

SEQ ID NO: 129125 - DNA, 843 bp, Gibberella zeae PH-1
  CDS (1)..(843)
atgacttcgatcattacaaagctcgttaccaagaagatccttggggagactgtctcgaacaaatttggaacggaggacccttactttgagcatgtccccgcgactcgtctggatggaaaacccaacggcaaagtaaagaagcgcaagaaggctcttcctccaggcattaccgataacgatgccaaggtcttgacaaaggtcaagcgtcgagcttatcgactagacctgtgtctcttcagttgctttggcgtccgtttcggttggggcagcgttataggactggttcctgcaatcggcgatgttctggacatgttactcgcacttatcgtcatgagaacctgcatgaaggtcgatggtggactgcccacctcggtcaagggcaaaatgatgtttaacatcttgatcgattttgtcatcggacttgttcctttcgctggcgacctggtagatgcagcatataagtgcaatactcgcaacgcggcgctcctcgaggcccacctacgagaggagggacgcaagaatctgaagaagagcggattaccggtaccggccattgatcccagcgacgcagacgaatttgatcgacttcagacgcaagatccgcccgagtacatctcaaacccaccatcccgaaatgcatccatgtcagaacgtcgtcaacgcagccgcagccgcagccgagatcgccgtcgtgatgatcgccccgtcgagccggtaccggcgcgagttcgcgagagccgtggattcttcggtcgtagcagagctcggccggatgatatcgaaacagggaaagctgatcgtggatctcgacgccaaagatcgccgcgcagggagcgacgctaa

SEQ ID NO: 129126 - protein, 280 aa, Gibberella zeae PH-1
MTSIITKLVTKKILGETVSNKFGTEDPYFEHVPATRLDGKPNGKVKKRKKALPPGITDNDAKVLTKVKRRAYRLDLCLFSCFGVRFGWGSVIGLVPAIGDVLDMLLALIVMRTCMKVDGGLPTSVKGKMMFNILIDFVIGLVPFAGDLVDAAYKCNTRNAALLEAHLREEGRKNLKKSGLPVPAIDPSDADEFDRLQTQDPPEYISNPPSRNASMSERRQRSRSRSRDRRRDDRPVEPVPARVRESRGFFGRSRARPDDIETGKADRGSRRQRSPRRERR

SEQ ID NO: 129127 - DNA, 660 bp, Candida glabrata CBS 138
  CDS (1)..(660)
atgtctgggctagtgagagactttatagttgggtatgcggaggatttcgcgaatgagtacgcgcaggagaacttccagccggtgattgacccgtactacgcgcgggtgggtccgcagaagaagaaagtgcgccgggagctgccagcggagctgttcagcaagcaagagcgcaagcggttcaaaactctgcagtctaagtcctggacacacgaccggtccatgtgcgggtgctgctgctggacggagtgcattggctgggcgcccgtgttcagcatcatccccgtggtggggccgatcatcatgtacatgatccacaactccttggtcacgtacgccgagcgcaacctgtacaacaacaggctgcccacgggcctgaagaccaagctgctcgcgaacatcacgttcgacttgtgcatcacactggtgcctgtcctgggcgccctgttctcctggctgaacggctgctccacgagaaacacagcccttatatacaacgatctagtagagaaacgcatgaagcaggtaccacagtatcagcaagctcaggctcagcaagctcaaactcagcaagctcaagctcagcaagtaccacagtaccgtacacaacagcaagctccagctcagcaagtaccacagtatagaacgcaacagtatcggtga

SEQ ID NO: 129128 - protein, 219 aa, Candida glabrata CBS 138
MSGLVRDFIVGYAEDFANEYAQENFQPVIDPYYARVGPQKKKVRRELPAELFSKQERKRFKTLQSKSWTHDRSMCGCCCWTECIGWAPVFSIIPVVGPIIMYMIHNSLVTYAERNLYNNRLPTGLKTKLLANITFDLCITLVPVLGALFSWLNGCSTRNTALIYNDLVEKRMKQVPQYQQAQAQQAQTQQAQAQQVPQYRTQQQAPAQQVPQYRTQQYR

SEQ ID NO: 129129 - DNA, 774 bp, Kluyveromyces lactis NRRL Y-1140
  CDS (1)..(774)
atggacatcttcacagcgaagaaccgcatgattttaaatatagaattaatttcaaaccactctgatggctacatgttacataacctcggaactggaacagaaacaaaaaaaggaagcggtaaagggcaatcaagcgacgagaagatgggtggtgtagtcactagtatggctgagtctagtgctcaggactatggtatggaaaagtatgatgatttcatgggatcaaagtttcaaccggtgaaggatccattctattcggaactaagtaatgggaaaagggttcgaaggaagttgcctgcatattgcacgaaacaggaaaccaagacatggaaacggttacagaaccgagcatggtacgacgaccgatgcttcctcgggtgtggatgtatctggattgattggggcatcggttgggccacggtactttcgttgcttcctgtgatcggaccgatcttaatgtactgggtacacagctctacggtggaatacgcaaggaaacggtacaatttgcccaacgatctgttggtgaagatgcatgcaaacatagtgtttgatctattaataacgttacccccgataattggcacgtttttgacctggatgaacgcatgttctactagaaatgtcgcaatggtgtacaattacgtatgtaaggattcgtggcagaggtatctacagcagaacccaacacaaagtgcaccggttgggttccaaccgatgccaatggctgcgaacccacaagtcccagcccaagcagtccaccatcaggtataa

SEQ ID NO: 129130 - protein, 257 aa, Kluyveromyces lactis NRRL Y-1140
MDIFTAKNRMILNIELISNHSDGYMLHNLGTGTETKKGSGKGQSSDEKMGGVVTSMAESSAQDYGMEKYDDFMGSKFQPVKDPFYSELSNGKRVRRKLPAYCTKQETKTWKRLQNRAWYDDRCFLGCGCIWIDWGIGWATVLSLLPVIGPILMYWVHSSTVEYARKRYNLPNDLLVKMHANIVFDLLITLPPIIGTFLTWMNACSTRNVAMVYNYVCKDSWQRYLQQNPTQSAPVGFQPMPMAANPQVPAQAVHHQV

SEQ ID NO: 129131 - DNA, 729 bp, Debaryomyces hansenii CBS767
  CDS (1)..(729)
atgtctaacgttcaagatcagctagagggattgcccggatatgatattgtcatggattattggaacgattatgcggaagaacatataaaagtaggcaaaaatccatacgaggacgagaacggaaataagcttagattacccaaaaacaccactaaagaagaacagaagatctggaaaagggtgcaaagtacggcatgggtacacgataagtgtttccttggatcttgtggggttggtatggattgtggtttgggttccgttccattggtggttgccttatttccagtgctaggaccacttgtgatgtatggattgcatgccaggcttattcacattgtcaccaatgaatacaagctccctaataagctagtactacaaatggagtcccaaattgcattcgatctacttataagtctaccaccaatattaggtggttttttggcttggctaaatgggtgtctgactagaaatgctggcatgatatacaattacttcgcctacgtatccctggaaagggaaaagaataagcagcctacctacgttggaactggagacattagtgaatacttacgatcgccagaaccggcgtataccaacactgccagacagaataattatcaatcgtcaaacaacggtggtaagagcatatctgcatttaaaaagaagccacctgccaataatactaatacaataaaggttggaaatcaacagcaatctggatttgtatag

SEQ ID NO: 129132 - protein, 242 aa, Debaryomyces hansenii CBS767
MSNVQDQLEGLPGYDIVMDYWNDYAEEHIKVGKNPYEDENGNKLRLPKNTTKEEQKIWKRVQSTAWVHDKCFLGSCGVGMDCGLGSVPLVVALFPVLGPLVMYGLHARLIHIVTNEYKLPNKLVLQMESQIAFDLLISLPPILGGFLAWLNGCLTRNAGMIYNYFAYVSLEREKNKQPTYVGTGDISEYLRSPEPAYTNTARQNNYQSSNNGGKSISAFKKKPPANNTNTIKVGNQQQSGFV

SEQ ID NO: 129133 - DNA, 708 bp, Candida albicans SC5314
  CDS (1)..(708): transl_table=12
atgtcacaaattcaagatcaattggaaaatatccctggatatgatgttgtaatggattatttcaacgaatatggggaagaacattggaatgctaatgttaacccttttgaggatgagaacgggaacaagcgtcgtcttcccaaagatttagcaacgaaacatgatcagcaagtatggaaacagattcaatcacaagcatggactgatgacaagtgttttctagggagttgtgctgtggggttagactgtggtttgggattggctcccttggtagttttgatatttccagtgttgggtccacttatcatgtatggggttcatactagagtgataaacatagcacagaaaaattacaatttgcccaatacgctcattgcaaaactacagacgaatataatgattgatttattgattacgtttcctccggtgattggcagtttttttggttggctacatgcttgttcgacgagaaatgcaggaatgatttatatttatttagagaaaatgcttaaacataaggtgtcgggccagggtgtgagttacgtaggcgccagaatgacagcaggaacttatgaaggtcagccaaacgctggcagttcagtacaggggtctcggccacaaacagtcaagtccactggactatttaagaaaaagccaactaccaacaattcaattagggtgggccaacaagaatctgggtttatgtaa

SEQ ID NO: 129134 - protein, 235 aa, Candida albicans SC5314
MSQIQDQLENIPGYDVVMDYFNEYGEEHWNANVNPFEDENGNKRRLPKDLATKHDQQVWKQIQSQAWTDDKCFLGSCAVGLDCGLGLAPLVVLIFPVLGPLIMYGVHTRVINIAQKNYNLPNTLIAKLQTNIMIDLLITFPPVIGSFFGWLHACSTRNAGMIYIYLEKMLKHKVSGQGVSYVGARMTAGTYEGQPNAGSSVQGSRPQTVKSTGLFKKKPTTNNSIRVGQQESGFM

SEQ ID NO: 129135 - DNA, 24 bp, Artificial sequence
  primer
atgtcagggttcattaagagcacg

SEQ ID NO: 129136 - DNA, 22 bp, Artificial sequence
  primer
tcacctgtaacctctttggggg

SEQ ID NO: 129137 - protein, 209 aa, Artificial sequence
  consensus sequence
  Variant (2)..(14): Xaa in position 2 to 14 is any amino acid
  Variant (16)..(30): Xaa in position 16 to 30 is any amino acid
  Variant (31)..(34): Xaa in position 31 to 34 is any or no amino acid
  Variant (36)..(45): Xaa in position 36 to 45 is any amino acid
  Variant (46)..(50): Xaa in position 46 to 50 is any or no amino acid
  Variant (53)..(55): Xaa in position 53 to 55 is any amino acid
  Variant (56)..(56): Xaa in position 56 is any or no amino acid
  Variant (59)..(61): Xaa in position 59 to 61 is any amino acid
  Variant (63)..(64): Xaa in position 63 to 64 is any amino acid
  Variant (66)..(67): Xaa in position 66 to 67 is any amino acid
  Variant (69)..(70): Xaa in position 69 to 70 is any amino acid
  Variant (73)..(74): Xaa in position 73 to 74 is any amino acid
  Variant (76)..(79): Xaa in position 76 to 79 is any amino acid
  Variant (81)..(86): Xaa in position 81 to 86 is any amino acid
  Variant (87)..(90): Xaa in position 87 to 90 is any or no amino acid
  Variant (92)..(94): Xaa in position 92 to 94 is any amino acid
  Variant (95)..(95): Xaa in position 95 is any or no amino acid
  Variant (97)..(100): Xaa in position 97 to 100 is any amino acid
  Variant (103)..(103): Xaa in position 103 is any amino acid
  Variant (106)..(107): Xaa in position 106 to 107 is any amino acid
  Variant (110)..(111): Xaa in position 110 to 111 is any amino acid
  Variant (113)..(122): Xaa in position 113 to 122 is any amino acid
  Variant (123)..(123): Xaa in position 123 is any or no amino acid
  Variant (125)..(125): Xaa in position 125 is any amino acid
  Variant (126)..(127): Xaa in position 126 to 127 is any or no amino acid
  Variant (130)..(134): Xaa in position 130 to 134 is any amino acid
  Variant (136)..(138): Xaa in position 136 to 138 is any amino acid
  Variant (141)..(142): Xaa in position 141 to 142 is any amino acid
  Variant (145)..(145): Xaa in position 145 is any amino acid
  Variant (147)..(147): Xaa in position 147 is any amino acid
  Variant (149)..(149): Xaa in position 149 is any amino acid
  Variant (151)..(152): Xaa in position 151 to 152 is any amino acid
  Variant (154)..(157): Xaa in position 154 to 157 is any amino acid
  Variant (159)..(161): Xaa in position 159 to 161 is any amino acid
  Variant (163)..(163): Xaa in position 163 is any amino acid
  Variant (167)..(170): Xaa in position 167 to 170 is any amino acid
  Variant (172)..(202): Xaa in position 172 to 202 is any amino acid
  Variant (203)..(208): Xaa in position 203 to 208 is any or no amino acid
MXXXXXXXXXXXXXDXXXXXXXXXXXXXXXXXXXPXXXXXXXXXXXXXXXLPXXXXTKXXXKXXKXXQXXAWXXDXXXXGXXXXXXXXXXGXXXXVXXXXPVXGPXXMYXXHXXXXXXXXXXXYXXXLPXXXXXKXXXNIXXDLXIXLXPXXGXXXXWXXXCXTRNXXXXYXXXXXXXXXXXXXXXXXXXXXXXXXXXXXXXXXXXXXP

SEQ ID NO: 129138 - protein, 49 aa, Artificial sequence
  protein pattern
  Variant (3)..(3): Xaa in position 3 is Ala, Asn or Thr
  Variant (4)..(4): Xaa in position 4 is Asp, Glu, Gly, Ser or Thr
  Variant (5)..(5): Xaa in position 5 is Ile, Leu or Val
  Variant (6)..(6): Xaa in position 6 is any amino acid
  Variant (7)..(7): Xaa in position 7 is Ala, Gly, Thr or Val
  Variant (9)..(9): Xaa in position 9 is Leu or Met
  Variant (10)..(11): Xaa in position 10 to 11 is any amino acid
  Variant (14)..(14): Xaa in position 14 is any amino acid
  Variant (15)..(15): Xaa in position 15 is Phe or Ile
  Variant (17)..(17): Xaa in position 17 is Phe or Leu
  Variant (18)..(18): Xaa in position 18 is any amino acid
  Variant (20)..(20): Xaa in position 20 is Gly, Ser or Thr
  Variant (21)..(21): Xaa in position 21 is Phe or Leu
  Variant (22)..(22): Xaa in position 22 is Pro or Val
  Variant (24)..(24): Xaa in position 24 is Phe, Ile or Val
  Variant (25)..(25): Xaa in position 25 is Ala, Ile or Leu
  Variant (27)..(27): Xaa in position 27 is Ala, Asp, Ser or Thr
  Variant (28)..(29): Xaa in position 28 to 29 is Phe, Leu or Val
  Variant (30)..(30): Xaa in position 30 is Ala, Asp, Gly, Ser or Thr
  Variant (31)..(34): Xaa in position 31 to 34 is any amino acid
  Variant (36)..(36): Xaa in position 36 is Asn or Ser
  Variant (40)..(40): Xaa in position 40 is any or no amino acid
  Variant (42)..(42): Xaa in position 42 is any amino acid
  Variant (43)..(43): Xaa in position 43 is Ile, Leu, Met or Val
  Variant (44)..(48): Xaa in position 44 to 48 is any amino acid
  Variant (49)..(49): Xaa in position 49 is Glu or Lys
LPXXXXXKXXXNIXXDXXIXXXPXXGXXXXXXXXCXTRNXAXXXXXXXX

SEQ ID NO: 129139 - protein, 28 aa, Artificial sequence
  protein pattern
  Variant (2)..(2): Xaa in position 2 is any amino acid
  Variant (3)..(3): Xaa in position 3 is Asp or Glu
  Variant (4)..(6): Xaa in position 4 to 6 is any amino acid
  Variant (7)..(7): Xaa in position 7 is Phe or Trp
  Variant (9)..(9): Xaa in position 9 is any amino acid
  Variant (10)..(10): Xaa in position 10 is Ile, Leu or Val
  Variant (12)..(12): Xaa in position 12 is Asn or Ser
  Variant (13)..(13): Xaa in position 13 is any amino acid
  Variant (14)..(14): Xaa in position 14 is Ala or Ser
  Variant (16)..(16): Xaa in position 16 is any amino acid
  Variant (17)..(17): Xaa in position 17 is Asp or His
  Variant (19)..(19): Xaa in position 19 is any amino acid
  Variant (20)..(21): Xaa in position 20 to 21 is any or no amino acid
  Variant (23)..(24): Xaa in position 23 to 24 is any or no amino acid
  Variant (26)..(26): Xaa in position 26 is Cys or Ser
  Variant (27)..(27): Xaa in position 27 is Cys or Gly
  Variant (28)..(28): Xaa in position 28 is Ala, Cys or Gly
KXXXXXXKXXQXXXWXXDXXXCXXGXXX

SEQ ID NO: 129140 - protein, 29 aa, Artificial sequence
  protein pattern
  Variant (2)..(9): Xaa in position 2 to 9 is any amino acid
  Variant (10)..(10): Xaa in position 10 is any or no amino acid
  Variant (13)..(13): Xaa in position 13 is Ile, Leu or Val
  Variant (16)..(16): Xaa in position 16 is Ile or Leu
  Variant (17)..(17): Xaa in position 17 is Ile, Leu or Val
  Variant (20)..(20): Xaa in position 20 is any amino acid
  Variant (21)..(21): Xaa in position 21 is Ile, Leu or Val
  Variant (23)..(23): Xaa in position 23 is Ala, Asp, Asn, Ser or Thr
  Variant (24)..(25): Xaa in position 24 to 25 is any amino acid
  Variant (26)..(26): Xaa in position 26 is Ile or Val
  Variant (27)..(28): Xaa in position 27 to 28 is any amino acid
  Variant (29)..(29): Xaa in position 29 is Ala or Val
GXXXXXXXXXPVXGPXXMYXXHXXXXXXX

SEQ ID NO: 129141 - DNA, 2118 bp, Saccharomyces cerevisiae
  CDS (1)..(2118)
atggctggtgaaacttttgaatttcaagctgaaatcactcagttgatgagtttgatcatcaacactgtctattctaacaaggaaattttcttgagagaactgatctctaacgcctccgatgctttagacaaaattagataccaagctttgtctgatccaaagcaattggaaaccgaaccagatttgttcattagaatcaccccaaaaccagaagaaaaagttttggaaatcagagattctggtattggtatgaccaaggctgaattgattaacaatttgggtaccattgctaagtctggtactaaagctttcatggaagctctatctgctggtgccgatgtatccatgattggtcaattcggtgttggtttttactctttattcttagtcgccgacagagttcaagttatttccaagaacaatgaggacgaacaatatatttgggaatctaatgccggtggttctttcaccgttactttggacgaagttaacgaaagaattggtagaggtaccgtcttgagattattcttgaaagatgaccaattggagtacttggaagaaaagagaattaaagaagtcatcaagagacattctgaattcgttgcttaccctatccaacttctagtcaccaaggaagtcgaaaaggaagttccaattccagaagaagaaaagaaagacgaggaaaagaaggatgaagatgacaagaaaccaaaattggaagaagtcgatgaagaagaagaagaaaagaagccaaaaaccaaaaaagttaaagaagaggttcaagaattagaagagttgaacaagactaagccattatggactagaaacccatctgatatcactcaagaggaatacaatgctttctataagtctatttctaacgactgggaagacccattgtacgttaagcatttctctgttgaaggtcaattggaatttagagctatcttgttcattccaaagagagcaccattcgacttatttgagagtaagaagaagaagaacaatatcaagttgtacgttcgtcgtgtcttcatcactgatgaagctgaagacttgattccagagtggttatctttcgtcaagggtgttgttgactctgaagatttaccattgaatttgtccagagaaatgttacaacaaaataagattatgaaggttattagaaagaatattgtcaagaaattgattgaagccttcaacgaaatcgctgaagactccgagcaatttgacaaattttactctgccttcgctaagaacattaagctgggtgtacatgaggacactcaaaacagagctgctttagctaagttgctacgttacaattctactaaatctgtcgatgaattgacttccttgactgattacgttactagaatgccagaacaccaaaagaacatctattacatcaccggtgaatctctaaaggcagtcgaaaagtctccattcttggacgccttgaaggctaagaactttgaagttttgttcttgaccgacccaattgatgaatacgctttcactcaattgaaggaattcgagggtaaaactttggttgacattactaaagatttcgaattggaagaaacagacgaagaaaaagctgaaagagagaaggagatcaaagaatacgaaccattgaccaaggccttgaaggatatcttgggtgaccaagtggagaaggttgttgtttcttacaaattgctagatgctccagctgccatcagaactggtcaattcggctggtctgctaacatggaaagaatcatgaaggctcaagccttgagagactcttccatgtcctcctacatgtcttccaagaagactttcgaaatttctccaaaatctccaattattaaggaattgaaaaagagagttgatgagggtggtgcacaagataagaccgtcaaagatttgactaacttattattcgagaccgctttgttgacttctggtttcagtttggaagaaccaacttcttttgcatcaagaataaatagattgatttctttaggtttgaacattgatgaggatgaagaaacagaaaccgctccagaagcttctaccgaagctccagttgaagaggttccagctgacaccgagatggaagaagttgattaa

SEQ ID NO: 129142 - protein, 705 aa, Saccharomyces cerevisiae
MAGETFEFQAEITQLMSLIINTVYSNKEIFLRELISNASDALDKIRYQALSDPKQLETEPDLFIRITPKPEEKVLEIRDSGIGMTKAELINNLGTIAKSGTKAFMEALSAGADVSMIGQFGVGFYSLFLVADRVQVISKNNEDEQYIWESNAGGSFTVTLDEVNERIGRGTVLRLFLKDDQLEYLEEKRIKEVIKRHSEFVAYPIQLLVTKEVEKEVPIPEEEKKDEEKKDEDDKKPKLEEVDEEEEEKKPKTKKVKEEVQELEELNKTKPLWTRNPSDITQEEYNAFYKSISNDWEDPLYVKHFSVEGQLEFRAILFIPKRAPFDLFESKKKKNNIKLYVRRVFITDEAEDLIPEWLSFVKGVVDSEDLPLNLSREMLQQNKIMKVIRKNIVKKLIEAFNEIAEDSEQFDKFYSAFAKNIKLGVHEDTQNRAALAKLLRYNSTKSVDELTSLTDYVTRMPEHQKNIYYITGESLKAVEKSPFLDALKAKNFEVLFLTDPIDEYAFTQLKEFEGKTLVDITKDFELEETDEEKAEREKEIKEYEPLTKALKDILGDQVEKVVVSYKLLDAPAAIRTGQFGWSANMERIMKAQALRDSSMSSYMSSKKTFEISPKSPIIKELKKRVDEGGAQDKTVKDLTNLLFETALLTSGFSLEEPTSFASRINRLISLGLNIDEDEETETAPEASTEAPVEEVPADTEMEEVD

SEQ ID NO: 129143 - DNA, 2151 bp, Bombyx mori
  CDS (1)..(2151)
atgccggaagaaatggagacacagccagcggaggttgaaaccttcgcgttccaggctgagatcgctcagcttatgtccctgatcatcaacaccttttactccaacaaagaaattttccttcgtgagctgatttccaattcatcggacgctttagacaaaatcaggtatgaatctctcacggatccgtcaaaactcgatagtggcaaagagctgtacatcaagatcattcccaacaagaacgagggcactcttacgatcatcgataccggtattggtatgaccaaggccgatttggtgaacaatttgggaaccatcgcgaaatctggtactaaagctttcatggaggctcttcaagcaggtgccgacatcagcatgattggacagttcggtgttggcttctactccagttacttggtcgctgaccgcgtgactgttcactctaaacacaatgacgacgagcaatacgtgtgggaatcttctgcaggaggctcgttcacagtccgcccagacagcggtgagccccttggtcgaggtacaaagatcgtccttcacgtcaaagaggacttggcagaattcatggaagaacacaaaatcaaagagatcgtaaagaaacattcccagttcattggctacccaatcaagctgatggttgaaaaagaacgcgaaaaagaactgtctgatgatgaagccgaagaagaaaagaaggaagaggaagatgagaagcctaagattgaagatgtaggtgaagatgaagacgaggacaaaaaggatacgaagaagaagaagaaaacaattaaagaaaaatacacagaggatgaagaactcaacaagacaaagcctatctggaccagaaacgctgatgacattacccaagatgagtacggagacttctacaaatcccttaccaatgattgggaggaccatcttgcagtcaaacacttctccgttgaaggtcagttagagttccgagcactactttttgtgccacgtcgtgcaccttttgacttgtttgaaaacaagaagcgcaagaacaatatcaagctgtatgtacgaagagttttcatcatggacaactgtgaggatctcatcccagagtaccttaacttcattagaggtgttgtcgacagtgaggaccttcctctaaacatttcacgtgagatgcttcaacagaataaaattctgaaagtaattaggaagaatttagttaaaaaatgcctagaactatttgaagaattggcagaggacaaagaaaactacaagaagtattatgaacaattcagcaagaacttaaaattgggtatccatgaagactctcaaaacagggctaagctctctgagcttctgcggtaccacacttcagcatcgggtgatgaagcctgctctctcaaagagtatgtatccaggatgaaggagaaccagaaacatatctactacatcactggagaaaacagagaccaggtggcgaactcctcatttgtggagagagtgaagaaacgtggctatgaagtagtctacatgactgagcccattgatgaatatgtagtacaacagatgagggagtatgatggcaagacccttgtatcggtcacaaaggaaggattagaacttcctgaagatgaggaagaaaagaagaaacgtgaggaagataaggtgaagttcgaaggcctgtgcaaggtgatgaagaacatcctggacaacaaagttgagaaagttgttgtctctaacagacttgtggagtctccttgctgtattgttactgctcaatatggatggtctgccaacatggaacgtatcatgaaggctcaggctctacgtgacacatccacaatgggatacatggctgcgaagaagcatttggaaatcaatcctgatcactcaattgtggaaacattaaggcagaaagcggaggccgacaagaatgacaaagctgttaaggatcttgttatcttattgtatgaaactgccctgctgtcttctggcttcacgcttgatgagccccaagtccatgcttcccgtatctatagaatgatcaaactgggtcttggtattgatgaagatgagccgattcaggttgaagagcctgcttctggagacgtgccgccattggagggtgatgctgatgatgcatctcgcatggaggaagttgattaa

SEQ ID NO: 129144 - protein, 716 aa, Bombyx mori
MPEEMETQPAEVETFAFQAEIAQLMSLIINTFYSNKEIFLRELISNSSDALDKIRYESLTDPSKLDSGKELYIKIIPNKNEGTLTIIDTGIGMTKADLVNNLGTIAKSGTKAFMEALQAGADISMIGQFGVGFYSSYLVADRVTVHSKHNDDEQYVWESSAGGSFTVRPDSGEPLGRGTKIVLHVKEDLAEFMEEHKIKEIVKKHSQFIGYPIKLMVEKEREKELSDDEAEEEKKEEEDEKPKIEDVGEDEDEDKKDTKKKKKTIKEKYTEDEELNKTKPIWTRNADDITQDEYGDFYKSLTNDWEDHLAVKHFSVEGQLEFRALLFVPRRAPFDLFENKKRKNNIKLYVRRVFIMDNCEDLIPEYLNFIRGVVDSEDLPLNISREMLQQNKILKVIRKNLVKKCLELFEELAEDKENYKKYYEQFSKNLKLGIHEDSQNRAKLSELLRYHTSASGDEACSLKEYVSRMKENQKHIYYITGENRDQVANSSFVERVKKRGYEVVYMTEPIDEYVVQQMREYDGKTLVSVTKEGLELPEDEEEKKKREEDKVKFEGLCKVMKNILDNKVEKVVVSNRLVESPCCIVTAQYGWSANMERIMKAQALRDTSTMGYMAAKKHLEINPDHSIVETLRQKAEADKNDKAVKDLVILLYETALLSSGFTLDEPQVHASRIYRMIKLGLGIDEDEPIQVEEPASGDVPPLEGDADDASRMEEVD

SEQ ID NO: 129145 - DNA, 2433 bp, Oryza sativa (japonica cultivar-group)
  CDS (1)..(2433)
atgcgcaagtgggcgctctcctccgcgctcctcctcctcctcctcaccacactccccgatccagctaagaagctccaagtcaatgctgatgacagcactgatgagttagttgatccgccgaaggtagaggagaagattggtggtgttccccatggcctgtccacggactctgaggttgttcagagggaggctgagtcaatctcgaggaagaccctcaggagctcagcggagaaatttgagttccaggctgaggtgtccagactcatggacatcatcatcaactcactctacagcaacaaggacattttcctgagggagctcatctccaatgcttctgatgctttggacaagattaggttcctggctctcactgataaggaggttttgggcgaaggtgacactgctaagcttgaaatccagattaagctggataaggagaagaagattctctccattcgggataggggtattggtatgaccaaggaagatctcattaagaaccttgggaccattgccaaatctggaacttcagcttttgtggaaaagatgcagactgggggtgacctcaatctcattgggcaattcggtgttggtttctattcagtatacttggttgctgactatgttgaagtgatcagcaagcacaatgacgacaaacagcatgtctgggagtccaaagctgatggatcattcgctatctctgaggatacatggaatgaacccctgggccgtggaactgaaataagactgcacctccgagatgaagccaaggagtacgtggaagaagacaagctaaaggatttggtgaagaagtactctgagttcatcaatttccccatttacttgtgggcaaccaaggaggttgatgtggaagtgccagctgatgaggatgagtcaagtgaatcaagtgaagaagaggaatcatcccctgagtctacagaggaagaagagacagaagagagtgaagagaagaagcccaagacaaagacagtaaaggaaaccactactgagtgggagcttctgaatgatgtgaaggctatatggcttcgtagccctaaggaggttactgaagaagaatacacaaagttttaccactcacttgctaaggactttggtgatgacaagcccttgtcttggagccacttcactgctgagggagatgttgagttcaaagctttgctctttgttcctcccaaggctccacatgatctctatgagagttactacaactctaacaagtcaaaccttaagttgtatgttagaagggttttcatctctgatgaatttgatgagcttcttccgaagtatctcagctttttgaagggtctcgtcgactcggacacattgcctctcaatgtatcacgagaaatgctccaacaacatagcagcctgaagaccatcaagaagaaactaatccgcaaagctcttgacatgattagaaaacttgctgaggaagatcctgatgagtacagcaacaaagataagacagatgaagaaaaaagtgcaatggaggagaaaaagggccagtatgccaagttctggaatgagtttggaaaatcagtcaagttgggcatcattgaagacgcaactaacaggaaccgtcttgcaaagcttctgagatttgaaagtaccaagtcggaaggcaaacttgcctctcttgatgagtacatttcaaggatgaagccagggcagaaggacatcttttacattaccggaagcagcaaggaacaattagagaaatcaccgttccttgagaggctaaccaaaaagaactacgaggttatctacttcactgaccctgttgacgagtacttgatgcaatacctcatggactacgaggacaagaagttccagaacgtctccaaggagggtctcaaactcggcaaggactctaagctcaaggacctcaaggagtccttcaaggagctgaccgactggtggaagaaggctcttgacaccgagagcgtggactcggtgaagatcagcaaccggctgagcgacaccccctgcgtggtggtgacatccaagtacgggtggagcgccaacatggagaagatcatgcagtcacagaccctctcggatgccagcaagcaggcgtacatgcgcggcaagagggtactcgagatcaaccccaggcaccccatcatcaaggaactccgtgacaaggtcgcccaggacagcgagagcgagagcttgaagcagacggcgaagctggtgtaccagacggccctcatggagagcggcttcaaccttcctgatcccaaggacttcgcctccagcatctacaggtcggtgcagaagagccttgacctgagccccgacgcggccgtggaagaggaagaggaggtcgaggaggccgaggttgaagagaaggaatcatccaacatcaaggaggaggcggagccgtcgtcgtatgataaggacgagctgtag

SEQ ID NO: 129146 - protein, 810 aa, Oryza sativa (japonica cultivar-group)
MRKWALSSALLLLLLTTLPDPAKKLQVNADDSTDELVDPPKVEEKIGGVPHGLSTDSEVVQREAESISRKTLRSSAEKFEFQAEVSRLMDIIINSLYSNKDIFLRELISNASDALDKIRFLALTDKEVLGEGDTAKLEIQIKLDKEKKILSIRDRGIGMTKEDLIKNLGTIAKSGTSAFVEKMQTGGDLNLIGQFGVGFYSVYLVADYVEVISKHNDDKQHVWESKADGSFAISEDTWNEPLGRGTEIRLHLRDEAKEYVEEDKLKDLVKKYSEFINFPIYLWATKEVDVEVPADEDESSESSEEEESSPESTEEEETEESEEKKPKTKTVKETTTEWELLNDVKAIWLRSPKEVTEEEYTKFYHSLAKDFGDDKPLSWSHFTAEGDVEFKALLFVPPKAPHDLYESYYNSNKSNLKLYVRRVFISDEFDELLPKYLSFLKGLVDSDTLPLNVSREMLQQHSSLKTIKKKLIRKALDMIRKLAEEDPDEYSNKDKTDEEKSAMEEKKGQYAKFWNEFGKSVKLGIIEDATNRNRLAKLLRFESTKSEGKLASLDEYISRMKPGQKDIFYITGSSKEQLEKSPFLERLTKKNYEVIYFTDPVDEYLMQYLMDYEDKKFQNVSKEGLKLGKDSKLKDLKESFKELTDWWKKALDTESVDSVKISNRLSDTPCVVVTSKYGWSANMEKIMQSQTLSDASKQAYMRGKRVLEINPRHPIIKELRDKVAQDSESESLKQTAKLVYQTALMESGFNLPDPKDFASSIYRSVQKSLDLSPDAAVEEEEEVEEAEVEEKESSNIKEEAEPSSYDKDEL

SEQ ID NO: 129147 - DNA, 2358 bp, Oryza sativa (japonica cultivar-group)
  CDS (1)..(2358)
atggcgccttcgctgagcaggagcctgggggcgtcgtcggtggcggcgctgcggccgtgcgcggggagggttagggcgccgggggcgggcgcggcgcgggggagcgggtcggcgaggtgcgggagaggggtgaggtgggaggcggggagcgggagcagggggagactggtgcgggtgaggtgcgacgccgccgtcgcggagaaggccgaggagacggcggaggaggagaagttcgagtaccaggcggaggttagccgcctaatggatttgattgtccatagcctttacagccacaaggaagtatttcttcgggagcttgtgagtaatgcgagtgacgcattggataagctgaggtttcttggtgtgactgattcttctctccttgctgatggcggcgagttggagataaggattaaaccagaccctgatgcaggaaccataactattactgatactggcattggaatgaccaaagatgaacttaaggattgccttggtactattgctcagagtggcacctcaaaatttttgaaggctctaaaggagaataaagaccttggagccgataatggtctgattggccagtttggggttgggttttactcagcttttcttgtagcggaaaaggttgtggtctccactaagagccccaaatcagataagcaatatgtatgggaaggtgtagctgacagtagctcttatgtcatcaaggaagagactgatcctgaaaaaatgcttacacgtggcactcagattactctcgttttaaggcctgatgataagtttgagtttgctgatcctggaaggattcaaggcctagttaagaactactctcagtttgtgtctttccccatatacacatggcaggaaaaatccagaactgtcgaggttgaagaggatgaagaggcaaaagaaggtgaagaggcgaaagagggtgaacaaaagaaaaagaagacaattactgagaaatactgggattgggagctagccaatgaaacaaagcctatatggatgagaagtccaaaggaaattgagaaaacagaatacaatgaattttataagaaggcattcaatgagttcttagatcctctggcctacactcacttcacaacagagggtgaggtggaatttaggagtgtcctttacattccaggaatggctccgcttagtaatgaggagataatgaatccaaaaactaagaatatccggttatatgtcaaaagagtatttatctctgatgacttcgatggtgaactgttccccagatacttgagctttgtaaaaggtgtagttgattcaaatgaccttcccctcaatgtttctcgtgagattcttcaggagagtcgaatagtaagaattatgcgaaagagacttgttaggaagacatttgatatgattgaggagatttctgaaaaggatgacaaggaggattacaagaagttctgggagagctttggcaagttcatcaaacttggttgcattgaggacaccggaaatcacaagcgtcttgcacctctgctgcgtttccacacttctaaaaatgagggagatttgataagtcttgatcaatatgtagaaaacatgccagagaaccaaaaagcaatctattacattgctacagatagtctccagagtgcaaagactgctcctttcctagaaaagttggttcagaaagacattgaagttctctacctcattgagccaatagatgaggttgccattcagaatttgcagacctataaagagaagaagtttgttgatatcagcaaagaggacctggagttgggtgatgaagatgaggacaataaggaaagcaaacaggaatacactcttctgtgtgactgggtaaaacagcagcttggtgacaaggtagcaaaggttcaaatatcaaagcgcctcagtttgtcaccatgtgttcttgtatctggcaagtttggttggtctgccaacatggaaagactcatgaaagcacaaacacttggggacacatcaagcttggagttcatgaggggtagaaggattttcgaaattaaccctgaccaccctattgtcaaggacttgaatgctgcctgcaaaaatgagcctgaaagtacagaagctaagagggctgttgagctgttgtatgagactgctctgatctccagtggatatactcctgacagtcctgcggagttgggtggtaagatctatgagatgatgacaattgcccttggcgggagatgggggaggtcagacaccgagactgaagcagcaaccactggtgatgccagcacagagacaggctcatctgaagccacggtgacggaggtgattgagccttctgaagtgaggcctgagagtgacccatggagggattaa

SEQ ID NO: 129148 - protein, 785 aa, Oryza sativa (japonica cultivar-group)
MAPSLSRSLGASSVAALRPCAGRVRAPGAGAARGSGSARCGRGVRWEAGSGSRGRLVRVRCDAAVAEKAEETAEEEKFEYQAEVSRLMDLIVHSLYSHKEVFLRELVSNASDALDKLRFLGVTDSSLLADGGELEIRIKPDPDAGTITITDTGIGMTKDELKDCLGTIAQSGTSKFLKALKENKDLGADNGLIGQFGVGFYSAFLVAEKVVVSTKSPKSDKQYVWEGVADSSSYVIKEETDPEKMLTRGTQITLVLRPDDKFEFADPGRIQGLVKNYSQFVSFPIYTWQEKSRTVEVEEDEEAKEGEEAKEGEQKKKKTITEKYWDWELANETKPIWMRSPKEIEKTEYNEFYKKAFNEFLDPLAYTHFTTEGEVEFRSVLYIPGMAPLSNEEIMNPKTKNIRLYVKRVFISDDFDGELFPRYLSFVKGVVDSNDLPLNVSREILQESRIVRIMRKRLVRKTFDMIEEISEKDDKEDYKKFWESFGKFIKLGCIEDTGNHKRLAPLLRFHTSKNEGDLISLDQYVENMPENQKAIYYIATDSLQSAKTAPFLEKLVQKDIEVLYLIEPIDEVAIQNLQTYKEKKFVDISKEDLELGDEDEDNKESKQEYTLLCDWVKQQLGDKVAKVQISKRLSLSPCVLVSGKFGWSANMERLMKAQTLGDTSSLEFMRGRRIFEINPDHPIVKDLNAACKNEPESTEAKRAVELLYETALISSGYTPDSPAELGGKIYEMMTIALGGRWGRSDTETEAATTGDASTETGSSEATVTEVIEPSEVRPESDPWRD

SEQ ID NO: 129149 - DNA, 2166 bp, Tribolium castaneum
  CDS (1)..(2166)
atgccggaagaaaaccaaaatggagatgtggaaaccttcgccttccaggcggaaatcgcccagttgatgagtctgatcatcaacaccttctactcgaacaaggaaattttccttcgggagttgatttccaattcgtcagatgcgttggataaaatccgttacgagtccttgaccaacccttccagactcgattcaggcaaagaactctacatcaagatcatccctaacaagaatgacgggaccttgaccattattgacaccggtatcgggatgactaaagccgatttggtccataacttgggcaccatcgccaagtccggcaccaaggccttcatggaggccctccaagctggggctgacatcagcatgatcggtcaattcggtgtcggtttctactcggcttacttggtagccgacaaggtcacagtcgtttcgaagaacaacgatgatgagcaatacgtttgggagtcgtcagctggtggtagcttcactgtaacacaagaccgtggcgagcctttgggccgtggcaccaagattgtccttcacatgaaagaggaccaaaccgaatttttggaagaacacaaaattaaagaaattgtaaagaaacactcgcagttcattggctatcccatcaaattggtcgtggagaaggaacgcgagaaggagttgagcgacgatgaggccgaagaagagaagaaggaggaagaaggcgaagacaaggataaagataagccaaagattgaggatgtaggcgaggacgaagatgaagacacgaagaaggaagataagaaaaagaagaagactattaaggagaaatacacagaagatgaagaattgaacaaaaccaagccgatttggacaaggaacgctgacgatatcagtcaggaagaatacggagagttttacaaatcgttgactaatgattgggaggaccatttggccgtcaaacactttagtgttgagggtcaattggagttccgtgccctcctctttgtcccacgtcgcgttccattcgatcttttcgaaaataagaagcgcaagaataatattaaattatacgtgaggagggtcttcattatggacaactgcgaagaactcatccccgaatatttgaactttatcaagggtgtcgtcgattcggaagacttgcctttgaacatttcccgtgagatgttgcaacaaaataagatcttgaaggtcattcgtaagaatttggtcaagaaatgcctagagttgttcgaggagttggccgaggataaggacggctacaagaaattctacgaacagttctcgaagaatattaaattgggtattcatgaagactcgcaaaaccgggccaaattgtccgaattgctccgttatcacacttctgcaagtggcgatgaggcttgctctttgaaggactacgtgagccgcatcaagcctaaccagaaacacatttattacattactggcgaaagcaaggagcaagtggcgaattcgtcgttcgttgagagggtcaagaagcgcggtttcgaggtcgtttacatgactgagcccattgatgaatacgtcgtacaacaaatgaaagaattcgacggcaaaactctcgtttcggtcacaaaggaaggtctcgaattgcctgaagacgaagaagagaagaagaagcgcgaagaagacaaagccaaattcgagggactttgcaaggttatgaagagcatcctcgataataaggttgagaaggtcgtggtatcgaaccgtctagtcgaatctccctgctgtattacgatgcgcaggtatggctggaccgccaacatggaacgtatcatgaaagcacaagctttgagagacacctccactatgggctacatggcagccaaaaagcacctcgaaatcaaccccgacccttccatccttaaaaatttgagacagaaggccgaggctgataagaacgacaaggctgttaaagacttggttattcttttgttcgaaaccgctttactcagctctgggttcaccttggatgagcctcaagtccacgcatccaggatctacaggatgatcaagctgggtctgggtattgatgaggaggaagccatgatcaccgaagatgcacaaggaggcgatgcaccctctgctgatgccgccgagtccgaggacgcgtcgaggatggaggaagttgattaa

SEQ ID NO: 129150 - protein, 721 aa, Tribolium castaneum
MPEENQNGDVETFAFQAEIAQLMSLIINTFYSNKEIFLRELISNSSDALDKIRYESLTNPSRLDSGKELYIKIIPNKNDGTLTIIDTGIGMTKADLVHNLGTIAKSGTKAFMEALQAGADISMIGQFGVGFYSAYLVADKVTVVSKNNDDEQYVWESSAGGSFTVTQDRGEPLGRGTKIVLHMKEDQTEFLEEHKIKEIVKKHSQFIGYPIKLVVEKEREKELSDDEAEEEKKEEEGEDKDKDKPKIEDVGEDEDEDTKKEDKKKKKTIKEKYTEDEELNKTKPIWTRNADDISQEEYGEFYKSLTNDWEDHLAVKHFSVEGQLEFRALLFVPRRVPFDLFENKKRKNNIKLYVRRVFIMDNCEELIPEYLNFIKGVVDSEDLPLNISREMLQQNKILKVIRKNLVKKCLELFEELAEDKDGYKKFYEQFSKNIKLGIHEDSQNRAKLSELLRYHTSASGDEACSLKDYVSRIKPNQKHIYYITGESKEQVANSSFVERVKKRGFEVVYMTEPIDEYVVQQMKEFDGKTLVSVTKEGLELPEDEEEKKKREEDKAKFEGLCKVMKSILDNKVEKVVVSNRLVESPCCITMRRYGWTANMERIMKAQALRDTSTMGYMAAKKHLEINPDPSILKNLRQKAEADKNDKAVKDLVILLFETALLSSGFTLDEPQVHASRIYRMIKLGLGIDEEEAMITEDAQGGDAPSADAAESEDASRMEEVD

SEQ ID NO: 129151 - DNA, 2343 bp, Arabidopsis thaliana
  CDS (1)..(2343)
atggctcctgctttgagtagaagtctctacacatctcctttgacttcagttccaatcactcctgtctcttctcgtctctctcatctgagaagctcgtttctcccacacggcggcgctttaagaaccggcgtttcgtgtagctggaatctcgaaaagagatgtaaccgattcgccgtgaagtgtgacgccgccgtggcggagaaagagaccactgaagaagggtcaggtgagaagtttgagtaccaagctgaggttagtagattgttggatttgattgttcatagcttatacagtcacaaggaggtgtttctcagggagcttgtaagtaatgcaagtgatgctttggataagctgaggttcttgagtgtaacagagccttctttgcttggagatggtggagatcttgagattaggattaagcctgatcctgataacggcaccatcaccataactgatactggtattggaatgacaaaggaagaacttattgattgccttggaactattgctcaaagtggtacttcgaaattcttgaaggctctaaaggaaaacaaggaccttggtgctgacaacggtttgatcggacagtttggtgttgggttttactctgctttcttagttgctgagaaggttgttgtgtccaccaaaagccccaaatctgacaagcaatatgtttgggaatcggttgccgatagtagctcgtatctgatcagagaagaaacagaccctgataacattctacgtcgtggaacacaaatcaccttgtatctgagggaggatgataaatacgaatttgcggagtctacaaggatcaagaacctcgtgaagaattactctcagttcgttgggtttcctatctatacatggcaggagaaatcaaggactatagaggtcgaagaggacgaaccagttaaggaaggagaagagggtgagccaaagaaaaagaagaccactaaaactgagaagtattgggattgggaactagccaacgagaccaaaccgctatggatgcgcaattcgaaggaagtggaaaaaggagagtacaatgagttctacaaaaaggctttcaatgagttcttggatccacttgctcacacacacttcacaactgagggtgaggttgagttcaggagcattttgtacatccctgggatgggtcctcttaacaatgaagatgttacaaacccgaaaacaaagaacattcgtctctacgtgaagcgtgtgtttatctctgacgattttgatggagagcttttcccgagatatctgagctttgtgaagggagttgtggactctgatgatcttcctcttaatgtttctcgtgaaattctccaagaaagcagaattgtaagaatcatgagaaagaggctcattagaaaaacctttgacatgatacaagaaatctctgagagtgaaaacaaagaggattacaagaaattctgggagaactttggtagattccttaaattgggttgtattgaagacaccggtaaccacaagcgtatcacaccgctacttagattcttcagttccaagaatgaagaggaattgacaagcttggatgattatatcgagaacatgggagagaaccaaaaggcgatctactacctcgcaactgatagtcttaaaagtgccaagtctgcccctttcttggagaaactaatccaaaaagatatcgaggttctatatttggttgaaccaatcgatgaagttgctattcagaatttgcaaacctacaaagaaaagaaattcgttgatatcagtaaagaagatttggaactcggagatgaagatgaagtaaaggacagggaagcgaaacaagagtttaaccttctctgtgactggataaaacagcagctcggtgacaaagttgcaaaagtccaagtctcaaaccgtttgagctcttctccttgtgtgcttgtctctggcaaattcgggtggtcagctaatatggaaaggctaatgaaggcacaggctcttggagacacttcaagcctggagttcatgagaggtaggagaatactagagatcaatccagatcatcccatcatcaaagacttgaacgctgcttgtaagaatgcaccagagagcactgaagcaacaagagtggtcgatctcttgtatgacactgctataatatcaagtggattcactcctgatagcccggccgagctcgggaacaagatatatgagatgatggcaatggcggttggaggaagatggggcagagttgaagaagaagaagaaagctcgactgtgaatgaaggagatgacaaaagcggagaaacagaggtagttgaaccatctgaagtgagggcagagagtgatccttggcaagattga

SEQ ID NO: 129152 - protein, 780 aa, Arabidopsis thaliana
MAPALSRSLYTSPLTSVPITPVSSRLSHLRSSFLPHGGALRTGVSCSWNLEKRCNRFAVKCDAAVAEKETTEEGSGEKFEYQAEVSRLLDLIVHSLYSHKEVFLRELVSNASDALDKLRFLSVTEPSLLGDGGDLEIRIKPDPDNGTITITDTGIGMTKEELIDCLGTIAQSGTSKFLKALKENKDLGADNGLIGQFGVGFYSAFLVAEKVVVSTKSPKSDKQYVWESVADSSSYLIREETDPDNILRRGTQITLYLREDDKYEFAESTRIKNLVKNYSQFVGFPIYTWQEKSRTIEVEEDEPVKEGEEGEPKKKKTTKTEKYWDWELANETKPLWMRNSKEVEKGEYNEFYKKAFNEFLDPLAHTHFTTEGEVEFRSILYIPGMGPLNNEDVTNPKTKNIRLYVKRVFISDDFDGELFPRYLSFVKGVVDSDDLPLNVSREILQESRIVRIMRKRLIRKTFDMIQEISESENKEDYKKFWENFGRFLKLGCIEDTGNHKRITPLLRFFSSKNEEELTSLDDYIENMGENQKAIYYLATDSLKSAKSAPFLEKLIQKDIEVLYLVEPIDEVAIQNLQTYKEKKFVDISKEDLELGDEDEVKDREAKQEFNLLCDWIKQQLGDKVAKVQVSNRLSSSPCVLVSGKFGWSANMERLMKAQALGDTSSLEFMRGRRILEINPDHPIIKDLNAACKNAPESTEATRVVDLLYDTAIISSGFTPDSPAELGNKIYEMMAMAVGGRWGRVEEEEESSTVNEGDDKSGETEVVEPSEVRAESDPWQD

SEQ ID NO: 129153 - DNA, 2400 bp, Arabidopsis thaliana
  CDS (1)..(2400)
atgatcaggctctctaagcgctccgtctctaccctcctacgctccggtaaccaaagcttccgtatcgccgccgcagcttccacctcccgttcttccccatctgccacggatgtcaagagaagtgacactgaatcgagatggtactcatctttaaccaatggacaatctaagaatagtgggtcatttgctcaattgaacatgaaaaccaattggtttatgggataccggaacgaatccagtgcagcagcatcagattcttcctcacaagctcctccaccggctgagaaattcgagtatcaagctgaagttagtcgcctcatggaccttattgtcaacagcttatacagcaataaggaggtgtttcttcgggagcttattagtaatgcaagtgatgcattggataagcttcgttatttgagcgttaccaaccctgagctctcaaaagatgctcctgatcttgatatacgtatctatgcagacaaggagaatggaatcataactctcactgattctggtattggtatgacacggcaagaattagttgactgtcttgggactattgctcaaagtggaaccgccaagttcatgaaagctctaaaggatagcaaggatgcaggtggtgacaacaatttaattggtcaatttggtgtagggttctattcagcatttttggttgcagatcgggtaattgtgtcaaccaagagccctaagtctgataaacaatatgtatgggaaggagaagcaaattcaagcagttttaccattcaggaagatactgacccacaatctctcattcctagaggaactcgtattactttgcatcttaagcaagaagccaaaaactttgcagatcctgagcggattcagaagctcgtgaaaaactattcccagtttgtttctttccctatttacacttggcaggaaaaaggatacacaaaagaggttgaggttgaagatgatccaactgaaacaaaaaaagatgaccaagatgaccaaactgagaaaaagaagaagaccaagaaggttgttgagagatactgggattgggagcttacaaatgagacacaaccgatttggctgcgtaaccctaaggaggtgacaacagcagaatacaatgagttttacagaaaagctttcaatgagtatttggacccattggcttcatcccatttcacgacagagggcgaagtcgagtttaggtctatcctatatgtgccacctgtttcaccatcggggaaggatgacatagtcaatcaaaagacaaagaacataaggctctatgttaaacgagttttcatttcagatgactttgatggggagctgtttcctcggtacttgagctttgttaaaggtgttgtggactcgcatgatctcccacttaatgtatcacgtgagattcttcaagaaagtcgcatagtgcggatcatgaagaaacgtctagtgaggaaggcttttgatatgattttgggtatatccttgagtgaaaacagagaagactatgagaagttttgggataattttggcaaacacttgaaattagggtgcatcgaagaccgtgaaaaccacaagcgtatagctccactgcttcgatttttctcctcccagagtgagaatgacatgatcagcttggatgagtatgttgagaacatgaaacctgaacagaaagccatatacttcattgcttctgacagcattacaagtgctaagaatgcacctttcctcgaaaagatgctggagaaaggacttgaagtactatatttggtagagcctattgatgaagttgccgtacagagtttaaaagcttataaggagaaggattttgtagatatcagcaaggaagacttggatctaggagacaagaacgaggagaaagaggcagcagtgaaaaaagagtttggacagacttgtgactggataaagaaacgattgggtgacaaggttgccagtgttcaaatttccaaccgtcttagttcttccccctgtgttcttgtatctggtaaatttggttggtcagccaatatggagaggctaatgaaggcacaatcaactggtgacacaataagcctcgactacatgaaagggagaagagtgtttgagatcaatcccgaccactcaattatcaagaacataaatgctgcttacaatagtaacccaaatgacgaagatgcaatgagagccatagatcttatgtatgacgcagcactagtttctagtgggttcacgcccgataatccagcagagctgggtgggaagatatatgagatgatggatgtagctctttccgggaaatggtcaagccctgaggtgcagccgcagcaacagcagatggcacattctcacgatgcagagacgtttgaagctgaagtggttgaaccagtcgaagtggatgggaagaaatga

SEQ ID NO: 129154 - protein, 799 aa, Arabidopsis thaliana
MIRLSKRSVSTLLRSGNQSFRIAAAASTSRSSPSATDVKRSDTESRWYSSLTNGQSKNSGSFAQLNMKTNWFMGYRNESSAAASDSSSQAPPPAEKFEYQAEVSRLMDLIVNSLYSNKEVFLRELISNASDALDKLRYLSVTNPELSKDAPDLDIRIYADKENGIITLTDSGIGMTRQELVDCLGTIAQSGTAKFMKALKDSKDAGGDNNLIGQFGVGFYSAFLVADRVIVSTKSPKSDKQYVWEGEANSSSFTIQEDTDPQSLIPRGTRITLHLKQEAKNFADPERIQKLVKNYSQFVSFPIYTWQEKGYTKEVEVEDDPTETKKDDQDDQTEKKKKTKKVVERYWDWELTNETQPIWLRNPKEVTTAEYNEFYRKAFNEYLDPLASSHFTTEGEVEFRSILYVPPVSPSGKDDIVNQKTKNIRLYVKRVFISDDFDGELFPRYLSFVKGVVDSHDLPLNVSREILQESRIVRIMKKRLVRKAFDMILGISLSENREDYEKFWDNFGKHLKLGCIEDRENHKRIAPLLRFFSSQSENDMISLDEYVENMKPEQKAIYFIASDSITSAKNAPFLEKMLEKGLEVLYLVEPIDEVAVQSLKAYKEKDFVDISKEDLDLGDKNEEKEAAVKKEFGQTCDWIKKRLGDKVASVQISNRLSSSPCVLVSGKFGWSANMERLMKAQSTGDTISLDYMKGRRVFEINPDHSIIKNINAAYNSNPNDEDAMRAIDLMYDAALVSSGFTPDNPAELGGKIYEMMDVALSGKWSSPEVQPQQQQMAHSHDAETFEAEVVEPVEVDGKK

SEQ ID NO: 129155 - DNA, 2118 bp, Arabidopsis thaliana
  CDS (1)..(2118)
atggcggatgttcagatggctgatgcagagacttttgctttccaagctgagattaaccagcttcttagcttgatcatcaacacgttctacagcaacaaagaaatcttcctccgtgagctcatcagtaactcttctgatgctcttgacaagatccgatttgagagcttaacggataagagcaagctcgatggacagcctgaactcttcattagattggttcctgacaagtctaataagacgctctcaattattgacagtggtattggcatgaccaaagcagatttggtgaacaacttgggaaccattgcgaggtctggaacaaaagagtttatggaggcgcttcaagctggagctgatgtaagcatgataggacaatttggtgttggtttctactctgcttatcttgttgcagagaaggttgttgtcactacaaagcacaatgatgatgaacaatacgtttgggagtctcaagctggtggttccttcactgtcactagggatgtggatggggaaccacttggtagaggaactaagatcaccctcttccttaaggacgatcagcttgaatacttggaggagaggagactcaaagacttggtgaagaagcactctgagttcatcagttaccctatctacctttggaccgagaaaaccaccgagaaggagatcagtgacgatgaggatgaagatgaaccaaagaaagaaaacgaaggtgaggttgaagaagttgatgaggagaaggagaaagatggtaaaaagaagaagaaaatcaaggaagtctctcacgagtgggaactcatcaacaagcagaaaccgatctggttgaggaagccagaagagatcactaaggaagagtatgctgctttctacaagagcttgaccaatgactgggaagatcacttagccgtgaaacacttctcagtggagggtcagctagaattcaaggccattctctttgtaccaaagagagctccgtttgatctctttgacacgaggaagaagttgaacaacatcaagctttatgtcaggagggtgttcattatggacaactgtgaagagctaatcccagagtacctcagctttgtgaaaggtgttgttgactctgatgacttgccactcaacatctctcgtgagacgcttcaacagaacaagatccttaaggtgatcaggaagaatctagtgaagaagtgcattgagatgttcaacgagattgctgagaacaaagaggactacaccaaattctatgaggctttctccaagaatctcaaattgggtatccatgaagacagtcagaacaggggaaagattgctgatcttctacggtaccactccacaaagagtggtgatgaaatgacgagcttcaaagattacgtcacaaggatgaaggaaggtcaaaaggacattttctacatcactggtgaaagcaaaaaggcggtggagaattctcccttcttggagaggctgaagaagagaggatacgaggtactttacatggtggatgcgattgacgaatacgctgttggacaattgaaggagtatgacggtaagaaacttgtttctgcgactaaagaaggcctcaaacttgaagatgagaccgaagaagagaagaaaaagagggaagagaagaagaagtccttcgagaatctgtgcaagacgattaaggaaattctcggggacaaggttgagaaggttgtggtctcagacaggattgtggactctccctgctgtctagtaactggtgaatatggatggactgcaaatatggagaggattatgaaggcacaggcgttgagagatagcagcatgagtggttacatgtcgagcaagaaaacaatggagatcaaccccgacaacggtataatggaggagctcaggaagagagctgaagcagacaagaatgacaagtctgttaaagatcttgtcatgttgctgtatgagacagctttgttgacgtctggattcagtcttgatgaaccgaacacttttgctgctaggattcacaggatgttgaagttgggtctgagtattgatgaggatgagaacgttgaggaagatggtgatatgcctgagttggaggaggacgctgctgaagagagcaagatggaggaagtcgactaa

SEQ ID NO: 129156 - protein, 705 aa, Arabidopsis thaliana
MADVQMADAETFAFQAEINQLLSLIINTFYSNKEIFLRELISNSSDALDKIRFESLTDKSKLDGQPELFIRLVPDKSNKTLSIIDSGIGMTKADLVNNLGTIARSGTKEFMEALQAGADVSMIGQFGVGFYSAYLVAEKVVVTTKHNDDEQYVWESQAGGSFTVTRDVDGEPLGRGTKITLFLKDDQLEYLEERRLKDLVKKHSEFISYPIYLWTEKTTEKEISDDEDEDEPKKENEGEVEEVDEEKEKDGKKKKKIKEVSHEWELINKQKPIWLRKPEEITKEEYAAFYKSLTNDWEDHLAVKHFSVEGQLEFKAILFVPKRAPFDLFDTRKKLNNIKLYVRRVFIMDNCEELIPEYLSFVKGVVDSDDLPLNISRETLQQNKILKVIRKNLVKKCIEMFNEIAENKEDYTKFYEAFSKNLKLGIHEDSQNRGKIADLLRYHSTKSGDEMTSFKDYVTRMKEGQKDIFYITGESKKAVENSPFLERLKKRGYEVLYMVDAIDEYAVGQLKEYDGKKLVSATKEGLKLEDETEEEKKKREEKKKSFENLCKTIKEILGDKVEKVVVSDRIVDSPCCLVTGEYGWTANMERIMKAQALRDSSMSGYMSSKKTMEINPDNGIMEELRKRAEADKNDKSVKDLVMLLYETALLTSGFSLDEPNTFAARIHRMLKLGLSIDEDENVEEDGDMPELEEDAAEESKMEEVD

SEQ ID NO: 129157 - DNA, 2100 bp, Arabidopsis thaliana
  CDS (1)..(2100)
atggcggacgcagagacctttgctttccaagctgagatcaaccagttgctttccctcatcatcaataccttttactccaacaaggagatcttcctccgtgaactcatcagtaactcctccgatgctttggacaagattaggttcgagtccttgacggataagagcaagctcgatggtcagcctgagcttttcattcatatcattccggacaagactaacaacaccttgaccattatcgatagtggtattgggatgaccaaggctgatttggtgaacaaccttggaacaattgcaaggtctggtaccaaggagttcatggaggcattggctgctggagctgatgttagcatgattggtcaatttggtgttggtttctactctgcttacttggttgctgacaaggttgttgttactaccaagcacaacgacgatgagcagtatgtgtgggagtctcaggccggtggatctttcacggtgaccagagacacctctggtgaggctcttggtagaggaacaaagatgatcctttacctcaaggaagaccagatggagtacattgaggagcgaaggcttaaggatttggtgaagaagcactctgagttcatcagctacccaatctctctctggattgagaagaccattgagaaggagatctctgatgatgaagaggaggaagagaagaaggatgaggaaggcaaggttgaggaaattgatgaggagaaagaaaaggaggagaagaaaaagaagaagattaaggaggttactcatgagtgggatttggtgaacaaacagaagcctatctggatgaggaagccagaggagatcaacaaggaggagtacgctgctttctacaagagtttgagcaatgattgggaggagcatttggctgtgaagcatttctctgttgaaggacagcttgagttcaaagctatcctctttgttcccaagagagctcctttcgatctctttgacactaagaagaagcccaacaacatcaagctctatgtccgtcgtgtcttcatcatggacaactgtgaagacatcatccctgattaccttgggtttgtcaagggtatcgttgactctgaagatcttcctctcaacatctcaagagaaacattgcagcagaacaagatcctcaaggtcatccgcaagaaccttgtgaagaagtgtcttgagctcttctttgagattgccgagaacaaggaggactacaacaagttctatgaggctttctctaaaaacctgaagctcggcatccacgaggactcccaaaacagaaccaagattgctgagttgctccgttaccactcaaccaagagcggtgatgaattgaccagtctcaaggactacgtgacaaggatgaaggaaggtcagaacgagatcttctacatcaccggtgagagcaaaaaggccgtggagaactctcccttcctagagaagctcaagaagaagggttacgaagtcctctacatggttgacgctattgatgagtatgctattggtcagctcaaggaattcgagggaaagaagcttgtctctgcaaccaaggaaggtctgaagctggaagagactgatgacgagaagaagaagaaagaagagctcaaggagaagtttgagggactctgcaaagtgattaaggacgttttgggagacaaggtcgagaaggttatcgtctctgaccgtgtggtggactcaccttgctgtctagtaacaggcgagtatggctggactgcaaacatggagaggatcatgaaagctcaagctttgaaggatagcaacacgggtggttacatgtcaagcaagaagacaatggaaattaacccagagaactcgatcatggatgagctgagaaagagagctgaagcggacaagaacgataagtctgtgaaggatcttgtgcttcttctctttgagaccgctcttctcacctctggtttcagccttgatgagcccaacacttttggaagcagaatccacaggatgttgaagcttggattgagcattgaagaggatgatgccgttgaagctgatgctgagatgcctccgcttgaagatgatgctgatgctgaaggtagcaagatggaggaagtcgactaa

SEQ ID NO: 129158 - protein, 699 aa, Arabidopsis thaliana
MADAETFAFQAEINQLLSLIINTFYSNKEIFLRELISNSSDALDKIRFESLTDKSKLDGQPELFIHIIPDKTNNTLTIIDSGIGMTKADLVNNLGTIARSGTKEFMEALAAGADVSMIGQFGVGFYSAYLVADKVVVTTKHNDDEQYVWESQAGGSFTVTRDTSGEALGRGTKMILYLKEDQMEYIEERRLKDLVKKHSEFISYPISLWIEKTIEKEISDDEEEEEKKDEEGKVEEIDEEKEKEEKKKKKIKEVTHEWDLVNKQKPIWMRKPEEINKEEYAAFYKSLSNDWEEHLAVKHFSVEGQLEFKAILFVPKRAPFDLFDTKKKPNNIKLYVRRVFIMDNCEDIIPDYLGFVKGIVDSEDLPLNISRETLQQNKILKVIRKNLVKKCLELFFEIAENKEDYNKFYEAFSKNLKLGIHEDSQNRTKIAELLRYHSTKSGDELTSLKDYVTRMKEGQNEIFYITGESKKAVENSPFLEKLKKKGYEVLYMVDAIDEYAIGQLKEFEGKKLVSATKEGLKLEETDDEKKKKEELKEKFEGLCKVIKDVLGDKVEKVIVSDRVVDSPCCLVTGEYGWTANMERIMKAQALKDSNTGGYMSSKKTMEINPENSIMDELRKRAEADKNDKSVKDLVLLLFETALLTSGFSLDEPNTFGSRIHRMLKLGLSIEEDDAVEADAEMPPLEDDADAEGSKMEEVD

SEQ ID NO: 129159 - DNA, 1896 bp, Haemophilus influenzae Rd KW20
  CDS (1)..(1896): transl_table=11
atgaaggaaaaaattatgtcacaaaatcaagaaactcgcggattccaatctgaagtcaaacaactactccaattaatgattcattctttgtactctaacaaagaaattttcttacgtgaattgatttctaatgcttctgatgcggcagataaattacgctttaaagcactttccaaccctgctttatatgaaggcgatggcgacttgcgtgtgcgtgttagctttgatgcggataaaggcactatcacaattagcgataacggcattggcatgacccgtgagcaagtcatcgatcatttgggtacgattgcaaaatcaggaacaaaagaatttttaaccgcacttggtcaagatcaagcaaaaaatagccagcttattgggcagtttggtgtgggtttttattctgcttttattgtggcagataaagtgactgtaaaaaccagagcagctggtgaagaggcggataaagccgtactttgggaatctgcgggtgaaggcgaatattctgtggcggatattgagaaaaaatcccgtggtacagatgtgattttgcatttacgtgaagatgaaaaagaatttttaaatgaatggcgtttgcgtgaaattattggtaaatattctgaccatattggcttgccagtggaaatgctgacgaaagaatacgatgatgaaggcaaagagtgcggcgaaaaatgggaaaaaatcaataaatctgatgccctttggacgcgttctaaaaatgatgtgtctgatgaggaatacaaagcgttttacaaacacttaagccatgattttgttgatcctgtgacttgggcgcataacaaagttgagggaaatcaagcatatactagtttgctttatgtaccagctaaagcaccttgggatttatttaatcgagaacataaacatggcttaaaactttatgttcaacgtgtatttattatggatgatgctgagcaatttataccgaattatctacgttttatgcgtggtttaatcgatagcaatgacttgccattaaatgtatctcgtgaaattttacaggataacaaaattacggctgcactacgcaaagcattaactaagcgttcattacaaatgctagaaaaattagcaaaagatgatgcagaaaaatatcttcaattctggaaagagtttggtttagtcttaaaagaaggccctgcagaagattttgctaacaaagaaactgtcgcgaagttattgcgttttgcttcgacacataatgatggtagcgagcaaactgtctctttagaagattacatcttgcgtatgaaagaggggcaaaaagctatctattacattacagcggatagttatgttgcagcgaaaaatagcccgcacttggaattattcaataaaaaaggcattgaggttttgttgctttccgatcgcattgatgaatggatgttaagctatttaactgaattcgatggtaaacaattacaaagtattacaaaagcagatttggatttaggcgatttagcggataaagaatctgaaacacaaaaacaacaagatgaagcctttggtagttttattgagcgtgtgaaaaacttgcttggcgaacgtgtgaaaacggtgcgtttaactcacaatttaacggatacaccagcggtggtttctacggataacgatcaaatgacgacccaaatggcgaaattgtttgcagccgcagggcaacctgtaccagaagtaaaatacacatttgaactgaatccagaacaccatttagtgaaaaaagtggctgatattgcagatgaaactgaatttgctgattgggtggaattattacttgaacaagctatgttagcagagcgcggatctttggaaaatccagctgcgtttattaaacgtatcaataagttgttaggttaa

SEQ ID NO: 129160 - protein, 631 aa, Haemophilus influenzae Rd KW20
MKEKIMSQNQETRGFQSEVKQLLQLMIHSLYSNKEIFLRELISNASDAADKLRFKALSNPALYEGDGDLRVRVSFDADKGTITISDNGIGMTREQVIDHLGTIAKSGTKEFLTALGQDQAKNSQLIGQFGVGFYSAFIVADKVTVKTRAAGEEADKAVLWESAGEGEYSVADIEKKSRGTDVILHLREDEKEFLNEWRLREIIGKYSDHIGLPVEMLTKEYDDEGKECGEKWEKINKSDALWTRSKNDVSDEEYKAFYKHLSHDFVDPVTWAHNKVEGNQAYTSLLYVPAKAPWDLFNREHKHGLKLYVQRVFIMDDAEQFIPNYLRFMRGLIDSNDLPLNVSREILQDNKITAALRKALTKRSLQMLEKLAKDDAEKYLQFWKEFGLVLKEGPAEDFANKETVAKLLRFASTHNDGSEQTVSLEDYILRMKEGQKAIYYITADSYVAAKNSPHLELFNKKGIEVLLLSDRIDEWMLSYLTEFDGKQLQSITKADLDLGDLADKESETQKQQDEAFGSFIERVKNLLGERVKTVRLTHNLTDTPAVVSTDNDQMTTQMAKLFAAAGQPVPEVKYTFELNPEHHLVKKVADIADETEFADWVELLLEQAMLAERGSLENPAAFIKRINKLLG

SEQ ID NO: 129161 - DNA, 2073 bp, Encephalitozoon cuniculi GB-M1
  CDS (1)..(2073)
atgtcatcgaaccaggagccattggtagaaggcaagatcaaggacaagcattctgagacacacggatttgaggttgatgtgaaccagatgatggacacgatgatcaagagcgtgtactcgtccaaggagctgtttctcagggagctggtgtcgaactcaagtgacgcctgcgacaagctcaaggcgctctatttccagctccgagagaagggatgtgtgcttgatcccgtcacatccctggggattgagattattccgaacaaggataacaggacgctgacgatcaaggataacgggattgggatgacgaagcccgacctgatgaacttcattggaactattgcaagtagtggaaccaagaagttcagagaggagatgaaagagaaagggaactctgctgatgcctccaacctgattgggcagtttggtctcgggttctactcctcgtaccttgtggccgagagggttgacctgataaccaagcacccctctgacgaggcgcttgtgtggacgtccactggaagggacgtgtacacaatagaggagtatgatggagagccgtttgcacatgggacgtcactggtgctgtacatcaaggaaggagaggaggagttcctcgatccaaagaggatcagtgagatagtgaagaaatactctctgtttgtgttctatcctatttacacgtatgtagagaaggagattgaggagccggaggaaaagaaggatgaagagaaggaagatgaaaaggtcgaggaggagacggccgagccgagggttgaggaggtacgggagaagagactgaagaaggttaccgagcgggagcagatcaatgttgagaagccgttgtggaagagaaacataaaggaggttcctgaggaagagctgaagagcttctacaagacggtttccggagactgggacgatttcctcgcggttgacttctggcatattgaggggcttctgtcgattgagcttctgatgtttattccgaagagggcaagattcgacatgttcaataagaacaagaagaacaacaacatcaagctgtactgcaagaatgtgtttgtgactgatgactttggagatgctattccggagtggatgtcgtttgtcagcggggtggttgcctctgatgacattcccatgaacatcagcagggagatgatccaggggacaaatgtgatgaagcttgttaagaagactctcccacagaagatctttgaaatgatagggaagcttgctcttgatgccgagaagtacaagacattctataaggagtttggaaattgtctgaagatggcgattggagaggcaagcgaggggcagcaggacggatacgccaagtgcctgaggtacttcaccacgaagagtggggaagaggccatatcactggacacgtacgtggagaggatggcgccaaaccagaagcagatctatgtgataactgggctcagcaaggagcaggtcaagtcgaatccggccctggatgcattccagaagtacgaggtgatatacatgcatgaggtgatggacgaggtcatgctccgagggctcaagaagtacaaggggcatactatccagaggataacaagcgagggcgttgagcttcccgaggacgaggcaagcaacgaagaggttgtcaagtcgtttgaggagttctgcaagaaggtgaaggacattctttccagcaaggttgagaaggttactgtgaacccaaggcttgtgagcgttcctgcggtcatctccaccaccaagtactctctgtctggaaccatggagaacataatgaaatcccagcctgttaccgaggcaaacccgtttgcagccatgacagcggtcagcaagaagatctttgagatgaatccaaaccaccagcttgtcaagaatctcaaggcgctcttcgacagtaacgagatcgagaagatgaataggatcttggaggtgtttttcgagacggttcttattcacaatgggtttgtactgtctgaccccaagggattctgcgccaacgtcttcgacttcctctgctccgaggaggtgaggtgcgaagagcccgttgaggaggtccagtga

SEQ ID NO: 129162 - protein, 690 aa, Encephalitozoon cuniculi GB-M1
MSSNQEPLVEGKIKDKHSETHGFEVDVNQMMDTMIKSVYSSKELFLRELVSNSSDACDKLKALYFQLREKGCVLDPVTSLGIEIIPNKDNRTLTIKDNGIGMTKPDLMNFIGTIASSGTKKFREEMKEKGNSADASNLIGQFGLGFYSSYLVAERVDLITKHPSDEALVWTSTGRDVYTIEEYDGEPFAHGTSLVLYIKEGEEEFLDPKRISEIVKKYSLFVFYPIYTYVEKEIEEPEEKKDEEKEDEKVEEETAEPRVEEVREKRLKKVTEREQINVEKPLWKRNIKEVPEEELKSFYKTVSGDWDDFLAVDFWHIEGLLSIELLMFIPKRARFDMFNKNKKNNNIKLYCKNVFVTDDFGDAIPEWMSFVSGVVASDDIPMNISREMIQGTNVMKLVKKTLPQKIFEMIGKLALDAEKYKTFYKEFGNCLKMAIGEASEGQQDGYAKCLRYFTTKSGEEAISLDTYVERMAPNQKQIYVITGLSKEQVKSNPALDAFQKYEVIYMHEVMDEVMLRGLKKYKGHTIQRITSEGVELPEDEASNEEVVKSFEEFCKKVKDILSSKVEKVTVNPRLVSVPAVISTTKYSLSGTMENIMKSQPVTEANPFAAMTAVSKKIFEMNPNHQLVKNLKALFDSNEIEKMNRILEVFFETVLIHNGFVLSDPKGFCANVFDFLCSEEVRCEEPVEEVQ

SEQ ID NO: 129163 - DNA, 2364 bp, Drosophila melanogaster
  CDS (1)..(2364)
atgaagtactttttgctggtgggcctgctgctcctagcaggcatcaatcaaatagccgccgatgacgaggccgccacaacggagaccatcgaccttgatctgggctccttcaaggagggctcccgcaccgatgccgagaccctgaagcgcgaggaggaggccatccagctggacggcctgaacgtggcgcagctgaaggaaattcgcgagaaggcgaagaagtttactttccaaacggaggtcaaccgcatgatgaagctgattatcaactcgctttaccgcaacaaggagatcttcctgcgtgaattgatatccaacgcctccgatgccatcgacaagatccgcctattggctctgtccaacagcaaggagctggaaacgaatccggagctgcacatccgcattaaggccgacaaggagaacaaggcgttgcacatcatggactcgggtatcggcatgactcaccaggatctgatcaataacctgggtacaattgccaagtccggcactgccgattttctggccaagatgcaggatcccagcaagtcggagggactcgatatgaacgacatgattggacagttcggtgtgggcttttactccgctttcttggtcgccgatcgtgtagtggtgaccaccaagcacaacgacgacaaacagtacatctgggagtcggatgccaacagcttcagcatcaccgaggatccccgtggcgatactctgaagcgaggatccgtgatctcgctgtatctgaaggaagaagcccaggacttcctggaggaggacaccgtgcgcgagctcatccgcaagtactcgcagttcatcaacttccccatccgcatgtggtccagcaagaccgtcgaggaggaggtgcccgtggaggaggaggccaagcccgagaagagcgaggatgacgtggaggatgaggacgccaaggtcgaggaggccgaagatgagaagcccaagaccaaaaaggtttcgaagaccacctgggactggaccctgatcaacgacagcaagcccatctggacgcgcaagcccgccgaagtgaccgaggatgagtacactagcttctacaagagcctgaccaaggactccagcgagcccctgacccagacgcacttcatcgccgagggcgaggtgaccttcaagagtttgctctacgtgcccaaggtgcagccatcggagtccttcaaccgctacggcaccaagtccgacaacattaagctgtacgtgcgccgtgttttcatcaccgacgagttcaacgacatgatgcccaactacctgagcttcattcgtggcgtcgtcgactccgacgatctgcccctgaacgtttcccgcgaaactctgcagcagcacaagctcatcaaggtgatcaagaagaagctggtccgcaaggttctcgatatgctgaagaagatcgacaaggaggcgtatgagaagttctggaaggagttctccaccaacatcaaattgggcgtgatggaggatcccagcaaccgatcgcgtctcgccaagctgctccgcttccagacctccaacggcaagggcgtcacctcgctggcggagtacaaggagcgcatgaaggccaagcaggagcacatctactacatcgctggtgccaaccgcgctgaggtcgagaagtcgccgttcgtcgagcgtctgctgagcaagggatacgaggtgctgtatctggtggaggccgtcgacgagtactgcatctccgcgctgcccgagttcgatggcaagaagttccagaacgtggccaaggagggattccagctgaacgagtccgagaagagcaagaagaacttcgagtcgctaaagagcaccttcgagccgctggtcaagtggctgaacgatgtggcactcaaggatcagatctccaaggcccaggtttccgagcgtctgagcaactcgccatgcgccctcgtggccggcgtcttcggctggaccggcaacatggagcgtctggccatgtccaacgcccaccagaagtccgacgatcctcagcgcacctactacctcaaccagaagaaaacgctcgagatcaatcccaggcatccgctgatgcgcgagctgctgcgccgcgtggaggccgacgaggccgatgacaccgccaaggacatggctgtgatgatgttccgcaccgccaccctgcggtctggatacatgctccaggagacttcgcagttcgccgacagtattgagcagatgatgcgccagaccttgggtgtctcccaagacgagcaggtggagttcgacgaggaggaggaggatgatgccgaggagaccgccaccggcagccaggagagcggcaacgccgatgatgaggaggaggagcagcagcacgacgagctgtaa

SEQ ID NO: 129164 - protein, 787 aa, Drosophila melanogaster
MKYFLLVGLLLLAGINQIAADDEAATTETIDLDLGSFKEGSRTDAETLKREEEAIQLDGLNVAQLKEIREKAKKFTFQTEVNRMMKLIINSLYRNKEIFLRELISNASDAIDKIRLLALSNSKELETNPELHIRIKADKENKALHIMDSGIGMTHQDLINNLGTIAKSGTADFLAKMQDPSKSEGLDMNDMIGQFGVGFYSAFLVADRVVVTTKHNDDKQYIWESDANSFSITEDPRGDTLKRGSVISLYLKEEAQDFLEEDTVRELIRKYSQFINFPIRMWSSKTVEEEVPVEEEAKPEKSEDDVEDEDAKVEEAEDEKPKTKKVSKTTWDWTLINDSKPIWTRKPAEVTEDEYTSFYKSLTKDSSEPLTQTHFIAEGEVTFKSLLYVPKVQPSESFNRYGTKSDNIKLYVRRVFITDEFNDMMPNYLSFIRGVVDSDDLPLNVSRETLQQHKLIKVIKKKLVRKVLDMLKKIDKEAYEKFWKEFSTNIKLGVMEDPSNRSRLAKLLRFQTSNGKGVTSLAEYKERMKAKQEHIYYIAGANRAEVEKSPFVERLLSKGYEVLYLVEAVDEYCISALPEFDGKKFQNVAKEGFQLNESEKSKKNFESLKSTFEPLVKWLNDVALKDQISKAQVSERLSNSPCALVAGVFGWTGNMERLAMSNAHQKSDDPQRTYYLNQKKTLEINPRHPLMRELLRRVEADEADDTAKDMAVMMFRTATLRSGYMLQETSQFADSIEQMMRQTLGVSQDEQVEFDEEEEDDAEETATGSQESGNADDEEEEQQHDEL

SEQ ID NO: 129165 - DNA, 1899 bp, Salmonella enterica subsp. enterica serovar Typhi Ty2
  CDS (1)..(1899): transl_table=11
atggcattgttgaggtctatccacatgaaaggacaagaaacgcgtggttttcagtcagaagttaaacagcttctgcacctgatgatccattctctttattccaataaagaaatcttcctgcgtgaactcatctctaacgcctcagatgcggcggacaagctgcgtttccgcgctctgtcaaacccggacctgtatgaaggagatggcgagctgcgtgtgcgcgtctctttcgataaagataagcgtacgttgaccattgccgataacggcgtggggatgaatcgtgatgaggtgattgaccacttaggcaccattgccaagtccggcaccaaatctttcctcgaatcaatggggtccgatcaggcgaaagatagccagctcatcggtcagtttggcgtaggcttctactccgcgtttattgtggccgataaagtgaccgtacgtacccgtgcggcaggcgacaagccggaaaatggcgtgttctgggaatcggcaggcgaaggcgaatataccgttgccgatatcaccaaaaatgaccgtggtacggaaatcaccttacacctgcgtgaaggcgaagatgaattcctcgatgactggcgcgtacgctcaattatcagtaaatattccgatcacatcgcattgccggtagagattgaaaaacgggaagaaaaagacggcgaaaccgtgatttcctgggagaaaatcaacaaggcccaggcgttgtggacccgtaacaagtcggaaattaaagacgacgagtacaacgagttttacaagcacatcgcgcatgatttcaccgatccgctgacctggagccacaaccgcgtggaaggtaagcaggagtacaccagcctgctgtatatcccgtcgcaggcgccgtgggatctgtggaaccgcgatcacaaacatggtctgaagctgtacgtacagcgtgtgttcattatggacgatgccgagcagttcatgccgaactatctgcgtttcgtgcgcggcctgattgattctaatgacctgccgttgaatgtctcccgtgaaatcctgcaggacagcacggtaacgcgtaatctgcgcagcgccctgaccaaacgcgttctgcaaatgctggaaaaactggcgaaagacgacgcggaaaaataccaaaccttctggaaacagttcggtctggtgttgaaagaaggcccggcggaagatcacgccaaccaggaagcgatcgctaaactgttgcgctttgcctccacccataccgactcttccgcccagaccgtgtcgctggaagattacgtctcccggatgaaagaagggcaggaaaaaatctactacatcaccgcagacagctatgcggcggcgaaaaacagcccgcacctggagctgctgcgtaagaaaggcatcgaagtgctgctgctctccgatcgcatcgacgagtggatgatgaactacctgaccgagtttgacggtaaagcattccagtcggtcgctaaagccgatgagtccatcgaaaaactggcggatgaagtcgacgaaaacgcgaaagaagcggaaaaggcgcttgagccgttcgtggagcgtgtcaaaaccctgctgggcgatcgcgtgaaagaggtgcgtctgacacaccgtttaaccgacacgccggcgattgtcaccaccgatgcggatgaaatgagcacccagatggcgaaactgttcgccgcggccggtcagtccgtgccggaagtgaaatacatctttgagctcaacccggatcatgtgctggtcaaacgcactgccgataccaaggatgaagcgcagtttaaagagtgggtcgagctgctgctggatcaggcgctgttcgctgaacgcggtacgctggaagatccgaaccagtttatccgccgtatgaaccagttgctggtgtcctga

SEQ ID NO: 129166 - protein, 632 aa, Salmonella enterica subsp. enterica serovar Typhi Ty2
MALLRSIHMKGQETRGFQSEVKQLLHLMIHSLYSNKEIFLRELISNASDAADKLRFRALSNPDLYEGDGELRVRVSFDKDKRTLTIADNGVGMNRDEVIDHLGTIAKSGTKSFLESMGSDQAKDSQLIGQFGVGFYSAFIVADKVTVRTRAAGDKPENGVFWESAGEGEYTVADITKNDRGTEITLHLREGEDEFLDDWRVRSIISKYSDHIALPVEIEKREEKDGETVISWEKINKAQALWTRNKSEIKDDEYNEFYKHIAHDFTDPLTWSHNRVEGKQEYTSLLYIPSQAPWDLWNRDHKHGLKLYVQRVFIMDDAEQFMPNYLRFVRGLIDSNDLPLNVSREILQDSTVTRNLRSALTKRVLQMLEKLAKDDAEKYQTFWKQFGLVLKEGPAEDHANQEAIAKLLRFASTHTDSSAQTVSLEDYVSRMKEGQEKIYYITADSYAAAKNSPHLELLRKKGIEVLLLSDRIDEWMMNYLTEFDGKAFQSVAKADESIEKLADEVDENAKEAEKALEPFVERVKTLLGDRVKEVRLTHRLTDTPAIVTTDADEMSTQMAKLFAAAGQSVPEVKYIFELNPDHVLVKRTADTKDEAQFKEWVELLLDQALFAERGTLEDPNQFIRRMNQLLVS

SEQ ID NO: 129167 - DNA, 1953 bp, Chromobacterium violaceum ATCC 12472
  CDS (1)..(1953): transl_table=11
atgccggcaacagccgccatctgccggctatcgccaacctcaataacattgacgaccatgagtgcacagaaagaaaccctgggttttcagaccgaagtcaaacagctgctcaagctgatgatccattccttgtattccaacaaggaaatcttcttgcgtgaattgatctccaatgcgtccgacgcggccgacaagctgcgcttcgagggcctggccaagccggagctgttcgagaacgatccggagctgaagatccgcatcgccttcgataaagacgcccgcaccatcactatcgccgacaacggcatcggcatgagccgcgacgaagtggtgtcccatatcggcaccatcgccaagtcgggcaccaagtccttcttcgagcagctgtccggcgacgagaaaaaggatgcccacctgatcggccagtttggcgtaggcttctattccgccttcatcgtcgccgacaaggtgacgctgaccacccgtcgcgccggcgaggccgaggccgtgcgctgggagtcgcacggcgagggcgagtacacgctggagagcgtggagaaggccgagcgcggcaccgagatcgtcctgcacctgaaggagggcgaggacgagctgctgaacgactggaagctgaagggcatcatccgcaagtattccgaccacatctccatcccgatcgagatgaagaagggcaacagctacggcgagaacggcgaagtgatcgtcagcgacgaaatggaggcggtcaactccgcgtccgcgctgtggacccgctccaagaacgacatcagcgaagagcagtaccaggaattctacaagcacgtcgcccacgacttcaccgccccgctggcctggagccacgcccgcgtcgagggccgccaggaatacaccgagctgctgtatatcccgtcgcgcgcgccgttcgacctgtatgaccgcgagcgcaagcagggcgtgaagctgtacgtgcgccgcgtcttcatcatggaagacaccgagaagctgatgccgcactacctgcgcttcgtgcgcggcgtgatcgacagcaacgatctgccgctgaacgtgtcgcgcgaaatcttgcaggagtccaaggacatcgacgccatccgcgccggctgcgtgaagaaggtgctgggcctgctggaagacttgtcggccaaccagccggagaagtacgccgagttctggaaggaattcggccaggtgctgaaggaaggcgtgggcgaggacttcgccaacaaggagcgcatcgccaagctgctgcgtttcgtctccaccgcgtccgaagacgccgagcccaccgtatcgctggctgattacatcggccggatgaaggaaggccaggacaagatctactacatcaccgccgacacgctggccgccgccaagaacagtccgcatctggaagtgttcaagaagaagggcgtggaggtgctgctgttgaccgaccgcgtcgacgaatgggtgacaggctcgctgttcgaattcgacggcaaggcgctgcaatccgtcgccaagggcgccctcgatctgggcgcgctggaagacgaggccgacaaggaagcgcagaagcaggtcgaggaagcgtccaagccggtggtggaaaaagtgcagaaggcgttgggcgacaaggtgaaggaggtgcgcgccaccgcccgcctggtggaaagcccggcttgcctggtggccggcgagcatgacatgagcgcccacctggagcgcatgctgaaggctgccggccagaagatagaaggcagcaagccgacgctggaaatcaatccggagcatgtgctggtcaagcgtttggccgaggagtccgacgaggcccgcgccggcgacctggccgccgtgctctacgatcaggccttgctggccgaaggcggcaagctggaagaccctgcctccttcgtcaagcgcatcaacaagctgatgctggagttgtcggtctga

SEQ ID NO: 129168 - protein, 650 aa, Chromobacterium violaceum ATCC 12472
MPATAAICRLSPTSITLTTMSAQKETLGFQTEVKQLLKLMIHSLYSNKEIFLRELISNASDAADKLRFEGLAKPELFENDPELKIRIAFDKDARTITIADNGIGMSRDEVVSHIGTIAKSGTKSFFEQLSGDEKKDAHLIGQFGVGFYSAFIVADKVTLTTRRAGEAEAVRWESHGEGEYTLESVEKAERGTEIVLHLKEGEDELLNDWKLKGIIRKYSDHISIPIEMKKGNSYGENGEVIVSDEMEAVNSASALWTRSKNDISEEQYQEFYKHVAHDFTAPLAWSHARVEGRQEYTELLYIPSRAPFDLYDRERKQGVKLYVRRVFIMEDTEKLMPHYLRFVRGVIDSNDLPLNVSREILQESKDIDAIRAGCVKKVLGLLEDLSANQPEKYAEFWKEFGQVLKEGVGEDFANKERIAKLLRFVSTASEDAEPTVSLADYIGRMKEGQDKIYYITADTLAAAKNSPHLEVFKKKGVEVLLLTDRVDEWVTGSLFEFDGKALQSVAKGALDLGALEDEADKEAQKQVEEASKPVVEKVQKALGDKVKEVRATARLVESPACLVAGEHDMSAHLERMLKAAGQKIEGSKPTLEINPEHVLVKRLAEESDEARAGDLAAVLYDQALLAEGGKLEDPASFVKRINKLMLELSV

SEQ ID NO: 129169 - DNA, 2472 bp, Arabidopsis thaliana
  CDS (1)..(2472)
atgaggaagaggacgctcgtgtccgttttgttccttttctcgcttctgtttcttcttccagatcaaggtacaaagttacacgcgaatgcagaagagagttccgatgatgttacagatccaccaaaagttgaggagaaaattggtggtcacggtggtttatcgacggattccgatgtagttcatagagagtctgagtcgatgtcaaagaagacgcttcgcagtaacgcggagaagtttgagttccaagctgaggtttctcggcttatggacattattatcaactctctatacagtaacaaggacattttcttaagagagttgatctccaatgcttctgatgccttggacaaaattaggttccttgcactcactgacaaagacgttttgggtgaaggtgacactgctaagcttgagatccagattaagctagacaaagccaagaagattctttctattcgagaccggggaattggtatgactaaggaagacttaatcaagaaccttggtaccatagcaaaatctggaacgtcagcttttgttgagaaaatgcaatcaagtggggatttgaaccttattggacaatttggagttggattctactctgcctatcttgttgctgactacattgaagtcattagcaagcacaatgatgacagccagtatgtatgggaatcaaaggctaacggtaaatttgctgtttccgaggatacatggaatgagcctcttggacgtggaaccgagattagattacatcttagggatgaagctggcgagtacctagaagaaagtaaacttaaggaattggtgaagagatattctgaattcattaacttccctatctccctctgggctagcaaagaggttgaaaccgaggtcccagttgaggaagatgaatcagctgatgaggaaactgaaaccacctctaccgaggaagaaaaggaagaagatgctgaggaggaagatggtgagaaaaagcagaaaaccaagaaggtgaaagaaacagtttatgaatgggagcttctgaatgatgttaaggctatatggctgagaagtccaaaggaggtgacagaggaagagtacactaaattctaccactctctctcaaaggattttaccgacgagaagccaatggcttggagtcactttaatgctgaaggtgatgttgaattcaaggctgtgttgtatgttcctccgaaagctccccatgatctatacgagagctattacaacagcaacaaggcgaacttgaagctatatgtcaggagggtgttcatctcagatgaatttgatgagcttctgcctaagtatttgagtttcttgaagggtcttgttgactctgacacattgcctctaaatgtatcaagagaaatgcttcaacaacacagcagcttaaagacaattaagaagaagcttatccgaaaggcgcttgatatgatccgcaagcttgctgaagaagatcctgatgaaatccatgatgatgagaaaaaagatgtggagaagtctggtgagaacgatgagaagaagggtcaatacacaaaattctggaacgagtttggcaagtctgtcaaactaggtatcattgaggatgctgctaacaggaaccgcttggcaaaacttcttcgttttgagacaacaaagtccgatggaaaattgacttccctggatcagtacattaagagaatgaaaaagagccaaaaggacatattttacatcacaggaagcagcaaggaacagctagagaaatctccattcctggagaggctcatcaagaagggctatgaggtcatcttcttcacagacccagttgatgaatacttgatgcaatacctgatggattacgaagacaaaaagttccagaatgtgtccaaggaaggactgaaggttgggaaagattcaaaagacaaggagctgaaggaagcattcaaggagctaacaaagtggtggaaaggaaatctcgctagcgaaaacgtagacgatgtcaaaatcagcaaccgtttggctgacactccatgtgtagtcgtaacatccaagtttggatggagtgctaatatggagaggatcatgcagtcccaaactctctcggatgctaataagcaagcttacatgcgcggaaagagagtcctcgagatcaacccacgacaccctatcatcaaagaactcaaggatagaattgcaagtgacccagaggatgagagtgtgaaggaaacagcacagctcatgtaccagacagctttgatcgagagtggattcatactcaccgacccaaaagactttgctgcccgtatttataactcagtcaagagcggtctgaacatcagccctgatgcagtagccgacgaggaaatcgaggcagcagaggaaccagagaccagtgaggcaactgagacgaaatcagatgacttggctggtggtctaaacattgaagccgaacccgttgagcaacaagaagagaacaccaaggacgaactgtag

SEQ ID NO: 129170 - protein, 823 aa, Arabidopsis thaliana
MRKRTLVSVLFLFSLLFLLPDQGTKLHANAEESSDDVTDPPKVEEKIGGHGGLSTDSDVVHRESESMSKKTLRSNAEKFEFQAEVSRLMDIIINSLYSNKDIFLRELISNASDALDKIRFLALTDKDVLGEGDTAKLEIQIKLDKAKKILSIRDRGIGMTKEDLIKNLGTIAKSGTSAFVEKMQSSGDLNLIGQFGVGFYSAYLVADYIEVISKHNDDSQYVWESKANGKFAVSEDTWNEPLGRGTEIRLHLRDEAGEYLEESKLKELVKRYSEFINFPISLWASKEVETEVPVEEDESADEETETTSTEEEKEEDAEEEDGEKKQKTKKVKETVYEWELLNDVKAIWLRSPKEVTEEEYTKFYHSLSKDFTDEKPMAWSHFNAEGDVEFKAVLYVPPKAPHDLYESYYNSNKANLKLYVRRVFISDEFDELLPKYLSFLKGLVDSDTLPLNVSREMLQQHSSLKTIKKKLIRKALDMIRKLAEEDPDEIHDDEKKDVEKSGENDEKKGQYTKFWNEFGKSVKLGIIEDAANRNRLAKLLRFETTKSDGKLTSLDQYIKRMKKSQKDIFYITGSSKEQLEKSPFLERLIKKGYEVIFFTDPVDEYLMQYLMDYEDKKFQNVSKEGLKVGKDSKDKELKEAFKELTKWWKGNLASENVDDVKISNRLADTPCVVVTSKFGWSANMERIMQSQTLSDANKQAYMRGKRVLEINPRHPIIKELKDRIASDPEDESVKETAQLMYQTALIESGFILTDPKDFAARIYNSVKSGLNISPDAVADEEIEAAEEPETSEATETKSDDLAGGLNIEAEPVEQQEENTKDEL

SEQ ID NO: 129171 - DNA, 2421 bp, Strongylocentrotus purpuratus
  CDS (1)..(2421)
atggccaacaaattttggcttttagccatcgtaggtgttctgctgtttgcagcatgtgcatcagcagcagatgaagatgagggagaggcaattgttgaagacgacattggaaagagtcgtgatggatcaaagactgatgatgaagttgtcgcaagggaggaggaagcaatcaaactggatggattaaatgtttctcaaatgaaagagttacgagattcggctgaaaaacatgtattccaggccgaggtcaaccgtatgatgaaactcatcatcaactcactctacaggaacaaggagatcttcttgcgtgagttgatctccaacgcttctgatgctctggataagatcagattgacatcgttgacagataaagcagccttggatgccacagaagaactatccatcaagattaaggctgataaagataatcacatgcttcatataaccgataccggtgtgggtatgaccaagaatgacctcatcaacaaccttggaaccatcgccaaatctggaaccagtgaattctttgagaaactttccgacatggattcatctgaagctaccgatctgattggtcagtttggtgttggtttctactcttcattcttggttgctgagcgtgttatcgtcacatctaaacacaacgatgatgagcagtacatctgggaatctgactcggctgaattctccatcaataaggaccctcgtggagacactctcaaacgtggaactactatcagtcttttgctgaaggaggaagcctatgatttcttggaagcagataccattgagaaccttgtgaagaagtacagtcagttcatcaacttccccatttatctgtggggtagcaagaccgagtcagttgaagaacctattgaggaagatgaagcagctgaagcggaggaggataagactgaagatgaggatgttgaggttgaggaggagacagacgaggaagagaaacccaagactaagaaggtggagaagactacatgggactggagattgatgaatgagaacaaacccatctggaccagagcgcctcgggatatcacagatgaagaatacgaggagttctataaatctttcaccaaggagaccgatgcacccatggctaagactcatttctcagcggaaggagaggtcaccttcaggtccatcctcttcatcccctcgaaggcacctaaccagatgttccaggactatggcaagaagtttgacaacatcaagctttatgtacgacgtgtattcatcactcatgactttgaagacatgatgcccaagtatcttagctttgtcaagggcgtagttgactctgatgatctgccactcaatgtgtcacgtgagactctccagcaacacaaactactcaaggtcatcaagaagaaacttgtcaggaagactcttgacatgctgaagaagatggaccccgaagaatacatggagaagttctacaaggagtacggagtcaacgtccaagctggggatcatcgaagaccacagcaacaggtcccgtctggccaagctggtcaggttcttctctcaaactctgagacggaacagaccagtcttcaggattatctggagcgtatgaaggagaagcaggaggtcatctactttgttgctggaacaagcaggaaagaggttgaatcttcaccatttgttgagcgactcctgaagaagggctacgaggtaatcttcttgaccgagcccgtagatgagtattgcatccaatccctgcccgagtttgaaggcaagaagttccagaacgttgccaaggaaggactgaagattgatggagaggactccgaggctgctaaggagaggaaggaggagctggaggccaagtttgaaccccttctcaagtggctcaaggacgcagctctgggagatgagatcaaggatgctaagctgtccaaccgtctgagtgactcaccctgtgccttggttgctagtcagtatggatggtcaggaaacatggaacgtatcatgaaggctcaggcatacgctcaggctaataatcctaacacagagtactacgcctcccagaagaagaccctggaagtgaaccccagacatcccctcatcaagacactcttagagaaggttgaagcggatgcagaagatgagacggccaaggaccttgccgtcgtcatgtttgagacggctaccctgcgttctggtttcgccctccccgactctgctgccttcgctggtaggatagagaggatgctcaagatcagtatgaaccttgaccctaatgagaaggtggaagaagaaccagaatatgaagacgaggaagaagtagaggaagaggaggaggaagaagacgaggaggaagaattatctgatgatgatgaatatgatgatagcgtagaagaattagtagaagaagatattgaaagccatgatgagctctga

SEQ ID NO: 129172 - protein, 806 aa, Strongylocentrotus purpuratus
MANKFWLLAIVGVLLFAACASAADEDEGEAIVEDDIGKSRDGSKTDDEVVAREEEAIKLDGLNVSQMKELRDSAEKHVFQAEVNRMMKLIINSLYRNKEIFLRELISNASDALDKIRLTSLTDKAALDATEELSIKIKADKDNHMLHITDTGVGMTKNDLINNLGTIAKSGTSEFFEKLSDMDSSEATDLIGQFGVGFYSSFLVAERVIVTSKHNDDEQYIWESDSAEFSINKDPRGDTLKRGTTISLLLKEEAYDFLEADTIENLVKKYSQFINFPIYLWGSKTESVEEPIEEDEAAEAEEDKTEDEDVEVEEETDEEEKPKTKKVEKTTWDWRLMNENKPIWTRAPRDITDEEYEEFYKSFTKETDAPMAKTHFSAEGEVTFRSILFIPSKAPNQMFQDYGKKFDNIKLYVRRVFITHDFEDMMPKYLSFVKGVVDSDDLPLNVSRETLQQHKLLKVIKKKLVRKTLDMLKKMDPEEYMEKFYKEYGVNVQAGDHRRPQQQVPSGQAGQVLLSNSETEQTSLQDYLERMKEKQEVIYFVAGTSRKEVESSPFVERLLKKGYEVIFLTEPVDEYCIQSLPEFEGKKFQNVAKEGLKIDGEDSEAAKERKEELEAKFEPLLKWLKDAALGDEIKDAKLSNRLSDSPCALVASQYGWSGNMERIMKAQAYAQANNPNTEYYASQKKTLEVNPRHPLIKTLLEKVEADAEDETAKDLAVVMFETATLRSGFALPDSAAFAGRIERMLKISMNLDPNEKVEEEPEYEDEEEVEEEEEEEDEEEELSDDDEYDDSVEELVEEDIESHDEL

SEQ ID NO: 129173 - DNA, 2373 bp, Nasonia vitripennis
  CDS (1)..(2373)
atgaacaagctcgccttcgccgtcgcggcgcttttcctcctcgcggggtttgccgctgcggaggacgacttcatcgacgagagcatcggcaccgtcgagactgatttcggcgccagccgagaagccctcaggacagacgaccaagttgtgcagagagaggaggaagccatcaaaattgatggcctcaatgtcgcccagattaaggaactgagggacaaggctgagaagttcaacttccagaccgaagtcaatcgcatgatgaagctcatcattaattctctgtaccgcaacaaggagatcttcctccgagagttgatctcgaacgcgtctgacgctattgacaagattcgcttgctctccctcacggacaaaaacgtgctggaaaccaatgaggagctctccataaggataaaggcggacaaggccaataaaatactcagcatcaccgataccggcatcggtatgaccaagcaggatctcgtcaacaatttgggcaccatcgccaagtccggcactgccgaatttctgggcaaaatgcaggacgcgtccaatgctcaagaaatgaacgacatgatagggcagtttggtgttggattctactctgccttcctcgtcgccaatagggtagtcgtcaccaccaagcacaacgacgacaagcagtacatctgggaatctgacagcgccagcttcagcattgtcgaggatcctcgaggtgacactctcaagaggggaacgaccatcagcttgcacatgaaagatgaggcttccgacttcttggaacaagacaccatcaagaatctcatcaagaaatattcacagttcatcaacttccccatctacttgtggaacagcaaaaccgtccaagttgaagaggaggaagcggaaaaggctgatgttgagggagacaacgagaaaaccgaagaagaaaaagaagaagaagaagaagatgccaaggtagaggaagctggcgaggagaaagagaagaagaaagttagcaagaccatctgggattgggaattgctgaacgactccaaaccaatctggactctgaaaccatctgacatcactgatgacgagtacaatgaattctacaaggcactgaccaaggatgctcaagaaccattggccaaggttcacttcattgctgaaggagaagtcaccttcaagtcattgctgtttgttcccagagttcagccaggtgacagtttcaaccgctatggaacaaaggatgataacatcaagttatacgtcaggagagtcttcatttctgacaaattcaacgatttgatgccaaactatttggctttcattcagggtatcgttgacagtgatgatcttccacttaatgtttctcgtgaaaatctgcagcagcacaagctcattaaaatcattaagaagaaactggttcgtaaggtcctggatatgatcaagaaaattcccaaagaagactaccttgacttctggaaggaatacagcacaaacatcaaattaggtgttatcgaagatgctcagaatcgcgctaggctttcaaaattgctcatgttccgtacttctgctcaaaatgagcctaccaacctggctgactacgtttcccgcatgaagccaaaccaacagcacatctactacatagctggggcttccattgatgaagttaaaaagtctccatttgttgaacgtctcctgaagaagggatacgaagtcttgtacttggttgaagctgttgacgaatatgcactttcgtctatcccagaattcgatagcaagaagttccaaaatgttgccaaggaaggcttctcgctcgacgagggaaccaaagctgcggagagaaagcaaaagctggaaagcacttttgagccccttatcaagtacctgaatgacaagctcaaggaccacattagcaaagctcaagtatcagagcgtttaactgactccccttgtgctcttgtggccagcatgtttggatggactggaaacatggaaaggctcgcaatctctaatgctcaccaaaagagcgatgatcctcagaagacttactatttgaaccaaaagaaaactctggaaatcaatccacgtcatcctctgattagagaactactgcgaagggttgagcaagatgcagaagacaaaataactcaggatatggctcaaatgatgttccaaacagcaactctaagatcaggctacatgctgaaagaaactgcaagctttgctgaaaatgttgaacagcttatgcgaaaaacgttggggattccattagatgaggttccagaagaagaagaagatttaccagaagatgttaatgagactgaaaaagaatctgaaattaatgccgatgatgacagagagcagagtgaagaacacgacgaactttaa

SEQ ID NO: 129174 - protein, 790 aa, Nasonia vitripennis
MNKLAFAVAALFLLAGFAAAEDDFIDESIGTVETDFGASREALRTDDQVVQREEEAIKIDGLNVAQIKELRDKAEKFNFQTEVNRMMKLIINSLYRNKEIFLRELISNASDAIDKIRLLSLTDKNVLETNEELSIRIKADKANKILSITDTGIGMTKQDLVNNLGTIAKSGTAEFLGKMQDASNAQEMNDMIGQFGVGFYSAFLVANRVVVTTKHNDDKQYIWESDSASFSIVEDPRGDTLKRGTTISLHMKDEASDFLEQDTIKNLIKKYSQFINFPIYLWNSKTVQVEEEEAEKADVEGDNEKTEEEKEEEEEDAKVEEAGEEKEKKKVSKTIWDWELLNDSKPIWTLKPSDITDDEYNEFYKALTKDAQEPLAKVHFIAEGEVTFKSLLFVPRVQPGDSFNRYGTKDDNIKLYVRRVFISDKFNDLMPNYLAFIQGIVDSDDLPLNVSRENLQQHKLIKIIKKKLVRKVLDMIKKIPKEDYLDFWKEYSTNIKLGVIEDAQNRARLSKLLMFRTSAQNEPTNLADYVSRMKPNQQHIYYIAGASIDEVKKSPFVERLLKKGYEVLYLVEAVDEYALSSIPEFDSKKFQNVAKEGFSLDEGTKAAERKQKLESTFEPLIKYLNDKLKDHISKAQVSERLTDSPCALVASMFGWTGNMERLAISNAHQKSDDPQKTYYLNQKKTLEINPRHPLIRELLRRVEQDAEDKITQDMAQMMFQTATLRSGYMLKETASFAENVEQLMRKTLGIPLDEVPEEEEDLPEDVNETEKESEINADDDREQSEEHDEL

SEQ ID NO: 129175 - DNA, 2148 bp, Nasonia vitripennis
  CDS (1)..(2148)
atggagactgcaggaggagaggttgagacctttgctttccaagctgaaatcgcccagttgatgtccctcatcatcaacactttctactcgaacaaagaaatcttcctccgagaattgatttccaactccagtgatgccctggacaagatccgttacgaatctttgacagaccccacaaagttggaggcttgcaaggacctctacatcaagattattcccaacaagaatgaccgcacactgaccatcatcgacactggtattggtatgaccaaagccgatttggttaacaaccttggaaccatcgccaagtccggaactaaggccttcatggaggctctccaggctggtgctgacatttctatgattggtcagtttggtgttggtttctactcggcctacctcgttgctgacaaagtcgttgttgtgtcgaagcacaatgatgacgagcagtacgtttgggaatccagcgccggaggatctttcactgtcaaggtagacaatggtgagcctcttggacgtggaaccaagatcatcctccacttcaaggaagaccaatccgagtatttggaggaaagcaagatcaaggaaatcgtcaagaagcactcccagttcattggctaccccatcaaacttgtagtacaaaaggagcgtgagaaggaactcagcgacgacgaagctgaggctgaggaggagaagaaggaagaagatgatggaaagcccaaggttgaggatgtcggcgaagatgaggaggaagacactgacaaggaaaagaagaagaagaagaagaccatcaaagaaaagtatgaagaagatgaggaactcaacaagactaagcctatttggaccagaaatgctgacgacatcacccaggaagagtacggtgaattttacaagtcgttgaccaacgactgggaagaccacctggctgtaaagcacttctctgtagaaggtcaattggagttcagagctcttctgttcgcgccaaggcgtatgcccttcgatctctttgagaacaagaagaggaagaacaacatcaagttgtacgtacgtcgtgtcttcatcatggacaactgcgaagagttgatccccgagtacttgaacttcatgaagggagtcgtcgacagcgaagatcttcctctgaacatttctcgtgagatgttgcagcagaacaagatccttaaggtcatcaggaagaacttggtcaagaaatgtctggaacttttcgaagaactcaccgaagacaaagagtcctacaagaagttctatgaacaattcagcaagaacatcaagcttggaatccacgaagacagcgccaaccgcagcaagctggccgatttgctccgttaccacacgtccgcttccggtgatgaggcgtgctccctcaaggactacgttggtaggatgaaggagaaccagaagcacatctactacatcactggtgaaagcaaggagcaggtagccaacagctcgttcgtcgagcgagtaaagaagcgtggtttcgaggtcgtctacatgaccgagcccatcgatgagtacgtcgttcagcaaatgaaagaatacgacggaaagcagctggtctctgtcaccaaggagggcttggagctgcctgaagacgaagaagagaagaagaagcacgaggaagacaagtccaagttcgagaacctctgcaaggtcatgaagaacatcctggacaacaaggtcgagaaggttctggtatccaaccgtcttgttgactctccatgctgtattgtcacctctcagtacggctggaccgccaacatggaaaggatcatgaaggctcaggctctccgtgatgcttccaccatgggttacatggcagccaagaagcacctcgagatcaaccctgaccacccagtcattgatactctgagggagaaggctgaggctgacaagaacgacaagtctgtgaaagacttggtcgttctcctgttcgagactgccctcttgtcgtctggtttcagtctggacgagccccaggttcatgccgcccgcatttacagaatggtcaagcttggacttggaatcgacgaggaagagcctgtccccgaagaaaccaaagtcgccgaggaggtgccgcccctggagggtggtgaggatgatgcgtcgcgcatggaggaagtcgattaa

SEQ ID NO: 129176 - protein, 715 aa, Nasonia vitripennis
METAGGEVETFAFQAEIAQLMSLIINTFYSNKEIFLRELISNSSDALDKIRYESLTDPTKLEACKDLYIKIIPNKNDRTLTIIDTGIGMTKADLVNNLGTIAKSGTKAFMEALQAGADISMIGQFGVGFYSAYLVADKVVVVSKHNDDEQYVWESSAGGSFTVKVDNGEPLGRGTKIILHFKEDQSEYLEESKIKEIVKKHSQFIGYPIKLVVQKEREKELSDDEAEAEEEKKEEDDGKPKVEDVGEDEEEDTDKEKKKKKKTIKEKYEEDEELNKTKPIWTRNADDITQEEYGEFYKSLTNDWEDHLAVKHFSVEGQLEFRALLFAPRRMPFDLFENKKRKNNIKLYVRRVFIMDNCEELIPEYLNFMKGVVDSEDLPLNISREMLQQNKILKVIRKNLVKKCLELFEELTEDKESYKKFYEQFSKNIKLGIHEDSANRSKLADLLRYHTSASGDEACSLKDYVGRMKENQKHIYYITGESKEQVANSSFVERVKKRGFEVVYMTEPIDEYVVQQMKEYDGKQLVSVTKEGLELPEDEEEKKKHEEDKSKFENLCKVMKNILDNKVEKVLVSNRLVDSPCCIVTSQYGWTANMERIMKAQALRDASTMGYMAAKKHLEINPDHPVIDTLREKAEADKNDKSVKDLVVLLFETALLSSGFSLDEPQVHAARIYRMVKLGLGIDEEEPVPEETKVAEEVPPLEGGEDDASRMEEVD

SEQ ID NO: 129177 - DNA, 2157 bp, Apis mellifera
  CDS (1)..(2157)
atgtcaacagaaatggaaacaaaagcagaagatgtggaaacttttgcattccaggcagagattgctcaacttatgtcattgattattaataccttttattcaaataaagaaatttttttaagagaacttatatcaaactctagtgacgcccttgataagattcgttatgaatctttaactgatccttctaagcttgataatggcaaagaattatttattaaaattattccaaacaagaatgatggtactttgactattattgatactggtattggtatgactaaggctgatttggtaaataatcttggtacaattgcaaagtctggtaccaaagcttttatggaagcacttcaagctggtgcagatatttccatgattggacaatttggtgtaggtttttattctgcttatttaatagcagacaaagtcactgttatttcaaaacacaatgatgatgaacaatatctatgggaatctagtgctggtggatcatttactgttagacatgataatggagaaacattaggacgaggaacaaaaattgttttacatgtaaaagaagatcaagccgaatatttagaagagagtaaaataaaagaaattgtaaaaaaacattctcaatttattggttatccaattaaattagttgtacagaaggaacgtgaaaaagaactgagtgaggatgaagctgaagaagaagaagaagagaaaaaggaagatgatggaaaaccaaaaattgaagatgtagatgaaaatgaagaagcaccagaggaagaaggaaaaaagaagaagaaaaaaactattaaagagaaatatacagaagatgaagaattaaacaaaacaaaacctatctggactagaaattctgatgatattacacaagaagaatatggtgaattttataaatcattgacaaatgattgggaagatcatttggctgttaaacatttttctgtagaaggtcaattagaattcagagctttactttttattccaaaacgtatgccatttgatttatttgaaaataagaaaaggaaaaataatattaaattatatgtaagaagagtattcattatggacaactgtgaacagttaattccagaatatttaaatttcataaaaggagtagttgatagtgaagatcttcctttgaacatttctcgtgaaatgcttcaacaaaataaaattttaaaggttattcgtaaaaatcttgtaaaaaaatgcatagaattgtttgaagaacttgcagaagacaaagataattataaaaaattctatgaacaatttagcaaaaacattaaattaggtattcatgaggacagttctaatcgtaataaattatctgatcttttaagatatcacacttcatcttctggagatgaggtctgttctcttaaggattatgtaggtagaatgaaagagaatcaaaaacacatttacttcattactggagagagcaaagaccaagttgcaaacagttcatttgttgaacgtgtaaaaaaacgtggctttgaagttgtttatatgacagagcctatcgatgaatatgtagtacaacaaatgaaagaatttgatggaaaacaattagtatctgtaaccaaagaaggtttagagtttcctgaagatgaagatgaaaagaagaaaagagaagaagacaaagccaaatatgaaaatttatgtaaagtaatgaaaaatattcttgacaataaagtagagaaagttgtagtttcgaatcgattggttgattcaccttgctgtatagttacttcacaatacggttggactgctaatatggaaagaattatgaaagctcaagcacttagagacacatctactatgggatatatggctgcaaaaaaacatcttgagataaatcctgaccatactattattgaaactttacatcagaaagcagaaacagataaaaatgataaagcagtaaaagatttagtaattttattgtttgaaacagcacttttatcttctggttttactttagatgaaccacaagttcatgctgcaagaatttacagaatgattaaattgggacttggtattgatgaagaagaatctgtaccagaagaacaaactacagaagaaattcctcctctggaaggagatacagaagatagttcacgaatggaagaagtagattag

SEQ ID NO: 129178 - protein, 718 aa, Apis mellifera
MSTEMETKAEDVETFAFQAEIAQLMSLIINTFYSNKEIFLRELISNSSDALDKIRYESLTDPSKLDNGKELFIKIIPNKNDGTLTIIDTGIGMTKADLVNNLGTIAKSGTKAFMEALQAGADISMIGQFGVGFYSAYLIADKVTVISKHNDDEQYLWESSAGGSFTVRHDNGETLGRGTKIVLHVKEDQAEYLEESKIKEIVKKHSQFIGYPIKLVVQKEREKELSEDEAEEEEEEKKEDDGKPKIEDVDENEEAPEEEGKKKKKKTIKEKYTEDEELNKTKPIWTRNSDDITQEEYGEFYKSLTNDWEDHLAVKHFSVEGQLEFRALLFIPKRMPFDLFENKKRKNNIKLYVRRVFIMDNCEQLIPEYLNFIKGVVDSEDLPLNISREMLQQNKILKVIRKNLVKKCIELFEELAEDKDNYKKFYEQFSKNIKLGIHEDSSNRNKLSDLLRYHTSSSGDEVCSLKDYVGRMKENQKHIYFITGESKDQVANSSFVERVKKRGFEVVYMTEPIDEYVVQQMKEFDGKQLVSVTKEGLEFPEDEDEKKKREEDKAKYENLCKVMKNILDNKVEKVVVSNRLVDSPCCIVTSQYGWTANMERIMKAQALRDTSTMGYMAAKKHLEINPDHTIIETLHQKAETDKNDKAVKDLVILLFETALLSSGFTLDEPQVHAARIYRMIKLGLGIDEEESVPEEQTTEEIPPLEGDTEDSSRMEEVD

SEQ ID NO: 129179 - DNA, 2397 bp, Apis mellifera
  CDS (1)..(2397)
atgagaaaagcgttaatattgctatcgattctcttctttctaacaggatttgttagagcagaaaatttggtggaagaagatattggaactgtagaaaatgatttgagtgctagccgcgaaggatctcgaacggataatgaagtaattcaaagagaagaggaagcaattaaacttgatggattaaatgtggctcaaattaaagaactcagagaaaaagctgaaaaatttacttttcaaaccgaagtcaatcgtattatgaaacttattataaactctttgtatcgtaacaaagatatttttctaagagagttgatatctaatgcatctgatgcattagataaaataagattgctgtcacttactgataaaaatgtcttggatactaatccagaattagcaattagaataaaatctgataaagaaaataaaatattaagtataactgattctggtattggtatggccaaacatgaattaattaataatcttggaaccattgctaaatcaggaactgctgagttcttgggcaaaatgcaagaaacttctaatactcaagatttgaacgatatgattggtcaatttggagttggtttctattctgcttttttggtttctcatacagtagtagttacttctaagcataatgaagacaatcaacatatttggcagtctgatagtagcagttacagcattgtagaagatcccagggggaatacactaaaaagaggaactacagtgagtttgcatttaaaagatgaagcattggactttttagaagaagatacaattaaaaatcttgtaaagaaatactcacaatttatcaatttccctatatatttatggagtagcaaagtcattcaagtagatgaagaagaggaagaagaagagaaacgagtaaaagaagatgaaagtgaaaaaaaagattccattgaagataaagtggatgaggaggaggatgcaaaagtagaagatgtggaggaagaaaagaaaacaaagaaggttgataaaactgtttgggactgggaattgttaaatgattctaaacctatatggactttaaagccatctgaagttgaagataaagattataatgatttttataaggttttaacaaaagatactcaggatcctttagcaaaaatccattttgtagcagaaggtgaagtcaccttcaaatcacttctttttattcctaaagttcagccaagtgatagttttaatcgttatggcactaaagcagacaatattaaattatatgtcagaagagttttcatcacagataaatttacagatatgatgcctaactatttatccttcattcgtggtattgttgatagcgatgacttaccgttaaatgtttcacgtgaaaacttacagcaacataaactcattaaggtaatcaaaaagaaattgattagaaaagtattagatatgatcaaaaaaatccctaaggaagattatgaaaaattctggaaagaatacagcactaatattaaactgggtgtgattgaagatgctcaaaacagagccagattatccaaacttttgttatttcaatcttctacacaaaaagattttacatcattatcagattatgtaacccgaatgaaatctagtcaacaatacatttattatattgctggctcttctgaagaagaagtaaaaaaatctccatttgtagaaagattagataaaaagggctatgaagttctatatcttactgaagcagttgatgaatatgctatttctgctcttcctgaattcgatggtaaaaagttccagaacgtagctaaagaaggattttcgcttgatgaaggcgaaaaggctaaagaaagaatggagcaattgaaaactacttttgaaccattggttaaatggctgaatgatgttttgaaggatcatatcagtaaagctcaggtttccgaacgtcttacagattctccatgtgctttggttgctagtatgtttggatggacaggaaatatggaaagattagctatttcaaatgctcatcaaaagactgatgatccccagaaaaattattatttgaatcaaaaaaaaactttagagatcaatccaagacatccacttattagagaacttttacgtagagtggaagttgatactactgatcagacagcaaaagatattgcattgatgatgttcagaacagctactcttcggtcaggatacatgctcagagaaactgccagttttgcggatagtgtagagcaattaatgagaaagactttaggcatttctctagatgaagttcctgaagaggaagaaatacaagaagaagaatctggaccaacagaaaaacaagattctgaaaaaattattgatatggatgcaaatgaagatgatcaagatgaagaaaaacatgatgaattataa

SEQ ID NO: 129180 - protein, 798 aa, Apis mellifera
MRKALILLSILFFLTGFVRAENLVEEDIGTVENDLSASREGSRTDNEVIQREEEAIKLDGLNVAQIKELREKAEKFTFQTEVNRIMKLIINSLYRNKDIFLRELISNASDALDKIRLLSLTDKNVLDTNPELAIRIKSDKENKILSITDSGIGMAKHELINNLGTIAKSGTAEFLGKMQETSNTQDLNDMIGQFGVGFYSAFLVSHTVVVTSKHNEDNQHIWQSDSSSYSIVEDPRGNTLKRGTTVSLHLKDEALDFLEEDTIKNLVKKYSQFINFPIYLWSSKVIQVDEEEEEEEKRVKEDESEKKDSIEDKVDEEEDAKVEDVEEEKKTKKVDKTVWDWELLNDSKPIWTLKPSEVEDKDYNDFYKVLTKDTQDPLAKIHFVAEGEVTFKSLLFIPKVQPSDSFNRYGTKADNIKLYVRRVFITDKFTDMMPNYLSFIRGIVDSDDLPLNVSRENLQQHKLIKVIKKKLIRKVLDMIKKIPKEDYEKFWKEYSTNIKLGVIEDAQNRARLSKLLLFQSSTQKDFTSLSDYVTRMKSSQQYIYYIAGSSEEEVKKSPFVERLDKKGYEVLYLTEAVDEYAISALPEFDGKKFQNVAKEGFSLDEGEKAKERMEQLKTTFEPLVKWLNDVLKDHISKAQVSERLTDSPCALVASMFGWTGNMERLAISNAHQKTDDPQKNYYLNQKKTLEINPRHPLIRELLRRVEVDTTDQTAKDIALMMFRTATLRSGYMLRETASFADSVEQLMRKTLGISLDEVPEEEEIQEEESGPTEKQDSEKIIDMDANEDDQDEEKHDEL

SEQ ID NO: 129181 - DNA, 2118 bp, Candida glabrata CBS 138
  CDS (1)..(2118)
atgtctgaaacttttgaatttcaagctgagatcactcaattgatgagtttgatcatcaacacagtttactctaacaaggaaattttcctaagagaactgatctctaacgcttccgatgccatcgacaagattagataccaagctttgtctgatccaaagcaattggaaactgaaccagaattgttcatcagaatcactccaagaccagaagagaaagttctagaaatcagagactctggtatcggtatgaccaaggccgaactgattaacaacttgggtaccatcgccaagtccggtaccaaggctttcatggaagctctatccgcaggcgctgatgtttctatgatcggtcaattcggtgtcggtttctactcccttttcttggttgctgacagagtccaagttatctccaagaacaacgacgacgaacaatacatttgggaatccaatgccggtggttctttcactgttaccttggacaccgtcaatgaaaagatcggcagaggtaccatcctaagacttttcatgaaggaagaccaattggaatacttggaagaaaagagaattaaggaagtcgtcaagaaacactctgaattcgtcgcttacccaatccaattgatggtcactaaagaagtcgaaaaggaagtcccagtcactgaagaagaaaagaaggacgaagaaaagaaggacgaagacgacaagaagccaaagctagaagaagtagacgaagacgaagagaagaaagatgaaaagaagacaaagactgttaaggaaaccgtcaaggaacttgaagaacttaacaagaccaagccattgtggaccagaaacccatctgagatcacccaagaagaatacaacgctttctacaagtctatttccaacgactgggaagacccactatatgtcaagcacttctctgttgaaggtcaactagaattcaaggctatcttgttcattccaaagagagctccattcgacttgttcgaaagcaagaagaagaagaacaacatcaaactttacgtccgtcgtgtcttcattacagatgaagccgaagagttgattccagaatggttatcctttgtcaagggtgttgttgactctgaagacttgccattgaacttgtccagagaaatgttgcaacagaacaagatcatgaaggtcattagaaagaacattgtcaagaagttgattgaatccttcaacgaaattgctgaagattctgaacaatttgacaagttctacagcgcatttgctaagaacatcaagcttggtatccacgaagacactcaaaacagagctgctctagccaagttgctacgttacaactccaccaagtctgttgatgagttgacatctttgtctgactacgttaccagaatgccagaacaccaaaagaacatctatttcatcactggtgagtctctaaaggctgttcaaaactccccattcttggatgctttgaaggcaaaggactttgaagttttattcttagttgatccaattgacgaatatgctttcactcaaatgaaggaattcgaaggtaagcaattagttgacattacaaaggacttcgaattagaagaaactgaagaagaaaaggccgaaagagagaaggaaattaaggaatacgaacctttgactaaggctttgaaggaagttttgggtgaacaagtggaaaaggttgtcgtttctcacaagcttgttgactctccagctgccatcagaaccggtcaatttggttggtccgctaacatggaaagaatcatgaaggctcaagccttgagagactccagcatgtcctcttacatgtcctccaagaagatctttgaaatttctccaaagtctccaatcattaaggaattgaagaagagagtcgacgaaggtggtgctcaagataagactgttaaggatttgactaacttgttatttgagactgctttgttgacttccggtttcactctagaagaaccatcttctttcgcttccagaattaacagattgatttctctaggtttgaacatcgatgaagacgaagaagaacaagctgctccagaagtcaaggccgaagctgaggtcgaagaagtcccagctgacaccgaaatggaagaagttgactaa

SEQ ID NO: 129182 - protein, 705 aa, Candida glabrata CBS 138
MSETFEFQAEITQLMSLIINTVYSNKEIFLRELISNASDAIDKIRYQALSDPKQLETEPELFIRITPRPEEKVLEIRDSGIGMTKAELINNLGTIAKSGTKAFMEALSAGADVSMIGQFGVGFYSLFLVADRVQVISKNNDDEQYIWESNAGGSFTVTLDTVNEKIGRGTILRLFMKEDQLEYLEEKRIKEVVKKHSEFVAYPIQLMVTKEVEKEVPVTEEEKKDEEKKDEDDKKPKLEEVDEDEEKKDEKKTKTVKETVKELEELNKTKPLWTRNPSEITQEEYNAFYKSISNDWEDPLYVKHFSVEGQLEFKAILFIPKRAPFDLFESKKKKNNIKLYVRRVFITDEAEELIPEWLSFVKGVVDSEDLPLNLSREMLQQNKIMKVIRKNIVKKLIESFNEIAEDSEQFDKFYSAFAKNIKLGIHEDTQNRAALAKLLRYNSTKSVDELTSLSDYVTRMPEHQKNIYFITGESLKAVQNSPFLDALKAKDFEVLFLVDPIDEYAFTQMKEFEGKQLVDITKDFELEETEEEKAEREKEIKEYEPLTKALKEVLGEQVEKVVVSHKLVDSPAAIRTGQFGWSANMERIMKAQALRDSSMSSYMSSKKIFEISPKSPIIKELKKRVDEGGAQDKTVKDLTNLLFETALLTSGFTLEEPSSFASRINRLISLGLNIDEDEEEQAAPEVKAEAEVEEVPADTEMEEVD

SEQ ID NO: 129183 - DNA, 2142 bp, Kluyveromyces lactis NRRL Y-1140
  CDS (1)..(2142)
atggttaatcaagagacatatgagtttcaagctgagatcactcagttgatgagtttgatcatcaacactgtttattctaacaaggagattttcttgagagagttgatttccaatgcttcggatgctttggataagattagataccaatctttgtcagatccaaaggttttggagactgaaccagaattatttattagaattactcctagaccagaagaaaaggtgttggaaatcagagattctggtattggtatgaccaaggctgaattgattaacaatttgggtaccattgccaagtcaggtaccaaggcttttatggaagcattgtcagccggtgcagatgtttctatgattggtcagttcggtgttggtttctactctttattcttggtcgctgacagagttcaagttatctccaagcacaacgacgatgaacaatacatctgggaatccaacgctggtggttctttcaccgttaccttggacgaatccaacgagagaatcggtagaggtactgtgttgagattgttcttgaaagaagaccaattggaatacttggaagaaaagagaattaaggatgttgttaagaagcactctgaattcgttgcttacccaattcaattactcgtcaccaaggaagtcgaaaaggacgttccggttgctgaagaagaagaagaagtaaaggaagagaagaaggaaggagaagaagaagaagatgacaagaaaccaaagttggaagaaattgacgaagacgaagaaaagaaggatgatgaacaaaagactaagaaggtcaaggaaactgtcaaggaattggaagaattgaacaagaccaagcctttgtggaccaagaacccatccgaggtcacccaagaagaatacaatgccttctacaagtctatttccaacgactgggaagacccattggccgtgaaacatttctccgttgaaggtcaattggaattcaaggctatcttgttcgttccaaagagagctgcattcgacctgttcgaatccaagaagaagaagaccaacatcaagttgtacgtccgtcgtgtcttcattaccgatgaagctgaagaattgatcccagaatggttatccttcgttaagggtgttgttgactctgaagatttgccattgaacttatccagagaaatgttgcaacaaaacaagatcatgaaggttatcaagaagaacatcgtcaagaagatgatcgaaactttcaacgaaatcgcggaagactctgaacaattcgacaagttctacaccgccttctcgaagaacatcaagttaggtatccacgaagatactcaaaacagagctgctttggctaagttgttgagatacaactccaccaagtctgttgacgaattgacttctttgtccgattacgtcaccagaatgccagaacaccaaaagaacatctacttcatcaccggtgaatctattaaggccgttgaaaaatctccattcttggatgccttgaaggccaagaacttcgaagtcttgttccttgttgacccaatcgatgaatacgccttctctcaattgaaggaattcgaaggtaagcaattggttgacattaccaaggatttcgaattggaagaaactgaagaagaaaaggaacaaagagaaaaggaagttaaggaattcgaacctttgaccaccgctttgaaagaaatcttgggtgaccaagtcgaaaaggtggttgtctcccacaagttgttggatgctccagccgctatcagaaccggtcaattcggttggtccgctaacatggaaagaatcatgaaggctcaagccttgagagactctagtatgtcttcctacatggcctccaagaaaatcttcgaaatctctccaaagtctccaatcattagagaattgaagaacaaggtcgaagaaggtggtgctcaagacaagactgtcaaggacttgactaacttgttgttcgaaactgcattgttgacttccggtttctccttggaagaaccatcttccttcgcatccagaatcaacagattgatctccttgggtttgaacatcgatgaagatgaagaagttgaagctgctccagaagccgctccagaagctccagctgaagaagcaaacgctgaaactgaaatggaggaagttgattaa

SEQ ID NO: 129184 - protein, 713 aa, Kluyveromyces lactis NRRL Y-1140
MVNQETYEFQAEITQLMSLIINTVYSNKEIFLRELISNASDALDKIRYQSLSDPKVLETEPELFIRITPRPEEKVLEIRDSGIGMTKAELINNLGTIAKSGTKAFMEALSAGADVSMIGQFGVGFYSLFLVADRVQVISKHNDDEQYIWESNAGGSFTVTLDESNERIGRGTVLRLFLKEDQLEYLEEKRIKDVVKKHSEFVAYPIQLLVTKEVEKDVPVAEEEEEVKEEKKEGEEEEDDKKPKLEEIDEDEEKKDDEQKTKKVKETVKELEELNKTKPLWTKNPSEVTQEEYNAFYKSISNDWEDPLAVKHFSVEGQLEFKAILFVPKRAAFDLFESKKKKTNIKLYVRRVFITDEAEELIPEWLSFVKGVVDSEDLPLNLSREMLQQNKIMKVIKKNIVKKMIETFNEIAEDSEQFDKFYTAFSKNIKLGIHEDTQNRAALAKLLRYNSTKSVDELTSLSDYVTRMPEHQKNIYFITGESIKAVEKSPFLDALKAKNFEVLFLVDPIDEYAFSQLKEFEGKQLVDITKDFELEETEEEKEQREKEVKEFEPLTTALKEILGDQVEKVVVSHKLLDAPAAIRTGQFGWSANMERIMKAQALRDSSMSSYMASKKIFEISPKSPIIRELKNKVEEGGAQDKTVKDLTNLLFETALLTSGFSLEEPSSFASRINRLISLGLNIDEDEEVEAAPEAAPEAPAEEANAETEMEEVD

SEQ ID NO: 129185 - DNA, 2118 bp, Debaryomyces hansenii CBS767
  CDS (1)..(2118)
atgtctgacgctaaagttgaaactcatgaattcaccgctgagatttctcagttgatgtctttgatcattaacaccgtttactccaacaaggaaattttcttgagagaattgatttctaatgcttctgatgctttggataagatcagatacgaagcattagctgatccaagcaaattggaaaccgaaccagaattattcatcagacttaccccaagacctgaagaaaaagttttggaaatcagagatactggtatcggtatgaccaaggctgacttagtcaataacttaggtactatcgctaagtctggtaccaaggctttcatggaagctttatctgctggtgcagatgtttccatgattggtcaattcggtgttggtttctactctttattcttggttgctgaccacgttcaagttatcaccaagcacaatgacgacgaacaatacatttgggaatccaacgctggtggtaagttcactgttgctttggatgaagttaacccaaagattggccgtggtaccgtcttgagattattcttgaaggaagatcaattggaatacttggaagaaaagagaattaaggaagttgtcaagagacactctgaattcgtttcttacccagtccaattagtcgtcaccaaggaagtcgaaaaggatgctcctgaagaaaaggaagacgaagaagaagtcaaggaaggtgatgacaagaaggcaaaggtcgaagaagtcgatgaagaaggtgaagaaaagaagaaggaaaccaagaagattactgaacaagtcactgaaacggaagaattgaataagaccaagccattatggaccagaaacccatctgatgtcactcaagatgaatacaatgcgttctacaagtccatttccaacgactgggaagacccattggctgtcaagcacttctctgttgaaggtcaattagaattcagagccatcttattcgttccaaagagagctccattcgatgcttttgaatctaagaagaagaagaacaacattaagttatacgtccgtcgtgttttcatcactgacgaagctgaagaattaatcccagaatggttaagtttcgttagaggtgttgttgactccgaagatttgccattgaacttgtccagagaaatgttacaacaaaacaagatcttaaaggtcatcaagaagaacatcgttaagaagttgattgaaacctttaatgatattgctgaagaccaagaacaattcgaaaagttctacagcgccttctccaagaacattaagttaggtatccacgaagatcaacaaaacagaaccgcattatctaagttattgagatacaactctaccaagactggtgaagaattaacttctttatctgactatgtcacccgtatgccagaacaccaaaagaacatttactacatcactggtgaatctatcaaagctgttgaaaagtctccattcttagatgctttgaaggccaagaacttcgaagttttattcttagttgacccaattgatgaatacgctatgactcaattgaaggaattcgaagacaagaagttagttgatatcactaaggacttcgacttagaagaaagtgaagaagaaaagaaacaaagagaaaaggaaatcgaagaatacgaaccattgactaaggccttaaaggaaatcttaggtgaccaagttgaaaaggtcgttctttctcacaaattagttgatgctcctgctgctatcagaactggtcaattcggttggtctgctaatatggaaagaattatgaaggctcaagctttaagagacactaccatgtcttcttacatgtcctctaagaagactttcgaaatctctccaagatcttctattattaaggaattaagaaagaaggttgaagctgacggtgccgaagataagactgtcaaggacttgactaccttattgtacgaaaccgctttgttgacatctggtttctccttagaagaaccaagctctttcgctggtagaattaacagattgatctctttaggtttaaacattgatgaagaagaagaagttgaagaagtcggtacttctactggtactaccactgatgaacctgctgttgaatctgctatggaagaagttgattaa

SEQ ID NO: 129186 - protein, 705 aa, Debaryomyces hansenii CBS767
MSDAKVETHEFTAEISQLMSLIINTVYSNKEIFLRELISNASDALDKIRYEALADPSKLETEPELFIRLTPRPEEKVLEIRDTGIGMTKADLVNNLGTIAKSGTKAFMEALSAGADVSMIGQFGVGFYSLFLVADHVQVITKHNDDEQYIWESNAGGKFTVALDEVNPKIGRGTVLRLFLKEDQLEYLEEKRIKEVVKRHSEFVSYPVQLVVTKEVEKDAPEEKEDEEEVKEGDDKKAKVEEVDEEGEEKKKETKKITEQVTETEELNKTKPLWTRNPSDVTQDEYNAFYKSISNDWEDPLAVKHFSVEGQLEFRAILFVPKRAPFDAFESKKKKNNIKLYVRRVFITDEAEELIPEWLSFVRGVVDSEDLPLNLSREMLQQNKILKVIKKNIVKKLIETFNDIAEDQEQFEKFYSAFSKNIKLGIHEDQQNRTALSKLLRYNSTKTGEELTSLSDYVTRMPEHQKNIYYITGESIKAVEKSPFLDALKAKNFEVLFLVDPIDEYAMTQLKEFEDKKLVDITKDFDLEESEEEKKQREKEIEEYEPLTKALKEILGDQVEKVVLSHKLVDAPAAIRTGQFGWSANMERIMKAQALRDTTMSSYMSSKKTFEISPRSSIIKELRKKVEADGAEDKTVKDLTTLLYETALLTSGFSLEEPSSFAGRINRLISLGLNIDEEEEVEEVGTSTGTTTDEPAVESAMEEVD

SEQ ID NO: 129187 - DNA, 2115 bp, Yarrowia lipolytica CLIB122
  CDS (1)..(2115)
atgtcagacgccgacaaaaagtccgaatcctatgagttcacagctgagatctctcagctgatgtctctcatcatcaacaccgtctactccaacaaggagattttcctgcgagagctcatttccaacgcttccgatgctctggacaagatccgataccaggccctgtccgaccccaagcagctggagaccgagcccgagctcttcatccgactcacccccaacaagggcctcaagacctttgagattcgagataccggtatcggtatgactaaggctgatctcgtcaacaacctgggtacaattgccaagtccggcaccaagtccttcatggaggctctctccgctggcgccgacgtgtccatgattggtcagtttggtgttggtttctactctcttttcctggttgctgaccgagtccaggtcatcaccaagcacaacgacgacgagcagtacatctgggagtcttccgccggtggtaagttcaccattactctcgacaccgtcaacgagcgaatcggccgaggtaccgttctgcgactcttcatgaaggaggaccagctcgagtaccttgaggagaagcgaatcaaggatgttgtcaagcgacactccgagttcgtctcttaccccatccagcttgttgtcaccaaggaggttgaggtcgatgccccctctgccgacaaggttgagaaggagctcgatgccgactccgaagataagaaccccaagattgaggaggtcaaggacgaggacgccaaggacgagaagccccagaagatcaaggagatggtcaccgagaacgaggagcttaacaaggttaagcctctgtggacccgaaaccccgctgaggtcaagcccgaggagtacgctgccttctacaagtctatctctaacgactgggaggaccaccttgctgtcaagcacttctccgtcgagggtcagctcgagttccgagccattctcttcattcccaagcgagctcccttcgatctctttgagtccaagaagaagaagtctaacatcaagctttacgtcaagcgtgtcttcatcactgatgacgctgaggagctgatccccgagtggatgggcttcgtcaagggtgttgttgactccgaggacctgcctcttaacctgtcccgagaggttctgcagcagaacaagattctgaaggtcatccgaaagaacattgtcaagaagctgattgaggccttcaacgagattgctgaggaccgagagcagttcgacaagttctacactgccttctccaagaacctcaagctcggtgtccacgaggactcccagaaccgacaggctcttgccaagctcctgcgatacaactccaccaagtcttccgacgagcttacctccttcgaggactacatcacccgaatgcccgagcaccagaagaacatttacttcatcaccggtgagtccatcaagtccgttgagaagtctcccttcctcgacgccctcaaggccaagaactttgaggttctgtacatggttgaccccattgacgagtacgccatggcccagctcaaggagtttgataaccgaaagctggttgatatcaccaaggacttcgagcttgaggagaccgaggaggagaagaagcagcgagaggctgaggacaaggagttcgagccccttgccgccgccctcaaggagattcttggcgaccaggtcgagaaggttgttgtgtcccacaagcttgtcgacgctcctgctgccatccgaaccggccagtttggctggtccgctaacatggagcgaatcatgcgagcccaggctctgcgagacacctccatgtctgcctacatggcctccaagaagacctttgagatttctcccaagtctcctatcatcaaggagctgaagaacaaggttgaggccgatggtgctgaggaccgaactgtcaaggacctcaccactcttctgtacgagactgctctgctgacctccggcttcactcttgatgagcccgccagctttgcttctcgaatcaaccgactcatttctctcggtctcaacattgacgaggctgagcacgaggcttttgccgagcccacccccagcactgaggacaactctgccagtgttatggaggaggttgactaa

SEQ ID NO: 129188 - protein, 704 aa, Yarrowia lipolytica CLIB122
MSDADKKSESYEFTAEISQLMSLIINTVYSNKEIFLRELISNASDALDKIRYQALSDPKQLETEPELFIRLTPNKGLKTFEIRDTGIGMTKADLVNNLGTIAKSGTKSFMEALSAGADVSMIGQFGVGFYSLFLVADRVQVITKHNDDEQYIWESSAGGKFTITLDTVNERIGRGTVLRLFMKEDQLEYLEEKRIKDVVKRHSEFVSYPIQLVVTKEVEVDAPSADKVEKELDADSEDKNPKIEEVKDEDAKDEKPQKIKEMVTENEELNKVKPLWTRNPAEVKPEEYAAFYKSISNDWEDHLAVKHFSVEGQLEFRAILFIPKRAPFDLFESKKKKSNIKLYVKRVFITDDAEELIPEWMGFVKGVVDSEDLPLNLSREVLQQNKILKVIRKNIVKKLIEAFNEIAEDREQFDKFYTAFSKNLKLGVHEDSQNRQALAKLLRYNSTKSSDELTSFEDYITRMPEHQKNIYFITGESIKSVEKSPFLDALKAKNFEVLYMVDPIDEYAMAQLKEFDNRKLVDITKDFELEETEEEKKQREAEDKEFEPLAAALKEILGDQVEKVVVSHKLVDAPAAIRTGQFGWSANMERIMRAQALRDTSMSAYMASKKTFEISPKSPIIKELKNKVEADGAEDRTVKDLTTLLYETALLTSGFTLDEPASFASRINRLISLGLNIDEAEHEAFAEPTPSTEDNSASVMEEVD

SEQ ID NO: 129189 - DNA, 2175 bp, Apis mellifera
  CDS (1)..(2175)
atgccggaggacgtcaccatggctaatgccggagaggttgaaactttcgctttccaagctgaaattgcacaattgatgagtttgattattaatacattttattccaataaagaaatttttattcgagaattgatttcaaatgcatctgatgcattagacaaaattcgctatgaatctctcacggatccatctaaattggatacgtgtaaggaattatttattaaaattgttcctaataaaaatgatcgtactttaaccatacttgattctggtattggtatgacaaaggctgatcttgtgaacaatttgggtaccattgctaaatctggtacaaaagcatttatggaagctcttcaagctggtgcagatatttctatgataggtcagtttggtgtaggtttttattctgcttatcttgtagcagataaagttgttgtaatttcgaaacacaatgatgatgaacaatatgtatgggaatcttctgctggtggttctttcactgttcgccctgacaatggagaaccaattggaagaggtaccaaaattattttacacattaaagaagatcaaactgaatatttggaagaatctaaaatcaaagaaattgtcaaaaagcattctcaattcattggttatccaattaaacttgttgttgagaaggaaagagacaaagaattaagtgaagatgaagaagaggaagaagaacctgcaaaggaagaaggtgaagatacaggtaaacctaaaattgaagaagttggagaagatgaagatgaagacaaacctaaagatgagaagaagaaaaagaagaaaactattaaagaaaaatatactgaggatgaggaactaaataagacaaaaccaatctggacaagaaatccagatgatatttctcaagaagaatatggtgaattttataagagtttaacaaatgattgggaagatcatttagctgtcaaacatttctcagttgaaggtcaattggaattccgtgcattgcttttcattccgcgacgtgcaccttttgatctttttgaaaataagaaaagaaagaataacatcaaattatatgtacgtagagttttcattatggataattgtgaagatcttattccagagtatcttaacttcattaagggtgtagttgatagtgaagatcttccattgaatatttctcgtgagatgttacaacaaaataaaatccttaaagtcatcagaaagaatcttgtcaagaaatgcttagaattatttgaagaattatctgaagataaggaaagctataaaaaatgctatgaacaatttagcaagaatataaaattaggtattcatgaagacagtcaaaataggaagaaactgtcagaattacttagatatcatacttctgcatctggagatgaaatgtgctcgttaaaggattatgttggaagaatgaaagaaaatcaaaaacacatttactatatcactggtgaaagcagagaacaagtagccaatagttcatttgtagaaagggttaagaagcgtggttttgaagtagtatacatgacagaacccattgatgaatatgttgtacaacaattgaaggagtttgatggcaaacagttggtctctgtaactaaggagggtttggaacttccagaagatgaagaagaaaagaagaaacgtgaagaagacaaagccaaattcgagaatctctgtaaagttatgaaagatattttagacaaaaaagtagaaaaagttgtagtatccaacaggttagttgattctccatgctgtattgttacatcacaatatgggtggactgcaaatatggaaagaattatgaaagctcaagctctcagagatgcatccactatgggatatatggctgccaagaagcatttagaaatcaatccagatcatccaattatggaaaatttgaggcaaaaagctgaagctgacaaacacgataagtctgtgaaagatttggtcatgcttctttttgaaacagctttgttatcttctgggtttgctcttgaagatccacaagtacatgcttccagaatatatagaatgattaaacttggtcttggttttgatgatgatgacacaccaaatgtagaggatgaaaaaatggatacagaagttcctccattagaagatgacacagaagaagcatctaggatggaagaagtagattaa

SEQ ID NO: 129190 - protein, 724 aa, Apis mellifera
MPEDVTMANAGEVETFAFQAEIAQLMSLIINTFYSNKEIFIRELISNASDALDKIRYESLTDPSKLDTCKELFIKIVPNKNDRTLTILDSGIGMTKADLVNNLGTIAKSGTKAFMEALQAGADISMIGQFGVGFYSAYLVADKVVVISKHNDDEQYVWESSAGGSFTVRPDNGEPIGRGTKIILHIKEDQTEYLEESKIKEIVKKHSQFIGYPIKLVVEKERDKELSEDEEEEEEPAKEEGEDTGKPKIEEVGEDEDEDKPKDEKKKKKKTIKEKYTEDEELNKTKPIWTRNPDDISQEEYGEFYKSLTNDWEDHLAVKHFSVEGQLEFRALLFIPRRAPFDLFENKKRKNNIKLYVRRVFIMDNCEDLIPEYLNFIKGVVDSEDLPLNISREMLQQNKILKVIRKNLVKKCLELFEELSEDKESYKKCYEQFSKNIKLGIHEDSQNRKKLSELLRYHTSASGDEMCSLKDYVGRMKENQKHIYYITGESREQVANSSFVERVKKRGFEVVYMTEPIDEYVVQQLKEFDGKQLVSVTKEGLELPEDEEEKKKREEDKAKFENLCKVMKDILDKKVEKVVVSNRLVDSPCCIVTSQYGWTANMERIMKAQALRDASTMGYMAAKKHLEINPDHPIMENLRQKAEADKHDKSVKDLVMLLFETALLSSGFALEDPQVHASRIYRMIKLGLGFDDDDTPNVEDEKMDTEVPPLEDDTEEASRMEEVD

SEQ ID NO: 129191 - DNA, 2103 bp, Aspergillus nidulans FGSC A4
  CDS (1)..(2103)
atggcctctgagaccttcgagttccaggctgagatttctcagctcttgtcgctgattatcaatactgtctactccaacaaggagattttcctgcgagaaatcatctccaacgcttccgatgcccttgacaagattcgctatgagtctctgtctgacccctccaagctcgactcgggcaaggacctccgcatcgacatcattcccgatgccgagaacaagactctcactatccgtgataccggtattggtatgaccaaggctgatctgatcaacaacctcggtaccattgctcgctctggcaccaagcagttcatggaggctctctccgctggtgctgatatctctatgattggtcagtttggtgtcggtttctactccgcctacctcgttgccgaccgtgtcactgtcgtctccaagcacaacgatgatgagcagtacatttgggagtcctccgctggtggtactttcactctcactcaggacaccgagggtgagccccttggccgtggtaccaagatgatcttccacttgaaggatgaacagaccgagtacctccaggagagccgtatcaaggaggttgttcgcaagcactccgagttcatctcctaccccatctacctccacgtcctgaaggagactgagaaggaggtccctgacgaggaggctgagaccaaggaagaggagggtgacgagaagaagcccaagattgaggaggttgacgatgaggaggagaagaaggagaagaagaccaagactatcaaggagtccaagatcgaggaggaggagcttaacaagactaagcctatctggacccgcaaccccgctgatatcacggaggaggaatacgcttccttctacaagtccctttccaacgactgggaggaccacctcgctgttaagcacttctcagttgagggtcagctcgagttccgcgccatcctttatgttcccaagcgtgctccctttgatctcttcgagactaagaagacgaagaacaacatcaagctctatgttcgccgtgtcttcatcaccgacgatgctaccgatcttatccccgaatggctcggtttcgtcaagggtgttgtcgactctgaggatcttcctctcaacctgtctcgtgagaccctgcagcagaacaagattatgaaggtcatcaagaagaacatcgtcaagaagactcttgagctcttcaacgaaattgctgaagaccgcgagcagtttgacaagttctacagcgccttctccaagaacattaagctcggtatccacgaggatgctcagaaccgcaacacccttgccaagctcctccgctaccagtccaccaagtctggtgacgagaccacctctctgacagactacgtcacccgtatgaaggagcaccagaagcagatctattacattactggcgagtccatcaaggctgttgctaagtcgcccttccttgacaccctcaagcagaaggactttgaggttctgttcctggttgaccccattgatgagtacgctttcactcagcttaaggaatttgacggcaagaagctcgttgatattaccaaggacttcgagcttgaggagaccgacgaggagaaggctgagcgtgagaaggaggagaaggagttcgagaatctcgctaagagcctcaagaacatccttggcgacaaagtcgagaaggttgttgtctctcacaaacttatcggttccccttgcgccatccgtactggtcagttcggttggtccgctaacatggagcgtatcatgaaggctcaagccctccgtgacacctccatgagctcctacatgtcttccaagaagaccttcgagatctcccccaagtctcccatcatcaaggagcttaagaagaaggttgaggctgatggcgagagcgaccgcaccgtcaagtccatcactcagctcctctatgagacctccctgctcgtttctggcttcaccattgaagagcccgccagcttcgctgagcgcatccacaagctcgtgtctctcggtctgaacattgacgaggaggccgaggctgagcccgccagcaccgaggaggcacccgctgccgctacgaccggcgagagcgccatggaggaggttgactag

SEQ ID NO: 129192 - protein, 700 aa, Aspergillus nidulans FGSC A4
MASETFEFQAEISQLLSLIINTVYSNKEIFLREIISNASDALDKIRYESLSDPSKLDSGKDLRIDIIPDAENKTLTIRDTGIGMTKADLINNLGTIARSGTKQFMEALSAGADISMIGQFGVGFYSAYLVADRVTVVSKHNDDEQYIWESSAGGTFTLTQDTEGEPLGRGTKMIFHLKDEQTEYLQESRIKEVVRKHSEFISYPIYLHVLKETEKEVPDEEAETKEEEGDEKKPKIEEVDDEEEKKEKKTKTIKESKIEEEELNKTKPIWTRNPADITEEEYASFYKSLSNDWEDHLAVKHFSVEGQLEFRAILYVPKRAPFDLFETKKTKNNIKLYVRRVFITDDATDLIPEWLGFVKGVVDSEDLPLNLSRETLQQNKIMKVIKKNIVKKTLELFNEIAEDREQFDKFYSAFSKNIKLGIHEDAQNRNTLAKLLRYQSTKSGDETTSLTDYVTRMKEHQKQIYYITGESIKAVAKSPFLDTLKQKDFEVLFLVDPIDEYAFTQLKEFDGKKLVDITKDFELEETDEEKAEREKEEKEFENLAKSLKNILGDKVEKVVVSHKLIGSPCAIRTGQFGWSANMERIMKAQALRDTSMSSYMSSKKTFEISPKSPIIKELKKKVEADGESDRTVKSITQLLYETSLLVSGFTIEEPASFAERIHKLVSLGLNIDEEAEAEPASTEEAPAAATTGESAMEEVD

SEQ ID NO: 129193 - DNA, 2277 bp, Strongylocentrotus purpuratus
  CDS (1)..(2277)
atgccaggttttgtacgtgagcagagccgtgggatggtaccggggtgcaccaacgcagatgcccgggtagctcgggcggtcaacgaagcgatgatgcgggggctagctgcgggggatcaggccaaccttacagctttgcttactgaacacttcgggcaagacagcgacgagagaattcctgataaaggtgattcacccttgatgcacaatggcaactaccatcaaggattacccagacatctgagggggcttgtccacaccagacagtactcaagcactgcagaaaccgagtcatctaatgaaatcgttacaggaatcactgaaagtgagcctgagaatatagaagaggagccagtaaaacacagcatcattcaggattcagagacatcctctggagactttcaacaacatgaattccaagctgagactacaatgctattagatattgttgccaagtctttgtattcagaaaatgaggtttttatcagggagctggtgtccaatgccagtgatgccctggaaaaactacgctatctacagctgacccaggataatcttgagaaacctggagccttggagattcacattgcaaccaaccaggacaagggaacctttactatacaggatactggtgttggtatgacaaaggaagagatgatagaaaatctaggaaccattgcaagatcagggtcaaaggcatttctcaaagaactacaagagaaaggtggaagctcagacagcagtatcatagggcagtttggagtgggtttctattcagcattcatggtaggagatacggtggaagttttctcaaagtcgcataaaaaggatgccaaagcgtggtattggtgttcagatgggtcagggcaatataaaatcagtgaggctgaaggagtgatgaaaggaactaagattgtgattcatctcaagaaggactgctggaagtttggcatggagtcagatgccaaagacatcttgctgaaacacagcaactttgttggagtaccgatcttcctcaacggcaagcttatcaacaccacccaggcgctctggacagaggaaacccgtaaaatcacagaacagaaccacactgatttctaccagtacctcaccaagaacacctatgatacgccccgctacaccctccacttcaaggccgatgcccccctcaatatacgtagtcttttctacgtcccgaatcggccgccggcaatgtgggagcacagccagcaggcagatagcggagtgtcgctcttcagccgcaagattcttatccagcacaaggcagagaagatattacccaagtggctgcgttttgttacaggtgttgtagacagtgaagatattcctttgaaccttagcagagagttgcttcaggatagtgcgcttataaggaagctgagaactgtactgaccactcgactggtcaagttctttactgaccaggctaggaaagaccctgctaagtatgaccagttcactgatgagtacagtctcttccttagagagggtattgtgtctgcacaggaacaggctgagaaggaagagatagctagactgctgagatacgagtcatcagccttacaagaaggacagaaaaccagcctagtggagtatggagaaaggatgaagggaggagaacgcaatatctactacatttgtgcaccaagtcgagagctggcggagggctcaccttactttgaagcattcaggcagaaagatcgtgaagtaattttctgctatgatgattacgatgagatcactatgttacagctcagggagtttgatcgtaagctgctgaggtctgtagagagtgagatggcaggagatcaatcaagcgaagagatagctcaagaaaatggtaagatctttgaaggaagtctaaccacaggggaagtcaattctcttgtccaataccttaaaggagctttaggggtcaaggtcaacaatgtcaaggtaacccaaagacttggtcagtaccctgccatgatcactgtggctgagatgggcgctgcaaggcacttccttagaacagccatgaagaatcgcactgaggaagagaagatgcagctactccaaccaacattagaggttaatggaagccatccaatcgtaaagaaattgtttgccttgaaaacatcagatccagatttagcaaagatgctagcagaacagatttatgataatggaatgatagctgctggactggtagaagacccccgtcctatgctcggcaggttttatgctttcatggagaagtcattggagaaatactaa

SEQ ID NO: 129194 - protein, 758 aa, Strongylocentrotus purpuratus
MPGFVREQSRGMVPGCTNADARVARAVNEAMMRGLAAGDQANLTALLTEHFGQDSDERIPDKGDSPLMHNGNYHQGLPRHLRGLVHTRQYSSTAETESSNEIVTGITESEPENIEEEPVKHSIIQDSETSSGDFQQHEFQAETTMLLDIVAKSLYSENEVFIRELVSNASDALEKLRYLQLTQDNLEKPGALEIHIATNQDKGTFTIQDTGVGMTKEEMIENLGTIARSGSKAFLKELQEKGGSSDSSIIGQFGVGFYSAFMVGDTVEVFSKSHKKDAKAWYWCSDGSGQYKISEAEGVMKGTKIVIHLKKDCWKFGMESDAKDILLKHSNFVGVPIFLNGKLINTTQALWTEETRKITEQNHTDFYQYLTKNTYDTPRYTLHFKADAPLNIRSLFYVPNRPPAMWEHSQQADSGVSLFSRKILIQHKAEKILPKWLRFVTGVVDSEDIPLNLSRELLQDSALIRKLRTVLTTRLVKFFTDQARKDPAKYDQFTDEYSLFLREGIVSAQEQAEKEEIARLLRYESSALQEGQKTSLVEYGERMKGGERNIYYICAPSRELAEGSPYFEAFRQKDREVIFCYDDYDEITMLQLREFDRKLLRSVESEMAGDQSSEEIAQENGKIFEGSLTTGEVNSLVQYLKGALGVKVNNVKVTQRLGQYPAMITVAEMGAARHFLRTAMKNRTEEEKMQLLQPTLEVNGSHPIVKKLFALKTSDPDLAKMLAEQIYDNGMIAAGLVEDPRPMLGRFYAFMEKSLEKY

SEQ ID NO: 129195 - DNA, 2349 bp, Tribolium castaneum
  CDS (1)..(2349)
atgaagcagttgattgttttagcgataaatttgctacttttaatcggatacacacgagcagatgaatctattggggaaggaaccgtggaaaaggttgacctggacttgggggctagtagagaagggtcaagaacagacgatgaagtcgttaaaagggaagaagaagcaattaaattggacggacttaatgttgcccaattaaaagaactgcgcgacaaagcggagaaattcactttccagacggaagttaatcggatgatgaaactaatcatcaactccttgtaccgaaataaagaaattttcctcagggaattaatttctaatgcttctgacgctttagataagatccgcttgttgtcactgacagataaaaatgtgttggactcaaatcccgagttgaatattcgaatcaaagccgacaaggaggcgggaatgcttcatattaccgatactggtatcggaatgactaaacaagaccttgttaacaacttgggtactattgcgaaatcgggcactgccgaatttttgagtaaaatgcaagacgcttcaactgctcaagatatgaacgatatgattggtcagtttggtgttggtttctattcggcattcttagttgcggataaagttgtcgtaacgacaaaacataacgacgataaacagtacatttgggagtcggattcgtcaagcttttccattgtggatgatcctagaggcgattcgttgaaaaggggaaccacagtcagcctccagttgaaacccgaagccaaagatttcctcgaacatgacactgttcgttctttagttaagaaatattcacaatttatcaatttcccaatctatatgtggactagtcatacggaacaagtggaagaaccaatcgaagaagatgaaaagtcggaagagaaggagaagcctgatactgaagatgaggcagctgttgaggaagagaaggaggaagaaaaacccaagactaagaaagttgataagacggtttgggactgggaactgttgaatgatagtaagccaatttggacgaagaaaccgtcggaagttgatgataaggaatacgacgagttttacaagtctttgactaaggatagcaaacaacctttggcaaaagttcactttattgccgaaggtgaagttactttcaaggctttgttgtacgtaccagaagtacaaccatctgaaagttttaacagatatggtaccaaaaccgataatatcaaattgtacgttcgaagggtattcattacggatgaatttaacgacatgattccatcttatttgagtttcgttcgaggtgttgtagactcagacgacttacctttgaacgtttcccgtgaaactctccaacagcacaaactaattaaagttattaagaagaaactggttcgcaaagttctagatatgttgaagaagatatctgaggaagattatgagaaattctggaaggagtactctacaaacatcaaacttggaacaattgaggatccagcaaaccgcacccgattggctaaactcctccaattccattcatccaacagtgacaaaatgacttcgttagctgattacgtcaaacgtatgaagcccaaacaagaacgcattttctacattgctggttcatccaaagacgaagtccaaaaatcgcctttcgttgagcgattgctccgtaaagggtatgaggttttgtacctcgtcgaagccgtcgatgagtatgcgatttcggcaattccggaattcgaaggcaagaagttccagaatgtggccaaggaaggcttcagcttgactgaaagcgaaggaggaaaggaacaattggagcagcttaagaccacctttgagcctttgacgaagtggttaagcgatgaagcgctcaaggaccacgtcgccaaagctacagtttcagaaaggttgagtgattccccgtgcgctctagtcgcgagtatgtttggatggaccggaaatatggaacggttagcgatttcaaacgcacaccaaaagtcagacgatcctcaaaggtcgtattatttgaaccagaagaagacactggagattaacccaaggcatccgttgatgcgtgagttgttgaagcgggtcaatgacgatccgtcggatcctacggccaaagatatggccttgatgttgttccggacggcaacgcttagatcgggttatatgttacgggagacggcggattttgcgcaatctatcgaagcgatgatgaggaaaacgttgggtgtgcccctggatgaaggggtggaggaagaggaggatcttcccgaagatggtattccggaagaagagagtgaggagatcaaggatgatgatggggatcatgacgagttgtaa

SEQ ID NO: 129196 - protein, 782 aa, Tribolium castaneum
MKQLIVLAINLLLLIGYTRADESIGEGTVEKVDLDLGASREGSRTDDEVVKREEEAIKLDGLNVAQLKELRDKAEKFTFQTEVNRMMKLIINSLYRNKEIFLRELISNASDALDKIRLLSLTDKNVLDSNPELNIRIKADKEAGMLHITDTGIGMTKQDLVNNLGTIAKSGTAEFLSKMQDASTAQDMNDMIGQFGVGFYSAFLVADKVVVTTKHNDDKQYIWESDSSSFSIVDDPRGDSLKRGTTVSLQLKPEAKDFLEHDTVRSLVKKYSQFINFPIYMWTSHTEQVEEPIEEDEKSEEKEKPDTEDEAAVEEEKEEEKPKTKKVDKTVWDWELLNDSKPIWTKKPSEVDDKEYDEFYKSLTKDSKQPLAKVHFIAEGEVTFKALLYVPEVQPSESFNRYGTKTDNIKLYVRRVFITDEFNDMIPSYLSFVRGVVDSDDLPLNVSRETLQQHKLIKVIKKKLVRKVLDMLKKISEEDYEKFWKEYSTNIKLGTIEDPANRTRLAKLLQFHSSNSDKMTSLADYVKRMKPKQERIFYIAGSSKDEVQKSPFVERLLRKGYEVLYLVEAVDEYAISAIPEFEGKKFQNVAKEGFSLTESEGGKEQLEQLKTTFEPLTKWLSDEALKDHVAKATVSERLSDSPCALVASMFGWTGNMERLAISNAHQKSDDPQRSYYLNQKKTLEINPRHPLMRELLKRVNDDPSDPTAKDMALMLFRTATLRSGYMLRETADFAQSIEAMMRKTLGVPLDEGVEEEEDLPEDGIPEEESEEIKDDDGDHDEL

SEQ ID NO: 129197 - DNA, 1890 bp, Erwinia carotovora subsp. atroseptica SCRI1043
  CDS (1)..(1890): transl_table=11
atgagtatgaaaggccaagaaactcgcgggttccagtccgaagttaagcaactactgcatttgatgatccattcgctttactccaataaagaaatttttctgcgtgaattgatctccaacgcctctgatgcagcagacaagctacgtttccgtgcgctgtccacaccagaactgtatgcgggtgatggcgacctgcgcgtgcgcgtgtctacggataaagaaaaacgtactctgacgatttctgacaacggtatcggcatgagccgtgacgaagtgattgataatctgggtactattgcaaaatccggcactaaatcctttctggaatccatgggttccgatcaggttaaagatagccaactgattggtcagttcggtgtgggtttctactctgccttcatcgtggcggataaagtgaccgtgcgtacccgtgccgcgggcgcgaatgccgatcagggcgtgtattgggaatctgccggtgaaggcgattataccattgctgacatcactaaagacgatcgcggaacggaaatcactctgcatctgcgtgaaggcgaagacgagtttctggatgactggcgtgtgcgttccgtcatcagcaaatactctgaccatatcgcgctgccggtagaaatcgaatcccagacagaaagcgaagaagaaggtggtgagtccactgttagttgggaaaaaattaacaaggcacaagccctgtggacgcgcagtaaatctgaagtcagcgatgatgagtacaacgaattttataagcacatctcccatgactttaccgatccgctgagctggagccacaaccgtgtagaaggcaagcaggagtacaccagcctgctctacattcctgcacatgcaccgtgggatatgtggaatcgcgatcataaacacggtctaaaattgtatgttcagcgtgtcttcattatggatgatgctgaacagttcatgccgaattacctgcgttttgttcgtggcctgattgattccaacgatttgccgttgaacgtttcccgtgagattttgcaggacagccgtgtgacgcagaatttgcgtaatgcgctgaccaaacgtgtgctgcaaatgctggacaaactggcgaaagacgacgcggaaaaatatcaaacgttctggcaacagttcggtctggtgctgaaagaaggtccggcggaagacggtagcaaccgggaagcgatcgcgaaactgctgcgctttgccaccacgcaatctgatagttcagcgcagacggtgtcgctggaagattacgttagtcgcatggtggaaggtcaggacaagatctactacatcactgcagacagctatgcggcagcgaagagcagcccacacctggagctgttccgtaagaaaggcattgaggtattgttgttgtccgagcgtattgacgaatggatgatgagctacctgaccgagtttgacggtaaatccttccagtctgttagcaaagcggatgatacgttggacaaactggctgatgaagaaaacgatgcgcagaaagaagcacaaaaagcgctggagccgtttgtcgagcgtgtgaaaacgctgctgggcgaacgcgttaaagacgtgcgtttcacgtaccgtttgaccgatacgcctgcaattgtcgtgacggatgccgacgagatgagcacgcagatggcgaaactgttcgccgcagcgggccaacaagcgccggaagtgaagtacatttttgaactgaacccggagcacgcgttaattaaacgtgcagctgacgtttctgatgaggctgaatttggtgagtgggttgagctgcttctggatcaggctttgttagcggaacgcggaacgctggacgatccaaatctgttcattcgtcgtatgaatcagctattaagcgcctga

SEQ ID NO: 129198 - protein, 629 aa, Erwinia carotovora subsp. atroseptica SCRI1043
MSMKGQETRGFQSEVKQLLHLMIHSLYSNKEIFLRELISNASDAADKLRFRALSTPELYAGDGDLRVRVSTDKEKRTLTISDNGIGMSRDEVIDNLGTIAKSGTKSFLESMGSDQVKDSQLIGQFGVGFYSAFIVADKVTVRTRAAGANADQGVYWESAGEGDYTIADITKDDRGTEITLHLREGEDEFLDDWRVRSVISKYSDHIALPVEIESQTESEEEGGESTVSWEKINKAQALWTRSKSEVSDDEYNEFYKHISHDFTDPLSWSHNRVEGKQEYTSLLYIPAHAPWDMWNRDHKHGLKLYVQRVFIMDDAEQFMPNYLRFVRGLIDSNDLPLNVSREILQDSRVTQNLRNALTKRVLQMLDKLAKDDAEKYQTFWQQFGLVLKEGPAEDGSNREAIAKLLRFATTQSDSSAQTVSLEDYVSRMVEGQDKIYYITADSYAAAKSSPHLELFRKKGIEVLLLSERIDEWMMSYLTEFDGKSFQSVSKADDTLDKLADEENDAQKEAQKALEPFVERVKTLLGERVKDVRFTYRLTDTPAIVVTDADEMSTQMAKLFAAAGQQAPEVKYIFELNPEHALIKRAADVSDEAEFGEWVELLLDQALLAERGTLDDPNLFIRRMNQLLSA

SEQ ID NO: 129199 - DNA, 1914 bp, Pseudomonas syringae pv. syringae B728a
  CDS (1)..(1914): transl_table=11
atgattatgagtgtggaaactcaaaaggaaaccctgggcttccagaccgaggtaaagcaactgctgcacctcatgatccattcgctgtattccaacaaggaaattttccttcgcgaattgatctcgaacgcgtctgacgcggtcgacaaattgcgttttgaagcgttgtccaagcccgagttgctggaaggcggcgcggagctgaaaattcgtgtgagcttcgacaaggacgcgaagaccgttacgcttgaagacaacggcatcggtatgagccgtgaagacgtgatcacccacctgggcacgatcgccaagtccggcaccgccgatttcatgaaaaacctgtcgggcgaccagaagaaggactcgcacctgatcggtcagttcggtgtcggcttctactcggcgttcatcgttgccgatcaggtcgaagtgttcagccgtcgtgccggcacgccagcgagcgaaggtgtgcactggtcttccaagggcgaaggcgagttcgaagtcgccaccgtcgacaaggctgatcgtggcacccgtattgttctgcacctgaaaaacggtgaagaggaattcgctgacggctaccgcctgcgcaacatcatcaagaaatactccgaccatatcgccttgccgatcgagctgcccaaagagcaggctccggcagccgaaggcgaggagcctgcggcgctggaatgggaaaccgtcaaccgcgccagcgcgctctggacccgtccgcgcaccgaggtgaaggacgaggagtaccaggagttctacaagcacgtcgcgcacgactacgagaacccgctgagctggagccataacaaggtcgaaggcaagctggaatacacctcgctgctgtacgtgcctgcgcgtgcgccgtttgatctgtatcagcgcgaagcaccgcgtggtctcaagctctacgtgcagcgcgtgttcgtgatggatcaggccgagtcgttcctgccgctgtacatgcgcttcgtcaagggcgtggtcgactccaatgacctgtcgctgaacgtttcccgcgaaatcctgcagaaagacccgatcatcgactcgatgaagtcggcgctgaccaagcgcgtgctggacatgctggagaagctggcgaaaaacgagcccgagaagtacaagggcttctggaaaaacttcggtcaggtcctcaaggaaggtccggcagaagacttcgccaacaaggaaaaaatcgccggtctgctgcgtttcgcgtcgacgtccgacgacagcggcgaacagagcgtttccctggccgagtacctggcgcgcgccaaggaaggtcaggacaagatttactacctcactggcgaatcctacgcacaggtcaagaacagcccgcaccttgaggtcttccgcaagaaaggcattgaagtgctgttgctcaccgatcgtatcgacgagtggctgatgagctacctgagcgatttcgatggcaagggctttgtggatgtggcgcgtggtgacctggacctgggcaatctcgactccgaagaggacaagaaggctcaggaagagatcgccaaggacaaggaaggcctgatcgagcgtctgaaagccgccttgggtgagtcggtaagcgaagtgcgggtttcccatcgcctgaccgattcgcctgcaattctggccattggcgagcaggatatgggtctgcagatgcgtcagattctggaagccagcgggcaaaaggtgccggattccaagcctatcttcgaattcaaccctgcccacccgttgatcggcaagctcgatgccgaacagagcgaagaccgcttcggcgatctgtcgcacattctgttcgatcaggctgcgctggccgctggtgacagcctcaaggatccggccgcttacgtgcgtcgtctgaacaagttgctggtagaactgtcggtttga

SEQ ID NO: 129200 - protein, 637 aa, Pseudomonas syringae pv. syringae B728a
MIMSVETQKETLGFQTEVKQLLHLMIHSLYSNKEIFLRELISNASDAVDKLRFEALSKPELLEGGAELKIRVSFDKDAKTVTLEDNGIGMSREDVITHLGTIAKSGTADFMKNLSGDQKKDSHLIGQFGVGFYSAFIVADQVEVFSRRAGTPASEGVHWSSKGEGEFEVATVDKADRGTRIVLHLKNGEEEFADGYRLRNIIKKYSDHIALPIELPKEQAPAAEGEEPAALEWETVNRASALWTRPRTEVKDEEYQEFYKHVAHDYENPLSWSHNKVEGKLEYTSLLYVPARAPFDLYQREAPRGLKLYVQRVFVMDQAESFLPLYMRFVKGVVDSNDLSLNVSREILQKDPIIDSMKSALTKRVLDMLEKLAKNEPEKYKGFWKNFGQVLKEGPAEDFANKEKIAGLLRFASTSDDSGEQSVSLAEYLARAKEGQDKIYYLTGESYAQVKNSPHLEVFRKKGIEVLLLTDRIDEWLMSYLSDFDGKGFVDVARGDLDLGNLDSEEDKKAQEEIAKDKEGLIERLKAALGESVSEVRVSHRLTDSPAILAIGEQDMGLQMRQILEASGQKVPDSKPIFEFNPAHPLIGKLDAEQSEDRFGDLSHILFDQAALAAGDSLKDPAAYVRRLNKLLVELSV

SEQ ID NO: 129201 - DNA, 1881 bp, Haemophilus somnus 129PT
  CDS (1)..(1881): transl_table=11
atgtcaacaaatcaagaaactcgtggttttcagtctgaagttaaacagcttttacaattgatgattcattctctttattcaaataaagagatttttttgcgtgagttgatttccaatgcgtctgatgcggcggataaattgcgttttaaagccttgtctgcacctgaattatatgaaggagatggtgatttaaaagtgcggatcagttttgacgcagagaaaggtacgttaaccattagcgataatggtattggtatgacgagagagcaggtgatagatcatttaggcactatcgctaagtccggaacaaaagaatttttggccgcacttggacaggaacaggctaaagatagtcagttgatcggacaattcggtgtcggtttttattcggcatttattgtggcagataaagtaacagtgaaaacgagagcagcaggtgagccgatagataaagcggtgttgtgggaatcagccggtgagggtgaatattctgttgctgatattgagaaaaaagaacgtggtacggaaattactttgcacttacgtgaagaggaaaaagagtttgctaatgaatggcgtgtacgtgaaattatcggtaaatattctgatcatattggcttgcctgttgaaattttagcgaaagaatatgatgaagaaggtaaagaaacgggaattaaatgggaaaaaattaataaagctcaagcactttggacaagatcgaaaggtgagatttccgatgaggaatataaagagttttataaacatttaagccatgattttgctgatcctcttttatggacacataataaagttgaaggaaatcaagaatataccagcttgctttatgtgccgtctaaagccccttgggatttattcaatcgtgagcataaacatggtttgaaactttatgtacagcgtgtatttattatggatgatgctgaacaatttatgccgaattatttacgctttatgcgtggcttaattgatagcaatgatttgccgctaaatgtatctcgtgagattttacaagataataaagtgacagctgctttacgtaaagcattgaccaaacgctcattgcaaatgctggaaaaattagccaaagatgacgaggagaaatatttacaattctggaaagaatttggtttggttttgaaagaaggtccatcagaagactttgcgaataaagaaaatattgccaaattattgcgtttcgcttccagtaaaaatgatagctcagaacaaaccgtttctttggaagattatgttgctcgtatgaaagaggggcaaaaggcaatctattacatcactgcagatagttatattgctgctaaaaactcaccgcacttagagctgttcaataagaaggatattgaggtgttgttgttatctgatcgaattgatgaatggatgttaagttatttaactgaatttgacggtaagcaattacaaccgattactaaagctgatctggatttaggtgatttagcggacaaagaacaggaagagcaaaaagagcaagataaaacctttagttcgtttattgaacgagtaaaaaccttgttgggagaacgtgtaaaagatgtgcgtttaacgcatcgtttaacggataccccagcagtggtttctactgataatgatcaaatgaccacgcaaatggcaaaattatttgctgcggctggacaacctgttcctgaagtaaaatatacgtttgaacttaaccctgaacatcatttagtgaaaaaagtagcagatttggctgatgaagacgaatttgcaaattggattgaattactgcttgagcaagcaatgcttgcagaacgtggttcattagaaaatcctaccgcatttattaagcgagtaaatagtttgttgagttaa

SEQ ID NO: 129202 - protein, 626 aa, Haemophilus somnus 129PT
MSTNQETRGFQSEVKQLLQLMIHSLYSNKEIFLRELISNASDAADKLRFKALSAPELYEGDGDLKVRISFDAEKGTLTISDNGIGMTREQVIDHLGTIAKSGTKEFLAALGQEQAKDSQLIGQFGVGFYSAFIVADKVTVKTRAAGEPIDKAVLWESAGEGEYSVADIEKKERGTEITLHLREEEKEFANEWRVREIIGKYSDHIGLPVEILAKEYDEEGKETGIKWEKINKAQALWTRSKGEISDEEYKEFYKHLSHDFADPLLWTHNKVEGNQEYTSLLYVPSKAPWDLFNREHKHGLKLYVQRVFIMDDAEQFMPNYLRFMRGLIDSNDLPLNVSREILQDNKVTAALRKALTKRSLQMLEKLAKDDEEKYLQFWKEFGLVLKEGPSEDFANKENIAKLLRFASSKNDSSEQTVSLEDYVARMKEGQKAIYYITADSYIAAKNSPHLELFNKKDIEVLLLSDRIDEWMLSYLTEFDGKQLQPITKADLDLGDLADKEQEEQKEQDKTFSSFIERVKTLLGERVKDVRLTHRLTDTPAVVSTDNDQMTTQMAKLFAAAGQPVPEVKYTFELNPEHHLVKKVADLADEDEFANWIELLLEQAMLAERGSLENPTAFIKRVNSLLS

SEQ ID NO: 129203 - DNA, 1914 bp, Shewanella sp. MR-7
  CDS (1)..(1914): transl_table=11
atgtcacaacaagaaactcatggttttcaaactgaagtcaaacagctgttgcatttgatgatccattctttgtattccaacaaagaaattttcttgcgtgaactggtctccaacgctgcggatgcggccgataagctgcgttaccttgcgttgaccaacgacgcgctatacgaaggtgacggtgagctacgtgtgcgtatcagcgcagacaaagaaaaaggcactgtgaccatcgaagacaacggcgtaggtatgacccgcgatggcgtgattgagcatttaggcacgatcgccaaatcgggcaccgccgaattcttcaaaaacctctcaggcgaagcctcaaaggactcgcagctgatcggtcaattcggtgtgggcttctattccgcctttattgtggcgaaaaaagtcacagtacgcacccgtgcggcaggccataaggccaatgaagccgtattgtgggaatcggaaggtgagggcagtttcaccgtcgataccatcactaaggcgagccgtggtactgagatcaccctgcaccttcgtgatgaagagaaagagtttgccgatgagtggcgcctacgttccatcatcacaaaatactcagatcatatctccgtacccgttgaaatgtggcaggaaggcacccctgagcgcgatggcccagacggtgaaaaaatccccgctaccgaaggttactggaaggtcatgaacaaggcgactgcgctgtggatgcgcaataagtctgagatcagtgacgaagagtaccaagaattttataagcacatttcccacgactacacagacgcactgctgtggagccataaccgcgttgaaggtaaacaggaatacactaacctgttgtatatcccttcaaaagcaccgtgggatctgtggaaccgcgaccgtaagcatggcctgaaactctttgttcagcgcgtgtttatcatggatgacgccgagcagtttatgccatcttacctgcgctttgtgcaggggttaattgactcaaacgatctgccgctaaacgtgtctcgcgagattttgcaggacaaccacatcaccaaggcgatgcgcaccggtatcactaagcgtgtgctgggtatgttggaaaaactggcaaaagacgatgcggaaaaataccaacaattctgggccgaatttggtcaagtgttgaaggaaggtccagcggaagactttgcaaaccgtgagcgtattgcaggcttactgcgctttgcctctacccatactggcagcgcggcaccaacagtgtcactcgatgactacttaagccgcatgaaggaaggccaaaacaagatttactatatcgttgccgacagccacgaagccgcggccaacagcccacacttagaactgctgcgtaagaaaggcatcgaagtgttgctgatgtcagaacgtatcgacgagtggttaatcaatcacttaactgaatacaaagagaagcaactgcactcagtgacccgtggcgagctggaattaggtgagctggaagatgcggccgagaaggaagcgcaggagaaactcgccgaagagtctgcacctttggttgaacgcattaaagcggcattaggcgctagcgtggccgatgtgaaagtcacttcacgcttaaccgacaccccagcctgtgtggtgacgggggaaggtgagatgtcgagccagatgattaaactgatgcaagcagcgggtcagccagtgccagaggtcaagccgacgtttgagatcaacccagcgcacccattagtgtcgcgcttaaacgatcttcaagatgaagccgccttcgccgattggtcgaatctgttattgcaacaggcgcaattgtcggagaagggcagcctagcggatccatcggcctttattaagctgatgaaccaaatgctattggcgaacctgaagtaa

SEQ ID NO: 129204 - protein, 637 aa, Shewanella sp. MR-7
MSQQETHGFQTEVKQLLHLMIHSLYSNKEIFLRELVSNAADAADKLRYLALTNDALYEGDGELRVRISADKEKGTVTIEDNGVGMTRDGVIEHLGTIAKSGTAEFFKNLSGEASKDSQLIGQFGVGFYSAFIVAKKVTVRTRAAGHKANEAVLWESEGEGSFTVDTITKASRGTEITLHLRDEEKEFADEWRLRSIITKYSDHISVPVEMWQEGTPERDGPDGEKIPATEGYWKVMNKATALWMRNKSEISDEEYQEFYKHISHDYTDALLWSHNRVEGKQEYTNLLYIPSKAPWDLWNRDRKHGLKLFVQRVFIMDDAEQFMPSYLRFVQGLIDSNDLPLNVSREILQDNHITKAMRTGITKRVLGMLEKLAKDDAEKYQQFWAEFGQVLKEGPAEDFANRERIAGLLRFASTHTGSAAPTVSLDDYLSRMKEGQNKIYYIVADSHEAAANSPHLELLRKKGIEVLLMSERIDEWLINHLTEYKEKQLHSVTRGELELGELEDAAEKEAQEKLAEESAPLVERIKAALGASVADVKVTSRLTDTPACVVTGEGEMSSQMIKLMQAAGQPVPEVKPTFEINPAHPLVSRLNDLQDEAAFADWSNLLLQQAQLSEKGSLADPSAFIKLMNQMLLANLK

SEQ ID NO: 129205 - DNA, 1959 bp, Alkalilimnicola ehrlichei MLHE-1
  CDS (1)..(1959): transl_table=11
atggcgacagacgcacacaaggaaaccctggagttccaggccgaggtgcagcagctcctgcacctgatgatccactcgctctactccaacaaggacatcttcctccgcgagctgatctccaacgcctcggacgccatcgacaagctccgcttccagtccctgcaggatgaatccctgctcgagggcgagggcgacctgcgtatccgcgtctccgtggacaaggacgcccgcaccatcaccgtggccgacaacggcatcggcatgacccgcgacgaggtggcggagaacctgggtaccattgcccgctccggcaccaaggccttcctggatcagctcaccggcgaccagcaaaaggacgccaagctgatcggccagttcggcgtgggcttctactcggccttcgtggtggccgagcacgtcaccgtgcatacccgcaaggccggcctgggcgccgagcacggggtgcgctggtcctccgacggcaagggcgcctacaccctggagaacgaggaagtggcggagcgcggcacccgggtggtgctgaccctgcccgaatcccagagcgaatacctggacgactggcggctgaagggcatcatccgccgctactctgaccacatcgacgtgcccatccagatgccggcccaggccgaggacaaggacgagccggaagatgaggccgaaaaggcggaagccgccgagacctgggagacggtgaacaacaccaacgccctgtggatgcgccccaagtcggagatcagcgacgacgactacaaggccttctacaagcacgtggcccacgacttcgacgaccccatggtctggctgcacaaccacgtggaggggcgccagtcctacacctcgctgctctacattccgaagaacccgcccttcgacctctacgagcgggagccggcccacggcatcaagctctacgtgcgccgggtcttcatcatggaggacaccgagaagctgatgccgcgctacctgcgcttcgtgcgtggcctggtggactccgacgacctgccgctcaacgtctcccgcgagctgctccagcacaacccgctcctggacaagatccgcagcgcctcggtcaagcgcattctcgaccgcctggagaagatggccaagaacgagccggagcagtacgccgagttctacggcaacttcggcaaggtgctgaaggagggcgtggccgaggacttcgccaaccgcgagcgcatcgccaagctgctgcgcttctccaccacccaagacgagaatgagacgccggatgtcagcctggacgactacatcgcccgtatgaaagagggccaggaggccatctactacgtcaccgccgagagcttcaacgccgcccgcaacagtccccacctggaggtgttccgcaagaagggggtcgaagtgctgctgctgcccgacccggtggacgagtgggtcatcacccacctgaatgaatacgacggcaagccgctgaagtcggtggccaagggcggcctggacctgggcgagctggaggaccaggcggagaagaaggccgcggaagaggccaccgaaagccacaaggacctgctggagaagctcaagggcgcgctggaggacaaggtgagcgaggtgcgggtctccacccgcctgaccgactccccggcctgcctggtggtgggcgagtacgacttcggcatgggcatgcagcggttgctcaaggccgccggccacgctatgccccagggcaagccggcgctggagatcaacatcgaccaccccatcgttcagcgcatggacacggggctggacgatgcccgcttcagcgattgggcggcggtgctctacgaccaggccctgctcaccgagggcgggcagctggaggacccggccgccttcgtcaagcgggtcaacgccctgctcaccgagcaggcccgggccggcgaagcaaagagcaacgccgcccgcggggactga

SEQ ID NO: 129206 - protein, 652 aa, Alkalilimnicola ehrlichei MLHE-1
MATDAHKETLEFQAEVQQLLHLMIHSLYSNKDIFLRELISNASDAIDKLRFQSLQDESLLEGEGDLRIRVSVDKDARTITVADNGIGMTRDEVAENLGTIARSGTKAFLDQLTGDQQKDAKLIGQFGVGFYSAFVVAEHVTVHTRKAGLGAEHGVRWSSDGKGAYTLENEEVAERGTRVVLTLPESQSEYLDDWRLKGIIRRYSDHIDVPIQMPAQAEDKDEPEDEAEKAEAAETWETVNNTNALWMRPKSEISDDDYKAFYKHVAHDFDDPMVWLHNHVEGRQSYTSLLYIPKNPPFDLYEREPAHGIKLYVRRVFIMEDTEKLMPRYLRFVRGLVDSDDLPLNVSRELLQHNPLLDKIRSASVKRILDRLEKMAKNEPEQYAEFYGNFGKVLKEGVAEDFANRERIAKLLRFSTTQDENETPDVSLDDYIARMKEGQEAIYYVTAESFNAARNSPHLEVFRKKGVEVLLLPDPVDEWVITHLNEYDGKPLKSVAKGGLDLGELEDQAEKKAAEEATESHKDLLEKLKGALEDKVSEVRVSTRLTDSPACLVVGEYDFGMGMQRLLKAAGHAMPQGKPALEINIDHPIVQRMDTGLDDARFSDWAAVLYDQALLTEGGQLEDPAAFVKRVNALLTEQARAGEAKSNAARGD

SEQ ID NO: 129207 - DNA, 1929 bp, Magnetococcus sp. MC-1
  CDS (1)..(1929): transl_table=11
atgagtgccgctaccgagacggaagtccgcgagtttcaaaccgaagtgagtcagttgctggatctaatgatccacgccctgtacagcaataaagagatctttctacgggaattgatctccaatgcctccgatgccaacgataagctgcgtttcgccgggctctctgatgatagcctgtttgaaggagatagcgagctaaccatcaaattggaatttgataaagaggctggcaccttctccatcatggataatggtatcggtatgagccgtgatgaggtgatctccaacattggtaccatcgccaaatcgggtaccaaggagttttttaaatcactcaccggtgatcagcagcgtgatgcccacctgattggtcaatttggggtcggtttttactccagctttattgtggcagacaaagtaactttggagacccgtaaagctggggctggcgctgagcaaggggtgcgttggatctcggcgggtgatggcagctacaccttggaaaatatggaaaaagccgagcgtggtacccgtattaccctgcatatgcgcgaggatgaaaaagagtttctggatgcgtggcgtctgcgctcgattgtgcgtaaattttctgaccatgtgacgtggccggtgaaaatgctcgaagagctgccacccgccccacctgcaaaagagggcgaagagcccgagccccctaaaaccccagagtgggagacggtcaataaagccagtgcgctgtggacgctctcgaaaaatgacatcacggaagatgagtataaagagttctacaaacatgtgggtcacgattttgaagaccccatggagtgggtacatgcgcgtatggaagggcgtatggagtataccctgttgctctacatcccgggtcgtgctccctttgatctgtgggatcgggatcgtcgcggtgggctgaagctgtttgtgcggcgtgtcttcatcatggataccagtgaagagctgctgccccgctacctgcgctttgtgcggggtgtgattgattccgccgatctacccctgaatgtctcgcgcgaaatattgcagcagaaccgtcaggtcgaggcgattaaaaagggcttggtccataaagttttgggtatgctcgaagagatgctcaaaaatgatcctgaaaaatatgccaccttctggaaagagtttggcatggtgctcaaagagggcatgatcgaagattttgccaacaaagagcgcatcgccaaactgtgccgctttagcaccacccatgacggtgagcgggtgccaaaaatcgccctagcggactatgtggagcgcatgaaagaggggcaggaggcgatctattatgtaaccggcgagagctttgaagcctgctcatctagcccccacttggagatcttccgtaaaaaaggcattgaggtgctgctgctttcagaccgggttgatgagtggaccgttactcatttgaccgagtttgacggcaagcctttacaggccatcaccaagggtgagttggatctctccaaatttgcaggtggtgaagaagaagccaaagatgaagaggctgaaaaagcgcaggaagaggcgcttaagccgatcaccgagcggatggctaaagtactggaaggtcaggttaaagaggtgcgattaagtcaccgtttgactgaatcccccgcctgtctggtgggggatgcgcacgatatgagcgccaccctggagcgcttgctcaaggaggccggtcaagaggtgcccaccgctaagcgtattttggagatcaaccccagccatgccctgctcaagcgtctagccgatgaggctgacgaagagaagtttggcgagttgacccatgtgttgcacgatcaagcgctgctcgcggagggggggcaactgaaagatcccagtcagtttgtcaaacgtctaaataagttgttgatgggttaa

SEQ ID NO: 129208 - protein, 642 aa, Magnetococcus sp. MC-1
MSAATETEVREFQTEVSQLLDLMIHALYSNKEIFLRELISNASDANDKLRFAGLSDDSLFEGDSELTIKLEFDKEAGTFSIMDNGIGMSRDEVISNIGTIAKSGTKEFFKSLTGDQQRDAHLIGQFGVGFYSSFIVADKVTLETRKAGAGAEQGVRWISAGDGSYTLENMEKAERGTRITLHMREDEKEFLDAWRLRSIVRKFSDHVTWPVKMLEELPPAPPAKEGEEPEPPKTPEWETVNKASALWTLSKNDITEDEYKEFYKHVGHDFEDPMEWVHARMEGRMEYTLLLYIPGRAPFDLWDRDRRGGLKLFVRRVFIMDTSEELLPRYLRFVRGVIDSADLPLNVSREILQQNRQVEAIKKGLVHKVLGMLEEMLKNDPEKYATFWKEFGMVLKEGMIEDFANKERIAKLCRFSTTHDGERVPKIALADYVERMKEGQEAIYYVTGESFEACSSSPHLEIFRKKGIEVLLLSDRVDEWTVTHLTEFDGKPLQAITKGELDLSKFAGGEEEAKDEEAEKAQEEALKPITERMAKVLEGQVKEVRLSHRLTESPACLVGDAHDMSATLERLLKEAGQEVPTAKRILEINPSHALLKRLADEADEEKFGELTHVLHDQALLAEGGQLKDPSQFVKRLNKLLMG

SEQ ID NO: 129209 - DNA, 1914 bp, Shewanella sp. ANA-3
  CDS (1)..(1914): transl_table=11
atgtcacaacaagaaactcatggttttcaaactgaagtcaaacagctgttgcatttgatgatccattctttgtattccaacaaagaaattttcttgcgtgaactggtctccaatgctgcggatgcggccgataagctgcgttaccttgcgttgaccaacgacgcgctatacgaaggtgacggtgagctacgtgtgcgcattagcgcagacaaagaaaaaggcactgtaaccatcgaagacaacggcgtaggtatgacccgcgatggtgtgattgagcatttaggcacgatcgccaaatcgggcaccgctgaattctttaaaaacctctctggcgaagcctcaaaggattcgcagctgatcggtcaattcggtgtgggcttttattcggcctttatcgtggcgaaaaaagtcactgtacgcacccgtgcggcaggccataaggctaatgaagccgtattgtgggaatcggaaggtgagggcagtttcacagtcgataccatcactaaggcgagccgtggtaccgagatcactctgcacctgcgtgatgaagagaaagagtttgccgatgagtggcgcctacgctccatcatcactaaatactcagaccatatctctgtaccagttgaaatgtggcaggaaggcacccctgagcgcgatggcccagacggtgaaaaaatccccgcaaccgaaggttactggaaagtcatgaacaaggcgactgcgctgtggatgcgcaataagtctgagatcagtgacgaagagtaccaagaattttataagcacatttcccacgactacacagacgcactgctgtggagccataaccgcgtagaaggtaaacaggaatacactaacctgttgtatatcccttcaaaagcaccatgggatctgtggaaccgcgaccgtaagcatggtctaaaactctttgttcagcgcgtgtttatcatggatgacgccgagcagtttatgccatcttacctgcgctttgtgcagggtttgattgactcaaacgatctgccgctgaacgtgtctcgcgagattttacaggacaaccacatcaccaaagcgatgcgcaccggtatcactaagcgcgtgctgggcatgttggaaaaactggcaaaagacgatgcggaaaaataccaacaattctgggccgaatttggtcaagtgttgaaggaaggtccagcggaagactttgcaaaccgtgagcgtatcgcaggcttattgcgttttgcgtctacccatacgggcagcgcggcaccgactgtttcactcgatgactacttaagccgcatgaaggaaggccaaaacaagatttactatatcgtggccgacagccacgaagccgcggccaacagcccacacttagaactgctgcgtaagaaaggcatcgaagtgttgctgatgtcagaacgtatcgacgagtggttaatcaaccacttaactgagtacaaagaaaaacaattgcactcagtcacccgtggcgagctggagttaggtgagctggaagatgcggccgagaaggaagcgcaagagaaactcgccgaagagtctgcgccattgattgaacgcattaaagcggcattaggcgctagcgtggccgatgtgaaagtgacctcacgcttaaccgataccccagcctgtgtggtgacgggggaaggtgagatgtcgagccagatgatcaaactgatgcaggctgcgggtcagccagtgccagaggtcaagccgacgtttgaggtaaaccctgcgcacccattagtatcgcgcttaaacgatcttcaagatgaagccgcctttgccgattggtcgaatctgttattgcaacaggcgcaattgtcggagaagggcagcctagcggatccatcggcctttattaagctgatgaaccaaatgttattggcgaacctgaagtaa

SEQ ID NO: 129210 - protein, 637 aa, Shewanella sp. ANA-3
MSQQETHGFQTEVKQLLHLMIHSLYSNKEIFLRELVSNAADAADKLRYLALTNDALYEGDGELRVRISADKEKGTVTIEDNGVGMTRDGVIEHLGTIAKSGTAEFFKNLSGEASKDSQLIGQFGVGFYSAFIVAKKVTVRTRAAGHKANEAVLWESEGEGSFTVDTITKASRGTEITLHLRDEEKEFADEWRLRSIITKYSDHISVPVEMWQEGTPERDGPDGEKIPATEGYWKVMNKATALWMRNKSEISDEEYQEFYKHISHDYTDALLWSHNRVEGKQEYTNLLYIPSKAPWDLWNRDRKHGLKLFVQRVFIMDDAEQFMPSYLRFVQGLIDSNDLPLNVSREILQDNHITKAMRTGITKRVLGMLEKLAKDDAEKYQQFWAEFGQVLKEGPAEDFANRERIAGLLRFASTHTGSAAPTVSLDDYLSRMKEGQNKIYYIVADSHEAAANSPHLELLRKKGIEVLLMSERIDEWLINHLTEYKEKQLHSVTRGELELGELEDAAEKEAQEKLAEESAPLIERIKAALGASVADVKVTSRLTDTPACVVTGEGEMSSQMIKLMQAAGQPVPEVKPTFEVNPAHPLVSRLNDLQDEAAFADWSNLLLQQAQLSEKGSLADPSAFIKLMNQMLLANLK

SEQ ID NO: 129211 - DNA, 1935 bp, Mycobacterium avium 104
  CDS (1)..(1935): transl_table=11
atgaacgcgcgcgtcgagcagttggagtttcaagccgaggctcggcaactgctggatctgatggtccactccgtctactccaacaaggactcgttcctgcgggagttgatctcgaacgcttccgacgcactggacaagctgcggctggaagccttccgcaacaaggacctcgacgtcgacacctccgacctgcacatccagatcgaggtggacaaggatgcgcgcaccctgaccatccgcgacaacggcatcggcatgacccgcgccgaggtggtcgacctgatcggcaccctggccaagtcgggcaccgccgaactgcgccaacaactccgcgaagccaagaacgcccagaacgaagccgcctcagaggaactcatcggccagttcggcatcggcttctactccagcttcatggtggccgacaaggtcgaactgctcacccgcaaggccggcgagagcgaggccaccaagtgggagtcgagcggcgagggcacctacaccatcgaatcggtcgagaacgccccgcagggaacctcggtcaccctgcatctgaagcccgaggacaccgaggacgagctgcacgactacacctcggagttcaagatcaagagcctggtcaagaagtactccgacttcatcgcctggcccatccggatggaggtggagcggcgcacgccggccaccgaagagggcggcgaggagaccgtcacccgggaggtcgagaccctcaactcgatgaaggccctgtgggcccggcccaaggacgaggtctccgaggaggagtacaaggagttctacaagcacatcgcgcacgcctgggacgacccgctcgaggtcatcgcgatgaaggccgagggcaccttcgagtaccaggcgctgctgttcatcccgtcccacgccccgttcgacctgttcaaccgggacgcgcacaccggcatccagctctacgtcaagcgggtgttcatcatgggtgactgcgaccagctgatgcccgaatacctgcgtttcgtcaagggtgttgttgacgcacaggacatgtcgctcaacgtgtcccgcgagatcctgcaacaggaccggcagatcaaggccatccggcggcggctgaccaagaaggttctgtccaccatcaaggagttgcaatccgagcggcccgacgactaccggaccttctggacccagttcggccgggtggtcaaggagggtctgctgtcggacttcgacaaccaggagacgctgctgcagctctgctccttcgcctcgacgcacagcgaggaggaggccaccacgctggcccagtacgtcgagcggatgaaggaagggcagacgcagatcttctacgccaccggcgagacgcgccagcagatcctcaagtcgccgcatctggaggcgttcaaggccaagggctacgaggtgttgctgctcaccgacccggtcgacgaggtctgggtgggaaccgtcaccgagttcgacggcaagccgctgcagtcaatcgccaagggcgaggtggacctgagcgccgagggcgaggagagccaggccgagcgggaagagcagcagaaggaattcgccgatctgctcgcctggctgaaggacaccctgtccgaccacgtcaaggaggtccggctgtccaaccggctgaccgactcgccggcctgcctgatcaccgacgccttcggcatcacaccggcgctggcccggctctaccgcgcctccgggcaggacattccggtgggcaagcgaatactggaactcaatcccaagcacccactggtcaccggcctgcgccaagcccaccaggaccgcgccgacgatccgtccgtcgccgagaccgcggaattgctttacggcacagcgcttctggccgagggaggcgccctcgacgacccggcccggttcgccgagatactggccgaccggttggcccgcaccctgtag

SEQ ID NO: 129212 - protein, 644 aa, Mycobacterium avium 104
MNARVEQLEFQAEARQLLDLMVHSVYSNKDSFLRELISNASDALDKLRLEAFRNKDLDVDTSDLHIQIEVDKDARTLTIRDNGIGMTRAEVVDLIGTLAKSGTAELRQQLREAKNAQNEAASEELIGQFGIGFYSSFMVADKVELLTRKAGESEATKWESSGEGTYTIESVENAPQGTSVTLHLKPEDTEDELHDYTSEFKIKSLVKKYSDFIAWPIRMEVERRTPATEEGGEETVTREVETLNSMKALWARPKDEVSEEEYKEFYKHIAHAWDDPLEVIAMKAEGTFEYQALLFIPSHAPFDLFNRDAHTGIQLYVKRVFIMGDCDQLMPEYLRFVKGVVDAQDMSLNVSREILQQDRQIKAIRRRLTKKVLSTIKELQSERPDDYRTFWTQFGRVVKEGLLSDFDNQETLLQLCSFASTHSEEEATTLAQYVERMKEGQTQIFYATGETRQQILKSPHLEAFKAKGYEVLLLTDPVDEVWVGTVTEFDGKPLQSIAKGEVDLSAEGEESQAEREEQQKEFADLLAWLKDTLSDHVKEVRLSNRLTDSPACLITDAFGITPALARLYRASGQDIPVGKRILELNPKHPLVTGLRQAHQDRADDPSVAETAELLYGTALLAEGGALDDPARFAEILADRLARTL

SEQ ID NO: 129213 - DNA, 1932 bp, Azoarcus sp. BH72
  CDS (1)..(1932): transl_table=11
atgtccgaagcgcaagccgcagcccagaccctcaatttccaggccgaggtgaagcaactgcttcacctgatgatccactcgctctattccaaccgcgagatcttcctgcgcgaactggtctcgaacgcgtcggacgcctgcgacaagctgcgtttcgaagcgctcgacaacgccgcgctgttcgaaggcgagggtgacctcaagatccgcatcgccttcgacaaggacgccaagacgatcaccatcgccgacaacggcatcggcatgagccgcgacgaggcgatctcccacctcggcaccatcgccaagtcgggcaccaaggaattcttcggcaagctcaccggcgaccagaagaaggacgccaacctcatcggccagttcggcgtcggcttctactccgccttcctggtggccgaccgcgttaccgtgctgacccgccgcgccggcctgccggcctcggcgggggtgaagtggcagtgttcgatggcgggcgacgaagccggcgcctacaccgtggaggacatcgacaagcccggccgcggcaccgaaatcacgctgcacctgcgcgatggccaggaagacctgctgtcgtcgtggaagctgaagagcctggtgcgcaagtactcggaccacatcgtccagcccatcgtgatgaagaaggaggagtggaacgaggagaagaacgagcaggtcgtcaccgacgaggacgagacggtgaaccaggccaacgcgctgtggacccgctcgaagaacgacatctcggaagacgagtacaaggctttctacaagcacgtcggccacgactacgacgagccgctggcctggacccattcgcgcgtcgaaggccgccacgaatacaccaacctgctctatgtgccggcgcacgcgcccttcgacctgtgggaccgcaacgccaagcacggcatcaagctgtacgtgaagcgcgtcttcatcatggacgacgccgagaagctgatgcccacctacctgcgcttcgtacgcggggtggtcgattccgccgacctgccgctcaacgtgtcgcgcgagatcctgcaggaatccaaggacatcgacaccatccgcgccggctgcacgaagaaggtgctcggcctgctggaagacctcgccaccagcgacgaggcgggcgacaaggagaagtacgccaccttctggaaggaattcggcaaggtgctgaaggaaggtgtgggcgaggacttcgccaacaaggagaagatcgccggcctgctgcgcttcgcctccaccaaggcggacacgccggacgagatcgtgtcgctcaaggactacatcgagcgcatgaaggaaggccaggacaagatctacttcgtcaccgccgaaaccttcaatgccgccaagaacagcccgcacctcgaggtcttccgcaagaagggcatcgaagtgctgctgctgtcggaccgcgtcgatgaatgggtgatcggcaacctcaccgagttcgacggcaagccgctggtgtccgtcgccaagggcgggctggatctgggcgcgctggaagacgaagccgagaagaaggaagccgagaaggccgccgacgactacaaggacctgctggagaagatgaaggccagcctcggcgagcgcgtgaaggacgtcaaggtgacgctgcgcctgaccgattcgccggcctgcctggtcgccgacgagcacgacatgggcatgaacctggcgcgcatcctgaaggcggccggccagagcgcgccggtgtccaagcccattctcgagatcaatcccaaccacccggcagtgctgcggctgaagtacgaggaaaagagcttcgacgactgggccgcggtgctgttcgaccaggcgctgctggccgaaggcggcacgctggacgacccggccacctttgtgaagcgcatcaaccagctgatgatggcgatgagcggcaactga

SEQ ID NO: 129214 - protein, 643 aa, Azoarcus sp. BH72
MSEAQAAAQTLNFQAEVKQLLHLMIHSLYSNREIFLRELVSNASDACDKLRFEALDNAALFEGEGDLKIRIAFDKDAKTITIADNGIGMSRDEAISHLGTIAKSGTKEFFGKLTGDQKKDANLIGQFGVGFYSAFLVADRVTVLTRRAGLPASAGVKWQCSMAGDEAGAYTVEDIDKPGRGTEITLHLRDGQEDLLSSWKLKSLVRKYSDHIVQPIVMKKEEWNEEKNEQVVTDEDETVNQANALWTRSKNDISEDEYKAFYKHVGHDYDEPLAWTHSRVEGRHEYTNLLYVPAHAPFDLWDRNAKHGIKLYVKRVFIMDDAEKLMPTYLRFVRGVVDSADLPLNVSREILQESKDIDTIRAGCTKKVLGLLEDLATSDEAGDKEKYATFWKEFGKVLKEGVGEDFANKEKIAGLLRFASTKADTPDEIVSLKDYIERMKEGQDKIYFVTAETFNAAKNSPHLEVFRKKGIEVLLLSDRVDEWVIGNLTEFDGKPLVSVAKGGLDLGALEDEAEKKEAEKAADDYKDLLEKMKASLGERVKDVKVTLRLTDSPACLVADEHDMGMNLARILKAAGQSAPVSKPILEINPNHPAVLRLKYEEKSFDDWAAVLFDQALLAEGGTLDDPATFVKRINQLMMAMSGN

SEQ ID NO: 129215 - DNA, 1881 bp, Haemophilus somnus 2336
  CDS (1)..(1881): transl_table=11
atgtcaacaaatcaagaaactcgtggttttcagtctgaagttaaacagcttttacaattgatgattcattctctttattcaaataaagagatttttttgcgtgagttgatttccaatgcgtctgatgcggcggataaattgcgttttaaagccttgtctgcacctgaattatatgaaggagatggtgatttaaaagtgcggatcagttttgacgcagaaaaaggtacgttaaccattagcgataatggtattggtatgacgagagagcaggtgatagatcatttaggcactatcgctaagtccggaacaaaagaatttttggccgcacttggacaggaacaggctaaagatagtcagttgatcggacaattcggtgtcggcttttattcggcatttattgtggcggataaagtaacagtgaaaacgagagcagcaggtgagccgatagatagagcggtgttgtgggaatcagccggtgagggtgaatattctgttgctgatattgagaaaagagaacgtggtacggaaattactttgcacttacgtgaagaggaaaaagagtttgctaatgaatggcgtgtacgtgaaattatcggtaaatattctgatcatattggcttgcctgttgaaattttagcgaaagaatatgatgaagaaggtaaagaaacgggaattaaatgggaaaaaattaataaagctcaagcactttggacaagatcgaaaggtgagatttctgatgaggaatataaagagttttataaacatttaagccatgattttgctgatcctcttttatggacacataataaagttgaaggaaatcaagaatataccagcttgctttatgtgccgtctaaagccccttgggatttattcaatcgtgagcataaacatggtttgaaactttatgtacagcgtgtatttattatggatgatgctgaacaatttatgccgaattatttacgctttatgcgtggcttaattgatagcaatgatttgccgctaaatgtatctcgtgagattttacaagataataaagtgacagctgctttacgtaaagcattgaccaaacgctcattgcaaatgctggaaaaattagccaaagatgacgaggagaaatatttacaattctggaaagaatttggtttggttttgaaagaaggtccatcagaagactttgcgaataaagaaaatattgccaaattattgcgtttcgcttccagtaaaaatgatagctcagaacaaaccgtttctttggaagattatgttgctcgtatgaaagaggggcaaaaggcaatctattacatcactgcagatagttatattgctgctaaaaactcaccgcacttagagctgttcaataagaaggatattgaggtgttgttgttatctgatcgaattgatgaatggatgttaagttatttaactgaatttgacggcaagcaattacaaccgattactaaagctgatctggatttaggtgatttagcggacaaagaacaggaagagcaaaaagagcaggataaaacatttagttcgtttattgaacgagtaaaaaccttgttgggagaacgtgtaaaagatgtgcgtttaacgcatcgtttaacggataccccagcagtggtttctactgataatgatcaaatgaccacgcaaatggcaaaattatttgctgcagctggacaacctgttcctgaagtaaaatatacgtttgaacttaaccctgaacatcatttagtgaaaaaagtagcagattttgctgatgaagacgaatttgcaaattggattgaattactgcttgagcaagcgatgcttgctgaacgtggttcattagaaaatcctaccgcatttattaagcgagtaaacaatttattggggtaa

SEQ ID NO: 129216 - protein, 626 aa, Haemophilus somnus 2336
MSTNQETRGFQSEVKQLLQLMIHSLYSNKEIFLRELISNASDAADKLRFKALSAPELYEGDGDLKVRISFDAEKGTLTISDNGIGMTREQVIDHLGTIAKSGTKEFLAALGQEQAKDSQLIGQFGVGFYSAFIVADKVTVKTRAAGEPIDRAVLWESAGEGEYSVADIEKRERGTEITLHLREEEKEFANEWRVREIIGKYSDHIGLPVEILAKEYDEEGKETGIKWEKINKAQALWTRSKGEISDEEYKEFYKHLSHDFADPLLWTHNKVEGNQEYTSLLYVPSKAPWDLFNREHKHGLKLYVQRVFIMDDAEQFMPNYLRFMRGLIDSNDLPLNVSREILQDNKVTAALRKALTKRSLQMLEKLAKDDEEKYLQFWKEFGLVLKEGPSEDFANKENIAKLLRFASSKNDSSEQTVSLEDYVARMKEGQKAIYYITADSYIAAKNSPHLELFNKKDIEVLLLSDRIDEWMLSYLTEFDGKQLQPITKADLDLGDLADKEQEEQKEQDKTFSSFIERVKTLLGERVKDVRLTHRLTDTPAVVSTDNDQMTTQMAKLFAAAGQPVPEVKYTFELNPEHHLVKKVADFADEDEFANWIELLLEQAMLAERGSLENPTAFIKRVNNLLG

SEQ ID NO: 129217 - DNA, 1881 bp, Haemophilus influenzae R2866
  CDS (1)..(1881): transl_table=11
atgtcacaaaatcaagaaactcgcggctttcaatctgaagtcaaacaacttctccaattaatgattcattctttgtattccaacaaagaaattttcttacgtgaattaatttctaatgcctctgatgcagcagataaattacgctttaaagcactttccaaccctgctttatatgaaggtgatggcgacttgcgtgtgcgcgttagctttgatgcggataaaggcactatcacaattagcgataacggcattggcatgacccgtgagcaagtcatcgatcatttgggtacgattgcaaaatcaggaacaaaagaatttttaaccgcacttggtcaagatcaagcaaaaaatagccagcttattgggcagtttggcgtgggtttttattcagcttttattgtggcagataaagtgactgtaaaaactagagcagctggtgaagaggtggataaagccgtactttgggaatctgcgggtgaaggcgaatattctgtggcggatattgagaaaaaatcccgtggtacagatgtgattttacatttacgtgaagatgaaaaagaatttttaaatgaatggcgtttgcgtgaaattattggtaaatattctgaccatattggcttgccagtggaaatgctgacgaaagaatacgatgatgagggcaaagagtgcggcgaaaaatgggaaaaaatcaataaatctgatgccctttggacgcgttctaaaaatgatgtttccgatgaggaatacaaagcgttttacaaacacttaagccatgattttgttgatcctgtgacttgggcgcataacaaagtggaaggaaatcaagcatatactagtttgctttatgtaccagctaaagcaccttgggatttatttaatcgcgaacataaacacggcttaaaactttatgttcaacgtgtatttattatggatgatgctgagcaatttatgccgaattatctacgttttatgcgtggtttaatcgatagtaatgacttgccattaaatgtatctcgtgaaattttacaggataacaaaattacggctgcactacgcaaagcattaactaagcgttcattacaaatgctagaaaaattagcaaaagatgatgcagaaaaatatcttcaattctggaaagagtttggtttagtcttaaaagaaggccctgcagaagattttgctaacaaagaaactgttgcgaagttattgcgttttgcttcgacacataatgatggttgcgagcaaactgcctctttagaagattacatcttgcgtatgaaagaggggcaaaaagctatctattacattacagcggatagttatgttgcagcgaaaaatagcccgcacttggaattattcaataaaaaaggcattgaggttttattgctttccgatcgcattgatgaatggatgttaagctatttaactgaatttgacggtaaagcattacaaagtatcacgaaagcagatttggatttaggcgatttagccgataaagaatctgaaacacaaaaacaacaagatgaagcctttggtagttttattgagcgtgtgaaaaacttgcttggcgaacgtgtgaaaacggtgcgtttaactcacaatttaacggatacaccagcggtggtttctacggataacgatcaaatgacgacccaaatggcgaaattgtttgcagccgcagggcaacctgtaccagaagtaaaatacacatttgaactgaatccagaacatcatttagtgaaaaaagtagcggatattgcagatgaaactgaatttgctgattgggtggaactgttgcttgaacaagctatgttagcagagcgcggatctttggaaaatccagctgcgtttattaaacgtatcaataagttgttaggttaa

SEQ ID NO: 129218 - protein, 626 aa, Haemophilus influenzae R2866
MSQNQETRGFQSEVKQLLQLMIHSLYSNKEIFLRELISNASDAADKLRFKALSNPALYEGDGDLRVRVSFDADKGTITISDNGIGMTREQVIDHLGTIAKSGTKEFLTALGQDQAKNSQLIGQFGVGFYSAFIVADKVTVKTRAAGEEVDKAVLWESAGEGEYSVADIEKKSRGTDVILHLREDEKEFLNEWRLREIIGKYSDHIGLPVEMLTKEYDDEGKECGEKWEKINKSDALWTRSKNDVSDEEYKAFYKHLSHDFVDPVTWAHNKVEGNQAYTSLLYVPAKAPWDLFNREHKHGLKLYVQRVFIMDDAEQFMPNYLRFMRGLIDSNDLPLNVSREILQDNKITAALRKALTKRSLQMLEKLAKDDAEKYLQFWKEFGLVLKEGPAEDFANKETVAKLLRFASTHNDGCEQTASLEDYILRMKEGQKAIYYITADSYVAAKNSPHLELFNKKGIEVLLLSDRIDEWMLSYLTEFDGKALQSITKADLDLGDLADKESETQKQQDEAFGSFIERVKNLLGERVKTVRLTHNLTDTPAVVSTDNDQMTTQMAKLFAAAGQPVPEVKYTFELNPEHHLVKKVADIADETEFADWVELLLEQAMLAERGSLENPAAFIKRINKLLG

SEQ ID NO: 129219 - DNA, 1911 bp, Xylella fastidiosa Dixon
  CDS (1)..(1911): transl_table=11
atgaccctcgaagcagacaaacagacccacggcttccaaacggaagtcaaacagttactgcaactgatgatccactccctgtactcaaacaaggagattttcctacgcgaattaatctccaatgctgccgatgctgcggacaaactgcgctttgaggcattgagcgccccctcattactggaagaagatcccaacctgcgcatccgcgttgagtttgataaacaagcacacaccatcaccattgatgacaacggcattggtatgagtcgttatgaggccattgcacacctgggcacgattgccaagtcaggcaccgcggatttcctcaaaacactgtctggagatcaacgcaaagacgccaatctcattggccaattcggtgtcggcttctacagtgcctttattgtcgccgaccacgtcgacgtctacagccgccgcgccggactgacagcagccgagggcgtacactggtcgagcaaaggtgaaggcaactttgaagtggccaccattgataaaccgcaacgcggtacccgcgtcgtgctccacctgaaagaaaatgaacaacactttgcagaaggatggaccctgcgcagcaccctgaaaaaatattccgaccacatcggcctccccattgaaatgctcaaggaacaccacggcaaggaggaagaaaaagacacccccaaagaagccgagtgggaagccgtcaacaaagccagcgccctatggacacgccccaaaaacgacattaaggatgaggaataccaggaattctacaaacacatctcacacgatatgaccaacccgctcgcctggagccataacaaggtcgaaggcaagctggaatacacctccttactctatgtcccaacacgcgcaccatttgacctgtaccaccgcaatgctgccaagggactgaaactgtatgtacaacgtgttttcatcatggatcaagcggaacagttcctgccgctctacctgcgtttcatcaagggcgttgttgactctgccgacctctcgctgaacgtctcccgcgagatcctccaatctggcccagtcgtggactccatgaaagccgcactgagcaaacgcgccctggacatgcttgaaaaactcgccaaagacgccccagaagattacaaaaccttctggaaaaactttggccaggtactgaaagaaggacccgccgaggattacagcaaccgcgagaaagtcgccagcctgctgcgctttgcctcaacctacgacacctccggtgatccctccgtcgcactcaccgattacatcgcacgcatgaaagaaggtcaggacaagctctactacctgaccggagaatcctacgcacaaatcaaggacagcccatacctggaagtattccgtaaaaaaggcattgaagtactgctactggtagaccgcattgacgagtggttgatgaactacttacatgaattcgacggcaaatcctttgtcgacattgcacgcggcgatctggacctcggaaacctcgacagcgaagcagacaaaaaagcacaagaggaaatcgcaaaaaccaaagaagcattagccagccggatcaaagccacactgggagaagatgttgccgaagtgcgcgtctcacatcgcctgaccgattcacccgcagtactcgccatcggcgaaggcgatctcggcctgcaaatgcgtcagttactcgaagctagcggccagaaagttccagaaacaaaacccgtcttcgaattcaacccaagccacccactcatcgagaaactggacgccgaacaagacatggaccgttttgcggacttgagccacatcctgttcgatcaagccgcactcgctgccggagacagtttgaaagacccggccaactacgtgcgccgcctcaacaaactcctactggaactatcggcctaa

SEQ ID NO: 129220 - protein, 636 aa, Xylella fastidiosa Dixon
MTLEADKQTHGFQTEVKQLLQLMIHSLYSNKEIFLRELISNAADAADKLRFEALSAPSLLEEDPNLRIRVEFDKQAHTITIDDNGIGMSRYEAIAHLGTIAKSGTADFLKTLSGDQRKDANLIGQFGVGFYSAFIVADHVDVYSRRAGLTAAEGVHWSSKGEGNFEVATIDKPQRGTRVVLHLKENEQHFAEGWTLRSTLKKYSDHIGLPIEMLKEHHGKEEEKDTPKEAEWEAVNKASALWTRPKNDIKDEEYQEFYKHISHDMTNPLAWSHNKVEGKLEYTSLLYVPTRAPFDLYHRNAAKGLKLYVQRVFIMDQAEQFLPLYLRFIKGVVDSADLSLNVSREILQSGPVVDSMKAALSKRALDMLEKLAKDAPEDYKTFWKNFGQVLKEGPAEDYSNREKVASLLRFASTYDTSGDPSVALTDYIARMKEGQDKLYYLTGESYAQIKDSPYLEVFRKKGIEVLLLVDRIDEWLMNYLHEFDGKSFVDIARGDLDLGNLDSEADKKAQEEIAKTKEALASRIKATLGEDVAEVRVSHRLTDSPAVLAIGEGDLGLQMRQLLEASGQKVPETKPVFEFNPSHPLIEKLDAEQDMDRFADLSHILFDQAALAAGDSLKDPANYVRRLNKLLLELSA

SEQ ID NO: 129221 - DNA, 1926 bp, Pseudoalteromonas tunicata D2
  CDS (1)..(1926): transl_table=11
atggagaacgcaatgacagcagctcaaaaagaaacattaggctttcaaaccgaagtaaaacaactattaaacctaatgatccactcactttattcaaataaagaaatattcttacgtgaattagtgtctaacgcttcagatgccgcggataagttacgttttttagcactttcagatggtaacttataccaaggtgacgcaaaccttcgcgtacgtattagtgccgacagtgaaaaaggcacagtaacaatatctgataatggtattggtatgacccgtgaagaagtcattagctcactgggtactattgcaaaatcaggcacggctgatttctttaaaaatttaaccggcgatcaagcaaaagactcgcagttaattggtcaatttggtgttggtttttattctgcatttatcgttgccgattcggtaacggttcgtactcgtaaagcgggtgaagcaaaagcgattgaatggcattcacaaggtgaaggcgaatacacgctagccgaaattggaaaagaagaccgtggtactgaaattattttacatctacgtgaagatgaaaaagaatttgcgagtgattaccgtttaaaaagcatagtgacaaaatattctgatcacatcgccattccggttgaaatgtgggaagaaggtacgcctgaatcagaaggtccagacggtgaaaaaattgtagcaactgaaggccagtggcaagcaattaaccgtgccacagcgctttggacacgtgataaatcagaattatcagatgatgaatacaaagaattttataaacacgtaagccatgattgggaagagccattaacgtgggcacacaataaagttgagggtaaaacagaatacaccagcttattatatatcccgaaaaaagcgccgtttgatttatggaatcgtgatcgccaaagtggtttaaaactctacgttcagcgtgtctttattatggatgacgcagagcaatttatgcctagttatttacgctttgtaaaaggtttgcttgattcgaatgatttaccactgaatgtctcgcgtgaaattctacaagataacaaagtaacacaagctattcgtaaaggttgtacatcacgtgttttaaaaatgcttgatcgtatgggtaaaaatcgccctgaagaataccaagtattttggaatgagtttggccaagtaatgaaagaaggcccagcagaagattttgcccataaagaagatattgcaaaattactgcgttttgcttcaacgcttagtgatgaaagtacacaaaatgtatcattaactgattacattgagcgtatgaaagaaggccaagataaaatttattatgtggttgccgatagttttggtgcagcgaaaaactcaccacatttagagattttccgtaaaaagggcatcgaagtattattgttatccgatcgtgtagatgagtggatgatgagccatttaaccgagtttgatggtaaacaattacgctcagtaacacgcggcgatctggatttaggtagcttagatgatgagcaaaccaaacaagagcaagcagaagctgaaaaagcagtagaaggcttagttgaacgagtgaatactgcccttactggtaaagtgaaagaagtacgattcactcatcgtttaacggattctccagcctgtgtagttacagatgaaaatgacatgagctcacaaatggctaagttaatggcttcagtaggtcaggcagtacctgaagcattaccgatttttgagcttaatcctgatcatcaattagtacagcacttaaaccagatgcaagatgaagaaaaatttgcccagtggtctgaagtattactcgatcaagcattgcttgcagaacgcggcagcttaaaagaccctgctggttttgtaagtcgtttaaataaattaatgcttgatttaagtaagtaa

SEQ ID NO: 129222 - protein, 641 aa, Pseudoalteromonas tunicata D2
MENAMTAAQKETLGFQTEVKQLLNLMIHSLYSNKEIFLRELVSNASDAADKLRFLALSDGNLYQGDANLRVRISADSEKGTVTISDNGIGMTREEVISSLGTIAKSGTADFFKNLTGDQAKDSQLIGQFGVGFYSAFIVADSVTVRTRKAGEAKAIEWHSQGEGEYTLAEIGKEDRGTEIILHLREDEKEFASDYRLKSIVTKYSDHIAIPVEMWEEGTPESEGPDGEKIVATEGQWQAINRATALWTRDKSELSDDEYKEFYKHVSHDWEEPLTWAHNKVEGKTEYTSLLYIPKKAPFDLWNRDRQSGLKLYVQRVFIMDDAEQFMPSYLRFVKGLLDSNDLPLNVSREILQDNKVTQAIRKGCTSRVLKMLDRMGKNRPEEYQVFWNEFGQVMKEGPAEDFAHKEDIAKLLRFASTLSDESTQNVSLTDYIERMKEGQDKIYYVVADSFGAAKNSPHLEIFRKKGIEVLLLSDRVDEWMMSHLTEFDGKQLRSVTRGDLDLGSLDDEQTKQEQAEAEKAVEGLVERVNTALTGKVKEVRFTHRLTDSPACVVTDENDMSSQMAKLMASVGQAVPEALPIFELNPDHQLVQHLNQMQDEEKFAQWSEVLLDQALLAERGSLKDPAGFVSRLNKLMLDLSK

SEQ ID NO: 129223 - DNA, 1893 bp, Oceanobacter sp. RED65
  CDS (1)..(1893): transl_table=11
atgaccactgcacaaaaagaaaccttaggctttcaaaccgaagtgaagcagatgcttcacctaatgatccattctctttacagcaacaaagagatcttcctgcgtgagctgatttccaatgcctcggatgcgtgtgacaagctacgttttgaaggtttaaatgatgatagtcttttcgagaatgatccagatacccaggtgaaaatcgaatttgatagcgaagcaaataccgtcaccatcagcgacaacggtattggcatgaaccgtgatgaggtgatcgagaatctaggtacgattgccaagtctggtaccgctcagttcttgcagcagctatccggtgatgagaaaaaagatgcacacttaattggtcaattcggggtgggtttctatagctccttcatcgttgcagacaaagtagaggtactgactcgtcgtgctggtgctaaagcggacgaggccgtactttggacaagtgatggcgatggcgaatttaccatcgagaacgttgaaaaagcgggccgtggcaccagcatcactttgtatctgaagaaagatgagtctgagtttgctgataacttccgtttacgtaatttggttaaaaaatactctgatcatatcgctgtccctgtgatgatggaaaaagaacattacggtgaagagaaagataagccagagacgcctgagtgggaaagtgtaaacagcgcaaaagcactgtggactcgttccaagtcagatattgaagacgaagactatcaagagttctacaagcatattgctcacgattacgaagactctttgacttggtcccataataaagtggaaggtaagttggaatacacgagcttactgtatgttccaaaacgacctccgtttgatttatggaatcgtgaaggtgctcgtggcctgaagttatatgttcagcgcgttttcattatggacgacgctgagcaatttttaccgccataccttcgtttcatcaagggtgtggtggatagcaatgatctaccactgaacgttagtcgtgaaattttacaagaaaatggcaatatcgcttctatgcgttctgctttgaccaaacgcattctagatatgctaaaaaaactggcgaaaaacaaaccagaagagtatcaaacgttttgggaagggtttggccaggtattgaaagaagggcctgcagacgatttcgctaataaagagaaaatcgctgaactattccgttttgccagtacaaaaggtgaagacgatactcagaatatttcgcttgatacttatctagagcgaatggatgagaagcaggaaaaaatctattacctaacggcagaaaactatttgacggcctctcgcagtccgcatttggagatgttccgtaagaaaggtattgaggttcttctgctaacggatcgcgttgatgagtggatggtttcacatctaagtgagttcaaaggtaagacgtttgaagacatcaccaaaggtgaacttgagttagacgaagaagataagaagaagcaggaagaagttgagaaagaaagcaaagatcttcttgagcgtattaagaaagtactcaatgacgaagtggaagacgttcgagtttctcatcgtctaaccgattctccagcgtgtctggttgttggtaaggatgatatcaacatgcagatgcgtcgtatgctcgaagcagcgggccaaactttacctgaagctaagcgtgtactggaagtgaatccggagcatcctttaatgcaaaagatggatcagcagcaagatgaagaacgttttgccgacatgacgcagattattttcgatcaggcgcaattggccgaaggttcacagctacaagatccagcgggttatgttgatcgcatcaacaagttaatgcttggtttacttgatggataa

SEQ ID NO: 129224 - protein, 630 aa, Oceanobacter sp. RED65
MTTAQKETLGFQTEVKQMLHLMIHSLYSNKEIFLRELISNASDACDKLRFEGLNDDSLFENDPDTQVKIEFDSEANTVTISDNGIGMNRDEVIENLGTIAKSGTAQFLQQLSGDEKKDAHLIGQFGVGFYSSFIVADKVEVLTRRAGAKADEAVLWTSDGDGEFTIENVEKAGRGTSITLYLKKDESEFADNFRLRNLVKKYSDHIAVPVMMEKEHYGEEKDKPETPEWESVNSAKALWTRSKSDIEDEDYQEFYKHIAHDYEDSLTWSHNKVEGKLEYTSLLYVPKRPPFDLWNREGARGLKLYVQRVFIMDDAEQFLPPYLRFIKGVVDSNDLPLNVSREILQENGNIASMRSALTKRILDMLKKLAKNKPEEYQTFWEGFGQVLKEGPADDFANKEKIAELFRFASTKGEDDTQNISLDTYLERMDEKQEKIYYLTAENYLTASRSPHLEMFRKKGIEVLLLTDRVDEWMVSHLSEFKGKTFEDITKGELELDEEDKKKQEEVEKESKDLLERIKKVLNDEVEDVRVSHRLTDSPACLVVGKDDINMQMRRMLEAAGQTLPEAKRVLEVNPEHPLMQKMDQQQDEERFADMTQIIFDQAQLAEGSQLQDPAGYVDRINKLMLGLLDG

SEQ ID NO: 129225 - DNA, 1914 bp, Alteromonadales bacterium TW-7
  CDS (1)..(1914): transl_table=11
atgactgcagcacaaaaagaaacattaggctttcaaacagaagtaaaacaactattaaacttaatgattcattctctttattcaaacaaagagatttttttacgtgagcttgtatcaaacgcatcagatgcagccgacaagctacgttttttagcgctttcaaatggtgatctttaccaaggtgatgcagaccttcgcgttcgtatcagcgcagataaagaggccaataccgttactatttcagataacggcatcggtatgacgcgtgaagaagtgattaactctttaggcactattgcaaaatcgggcactgctgagtttttcaaaaacttaacgggcgatcagagcaaagattcacaacttattggtcagtttggtgttggtttttactctgcatttattgttgctgatttagtgactgttcgcacacgtaaagcgggtgaaacaactgcttatgagtgggagtctaaaggtgaaggcgagtatacgctgcaagaaattgaaaaagaaggccgtggtaccgaaattactttacaccttcgcgaagacgaaaaagaatttgcagacgaattccgtttacgtagcattgtgaccaaatactcagatcatatttctacgcctgtacaaatgtacaaagcagaagtaccagaatctgaaggcgaagatggcgaaaaaattccagcagtaccgggtgagtgggaaagcattaaccgcgccacggcattgtggacgcgtgataaatcagagctttctgatgaagaatacaaagagttttacaagcatgtgagccatgactgggaagatccgctaagctgggcacataataaagttgaaggtaaaactgagtacactagccttttatatatccctaaaaaagcccctttcgatttatggaaccgtgagcgtcaaagtggtttaaaactatacgttcaacgtgtgtttgtaatggatgatgctgagcagtttatgccaagctacttacgttttgttaagggtttattagattcaaacgatttaccattaaatgtatcgcgtgaaattttacaagataacaaagtaacccaagcgattcgtaaagggtgtacctcgcgtatcattaaaatgcttgagcgtatggctaaaaacaaagctgacgattaccaagtattttggaatgagtttggtcaggtgatgaaagaaggcccagcggaagacgctgcaaataaagaagcgatttgcaagttacttcgtttttcttctactcatacagactcacagacgcaagatgtgtcgcttgagcaatatgttgagcgcatgaacgaagggcaagataaaatatattacgtggtagccgatacctttaccgctgctaaaaactcgccgcatttagagattttccgcaaaaaaggcattgaggtattattactaagcgaccgtgttgacgagtggatgatgagccacctaactgagtttgcagataagccacttcagtcaatcacacgtggtgacttagacctaggcaagcttgatgatgaagagacaaagaaagcgcaagaagagtctgaaaaagagatggccggcttagtagaacgcattaaaacagccttaggagatgatgttaaagaagtgcgtttcacacaccgtttaactgactctccagcatgtgttgtaagtgatgacaacgacatgagttcgcaaatgcaaaagctaatggagtctgttggtcaagcggcgccagaggctaagcctgtgtttgagctaaacccagagcatcaacttgtgaaacatttaaatgacgaacaagatgaagataaatttgcacaatggtcacatgtcctattagaccaagcattacttgcagagcgcggaacattaaaagacccaacagggtttgttacacgcctaaataaattaatgttagagctaagcaaataa

SEQ ID NO: 129226 - protein, 637 aa, Alteromonadales bacterium TW-7
MTAAQKETLGFQTEVKQLLNLMIHSLYSNKEIFLRELVSNASDAADKLRFLALSNGDLYQGDADLRVRISADKEANTVTISDNGIGMTREEVINSLGTIAKSGTAEFFKNLTGDQSKDSQLIGQFGVGFYSAFIVADLVTVRTRKAGETTAYEWESKGEGEYTLQEIEKEGRGTEITLHLREDEKEFADEFRLRSIVTKYSDHISTPVQMYKAEVPESEGEDGEKIPAVPGEWESINRATALWTRDKSELSDEEYKEFYKHVSHDWEDPLSWAHNKVEGKTEYTSLLYIPKKAPFDLWNRERQSGLKLYVQRVFVMDDAEQFMPSYLRFVKGLLDSNDLPLNVSREILQDNKVTQAIRKGCTSRIIKMLERMAKNKADDYQVFWNEFGQVMKEGPAEDAANKEAICKLLRFSSTHTDSQTQDVSLEQYVERMNEGQDKIYYVVADTFTAAKNSPHLEIFRKKGIEVLLLSDRVDEWMMSHLTEFADKPLQSITRGDLDLGKLDDEETKKAQEESEKEMAGLVERIKTALGDDVKEVRFTHRLTDSPACVVSDDNDMSSQMQKLMESVGQAAPEAKPVFELNPEHQLVKHLNDEQDEDKFAQWSHVLLDQALLAERGTLKDPTGFVTRLNKLMLELSK

SEQ ID NO: 129227 - DNA, 1929 bp, marine gamma proteobacterium HTCC2143
  CDS (1)..(1929): transl_table=11
atgacgacagcaacgagtaaagaaacgctaggcttccagactgaagcaaagcaattactgcagttaatgattcactctctttatagtaataaagaaatattcttgcgggagctgatatctaatgcctccgatgccgcggacaagttgcgcttcgaagccttggctgacggtacgttatatgaaaatgatcctgagttgaagataaccattacgttcgatcaagaggccaagacacttagtatctcggacaacggtattgggatgtcgaaggacgatgttatttcgcatttgggaacgatagctaaatcgggaactgcagagtttttgggccgcttaagtggcgacgagaagaaagactcacagttgattggtcaattcggagtcggcttctactccgcctttattgttgccgacagagtagaggtgctgactcgtcgcgccgggctggagccctcagaaggtattcattgggagtctgaaggagaggctgagtttagtgttgagagtatagagaaagcagaccgcggaacaactgtgatccttcacttaagagaagacagcgctgattttgcggacaactggcgtattcggtcggttgttaagaagtattcggatcacattgccataccggtattaatggaaaagcaagcaacaccggactacgacgacgaaggcaaagaaaagcccgttgaggaaaacacgacgcctgagtttgaagccgtcaacgatgcgacggcattgtggacgcggtcgagaagtgaagttaccgatgaggaatacatagaattttataagcatgtttcccatgactttgaagaccctctgagttggactcacaacaaggtagaaggcaagctggaatacaatagtttgctgtatgtgccgaagaaagcaccgtttgatatgtggaatcgggaggcaagtcgcggacttaagctttatgttcaacgcacctttatcatggatgatgcggagcagtttttgccattgtatctgcgctttattaagggtgtgattgattcgaatgatctgtctttgaatgtctcgcgagagattcttcagcaagaccctgctgtggattcaatgaaaagtgcggtgactaaaagagtattagatacgctgtcaaaaattgcgaaaaatgatagcgaaaagtatcagttattttgggaccaatttgggcaggttttaaaagaaggaccggcagaggatttttctaacaaggaaaagatcgccaaattgctgcgatttgcttcaacccatacaaactcggatgttcaaagcaattctctggaagattatgttggtcggatgaaagaagggcaggataaaatttattatgttgctgctgaaaacttcactaccggaagtaatagtccccatctggaagttttccgtaagaaagatatagaagttctggttttttatgatcgaattgacgagtggttgatgggtcatatgatggacttcgacggtaagcaatttcaggatgtcggcaaaggggaattaaacctgggtgatttggaaggtgaggacgataaaaaagagaaagaaaagctcgagacggaaaacaaagatcttattgaacgtgtgaaaaaggttttgggagaaaaaattgattctgttcgagtgaccaatcggttaacagattcacccgcatgtttagtggttggtgaagatgatatgggcgctcagatgcgacggattatggagcaggctgggcaggcaatgcctgagagtaagcctattctcgagttgaacccggagcactcattggtgaaaaaattggatcaggagagcgatgaggaccgttttgctgatttagtcgatattttgtttgaccagtcgacattagcagaaggtggtcagcttgacgaccccgcggcctatgttcatcggttgaacaagttgatacttgatttgagtaaataa

SEQ ID NO: 129228 - protein, 642 aa, marine gamma proteobacterium HTCC2143
MTTATSKETLGFQTEAKQLLQLMIHSLYSNKEIFLRELISNASDAADKLRFEALADGTLYENDPELKITITFDQEAKTLSISDNGIGMSKDDVISHLGTIAKSGTAEFLGRLSGDEKKDSQLIGQFGVGFYSAFIVADRVEVLTRRAGLEPSEGIHWESEGEAEFSVESIEKADRGTTVILHLREDSADFADNWRIRSVVKKYSDHIAIPVLMEKQATPDYDDEGKEKPVEENTTPEFEAVNDATALWTRSRSEVTDEEYIEFYKHVSHDFEDPLSWTHNKVEGKLEYNSLLYVPKKAPFDMWNREASRGLKLYVQRTFIMDDAEQFLPLYLRFIKGVIDSNDLSLNVSREILQQDPAVDSMKSAVTKRVLDTLSKIAKNDSEKYQLFWDQFGQVLKEGPAEDFSNKEKIAKLLRFASTHTNSDVQSNSLEDYVGRMKEGQDKIYYVAAENFTTGSNSPHLEVFRKKDIEVLVFYDRIDEWLMGHMMDFDGKQFQDVGKGELNLGDLEGEDDKKEKEKLETENKDLIERVKKVLGEKIDSVRVTNRLTDSPACLVVGEDDMGAQMRRIMEQAGQAMPESKPILELNPEHSLVKKLDQESDEDRFADLVDILFDQSTLAEGGQLDDPAAYVHRLNKLILDLSK

SEQ ID NO: 129229 - DNA, 2052 bp, marine gamma proteobacterium HTCC2080
  CDS (1)..(2052): transl_table=11
atgcgtgaaaattcgctgacgacgggtattaaaaatgagctgctgcgttatgccgtcggccttgaaatttcgaccctttgcctccacctaacaacccaaagcgaaaacttagggaaaacgccaatgactgccgccacagaaacaaatgccaccgaaacaatgggctttcagaccgaagccaaaaagttgcttcatttgatgatccattcgttgtactcgaatcgggaaatctttctcagagaattaatatcgaatgcttcagacgccattgataagcatcgctttgcggttattgagaacggcaagttggcggaaggtgtttctgaataccaaattcaggttggagttgatggcgagtccaatacggtcacaatttcggataatggcattggcatgagccgggaagaggtgattgaacaccttggcaccattgcgaaatcgggtaccgccgcgttcttggataatctcagtggtgatgataaaaaagactcccaacttattggtcagtttggtgtcgggttttactcagcgtttatcgtcgccgatcgtgtggaagttataactcgtaaagccggcaccgctagttctgaggcgacacattgggaatcggcgggtgaggccgaattttcggtcaccagttcagagcgtgacacctcaggtacgaccgtaattttgcacctaaagtcagatgccgatgaatttgcctctgaataccgaattcgtagtgtcatcaaaaaatactcggaccatatttcagtgccagtaatgatgccaaaggtcgctgatgctcctgcaggtgaagatgaagcagaggtggttgagtcggccccagtcgagtgggaggcggttaacgaagcgcaagccctttggacacgcagtcgatcagacgtctctgatgaagagtaccaagctttctataaacacatctcacacgactttgaggaccctgcaacttggagtcataacagagtagagggaaagctggagtacacatcgctgctatacataccggcgaaggctccctttgacctatggaatcgtgagggtgcacgaggtttaaaactgtatgtgcagcgcacgtttattatggatgacgctgaacaatttctgcccctgtatctgcggtttgttaagggtgtactcgactctaatgatctgccgctgaacgtatcacgtgaaatcttgcaacaagacggcaatgttgaatccatgaagagcgctatgtccaagcgaatactggatatgctgcaaaaaatggcatctgctgagcccgagcagtatcagcaattctgggacacctttggcgaggtattgaaagaaggtcctgcagaggacttcgctaacaaggaaaaggttgccaaacttctgcgctttgcctccaccaattccgatgctccagagcatacggtcagtcttccagattactgtgagcgcctctctgagggtcaagaagcgatttggtatgttgtggcagaaaaccacgcgacagcaaaaaacagcccgcacctagaggttttccggaagaagggtattgaggtgctgcttttatccgatcgtattgatgagtggctaatgagccatctcatggagttcgatggaaaggagcttaaagatgtcgctcgtggaagtctggaatttgacagtgaaaacgaggaagaaaaagcggcgttggaaaccgcaggtaaggcacacgagggtctcattgagcggatgaaagccgctctgggcgataaagtggcggaggtgcgtcccacgctgcgcctcactgaatcaccggcatgcttggtggtcggcgaacatgagatgggtgcgcagatgcgccgcattatggaggcggcgggtcaggccgtgcctgattctccccccacattggagcttaatacggaacatccgctgattcagcgtctggatcaagagtccgatgaggagcgttttgccgatctcacccagattttgttcgatcaagcgacgttggcagagggttcgacgcttgaggatcctgccacttacgtcagccggctcaacaagctgttgttggagatgagtcagtag

SEQ ID NO: 129230 - protein, 683 aa, marine gamma proteobacterium HTCC2080
MRENSLTTGIKNELLRYAVGLEISTLCLHLTTQSENLGKTPMTAATETNATETMGFQTEAKKLLHLMIHSLYSNREIFLRELISNASDAIDKHRFAVIENGKLAEGVSEYQIQVGVDGESNTVTISDNGIGMSREEVIEHLGTIAKSGTAAFLDNLSGDDKKDSQLIGQFGVGFYSAFIVADRVEVITRKAGTASSEATHWESAGEAEFSVTSSERDTSGTTVILHLKSDADEFASEYRIRSVIKKYSDHISVPVMMPKVADAPAGEDEAEVVESAPVEWEAVNEAQALWTRSRSDVSDEEYQAFYKHISHDFEDPATWSHNRVEGKLEYTSLLYIPAKAPFDLWNREGARGLKLYVQRTFIMDDAEQFLPLYLRFVKGVLDSNDLPLNVSREILQQDGNVESMKSAMSKRILDMLQKMASAEPEQYQQFWDTFGEVLKEGPAEDFANKEKVAKLLRFASTNSDAPEHTVSLPDYCERLSEGQEAIWYVVAENHATAKNSPHLEVFRKKGIEVLLLSDRIDEWLMSHLMEFDGKELKDVARGSLEFDSENEEEKAALETAGKAHEGLIERMKAALGDKVAEVRPTLRLTESPACLVVGEHEMGAQMRRIMEAAGQAVPDSPPTLELNTEHPLIQRLDQESDEERFADLTQILFDQATLAEGSTLEDPATYVSRLNKLLLEMSQ

SEQ ID NO: 129231 - DNA, 1905 bp, Pseudomonas putida GB-1
  CDS (1)..(1905): transl_table=11
atgactgtggaaacacaaaaggaaacgttgggcttccagactgaggtgaagcagctgctgcacctcatgattcactcgttgtactccaacaaggaaatcttcctgcgggagctgatttccaacgcctccgacgccgctgacaagctgcggttcgaagccctggccaagccagagctgctcgaaggcgacgccgacctgaaaattcgcctgagcttcgacaaggacgccggtaccgtgaccctcgaggacaacggcatcggcatgagccgcgaagacgtcatcgcccacctgggtaccatcgccaagtccggcaccgccgacttcatgaagaacctcaccggtgaccagaagaaggactcgcacctgatcggtcagttcggcgtgggcttctactccgcgttcatcgttgccgacaaggttgacgtgtacagccgccgtgctggccagccagcggccgagggtgtgcactggtcgtcgaaaggcgagggcgagttcgaagtcgccaccatcgacaagccacagcgcggcacccgcatcgtcctgcacctgaagaaggacgaactggaattcgctgatggctggcgcctgcgcaacgtggtcaagaaatactccgaccacatcgctctgccgatccagttgcccaaagagcaggctggcgctgaaggtgaagaacagccggccgaagagtgggaaaccgtcaaccgcgccagcgccctgtggacccgttcgcgcaccgaggtgaaggacgaggagtaccaggagttctacaagcacatcggccatgacttcgaaaacccgctggcctggagccacaacaaggtcgaaggcaagctcgaatacaactcgctgctgtacgtgccggcccgtgcgccgttcgacctgtaccagcgcgaagcaccgcgcggcctgaagctgtacgtgcagcgtgtgttcatcatggaccaggccgagtcgttcctgccgctgtacctgcgtttcatcaagggtgtggtcgattccaacgacctgtcgctgaacgtgtcgcgtgaaatcctgcagaaagacccgatcatcgattcgatgaagaccgcgctgaccaagcgcgtgctggacatgctggagaaactggcgaagaacgaacccgagcagtacaagggcttctggaagaacttcggccaagtgttgaaagaaggcccggccgaagacttcgccaacaaggagaaaatcgccggcctgctgcgcttcgcttccacccaggacgacagcggcgagcagagcgtcgccctggccgactacctggcccgtgcgaaggaaggccaggacaagatctactacctcaccggcgagtcgtacgcgcaggtcaagaacagcccgcacctggaagtcttccgcaagaaaggcatcgaagtgctgctgctgaccgaccgtatcgacgagtggctgatgagctacctcaacgaattcgacggcaaggccttcgttgacatcgcccgtggcgatctggacctgggcaagctggattcggaagaagacaagaaagcccaggaagaagtcgccaaggacaaggaaggcctggtcgagcgcctaaaaggcgcgctgggtgacagcgtggccgaagtgcgcgtgtcgcaccgcctgaccgactcgccggcaatcctggccattggcgagcaggacctgggcctgcagatgcgtcaaattctggaagccagcgggcagaaggtgccggagtccaagccgatcttcgagttcaacccgagccacccgctgatcgagaagttggacaacgagcagagcgaagaccgcttcgccgagctgtcgcacatcctgttcgatcaggcggccctggcggccggtgacagcctgaaggacccggcggcgtacgttcgtcgcctgaacaagctgctggtcgagctgtctgcttga

SEQ ID NO: 129232 - protein, 634 aa, Pseudomonas putida GB-1
MTVETQKETLGFQTEVKQLLHLMIHSLYSNKEIFLRELISNASDAADKLRFEALAKPELLEGDADLKIRLSFDKDAGTVTLEDNGIGMSREDVIAHLGTIAKSGTADFMKNLTGDQKKDSHLIGQFGVGFYSAFIVADKVDVYSRRAGQPAAEGVHWSSKGEGEFEVATIDKPQRGTRIVLHLKKDELEFADGWRLRNVVKKYSDHIALPIQLPKEQAGAEGEEQPAEEWETVNRASALWTRSRTEVKDEEYQEFYKHIGHDFENPLAWSHNKVEGKLEYNSLLYVPARAPFDLYQREAPRGLKLYVQRVFIMDQAESFLPLYLRFIKGVVDSNDLSLNVSREILQKDPIIDSMKTALTKRVLDMLEKLAKNEPEQYKGFWKNFGQVLKEGPAEDFANKEKIAGLLRFASTQDDSGEQSVALADYLARAKEGQDKIYYLTGESYAQVKNSPHLEVFRKKGIEVLLLTDRIDEWLMSYLNEFDGKAFVDIARGDLDLGKLDSEEDKKAQEEVAKDKEGLVERLKGALGDSVAEVRVSHRLTDSPAILAIGEQDLGLQMRQILEASGQKVPESKPIFEFNPSHPLIEKLDNEQSEDRFAELSHILFDQAALAAGDSLKDPAAYVRRLNKLLVELSA

SEQ ID NO: 129233 - DNA, 2151 bp, Drosophila buzzatii
  CDS (1)..(2151)
  misc_feature (546)..(546): r is g or a
  misc_feature (735)..(735): k is g or t
  misc_feature (987)..(987): y is t or c
  misc_feature (1230)..(1230): r is g or a
  misc_feature (1247)..(1247): r is g or a
  misc_feature (1255)..(1255): m is a or c
  misc_feature (1405)..(1405): r is g or a
  misc_feature (1518)..(1518): y is t or c
  misc_feature (1830)..(1830): y is t or c
  misc_feature (1857)..(1857): r is g or a
atgcctgaagaaaccgagactttcgcattccaggctgagattgctcagcttatgtcgttgatcattaacacattctactcaaacaaagaaatcttcttgcgtgaattgatttcaaatgcgtctgatgcactcgacaaaatccgctatgaatcgctgacagatcccagcaaacttgattctggcaaggagctatacatcaagctcataccaaacaaaaccgctggtactctaaccatcattgatacgggtattggtatgaccaagtccgatttggttaacaacttgggtaccattgccaagtcgggcactaaggcgttcatggaggcattgcaggctggtgccgatatttccatgattggccagtttggtgttggcttctattctgcatatctggtagccgataaggtgaccgtcacctcgaagaacaatgatgatgaacaatacatctgggagtcgtctgccggtggctctttcaccgttcgtgctgataactctgagcctttgggccgtggtaccaagattgttctgtacatcaaggaggatcaraccgattaccttgaggagaaaaagatcaaggagattgtcaacaagcactctcagttcattggctaccctatcaaattgctggtggagaaggagcgtgagaaggaggtgagcgatgatgaggctgatgatgagaaggagggtgaagataagaaggagatggataccgatgagcccaagattgaggatgtkggcgaggacgaagatgcagacaagaaagataaggatgccaagaagaagaagactatcaaggagaagtacaccgaagatgaagagctgaacaagacaaagcccatctggacacgcaatcccgatgatatctcccaggaggaatacggggagttctacaagtcgttgaccaacgattgggaggatcatttggctgttaagcacttctccgttgagggtcaactagagttccgtgctctgcttttcattccacgycgcacacctttcgatctgttcgagaaccagaagaagcgcaataacatcaagttgtacgtgcgtcgtgtcttcatcatggacaactgcgaggatctgattcccgagtatttgaacttcgtcaagggtgtggttgactctgaggatttgccattgaacatttcccgtgagatgttgcagcaaaacaaggtacttaaggttatccgtaagaatctagtcaagaagaccatggagttgattgaggarctcacagaggacaaggrgaactacmaaaagttctacgaccagttcagcaagaacttgaagttgggtgtccatgaagatagcaacaaccgtgctaagttagccgatttcttgcgtttccacacttctgcgtctggcgatgattactgttcgttggccgactacgtgtcgaggatgraggagaaccagaagcacatctacttcatcactggcgaatctaaggatcaggtcagcaactctgcattcgttgagcgtgtcaaggcccgtggctttgaagtggtttacatgacygagcctattgatgaatacgtcaaccagcatctgaaggagtacaagggcaagcaatttgtctccgttaccaaggagggtcttgagttgcccgaggatgaggccgagaagaagaagcgcgaggaggacaaggctaagttcgagagcttgtgcaagttgatgaaatcaattttggacaacaaagtcgagaaggttgttgtgtccaaccgtcttgtcgattcaccatgctgcattgttacctcgcagttcggctggtccgccaacatggagcgcatcatgaaggctcaggccctgcgtgacacctcgaccatgggytacatggccggcaagaaacatttggaratcaatcctgatcatccaattgtggagaccttgcgccagaaggctgaagccgataagaacgataaggccgtaaaggatctggtcattctgctgttcgagacatcgcttttgtcatctggattctcactggacagccctcaggtgcatgccagccgcatctatcgcatgatcaagctgggtcttggcatcgatgaggatgagccaatgaccacagaggatgctcaaagcgctggtgatgctccatctttggttgaggacaccgaggatgcttcccacatggaagaggtcgattaa

SEQ ID NO: 129234 - protein, 716 aa, Drosophila buzzatii
  misc_feature (416)..(416): The Xaa at location 416 stands for Glu, or Gly.
  misc_feature (419)..(419): The Xaa at location 419 stands for Gln, or Lys.
  misc_feature (469)..(469): The Xaa at location 469 stands for Glu, or Lys.
MPEETETFAFQAEIAQLMSLIINTFYSNKEIFLRELISNASDALDKIRYESLTDPSKLDSGKELYIKLIPNKTAGTLTIIDTGIGMTKSDLVNNLGTIAKSGTKAFMEALQAGADISMIGQFGVGFYSAYLVADKVTVTSKNNDDEQYIWESSAGGSFTVRADNSEPLGRGTKIVLYIKEDQTDYLEEKKIKEIVNKHSQFIGYPIKLLVEKEREKEVSDDEADDEKEGEDKKEMDTDEPKIEDVGEDEDADKKDKDAKKKKTIKEKYTEDEELNKTKPIWTRNPDDISQEEYGEFYKSLTNDWEDHLAVKHFSVEGQLEFRALLFIPRRTPFDLFENQKKRNNIKLYVRRVFIMDNCEDLIPEYLNFVKGVVDSEDLPLNISREMLQQNKVLKVIRKNLVKKTMELIEELTEDKXNYXKFYDQFSKNLKLGVHEDSNNRAKLADFLRFHTSASGDDYCSLADYVSRMXENQKHIYFITGESKDQVSNSAFVERVKARGFEVVYMTEPIDEYVNQHLKEYKGKQFVSVTKEGLELPEDEAEKKKREEDKAKFESLCKLMKSILDNKVEKVVVSNRLVDSPCCIVTSQFGWSANMERIMKAQALRDTSTMGYMAGKKHLEINPDHPIVETLRQKAEADKNDKAVKDLVILLFETSLLSSGFSLDSPQVHASRIYRMIKLGLGIDEDEPMTTEDAQSAGDAPSLVEDTEDASHMEEVD

SEQ ID NO: 129235 - DNA, 2109 bp, Aspergillus niger
  CDS (1)..(2109)
atgtctgccgagactttcgagttccaggctgagatctctcagctcctctccctcatcatcaacactgtctactccaacaaggagattttcctgcgtgagctgatctccaacgcctccgatgctctggacaagattcgctatgagtccctgtccgacccctccaagctcgactcgggcaaggatctccgcatcgacctgatccccaacgccgaggccaagaccctcaccatccgtgataccggtatcggtatgaccaaggctgacctcatcaacaacctcggtaccattgctcgctctggtactaagcagttcatggaggctctctccgctggtgctgatatctccatgatcggtcagttcggtgttggtttctactctgcctaccttgtggccgaccgtgtcaccgtcatctccaagcacaacgatgacgagcagtacatctgggagtccgctgccggtggtaccttcaccctcacccaggacaccgagggtgagcagcttggtcgtggtaccaagatcatcctccacctgaaggatgagcagaccgactacctcaacgagagccgcatcaaggaggttgtccgcaagcactccgagttcatctcctaccccatctaccttcacgtcctgaaggagaccgagaaggaggtccccgacgaggaggctgagaccaaggaggaggaagagggtgacgagaagaagcccaagatcgaggaggtcgatgaggaagaggagaagaaggagaagaagaccaagactgtcaaggagagcaagatcgaggaggaggagcttaacaagaccaagcccatctggactcgtaaccccgccgacatcacccaggaggagtacgctgctttctacaagtccctctccaacgactgggaggaccacttggctgtcaagcacttctccgtcgagggtcagctcgagttccgtgccatcctctacgtccccaagcgtgctcccttcgacctgttcgagtctaagaagaccaagaacaacatcaagctctacgtccgccgtgtcttcatcaccgatgacgccactgacctcatccccgagtggctcagcttcgtcaagggtgttgtcgactctgaggaccttcctctcaacctgtcccgtgagactctccagcagaacaagatcatgaaggtcatcaagaagaacatcgtcaagaagaccctcgagctcttcactgagatcgctgaggaccgcgagcagttcgacaagttctactctgccttcagcaagaacatcaagctcggtattcacgaggacgcccagaaccgtcccactctggccaagctcctccgctaccagtccaccaagtctggtgatgaggctacttcccttaccgactacgtcacccgtatgcccgagcaccagaagcagatctactacatcaccggcgagtccatcaaggccgttgccaagtctcccttcctggacagcctcaagcagaagaacttcgaggttctgttcctggttgaccccattgacgagtacgccttcactcagctgaaggagttcgacggcaagaagctggtcgacatcaccaaggacttcgagcttgaggagtccgaggaggagaaggctgagcgcgagaaggaggagaaggagttcgagggtctcgccaagagcctcaagaacatcctcggcgacaaggtcgagaaggtcgttgtctcccacaagctcgttggctctccttgcgccatccgtaccggccagttcggttggtccgctaacatggagcgtatcatgaaggcccaggccctccgtgacacctccatgagctcttacatgtcctccaagaagactttcgagatctctcccaagtcctctatcatcaaggagctccgcaagaaggttgaggccgatggcgagggtgaccgcactgtcaagtccatcactcagctgctcttcgagacctctctcctggtctccggtttcaccattgaggagcccgccagcttcgctgagcgcatccacaagctcgtctcccttggtctgaacatcgacgaggaggctgagaccaccgaggagaaggctgctgaggaggctgcccctgccgccgccgctgccgagagctccatggaggaggttgactaa

SEQ ID NO: 129236 - protein, 702 aa, Aspergillus niger
MSAETFEFQAEISQLLSLIINTVYSNKEIFLRELISNASDALDKIRYESLSDPSKLDSGKDLRIDLIPNAEAKTLTIRDTGIGMTKADLINNLGTIARSGTKQFMEALSAGADISMIGQFGVGFYSAYLVADRVTVISKHNDDEQYIWESAAGGTFTLTQDTEGEQLGRGTKIILHLKDEQTDYLNESRIKEVVRKHSEFISYPIYLHVLKETEKEVPDEEAETKEEEEGDEKKPKIEEVDEEEEKKEKKTKTVKESKIEEEELNKTKPIWTRNPADITQEEYAAFYKSLSNDWEDHLAVKHFSVEGQLEFRAILYVPKRAPFDLFESKKTKNNIKLYVRRVFITDDATDLIPEWLSFVKGVVDSEDLPLNLSRETLQQNKIMKVIKKNIVKKTLELFTEIAEDREQFDKFYSAFSKNIKLGIHEDAQNRPTLAKLLRYQSTKSGDEATSLTDYVTRMPEHQKQIYYITGESIKAVAKSPFLDSLKQKNFEVLFLVDPIDEYAFTQLKEFDGKKLVDITKDFELEESEEEKAEREKEEKEFEGLAKSLKNILGDKVEKVVVSHKLVGSPCAIRTGQFGWSANMERIMKAQALRDTSMSSYMSSKKTFEISPKSSIIKELRKKVEADGEGDRTVKSITQLLFETSLLVSGFTIEEPASFAERIHKLVSLGLNIDEEAETTEEKAAEEAAPAAAAAESSMEEVD

SEQ ID NO: 129237 - DNA, 1911 bp, Herbaspirillum seropedicae
  CDS (1)..(1911): transl_table=11
atggcaaccgaaaaacagaccatgggcttccaggccgaagtcaagcaactgttgcaactgatgatccactcgctgtactcgaacaaggaaatcttcctgcgcgagctggtctccaatgcctccgacgcggccgacaagctgcgtttcgaagcgatcaacaacgccagcctgttcgaggacgacccggaactgaagatcaggatcagcttcgacaaggccgcccgcaccatcaccatctccgacaacggcatcggcatgaaccgcgaggaagccatctcgcacctgggcaccatcgccaagtcgggcaccaaggaattcttctcgcgcctgtccggcgaccagcagaaggacgccgccctgatcggccagttcggcgtgggcttctattccggcttcatcatcgccgaccgcatcacggtcgagacgcgccgtgccggcaccccggcttccgaaggcgtgcgctgggagtccgaaggcgcgggcgacttctcgatcgaacagatcgacaagccgcgccggggcaccgacatcatcctgcacctgcgtgaaggtgaagatgagttcctctcttcctggcagctcaagtccatcatccgcaagtattccgaccacatctcgctgcccatccagatgaacaaggaagagtgggatgaagagaagaaggaaaccgtccagaaggacgagctggaaacggtcaaccaggccagcgccctgtggacccgcagcaagtccgagatcactccggagcaatacgaagagttctacaagcacgtctcgcacgacttcggcgcgccgctggcctacacccacaaccgcgtggaaggccgcagcgaatacacccagctgctctatatcccggcgcgcgcccccttcgacctgtgggaccgcaacaagcgcggcggcatcaagctctacgtcaagcgcgtgttcatcatggatgacgccgagcagctgatgccggtgtacctgcgcttcgtcaagggtgtgatcgattcggccgacctgccgctgaacgtctcgcgcgagatcctgcaggagtcgcgcgacgtgcgcgccatccgtgacggctcggccaagcgcgtgctgagcctgctggaagaactggccaacagcgacgagcaggcgcagaaggacaagtacagcaccttctggaccgaattcggccaggtactcaaggaaggcgtgggcgaagatgcagccaacaaggagcgcatcgccaagctgctgcgctttgcctccacccacaacgacagcgacgtgcagaacgtctcgctggccgactacgtgggccgcatgaaggaaggccaggacaagatctactacgtcaccgccgagacctggcaagccgccaagaacagcccgcacctggaaatcttccgcaagaagggcgtggaagtgctgctgctgaccgatcgcgtggacgaatggatgctgtccttcctgaccgacttcgacggcaaggaactggcctcggtggccaagggcggcctggacctgggcaagctggaaaacgaagacgaaaagaagcagcacgaagagacccaggccgagtacaaggatctggtcgagaagatgaagaccgccctggccgacaaggccaaggaagtgcgcgtgaccttccggctgaccgactccccggcctgcctggtggccgacgagaatgaactctcgggcaacctggtgcgcatgttgaaggccgccggccaggccgcgccggaatccaagccgaccctggaaatcaacccggaccacccgctggtgcaacgtctgaagtatgaagaagcccgcttcgacgactggtcgcacatcctgtacgaccaggccctgctggccgagggtggcgcgttggctgatccggccagcttcgtcaagcgcctcaacgacatgctgctggccatggccgccaagtaa

SEQ ID NO: 129238 - protein, 636 aa, Herbaspirillum seropedicae
MATEKQTMGFQAEVKQLLQLMIHSLYSNKEIFLRELVSNASDAADKLRFEAINNASLFEDDPELKIRISFDKAARTITISDNGIGMNREEAISHLGTIAKSGTKEFFSRLSGDQQKDAALIGQFGVGFYSGFIIADRITVETRRAGTPASEGVRWESEGAGDFSIEQIDKPRRGTDIILHLREGEDEFLSSWQLKSIIRKYSDHISLPIQMNKEEWDEEKKETVQKDELETVNQASALWTRSKSEITPEQYEEFYKHVSHDFGAPLAYTHNRVEGRSEYTQLLYIPARAPFDLWDRNKRGGIKLYVKRVFIMDDAEQLMPVYLRFVKGVIDSADLPLNVSREILQESRDVRAIRDGSAKRVLSLLEELANSDEQAQKDKYSTFWTEFGQVLKEGVGEDAANKERIAKLLRFASTHNDSDVQNVSLADYVGRMKEGQDKIYYVTAETWQAAKNSPHLEIFRKKGVEVLLLTDRVDEWMLSFLTDFDGKELASVAKGGLDLGKLENEDEKKQHEETQAEYKDLVEKMKTALADKAKEVRVTFRLTDSPACLVADENELSGNLVRMLKAAGQAAPESKPTLEINPDHPLVQRLKYEEARFDDWSHILYDQALLAEGGALADPASFVKRLNDMLLAMAAK

SEQ ID NO: 129239 - DNA, 2151 bp, Dendrolimus punctatus
  CDS (1)..(2151)
atgccggaagagatgcagacgcagcccgcagaggtggagacctttgcattccaggctgagatcgctcagcttatgtccctgatcatcaacacattctactccaacaaagagatcttccttcgtgagttgatttcgaactcttcagatgccttggacaaaatccggtatgaatcacttacggatccgtcaaagctggagagcggcaaggagctgtacatcaagattattcccaacaaaagcgaaggtacgctaaccatcattgataccggtattggtatgaccaaggctgatttggtgaataatttgggtacaatcgcaaaatctggcaccaaagcgttcatggaagccctgcaagccggcgctgacatttccatgattgggcagtttggtgtgggtttctactcctgctacctggttgcagaccgcgttactgttcattccaagcacaatgatgacgagcaatatatgtgggaatctgctgctggcggttcctttaccgtacgtccagatcccggcgaaccattaggccgcggtacaaaggtcgtgcttcacgttaaggaggacttggcagactacatggaagagcaaaagatcaaggaagttgttaagaaacactcgcagttcatcggctatccaattaagttggttgtagaaaaagaacgtgagaaggagctgtctgatgatgaagcagaggaagaaaagaaggaagagaaagaggatgagaagcccaagatagaggatgtaggtgaggatgaagaagaggacaaaaaggacaagaaaaagaagactatcaaagaaaaatacactgaggatgaggaactaaatagaacaaagcccatttggacgagaaatgctgatgatatcacccaagaagaatatggtgacttctacaagtcgctcacaaacgactgggaagaccatctagctgttaaacacttctctgtggaaggccaacttgagttccgtgcactcctctttgtccctcgtagagcaccattcgacctctttgagaacaagaaacgcaagaacaacattaagttgtatgtccgcagagttttcatcatggacaactgcgaagacgagcatatgactgagtacctgaaatgcatcaacggtgtcatcgacagtgaggacatgcccctcaacatctctcgtgagatgctgcaacagaacaagatcctgaaagttatcaggaagaacttggttaagaaatgcttagaattatttgaagagttggctgaagataaagaaaactacaagaaatgctatgaacagtttagcaagaacttgaagcttggtattcatgaagatacccagaataggtctaagcttgcagacctgctacgctacaacacctcggcgtcaggcgatgaggcttgctctctcaaagagtatgtatctcgtatgaaagagaaccagaagcacatttactacattactggtgagaaccgtgaccaagtagcaaactcttcatttgttgagcgtgtcaagaaacgtggttatgaagttgtgtacatgactgagcctattgatgaatatgtagtccagcagatgagagaatatgatggtaagaccttagtctctgttacaaaggaaggtttggaactccctgaagacgaggaggaaaagaagaagcgtgaggaagacaaagtcaagtttgaaggtttgtgcaaggtcatgaagaacattctagacaataaagtcgagaaagttgtagtgtctaacaggcttgttgaatctccacgctgtattgtaactgctcagtatggttggtcagcaaacatggagcgtatcatgaaagcacaggctctcagggacacctcaaccatgggctacatggctgcgaagaaacacttggaaatcaatccagatcattccatcgtagagacattgaggcagaaggctgaagcagacaagaatgacaaagccgtcaaggacttggtcatccttttatatgagactgcattattgtcttctggttttactttagatgaacctcaagtccatgcttctaggatttatagaatgatcaagctgggtcttggtatcgatgaggatgagcctatccaggtcgaagaaaccagtgctggagatgtgccaccgctggaaggtgatgctgatgatgcgtctcgcatggaggaagtggattaa

SEQ ID NO: 129240 - protein, 716 aa, Dendrolimus punctatus
MPEEMQTQPAEVETFAFQAEIAQLMSLIINTFYSNKEIFLRELISNSSDALDKIRYESLTDPSKLESGKELYIKIIPNKSEGTLTIIDTGIGMTKADLVNNLGTIAKSGTKAFMEALQAGADISMIGQFGVGFYSCYLVADRVTVHSKHNDDEQYMWESAAGGSFTVRPDPGEPLGRGTKVVLHVKEDLADYMEEQKIKEVVKKHSQFIGYPIKLVVEKEREKELSDDEAEEEKKEEKEDEKPKIEDVGEDEEEDKKDKKKKTIKEKYTEDEELNRTKPIWTRNADDITQEEYGDFYKSLTNDWEDHLAVKHFSVEGQLEFRALLFVPRRAPFDLFENKKRKNNIKLYVRRVFIMDNCEDEHMTEYLKCINGVIDSEDMPLNISREMLQQNKILKVIRKNLVKKCLELFEELAEDKENYKKCYEQFSKNLKLGIHEDTQNRSKLADLLRYNTSASGDEACSLKEYVSRMKENQKHIYYITGENRDQVANSSFVERVKKRGYEVVYMTEPIDEYVVQQMREYDGKTLVSVTKEGLELPEDEEEKKKREEDKVKFEGLCKVMKNILDNKVEKVVVSNRLVESPRCIVTAQYGWSANMERIMKAQALRDTSTMGYMAAKKHLEINPDHSIVETLRQKAEADKNDKAVKDLVILLYETALLSSGFTLDEPQVHASRIYRMIKLGLGIDEDEPIQVEETSAGDVPPLEGDADDASRMEEVD

SEQ ID NO: 129241 - DNA, 2154 bp, Lucilia cuprina
  CDS (1)..(2154)
atgccagaagaagcagagacctttgcattccaggctgagtttgctcagctgatgtccctgatcatcaacacattctactcgaacaaggagattttcctgcgcgagttgatctcgaaagcttccgatgccctggacaagatccgctatgagtcccttactgagcccagtaagcaggactctggcaaggagctgtacatcaagctgatccctaacaagaggcctggtactctgaccatgattgatgccggtatcggtatgaccaagtccgacctggtcaacaacttgggaaccattgccaagtccggaaccaaggccttcatggaggctctgcaggctggtgccgacatttccatgatcggtcagttcggtgtgggtttctactccgcctacctggtcgccgacaaggtgactgtcacctccaagaacaacgatgacgagcagtacgttggggagtcctctgccggaggctctttcacagtccgtgccgacaactctgagcccctgggccgtggcaccaagatcgtgctgtacatcaaggaggaccagaccgactatctggaggagagcaagatcaaggagattgttaacaagcactcccagttcattggctaccccatcaagctgctcgtggaaaaagaacgtgaaaaagaagtgagcgatgacgaagcggatgacgagaaaaaggagggggacgaaaaaaaggaaatggagacagatgaaccaaagattgaagatgtggagggggatgaggacgccgataagaaggacaaggatgccaaaaagaagaagaccatcaaggagaagtacactgaagatgaggaattaaataaaacaaaaccgatctggaccccgaatcccgatgatatctcccaggaggaggacggcgagcctacaaagtccctcaacaacgattgggaagatcatttggctgtcaagcacttctcctgtgaaggtcaacttgaattccgtgccctcctcttcattcctcgtcgcaccccattcgatctcttcgaaaaccaaaagaaacgcaacaacattaagttgtacgtccgtcgtgtcttcatcatggacaactgcgaagatctcattcctgaatacttgaacttcaagaagggtgttgtcgactctgaagatttgcccctcaacatttctcgtgaaatgcagcaacaaaacaaagtcctaaaggtgatccgaaagaacctggtcaagaagaccatggaattgattgaagaacttaccgaagacaaagaaatgtacaagaagttctacgatcaattcagcaagaacttgaaattgggtgtccacgaagataccaacaaccgtgccaaattggccgatttcttgcgtttccacacctctgcttctggtgacgatgcctgctccttggccgactacgtatctcgcatgaaggagaaccaaaaacacatctacttcatcactggtgaatccaaggaacaagttgccaactctgccttcgttgaacgtgtcaaggctcgtgggttcgaagtcgtatacatgaccgaacccatcgatgatacgtcatccaacactatgaaggagtacaagggcaaacaagtggtttccgttaccaaggaaggtttggattgcctggaaacgaggagcgaaaaaagaagacgcgaagaagataaggccacattcgaaaacctctgcaagctaatgaaatccatcttggacagcaaagttgacaaggttgttgtatcaaaccgcttagttgaatcaccctgctgtatcgtcacctcccaattcggttggtccgccaacatggcacgtatcatgaaggctcaagctttgcgtgacacctccaccatgggctacatggtcggcaagaaacatttggaaatcaatcccgaccacgccatcattgagactctgcgccagaaggccgatgccgacaagaacgacaaggctgtcaaggatttggttatcctgttgttcgagacctccctcttgtcatctggcttctcattgcaaagcccccaggtgcacgctagccgcatctaccgcatgataaagctcggcttgggcatcgagacgagcgaaccaatgaccaccgacgatgcccagagcgccggagatgccccctcgctggttgaggacacagaggacgcttcccacatggaggaggtcgattaa

SEQ ID NO: 129242 - protein, 717 aa, Lucilia cuprina
MPEEAETFAFQAEFAQLMSLIINTFYSNKEIFLRELISKASDALDKIRYESLTEPSKQDSGKELYIKLIPNKRPGTLTMIDAGIGMTKSDLVNNLGTIAKSGTKAFMEALQAGADISMIGQFGVGFYSAYLVADKVTVTSKNNDDEQYVGESSAGGSFTVRADNSEPLGRGTKIVLYIKEDQTDYLEESKIKEIVNKHSQFIGYPIKLLVEKEREKEVSDDEADDEKKEGDEKKEMETDEPKIEDVEGDEDADKKDKDAKKKKTIKEKYTEDEELNKTKPIWTPNPDDISQEEDGEPTKSLNNDWEDHLAVKHFSCEGQLEFRALLFIPRRTPFDLFENQKKRNNIKLYVRRVFIMDNCEDLIPEYLNFKKGVVDSEDLPLNISREMQQQNKVLKVIRKNLVKKTMELIEELTEDKEMYKKFYDQFSKNLKLGVHEDTNNRAKLADFLRFHTSASGDDACSLADYVSRMKENQKHIYFITGESKEQVANSAFVERVKARGFEVVYMTEPIDDTSSNTMKEYKGKQVVSVTKEGLDCLETRSEKRRREEDKATFENLCKLMKSILDSKVDKVVVSNRLVESPCCIVTSQFGWSANMARIMKAQALRDTSTMGYMVGKKHLEINPDHAIIETLRQKADADKNDKAVKDLVILLFETSLLSSGFSLQSPQVHASRIYRMIKLGLGIETSEPMTTDDAQSAGDAPSLVEDTEDASHMEEVD

SEQ ID NO: 129243 - DNA, 2187 bp, Haliotis asinina
  CDS (1)..(2187)
atgccagaaccccaggaagcccagatggatgagggcgaggttgaaacctttgccttccaggcagaaattgcacagctgatgagcttgatcatcaacactttctactccaacaaggaaattttcttgagagaactgatttccaactcctctgatgctttggacaagattcgttatgaatctctcacagacccatccaaactggatgccagcaaagacctgcagatccgaattgttcccgataaggagagcaagaccctcatcattgaggatagcggtattggtatgaccaaggctgatcttgtcaacaaccttggtaccattgccaagtcaggaacaaaagctttcatggaggccctgcaggcaggtgctgacatctctatgattggacagtttggcgtgggtttctattctgcctaccttgttgcagagagggtggttgtggagtccaaacacaatgatgatgaacaatacatctgggagtcatcagctggagggtctttcaccatcagaagttcaaatgatcccactctccctcgtggaactcgaatcaccctttacatgaaggaagaccaggccgaatatctggaggagcgtcgcatcaaggagatagtgaagaaacactcacagttcattggctaccccatcaaactgatggttgagaaggagagggacaaggaggtgtctgatgacgaggaagatgagaagaaggaagatgaagagaagaaagaagacgaggaagagaatgaggataaacccaaggtagaggatcttgatgaggatgaggatgaagacaaaagcaaagataagaaaaagaagaagaagatcaaggaaaaatacacagaagatgaagaactgaacaagaccaaaccattgtggaccagaaatgcagatgatatcacccaagaagaatatgctgaattctacaagtccttgacaaatgactgggaggaccatcttgctgtcaagcacttctccgtggaaggccagctggagttccgtgctttgttgttcctgcccaagagagctccatttgacatgtttgagaacaaaaagaagaagaataacatcaagttgtatgtgagacgtgtgtttatcatggacaactgtgaagatctcattccagagtacttgaactttgtgcgtggtgttgtagactctgaggatcttcccctcaacatatccagagagatgttgcaacagagcaaaattctgaaagttatccgtaagaatctggtgaagaaatgcatggaactgtttgaagacctcacagaagacaaagacaacttcaaaaaattctatgaacagttcagcaaaaacctcaagcttggtatccatgaagactccaccaacagaaagaagctgtcagagctgctgagatactacacttcccagtcaggggatgagatgacatccctgaaagactacgtgtctcgcatgaaggaaaaccagaagagcatttactacatcacaggtgaaagcagggactctgttcagaactcggcctttgttgagcgagtgaagaagaggggatttgaggtggtctacatgacagaccctattgatgagtactgtgttcagcaattgaaagagtatgatggcaagactttggtgtgtgtcaccaaggaaggtctggaattaccagaggacgaggaagaaaagaagaaactggaggaggcgaaggctcagtttgaaggactgtgcaaagtcatgaaggagatccttgacaagaaagtagaaaaggttgtggtttccaatcgtctggttacctccccttgctgtattgtcacaagtcagtatggctggtcagccaacatggagagaatcatgaaggcccaggcactgagagacaccagcactatgggctacatggcagctaagaaacacttggagatcaacccagaccatcccattgtgaagacactgaaggagaaggcagatgctgacaaaaatgacaaggcagtgaaagatttgtgcatgcttttgtttgaaacctccctccttgcctctggtttctccctggaagacccaacatcacatgccaacaggatacacaggatgatcaagctgggtctaggaattgatgaagatgatatcccagcagaatctgcaacagaatctggcacagatgagatgccaccacttgaaggtgacgaagatgatgcatcaaggatggaagaagttgactga

SEQ ID NO: 129244 - protein, 728 aa, Haliotis asinina
MPEPQEAQMDEGEVETFAFQAEIAQLMSLIINTFYSNKEIFLRELISNSSDALDKIRYESLTDPSKLDASKDLQIRIVPDKESKTLIIEDSGIGMTKADLVNNLGTIAKSGTKAFMEALQAGADISMIGQFGVGFYSAYLVAERVVVESKHNDDEQYIWESSAGGSFTIRSSNDPTLPRGTRITLYMKEDQAEYLEERRIKEIVKKHSQFIGYPIKLMVEKERDKEVSDDEEDEKKEDEEKKEDEEENEDKPKVEDLDEDEDEDKSKDKKKKKKIKEKYTEDEELNKTKPLWTRNADDITQEEYAEFYKSLTNDWEDHLAVKHFSVEGQLEFRALLFLPKRAPFDMFENKKKKNNIKLYVRRVFIMDNCEDLIPEYLNFVRGVVDSEDLPLNISREMLQQSKILKVIRKNLVKKCMELFEDLTEDKDNFKKFYEQFSKNLKLGIHEDSTNRKKLSELLRYYTSQSGDEMTSLKDYVSRMKENQKSIYYITGESRDSVQNSAFVERVKKRGFEVVYMTDPIDEYCVQQLKEYDGKTLVCVTKEGLELPEDEEEKKKLEEAKAQFEGLCKVMKEILDKKVEKVVVSNRLVTSPCCIVTSQYGWSANMERIMKAQALRDTSTMGYMAAKKHLEINPDHPIVKTLKEKADADKNDKAVKDLCMLLFETSLLASGFSLEDPTSHANRIHRMIKLGLGIDEDDIPAESATESGTDEMPPLEGDEDDASRMEEVD

SEQ ID NO: 129245 - DNA, 2154 bp, Mamestra brassicae
  CDS (1)..(2154)
atgcccgaagaaatgcagaccgatggtgcggaggtggagaccttcgccttccaggcggagatcgcccagctcatgtccctgatcatcaacacattctactccaacaaagaaatcttccttcgtgagttgatctcaaactcttcagacgccttggacaagatccggtatgagtcactcaccgacccatcgaagctggacagcggcaaggagctatacatcaagatcattcccaacaagagcgaaggtacactaactctcattgataccggtatcggtatgaccaaggctgacctcgtcaacaaccttggtaccatcgcgaagtctggaacaaaggcgttcatggaggctcttcaggcgggtgctgacataagcatgatcggtcagtttggtgtgggtttctattcctgctacctggtcgccgaccgcgtgacagtacactccaagcacaatgacgacgagcagtacgtgtgggagtcgtcggcaggtggctcattcacggtgcgccccgaccacggcgagccgctcggccgcggcacgcagatcgtgctgcacatcaaggaggacctcactgagtaccttgaggaacacaagatcaaggaaatcgtcaagaagcactcgcagttcatcggctaccccatcaaactgatggtggagaaggaacgcgagaaggagttgtctgacgacgaggcagaagaggagaagaaagaggaagagaaggaggacgacaagcctaagattgaggatgtcggcgaggatgacgaggaagacaagaaggacaagaagaagaagaaaaccatcaaggagaagtacactgaggacgaggagctcaacaagaccaagcccatctggacgcgcaacgctgacgacatcacccaggaggagtacggtgacttctacaagtccctcaccaatgactgggaggaccaccttgccgtcaagcacttctctgttgaaggacagctggaattcagggcactcttgttcgtgccccgccgtgcgcccttcgacctctttgaaaacaagaagcgcaagaacaacatcaagctgtacgtccgcagggtgttcatcatggacaactgtgaggacctcatccccgagtacctgaacttcatcaagggtgtggtcgacagtgaggacctgcccctcaacatctctcgtgagatgctccaacagaacaagatcctaaaagtaatcaggaagaacttagttaagaaatgcttagaactcttcgaagagttggctgaggacaaggagaactacaagaagtattatgaacagttcagcaagaacctgaagctcggaatccacgaggactctcagaacaggtccaagctggctgacttgctccgctaccacacatccgcctccggtgacgaggcatgctccctcaaggagtatgcttcccgcatgaaggaaaaccagaaacacatctactacatcactggtgagaaccgtgaccaggttgccaactcttcatttgttgagcgtgtcaagaagcgtggttatgaagttgtctacatgaccgagcccattgatgagtatgtagtacagcagatgagggagtatgacggtaagactctcgtctcagtcacaaaggagggtctggaactccctgaggacgaagaagagaagaagaagcgtgaggaggacaaagtgaagttcgaaggtctctgcaaggtgatgaagaacatcttggacaacaaagtagagaaggttgttgtatccaaccgtctggttgagtccccgtgctgcattgtcactgcacagtacggttggtctgccaacatggagcgtatcatgaaggcccaggctctgcgtgacacatctaccatgggttacatggctgccaagaagcaccttgagatcaaccctgaccattccattgttgagacattgaggcagaaggctgaggctgacaagaacgacaaggctgtaaaggaccttgttatcctgttgtacgagactgctctgctgtcatctggctttgctcttgacgagccccaggtgcatgcttcccgcatctaccgtatgatcaagctgggtcttggcatcgatgaggatgagcccatccaggtggaggaggccaacgctggcgacgtgccaccgctagagggtgacgctgacgacgcgtcccgcatggaggaggttgattaa

SEQ ID NO: 129246 - protein, 717 aa, Mamestra brassicae
MPEEMQTDGAEVETFAFQAEIAQLMSLIINTFYSNKEIFLRELISNSSDALDKIRYESLTDPSKLDSGKELYIKIIPNKSEGTLTLIDTGIGMTKADLVNNLGTIAKSGTKAFMEALQAGADISMIGQFGVGFYSCYLVADRVTVHSKHNDDEQYVWESSAGGSFTVRPDHGEPLGRGTQIVLHIKEDLTEYLEEHKIKEIVKKHSQFIGYPIKLMVEKEREKELSDDEAEEEKKEEEKEDDKPKIEDVGEDDEEDKKDKKKKKTIKEKYTEDEELNKTKPIWTRNADDITQEEYGDFYKSLTNDWEDHLAVKHFSVEGQLEFRALLFVPRRAPFDLFENKKRKNNIKLYVRRVFIMDNCEDLIPEYLNFIKGVVDSEDLPLNISREMLQQNKILKVIRKNLVKKCLELFEELAEDKENYKKYYEQFSKNLKLGIHEDSQNRSKLADLLRYHTSASGDEACSLKEYASRMKENQKHIYYITGENRDQVANSSFVERVKKRGYEVVYMTEPIDEYVVQQMREYDGKTLVSVTKEGLELPEDEEEKKKREEDKVKFEGLCKVMKNILDNKVEKVVVSNRLVESPCCIVTAQYGWSANMERIMKAQALRDTSTMGYMAAKKHLEINPDHSIVETLRQKAEADKNDKAVKDLVILLYETALLSSGFALDEPQVHASRIYRMIKLGLGIDEDEPIQVEEANAGDVPPLEGDADDASRMEEVD

SEQ ID NO: 129247 - DNA, 2411 bp, Triticum aestivum
  CDS (71)..(2173)
ctagccgcctcctgcacgcttctcctccgctccccgccccgcctcgagcagctcaggaacgcgcgcagccatggcgacggagaccgagaccttcgccttccaggccgagatcaaccagctcctctcgctcatcatcaacaccttctactccaacaaggagatcttcctccgcgagctcatctccaactcctccgatgccttggacaagatcaggttcgagagcctcacggacaagagcaagctcgatgcgcagcccgagctcttcatccacatcatccccgacaaggcgaccaacacgctcacgatcgtcgacagcggcattggcatgaccaagtcggacctcgtcaacaacctcgggaccatcgccaggtcggggaccaaggagttcatggaggccctcgccgccggcgccgacgtgtccatgattgggcagtttggtgtcggtttctactccgcctacctcgtcgccgagagggttgtcgtcaccaccaagcacaacgacgacgagcagtacgtgtgggagtcccaggccggtggctccttcaccgtcactcgtgatacgtctggggagcagctcggcaggggtaccaagatggtcctctacctcaaggacgaccagatggaataccttgaggagcgccgcatcaaggatctagttaagaagcactctgagtttatcagctaccccatctccctgtggactgagaagaccactgagaaggaaatttctgatgatgaagatgaggaggagaagaaggatactgaggagggcaaggttgaggatgttgatgaggagaaggaagagaaggaaaagaagaaaaagaagatcaaggaagtctctcatgagtggaacttggtcaacaagcagaagcctatctggatgaggaaaccagaggagatcaacaaggaagagtacgcagctttttacaagagcttgaccaatgactgggaggagcatttggctgtcaagcacttctctgttgagggtcagcttgagttcaaggctgtcctgtttgtgcccaagagggcccccttcgacctcttcgacaacaagaagaaggccaacaacatcaagctgtacgtgcgccgtgtcttcatcatggacaactgtgaggagttgatccctgagtacctgagctttgtcaagggtattgttgattcagaggaccttcccctgaacatctcccgtgagactctccagcagaacaagatcctcaaggtcatcaggaagaaccttgtcaagaagtgcattgagctcttctttgagattgctgagaacaaggaggactacaacaagttctacgaggccttctccaagaacctcaagcttggcatccacgaggactcccagaacaggaccaagattgccgagcttctgaggtaccactccaccaagagtggcgatgagctgacaagcctgaaggactatgtgaccaggatgaaggagggacagaacgagatctactacatcactggtgagagcaagaaggctgtggagaactctcccttccttgagaagctgaagaagaagggctatgaggtcatctacatggttgacgccattgatgagtatgccattggtcagctcaaggagtttgaggggaagaagcttgtctctgccaccaaggagggtctgaagcttgatgagagcgaggacgagaagaagaagcaggaggagctcaaggagaagttcgagggtctgtgcaaggtcatcaaggaggtgctgggtgacaaggtggagaaggtcatcgtctctgaccgtgttgtggactctccttgctgtctggtgactggtgagtatgggtggactgccaacatggagaggatcatgaaggcccaggccttgagggactcgagcatggctggctacatgtcgagcaagaagaccatggagatcaaccctgagaacgccatcatggacgagcttcgcaagcgcgccgacgccgacaagaacgacaagtctgtcaaggaccttgtgatgctgctcttcgagacctccctgctcacctccggcttcagcctggaggaccccaacaccttcggcaccaggatccaccgcatgctcaagcttggcctgagcattgacgaggacgacgaggcgcctgagaacgacaccgacatgccacccctggaggatgacgctggtgagagcaagatggaggaggtcgactaagcgcaaggccgtcggctgtcgtcgttggatgtccatgccctgcgttgtttttatctttagtgtcgaagttcgatggttttggcacgtttagctgtatcggttttgtcttttggctggccaaacattaagcgcggttagctgtttgtggtactcgtggaacagttcgttattgttggttctacaatatgtgttagctatatttttatattaaaaaaaaaaaaaaaaaaaaaaaaaaaaa

SEQ ID NO: 129248 - protein, 700 aa, Triticum aestivum
MATETETFAFQAEINQLLSLIINTFYSNKEIFLRELISNSSDALDKIRFESLTDKSKLDAQPELFIHIIPDKATNTLTIVDSGIGMTKSDLVNNLGTIARSGTKEFMEALAAGADVSMIGQFGVGFYSAYLVAERVVVTTKHNDDEQYVWESQAGGSFTVTRDTSGEQLGRGTKMVLYLKDDQMEYLEERRIKDLVKKHSEFISYPISLWTEKTTEKEISDDEDEEEKKDTEEGKVEDVDEEKEEKEKKKKKIKEVSHEWNLVNKQKPIWMRKPEEINKEEYAAFYKSLTNDWEEHLAVKHFSVEGQLEFKAVLFVPKRAPFDLFDNKKKANNIKLYVRRVFIMDNCEELIPEYLSFVKGIVDSEDLPLNISRETLQQNKILKVIRKNLVKKCIELFFEIAENKEDYNKFYEAFSKNLKLGIHEDSQNRTKIAELLRYHSTKSGDELTSLKDYVTRMKEGQNEIYYITGESKKAVENSPFLEKLKKKGYEVIYMVDAIDEYAIGQLKEFEGKKLVSATKEGLKLDESEDEKKKQEELKEKFEGLCKVIKEVLGDKVEKVIVSDRVVDSPCCLVTGEYGWTANMERIMKAQALRDSSMAGYMSSKKTMEINPENAIMDELRKRADADKNDKSVKDLVMLLFETSLLTSGFSLEDPNTFGTRIHRMLKLGLSIDEDDEAPENDTDMPPLEDDAGESKMEEVD

SEQ ID NO: 129249 - DNA, 2400 bp, Arabidopsis thaliana
  CDS (1)..(2400)
atgatcaggctctctaagcgctccgtctctaccctcctacgctccggtaaccaaagcttccgtatcgccgccgcagcttccacctcccgttcttccccatctgccacggatgtcaagagaagtgacactgaatcgagatggtactcatctttaaccaatggacaatctaagaatagtgggtcatttgctcaattgaacatgaaaaccaattggtttatgggataccggaacgaatccagtgcagcagcatcagattcttcctcacaagctcctccaccggctgagaaattcgagtatcaagctgaagttagtcgcctcatggaccttattgtcaacagcttatacagcaataaggaggtgtttcttcgggagcttattagtaatgcaagtgatgcattggataagcttcgttatttgagcgttaccaaccctgagctctcaaaagatgctcctgatcttgatatacgtatctatgcagacaaggagaatggaatcataactctcactgattctggtattggtatgacacggcaagaattagttgactgtcttgggactattgctcaaagtggaaccgccaagttcatgaaagctctaaaggatagcaaggatgcaggtggtgacaacaatttaattggtcaatttggtgtagggttctattcagcatttttggttgcagatcgggtaattgtgtcaaccaagagccctaagtctgataaacaatatgtatgggaaggagaagcaaatttaagcagttttaccattcaggaagatactgacccacaatctctcattcctagaggaactcgtattactttgcatcttaagcaagaagccaaaaactttgcagatcctgagcggattcagaagctcgtgaaaaactattcccagtttgtttctttccctatttacacttggcaggaaaaaggatacacaaaagaggttgaggttgaagatgatccaactgaaacaaaaaaagatgaccaagatgaccaaactgagaaaaagaagaagaccaagaaggttgttgagagatactgggattgggagcttacaaatgagacacaaccgatttggctgcgtaaccctaaggaggtgacaacagcagaatacaatgagttttacagaaaagctttcaatgagtatttggacccattggcttcatcccatttcacgacagagggcgaagtcgagtttaggtctatcctatatgtgccacctgtttcaccatcggggaaggatgacatagtcaatcaaaagacaaagaacataaggctctatgttaaacgagttttcatttcagatgactttgatggggagctgtttcctcggtacttgagctttgttaaaggtgttgtggactcgcatgatctcccacttaatgtatcacgtgagattcttcaagaaagtcgcatagtgcggatcatgaagaaacgtctagtgaggaaggcttttgatatgattttgggtatatccttgagtgaaaacagagaagactatgagaagttttgggataattttggcaaacacttgaaattagggtgcatcgaagaccgtgaaaaccacaagcgtatagctccactgcttcgatttttctcctcccagagtgagaatgacatgatcagcttggatgagtatgttgagaacatgaaacctgaacagaaagccatatacttcattgcttctgacagcattacaagtgctaagaatgcacctttcctcgaaaagatgctggagaaaggacttgaagtactatatttggtagagcctattgatgaagttgccgtacagagtttaaaagcttataaggagaaggattttgtagatatcagcaaggaagacttggatctaggagacaagaacgaggagaaagaggcagcagtgaaaaaagagtttggacagacttgtgactggataaagaaacgattgggtgacaaggttgccagtgttcaaatttccaaccgtcttagttcttccccctgtgttcttgtatctggtaaatttggttggtcagccaatatggagaggctaatgaaggcacaatcaactggtgacacaataagcctcgactacatgaaagggagaagagtgtttgagatcaatcccgaccactcaattatcaagaacataaatgctgcttacaatagtaacccaaatgacgaagatgcaatgagagccatagatcttatgtatgacgcagcactagtttctagtgggttcacgcccgataatccagcagagctgggtgggaagatatatgagatgatggatgtagctctttccgggaaatggtcaagccctgaggtgcagccgcagcaacagcagatggcacattctcacgatgcagagacgtttgaagctgaagtggttgaaccagtcgaagtggatgggaagaaatga

SEQ ID NO: 129250 - protein, 799 aa, Arabidopsis thaliana
MIRLSKRSVSTLLRSGNQSFRIAAAASTSRSSPSATDVKRSDTESRWYSSLTNGQSKNSGSFAQLNMKTNWFMGYRNESSAAASDSSSQAPPPAEKFEYQAEVSRLMDLIVNSLYSNKEVFLRELISNASDALDKLRYLSVTNPELSKDAPDLDIRIYADKENGIITLTDSGIGMTRQELVDCLGTIAQSGTAKFMKALKDSKDAGGDNNLIGQFGVGFYSAFLVADRVIVSTKSPKSDKQYVWEGEANLSSFTIQEDTDPQSLIPRGTRITLHLKQEAKNFADPERIQKLVKNYSQFVSFPIYTWQEKGYTKEVEVEDDPTETKKDDQDDQTEKKKKTKKVVERYWDWELTNETQPIWLRNPKEVTTAEYNEFYRKAFNEYLDPLASSHFTTEGEVEFRSILYVPPVSPSGKDDIVNQKTKNIRLYVKRVFISDDFDGELFPRYLSFVKGVVDSHDLPLNVSREILQESRIVRIMKKRLVRKAFDMILGISLSENREDYEKFWDNFGKHLKLGCIEDRENHKRIAPLLRFFSSQSENDMISLDEYVENMKPEQKAIYFIASDSITSAKNAPFLEKMLEKGLEVLYLVEPIDEVAVQSLKAYKEKDFVDISKEDLDLGDKNEEKEAAVKKEFGQTCDWIKKRLGDKVASVQISNRLSSSPCVLVSGKFGWSANMERLMKAQSTGDTISLDYMKGRRVFEINPDHSIIKNINAAYNSNPNDEDAMRAIDLMYDAALVSSGFTPDNPAELGGKIYEMMDVALSGKWSSPEVQPQQQQMAHSHDAETFEAEVVEPVEVDGKK

SEQ ID NO: 129251 - DNA, 2297 bp, Nicotiana tabacum
  CDS (1)..(2100)
atggcggatacagagacgtttgcattccaagctgagatcaatcagcttctcagtcttattatcaacactttctacagcaacaaggagatctttctccgtgaactcattagcaattcgtccgatgctctggacaagatccgttttgagagcttgactgacaagagcaagctagatgctcaacctgagctcttcatccatattattccagacaaaaccaacaattcactgactatcattgatagtggtattggcatgacaaaggctgatctggtgaacaacctgggtacaattgcgaggtcaggaaccaaggaattcatggaagctcttgcagctggtgctgatgttagcatgattgggcaatttggtgttggtttctactctgcttacttggtagctgagaaggttatcgtgaccacaaagcacaatgatgatgaacaatatgtctgggaatctcaagctggtggttctttcactgttaccagggacacatctggtgagaaccttggtaggggtacaaaaataaccctcttcctcaaggaggatcaacttgaataccttgaagaacgtaggctcaaggacctgattaagaagcactctgagttcatcagctacccaatctctttgtgggttgagaagaccatagaaaaggaaatctctgatgatgaggaggaagaggagaagaaagacgaggaaggtaaggtagaggaggttgacgaagaaaaggagatggaagaaaagaaaaagaagaaggttaaagaagtttctaatgagtggtcattggtgaacaagcagaagcccatttggatgaggaagcctgacgaaatcacgaaggaagagtatgccgctttctataagagcttgactaatgactgggaggagcatatggctgtgaagcacttctctgttgagggccaattggagttcaaggccattctttttgttccaaaaagggctccttttgatctcttcgacacaaggaagaagcccaataatatcaagctgtatgtgcgccgtgtgttcattatggacaactgtgaggagttgattcctgaatatttgagctttgtgaagggtattgtggattccgaggaccttcctcttaacatctccagagagatgttgcagcagaacaagatcctgaaggttattcgcaagaatttggtgaagaagtgtgttgagcttttcttcgaaattgctgagaataaggaagactataacaagttttatgaggccttctcaaagaacctcaagcttggcatccacgaggattcccaaaataggtctaagtttgctgaactgctgcggtaccattccaccaagagcggtgatgagatgaccagtttaaaggactatgtgaccagaatgaaggaaggccagaatgatatttactacattactggtgagagcaagaaggctgttgagaactcacccttccttgagaaactgaagaagaagggctatgaggttctttacatggttgatgccattgatgagtattcaattggtcagctgaaggaatttgagggcaaaaagcttgtttctgctaccaaggaaggtctcaagcttgatgagagtgaagatgagaagaaaaagcaggaagaattgaaggagaagtttgagggactgtgcaaggtcatcaaggatgttctaggagacaaggttgagaaggtggttgtctctgaccgtgttgtggactctccctgctgcttagtcactggggagtatggctggactgctaatatggagagaatcatgaaggcacaagcacttagggactctagcatggctggatacatgtctagcaagaagaccatggagatcaacccagagaatgctattatggaagagctgaggaagagggctgatgcagacaagaatgacaagtctgtgaaggacttggttctcttgctgtttgagactgccctcctcacctcaggtttcagccttgaggaacctaacacctttggcaacagaattcacaggatgctgaagcttgggctgagcattgatgatgactctggagatgcagatgttgacatgccggctttggaggatcctgaagctgatgctgagggtagcaagatggaggaggttgactaagtgcatagtagcatggctgatgttctatggttcccctagtatttccctagtttttgttttacctcatcaacgaacagtatgtagtagttcttagtgccattttttgagaatggcagttcaatgaagggtataatttattggctcttttggtttggcatttgtggttaatatagttttttttttttcttgtccaaaaa

SEQ ID NO: 129252 - protein, 699 aa, Nicotiana tabacum
MADTETFAFQAEINQLLSLIINTFYSNKEIFLRELISNSSDALDKIRFESLTDKSKLDAQPELFIHIIPDKTNNSLTIIDSGIGMTKADLVNNLGTIARSGTKEFMEALAAGADVSMIGQFGVGFYSAYLVAEKVIVTTKHNDDEQYVWESQAGGSFTVTRDTSGENLGRGTKITLFLKEDQLEYLEERRLKDLIKKHSEFISYPISLWVEKTIEKEISDDEEEEEKKDEEGKVEEVDEEKEMEEKKKKKVKEVSNEWSLVNKQKPIWMRKPDEITKEEYAAFYKSLTNDWEEHMAVKHFSVEGQLEFKAILFVPKRAPFDLFDTRKKPNNIKLYVRRVFIMDNCEELIPEYLSFVKGIVDSEDLPLNISREMLQQNKILKVIRKNLVKKCVELFFEIAENKEDYNKFYEAFSKNLKLGIHEDSQNRSKFAELLRYHSTKSGDEMTSLKDYVTRMKEGQNDIYYITGESKKAVENSPFLEKLKKKGYEVLYMVDAIDEYSIGQLKEFEGKKLVSATKEGLKLDESEDEKKKQEELKEKFEGLCKVIKDVLGDKVEKVVVSDRVVDSPCCLVTGEYGWTANMERIMKAQALRDSSMAGYMSSKKTMEINPENAIMEELRKRADADKNDKSVKDLVLLLFETALLTSGFSLEEPNTFGNRIHRMLKLGLSIDDDSGDADVDMPALEDPEADAEGSKMEEVD

SEQ ID NO: 129253 - DNA, 2187 bp, Haliotis tuberculata
  CDS (1)..(2187)
atgccagaacctcaggaagcccagatggatgagggcgaggttgaaacctttgccttccaggcagaaattgcccaactgatgagcttgatcatcaacactttctactctaacaaggaaattttcttgagagaactgatttccaattcctctgatgctttggacaagattcgttacgaatctctcactgatccatccaaactggatggcaacaaagatatgcagatccgaattgttcctgacaaggagaacaagaccctcgttattgaggatagcggtattggtatgaccaaagctgatcttgtcaacaaccttggtactattgccaagtctggaacaaaagctttcatggaggccctgcaggcaggtgctgatatctctatgattggacagtttggtgtgggtttctactccgcctaccttgttgcagagagggtggttgttgagtcaaaacacaatgatgatgaacagtacatctgggagtcgtcagccggagggtctttcacgatcaaaacttcaaatgatcccaccctcggccgtggaactcgaatcaccctttacatgaaggaagaccaagtcgaatatctggaggaacgccgtgtcaaggagatcgtgaagaagcactcccagttcattggctacccaatcaagctgatggttgagaaagagagggacaaggaggtgtctgatgatgaagaagaggagaagaaggaagatgaagagaagaaagatgatgaggaagagagtgaggataaacccaaggtagaggatcttgatgaggatgaggatgaagacaaaagcaaagacaagaaaaagaagaagaagatcaaggaaaaatacacagaagatgaagagctgaacaagaccaaaccactgtggaccagaaatgcagatgatatcacccaggaagaatatgccgagttctacaagtccttgaccaatgattgggaggaccatcttgctgtcaagcacttctcagtggaaggtcagttggagttccgtgcattgctgttcctgcccaagagagctccatttgacatgtttgagaacaagaagaagaagaataacatcaagctgtatgtgagacgtgtgtttatcatggacaactgtgaggacctcattccggagtacttgaactttgtgcgtggtgttgtagactctgaggatcttcccctcaatatatccagagagatgttgcaacagagcaaaattctgaaggttatccgtaagaatctggtgaagaaatgcatggaactgtttgatgacatcatggaagacaaagacaacttcaagaaattctacgaacagttcagcaagaacctcaagcttggtatccatgaagactccaccaacagaaggaagctgtctgacctgttgagatactacacttcccagtcaggagatgaggtgacctctctgaaggaatatgtgtctcgcatgaaggaaaaccagaagagcatatactacatcacaggtgaaagcaaggattctgtccagaactctgcttttgttgagagagtgaagaagaggggatttgaggtgatctacatgacagaccctatcgatgagtactgtgttcagcagctgaaagagtatgatggcaagactttagtgtgcgtcaccaaggaaggtctggaactgccagaggatgaggaagagaagaagaaactggaggaggccaaggctcagtttgaaggactgtgcaaggtcatgaaagagatccttgacaagaaagtggaaaaggttgtggtttccaatcgcctggttacctccccttgctgcattgtcacaagtcagtatggctggtcggccaacatggagagaatcatgaaggcccaggctctgcgagataccagcactatgggctacatggcagctaagaaacacttggagatcaatccagaccatcccattgtgaagaccctgaaggagaaggctgatgctgacaagaatgacaaggcagtgaaagatctgtgcatgctgctgtttgaaacctccctccttgcctctggcttctccctggaagacccaacttcacatgccaacaggatacacaggatgatcaaactgggtctaggaattgatgaagatgatatcccaacagaagctacagcggaatctgccacagatgagatgccaccactggaaggtgatgaagacgatgcatcaaggatggaggaagttgactga

SEQ ID NO: 129254 - protein, 728 aa, Haliotis tuberculata
MPEPQEAQMDEGEVETFAFQAEIAQLMSLIINTFYSNKEIFLRELISNSSDALDKIRYESLTDPSKLDGNKDMQIRIVPDKENKTLVIEDSGIGMTKADLVNNLGTIAKSGTKAFMEALQAGADISMIGQFGVGFYSAYLVAERVVVESKHNDDEQYIWESSAGGSFTIKTSNDPTLGRGTRITLYMKEDQVEYLEERRVKEIVKKHSQFIGYPIKLMVEKERDKEVSDDEEEEKKEDEEKKDDEEESEDKPKVEDLDEDEDEDKSKDKKKKKKIKEKYTEDEELNKTKPLWTRNADDITQEEYAEFYKSLTNDWEDHLAVKHFSVEGQLEFRALLFLPKRAPFDMFENKKKKNNIKLYVRRVFIMDNCEDLIPEYLNFVRGVVDSEDLPLNISREMLQQSKILKVIRKNLVKKCMELFDDIMEDKDNFKKFYEQFSKNLKLGIHEDSTNRRKLSDLLRYYTSQSGDEVTSLKEYVSRMKENQKSIYYITGESKDSVQNSAFVERVKKRGFEVIYMTDPIDEYCVQQLKEYDGKTLVCVTKEGLELPEDEEEKKKLEEAKAQFEGLCKVMKEILDKKVEKVVVSNRLVTSPCCIVTSQYGWSANMERIMKAQALRDTSTMGYMAAKKHLEINPDHPIVKTLKEKADADKNDKAVKDLCMLLFETSLLASGFSLEDPTSHANRIHRMIKLGLGIDEDDIPTEATAESATDEMPPLEGDEDDASRMEEVD

SEQ ID NO: 129255 - DNA, 2166 bp, Anopheles albimanus
  CDS (1)..(2166)
atgccggaagcaccagaaaccgagacctttgcgttccaggctgagatcgctcagctgatgtccctgatcatcaacacattctactcgaacaaggaaatcttcctgcgagagttgatctcgaactcgtcggatgcgctggacaagatccgctacgagtcgctgaccgatcccacgaaactggactcgggcaaggagctgttcatcaagatcatcccgaacaaggaagcgggcacgctgacgctcatcgataccggtatcggtatgacgaaggcggatctagtgaacaacctcggtacgattgccaagtccggcaccaaggcgttcatggaggctctgcaggccggtgccgacatcagcatgattggtcagttcggtgtgggtttctactcggcgtacctggttgctgacaaggtcgtggtcacatcaaagaacaacgatgacgaacagtacgtgtgggaatcgtcggccggaggttcgttcaccgtgcgtgcggatagtggagagccgctcggtcgcggtaccaagatcgtgctgcacatcaaggaagatcagctggagtacctggaggagagcaagatcaagcagatcgtcaacaagcactcgcagttcatcggctatccgatcaagctgctggtggagaaggagcgcgagaaggaagtgagcgacgatgaggccgaggatgacaagaaggaagagaagaaggaggaggacaagaaggacgatgagccaaagctggaggacgccgaggacgatgatgataagaaggacaagaagaagaagacggtgaaggtgaagtacaccgaggacgaggagctgaacaagacgaagccgatctggacgcgcaacgccgacgatatctcgcaggaggagtacggcgagttctacaagtcgttgaccaacgactgggaggaccatctggctgtgaagcacttctccgttgagggtcagctggacttccgtgcgctgctgttcgttccgcgtcgtatgccgttcgatctgttcgaaaacaagaagaagaagaacaacatcaagctgtacgtgcgccgcgtgttcatcatggacaactgcgaggagctgatcccggattatctcaactttatgaagggtgttgtcgattccgaggatctgccactgaacatctctcgtgagatgctgcagcagaacaagatcctgaaggtgatccgcaagaacttggtgaagaagtgcatggagctgttcgaggagttggccgaggacaaggagacgtacaagaagttctacgatcagttcagcaagaacctgaagctgggcgtgcacgaagacagtcagaaccgtcagaagctggccgatctgctgcgtttcaacacgtcggcatcgggcgatgagtactgctcgctgaatgactacgtcggccgcatgaaggagaaccagacgcagatctacttcatcacgggcgagagcatcgagcaggtgaagaactcggcattcgtggagcgcgtgaagaagcgcggcttcgaggtgatctacatgacggaggccatcgatgagtacgtgatccagcagctgaaggagtacaagggcaagcagctggtgtgcgtgacgaaggagggtctggagctgccggaggacgaggccgagaagaagaagcgcgaggaggacaaggccaagttcgagaacctgtgcaaggtgatgaagtcggtactggagagcaaggtggagaaggtggtggtgtcgaaccgtctggtggactcgccctgctgtattgtaacgtcgcagtacggctggtcggccaacatggagcgtatcatgaaggcgcaggcactgcgcgactcgtccgccatgggctacatggctggtaagaagcacctggagatcaatcccgatcatgccatcatcgagacgctgcgacagcgcgccgaagccgataagaacgataaggcagtgaaggatctggtcatcctgctgttcgagactgccctactgtcgtctggattctcgctcgatgagcctggaacgcacgccgcccgcatctaccgcatggtgaaactcggtctgggcatcgatgatgacgaaccgatgacgacggatgaagtgagcggtgctggtgcaccgacgacggccgccggagatgcgcctccgctggtggacgattccgaggatctgtcacacatggaggaggtcgattaa

SEQ ID NO: 129256 - protein, 721 aa, Anopheles albimanus
MPEAPETETFAFQAEIAQLMSLIINTFYSNKEIFLRELISNSSDALDKIRYESLTDPTKLDSGKELFIKIIPNKEAGTLTLIDTGIGMTKADLVNNLGTIAKSGTKAFMEALQAGADISMIGQFGVGFYSAYLVADKVVVTSKNNDDEQYVWESSAGGSFTVRADSGEPLGRGTKIVLHIKEDQLEYLEESKIKQIVNKHSQFIGYPIKLLVEKEREKEVSDDEAEDDKKEEKKEEDKKDDEPKLEDAEDDDDKKDKKKKTVKVKYTEDEELNKTKPIWTRNADDISQEEYGEFYKSLTNDWEDHLAVKHFSVEGQLDFRALLFVPRRMPFDLFENKKKKNNIKLYVRRVFIMDNCEELIPDYLNFMKGVVDSEDLPLNISREMLQQNKILKVIRKNLVKKCMELFEELAEDKETYKKFYDQFSKNLKLGVHEDSQNRQKLADLLRFNTSASGDEYCSLNDYVGRMKENQTQIYFITGESIEQVKNSAFVERVKKRGFEVIYMTEAIDEYVIQQLKEYKGKQLVCVTKEGLELPEDEAEKKKREEDKAKFENLCKVMKSVLESKVEKVVVSNRLVDSPCCIVTSQYGWSANMERIMKAQALRDSSAMGYMAGKKHLEINPDHAIIETLRQRAEADKNDKAVKDLVILLFETALLSSGFSLDEPGTHAARIYRMVKLGLGIDDDEPMTTDEVSGAGAPTTAAGDAPPLVDDSEDLSHMEEVD

SEQ ID NO: 129257 - DNA, 2115 bp, Metarhizium anisopliae
  CDS (1)..(2115)
atgtctgagactttcgagttccaggctgagatctctcagcttctctccctcatcatcaacactgtctactccaacaaagaaatcttcttgagagaacttgtttccaatgcctccgatgctttggacaagatccgctacaaggccctgtccgaccctacccagctcgactctggaaaggacttgcgcattgatatcatccccaacaaggaggccaagactttgaccatccgggataccggtattggtatgaccaaggctgacctcgtcaacaacctgggtaccattgcccgctccggtaccaagcagttcatggaggctttgacagctggtgccgatgtttccatgattggtcagtttggtgttggtttctactccgcgtacctcgttgccgacaaggtcactgtcgtctccaagaacaacgatgacgagcagtacatctgggagtctagtgctggtggtaccttcagcatcaccgctgacaccgagggccagcagctcggccgcggtacctccattatcctccacctcaaggacgagcaggctgaatacctgaatgagagcaagatcagggaggttatcaagaagcactccgagttcatctcctacccaatctacctccacgtccagaaggagactgaaaaggaggttcctgatgaggatgcccaggcccaagaggtcaaggaagaggagggtgaccacaagaagcctcgtatccaggaggttgatgacgaggatgaggagaaggaaaagaagaagaagaccaagaaggtcaaggagaccaccattgaggaagaggagctcaacaagcagaagcccatctggacccgcaatccccaggatattactcaggaggagtatgcttcattctacaagtctctttccaacgactgggaagaccaccttgccgtcaagcacttctccgtcgagggtcagctcgaattccgcgccatcctcttcgtccctaagcgtgctccctttgatctctttgagaccaagaagactaagaacaatatcaagctctatgtccgccgtgtcttcatcactgacgacgctactgagctcatccctgagtggctcagcttcgtcaagggtgtagtcgactctgaggaccttcccctcaacctgtctcgtgagaccctccagcagaacaagatcatgaaggtcatcaagaagaacattgtcaagaagtctctcgagctcttccaggagattgccgaggacaaggagcagttcgacaagttctacagtgctttctccaagaacttgaagctcggtatccacgaggactctcagaaccgccagcagcttgccaagcttctgcgcttcaactcaaccaagtctggtgacgaaatgacctctctgtccgactacgttactcgcatgcctgagcaccagaagaatatgtactacatcactggcgagtccatcaaggctgtctccaagtctcccttccttgacactctcaaggagaagggtttcgaagttctcttcctcgtcgaccccattgatgagtacgccatgactcagctcaaggagtttgaggagaagaagctcgttgatatcacaaaggacttcgaactcgaggagactgacgaggagaagaaggctcgcgaggaggaggaaaaggagtatgagagcctggctaagagcctcaagaacgttctcggcgagaaggttgagaaggttgttgtcagccacaaactcggcctctccccatgcgccatccgaaccggccagtttggttggtctgccaacatggagcgtattatgaaggcccaggccctccgtgacacctccatgtccagctacatgtcctccaagaagacctttgagatctcccccaagtctcctatcatccaggagctcaagaagaaggttgaaactgacggtgagaacgaccgtaccgtcaagtccatcgtccagcttctgttcgagacctccctgctcgtgtctggcttcacaatcgaggagcctgctggcttcgctgagcgcattcacaagctcgtccagctcggcctcaacatcgaggaggacgactctgcccctgctgaggctcccgccgaagctgcccctgccgccgagactggcgacagcgccatggaggaggttgactaa

SEQ ID NO: 129258 - protein, 704 aa, Metarhizium anisopliae
MSETFEFQAEISQLLSLIINTVYSNKEIFLRELVSNASDALDKIRYKALSDPTQLDSGKDLRIDIIPNKEAKTLTIRDTGIGMTKADLVNNLGTIARSGTKQFMEALTAGADVSMIGQFGVGFYSAYLVADKVTVVSKNNDDEQYIWESSAGGTFSITADTEGQQLGRGTSIILHLKDEQAEYLNESKIREVIKKHSEFISYPIYLHVQKETEKEVPDEDAQAQEVKEEEGDHKKPRIQEVDDEDEEKEKKKKTKKVKETTIEEEELNKQKPIWTRNPQDITQEEYASFYKSLSNDWEDHLAVKHFSVEGQLEFRAILFVPKRAPFDLFETKKTKNNIKLYVRRVFITDDATELIPEWLSFVKGVVDSEDLPLNLSRETLQQNKIMKVIKKNIVKKSLELFQEIAEDKEQFDKFYSAFSKNLKLGIHEDSQNRQQLAKLLRFNSTKSGDEMTSLSDYVTRMPEHQKNMYYITGESIKAVSKSPFLDTLKEKGFEVLFLVDPIDEYAMTQLKEFEEKKLVDITKDFELEETDEEKKAREEEEKEYESLAKSLKNVLGEKVEKVVVSHKLGLSPCAIRTGQFGWSANMERIMKAQALRDTSMSSYMSSKKTFEISPKSPIIQELKKKVETDGENDRTVKSIVQLLFETSLLVSGFTIEEPAGFAERIHKLVQLGLNIEEDDSAPAEAPAEAAPAAETGDSAMEEVD

SEQ ID NO: 129259 - DNA, 2100 bp, Aspergillus oryzae
  CDS (1)..(2100)
atgtccgagacttttgagttccaggctgagatctctcagctcctttctcttatcatcaacactgtctactccaacaaggagattttcctgcgtgaacttatctccaatgcctccgatgcccttgacaagatccgctatgagtctttgtcggacccttccaagctcgactcaggcaaggacctccgtatcgatatcattcccaacaaggaggccaagaccttgactatccgtgataccggtatcggtatgaccaaggctgacctgatcaacaaccttggtaccatcgctcgctctggtaccaagcagttcatggaagccctctccgcaggtgccgatatttccatgattggccagttcggtgttggcttctactctgcttaccttgtcgctgaccgcgtcactgtcatctctaagcacaacgatgatgagcagtacgtctgggagtccgctgccggcggtaccttcacgctcacccaggacaccgagggtgagccccttggccgtggtaccaagatgatccttcacttgaaggatgagcagaccgactacctcaacgagagccgcatcaaggaggttgttcgcaagcactccgaattcatctcttaccccatctacctccacgttctgaaggaaaccgagaaggaggttcctgatgaggaggaagagaccaaggaagaggaaggcgatgagaaaaagcccaaaattgaggaggttgacgaagaagaagaaaagaaggagaagaagaccaagactgtcaaggagagcaagatcgaggaggaggagctcaacaagactaagcccatctggacccgtaaccctgctgatatcactcaggaggaatacgctgccttctacaagtctctctccaatgactgggaggatcaccttgccgtcaagcacttctccgttgagggtcagctcgagttccgtgccatcctctatattcctaagcgtgctcctttcgacctcttcgagaccaagaagactaagaacaacatcaagctctatgttcgccgtgtcttcatcaccgacgacgccaccgacctcatccctgagtggctcagcttcatcaagggtgttgttgattcagaggaccttcctctcaacttgtcccgtgagaccctgcagcagaacaagatcatgaaggttatcaaaaagaacattgtcaagaagacccttgagctcttcaccgagattgctgaagaccgtgagcagtttgacaagttctactccgccttcagcaagaacatcaaacttggtgtccacgaggatgctcagaaccgccagactctcgctaagctgctccgttaccagtccaccaagtcgggtgatgaggtcacctccctctctgactatgtcacccgcatgcctgagcaccagaagcaaatctactacatcactggcgagtctatcaaggctgtcgccaagtctcctttccttgacagcctcaagcagaagaactttgaggttctcttcctggttgaccctattgatgagtacgctttcactcagcttaaggagtttgatggcaagaagcttgtcgacatcactaaggacttcgaactcgaggagtccgaggaggagaaggctgagcgtgagaaggaggagaaggagttcgagggcctcgccaagagccttaagaacatcctcggtgacaaggttgagaaggttgttgtctctcacaaacttgttggctctccttgcgccatccgtactggccagtttggttggtctgccaatatggagcgtatcatgaaggcccaggccctccgtgacacctccatgagctcctacatgtcttccaagaagaccttcgagatctctcccaagtctgctatcatcaaggagctcaagaagaaggtcgaggctgatggtgaaagcgaccgtaccgtcaagtccatcactcagcttctgttcgagacctctcttttggtttccggcttcaccatcgacgagcctgccagctttgccgagcgcatccacaagcttgtgtctcttggtctgaacgtcgacgaggaggctgagacctctgaggaaaaggccgctgaggaggctcctgccgctgccaccggtgagagctccatggaggaggttgactaa

SEQ ID NO: 129260 - protein, 699 aa, Aspergillus oryzae
MSETFEFQAEISQLLSLIINTVYSNKEIFLRELISNASDALDKIRYESLSDPSKLDSGKDLRIDIIPNKEAKTLTIRDTGIGMTKADLINNLGTIARSGTKQFMEALSAGADISMIGQFGVGFYSAYLVADRVTVISKHNDDEQYVWESAAGGTFTLTQDTEGEPLGRGTKMILHLKDEQTDYLNESRIKEVVRKHSEFISYPIYLHVLKETEKEVPDEEEETKEEEGDEKKPKIEEVDEEEEKKEKKTKTVKESKIEEEELNKTKPIWTRNPADITQEEYAAFYKSLSNDWEDHLAVKHFSVEGQLEFRAILYIPKRAPFDLFETKKTKNNIKLYVRRVFITDDATDLIPEWLSFIKGVVDSEDLPLNLSRETLQQNKIMKVIKKNIVKKTLELFTEIAEDREQFDKFYSAFSKNIKLGVHEDAQNRQTLAKLLRYQSTKSGDEVTSLSDYVTRMPEHQKQIYYITGESIKAVAKSPFLDSLKQKNFEVLFLVDPIDEYAFTQLKEFDGKKLVDITKDFELEESEEEKAEREKEEKEFEGLAKSLKNILGDKVEKVVVSHKLVGSPCAIRTGQFGWSANMERIMKAQALRDTSMSSYMSSKKTFEISPKSAIIKELKKKVEADGESDRTVKSITQLLFETSLLVSGFTIDEPASFAERIHKLVSLGLNVDEEAETSEEKAAEEAPAAATGESSMEEVD

SEQ ID NO: 129261 - DNA, 2154 bp, Plutella xylostella
  CDS (1)..(2154)
atgcctgaagaaatgcaagcgcagtcgggagaggtggagaccttcgccttccaggcggagatcgcccagctcatgtccctcatcatcaacacattctactcgaacaaagagatcttcctccgtgagttgatctccaactcgtcggacgcgctcgacaagatccgctgcgagtcgctcaccgacccctccaagctcgacagcggtaaggaactctacatcaagatcatcccgaacaaagccgagggcacgctgaccatcatcgacaccggtatcggcatgaccaaggccgacctggtcaacaacctgggaaccatcgccaagtccggcaccaaggccttcatggaggcgctacaggcgggtgcggacatcagcatgatcgggcagttcggagtgggtttctactcgtgctacctcgtcgctgaccgcgtgaccgtgacctccaagcacaacgacgacgagcagtacatgtgggagtccgccgccgggggctccttcaccatccgctccgacgccagcgagccgctcggccgcggcaccaagatcgtgctgcacatcaaggaggacctgaccgagtacctcgaggagcacaagatcaaggagatcgtgaagaagcactcgcagttcatcggctaccccatcaagctgatggtggagaaggagcgcgagaaggagctgtcggacgacgaggccgaggaggagaagaaggaggagggtgaggacgacaagcccaagatcgaggacgtcggcgaggacgaggacgaggacgccaaggacaagaagaagaagaagaagacgatcaaggagaagtacacggaggacgaggagctgaacaagaccaagcccatctggacgcgcaacgctgacgacattacccaagaggagtacggtgacttctacaagtcgctgaccaacgactgggaggaccacctggccgtcaagcacttctccgtggaggggcagctggagttccgcgcgctactgttcgtgccgcgccgcgcgcccttcgacctgttcgagaacaagaagcgcaagaacaacaccaagctgtacgtgcgcagagtcttcattatggacaactgcgaggacctcatccccgagtacctcaacttcatcaagggagtggtcgacagcgaggacctgcccctcaacatctcgcgagagatgctgcagcagaacaagatcctgaaggtgatccgcaagaacttggtcaagaagtgtctggagctgttcgaggagctggccgaggacaaggagaactacaagaagtactacgagcagttcagcaagaacctgaagctgggtatccacgaggactctcagaacaggaacaagctggccgacctgctgcgcttccacacatccgcttctggagacgaggcttgctccttcaaggagtacgtgtcccgcatgaaggagaaccagaaacacatctactacatcactggagagaaccgagaccaggtgtccaactcctcgttcgttgagagggtcaagaagcgtggctacgaagtagtctacatgactgagcccatcgacgagtacgtagtacaacagatgagggagtacgatggcaagaccctggtgtccgtcaccaaggagggcctcgagctgcccgaggatgaggaggagaagaagaagcgcgaggaggacaaggtcaagttcgagaacctctgcaaggtcatgaagaacatcctcgacaacaaggttgagaaagtggtggtcagcaacaggctggtcgagtctccatgctgcatcgtcactgcccagtacggttggtccgccaacatggagcgcatcatgaaggcgcaggcgctccgagacacctccaccatgggctacatggctgccaagaagcacctcgagatcaaccccgaccactcaatcgtcgagactctgcggcagaaggctgaggttgacaagaacgacaaggctgtcaaggacctggtcatcctgctgtacgagaccgctctgctgtcgtctggcttctccctggacgagccccaggtgcacgcctccaggatctaccgcatgatcaagctgggtctgggcatcgacgaggacgagcccatccaagtggaggaggccagcgctggggacgtcccgcctctggagggagacggagacgatgcatcccgcatggaggaagtcgactaa

SEQ ID NO: 129262 - protein, 717 aa, Plutella xylostella
MPEEMQAQSGEVETFAFQAEIAQLMSLIINTFYSNKEIFLRELISNSSDALDKIRCESLTDPSKLDSGKELYIKIIPNKAEGTLTIIDTGIGMTKADLVNNLGTIAKSGTKAFMEALQAGADISMIGQFGVGFYSCYLVADRVTVTSKHNDDEQYMWESAAGGSFTIRSDASEPLGRGTKIVLHIKEDLTEYLEEHKIKEIVKKHSQFIGYPIKLMVEKEREKELSDDEAEEEKKEEGEDDKPKIEDVGEDEDEDAKDKKKKKKTIKEKYTEDEELNKTKPIWTRNADDITQEEYGDFYKSLTNDWEDHLAVKHFSVEGQLEFRALLFVPRRAPFDLFENKKRKNNTKLYVRRVFIMDNCEDLIPEYLNFIKGVVDSEDLPLNISREMLQQNKILKVIRKNLVKKCLELFEELAEDKENYKKYYEQFSKNLKLGIHEDSQNRNKLADLLRFHTSASGDEACSFKEYVSRMKENQKHIYYITGENRDQVSNSSFVERVKKRGYEVVYMTEPIDEYVVQQMREYDGKTLVSVTKEGLELPEDEEEKKKREEDKVKFENLCKVMKNILDNKVEKVVVSNRLVESPCCIVTAQYGWSANMERIMKAQALRDTSTMGYMAAKKHLEINPDHSIVETLRQKAEVDKNDKAVKDLVILLYETALLSSGFSLDEPQVHASRIYRMIKLGLGIDEDEPIQVEEASAGDVPPLEGDGDDASRMEEVD

SEQ ID NO: 129263 - DNA, 2148 bp, Ceratitis capitata
  CDS (1)..(2148)
atgtctgaagaagtggaaaccttcgctttccaagctgaaattgctcagcttatgtcgttgatcatcaacacattctactcgaacaaagaaatttttcttcgtgagttgatctctaacgcttccgatgcactcgataaaatccgttacgagtctttgaccgaccccaccaagttggacagtggcaaagaattgtatattaagcttattcccaataaaacggcaggcactttgaccattattgatactggtattggtatgactaaatccgatttggtcaacaatttgggtacaattgccaagtccggcactaaagcattcatggaagcattgcaagctggtgctgatatttctatgattggtcaatttggtgttggtttctactcggcttacttggttgctgacaaagtaaccgttacgtcaaagcacaacgatgacgaacaatacatttgggaatcgtcggctggtggctcgttcacagttaaaccagacaacacagaaccattgggtcgtggtaccaagatcgttttgtacatcaaggaagatcaaaccgattatttagaagaaagcaaagtcaaggaaattgtgaacaagcactctcaattcatcggttaccccattaagctgttggtggaaaaagaacgcgaccaagaagtgagtgacgatgaggctgaagatgacaagaaggaggaagaaaagaaagaaatggacactgatgagcccaagattgaagatgttggtgaggatgaggatgccgacaaagataaggacaagaagaagaagaaaactgttaaggtgaaatacaccgaagatgaggaattgaataaaacaaaacccatctggactcgtaatcctgacgacatttcacaggaagaatacggcgaattctacaaatctctcacaaatgactgggaagatcatttagccgtaaagcacttctccgttgaaggtcaattggaattccgtgctttgctcttcatcccacgtcgcactcctttcgacttgttcgaaaatcaaaagaagcgcaacaacatcaaactgtacgtccgccgtgttttcatcatggacaattgcgaagaactcattcccgagtatcttaacttcatcaagggtgtcgttgattcagaagatttgcctttgaacatttctcgtgagatgttgcaacaaaacaaagtattaaaggttatccgaaaaaatttggtaaagaagaccatggaattaattgaagaactcactgaagacaaagaattgtacaagaagttctacgatcaattcgccaagaacttgaaattgggtgttcacgaagacagcaacaaccgcgccaaacttgccgacttcctgcgctatcccacttctgcctctggcgatgatgccgcctctttggccgattacgtatcacgtatgaaggagaaccagaagcacatctacttcatcacaggtgaatcaaaagaacaagttagcaactctgccttcgtcgagcgagttaaggcacgtggttttgaagtcatctacatgaccgagcctattgatgaatacgttatccagcacttgaaggaatacaagggcaaacagttgacttctgtaaccaaggaaggtttggagttgcctgaggatgatgccgagaagaagaagcgtgaggaagataaggcgaagttcgaaaacctctgcaaattgatgaaatccattttggacaacaaagttgagaaggtagtcgtttcgaacagattggttgagtcgccatgttgtattgtcacgtcacaattcggttggtcagcgaacatggaacgtataatgaaagcccaagctttacgtgatacctcaactatgggctacatggctggcaagaagcatttggaaatcaaccctgaacatccaatcatcgagacacttcgtgaaaaggctgatgttgacaagaacgataaagctgtgaaagacttgtgcattctgctcttcgagacagccctgttgtcatcaggcttctcattggacagcccgcaagtgcacgcctcccgcatttaccgtatgatcaaacttggtcttggtattgatgaagaggagccaatggctacagaagatacccagagcggtggtgatgcgcctccattggtcgatgacactgaagatgcttcacacatggaagaagtcgattaa

SEQ ID NO: 129264 - protein, 715 aa, Ceratitis capitata
MSEEVETFAFQAEIAQLMSLIINTFYSNKEIFLRELISNASDALDKIRYESLTDPTKLDSGKELYIKLIPNKTAGTLTIIDTGIGMTKSDLVNNLGTIAKSGTKAFMEALQAGADISMIGQFGVGFYSAYLVADKVTVTSKHNDDEQYIWESSAGGSFTVKPDNTEPLGRGTKIVLYIKEDQTDYLEESKVKEIVNKHSQFIGYPIKLLVEKERDQEVSDDEAEDDKKEEEKKEMDTDEPKIEDVGEDEDADKDKDKKKKKTVKVKYTEDEELNKTKPIWTRNPDDISQEEYGEFYKSLTNDWEDHLAVKHFSVEGQLEFRALLFIPRRTPFDLFENQKKRNNIKLYVRRVFIMDNCEELIPEYLNFIKGVVDSEDLPLNISREMLQQNKVLKVIRKNLVKKTMELIEELTEDKELYKKFYDQFAKNLKLGVHEDSNNRAKLADFLRYPTSASGDDAASLADYVSRMKENQKHIYFITGESKEQVSNSAFVERVKARGFEVIYMTEPIDEYVIQHLKEYKGKQLTSVTKEGLELPEDDAEKKKREEDKAKFENLCKLMKSILDNKVEKVVVSNRLVESPCCIVTSQFGWSANMERIMKAQALRDTSTMGYMAGKKHLEINPEHPIIETLREKADVDKNDKAVKDLCILLFETALLSSGFSLDSPQVHASRIYRMIKLGLGIDEEEPMATEDTQSGGDAPPLVDDTEDASHMEEVD

SEQ ID NO: 129265 - DNA, 1905 bp, Xanthomonas albilineans
  CDS (1)..(1905): transl_table=11
atgagcgtggaaacccaaaaagaaaccctgggctttcagaccgaggtcaaacagctgctgcagctgatgatccattcgttgtattccaacaaggagatcttcctgcgcgagctgatctccaatgcctccgacgcggccgacaaactgcgcttcgaggcactggtcaagccggaacttctggacggcgatgcgcaactgcgcatccgcatcggcttcgacaaggacgccggcaccgtcaccatcgacgacaacggcatcggcatgagccgcgaggagatcgtcgcgcacctgggcaccatcgccaaatccggcacctccgatttcctcaagcatctgtccggcgatcagaagaaggattcgcacctgatcggccagttcggtgtcggcttctacagtgccttcatcgtcgccgatcaagtggacgtgtacagccgtcgcgccgggctgccggccagcgacggcgtacactggtcctcgcgtggcgaaggcgagttcgaggtcgccaccatcgacaagcccgagcgcggcacccgcatcgtgctgcacttgaaggaggaagagaaaggcttcgccgacggttggaagttgcgcagcatcgtgcgcaagtactccgaccacatcgccttgccgatcgagctaatcaaggaacactacggcgaggacaaggacaagccggaaacccccgagtgggagaccgtcaatcgcgccagcgcgctgtggacacggccgcgcaccgagatcaaggacgaggaataccaagaactgtacaagcacattgcccacgaccacgaaaacccggtggcgtggagccataacaaggtcgaaggcaaactggaatacacctcgctgctgtacctgcccggccgcgccccgttcgacctgtaccagcgcgatgcctcgcgcgggctcaagctgtacgtgcagcgcgtcttcatcatggaccaggccgaccaattcctgccgctgtacctgcgcttcatcaagggcatcgtcgattccagcgacctgccgctgaacgtctcgcgcgaaatcctgcaatctggtccggtgatcgactcgatgaagtcggcgctgaccaagcgcgcactggacatgctggaaaagctcgccaaagacgatcccgaacgctacaagggcgtgtggaagaacttcggccaggtgctgaaggaaggtccggcccaggacttcggcaaccgcgaaaagatcgccggcctgctgcgcttcgcgtccacccacagcggcgacgacgcccagaacgtgtcgctggccgactacgtggcgcggatgaaagacggccaggacaagctgtactacctgaccggggaaagctacgcgcaaatcaaggacagcccgcacctggaggtgttccgcaagaagggcatcgaggtgctcctgctcaccgaccgcatcgacgagtggctgatgagctatctcaccgagttcgacagcaaatccttcgtcgatgtggcgcgcggcgacctggacctgggcaagctggacagcgaagaagaaaagcaggcgcaggaagaagccgccaaggccaagcaagggctggccgagcgcatccagcaggtactcaaggacgaggtcgccgaggtgcgggtctcgcaccggctgaccgattcgccggcgattcttgccatcggccagggcgacatgggtctgcaaatgcggcagatcctggaagccagcgggcagaagctgccggagagcaagccggtgttcgagttcaaccccgcgcatccgctgatcgagaaactggatgcggaacccgatgtcgatcgtttcggtgatctggcgcgggtgctgttcgatcaggccgcgctggccgccggcgacagcctcaaggacccggccgcctacgtgcgtcggctcaacaagctgttgctggagctgtcggcgtaa

SEQ ID NO: 129266 - protein, 634 aa, Xanthomonas albilineans
MSVETQKETLGFQTEVKQLLQLMIHSLYSNKEIFLRELISNASDAADKLRFEALVKPELLDGDAQLRIRIGFDKDAGTVTIDDNGIGMSREEIVAHLGTIAKSGTSDFLKHLSGDQKKDSHLIGQFGVGFYSAFIVADQVDVYSRRAGLPASDGVHWSSRGEGEFEVATIDKPERGTRIVLHLKEEEKGFADGWKLRSIVRKYSDHIALPIELIKEHYGEDKDKPETPEWETVNRASALWTRPRTEIKDEEYQELYKHIAHDHENPVAWSHNKVEGKLEYTSLLYLPGRAPFDLYQRDASRGLKLYVQRVFIMDQADQFLPLYLRFIKGIVDSSDLPLNVSREILQSGPVIDSMKSALTKRALDMLEKLAKDDPERYKGVWKNFGQVLKEGPAQDFGNREKIAGLLRFASTHSGDDAQNVSLADYVARMKDGQDKLYYLTGESYAQIKDSPHLEVFRKKGIEVLLLTDRIDEWLMSYLTEFDSKSFVDVARGDLDLGKLDSEEEKQAQEEAAKAKQGLAERIQQVLKDEVAEVRVSHRLTDSPAILAIGQGDMGLQMRQILEASGQKLPESKPVFEFNPAHPLIEKLDAEPDVDRFGDLARVLFDQAALAAGDSLKDPAAYVRRLNKLLLELSA

SEQ ID NO: 129267 - DNA, 2154 bp, Chilo suppressalis
  CDS (1)..(2154)
atgccggaagagatgcagacccaatccggcgaggtggaaaccttcgccttccaggctgagatcgctcagctcatgtcgctgatcatcaacacgttctactccaacaaagagatcttccttcgtgaggtaatttcaaacgcttctgacgccttggacaagatccgctatgaatcactcaccgatccgtcaaagctggacagcggcaaagaattatacatcaagatcgtgcccaacaagagcgagggcacgctcaccatcattgacaccggtatcggcatgacaaaggcggatcttgtgaacaacctgggaacaatcgcaaagtctggcacaaaggcgttcatggaagcgttacaagccggcgcggacatcagcatgatcggtcagtttggtgttggtttctattcgtgctacctcgtggcagaccgcgtgacagtgcactccaagcacaacgacgatgaacagtacatgtgggagtctgccgcgggaggttccttcaccatcaggccagaccaaggcgagccactgggccgcggtaccaagatcgtgcttcatatcaaagaagacttgtcagaatatttggaagagcacaagatcaaggagattgtgaagaagcactctcaattcatcggttaccccatcaaacttgtggtagagaaagaacgtgaaaaggagctgtctgatgatgaggccgaggaagagaagaaggaagaggacaaagaggatgagaagccaaagatagaggatgtcggtgaagacgacgaggaagacaaaaaggacaagaagaagaagaagaccatcaaggagaaatacacagaggacgaggagttgaacaagaccaaacccatctggacgcgcaacgctgacgacatcacccaggaggagtacggtgagttctacaaatctctcaccaatgactgggaagaccacctagcagtcaaacacttctctgttgagggccaactcgagttccgtgcactcctcttcgtaccccgcagagcaccttttgatctattcgaaaacaagaagcgcaagaacaacatcaaattgtatgtgcgcagagtattcatcatggacaactgtgaggacctcatccctgagtacctcaacttcatcaagggtgtggttgacagcgaggacttgccactgaacatttctcgtgaaatgctccaacagaacaaaattcttaaagtaattaggaagaacttagttaagaaatgcttagagctcttcgaagagttggccgaggacaaggagaactacaagaaattctatgaacaattcagcaaaaacttgaaacttggcattcacgaggattctcagaacaggtctaagttggcagacttgctgcgctaccacacatcagcatctggtgatgaggcatgctccttcaaagaatatgtttcacgtatgaaggagaaccaaaaacacatctactacataactggtgagaaccgtgaccaggtagcaaactcttcatttgtagagcgagtcaagaagcgtggctatgaagtagtatacatgactgagcccattgatgagtatgtagttcaacagatgagggagtatgatggtgctacccttgtgtcagtcacaaaagaaggcttggagctccccgaagatgaggaggagaagaagaagcgtgaggaagacaaagtcaagttcgaaggcctctgcaaagtcatgaagaacatcctagacaacaaagttgagaaagtagttgtatcaaatcgtctagttgagtctccgtgttgcattgttactgctcagtatggttggtcagcgaacatggaacgtatcatgaaggctcaagctctccgtgacacatccacaatgggctacatggctgccaagaaacacttggaaatcaacccggaccactccattgttgagactttgagacagaaagcagaggctgataagaatgacaaagctgtgaaggatcttgtcatcttgttgtatgagactgctctgctgtcatctggattcgcccttgatgagccacaggtccatgcttcccggatctaccgtatgatcaagctcggtcttggcattgatgaggatgagcccatccaggttgaggagactagtgctggagacgtgccaccactagaaggagatgctgatgatgcatcacgcatggaggaagtcgattaa

SEQ ID NO: 129268 - protein, 717 aa, Chilo suppressalis
MPEEMQTQSGEVETFAFQAEIAQLMSLIINTFYSNKEIFLREVISNASDALDKIRYESLTDPSKLDSGKELYIKIVPNKSEGTLTIIDTGIGMTKADLVNNLGTIAKSGTKAFMEALQAGADISMIGQFGVGFYSCYLVADRVTVHSKHNDDEQYMWESAAGGSFTIRPDQGEPLGRGTKIVLHIKEDLSEYLEEHKIKEIVKKHSQFIGYPIKLVVEKEREKELSDDEAEEEKKEEDKEDEKPKIEDVGEDDEEDKKDKKKKKTIKEKYTEDEELNKTKPIWTRNADDITQEEYGEFYKSLTNDWEDHLAVKHFSVEGQLEFRALLFVPRRAPFDLFENKKRKNNIKLYVRRVFIMDNCEDLIPEYLNFIKGVVDSEDLPLNISREMLQQNKILKVIRKNLVKKCLELFEELAEDKENYKKFYEQFSKNLKLGIHEDSQNRSKLADLLRYHTSASGDEACSFKEYVSRMKENQKHIYYITGENRDQVANSSFVERVKKRGYEVVYMTEPIDEYVVQQMREYDGATLVSVTKEGLELPEDEEEKKKREEDKVKFEGLCKVMKNILDNKVEKVVVSNRLVESPCCIVTAQYGWSANMERIMKAQALRDTSTMGYMAAKKHLEINPDHSIVETLRQKAEADKNDKAVKDLVILLYETALLSSGFALDEPQVHASRIYRMIKLGLGIDEDEPIQVEETSAGDVPPLEGDADDASRMEEVD

SEQ ID NO: 129269 - DNA, 2654 bp, Secale cereale
  CDS (102)..(2447)
tcccaaacaccgcgccggaaccccaaaccatccgaacaaccaaccaccagcgagcgcggtaggctcggcgctgttggcccagcaccgtccgtctctctctcatggcgcccgcgctgagcaggaccctgggcccgtcctcggtggcggcgctgcggccgagcccgtcgcgggggctgccgctggccgcgctacttccacagggtaagaggtcttccagcgccagaggagtcaggtgggaggccgggaggggcaggctggtcggggcgaggtgcgcctccgccgtcgccgagaagaccgccggcgaggaggaggaggcggccggcgagaagttcgagtaccaggccgaggttagccggttgatggatttgattgttcacagcctgtacagccacaaggaagtgttccttcgggagcttgtaagtaatgcgagtgatgcgctggataagctgagatttctcagtgtaactgactcatccgtgctggctgatggtggtgagctggaaataaggattaaacctgaccctgatgctggaacaataacaatcactgatagtggcattgggatgacaaaggatgagctcaaggactgccttggaactattgcgcaaagtggtacctccaaatttttgaaggctctgaaggagaacaaggagcttggtgcagataatggacttatcggtcaatttggtgttggattttattcggcttttcttgttgcagagaaggttgtggtgtccactaagagtcccaagacagataagcagtatatatgggaagctgaggctaacagtagttcatacgttatcagggaagagactgatcctgagaaaatgctgacacgtggaacacagattaccctctttttaagagaggatgataagtatgaatttgctgaccctgcgaggattcaaggtctagttaagaactactcgcagtttgtttcattccccatctttacatggcaagagaaatctagaacagttgaggttgaagaagaggagtcaaaagaaggcgaagagacagcagagggcgagaaggaggagaagaagaaaactatcactgagaagtactgggattgggagttggcaaatgaaacaaagccaatttggatgagaaatccaaaggaagttgaggaaacagagtacaatgaattttacaagaaggcattcaatgagtttttggatcctctagcccatgcacacttcacaacagagggtgaggtggaatttaggagtgttctctacatccctggaatggcaccacttagcaatgaggagataatgaaccctaagaccaaaaatatccgattgtatgtcaagagggttttcatttctgatgactttgacggcgagctgttccccaggtacttgagctttgtcaaaggtgttgttgactcgaatgatctccctctgaatgtttctcgtgagattcttcaagaaagtcgcattgtcaggatcatgcgcaagagacttgttaggaagacttttgatatgattcaggatattgctgacaaggataacaaggaggactacaagaaatttggggagagctttggcaaatttatgaaacttggttgcattgaggactcaggaaatcagaagcgccttgctcctttgctgcggttttattcctccaaaaatgaaacggatttgataagtctcgatcagtatgtggagaatatgcccgagacccaaaaggcaatctattatattgccacagatagtcttcagagtgcaaagaccgctccattcttggaaaagctgcttcagaaagatattgaagttctctaccttattgagccgattgatgaggtagccattcagaatctgcagacatacaaagagaaaaagtttgttgatatcagcaaggaagacctagaattgggcgatgaggatgaggacaaggaagaaaccaagcaggaatacactcttctttgtgactggataaagcagcagctgggtgacaaagttgccaaggtccaaatttcgaagcgactcagctcttcaccatgtgttcttgtatctggcaagtttggttggtcggctaacatggaaaggcttatgaaagcacaaacgcttggtgacacatcaagcttggagttcatgagaggaaggagaatttttgaaatcaaccccgaccaccctattgtcaaggacttgagtgctgcttgcaagaatgagcctgatagcaccgaagctaagagggcagttgagctgctgtacgagactgccctgatctccagcggttatactcctgagagtccagcggagttggggggcaagatctacgagatgatgaccatcgcccttggcgggagatggggtagatccggcgccgaggaggctgagaccaatgtcgacggtgactcttctgaaggtgttgtaccggaggtcattgagccatccgaagtcaggactgagaacgagaatgacccatggagagattagttagttctgtaggcatccattatttttttaaataccctggaggtggacgagcaaaaaataggagtatcactggagccagagtgatgatgacatcgagcgatggactgtctttgtaagaacactgagctccagaatcttgtttgttatcgcccaaggataaattttgtaggtgacttttttgacggccgtgaaattaaattgtctttg

SEQ ID NO: 129270 - protein, 781 aa, Secale cereale
MAPALSRTLGPSSVAALRPSPSRGLPLAALLPQGKRSSSARGVRWEAGRGRLVGARCASAVAEKTAGEEEEAAGEKFEYQAEVSRLMDLIVHSLYSHKEVFLRELVSNASDALDKLRFLSVTDSSVLADGGELEIRIKPDPDAGTITITDSGIGMTKDELKDCLGTIAQSGTSKFLKALKENKELGADNGLIGQFGVGFYSAFLVAEKVVVSTKSPKTDKQYIWEAEANSSSYVIREETDPEKMLTRGTQITLFLREDDKYEFADPARIQGLVKNYSQFVSFPIFTWQEKSRTVEVEEEESKEGEETAEGEKEEKKKTITEKYWDWELANETKPIWMRNPKEVEETEYNEFYKKAFNEFLDPLAHAHFTTEGEVEFRSVLYIPGMAPLSNEEIMNPKTKNIRLYVKRVFISDDFDGELFPRYLSFVKGVVDSNDLPLNVSREILQESRIVRIMRKRLVRKTFDMIQDIADKDNKEDYKKFGESFGKFMKLGCIEDSGNQKRLAPLLRFYSSKNETDLISLDQYVENMPETQKAIYYIATDSLQSAKTAPFLEKLLQKDIEVLYLIEPIDEVAIQNLQTYKEKKFVDISKEDLELGDEDEDKEETKQEYTLLCDWIKQQLGDKVAKVQISKRLSSSPCVLVSGKFGWSANMERLMKAQTLGDTSSLEFMRGRRIFEINPDHPIVKDLSAACKNEPDSTEAKRAVELLYETALISSGYTPESPAELGGKIYEMMTIALGGRWGRSGAEEAETNVDGDSSEGVVPEVIEPSEVRTENENDPWRD

SEQ ID NO: 129271 - DNA, 2163 bp, Bemisia tabaci
  CDS (1)..(2163)
atgccagaagacgttaacatggaacaggctgagaccttcgtatttcaagctgagattgctcagcttatgagcttgattgtcaacacattctactcaaacaaagaaatcttcttgcgagaattgatctctaactcatcagatgccttggacaaaatccgttacgaatctctaacagacccatcccgtttggaaagtggcaaagaactttacatcaagatcattcccaacaagaatgacagaactctcaccatcattgatactggaattggaatgaccaaggctgaccttgtaaacaacttgggaacaatcgccaaatctggaactaaagccttcatggaggccctcgctgctggtgctgacatctctatgatcggtcagtttggtgtaggtttctactcagccttcctcgtcgctgacaccgtcacagtcgtctcaaaacacaacgatgacgaacagtatgtctgggagtcctctgccggtggatctttcacaatcaaatctgaccatggagaacctctcggccgtggaaccaagatcatcatgcacatgaaggaagacatgactgaattcctggaggagcgcaagatcaaagatatcgtcaagaagcactcccagttcatcggctatcccatcaaactgctcgtcgagaaggagcgagacaaggaactcagtgaagacgaagaggaagaagaagtgaagaaggaagacaaagaagaaaaagaagaagacaaggatacaccaaagatcgaagatgtagaagatgaagaagagggtaaagagaagaaaaagaagaagaagacaatcaaagaaaagtatactgaagatgaagagctgaacaagacgaaacccatctggacccgcaacccagatgacatcacaacagaagagtacggagagttctacaagtccctcacaaacgactgggaagaccacctagctgtcaaacacttctctgttgaaggccagctggaattcaaagccttattgttcgtccctcgccgtgctccattcgacctgttcgagaacaaaaagaagaagaacaacatcaaactgtatgtcagacgagttttcatcatggacaactgcgaagacctcatccctgaatacctgaacttcatcaagggtgtcgttgatagcgaggacttgcccctgaacatttctcgtgaaatgctccaacagaacaagatcctgaaagtcatccgcaagaacttggtcaagaaatgcttggaacttttcgaagagctggcagaagacaaagagaacttcaagaaattctacgaacagttcagcaagaatttgaaattaggaatccacgaagatactcaaaataggaagaaattggcagacctcctgaggtaccagacttcagccactggagacgatgtctgctcatttaaagattatgtagctcgtatgaaagagaaccagaagcatatctactacatcactggtgaaagcaaagatcaagtagctaactcctcatttgtcgagcgagtcaagaaacgcggttttgaagtaatctacatgaccgaacccatcgatgaatatgtagtccagcaaatgaaagactacgacggtaagaacctggtctcagtcacgaaagaaggattagaactgcctgaggacgaagaagaaaagaagaaatacgaggaagacaaagttaagttcgaaaccctctgcaaggtaatgaaagatatccttgacaagaaagtagagaaagttattgtgagtagcaggttagtcgaatccccatgctgtatcgtcacatcgcagtacggctggacagcaaacatggaacgtatcatgaaggctcaagcgctccgagactcttcgacaatgggctacatggcagccaagaaacatctggaaatcaaccctgaccaccctgtcatggatgctctccgagtgaaagcagaagctgagaagaacgacaagtcagtgagagatcttgttatgctgttgttcgagacggcccttctgtcctccggttttgctcttgaagatcctcaagtccatgctggccgcatccaccgaatgatcaagcttggcttaggtattgatgaagacgagccagtcatggttgaagaggagaagccagacacagccatgcctgcagctgacggagatgcagaagatgcttcaaggatggaagaagtcgattaa

SEQ ID NO: 129272 - protein, 720 aa, Bemisia tabaci
MPEDVNMEQAETFVFQAEIAQLMSLIVNTFYSNKEIFLRELISNSSDALDKIRYESLTDPSRLESGKELYIKIIPNKNDRTLTIIDTGIGMTKADLVNNLGTIAKSGTKAFMEALAAGADISMIGQFGVGFYSAFLVADTVTVVSKHNDDEQYVWESSAGGSFTIKSDHGEPLGRGTKIIMHMKEDMTEFLEERKIKDIVKKHSQFIGYPIKLLVEKERDKELSEDEEEEEVKKEDKEEKEEDKDTPKIEDVEDEEEGKEKKKKKKTIKEKYTEDEELNKTKPIWTRNPDDITTEEYGEFYKSLTNDWEDHLAVKHFSVEGQLEFKALLFVPRRAPFDLFENKKKKNNIKLYVRRVFIMDNCEDLIPEYLNFIKGVVDSEDLPLNISREMLQQNKILKVIRKNLVKKCLELFEELAEDKENFKKFYEQFSKNLKLGIHEDTQNRKKLADLLRYQTSATGDDVCSFKDYVARMKENQKHIYYITGESKDQVANSSFVERVKKRGFEVIYMTEPIDEYVVQQMKDYDGKNLVSVTKEGLELPEDEEEKKKYEEDKVKFETLCKVMKDILDKKVEKVIVSSRLVESPCCIVTSQYGWTANMERIMKAQALRDSSTMGYMAAKKHLEINPDHPVMDALRVKAEAEKNDKSVRDLVMLLFETALLSSGFALEDPQVHAGRIHRMIKLGLGIDEDEPVMVEEEKPDTAMPAADGDAEDASRMEEVD

SEQ ID NO: 129273 - DNA, 2163 bp, Bemisia tabaci
  CDS (1)..(2163)
atgccagaagacgttaacatggaacaggctgagaccttcgtatttcaagctgagattgctcagcttatgagcttgattgtcaacacattctactcaaacaaagaaatcttcttgcgagaattgatctcaaactcatcagatgccttggacaaaatccgttacgaatctctaacagacccatcccgtttggaaagtggcaaagaactttacatcaagatcattcccaacaagaatgacagaactctcaccatcattgatactggaattggaatgaccaagactgaccttgtaaacaacttgggaacaatcgccaaatctggaactaaagccttcatggaggccctcgctgctggtgctgacatctctatgatcggtcagtttggtgtaggtttctactcagccttcctcgtcgctgacaccgtcacagtcgtctcaaaacacaacgatgacgaacagtatgtctgggagtcctctgccggtggatctttcacaatcaaatctgaccatggagaacctctcggccgtggaaccaagatcatcatgcacatgaaggaagacatgactgaattcctggaggagcgcaagatcaaagatatcgtcaagaagcactcccagttcatcggctatcccatcaaactgctcgtcgagaaggagcgagacaaggaactcagtgaagacgaagaggaagaagaagtgaagaaggaagacaaagaagaaaaggaagaagacagggatacaccaaagatcgaagatgtagaggatgaagaagagggtaaagagaagaaaaaggagaagaagacaatcaaagaaaagtatactgaagatgaagagctgaacaagacgaagcccatctggacccgcaacccagatgacatcacaacagaagagtacggagagttctacaagtccctcacaaacgactgggaagaccacctagctgtcaaacacttctctgttgaaggccagctggaattcaaagccttattgttcgtccctcgccgtgctccattcgacctgttcgagaacaaaaagaagaagaacaacatcaaactgtatgtcagacgagttttcatcatggacaactgcgaagacctcatccctgaatacctggacttcatcaagggtgtcgttgatagcgaggacttgcccctgaacatttctcgtgaaatgctccaacagaacaagatcctgaaagtcatccgcaagaacttggtcgagaaatgtttggaacctttcgaagagctggcagaagacaaagagaacttcaagaaattctacgaacagttcagcaagaatttgaaattaggaatccacgaagatactcaaaataggaagaaattggcagacctcctgaggtaccagacttcagccactggagacgatgtctgctcatttaaagattatgtagctcgtatgaaagagaaccagaagcatatctactacatcactggtgaaagcaaagatcaagtagctaactcctcatttgtcgagcgagtcaagaaacgcggttttgaagtaatctacatgaccgaacccatcgatgaatatgtagtccagcaaatgaaagactacgatggtaagaacctggtctcagtcacgaaagaaggattagaactgcctgaggacgaagaagaaaagaagaaatacgaggaagacaaagttaagttcgaaaccctctgcaaggtaatgaaagatatccttgacaagaaagtagagaaagttgttgtaagtaacaggttagtcgaatccccatgctgtatcgtcacatcgcagtacggctggacagcaaacatggaacgtatcatgaaggctcaagcgctccgagactcttcgacaatgggctacatggcagccaagaaacatctggaaatcaaccctgaccaccctgtcatggatgctctccgagtgaaagcagaagctgagaagaacgacaagtcagtgaaagatcttgttatgctgttgtttgagacggcccttctgtcctccggttttgctcttgaagatcctcaagtccatgctggccgcatccaccgaatgatcaagcttggcttaggtattgatgaagacgagccagtcatggttgaagaggagaagccagacacagccatgcctgcagctgacggagatgcagaagatgcttcaaggatggaggaagttgactaa

SEQ ID NO: 129274 - protein, 720 aa, Bemisia tabaci
MPEDVNMEQAETFVFQAEIAQLMSLIVNTFYSNKEIFLRELISNSSDALDKIRYESLTDPSRLESGKELYIKIIPNKNDRTLTIIDTGIGMTKTDLVNNLGTIAKSGTKAFMEALAAGADISMIGQFGVGFYSAFLVADTVTVVSKHNDDEQYVWESSAGGSFTIKSDHGEPLGRGTKIIMHMKEDMTEFLEERKIKDIVKKHSQFIGYPIKLLVEKERDKELSEDEEEEEVKKEDKEEKEEDRDTPKIEDVEDEEEGKEKKKEKKTIKEKYTEDEELNKTKPIWTRNPDDITTEEYGEFYKSLTNDWEDHLAVKHFSVEGQLEFKALLFVPRRAPFDLFENKKKKNNIKLYVRRVFIMDNCEDLIPEYLDFIKGVVDSEDLPLNISREMLQQNKILKVIRKNLVEKCLEPFEELAEDKENFKKFYEQFSKNLKLGIHEDTQNRKKLADLLRYQTSATGDDVCSFKDYVARMKENQKHIYYITGESKDQVANSSFVERVKKRGFEVIYMTEPIDEYVVQQMKDYDGKNLVSVTKEGLELPEDEEEKKKYEEDKVKFETLCKVMKDILDKKVEKVVVSNRLVESPCCIVTSQYGWTANMERIMKAQALRDSSTMGYMAAKKHLEINPDHPVMDALRVKAEAEKNDKSVKDLVMLLFETALLSSGFALEDPQVHAGRIHRMIKLGLGIDEDEPVMVEEEKPDTAMPAADGDAEDASRMEEVD

SEQ ID NO: 129275 - DNA, 2343 bp, Cryptococcus neoformans
  CDS (1)..(2343)
atgaggctgcctaggctgttctctgtcgtgcttgcctgcatcgcgggtctttccgtggtttgcgggcaggaagtcaagacattcaagtacgagtctgatattactcgtctgagatctctagttatccattctctctactcccacaaagatgtcttccttcgggaacttctttcaaacgccaacgatgccctcgagaaacttcgacttactgcactcaccgatcgatctgtcatgtctgcgggtgaaggaaacatcactattgaagtagtattggacgaaggaagtgccggcaagactggacaaattatcatcaaagataccggtatcggtatgactgaacatgaactggagaagaacttgggaacaattgcaagaagtggaacgagcgagtttttgaagcgagctgatgctgggggtgtagatgggaatttgatcggacagttcggtcttggtttctacagctgtttccttgtctcttccacagtccgcgtctcttctcttcctcctgcgaccaaagagaaccccaatcccgtccaacacacttttgtctcatcttcctccggggattcatttgagattttcccagaccctcgcggaaacactttgggtcggggcaccgagattgtgctcacaattgaggaggaagagaaggagtggttgtctgttaccaagctcaaaggtttgattgagaagcactctgccttttccactactttccccatttatatcaaggaaaagaaaacatcccaggttcccatcgaatctgaagatgaatttgacgacgaagatgcgatcgttgacgagaacgagcaaaagttcgagactgtaacagaagagcaatgggtccgcgtcaatgataagcctcctatttggatgaggcaacccaaggaagttgaggagaccgaataccgggacttcttcacggctctcgccaaagaccctcaagctgagactttgggttggtctcatttcaagggtgatactggcgatggtgtctcattccgcgccattatgtacatcccatcccagcttcccaaggacttttggcagaagattactagtggcatcaataacgttaggttgatggtaaagagggtcttcattacagatgacttgggtgaagaattcatgccaagatggctgagcttcttgaaggtggtcgtggatgctgatgatcttcccctcaatgtatcccgagaaacccttcagaacactcgtttcctctcgcaacttcagcgaatcctcgtccgaaaggctatcgacctcttcacccgcatcgccaccgaacagcccaagaagtacgaagaaatctctcagctttatggaaacgccttccgcttgggagtactggagagtaaaaaggaccatgtcaagcttgccaaactcttgagatttgagagcaccaggaccaactacacgagcttggaggagtatgtggagaataggaaagagggccagactcagatctactatatggcgggtgtcggggagaagattgatgatttgaagcgatcgccattcgtcgagaagctcattgctcgagggtacgaggtcctgctcttgaacctcccttccgatgagcctatgatgggtgctttgggcaacttcatgggaatgaggactcaagatgtttcaaagaaaggcctgaagtatggtgatgagaatgaacacgaggccgagaagaaggaactggaggcccaaaaaattgctttcaaaccccttgtcgattggttgaagaaggatctgaaaggtcagatcagtgacgttgtcctcaccaaccggctagtcacctcaccctgtaccgtcgtcgtcgaccatatgggctggtctgccaacatgcagcgaattatggcggctcaggctgaggctcatgacgaccctatgttccaagttatgaagaacttacccaaggtgctcgagatcaacccgaaatcacctctcattgaaggcctcttggaaaaggttttagagttgcctacgacagatgaggaggacgaggatgcgttgaagaagagcgacgaagaagaggaattgactgaaactgtcagggtgttgttggacaccaccctggtcaggagtggcttcagtgttgctgaccccactagctactttgagcgcgtagaagccctcctccggaagagccttggtgtatccctttctgcacagcctcaagttgatgtccgacctgcccctccaactgccatgggccctcttgacgaagatggcgttccttctgacgactttgattacgacaatgggatggcccaagaagccatgggtggagctgatgaatggttagactgggctgatatgaagaagcaaatggggcatgacgagctctaa

SEQ ID NO: 129276 - protein, 780 aa, Cryptococcus neoformans
MRLPRLFSVVLACIAGLSVVCGQEVKTFKYESDITRLRSLVIHSLYSHKDVFLRELLSNANDALEKLRLTALTDRSVMSAGEGNITIEVVLDEGSAGKTGQIIIKDTGIGMTEHELEKNLGTIARSGTSEFLKRADAGGVDGNLIGQFGLGFYSCFLVSSTVRVSSLPPATKENPNPVQHTFVSSSSGDSFEIFPDPRGNTLGRGTEIVLTIEEEEKEWLSVTKLKGLIEKHSAFSTTFPIYIKEKKTSQVPIESEDEFDDEDAIVDENEQKFETVTEEQWVRVNDKPPIWMRQPKEVEETEYRDFFTALAKDPQAETLGWSHFKGDTGDGVSFRAIMYIPSQLPKDFWQKITSGINNVRLMVKRVFITDDLGEEFMPRWLSFLKVVVDADDLPLNVSRETLQNTRFLSQLQRILVRKAIDLFTRIATEQPKKYEEISQLYGNAFRLGVLESKKDHVKLAKLLRFESTRTNYTSLEEYVENRKEGQTQIYYMAGVGEKIDDLKRSPFVEKLIARGYEVLLLNLPSDEPMMGALGNFMGMRTQDVSKKGLKYGDENEHEAEKKELEAQKIAFKPLVDWLKKDLKGQISDVVLTNRLVTSPCTVVVDHMGWSANMQRIMAAQAEAHDDPMFQVMKNLPKVLEINPKSPLIEGLLEKVLELPTTDEEDEDALKKSDEEEELTETVRVLLDTTLVRSGFSVADPTSYFERVEALLRKSLGVSLSAQPQVDVRPAPPTAMGPLDEDGVPSDDFDYDNGMAQEAMGGADEWLDWADMKKQMGHDEL

SEQ ID NO: 129277 - DNA, 2121 bp, Paracoccidioides brasiliensis
  CDS (1)..(2121)
atggcgtctgagaccttcgaattccaggctgagatctctcagctcctctccctcattatcaacaccgtctactcgaacaaggagatcttcctgcgagaactcatctccaactgttccgatgccctcgacaagatccgctatgaggccctctccgaccccggcaaactcgactccaacaaggatctccgcatcgatatcatccctgacaaaacaaacaaaaccctcaccatccaggataccggtattggtatgaccaaagctgacctcgtcaacaacctgggtactattgcccgctctggcactaagcaattcatggaagctctcaccgctggtgccgatatttctatgattggtcagtttggtgtcggcttctactctgcctacctcgtggccgacaaggtcaccgtcatttccaagcacaacgatgacgaacagtacatctgggagtccagcgccggtggcaccttcaagatcacccaggataccgatggagagtcccttggccgtggaaccaagatgatcctgcacctcaaggacgagcagaccgagtacctgaacgagagcaaaatcaaggaggtcgtcaagaagcactccgagttcatctcctaccccatctacctccatgtcgtgaaggaggttgagaaagaggtcgtcgatgaggatgctgaggaggtcaaagatgaggacgaagacaaggctcccaaggtcgaggaggttgatgatgaggaagaggagaaaaagaaggaaaagaagaccaagaaaatcaaagagagcaaaattgaggaggaagagcttaacaagactaagcccatctggactcgcaaccctgctgatatcactcaggaggaatatgcctctttctataagactctgtccaatgactgggaggaccatcttgctgtcaagcacttctccgttgaaggtcaactcgagttccgcgccatcctcttcgtgcccaagcgcgctcctttcgacctcttcgagaccaagaagaccaagaacaatatcaaactctacgttcgtcgtgtcttcatcaccgatgacgccactgatctcatccccgaatggctcagcttcatcaagggtgtcgtcgactctgaggaccttcctctcaacctttctcgtgagaccctccagcagaacaagatcatgaaggtcatcaagaagaacattgtcaagaagaccctcgagctctttaccgagatcgccgaagaccgtgagcaattcgacaagttctactctgctttcagcaagaacatcaagctcggtatccacgaggatgctcagaatcgccctgcccttgctaagctcctccgcttcaactccaccaagtccggcgatgagaccacgtcccttgccgactacgtcacccgcatgcaggagcatcagaagcaaatgtactacatcaccggcgagtctctcaaggctgtccagaagtcccccttccttgacaccctcaaggagaagaacttcgaggttctcttcctcgtcgaccccattgatgagtatgccatgacccaactcaaggaattcgacggcaagaaactcgtcgacatcaccaaggactttgagctcgaggaaaccgacgaggagaagaagacgcgcgaagccgaagagaaggaattcgaaggccttgccaaagccctcaagaacgtcctaggcgacaaagtcgagaaagtagtcgtctctcacaaattaattggctccccctgtgccatccgcactggccaattcggctggtccgcgaacatggaacggatcatgaaagcccaggccctccgcgacacatccatgagctcttacatgtcttccaagaagacattcgaaatttccccgcgctcccccatcatcaaggaactcaagaagaaggtcgaagcggatggcgagaacgaccgtactgtcaagtctattacgcagttgctctttgagacctcgttgctcgtctctggattcactattgaggaacccgctggctttgcagagcggatccataagcttgtttcacttggattgaatgttgatgaggaatcagagaaagaagggggggatagtacggataaggaggctgcgcctgctgcggctgagttggcgggtgagagtgcaatggaggaggttgattag

SEQ ID NO: 129278 - protein, 706 aa, Paracoccidioides brasiliensis
MASETFEFQAEISQLLSLIINTVYSNKEIFLRELISNCSDALDKIRYEALSDPGKLDSNKDLRIDIIPDKTNKTLTIQDTGIGMTKADLVNNLGTIARSGTKQFMEALTAGADISMIGQFGVGFYSAYLVADKVTVISKHNDDEQYIWESSAGGTFKITQDTDGESLGRGTKMILHLKDEQTEYLNESKIKEVVKKHSEFISYPIYLHVVKEVEKEVVDEDAEEVKDEDEDKAPKVEEVDDEEEEKKKEKKTKKIKESKIEEEELNKTKPIWTRNPADITQEEYASFYKTLSNDWEDHLAVKHFSVEGQLEFRAILFVPKRAPFDLFETKKTKNNIKLYVRRVFITDDATDLIPEWLSFIKGVVDSEDLPLNLSRETLQQNKIMKVIKKNIVKKTLELFTEIAEDREQFDKFYSAFSKNIKLGIHEDAQNRPALAKLLRFNSTKSGDETTSLADYVTRMQEHQKQMYYITGESLKAVQKSPFLDTLKEKNFEVLFLVDPIDEYAMTQLKEFDGKKLVDITKDFELEETDEEKKTREAEEKEFEGLAKALKNVLGDKVEKVVVSHKLIGSPCAIRTGQFGWSANMERIMKAQALRDTSMSSYMSSKKTFEISPRSPIIKELKKKVEADGENDRTVKSITQLLFETSLLVSGFTIEEPAGFAERIHKLVSLGLNVDEESEKEGGDSTDKEAAPAAAELAGESAMEEVD

SEQ ID NO: 129279 - DNA, 2145 bp, Liriomyza sativae
  CDS (1)..(2145)
atgactactgaagaagttgagacatttgctttccaagctgagattgctcagttgatgtcattgattatcaacacattttactccaataaggaaatcttcttgcgtgaattgatttcaaacgcttctgatgctctagacaaaatccgctacgaatcccttactgatccttcaaagcttgacagtggcaaagaattgtacattaagataattccaaacaaagctaatggcacactgacactcatcgatactggtattggtatgaccaaaacagatttggtgaacaacttgggtacaattgccaagtctggtactaaggcattcatggaggcattacaagctggtgctgatatctctatgattggacaatttggtgtaggtttttactctgcctacttggtagcagacaaggtcactgttacctccaaacacaatgatgatgaacagtatgtgtgggaatcatcagctggtggatcattcactgtacgtcttgatgatggtgagccattgggtcgtggaaccaaaattgtgttacacatcaaggaggatcaagctgaatacttggaagagagcaaaatcaaagaggtggtcaacaagcactctcaattcattggttatcctatcaaattgttagttgaaaaagagcgtgaccaagaagtaagtgacgatgaagccgaagatgaaaacaaagatgaaaagaaaatggataccgatgaacctaagattgaagatgttggtgaagatgaagatgccgacaagtcagacggcaaaaagaaaaaaactgttaaggttaagtacaccgaggatgaggaattgaacaaaactaaacccatctggacacggaatcccgatgatatttctcaagaagaatacggtgaattctacaaatccttgaataacgactgggaagatcatctagctgtcaaacacttctctgtggagggacaacttgaattccgtgctcttttgtttgtgccccgtcgtacacccttcgatttgtttgaaaaccaaaagaagcgcaacaacatcaagctttatgtgcgccgtgtgttcatcatggacaactgtgaagatttgattccagaatacttgaactttattcgtggtgttgtagactctgaagatttgccattgaacatttctcgtgaaatgttgcaacaaaacaaggtgcttaaagttatacgcaagaacttggttaagaaaaccatggaattgattgaggagctaactgaagacaaggaattgtacaaaaagttctacgatcaatttagcaagaaccttaaattgggtgtgcacgaagacagcacaaaccgctccaaattggctgatttcttgcgtttccacacctctgcgtctggtgatgattcctgctcgctggccgattatgtatcacgcatgaaggagaaccaaaagcacatttacttcattactggtgaatccaaggatcaagtcagcaattctgcattcgtcgaacgtgtgaaagcacgtggcttcgaagttgtctacatgactgagccaattgatgaatatgttattcaacacctcaaggagtacaagggtaaacaattggtgtctgtgaccaaagaggggttggaattgccagaggatgaagctgagaagaagaagcgtgaagaagacaaagccaaatttgagaacttgtgcaaattgatcaaatcaattttggacaataaagttgagaaagtggttgtatcaaaccgtctagtcgactctccttgctgcattgttacatctcaatatggttggtcagctaacatggagcgcataatgaaggcgcaagcactgcgtgactcatcaaccatgggctacatgagtggcaagaagcatttagaaattaatcctgaccatcccatcattgaaactttgcgtgtaaagtctgaagctgacaaaaatgacaaagctgtaaaagatttagtcattttgttgttcgagacctctttgctgtcatctggtttctcattggacagccctcaagtgcacgcctcccgcatttaccgcatgatcaaattgggcttgggtattgatgaagaggagcccatggccactgaagaaatcgaaagtgccggtgatgccccacaacaaatggtagatgatacagaagatgcttcacacatggaggaagtcgattaa

SEQ ID NO: 129280 - protein, 714 aa, Liriomyza sativae
MTTEEVETFAFQAEIAQLMSLIINTFYSNKEIFLRELISNASDALDKIRYESLTDPSKLDSGKELYIKIIPNKANGTLTLIDTGIGMTKTDLVNNLGTIAKSGTKAFMEALQAGADISMIGQFGVGFYSAYLVADKVTVTSKHNDDEQYVWESSAGGSFTVRLDDGEPLGRGTKIVLHIKEDQAEYLEESKIKEVVNKHSQFIGYPIKLLVEKERDQEVSDDEAEDENKDEKKMDTDEPKIEDVGEDEDADKSDGKKKKTVKVKYTEDEELNKTKPIWTRNPDDISQEEYGEFYKSLNNDWEDHLAVKHFSVEGQLEFRALLFVPRRTPFDLFENQKKRNNIKLYVRRVFIMDNCEDLIPEYLNFIRGVVDSEDLPLNISREMLQQNKVLKVIRKNLVKKTMELIEELTEDKELYKKFYDQFSKNLKLGVHEDSTNRSKLADFLRFHTSASGDDSCSLADYVSRMKENQKHIYFITGESKDQVSNSAFVERVKARGFEVVYMTEPIDEYVIQHLKEYKGKQLVSVTKEGLELPEDEAEKKKREEDKAKFENLCKLIKSILDNKVEKVVVSNRLVDSPCCIVTSQYGWSANMERIMKAQALRDSSTMGYMSGKKHLEINPDHPIIETLRVKSEADKNDKAVKDLVILLFETSLLSSGFSLDSPQVHASRIYRMIKLGLGIDEEEPMATEEIESAGDAPQQMVDDTEDASHMEEVD

SEQ ID NO: 129281 - DNA, 2145 bp, Liriomyza huidobrensis
  CDS (1)..(2145)
atgactactgaagaagttgagacatttgctttccaagctgagattgctcagttgatgtcattgattatcaacacattttactccaataaggaaatcttcttgcgtgaattgatttcaaacgcttctgatgctctagacaaaatccgctacgaatcccttactgatccttcaaagcttgacagtggcaaagaattgtacattaagataattccaaacaaagctaatggcacactgacactcatcgatactggtattggtatgaccaaaacagatttggtgaacaacttgggtacaattgccaagtctggtactaaggcattcatggaggcattacaagctggtgctgatatctctatgattggacaatttggtgtaggtttttactctgcctacttggtagcagacaaggtcactgttacctccaaacacaatgatgatgaacagtatgtgtgggaatcatcagctggtggatcattcactgtacgtcttgatgatggtgagccattgggtcgtggaaccaaaattgtgttgcacatcaaggaggatcaagctgaatacttggaagagagcaaaatcaaagaggtggtcaacaagcactctcaattcattgggtatcctatcaaattgttggtcgaaaaagaacgtgatcaagaagtgagcgatgatgaagctgatgaggagaagaaagaagataagaaaatggacactgatgaacctaaaattgaggatgttggtgaggatgaagatgctgacaagaaagatgacaagaagaagaagactgtcaaggttaagtacactgaagatgaggaattgaacaaaactaaacccatttggacacgcaacccagatgatatttctcaagaagaatatggtgaattctacaaatccttgaccaatgactgggaagatcatctagctgtcaaacatttctcagtggaaggtcaacttgaattccgtgctcttttattcgtgccacgtcgtactccattcgatttgttcgaaaaccaaaagaagcgcaacaacatcaaactttatgtgcgtcgtgtattcattatggacaattgtgaagatttgatacccgaatatttgaacttcatacgtggtgtagtcgactctgaagatttgccattaaacatttcacgtgaaatgttgcaacaaaacaaggttcttaaagttatacgcaagaatttggtaaagaagaccatggaattgattgaggagcttactgaagacaaagaaatgtacaagaacttctacaatcaattcagcaagaacttgaaattgggtgtgcatgaagacagcaccaatcgttccaaattggctgatttcttgcgtttcaccacctctgcttccggtgatgattcctgctcgctggccgactatgtttcacgcatgaaggagaaccaaaagcatatttactttatcactggtgaatccaaagatcaagtcagcaactctgcatttgttgaacgtgtcaaggctcgtggctttgaagtggtttatatgactgaacccattgatgaatacgtgattcaacatcttaaagaatacaaaggcaaacaattggtgtctgtaaccaaggaaggtttagaattgccagaagatgaagctgagaagaagaagcgtgaagaagacaaggctaaatttgagaacttgtgcaaattgattaaatctattttggacaacaaagttgagaaagttgtcgtatctaaccgtctagtcgattctccttgctgtattgttacatcacaatacggttggtctgctaacatggaacgtattatgaagacacaagcattgcgtgactccaacaccatgggctacatgagtggcaagaaacatttggaaattaatccagatcatcccattattgaaacattgcgtgaaaagtcggaagctgataaaaatgacaaggctgttaaagatttagtcattttattgtttgagacctccttgttgtcatctggtttctctttggacagcccacaagtacatgcttcacgtatttaccgcatgatcaaattgggacttggtattgatgatgaagaacccatggcaactgaagaaatcgaaagtgccggtgatgctccacagacaatggttgatgatacagaagatgcttcacatatggaagaagttgattaa

SEQ ID NO: 129282 - protein, 714 aa, Liriomyza huidobrensis
MTTEEVETFAFQAEIAQLMSLIINTFYSNKEIFLRELISNASDALDKIRYESLTDPSKLDSGKELYIKIIPNKANGTLTLIDTGIGMTKTDLVNNLGTIAKSGTKAFMEALQAGADISMIGQFGVGFYSAYLVADKVTVTSKHNDDEQYVWESSAGGSFTVRLDDGEPLGRGTKIVLHIKEDQAEYLEESKIKEVVNKHSQFIGYPIKLLVEKERDQEVSDDEADEEKKEDKKMDTDEPKIEDVGEDEDADKKDDKKKKTVKVKYTEDEELNKTKPIWTRNPDDISQEEYGEFYKSLTNDWEDHLAVKHFSVEGQLEFRALLFVPRRTPFDLFENQKKRNNIKLYVRRVFIMDNCEDLIPEYLNFIRGVVDSEDLPLNISREMLQQNKVLKVIRKNLVKKTMELIEELTEDKEMYKNFYNQFSKNLKLGVHEDSTNRSKLADFLRFTTSASGDDSCSLADYVSRMKENQKHIYFITGESKDQVSNSAFVERVKARGFEVVYMTEPIDEYVIQHLKEYKGKQLVSVTKEGLELPEDEAEKKKREEDKAKFENLCKLIKSILDNKVEKVVVSNRLVDSPCCIVTSQYGWSANMERIMKTQALRDSNTMGYMSGKKHLEINPDHPIIETLREKSEADKNDKAVKDLVILLFETSLLSSGFSLDSPQVHASRIYRMIKLGLGIDDEEPMATEEIESAGDAPQTMVDDTEDASHMEEVD

SEQ ID NO: 129283 - DNA, 2157 bp, Opistophthalmus carinatus
  CDS (1)..(2157)
atgcctgaagaagttgaaatgagcaatgaaggcgaagcagagacctttgccttccaggcagagatcgcccagttgatgagcctgatcatcaacacattctattcaaacaaggaaatatttctcagggaattgatctccaattcctcagatgcccttgacaagatccggtatgaaagcttaactgatccatccaagcttgagagtggtaaagatttgttcatcaaaatcattcctaacaaggatgaccgcacccttactattgttgatactggtgttggaatgacgaaggctgaccttgtaaataatctagggacaatcgcaaaatctggcaccaaagcatttatggaagctctgcaggccggagctgatatttcaatgattgggcagtttggtgtgggtttctattcagcttacttagttgctgataaggtgactgtggtaaccaagcataatgatgatgaacagtacatgtgggaatcctctgctggtggttccttcactgtcaggccagataatggtgaacaccttggacgtggtacaaagatcatactgcacttgaaggaagaccagactgaatacttagaagaaaagcgaatcaaggatgtagtgaagaagcacagccagtttattggatatccaatcaaactgcttgttcagaaggaaagagaaaaagaagtgtctgatgatgaagcagaggaagaggagaaagagaagaaagaagaggaagagagtgcagaagaaaagccaaaaatagaagatgtaggtgaagaggaagaagagaaggaaaagaagaaaaagaaaatcaaggagaaatacacagaggatgaagagcttaacaagaccaagccaatttggatgaggaatccagatgacatcagcaaggaagagtatggtgaattctacaagagtctgactaatgactgggaagaacatttggctgtccgtcacttctcagttgagggccagcttgagtttagggcactgctatttgttccaaagagagcaccctttgacctctttgaaaataagaaacaaaagaataatatcaagctatatgttaggagagtttttattatggacaattgtgaagatctgattccagaataccttaacttcatcaaaggagtagttgattccgaagatcttcccctgaacatttctcgtgaaatgctgcagcaaaatagaattctaaaagttattaggaagaatctagtgaagaagtgcttggaactttttgatgaagttagcgaagatatggaaatgtacaagaaattctatgaacagtacagcaagaaccttgagctcggtatccacgaagactcccaaaatagaaagaagttggccgaatacttaaggtactacacatcggcatctggtgatgaaatgtcttcactgaaggactatgtgtcacgaatgaaggagaaccaaaagcatatatacttcatcactggggaatcaaaggaccgtgttgcaaattctgcttttgtagaaagggttaggaaacgtggctttgaggtagtgtacatggtggagccaattgacgaatactgtgtccagcagctgaaggagtatgatggaaagcagctaatctcagtaaccaaagaaggcttggaactgccggaagatgaagaggagaagaagaaacgtgaagaagacaagacaaagtatgagaacttgtgcaaagtcatgaaagatatcctagacaagaaagtagaaaaggttgttgtatccaataggcttgtaagttctccctgctgtattgtgactagtcagtatggttggacagcagatatggagagaatcatgagccaggctgtgcgtgataacagtaccatgggttacatggcagccaaaaagcacttagagatcaatccggatcatcccactattgatactctaaggcagaaagctgatgctgacaagaatgataaatctgtcaaggaccttgtcatgctgcttttcgagacatcattgttatgctctggtttcacattagaagagcctcaaatgcatgcatctcgcatctatagaatgattaagttgggacttggtattgatgaggatgataccggtgcatctggagacacagtagaagaagaaatgcctccactagaaggggatgaagaagatgcatccagaatggaagaagtagattaa

SEQ ID NO: 129284 - protein, 718 aa, Opistophthalmus carinatus
MPEEVEMSNEGEAETFAFQAEIAQLMSLIINTFYSNKEIFLRELISNSSDALDKIRYESLTDPSKLESGKDLFIKIIPNKDDRTLTIVDTGVGMTKADLVNNLGTIAKSGTKAFMEALQAGADISMIGQFGVGFYSAYLVADKVTVVTKHNDDEQYMWESSAGGSFTVRPDNGEHLGRGTKIILHLKEDQTEYLEEKRIKDVVKKHSQFIGYPIKLLVQKEREKEVSDDEAEEEEKEKKEEEESAEEKPKIEDVGEEEEEKEKKKKKIKEKYTEDEELNKTKPIWMRNPDDISKEEYGEFYKSLTNDWEEHLAVRHFSVEGQLEFRALLFVPKRAPFDLFENKKQKNNIKLYVRRVFIMDNCEDLIPEYLNFIKGVVDSEDLPLNISREMLQQNRILKVIRKNLVKKCLELFDEVSEDMEMYKKFYEQYSKNLELGIHEDSQNRKKLAEYLRYYTSASGDEMSSLKDYVSRMKENQKHIYFITGESKDRVANSAFVERVRKRGFEVVYMVEPIDEYCVQQLKEYDGKQLISVTKEGLELPEDEEEKKKREEDKTKYENLCKVMKDILDKKVEKVVVSNRLVSSPCCIVTSQYGWTADMERIMSQAVRDNSTMGYMAAKKHLEINPDHPTIDTLRQKADADKNDKSVKDLVMLLFETSLLCSGFTLEEPQMHASRIYRMIKLGLGIDEDDTGASGDTVEEEMPPLEGDEEDASRMEEVD

SEQ ID NO: 129285 - DNA, 2963 bp, Chlamydomonas reinhardtii
  CDS (120)..(2552)
cacaagctaacttgacgatctaaacctagcagaggcttgagtgggttccactcggcccagagttttcgatcatttcggcggcttccgtgtttgctgacgcgcgcaagcgcttgaccaccatgatgctacgcggtctgtcctctggcatgcgccaggcccgcgctcagagcagcgcctcggctgcctctgctgcccggccgctgccgctgctggcgcgcggcaacggcgtcagctcggcccttctgagcggcgcttcgccgtgcgccgccgtcaccgcggcggccagcctgcgcccgctgcccgccggccgtggcccagtgctgatgcgcgccgccgccacggaggctgcgtccggctcggagaccttcacctaccaggccgaggtcgaccgcctgatggacatgattgtcaacagcctgtactcgaaccgcgaggtgttcctgcgcgagctcatctccaacgccagtgatgcgctggacaaggcgcgcttcctgtccctgacggacccctcggtgctggcgggccgcgaggagctggacatccgcatcagcgccgacaaggagaagggcaccctggtcatcgaggactcgggcatcggcatgtctcgcgagcagctgctgtccaacctgggcaccatcgcgcgctccggcacccgcaagttcatggaggccatggcggccaagggcgacaccaacctgattggccagttcggcgtgggcttctactcggccttcctggtggcggaccgcgtcatggtgcagagcaagagccccgaggaggccaagcactgggtgtgggaggccaaggccggcagccaccagtactcgatccgcgaggacgaggccaaggacctggtgcgcggcactcgcatcacgctgtacctgaaggaggacgccgccgagatggccgacactgtcaagattacgcagctgatcaagcagtactcgcagttcatcgccttccccatcaaggtctacgcgcccaagaaggagccgcgcaaggtggtggacgaggaggccaccaagaagaagcaggcggcggcggacgccaaggccaaggaggcgggtgaggaggcggccaagccggtggagccggtcatgaagaccgagtacgacgaggtgtgggactggcgcctggagaacgagaacaagcccatctggacgcgcagccccaaggacgtgtcggagaccgcctacaacgacttcttcaagaccacctttggcgagttcctggaccccctggcgcacgtgcacttcaacgtggagggcaccatcgagttctcctccatcctctacatccccggcatggcgcccttcgagcagcagaacatgcagcagcgctccaagtccatcaagctgtacgtcaagcgcgtcttcatctctgatgagtttgatgaggacctcatgccgcgctacctggccttcgtcaagggtgtggtggacagctccgacctgccgctcaacgtcagccgcgagatcctgcaggagagccgcatcgtgcgcgtaatccgcaagcagctcgtgcgcaggtccattgagatgctggaggagctggctggcaaggagggcggcgaggactacaagaccttctgggaggcgttcggccgcaacatcaagtacggcgtgatcgaggacaccgagaaccgcgagcgcctgtccaagctgctgcgcttctccagcagcaaggccgaggacagcctcacctcgctggacgagtacgtgggccgcatgggcgccaaccagaagaccatctactacatggccgccgacagcgtggcggcggcgcgcgcggcgcccttcatggaggccatggtggccaagggcatcgaggtgctgtacctgaccgagcccattgacgaggcctgcgtgaccaacctgggcaagtacggccccgacaagaacggcccgcagtacgagctggtggacgtgagcaaggagggcgtgagcctggacgagggcgaggatgagaagaagaaggcggaggaggtggccaaggacatggcgccggtggtggacttcctcaagaaggccctgggcgagcgcgtggagaaggtgactgtgtccaaccgcctactagacagcccctgcgcgctggtgaccagcaagttcggctggtccgccaacatggagcgcatcatgcgcagccaggcgctgggcgacgcgcgcgccatggagtacatgaagggccgcaagattatggagatcaaccccaaccacgacattattgccggcatcaagaccctgctcaaggagaaggacgaggaccgcgcccgcgacctgtcggagctgctgtacgagacggcgctcatcacctcgggcttccaggtggacagccccaaggactacgcctccaaggtgttcacgctcatgaagatcgcgctgggctacgacatcctgtcggaggccgaggagcaggcggcggcggcggcgccccaggcggctgaggcggcggcggcgcccaaggccgctgaggcggcggcggtgcccaaggtggaggcgacgccggtggatgcggaggtggtgtcggatgacccctggaagaagtccgcgtaaggcgagggcaagcgtttggattcggaggtggacggagcagggggcactaggtagactgacagactcgatgtggagtggagcgggtggattggccaaggcgccgcaagtacaccaagtatggacttgtcgacgagggactttgtgaccgagcgggttgtgcgtgccgagggaggtgtgtcatagcgtttgactgtgcgaagttttgacccatgtgcactgaatcggactcacaagacctacacagatacaagatagcagaggactgtgctgtagcagcgcacaaggagacagagcggcggcggatcctttcattgggggtgttcggcggacggacaaatgcacttttgcagcaagagatacggtgcggattcagcgctgtagcagccctgtaagcatggatcgaccaaaaaa

SEQ ID NO: 129286 - protein, 810 aa, Chlamydomonas reinhardtii
MMLRGLSSGMRQARAQSSASAASAARPLPLLARGNGVSSALLSGASPCAAVTAAASLRPLPAGRGPVLMRAAATEAASGSETFTYQAEVDRLMDMIVNSLYSNREVFLRELISNASDALDKARFLSLTDPSVLAGREELDIRISADKEKGTLVIEDSGIGMSREQLLSNLGTIARSGTRKFMEAMAAKGDTNLIGQFGVGFYSAFLVADRVMVQSKSPEEAKHWVWEAKAGSHQYSIREDEAKDLVRGTRITLYLKEDAAEMADTVKITQLIKQYSQFIAFPIKVYAPKKEPRKVVDEEATKKKQAAADAKAKEAGEEAAKPVEPVMKTEYDEVWDWRLENENKPIWTRSPKDVSETAYNDFFKTTFGEFLDPLAHVHFNVEGTIEFSSILYIPGMAPFEQQNMQQRSKSIKLYVKRVFISDEFDEDLMPRYLAFVKGVVDSSDLPLNVSREILQESRIVRVIRKQLVRRSIEMLEELAGKEGGEDYKTFWEAFGRNIKYGVIEDTENRERLSKLLRFSSSKAEDSLTSLDEYVGRMGANQKTIYYMAADSVAAARAAPFMEAMVAKGIEVLYLTEPIDEACVTNLGKYGPDKNGPQYELVDVSKEGVSLDEGEDEKKKAEEVAKDMAPVVDFLKKALGERVEKVTVSNRLLDSPCALVTSKFGWSANMERIMRSQALGDARAMEYMKGRKIMEINPNHDIIAGIKTLLKEKDEDRARDLSELLYETALITSGFQVDSPKDYASKVFTLMKIALGYDILSEAEEQAAAAAPQAAEAAAAPKAAEAAAVPKVEATPVDAEVVSDDPWKKSA

SEQ ID NO: 129287 - DNA, 2154 bp, Chiromantes haematocheir
  CDS (1)..(2154)
atgcctgaggaagccaccatggaggatgtggagaccttcgccttccaggcggagatcgcccagttgatgagcttgatcatcaacactttctacagcaacaaagaaatcttcctgcgagaactcatttccaacagctctgatgccctggacaagatccgctacgagtccctcacagacccctccaagctggagtctggcaaggagctcttcatcaaactggtgcccaacaagaacgaccgcacactcaccatcattgacagtggcgtcggcatgaccaaggctgacctggtgaacaacctgggcaccatcgccaagtccggcaccaaggccttcatggaggcactgcaggctggtgctgatatctctatgattggacagtttggtgtgggcttctactctgcctacctggtggccgacaaggttaccgtagtctcaaggaacaacgatgacgagcagtacgtgtgggagtcctcagctggaggttcattcaccgtgcgcactgaccatggtgagccagtgggccgtggcaccaggatcaccctgcatctgaaggaagaccagaccgagtacttggaggagcgccgcatcaaggagatcgtaaagaaacactcccagttcattggctaccccatcaagctgcttgtggagaaggagagggacaaggaggtgtcagatgatgaggaggaggagaaggaagaggaagagaaggatgaggaggaggacgagaagccaaagatcgaagatgtgggtgaggatgaagatgctgacaagaaggaaggtggcaagaaaaagaagactgtgaaggagaagtacacagaggatgaggagctgaacaagaccaagcccctgtggacccgcaaccctgatgacatttctcaggaagagtacggagagttctacaaatccctcaccaacgactgggaggaccacctggctgtcaagcacttcagtgttgagggtcaactggagttcagggcgctgctcttcctgccccgccgcgcacccttcgacctctttgagaaccgcaagcagaagaacaagatcaagctgtacgtgcgccgtgtcttcattatggagaactgcgaggagctgatcccagagtacctcaacttcctgaatggtgtggtggattcagaggacttgccactgaacatctcccgtgagatgttgcagcagaacaagatcctgaaggttattcgcaagaacttggtcaagaaagccctggagctctttgaggagctgatagaggacaaggacaattacaaaaagttctatgagaacttctccaagaacatcaagctgggcatccacgaggactctaccaaccgtaagaaactggcagagttcctgcgctaccacacctccgcctctggtgatgagatgtcctccctcaaggactatgtgtcccgcatgaaggagaaccagaagcagatctactacatcactggcgagagcgggagcaggtgcacaactgctgccttcgtagaaagggtgaagaagcgtggcttcgaggtggtgtacatggtggagccaatcgatgaatactgtgtccagcagctcaaggagtacggtggcaagcagctggtgtctgtcaccaaggaaggtctggaactcccagaggacgatgatgaaaagaagaaactggaggagcagaaggccaagtttgagaacctgtgcaaagttgtgaaggacatcctggacaagcgtgtggagaaggtggtggtgagcaacaggctggtgacctcgccctgctgtatcgtgacttcccagtacgggtggacggccaacatggagcgtatcatgaaggctcagctgcgggacacctccaccatgggttacatggctgccaagaagcacctcgagatcaacccagaccacagcatcatcgagaccctccgccagaaggccgatgctgacaagaacgacaagtctgtcaaggacctcgtcatgctgctctttgagagtgccctcctctcatctggcttcacccttgaggaccctggcgtgcacgctggccgcatctacagaatgatcaagcttggcctgggcattgatgaggacgacgcccctgctgaggacaatgctgaaaccgcggaagagatgccgcccctggaggacgaagaggacacttcccgcatggaggaagtggactaa

SEQ ID NO: 129288 - protein, 717 aa, Chiromantes haematocheir
MPEEATMEDVETFAFQAEIAQLMSLIINTFYSNKEIFLRELISNSSDALDKIRYESLTDPSKLESGKELFIKLVPNKNDRTLTIIDSGVGMTKADLVNNLGTIAKSGTKAFMEALQAGADISMIGQFGVGFYSAYLVADKVTVVSRNNDDEQYVWESSAGGSFTVRTDHGEPVGRGTRITLHLKEDQTEYLEERRIKEIVKKHSQFIGYPIKLLVEKERDKEVSDDEEEEKEEEEKDEEEDEKPKIEDVGEDEDADKKEGGKKKKTVKEKYTEDEELNKTKPLWTRNPDDISQEEYGEFYKSLTNDWEDHLAVKHFSVEGQLEFRALLFLPRRAPFDLFENRKQKNKIKLYVRRVFIMENCEELIPEYLNFLNGVVDSEDLPLNISREMLQQNKILKVIRKNLVKKALELFEELIEDKDNYKKFYENFSKNIKLGIHEDSTNRKKLAEFLRYHTSASGDEMSSLKDYVSRMKENQKQIYYITGESGSRCTTAAFVERVKKRGFEVVYMVEPIDEYCVQQLKEYGGKQLVSVTKEGLELPEDDDEKKKLEEQKAKFENLCKVVKDILDKRVEKVVVSNRLVTSPCCIVTSQYGWTANMERIMKAQLRDTSTMGYMAAKKHLEINPDHSIIETLRQKADADKNDKSVKDLVMLLFESALLSSGFTLEDPGVHAGRIYRMIKLGLGIDEDDAPAEDNAETAEEMPPLEDEEDTSRMEEVD

SEQ ID NO: 129289 - DNA, 2306 bp, Nicotiana tabacum
  CDS (41)..(2140)
caggtttcgtagtagcaaacagccggagagatctacaacgatggcggatacagagacgtttgcattccaagctgagatcaatcagcttctcagtcttattatcaacactttctacagcaacaaggaggtctttctccgtgaactcattagcaattcgtccgatgctctggacaagatccgttttgagagcttgactgacaagagcaagctagatgctcaacctgagctcttcatccatattattccagacaaaaccaacaattcactgactatcattgatagtggtattggcatgacaaaggctgatctggtgaacaacctgggtacaattgcgaggtcaggaaccaaggaattcatggaagctcttgcagctggtgctgatgttagcatgattgggcaatttggtgttggtttctactctgcttacttggtagctgagaaggttatcgtgaccacaaagcacaatgatgatgaacaatatgtctgggaatctcaagctggtggttctttcactgttaccagggacacatctggtgagaaccttggtaggggtacaaaaataaccctcttcctcaaggaggatcaacttgaataccttgaagaacgtaggctcaaggacctgattaagaagcactctgagttcatcagctacccaatctctttgtgggttgagaagaccatagaaaaggaaatctctgatgatgaggaggaagaggagaagaaagacgaggaaggtaaggtagaggaggttgacgaagaaaaggagatggaagaaaagaaaaagaagaaggttaaagaagtttctaatgagtggtcattggtgaacaagcagaagcccatttggatgaggaagcctgacgaaatcacgaaggaagggtatgccgctttctataagagcttgactaatgactgggaggagcatatggctgtgaagcacttctctgttgagggccaattggagttcaaggccattctttttgttccaaaaagggctccttttgatctcttcgacacaaggaagaagcccaataatatcaagctgtatgtgcgccgtgtgttcattatggacaactgtgaggagttgattcctgaatatttgagctttgtgaagggtattgtggattccgaggaccttcctcttaacatctccagagagatgttgcagcagaacaagatcctgaaggttattcgcaagaatttggtgaagaagtgtgttgagcttttcttcgaaattgctgagaataaggaagactataacaagttttatgaggccttctcaaagaacctcaagcttggcatccacgaggattcccaaaataggtctaagtttgctgaactgctgcggtaccattccaccaagagcggtgatgagatgaccagtttaaaggactatgtgaccagaatgaaggaaggccagaatgatatttactacattactggtgagagcaagaaggctgttgagaactcacccttccttgagaaactgaagaagaagggctatgaggttctttacatggttgatgccattgatgagtattcaattggtcagctgaaggaatttgagggcaaaaagcttgtttctgctaccaaggaaggtctcaagcttgatgagagtgaagatgagaagaaaaagcaggaagaattgaaggagaagtttgagggactgtgcaaggtcatcaaggatgttctaggagacaaggttgagaaggtggttgtctctgaccgtgttgtggactctccctgctgcttagtcactggggagtatggctggactgctaatatggagagaatcatgaaggcacaagcacttagggactctagcatggctggatacatgtctagcaagaagaccatggagatcaacccagagaatgctattatggaagagctgaggaagagggctgatgcagacaagaatgacaagtctgtgaaggacttggttctcttgctgtttgagactgccctcctcacctcaggtttcagccttgaggaacctaacacctttggcaacagaattcacaggatgctgaagcttgggctgagcattgatgatgactctggagatgcagatgttgacatgccggctttggaggatcctgaagctgatgctgagggtagcaagatggaggaggttgactaagtgcatagtagcatggctgatgttctatggttcccctagtatttccctatttttagttttaccccatcaacgaacagtatgtattagttcttagtgccattttttgagaatggcagttcaatgtagggtataatttattggctcttttggtttggaaaaaaaaaaa

SEQ ID NO: 129290 - protein, 699 aa, Nicotiana tabacum
MADTETFAFQAEINQLLSLIINTFYSNKEVFLRELISNSSDALDKIRFESLTDKSKLDAQPELFIHIIPDKTNNSLTIIDSGIGMTKADLVNNLGTIARSGTKEFMEALAAGADVSMIGQFGVGFYSAYLVAEKVIVTTKHNDDEQYVWESQAGGSFTVTRDTSGENLGRGTKITLFLKEDQLEYLEERRLKDLIKKHSEFISYPISLWVEKTIEKEISDDEEEEEKKDEEGKVEEVDEEKEMEEKKKKKVKEVSNEWSLVNKQKPIWMRKPDEITKEGYAAFYKSLTNDWEEHMAVKHFSVEGQLEFKAILFVPKRAPFDLFDTRKKPNNIKLYVRRVFIMDNCEELIPEYLSFVKGIVDSEDLPLNISREMLQQNKILKVIRKNLVKKCVELFFEIAENKEDYNKFYEAFSKNLKLGIHEDSQNRSKFAELLRYHSTKSGDEMTSLKDYVTRMKEGQNDIYYITGESKKAVENSPFLEKLKKKGYEVLYMVDAIDEYSIGQLKEFEGKKLVSATKEGLKLDESEDEKKKQEELKEKFEGLCKVIKDVLGDKVEKVVVSDRVVDSPCCLVTGEYGWTANMERIMKAQALRDSSMAGYMSSKKTMEINPENAIMEELRKRADADKNDKSVKDLVLLLFETALLTSGFSLEEPNTFGNRIHRMLKLGLSIDDDSGDADVDMPALEDPEADAEGSKMEEVD

SEQ ID NO: 129291 - DNA, 2157 bp, Locusta migratoria
  CDS (1)..(2157)
atgcaggatgctgcagaagtggagaccttcgcctttcaggcggagatcgcccagttgatgtcgttgatcattaacacattctattccaacaaagaaattttccttcgggagttgatctctaactcttctgatgcattggataaaatccgttacgaatccctgacggatccctcgaagctggattccggcaaagatttgtggataaagattgtccctaacaagagtgagaggacgctgactataattgacacgggcattggaatgacaaaggcagacttggtgaacaacctgggaaccattgcaaagtctggtaccaaggccttcatggaagcattgcaagctggtgcagatatttcaatgattggtcactttggcgtgggcttctactctgcatacttggtcgcagacaaggtgactgttgcgtcagagcacaatgatgatgagcagtacttgtgggagtcatctgctggaggatcattcactattcgcccagatcctggtgagccactaggcagaggaaccaaaattacactgtacgtcaaagaagaccagacagaattcttggaagagaggaagattaaagaaatagtgaagaagcattctcaattcattggttatccaatcaaattggttgttgagaaggagagagacaaggagctgagtgaagaggaggaagaggaagagaagaaagaaggtggtgaggaaggtgacaatgaatctaagccaaagattgaagatgttggggaggatgaagaggatgagtctggagacaagaagaaaaagaagaagaaaactatcaaggaaaagtacctagaagatgaagagttgaacaagacgaaaccaatctggaccaggaacccagatgatatctctcaagaagaatatggtgaattttacaagtctctgacaaatgattgggaagatcatcttgcagtgaaacatttttcagttgaagggcaacttgaatttagagcactgctgttcattcctcgaagagcaccttttgatctctttgaaaataagaaaaggaagaacaacatcaaattgtatgtacgtagggtgttcatcatggacaactgtgaagatttaattcctgaatatttgaatttcatcaagggagttgtggacagtgaggatcttccattaaacatctcaagagaaatgttgcagcagaacaaaatccttaagcacgaggggaagaatctagtcaaaaaatgcttggaactgtttgaggaattgacagaagatgcagacacctacaagaaattctatgaacaattcagcaaaaaccttaagcttggaattcatgaagacagtacaaatcgcaagaagctctcagatcttctgagatacgcaacatcagcttctggagatgaaacatgttctcttaaggactatgttgcaagaatgaaagagaatcagaagcacatctactacattactggtgaaaataaggaccaggtagcaaactcatcttttgttgaaagagtgaagaagcgtggctttgaagtggtgtacatgactgagccaattgatgaatatgttgtccagcagatgaaagaatatgatggcaaacaacttgtgtctgtaactaaggaaggtctcgaactcccagaagatgaggaagaaaagaagaagagggaagaagacaaggccaaatttgagaacctctgcaaagtcatgaaggacatattggacaagaaagttgagaaggttgtagtaagcaacaggttggttgaatctccatgctgtattgtaacatcgcagtatgggtggacggcaaatatggaacgtatcatgaaggcacaagcattgagggatacatccacaatgggctacatggctgctaaaaagcatttggagataaatccagaccatcctgttatggaaactcttcgccagaaggctgaagcggacaagaatgacaaggctgtgaaagacttggtaatgttgctgtttgagacagctctcctgtcctcaggatttactctggaggagcctcaggtgcatgcgtcaagaatttaccgaatgattaagctgggtctgggaattgatgaagaggaacctcaggcagcagaagaagaaaaagtagatgctgaaatgccaccccttgaaggtgacaatgaagatgcatctcgaatggaggaagtggattaa

SEQ ID NO: 129292 - protein, 718 aa, Locusta migratoria
MQDAAEVETFAFQAEIAQLMSLIINTFYSNKEIFLRELISNSSDALDKIRYESLTDPSKLDSGKDLWIKIVPNKSERTLTIIDTGIGMTKADLVNNLGTIAKSGTKAFMEALQAGADISMIGHFGVGFYSAYLVADKVTVASEHNDDEQYLWESSAGGSFTIRPDPGEPLGRGTKITLYVKEDQTEFLEERKIKEIVKKHSQFIGYPIKLVVEKERDKELSEEEEEEEKKEGGEEGDNESKPKIEDVGEDEEDESGDKKKKKKKTIKEKYLEDEELNKTKPIWTRNPDDISQEEYGEFYKSLTNDWEDHLAVKHFSVEGQLEFRALLFIPRRAPFDLFENKKRKNNIKLYVRRVFIMDNCEDLIPEYLNFIKGVVDSEDLPLNISREMLQQNKILKHEGKNLVKKCLELFEELTEDADTYKKFYEQFSKNLKLGIHEDSTNRKKLSDLLRYATSASGDETCSLKDYVARMKENQKHIYYITGENKDQVANSSFVERVKKRGFEVVYMTEPIDEYVVQQMKEYDGKQLVSVTKEGLELPEDEEEKKKREEDKAKFENLCKVMKDILDKKVEKVVVSNRLVESPCCIVTSQYGWTANMERIMKAQALRDTSTMGYMAAKKHLEINPDHPVMETLRQKAEADKNDKAVKDLVMLLFETALLSSGFTLEEPQVHASRIYRMIKLGLGIDEEEPQAAEEEKVDAEMPPLEGDNEDASRMEEVD

SEQ ID NO: 129293 - DNA, 2100 bp, Solanum lycopersicum
  CDS (1)..(2100)
atggcggaggcagagacgtttgcatttcaagctgagatcaaccagcttctgagtctcatcatcaatactttttatagtaacaaagagatctttctcagggaactcattagtaactcttctgatgcactggacaagatccgtttccagagtttgactgacaagagcaagctagatgctcaacctgaacttttcattcacatcgtccctgacaagaccaacaataccctcacaatcattgacagtggtgttggtatgacaaaggctgatctggtgaacaaccttggtacaattgctaggtctggcaccaaggaatttatggaggccattgctgctggtgctgatgttagcatgatcgggcaatttggtgttggtttctattctgcttatttggttgctgagagggtggttgtgaccacaaagcacaatgatgatgaacaatatgtttgggaatcacaagctggtggttcattcactgttacgagagatacatctggtgagaaccttggcaggggtaccaaaatgaccctcttcctcaaggaggaccagcttgaataccttgaggagcgaaggctcaaggaccttattaagaagcattctgagttcatcagctatccaatctctttgtgggttgagaagaccatagaaaaggaaatctcggatgatgaggacgaagaggagaagaaagatgaggaaggaaaggtagaggaggttgatgaagaaaaggagaaggaagagaagaaaaagaagaaaattaaggaagtctctaatgagtggtcattggttaataagcagaagcccatatggatgaggaagcccgaggagatcacaaaagaggagtatgctgcattctacaagagcctgacaaatgattgggaagagcatttggctgtcaagcacttctctgttgaaggtcagcttgagtttaaggctgttctttttattccaaagagagctccttttgacctctttgacaccaagaagaagcccaacaatatcaagctctatgttcgccgtgtgttcatcatggataactgtgaggaattgattcctgaatatttgagctttgtgaagggtattgtggattctgaagatcttcccctcaacatctctagagagatgttgcagcagaataagatcctgaaggttattcgcaaaaacttggtgaagaagtgcattgagctattctttgaaattgctgaaaacaaagaagactataacaagttctatgaggccttctcaaagaacctcaagcttggtatccatgaggattcacagaacaggtctaagtttgctgaactgctgagatatcactccacaaaaagtggtgatgagatgaccagcttgaaggactatgtaaccaggatgaaagaaggccagaatgatatttactacattactggtgagagcaagaaggctgttgagaactcacccttccttgagaagctgaagaagaagggttatgaggttctttacatggttgatgctattgatgagtattcaattggtcaattgaaggaatttgagggtaagaagcttgtttctgctaccaaggaaggcctcaagcttgaggagactgaagatgagaagaaaaagcaagaagaactaaaggagaagtttgagggtctttgcaaggtgattaaggatgttctaggtgacaaggttgagaaagtggtggtctctgaccgtgtagtggattctccttgctgcttggttactggagagtatggttggactgccaacatggagagaatcatgaaggcacaagctctcagggactctagcatggctggatacatgtctagcaagaagaccatggagatcaatcctgagaatgccatcatggatgagctcaggaagagagctgatgctgataagaatgacaagtccgtcaaggatttggttctattgttgtttgagactgctcttctcacttcaggttttagccttgatgagccaaacacatttggcaacagaattcacaggatgctgaagcttggtctgagtatcgatgaggatggtggagatgctgaagctgacatgccagcattggaggatcctgaagctgatgccgagggcagcaagatggaagaagtcgactaa

SEQ ID NO: 129294 - protein, 699 aa, Solanum lycopersicum
MAEAETFAFQAEINQLLSLIINTFYSNKEIFLRELISNSSDALDKIRFQSLTDKSKLDAQPELFIHIVPDKTNNTLTIIDSGVGMTKADLVNNLGTIARSGTKEFMEAIAAGADVSMIGQFGVGFYSAYLVAERVVVTTKHNDDEQYVWESQAGGSFTVTRDTSGENLGRGTKMTLFLKEDQLEYLEERRLKDLIKKHSEFISYPISLWVEKTIEKEISDDEDEEEKKDEEGKVEEVDEEKEKEEKKKKKIKEVSNEWSLVNKQKPIWMRKPEEITKEEYAAFYKSLTNDWEEHLAVKHFSVEGQLEFKAVLFIPKRAPFDLFDTKKKPNNIKLYVRRVFIMDNCEELIPEYLSFVKGIVDSEDLPLNISREMLQQNKILKVIRKNLVKKCIELFFEIAENKEDYNKFYEAFSKNLKLGIHEDSQNRSKFAELLRYHSTKSGDEMTSLKDYVTRMKEGQNDIYYITGESKKAVENSPFLEKLKKKGYEVLYMVDAIDEYSIGQLKEFEGKKLVSATKEGLKLEETEDEKKKQEELKEKFEGLCKVIKDVLGDKVEKVVVSDRVVDSPCCLVTGEYGWTANMERIMKAQALRDSSMAGYMSSKKTMEINPENAIMDELRKRADADKNDKSVKDLVLLLFETALLTSGFSLDEPNTFGNRIHRMLKLGLSIDEDGGDAEADMPALEDPEADAEGSKMEEVD

SEQ ID NO: 129295 - DNA, 2100 bp, Nicotiana benthamiana
  CDS (1)..(2100)
atggcggaggcagagacgtttgcatttcaagctgagatcaaccagctgttgagtcttatcatcaacactttctacagcaacaaagagatctttctccgtgaactcatcagtaactcttctgatgcgctagacaagatccgctttgagagtttgactgacaagagcaagctagatgctcaacctgaactattcatccacattatacccgacaagaccaacaataccctgactattattgacagtggtattggtatgacaaaggccgatctggtgaacaaccttggtacaattgctaggtcagggaccaaggaatttatggaggcacttgctgctggtgccgatgtaagcatgattgggcaatttggtgttggtttctactcggcttacttggttgctgaaagggtggttgtgaccacaaaacacaatgatgatgaacagtatgtttgggaatctcaagctggtggttcattcactgttacaagggatacatctggtgagaaccttggcaggggtacaaaaattaccctcttcctcaaggaggatcagcttgaataccttgaggagcgaaggcttaaggatctagttaagaagcattctgagttcatcagctacccaatctctctgtgggttgagaagaccatagaaaaggaaatctctgatgatgaggatgaagaagagaagaaggatgaggaaggaaaggtaggagaggttgatgaagagaaggagaaggaagagaagaaaaagaagaagatcaaggaagtgtctaatgagtggtcattggtaaataagcagaagcccatatggatgaggaagcctgaggagatcacaaaggaagagtatgctgctttctacaagagcctgactaatgactgggaggaacatttggctgtgaagcacttctctgttgagggtcagctggagttcaaggctgttctttttgttccaaagagagctccttttgacctctttgacaccaagaagaagcccaacaacatcaagctgtatgttcgccgtgttttcatcatggataactgtgaagagttgatccctgaatatttgagctttgtgaagggtattgtggattccgaggatcttccccttaacatctccagggagatgttgcagcagaacaagatccttaaagttattcgcaagaacttggtaaagaagtgcattgagctattctttgaaattgctgaaaacaaggaagattatgacaagttctacgaggccttctcaaagaacctcaagcttggtatccatgaggattcacagaacaggtctaagtttgctgaactgctgaggtaccactccacaaagagtggtgatgagatgaccagcttgaaggactatgtaacaaggatgaaagaaggacagaatgacatttactacattactggtgagagcaaaaaggctgttgagaactcacccttccttgagaagctaaagaagaagggctatgaggttctttacatggttgatgctattgatgagtattcagttggtcaattgaaggaatttgagggtaagaagcttgtttctgctaccaaggagggcctcaagcttgatgagagtgaagatgagaagaaaaagcacgaagaacttaaggagaagttcgagggtctgtgcaaggtgattaaggatgttctaggtgacaaggtcgagaaggtggtcgtctctgaccgtgttgtggattctccttgctgcttggttaccggggagtatggctggactgctaacatggagagaattatgaaggcacaagctcttagggacactagcatggctggatacatgtctagcaagaagaccatggagatcaaccctgagaatgccatcatggaagagctcaggaagagagctgatgctgacaagaacgacaagtctgtcaaggatttggttctattgctgttcgagaccgctcttctcacttcaggtttcagtcttgatgagcccaacacctttggcaacagaattcacaggatgctgaaacttggtctgagtatcgatgaggattgcggagatgcggaagctgacatgccaccattggaggatcctgaagctgatgctgaaggtagcaagatggaggaagttgactaa

SEQ ID NO: 129296 - protein, 699 aa, Nicotiana benthamiana
MAEAETFAFQAEINQLLSLIINTFYSNKEIFLRELISNSSDALDKIRFESLTDKSKLDAQPELFIHIIPDKTNNTLTIIDSGIGMTKADLVNNLGTIARSGTKEFMEALAAGADVSMIGQFGVGFYSAYLVAERVVVTTKHNDDEQYVWESQAGGSFTVTRDTSGENLGRGTKITLFLKEDQLEYLEERRLKDLVKKHSEFISYPISLWVEKTIEKEISDDEDEEEKKDEEGKVGEVDEEKEKEEKKKKKIKEVSNEWSLVNKQKPIWMRKPEEITKEEYAAFYKSLTNDWEEHLAVKHFSVEGQLEFKAVLFVPKRAPFDLFDTKKKPNNIKLYVRRVFIMDNCEELIPEYLSFVKGIVDSEDLPLNISREMLQQNKILKVIRKNLVKKCIELFFEIAENKEDYDKFYEAFSKNLKLGIHEDSQNRSKFAELLRYHSTKSGDEMTSLKDYVTRMKEGQNDIYYITGESKKAVENSPFLEKLKKKGYEVLYMVDAIDEYSVGQLKEFEGKKLVSATKEGLKLDESEDEKKKHEELKEKFEGLCKVIKDVLGDKVEKVVVSDRVVDSPCCLVTGEYGWTANMERIMKAQALRDTSMAGYMSSKKTMEINPENAIMEELRKRADADKNDKSVKDLVLLLFETALLTSGFSLDEPNTFGNRIHRMLKLGLSIDEDCGDAEADMPPLEDPEADAEGSKMEEVD

SEQ ID NO: 129297 - DNA, 2100 bp, Nicotiana benthamiana
  CDS (1)..(2100)
atggcggaggcagagacgtttgcatttcaagctgagatcaaccagcttctcagtcttattatcaacactttctacagcaacaaggagatctttctccgtgaactcattagcaattcttccgatgctctggacaagatccgttttgagagcttgactgacaaaagcaagctagatgctcaacctgagctcttcatccatattattccagacaagaccaacaattcactgacaatcattgacagtggtattggcatgacgaaggctgatctggtgaacaacctgggtacaattgcgaggtcaggaaccaaggaattcatggaagctcttgcagctggtgctgatgttagcatgattgggcaatttggtgttggtttctactctgcttatttggtagctgagaaggttatcgtgaccacaaagcacaatgatgatgaacagtatgtctgggaatctcaagctggtggttctttcactgttaccagggacacatccggtgataaccttggtaggggtacaaaaattaccctctttctcaaggaggatcaactggaataccttgaagaacgtaggctcaaggacctgattaagaagcactctgagttcatcagctacccaatctctttgtgggttgagaagaccatagaaaaggaaatctctgatgatgaggaggaagaggagaagaaagatgaggaaggtaaggtagaggaggttgacgaagaaaaggagaaggaagaaaagaaaaagaagaaggttaaagaagcttctaatgagtggtcattggtgaacaagcagaagcccatttggatgaggaagcctgatgagatcacgaaggaagagtatgccgctttctataagagcttgactaatgactgggaggagcatttggctgtgaagcacttctctgttgagggtcaattggagttcaaggccattctttttgttccaaaaagggctccttttgatctcttcgacacaaggaagaagcccaataatatcaagctgtatgtgcgtcgtgtgttcattatggacaactgtgaggagttgattcctgaatatttgagctttgtgaagggtattgtggattccgaggaccttcctcttaacatctcgagagaaatgttgcagcagaacaagatcctgaaggttattcgcaagaatttggtgaagaagtgcgttgagcttttcttcgaaattgctgagaacaaggaagactatgacaagttttatgaggccttctcaaagaacctcaagcttggcatccatgaggattcccaaaacaggtctaagtttgctgaactgctgcggtaccattccaccaagagtggtgatgagatgaccagtttgaaggactatgtgaccagaatgaaggaaggccagaatgatatttactacattactggtgagagcaagaaggctgttgagaactcacccttccttgagaaactgaagaagaagggctatgaggttctttacatggttgatgccattgatgagtactcaattggtcagctgaaggaatttgagggcaaaaagcttgtttctgctaccaaggaaggtctcaagcttgatgagagtgaagatgagaagaaaaagcaggaagaattgaaggagaagttcgagggactgtgcaaggtcatcaaggatgtgctaggagacaaggttgagaaggttgttgtctctgaccgtgttgtggactctccctgctgcttagtcactggggagtatggctggactgctaatatggagagaatcatgaaggcacaagcacttagggactctagcatggctggatacatgtctagcaagaagaccatggagatcaacccggagaatgctattatggaagagctgaggaagagggctgatgcagacaagaatgacaaatctgtcaaggacttggttctcttgctgttcgagactgccctcctcacctcaggtttcagccttgaggaacctaacacctttgggaacagaattcacaggatgctgaagcttgggctgagcattgatgatgactctggagatgcagatgttgacatgccggctttggaggatgctgaagctgatgctgaaggtagcaagatggaggaagttgactaa

SEQ ID NO: 129298 - protein, 699 aa, Nicotiana benthamiana
MAEAETFAFQAEINQLLSLIINTFYSNKEIFLRELISNSSDALDKIRFESLTDKSKLDAQPELFIHIIPDKTNNSLTIIDSGIGMTKADLVNNLGTIARSGTKEFMEALAAGADVSMIGQFGVGFYSAYLVAEKVIVTTKHNDDEQYVWESQAGGSFTVTRDTSGDNLGRGTKITLFLKEDQLEYLEERRLKDLIKKHSEFISYPISLWVEKTIEKEISDDEEEEEKKDEEGKVEEVDEEKEKEEKKKKKVKEASNEWSLVNKQKPIWMRKPDEITKEEYAAFYKSLTNDWEEHLAVKHFSVEGQLEFKAILFVPKRAPFDLFDTRKKPNNIKLYVRRVFIMDNCEELIPEYLSFVKGIVDSEDLPLNISREMLQQNKILKVIRKNLVKKCVELFFEIAENKEDYDKFYEAFSKNLKLGIHEDSQNRSKFAELLRYHSTKSGDEMTSLKDYVTRMKEGQNDIYYITGESKKAVENSPFLEKLKKKGYEVLYMVDAIDEYSIGQLKEFEGKKLVSATKEGLKLDESEDEKKKQEELKEKFEGLCKVIKDVLGDKVEKVVVSDRVVDSPCCLVTGEYGWTANMERIMKAQALRDSSMAGYMSSKKTMEINPENAIMEELRKRADADKNDKSVKDLVLLLFETALLTSGFSLEEPNTFGNRIHRMLKLGLSIDDDSGDADVDMPALEDAEADAEGSKMEEVD

SEQ ID NO: 129299 - DNA, 2181 bp, Chlamys farreri
  CDS (1)..(2181)
atgccagaaccagagggtcaagcaatggaagacggtgaagttgagacctttgcttttcaagctgggattgctcagttgatgagtttgatcatcaatactttctactcaaacaaagaaatctttttgcgtgaattgatttccaactgctctgatgctctagacaaaatccgttatgaaagtctcacagatccatcaaagctagattctggcaaagaactagaaattaagatcgtccccaacaaagatgacaacacactttccatcatggacacaggaatcggaatgaccaaggctgatctggtaaacaatcttggaaccatagctcgttctggaaccaaagcttttatggaggctttgcaagcaggtgctgatatttccatgattggacagtttggtgtaggtttttattctgcctacttggtcgctgacagagttgttgtcgaaaccaaaaacaacgatgatgaacactacatctgggaatcatccgctggtggctctttcactgttaggagcggggatggttcatttattctaggaacacgcatcaccttgcacatgaaagaagatcaagctgaataccttgaagaaaagaaggtaaaggaaattgtcaaaaaacacagtcagttcatcggctacccaataaaactccaggtggaaaaggaaagggatgttgaagtgtctgatgatgaagaggaggaggaaaagaaggaagaggacaaagatgcagaaaaatccgaagatgacaagccaaaggtagaagacttggatgatgaagatgatgatgaagacaagtcgaaagataagaagaagaagaagatcaagggaaagtatatagaagatgaggaattgaacaaaacaaagcccatctggacccgaaaccctgacgatatcacacaggaggagtatggtgaattctacaaatccctcactaatgattgggaggatcatttggctgtcaagcatttctcagtggaaggtcagctagaattccgagcattgctgtttgtgccaaggagagcaccatttgacctgtttgaaaataagaaaaagaagaacaacatcaagttgtatgtgaggagagtgtttatcatggacaattgtaatgaagttattccagaatacctcaactttgttaggggtgtcgtagactctgaagatctcccactgaacatttcaagagaaatgttgcaacaaagcaaaatcctcaaagtcatcagaaagaacttggtgaaaaaatgcatggagctgtttgatgacatcgcagaggacaaggagaactacaagaaattttatgaacagtttgcaaagaacctgaagcttggaatccatgaagacacaacaaacagaaagaagattgcagatttcctccggtatcacacctctcagtctggtgatgaaatgacttcatttaaggaatatgtctcaagaatgaaggaaaatcagaaaagcatctactacatcacaggcgagagcagagaggttgtccaaagttcagcatttgttgaaaatgtaaaaaagaggggcattgaggtcatttacatggtggatcccatcgacgaatatgcagtacagcagcttaaggaatatgagggaaagaccctggtgtccgtgacaaaagaaggacttgaattgccagaggatgaggaggaaaagaagaggttcgaggaagcaactgctgagtatgagggactttgtaaagttgtcaaagaaatcctggacaagaaagttgaaaaggtaacagtttccaacagactggtgacatccccatgttgtattgtaacaagtcaatatggttggtctgcaaacatggagaggatcatgaaagcccaggcccttcgggattcatccactatgggatgcatggctgccaagaagcacctagagataaatccagatcatgccatcatcaaatccctcaaggaaaaggctggattagacaaaaacgacaaatctgtaaaagatctcgttttgctgctgtttgaaacctccatgcttgcttcaggattttcattggaggagcctggtacccatgccaacagaatccacaggatgatcaagctcggacttggaattgatgacgatgactccggagcaccagaaacctctgatgagaatgttgaagagcccccaccactagaaggggatgaggatgatgcttcaagaatggaagaagtagattaa

SEQ ID NO: 129300 - protein, 726 aa, Chlamys farreri
MPEPEGQAMEDGEVETFAFQAGIAQLMSLIINTFYSNKEIFLRELISNCSDALDKIRYESLTDPSKLDSGKELEIKIVPNKDDNTLSIMDTGIGMTKADLVNNLGTIARSGTKAFMEALQAGADISMIGQFGVGFYSAYLVADRVVVETKNNDDEHYIWESSAGGSFTVRSGDGSFILGTRITLHMKEDQAEYLEEKKVKEIVKKHSQFIGYPIKLQVEKERDVEVSDDEEEEEKKEEDKDAEKSEDDKPKVEDLDDEDDDEDKSKDKKKKKIKGKYIEDEELNKTKPIWTRNPDDITQEEYGEFYKSLTNDWEDHLAVKHFSVEGQLEFRALLFVPRRAPFDLFENKKKKNNIKLYVRRVFIMDNCNEVIPEYLNFVRGVVDSEDLPLNISREMLQQSKILKVIRKNLVKKCMELFDDIAEDKENYKKFYEQFAKNLKLGIHEDTTNRKKIADFLRYHTSQSGDEMTSFKEYVSRMKENQKSIYYITGESREVVQSSAFVENVKKRGIEVIYMVDPIDEYAVQQLKEYEGKTLVSVTKEGLELPEDEEEKKRFEEATAEYEGLCKVVKEILDKKVEKVTVSNRLVTSPCCIVTSQYGWSANMERIMKAQALRDSSTMGCMAAKKHLEINPDHAIIKSLKEKAGLDKNDKSVKDLVLLLFETSMLASGFSLEEPGTHANRIHRMIKLGLGIDDDDSGAPETSDENVEEPPPLEGDEDDASRMEEVD

SEQ ID NO: 129301 - DNA, 2405 bp, Hevea brasiliensis
  CDS (121)..(2217)
ggcacgaggaagcaatatctcctctttcgtgtgttttctcttgcgctctcgcattctcttgcgcctgtgtcgaggcttgtgtgttggtgtggagtagtgttgaggagggcggacgtgcagatggctgatgctgagaccttcgccttccaggctgagattaaccagcttttgagcttgatcatcaatactttctacagcaacaaggagattttccttcgtgagatcatcagcaacgcctctgatgcattggacaaaataagatttgagagcttgacggataagagcaagctcgatgcccaaccagagcttttcattaggcttgttcctgacaaggccaataagaccctctcaattattgacagtggtatcggaatgaccaaagcagatttggtgaacaatttgggtaccattgcaagatccggcaccaaggaatttatggaggcattgcaggctggtgcggatgtgagcatgatcggtcaatttggtgttggattctactccgcttatctggtggcggagaaggtcattgtgaccacaaaacataatgacgatgaacagtacatctgggaatcacaagctggtggttctttcaccgtcacaagggatgtcaacggggaccaacttggcaggggtaccaaaattacacttttccttaaggaggaccagctcgagtacttggaagagaggaggattaaggaccttgtgaagaagcactctgagttcattagttaccctatctacctatggacagagaaaacaaccgagaaagagatcagtgatgatgaagacgatgaacccaagaaggaagaggagggggatgttgaggatgttgatgaggagaaggagaccaaatcaaagaagaagaagatcaaggaggtttctcacgagtggcagctcatcaacaagcaaaaacccatctggctgcgcaagccggaggagatcaccaaggaggaatatgcatctttctataagagcttgaccaacgactgggaggaccaccttgctgtcaagcatttctctgtcgagggtcagcttgaattcaaggctatcctgtttgttccaaagagggctccgtttgatctttttgacacccgcaagaaaatgagcaatatcaagctttatgttaggagggtcttcatcatggacaactgtgaggagctaatccccgagtaccttggctttgtcaaaggtgttgttgattctgatgatctgcctcttaacatttctcgtgagatgcttcagcagaacaaaattctcaaggttattaggaagaaccttgtgaagaaatgcattgagatgttcaatgagattgctgagaataaggaagactacaacaagttctacgaagctttctcgaagaatttgaaattgggtattcatgaggacagccagaacagagccaaattggctgatctgctccgataccactcaaccaagagcggtgacgagatgacaagcttgaaggattatgttaccaggatgaaggagggccagaaggatatctactatattactggtgagagcaagaaggcagttgagaattcaccattcctagagcggctcaagaagaaaggctatgaggttcttttcatggtggatgccattgatgagtacgctgtcgggcagctcaaggaatatgatggaaagaagctggtttctgctacaaaggaaggattgaagcttgatgatgagaccgaggaagagaagaagaaaaaagaggagaagaagaagtccttcgagaacctctgcaagacaatcaaggacattttgggggacaaggttgagaaggtggtggtctctgacaggattgtggactccccatgctgtttggtgacgggagaatatggctggactgctaacatggaaaggatcatgaaggctcaggcattgagagacagcagcatgagctcatacatgtccagcaagaagactatggagatcaatcctgataatgttatcgtggaggagttaaggaagagggcagaagctgacaagaatgacaaatctgtcaaggatcttgtgttactattgtttgagactgctctcctaacctctggcttcagcctcgatgatccaaacaccttttctgctaggattcacaggatgttgaaactgggtctgagcattgacgatgatgagactgccggcgatgatgctgatatgcctgctttggaggaagatggtgctgaggagagcaagatggaggaagtcgactaaagatttgtccatgtggatgaaggggtgcatgtcaattgcgtatgggaatagtcgactaaacgctagtcttttggtgtcttataatgcgtgttgaggtctcgtctgtgtgtctgataaagagtttatattttgtaattttgttttcaatcgaatatagtttggttcttctcaaaaaaaaaaaaaaaaaa

SEQ ID NO: 129302 - protein, 698 aa, Hevea brasiliensis
MADAETFAFQAEINQLLSLIINTFYSNKEIFLREIISNASDALDKIRFESLTDKSKLDAQPELFIRLVPDKANKTLSIIDSGIGMTKADLVNNLGTIARSGTKEFMEALQAGADVSMIGQFGVGFYSAYLVAEKVIVTTKHNDDEQYIWESQAGGSFTVTRDVNGDQLGRGTKITLFLKEDQLEYLEERRIKDLVKKHSEFISYPIYLWTEKTTEKEISDDEDDEPKKEEEGDVEDVDEEKETKSKKKKIKEVSHEWQLINKQKPIWLRKPEEITKEEYASFYKSLTNDWEDHLAVKHFSVEGQLEFKAILFVPKRAPFDLFDTRKKMSNIKLYVRRVFIMDNCEELIPEYLGFVKGVVDSDDLPLNISREMLQQNKILKVIRKNLVKKCIEMFNEIAENKEDYNKFYEAFSKNLKLGIHEDSQNRAKLADLLRYHSTKSGDEMTSLKDYVTRMKEGQKDIYYITGESKKAVENSPFLERLKKKGYEVLFMVDAIDEYAVGQLKEYDGKKLVSATKEGLKLDDETEEEKKKKEEKKKSFENLCKTIKDILGDKVEKVVVSDRIVDSPCCLVTGEYGWTANMERIMKAQALRDSSMSSYMSSKKTMEINPDNVIVEELRKRAEADKNDKSVKDLVLLLFETALLTSGFSLDDPNTFSARIHRMLKLGLSIDDDETAGDDADMPALEEDGAEESKMEEVD

SEQ ID NO: 129303 - DNA, 2100 bp, Cryptococcus bacillisporus
  CDS (1)..(2100)
atgtccaccgagacctttggcttccaggccgaaatttcccagcttctcgaccttatcatcaacaccttctactccaacaaggaaatcttccttcgagaactcatctccaactcttccgatgcccttgacaagatccgatacgccgctctcaccgacccctctcagcttgacactgagaaggacctctacatccgtatcatccccaacaaggaggagggtactctcactatcagggataccggtatcggtatgaccaaggccgaacttgttaacaacctcggtactattgccaagtctggtaccaaggcctttatggaggctctttcttccggtgctgacatttccatgattggtcaattcggtgttggtttctactcttcttaccttgttgccgaaaaggttcaagttaccaccaagcacaatgacgacgagcagtacatctgggagtctgctgccggcggtactttcaccatcactgaggacactgagggtcctcgacttggccgtggtacctctatgaagctcttcatcaaggaggacttgaaggagtacctcgaagagaagaggatcagggagattgttaagaagcactccgagtttatctcctaccctatccagctcgttgtcaccaaggagactgagaaggaggttgaagaggaggaggaggaggtcaaggagggtgactccaagatcgaagaggttgaggacgaggactctggcaagaagaccaagaagaccaagaagatcaaggagactaccactgagaacgaggagctcaacaagcagaagcccatctggaccaggaaccctcaggacgtcacccaggaggagtacgctagcttctacaagtccatctccaacgactgggaggaccaccttgccgtcaagcacttctctgttgagggtcagctcgagttcaaggctatgctctacattcctaagcgtgctccctttgacttgttcgagaccaagaagaagaggcacaacatcaagctctacgttcgacgagttttcatctctgacgacaacgaggacttgatgcccgaatacctcaactttgtcgtcggtgttgtcgactctgaggaccttcctctcaacatctctcgtgagactctccagcaaaacaagatcctcaaggtcattaagaagaacctcgtcaagaaggctcttgagctcctctctgagattgccgaggacaaggagaactttgacaagttctactctgccttctccaagaacctcaagctcggtatccacgaggacgccaccaaccgatccaagattgccgagttcctccgattccactctaccaagtctgttgacgagatgacttccttcaaggactacattacccgaatgcccgaggtccagaagtctatctactaccttaccggcgagtcgctcgaggctgtcaaggactcacctttccttgaggttctcaagaagaagggctttgaggtccttctcctcgtcgaccccattgacgagtacgccgttacccagctcaaggagtttgacggcaagaagctcgtctgtgtttccaaggagggtctcgagcttgaggagactcccgaggagaaggctgagagggagaaggaggctgcagagtacgagggtctctgttccgctatcaaggagaaccttggtgacaaggtcgagaaggttgtcatctccaaccgtatcaccgagtctccttgtgttctcgtcactggccagtttggctggtcttccaacatggagaggatcatgaaggctcaggctttgcgagactcttccatgtcctcttacatggctagcaagaagactatggagctcaacccctctcaccccatcatcaaggaactcaagagccgagtcgccgaggacaagtctgacaagactgtccgagacctcacttacctcctcttcgagactgccctcttgacctctggtttcactctctccaaccctcaggactttgcctctcgaatcaacaggatgatcgctcttggtctttccatcgatgccgagcctgaggctgctcccgctgctgccgcccccaccgaggacgctcccccccttgaggaggccggtgccggctccatggaggaggttgactaa

SEQ ID NO: 129304 - protein, 699 aa, Cryptococcus bacillisporus
MSTETFGFQAEISQLLDLIINTFYSNKEIFLRELISNSSDALDKIRYAALTDPSQLDTEKDLYIRIIPNKEEGTLTIRDTGIGMTKAELVNNLGTIAKSGTKAFMEALSSGADISMIGQFGVGFYSSYLVAEKVQVTTKHNDDEQYIWESAAGGTFTITEDTEGPRLGRGTSMKLFIKEDLKEYLEEKRIREIVKKHSEFISYPIQLVVTKETEKEVEEEEEEVKEGDSKIEEVEDEDSGKKTKKTKKIKETTTENEELNKQKPIWTRNPQDVTQEEYASFYKSISNDWEDHLAVKHFSVEGQLEFKAMLYIPKRAPFDLFETKKKRHNIKLYVRRVFISDDNEDLMPEYLNFVVGVVDSEDLPLNISRETLQQNKILKVIKKNLVKKALELLSEIAEDKENFDKFYSAFSKNLKLGIHEDATNRSKIAEFLRFHSTKSVDEMTSFKDYITRMPEVQKSIYYLTGESLEAVKDSPFLEVLKKKGFEVLLLVDPIDEYAVTQLKEFDGKKLVCVSKEGLELEETPEEKAEREKEAAEYEGLCSAIKENLGDKVEKVVISNRITESPCVLVTGQFGWSSNMERIMKAQALRDSSMSSYMASKKTMELNPSHPIIKELKSRVAEDKSDKTVRDLTYLLFETALLTSGFTLSNPQDFASRINRMIALGLSIDAEPEAAPAAAAPTEDAPPLEEAGAGSMEEVD

SEQ ID NO: 129305 - DNA, 2154 bp, Antheraea yamamai
  CDS (1)..(2154)
atgcctgaagggatggagactacaccatcggcggaggtggagaccttcgccttccaagcggaaatcgcccagctcatgtcactgatcatcaacacgttctactcaaataaagagatcttccttcgggagctgatttccaactcttcggacgcgttggacaagatccggtatgaatctctcacggacccgtcaaaattggacagcggtaaggaattgtacattaaaattattcctaacaaaagcgagggcacgcttacgatcattgacaccggtatcggcatgactaaggcagatttagtcaacaacttgggtaccattgcaaagtctggcaccaaggcttttatggaggcgctgcaggcgggcgctgacattagcatgatcggtcaatttggcgtgggcttctactcctgctacttagtcgctgaccgtgttactgtccactctaaacacaacgacgacgaacagtacatgtgggagtcttccgctggcggttctttcactgtacgctcagaccctggcgagcctctgggccgtggaaccaaaatcgttcttcacgtgaaggaagacctcgctgaatatatggaggagcacaaaatcaaggagattgtaaagaaacactcgcagttcatcggttaccctattaaactgatggttgagaaggaacgcgaaaaggagctgtctgacgatgaagctgaagaggaagaaaagaaagaaggtgaggatgataagcccaagatcgaggacgtcggcgaagacgaggaagaggacaaaaaagacaaaaagaagaaaaagacaataaaggagaaatacactgaagatgaggaattgaacaagacaaagccgatatggacgaggaacgcggacgacatcacacaggaggagtacggagacttctacaagtctttgacaaatgactgggaagatcacctcgctgtaaagcacttctcagtcgaaggtcagttggaattccgggctttgctgtttgtacctcgcagggcaccatttgacctctttgagaataagaaacgcaagaacaacatcaaactctacgtcagaagggtattcattatggataactgtgaagaccttatcccagagtatctgaactttatcaggggcgttgtcgacagtggagatttgcctctaaacatctctcgtgagatgctccaacagaataagattttaagagtcatcagaaagaatttggttaagaaatgtttggagctctttgaggagctggcagaggataaagaaaattacaagaagtattatgaacagtttggcaaaaatcttaaactaggtatccatgaaaactcgcagaatagatctaaattgtcagaccttctccgttaccacacatctgcctctggtgatgaggcttgctctctaaaagagtatgtttctcgcatgaaggagaaccagaaacacatatattacattactggtgaaaaccgtgaccaggtggccaactcttcatttgtggagagagtcaagaagcgtggctatgaggttgtatacatgactgagcctattgatgagtatgtagtccaacagatgaaaaagtatgatggcaagactttagtctccgtcactaaagagggcttggaactgccagaggatgaggaggaaaagaagaaacgtgaggaagataaggtcaagtttgaaggcctttgcaaggtcatgaagaacattttagacaaaaaagtagaaaaggtggtcgcctcaaataggcttgttgaatcaccgtgctgtattgtcacagcccagtatggttggtctgctaacatggaacgtatcatgaaggctcaagctctccgggatacctccaccatgggctatatggctgccaagaaacacttggaggtcaatcctgatcattccattgtagaaactctgaggcaaaaggcggaggctgacaaaaatgataaggctgtcaaggatcttgtcattttgctgtacgagactgctttgctgtcatctggcttcaccttggacgagccccaagtccatgcttcccgcatctacagaatgatcaagctcggtcttggcattgatgaggatgagcctatccaagtggaagaatcgagtgctggagatgtcccaccattggaaggagacactgatgatgcatcacgaatggaggaagttgattaa

SEQ ID NO: 129306 - protein, 717 aa, Antheraea yamamai
MPEGMETTPSAEVETFAFQAEIAQLMSLIINTFYSNKEIFLRELISNSSDALDKIRYESLTDPSKLDSGKELYIKIIPNKSEGTLTIIDTGIGMTKADLVNNLGTIAKSGTKAFMEALQAGADISMIGQFGVGFYSCYLVADRVTVHSKHNDDEQYMWESSAGGSFTVRSDPGEPLGRGTKIVLHVKEDLAEYMEEHKIKEIVKKHSQFIGYPIKLMVEKEREKELSDDEAEEEEKKEGEDDKPKIEDVGEDEEEDKKDKKKKKTIKEKYTEDEELNKTKPIWTRNADDITQEEYGDFYKSLTNDWEDHLAVKHFSVEGQLEFRALLFVPRRAPFDLFENKKRKNNIKLYVRRVFIMDNCEDLIPEYLNFIRGVVDSGDLPLNISREMLQQNKILRVIRKNLVKKCLELFEELAEDKENYKKYYEQFGKNLKLGIHENSQNRSKLSDLLRYHTSASGDEACSLKEYVSRMKENQKHIYYITGENRDQVANSSFVERVKKRGYEVVYMTEPIDEYVVQQMKKYDGKTLVSVTKEGLELPEDEEEKKKREEDKVKFEGLCKVMKNILDKKVEKVVASNRLVESPCCIVTAQYGWSANMERIMKAQALRDTSTMGYMAAKKHLEVNPDHSIVETLRQKAEADKNDKAVKDLVILLYETALLSSGFTLDEPQVHASRIYRMIKLGLGIDEDEPIQVEESSAGDVPPLEGDTDDASRMEEVD

SEQ ID NO: 129307 - DNA, 2103 bp, Hordeum vulgare
  CDS (1)..(2103)
atggcgacggagaccgagaccttcgccttccaggccgagatcaaccagctcctctcgctcatcatcaacaccttctactccaacaaggagatctttctccgcgagctcatctccaactcctccgatgccttggacaagatcaggttcgagagcctcacggacaagagcaagctcgatgcgcagcccgagctcttcatccacatcatccccgacaaggcgaccagcacgctcacgatcgtcgacagcggcattggcatgaccaagtcggacctcgtcaacaacctcgggaccatcgccaggtcgggcaccaaggagttcatggaggctcttgccgccggcgccgacgtgtccatgattgggcagttcggtgttgggttctactccgcctaccttgtggccgagagggtcgtcgtcaccaccaagcacaacgacgacgagcagtacgtgtgggagtcccaggccggtggctccttcaccgtcactcgtgatacgtctggggagcagctcggcaggggtaccaagatggtcctctacctcaaggacgaccagatggaataccttgaggagcgccgcatcaaggatctagttaagaagcactccgagtttatcagctaccccatctccctgtggactgagaagaccaccgagaaggaaatttctgacgatgaagacgaggaggagaagaaggataccgaggagggcaaggttgaggatgttgatgaggagaaggaagagaaggaaaagaagaaaaagaagatcaaggaagtctctcatgagtggaacttggtcaacaagcagaagcctatctggatgaggaagccagaggagatcaacaaggaagagtatgctgctttctacaagagcttgaccaatgactgggaggagcatttggctgtcaagcacttctctgttgagggtcagcttgagttcaaggctgtcctgtttgttcccaagagggcccccttcgacctcttcgacaacaagaagaaggccaacaacatcaagctgtatgtgcgccgtgtcttcatcatggacaactgtgatgagttgatccctgagtacctgagctttgtcaagggcattgttgattcagaggaccttcccctgaacatctcccgtgagactctccagcagaacaagatcctcaaggtcatccggaagaaccttgtcaagaagtgcattgagctcttctttgagattgctgagaacaaggaggactacaacaagttctacgaggccttctccaagaacctcaagcttggcatccatgaggactcccagaacaggaccaagattgctgagcttctgaggtaccactccaccaagagtggtgatgagctgacgagcctcaaggactatgtaaccaggatgaaggagggtcagaacgagatctactacatcactggtgagagcaagaaggctgtggagaactctcccttccttgagaagctgaagaagaagggctatgaggtcatctacatggttgacgccattgatgagtatgccattggtcagctcaaggagtttgagggcaagaagcttgtctctgccaccaaggagggtctgaagcttgatgagagcgaggacgagaagaagaagcaggaggaactcaaggagaagttcgaggggctgtgcaaggtcatcaaggaggtgctgggcgacaaggtggagaaggtcatcgtctctgaccgtgttgtggactcaccgtgctgtctggtgactggtgagtatgggtggaccgccaacatggagaggatcatgaaggcccaggccttgagggactcgagcatggctggctacatgtctagcaagaagaccatggagatcaaccctgagaacgccatcatggacgagctccgcaagcgtgccgacgccgacaagaacgacaagtcggtgaaggacctggtgatgcttctcttcgagacctccctgctcacctcgggcttcagccttgaggaccccaacaccttcggcaccaggatccaccgcatgctcaagcttggcctgagcattgatgaggacgatgaggcgcctgagaacgacaccgacatgccgcccctggaggatgatgccggtgagagcaagatggaggaggtcgactaa

SEQ ID NO: 129308 - protein, 700 aa, Hordeum vulgare
MATETETFAFQAEINQLLSLIINTFYSNKEIFLRELISNSSDALDKIRFESLTDKSKLDAQPELFIHIIPDKATSTLTIVDSGIGMTKSDLVNNLGTIARSGTKEFMEALAAGADVSMIGQFGVGFYSAYLVAERVVVTTKHNDDEQYVWESQAGGSFTVTRDTSGEQLGRGTKMVLYLKDDQMEYLEERRIKDLVKKHSEFISYPISLWTEKTTEKEISDDEDEEEKKDTEEGKVEDVDEEKEEKEKKKKKIKEVSHEWNLVNKQKPIWMRKPEEINKEEYAAFYKSLTNDWEEHLAVKHFSVEGQLEFKAVLFVPKRAPFDLFDNKKKANNIKLYVRRVFIMDNCDELIPEYLSFVKGIVDSEDLPLNISRETLQQNKILKVIRKNLVKKCIELFFEIAENKEDYNKFYEAFSKNLKLGIHEDSQNRTKIAELLRYHSTKSGDELTSLKDYVTRMKEGQNEIYYITGESKKAVENSPFLEKLKKKGYEVIYMVDAIDEYAIGQLKEFEGKKLVSATKEGLKLDESEDEKKKQEELKEKFEGLCKVIKEVLGDKVEKVIVSDRVVDSPCCLVTGEYGWTANMERIMKAQALRDSSMAGYMSSKKTMEINPENAIMDELRKRADADKNDKSVKDLVMLLFETSLLTSGFSLEDPNTFGTRIHRMLKLGLSIDEDDEAPENDTDMPPLEDDAGESKMEEVD

SEQ ID NO: 129309 - DNA, 2388 bp, Eptatretus stoutii
  CDS (1)..(2388)
atggcgaggagcgcttggttgctggttctcatctgtctctcggttacctttgccaaggccagagttgcagagaacgatgatgatccttccgtagtggagcaggacattggcaagagccgggacgcatcttctcgcacagatgacgaggtggttgaaagggaagaggaggctatccaactggaaggattgagtccggctcaggtgaaagagctgagggagagagctgataaatttgcatttcaagcggaggtcaaccgcatgatgaaactgattataaattctctctataagaacaaagagatcttcttgagagaattgatatcaaatgcctctgatgcgctggacaagatccgcttgatgtcactcacagatgaaaccgcacttgctgccacagatgaacttaccataaagataaaggctgaccaagagcataacatgcttcacataaccgacactggtatcggtatgactcgtgaagagctgataaagaatcttggaactattgccaagtctggcacaagtgaattcttgggcaagattacagaaatgcaagcagagggacagtcaacttctgaactgattggccagtttggtgttggattttactcttcttttctggtggctgaccgtgtcattgtgtcatcaaaacataacaatggcacacaacacatatgggagtctgactcggaagaattctctatcattgaggacccccggggagacacactcggccgtggtacaacgatcacgctcgtgctgaaggatgaggctgatgatttcctcgaactggacactatcaagaacctggtgaagaagtactcacaatttatcaactttcccatttacatctggagcagcaagactgagacggtggaggaagctgaggatgaggaagaagaagaagaagaagaagtggagggtgaagaaacaaaaagtgaggatgatgctgaggttgaagtggaaaaagaaaaagcgaaaaaggtggaaaagactgtatgggactgggagctgattaatgacatgaaacctgtttggcaaagacctagtaaggaggtggaagaggatgagtacaaggctttttacaaatcattttctaaggaaactgaagacccaatggcttggatacacttcacagcagagggtgaggtcaccttcaagtccattttgtttgtgcccaaggcagccccaagaggtctttttgatgaatatggctccaagctaaccgattacataaagatgtatgtacgacgtgtctttatcactgatgatttccatgatatgatgcctaagtacctgaacttcgtcaagggtgtggtggactctgatgacctgcccctcaatgtttctcgagaaactttgcaacaacacaagcttcttaaggttatcaaaaagaagttagttcgtaaaacactggatatgatcaagaaaattacaggtgatgctttcaaaaaattctggaaggagtttggcacaaacatgaagttgggagtcatcgaagatcactcaaatcgtacgcgccttgcgaaactgctgcgtttccagtcatccctgcatgagtcagacctcacaagcctggagcagtacgttgaaaggatgaaagagaaccaagaacgcatttattttgtggcaggaacaagtcgccaagaggtggaggcatctccattcgtagagcagctgctcaagaagggctacgaagttttgtacttgaccgagccagtggatgagtactgcatccaagccctgccagagtttgatgggaagcgctttcaaaatgttgccaaggagggcttgcagtttgaggagggagatgatgctaaagaaaagcaggaagccattgagaagaagtttgggccacttatttcttggctcaaggacgatggtctggaagataagattgacaaagcggcgatatcccagcgactccttgactcgccatgtgcactcgtagcaagtcaatatggttggtctggcaatatggagcgcatcatgaaggcacaggcctaccagacgggccgagaccctgctgcaacgttctatgccaaccagaaaaagacactagaaatcaatcctcaacacccactgattaagaagcttcttggccttgtaaaggacgatccaaaagacaagactgcgaaggatttggctgtgctgctgtttgagactgcaacactacgatctgggtttgcactccaggacacacgagcctatgccgacagcattgagcgcatgctgcgcctcagcctgaacatcgatcccaatgccaaggtggaagatgatgtcgaggatccgactgtcggtgaggatgagggtgaagaggtgaatgctgaagatggaagtgatgagagccaaaaggaaaacgagaaaagtgaaacgaaagacgagctttaa

SEQ ID NO: 129310 - protein, 795 aa, Eptatretus stoutii
MARSAWLLVLICLSVTFAKARVAENDDDPSVVEQDIGKSRDASSRTDDEVVEREEEAIQLEGLSPAQVKELRERADKFAFQAEVNRMMKLIINSLYKNKEIFLRELISNASDALDKIRLMSLTDETALAATDELTIKIKADQEHNMLHITDTGIGMTREELIKNLGTIAKSGTSEFLGKITEMQAEGQSTSELIGQFGVGFYSSFLVADRVIVSSKHNNGTQHIWESDSEEFSIIEDPRGDTLGRGTTITLVLKDEADDFLELDTIKNLVKKYSQFINFPIYIWSSKTETVEEAEDEEEEEEEEVEGEETKSEDDAEVEVEKEKAKKVEKTVWDWELINDMKPVWQRPSKEVEEDEYKAFYKSFSKETEDPMAWIHFTAEGEVTFKSILFVPKAAPRGLFDEYGSKLTDYIKMYVRRVFITDDFHDMMPKYLNFVKGVVDSDDLPLNVSRETLQQHKLLKVIKKKLVRKTLDMIKKITGDAFKKFWKEFGTNMKLGVIEDHSNRTRLAKLLRFQSSLHESDLTSLEQYVERMKENQERIYFVAGTSRQEVEASPFVEQLLKKGYEVLYLTEPVDEYCIQALPEFDGKRFQNVAKEGLQFEEGDDAKEKQEAIEKKFGPLISWLKDDGLEDKIDKAAISQRLLDSPCALVASQYGWSGNMERIMKAQAYQTGRDPAATFYANQKKTLEINPQHPLIKKLLGLVKDDPKDKTAKDLAVLLFETATLRSGFALQDTRAYADSIERMLRLSLNIDPNAKVEDDVEDPTVGEDEGEEVNAEDGSDESQKENEKSETKDEL

SEQ ID NO: 129311 - DNA, 2100 bp, Arabidopsis thaliana
  CDS (1)..(2100)
atggcggacgctgaaacctttgctttccaagctgagatcaaccagttgctttccctcatcatcaataccttttactctaacaaggagatcttcctccgtgaactcatcagtaactcttctgatgctttggacaagattagattcgagtccttgacggacaagagcaagctcgatggtcagcctgagctcttcattcacatcattcccgacaagactaacaacaccttgaccattattgatagtggtattggcatgaccaaggctgatttggtcaacaaccttggaacaattgcaagatctggaaccaaggaattcatggaagcactggctgctggagctgatgttagcatgattggtcagtttggtgttggtttctactctgcttacttggttgctgacaaggttgttgttactaccaagcacaatgacgatgagcagtacgtgtgggagtctcaggccgggggatctttcactgtgaccagagacacctctggggagactcttggtagaggaacaaagatggttctttacctcaaggaagaccagttggagtaccttgaggagcgaaggcttaaggatttggtgaagaagcactctgagttcatcagctacccaatctctctctggattgagaagaccattgagaaggagatctctgatgatgaagaggaggaagagaagaaggatgaggaaggcaaggttgaggaagttgatgaggagaaagaaaaggaggagaagaaaaagaagaagattaaggaggtttctcatgagtgggatttggtgaacaagcagaagcctatctggatgaggaagccagaggagatcaacaaggaggagtacgctgctttctacaagagtctcagcaatgattgggaggagcatttggctgtgaagcatttctctgttgaaggacagcttgagttcaaagctatcctctttgttcccaagagagctccttttgatctctttgacactaagaagaagcccaacaacatcaagctctatgtccgtcgtgtcttcatcatggacaactgtgaagacatcatccctgagtacctcggatttgtgaaaggtattgtcgactctgaagatcttcctctcaacatctcgagagagacattgcagcagaacaagatcctcaaggtcatccgcaagaaccttgtgaagaagtgccttgagctcttctttgagattgctgagaacaaggaagactacaacaagttctacgaggctttctctaagaacctgaagctcggtatccatgaggactcccaaaacagaaccaagattgctgagttgctccgttaccactcaaccaagagcggtgatgaattgactagtctcaaggactacgtgacaaggatgaaggaaggtcagaacgatatcttctacatcactggtgagagcaagaaggctgttgagaactctccattccttgagaagctcaagaagaaaggtattgaagttctctacatggttgatgcgattgatgagtacgctattggtcagcttaaggaattcgagggaaagaaacttgtttctgcaaccaaggaaggtctgaaactggatgagaccgaagatgaaaagaagaagaaagaagagctcaaggagaagtttgaaggactctgcaaagtgatcaaagacgttttgggtgacaaggtcgagaaggttattgtttctgaccgtgttgtggactcaccgtgctgtcttgtaaccggcgaatacggctggactgcaaacatggagaggatcatgaaagctcaagccttgagagacagcagcatggctggttacatgtcgagtaagaagacaatggagattaatccagagaactccatcatggatgagttgagaaagcgagctgacgcagacaagaacgacaagtctgtgaaggaccttgtgcttctcctctttgagaccgctcttctcacttctggtttcagccttgatgagccaaacactttcggaaacaggatccacaggatgctgaagcttggactgagcattgatgacgatgatgctgttgaagccgatgctgagatgcctccccttgaagacgatgctgatgccgaaggtagcaagatggaggaagtcgactaa

SEQ ID NO: 129312 - protein, 699 aa, Arabidopsis thaliana
MADAETFAFQAEINQLLSLIINTFYSNKEIFLRELISNSSDALDKIRFESLTDKSKLDGQPELFIHIIPDKTNNTLTIIDSGIGMTKADLVNNLGTIARSGTKEFMEALAAGADVSMIGQFGVGFYSAYLVADKVVVTTKHNDDEQYVWESQAGGSFTVTRDTSGETLGRGTKMVLYLKEDQLEYLEERRLKDLVKKHSEFISYPISLWIEKTIEKEISDDEEEEEKKDEEGKVEEVDEEKEKEEKKKKKIKEVSHEWDLVNKQKPIWMRKPEEINKEEYAAFYKSLSNDWEEHLAVKHFSVEGQLEFKAILFVPKRAPFDLFDTKKKPNNIKLYVRRVFIMDNCEDIIPEYLGFVKGIVDSEDLPLNISRETLQQNKILKVIRKNLVKKCLELFFEIAENKEDYNKFYEAFSKNLKLGIHEDSQNRTKIAELLRYHSTKSGDELTSLKDYVTRMKEGQNDIFYITGESKKAVENSPFLEKLKKKGIEVLYMVDAIDEYAIGQLKEFEGKKLVSATKEGLKLDETEDEKKKKEELKEKFEGLCKVIKDVLGDKVEKVIVSDRVVDSPCCLVTGEYGWTANMERIMKAQALRDSSMAGYMSSKKTMEINPENSIMDELRKRADADKNDKSVKDLVLLLFETALLTSGFSLDEPNTFGNRIHRMLKLGLSIDDDDAVEADAEMPPLEDDADAEGSKMEEVD

SEQ ID NO: 129313 - DNA, 2439 bp, Xerophyta viscosa
  CDS (1)..(2439)
atgaggaattggtcgatccctcctgcgctcgtcctcctacttctgatttcactctccgcaatccctgatggaggccgtaagctgcacgcgaacgccgaggagagccgcgatgccgacgagcttgtggatccgccgaaggtagaggagaagatcgccggcgttcatggaggtctttctacagacgccgatgttgccaagagggaggcggagtcgatgtctaggaagaatttgaggagcaatgcggagaaattcgagtttcaagctgaggtttcacggctaatggatatcatcatcaactcgctctacagtaacaaggatatcttccttagagagctcatctccaatgcgtctgatgctttggataagataaggttcctttcccttactgataaggaggtattgggcgagggcgacaacacgaagcttgagatcatgatcaagttggataaggagaagaagatcctctctattagagataggggtattggtatgaccaaagaggaccttatcaagaatttgggtactattgcaaagtcaggaacctcagcttttgttgagaagatgcagacaggaggtgatctgaacctcatcgggcagtttggagtgggtttctactcagtatatctagtttctgactatgttgaagtcattagcaagcacaatgatgacaaacagtatgtttgggaatctaaggctgatggtgcatttgccatctccgaggatacctggaatgagcccttgggacgtggaactgagatccgtttgcatctgagggatgaagcgaaggagtacctggatgagtcaaaattgaaggagttggttaagaagtattctgaatttatcaacttccccatatacctctgggcaagcaaggaggttgatgttgaagttccatctgatgaagaagaatccagtgatgtggaggagaaatctgagagtgaatcttctgaagaagaaatagaagaggacgatgctgagaaaaagcccaaaacaaagactgtcaaggaaacaacctatgagtgggagcttttaaatgatgttaaggccatatggcttcgcagccctaaagaagttactgatgaggaatatactaagttctaccactctcttgctaaggattttagtgatgaaaaacctttagcttggagtcatttttctgctgaaggtgatgtggaattcaaggctgtgctctttgtgcctcctaaggcaccacatgatctgtacgaaagttactacaattctcgtaaatccaacttgaagctatatgtcaggcgtgtcttcatttcggatgaatttgacgaacttctccccaagtacttgagctttttgatgggtctcgttgactcggatacacttccactgaatgtatcaagagagatgcttcaacagcatagcagcctgaagacaattaagaagaaattgatacgtaaagctcttgatatgattagaaaaattgctgatgaagatcctgatgagtctgacaaggaccattcggaagaagcaggtgaagagaatgagaagaagggattgtacactaaattctggaatgagtttggaaaatcaataaagcttggcattattgaggatgcacaaaatagaaatcgcctggccaaacttctgagatttgaaaccaccaagtctgatggtaagcttacatcgttggataagtacatatctagaatgaaacctgggcagaaggacattttctacttaactggaaccagcaaagagcagctagagaaatctccattccttgaggggcttaagaagaaggactatgaggtcattttcttcactgacccagttgatgagtatttgatgcaatacttgatggactatgaggacaagaaattccagaacgtgtccaaggagggtctcaaaatcgggaaggagtcaaagatcaaggatctcaaggagtccttcaaggagctcaccagttggtggaaagaagctctttccagtgagaatgtggactccgtgaagattagcaaccggttggataacactccttgcgttgttgtcacatcgaaatatggttggagtgcaaacatggagaagattatgcagtctcagactctttccgatgccagcaagcaggcatacatgcgcgggaagagggtgctcgagattaacccaagacaccctatcattaaagaacttcgtgaaagagttgccgtggaccctcaggatgaaaacatcaagcaaacagcgaagctgatttaccaaacagctctcatggagagtggattcctgatgaatgatccgaaagagttcgcaacaagtatatacagttctgttaaatccagcttgaatattagtccagatgccaaagtcgaagaggaggaggatactgatgagccggaggtggaagaaaaggaatctgcttcaagcaagggatcagaagaggcagaggatttcagcgccaaggatgagttgtaa

SEQ ID NO: 129314 - protein, 812 aa, Xerophyta viscosa
MRNWSIPPALVLLLLISLSAIPDGGRKLHANAEESRDADELVDPPKVEEKIAGVHGGLSTDADVAKREAESMSRKNLRSNAEKFEFQAEVSRLMDIIINSLYSNKDIFLRELISNASDALDKIRFLSLTDKEVLGEGDNTKLEIMIKLDKEKKILSIRDRGIGMTKEDLIKNLGTIAKSGTSAFVEKMQTGGDLNLIGQFGVGFYSVYLVSDYVEVISKHNDDKQYVWESKADGAFAISEDTWNEPLGRGTEIRLHLRDEAKEYLDESKLKELVKKYSEFINFPIYLWASKEVDVEVPSDEEESSDVEEKSESESSEEEIEEDDAEKKPKTKTVKETTYEWELLNDVKAIWLRSPKEVTDEEYTKFYHSLAKDFSDEKPLAWSHFSAEGDVEFKAVLFVPPKAPHDLYESYYNSRKSNLKLYVRRVFISDEFDELLPKYLSFLMGLVDSDTLPLNVSREMLQQHSSLKTIKKKLIRKALDMIRKIADEDPDESDKDHSEEAGEENEKKGLYTKFWNEFGKSIKLGIIEDAQNRNRLAKLLRFETTKSDGKLTSLDKYISRMKPGQKDIFYLTGTSKEQLEKSPFLEGLKKKDYEVIFFTDPVDEYLMQYLMDYEDKKFQNVSKEGLKIGKESKIKDLKESFKELTSWWKEALSSENVDSVKISNRLDNTPCVVVTSKYGWSANMEKIMQSQTLSDASKQAYMRGKRVLEINPRHPIIKELRERVAVDPQDENIKQTAKLIYQTALMESGFLMNDPKEFATSIYSSVKSSLNISPDAKVEEEEDTDEPEVEEKESASSKGSEEAEDFSAKDEL

SEQ ID NO: 129315 - DNA, 2073 bp, Drosophila melanogaster
  CDS (1)..(2073)
atgtctgtacgagcgatgggagtgctgggccaggcgtgccgcctcggtcgctgtgcccaagtgttgaggcagagtcaccgatccgccccagcagcgttcaatatcacccttggatcgcagcattcgccgggtgctctctcgctccgtcgctactccacggagaccaagcaggcatcaggatcagtggtggacaagcatgagttccaggcagagacgcgccagctacttgacattgtggctcgttccttatactccgaccacgaggtctttgtgcgcgagcttatttcgaatgcaagcgatgcgctggagaaatttcggtacacctcgttgagcgctggaggcgagaatctggctggaaaggaccggcctctggagattcgtatcaccaccgacaagccactgatgcagctaatcatccaggacacgggcatcggcatgaccaaggaggagctggtcagcaacctgggcaccattgcacgcagcggctcgaagaagttcctggagcagatgaaggggacccagcagggagccagctcggaggcatcctcgaacattattggtcagttcggcgtgggcttttactcttccttcattgtcgccaataaggtggaggtgttcacgagggcggctgtgcctaatgcacccggactgcgttggtccacggatggcagtggaacctacgagatcgaagaggtgcctgacgttgagttgggaacgcgaatcgtgcttcatttaaagaccgattgccgtgaatatgcggacgaggagaggatcaaggcggtaatcaagaaatacagcaactttgtgggctcacccatcttgcttaacggaaagcaggccaatgagatcaagcctctgtggcttcttgagccacaaagcatcagcaaggagcagcaccatgacttctatcggttcattagcaatagcttcgatgtcccgcgcttcaccttacactataatgctgacgtacccttgagcatccatgcactgctctacttccccgaaggaaagcctggtttattcgagatgtctcgggacggaaacaccggtgtggctctttacacccgcaaggtgcttattcagtccaagactgagcatctgctgcccaagtggctgcgttttgtaaagggtgttgtcgactctgaggacattccactcaacctgagtcgcgagctgctccagaacagcagcctgattcgcaaactgtccagtgtgatttccacccgcgttatccgtttcctgcaagagcggtccaagaagcagccagaagagtacgaggccttctaccgggactatgggcttttcctgaaggaaggaattgtaacctccagcgacgcttccgagaaagaagaaatagctaaacttctgcgttttgaatcctccaagtcggagaccgccagtgggcgcatgtcgctggaggagtactacaacgccgttcccgcagaacagcagaatatttactacttggcagcacccaaccgcgttcttgccgagtcctcgccctactacgagagtctgaagaagcgcaacgagctggtgctcttctgctacgaaccctatgatgagctggtgctcatgcagctgggcaagttcaaaagcaaaaaactcgtttccgtggagaaggagatgcgcgaagagtccaaggagacaacagcgaccacccttggcgagggcagtctgctgcgctcagagctcgacactttgattccctggctggaggaggagctcagggggcaggttattaaagtaaaagccaccactcgtctagacacacatccctgtgtaatcaccgtagaggaaatggctgccgctcgccacttcattcgcacccagagtcaccaggtgccagaacagaatcgatttgccctgcttcaaccagaactggagatcaacccaaagcaccccatcatcaagaagcttaacaagctccgtgagagcgacaaggatctggcccaacttatcgccaagcagctcttcgcaaacgcaatggtgggcgccggtttggctgaggatccccgcatgctgctaaccaacatgaacactctgctatcgcgggccctggagaaatactag

SEQ ID NO: 129316 - protein, 690 aa, Drosophila melanogaster
MSVRAMGVLGQACRLGRCAQVLRQSHRSAPAAFNITLGSQHSPGALSLRRYSTETKQASGSVVDKHEFQAETRQLLDIVARSLYSDHEVFVRELISNASDALEKFRYTSLSAGGENLAGKDRPLEIRITTDKPLMQLIIQDTGIGMTKEELVSNLGTIARSGSKKFLEQMKGTQQGASSEASSNIIGQFGVGFYSSFIVANKVEVFTRAAVPNAPGLRWSTDGSGTYEIEEVPDVELGTRIVLHLKTDCREYADEERIKAVIKKYSNFVGSPILLNGKQANEIKPLWLLEPQSISKEQHHDFYRFISNSFDVPRFTLHYNADVPLSIHALLYFPEGKPGLFEMSRDGNTGVALYTRKVLIQSKTEHLLPKWLRFVKGVVDSEDIPLNLSRELLQNSSLIRKLSSVISTRVIRFLQERSKKQPEEYEAFYRDYGLFLKEGIVTSSDASEKEEIAKLLRFESSKSETASGRMSLEEYYNAVPAEQQNIYYLAAPNRVLAESSPYYESLKKRNELVLFCYEPYDELVLMQLGKFKSKKLVSVEKEMREESKETTATTLGEGSLLRSELDTLIPWLEEELRGQVIKVKATTRLDTHPCVITVEEMAAARHFIRTQSHQVPEQNRFALLQPELEINPKHPIIKKLNKLRESDKDLAQLIAKQLFANAMVGAGLAEDPRMLLTNMNTLLSRALEKY

SEQ ID NO: 129317 - DNA, 2540 bp, Crypthecodinium cohnii
  CDS (60)..(2195)
tgcgaacagcaagcagactttgcagtggcccgtgtgttgcttctaccatagtcgcagccatggctgagaccttcgcattcaatgctgacattcagcagttgatgagcttgatcatcaacaccttctactccaacaaggaaatcttcctccgagagttgatctccaacgcttccgatgccttggacaaaatccgatacgagtccatcacggaccctgagaagatcgaggcccagcccaacttcttcatcaagatcatccccgacaagaccaacaacaccttgaccattgaggactcaggcattggtatgaccaagaacgagctcatcaacaacttgggtaccatcgccaagtctggcaccaaggccttcatggaggccatggctgctggaggtgacatctccatgattggtcagttcggtgtcggtttctactccgggtacttggtggccgacaagatccgagtggtttccaagcacaacgacgacgagcagtatgtctgggagtccggtgctggcggctctttcactgtgcagaaggacaccgagatggtccacggcgagatcaagcgtggcaccaagatcatctgctacttgaaggaggaccagtcggagttcttggaggagcgccgattgaaggatttggtcaagaagcacagcgagttcatcggtttccccatcgagctctacgtcgagaagagcaaggagaaggaggtgaccgactccgaggaggacgaggaggatgagaagaagaaggaggagggtgccgagggcgacgagcccaagatcgaggaggtcgacgaggagaaggagaaggaggagaagaagaagaagaccaagaaggtgaaggaggtctcccacgagtgggagcagttgaacaagaacaagcccttgtggatgcgcaagagcgaggacgtgaccaacgaggagtacgcctccttctacaagagcctttccaacgactgggaggaccacttggctgtgaagcacttcagtgtcgagggtcagctcgagttccgagccctcctcttcgtgccccgccgagcccccttcgacctcttcgagtccaagaagaagcgaaacaacatcaagttgtacgtccgccgtgtcttcatcatggacgactgcgacgagctcatgcccgagtggttgaacatggtcaagggcgtcgtcgactccgaggacttgcccctcaacatctcccgagagaccctccagcagaacaagatcttgagggtgatcaagaagaacctcgtcaagaagtgcttggagatgttcgccgagattgccgagaagaaggacgactacaagaaattctacgagcagttcggcaagtgcttgaagttgggcgtgcacgaggactccaccaaccgcaccaaggtcgccgagctcttgaggtggaacacctccaagtctggcgacgagcagatcagcttgaaggagtacgtcgaccgcatgaaggagggccagaacgacatctattacatcactggcgagagcatcgccgctgtcgcttcctcccccttcttggagaccctccgcaagaagggcctcgaggtcttgtacatggtcgaccccatcgacgagtactgcgtgcagcaactcaaggagttcgacggcaagaagttgaaatccaccaccaaggagggtctggatttggaggacgaggacgagaagaagaaattggaggagctcaaggctgagttcgagcctctgaccaagttgatgaaggaagtcttgggtgacaaggtcgagaaggtcttggtgagctcccgaatggccgactctccttgcgtcctcaccaccagcgagtacggctggtctgccaacatggagcgcatcatgaaggcccaggccatgcgcgacaactccatgactagctacatggtctccaagaagaccatggagatcaaccccaagcactccatcatgtccgagttgaagaagaaggctgccgccgacaagtccgacaagactgtcaaggacttgatctggttgctgttcgacacgtctttgttgacctctggtttcaacttggacgagcccactcagttcgctggccgcatccaccgcatgatcaagttgggcttgagcatcgacgacgacgatgagggccttggcgacgacgatgacttgcctcccttggaggaggtcgagggcgctgctgatgaggcctccaagatggaggaggtcgactaagtttgtttgtttggcctcagcgcagcaggccagtaatgtcggccctgacatgcgtgccaacaagtagagaggaattcattgcggcttgcctttttttgctctcttctggtttttcttgtgagccatgggaggggcttagatgtgtgacacactcttccttccgtccgatctttcggctgccccacgcgcacaagctgggaagttagggaattcctgtgcatctgcgaactgcctctcttgggggccgatcgtcgcatctctgcaaagacccaatgctccgctttcgaagtgtagcgaaacccatgccgagatcagcattgccctcggctgcgtcgaaaaaaaaaa

SEQ ID NO: 129318 - protein, 711 aa, Crypthecodinium cohnii
MAETFAFNADIQQLMSLIINTFYSNKEIFLRELISNASDALDKIRYESITDPEKIEAQPNFFIKIIPDKTNNTLTIEDSGIGMTKNELINNLGTIAKSGTKAFMEAMAAGGDISMIGQFGVGFYSGYLVADKIRVVSKHNDDEQYVWESGAGGSFTVQKDTEMVHGEIKRGTKIICYLKEDQSEFLEERRLKDLVKKHSEFIGFPIELYVEKSKEKEVTDSEEDEEDEKKKEEGAEGDEPKIEEVDEEKEKEEKKKKTKKVKEVSHEWEQLNKNKPLWMRKSEDVTNEEYASFYKSLSNDWEDHLAVKHFSVEGQLEFRALLFVPRRAPFDLFESKKKRNNIKLYVRRVFIMDDCDELMPEWLNMVKGVVDSEDLPLNISRETLQQNKILRVIKKNLVKKCLEMFAEIAEKKDDYKKFYEQFGKCLKLGVHEDSTNRTKVAELLRWNTSKSGDEQISLKEYVDRMKEGQNDIYYITGESIAAVASSPFLETLRKKGLEVLYMVDPIDEYCVQQLKEFDGKKLKSTTKEGLDLEDEDEKKKLEELKAEFEPLTKLMKEVLGDKVEKVLVSSRMADSPCVLTTSEYGWSANMERIMKAQAMRDNSMTSYMVSKKTMEINPKHSIMSELKKKAAADKSDKTVKDLIWLLFDTSLLTSGFNLDEPTQFAGRIHRMIKLGLSIDDDDEGLGDDDDLPPLEEVEGAADEASKMEEVD

SEQ ID NO: 129319 - DNA, 2154 bp, Spodoptera frugiperda
  CDS (1)..(2154)
atgcccgaagaaatgcagaccgatgtcgccgaggtggagaccttcgccttccaggcggagatcgcccagcttatgtccctgatcatcaacacattctactccaacaaagagatcttccttcgtgagttgatttccaactcttctgatgccttggacaagatccgttatgagtcactcaccgacccatcgaagctggacagcggcaaggagctgtacatcaagatcattcccaacaagagcgaaggtacactcactattattgataccggtattggtatgaccaaggctgacctcgtcaacaaccttggtaccatcgctaagtcaggaaccaaggcattcatggaggccctgcaggcaggcgccgacatcagcatgatcggtcagttcggtgtgggtttctactcatgctacctggtcgctgaccgcgtgacagttcactcgaagcacaatgacgacgagcagtacatgtgggagtcgtcggcgggaggctcgttcacggtccgccccgaccctggcgagcccctcggacgcggtaccaagatcgttctccacatcaaggaagacctcactgagtacctggaagagcacaagatcaaggaaatcgtgaagaagcactcacagttcatcggctaccccatcaaactgatggttgagaaggaacgcgagaaggagctctctgatgacgaggctgaggaggaaaagaaagaggacgagaaggaggatgacaagcccaagatcgaggatgtgggagaggacgacgaggaggacaagaaggacaagaagaagaagaagaccatcaaggagaagtacacagaggacgaggaactcaacaagaccaagcccatctggacccgcaatgctgatgacatcacacaggaggagtacggtgacttctacaaatccctcaccaatgactgggaggaccaccttgctgtcaaacacttctctgttgaaggtcagctggagttcagagccctgttgttcgtgccccgccgtgctcccttcgacttgtttgagaacaagaagcgcaagaacaacatcaagttgtacgtccgcagggtgttcatcatggacaactgcgaggaccttatccctgagtacctgaacttcatcaagggtgtagtcgacagtgaggacctgcccctcaacatctctcgtgagatgctccaacagaacaagatcctgaaagtaatcaggaagaacttggttaagaaatgcttggaactgttcgaagagttggctgaagacaaagagaactacaagaagtactacgagcaattcagcaagaacctgaagcttggtatccacgaggactcccagaacaggtcaaaactggctgacttgctccgctaccacacatctgcctctggtgatgaggcgtgctccctcaaagagtatgtctcacgcatgaaggagaaccagaaacacatctactacatcactggtgagaaccgtgaccaggttgccaactcatcattcgtagagcgagtcaagaagcgtggttatgaagttgtatacatgaccgagcccattgatgagtatgtagtacaacagatgagggagtacgatggtaagactctagtctctgtcacaaaggagggtctagaactccctgaagatgaagaggagaagaagaagcgcgaggaggacaaggtcaagttcgagggtctctgcaaggtcatgaagaacatccttgacaacaaagttgagaaggttgttgtctccaaccgtctcgttgagtccccatgctgcattgtcactgctcagtatggttggtctgccaacatggagcgtatcatgaaggctcaggctctccgtgacacatccaccatgggttacatggcggccaagaagcaccttgagatcaaccctgaccattccatcgtcgagaccctgaggcagaaggccgaggctgacaagaacgacaaggctgtgaaggacctcgtcatcctgctgtacgagactgccctgctgtcttctggcttcaccctggatgagccccaggtgcacgcctctcgcatttaccgcatgatcaagcttggtctgggcatcgacgaggacgagcctatccaggtggaggagtcgagcgccggcgacgtgcccccactagagggcgacgctgacgacgcgtcacgtatggaggaagtggattaa

SEQ ID NO: 129320 - protein, 717 aa, Spodoptera frugiperda
MPEEMQTDVAEVETFAFQAEIAQLMSLIINTFYSNKEIFLRELISNSSDALDKIRYESLTDPSKLDSGKELYIKIIPNKSEGTLTIIDTGIGMTKADLVNNLGTIAKSGTKAFMEALQAGADISMIGQFGVGFYSCYLVADRVTVHSKHNDDEQYMWESSAGGSFTVRPDPGEPLGRGTKIVLHIKEDLTEYLEEHKIKEIVKKHSQFIGYPIKLMVEKEREKELSDDEAEEEKKEDEKEDDKPKIEDVGEDDEEDKKDKKKKKTIKEKYTEDEELNKTKPIWTRNADDITQEEYGDFYKSLTNDWEDHLAVKHFSVEGQLEFRALLFVPRRAPFDLFENKKRKNNIKLYVRRVFIMDNCEDLIPEYLNFIKGVVDSEDLPLNISREMLQQNKILKVIRKNLVKKCLELFEELAEDKENYKKYYEQFSKNLKLGIHEDSQNRSKLADLLRYHTSASGDEACSLKEYVSRMKENQKHIYYITGENRDQVANSSFVERVKKRGYEVVYMTEPIDEYVVQQMREYDGKTLVSVTKEGLELPEDEEEKKKREEDKVKFEGLCKVMKNILDNKVEKVVVSNRLVESPCCIVTAQYGWSANMERIMKAQALRDTSTMGYMAAKKHLEINPDHSIVETLRQKAEADKNDKAVKDLVILLYETALLSSGFTLDEPQVHASRIYRMIKLGLGIDEDEPIQVEESSAGDVPPLEGDADDASRMEEVD

SEQ ID NO: 129321 - DNA, 2433 bp, Oryza sativa
  CDS (1)..(2433)
atgcgcaagtgggcgctctcctccgcgctcctcctcctcctcctcaccacactccccgatccagctaagaagctccaagtcaatgctgatgacagcactgatgagttagttgatccgccgaaggtagaggagaagattggtggtgttccccatggcctgtccacggactctgaggttgttcagagggaggctgagtcaatctcgaggaagaccctcaggagctcagcggagaaatttgagttccaggctgaggtgtccagactcatggacatcatcatcaactcactctacagcaacaaggacattttcctgagggagctcatctccaatgcttctgatgctttggacaagattaggttcctggctctcactgataaggaggttttgggcgaaggtgacactgctaagcttgaaatccagattaagctggataaggagaagaagattctctccattcgggataggggtattggtatgaccaaggaagatctcattaagaaccttgggaccattgccaaatctggaacttcagcttttgtggaaaaggtgcagactgggggtgacctcaatctcattgggcaattcggtgttggtttctattcagtatacttggttgctgactatgttgaagtgatcagcaagcacaatgacgacaaacagcatgtctgggagtccaaagctgatggatcattcgctatctctgaggatacatggaatgaacccctgggccgtggaactgaaataagactgcacctccgagatgaagccaaggagtacgtggaagaagacaagctaaaggatttggtgaagaagtactctgagttcatcaatttccccatttacttgtgggcaaccaaggaggttgatgtggaagtgccagctgatgaggatgagtcaagtgaatcaagtgaagaagaggaatcatcccctgagtctacagaggaagaagagacagaagagggtgaagagaagaagcccaagacaaagacagtaaaggaaaccactactgagtgggagcttctgaatgatgtgaaggctatatggcttcgtagccctaaggaggttactgaagaagaatacacaaagttttaccactcacttgctaaggactttggtgatgacaagcccttgtcttggagccacttcactgctgagggagatgttgagttcaaagctttgctctttgttcctcccaaggctccacatgatctctatgagagttactacaactctaacaagtcaaaccttaagttgtatgttagaagggtttccatctctgatgaatttgatgagcttcttccgaagtatctcagctttttgaagggtctcgtcgactcggacacattgcctctcaatgtatcacgagaaatgctccaacaacatagtagcctgaagaccatcaagaagaaactaatccgcaaagctcttgacatgattagaaaacttgctgaggaagatcctgatgagtacagcaacaaagataagacagatgaagaaaaaagtgcaatggaggagaaaaagggccagtatgccaagttctggaatgagtttggaaaatcagtcaagttgggcatcattgaagacgcaactaacaggaaccgtcttgcaaagcttctgagatttgaaagtaccaagtcggaaggcaaacttgcctctcttgatgagtacatttcaaggatgaagccagggcagaaggacatcttttacattaccggaagcagcaaggaacaattagagaaatcaccgttccttgagaggctaaccaaaaagaactacgaggttatctacttcactgaccctgttgacgagtacttgatgcaatacctcatggactacgaggacaagaagttccagaacgtctccaaggagggtctcaaactcggcaaggactctaagctcaaggacctcaaggagtccttcaaggagctgaccgactggtggaagaaggctcttgacaccgagagcgtggactcggtgaagatcagcaaccggctgagcgacaccccctgcgtggtggtgacatccaagtacgggtggagcgccaacatggagaagatcatgcagtcacagaccctctcggatgccagcaagcaggcgtacatgcgcggcaagagggtactcgagatcaaccccaggcaccccatcatcaaggaactccgtgacaaggtcgcccaggacagcgagagcgagagcttgaagcagacggcgaagctggtgtaccagacggccctcatggagagcggcttcaacctccctgatcccaaggacttcgccttcagcatctacaggtcggtgcagaagagccttgacctgagccccgacgcggccgtggaagaggaagaggaggtcgaggaggccgaggttgaagagaaggaatcatccaacatcaaggaggaggcggagccgtcgtcgtatgataaggacgagctgtag

SEQ ID NO: 129322 - protein, 810 aa, Oryza sativa
MRKWALSSALLLLLLTTLPDPAKKLQVNADDSTDELVDPPKVEEKIGGVPHGLSTDSEVVQREAESISRKTLRSSAEKFEFQAEVSRLMDIIINSLYSNKDIFLRELISNASDALDKIRFLALTDKEVLGEGDTAKLEIQIKLDKEKKILSIRDRGIGMTKEDLIKNLGTIAKSGTSAFVEKVQTGGDLNLIGQFGVGFYSVYLVADYVEVISKHNDDKQHVWESKADGSFAISEDTWNEPLGRGTEIRLHLRDEAKEYVEEDKLKDLVKKYSEFINFPIYLWATKEVDVEVPADEDESSESSEEEESSPESTEEEETEEGEEKKPKTKTVKETTTEWELLNDVKAIWLRSPKEVTEEEYTKFYHSLAKDFGDDKPLSWSHFTAEGDVEFKALLFVPPKAPHDLYESYYNSNKSNLKLYVRRVSISDEFDELLPKYLSFLKGLVDSDTLPLNVSREMLQQHSSLKTIKKKLIRKALDMIRKLAEEDPDEYSNKDKTDEEKSAMEEKKGQYAKFWNEFGKSVKLGIIEDATNRNRLAKLLRFESTKSEGKLASLDEYISRMKPGQKDIFYITGSSKEQLEKSPFLERLTKKNYEVIYFTDPVDEYLMQYLMDYEDKKFQNVSKEGLKLGKDSKLKDLKESFKELTDWWKKALDTESVDSVKISNRLSDTPCVVVTSKYGWSANMEKIMQSQTLSDASKQAYMRGKRVLEINPRHPIIKELRDKVAQDSESESLKQTAKLVYQTALMESGFNLPDPKDFAFSIYRSVQKSLDLSPDAAVEEEEEVEEAEVEEKESSNIKEEAEPSSYDKDEL

SEQ ID NO: 129323 - DNA, 2088 bp, Neurospora crassa
  CDS (1)..(2088)
atggcgaccgccgagactttcgagttccaggctgagatctctcagcttctctccctcatcatcaacactgtttactccaacaaggagatcttccttcgggagcttatctccaacgcctccgatgctctcgacaagatccgctatgaagtcccctgctcggaccccagcaagcctggactcctgcaagatcactccagcatcgacatcatccccgacaaggcgaacaagaccctcaccatacgcgataccggtatcggtatgaccaaggctgacctcgtcaacaaccttggtactattgcccgctccggtactaagcagttcatggaggccctcaccgctggtgccgatatctccatgatcggtcagttcggtgttggtttctactctgcctaccttgttgccgacagagttaccgtcgtctccaagcacaacgatgacgagcagtacatctgggagtcttcggctggtggtaccttcaccatcagacctgacaccgagggcgagcccttggccaagatcatcctccacctcaaggaggagcagcttgactacctcaacgagagcagaatcaaggaggtcgtcaagaagcactccgagtttatctcctaccccatctaccttcacgtccagataagccaggaggtaaccgaggagggtgacgacaagaatcccaagatcgaggaggttgatgaggaggaggaggagaagaagaagagaagaaggtcaagaacgatcaaggagacaagatctgaggaggaggagctcaacaagcagaagcccatctggactcgcaacccccaggacatcacccaggaggagtatgctgccttctacaagtccctctccaacgactgggaggaccacctcgctgtcaagcacttctccgttgagggtcagctcgagttccgcgccatcctcttcgttcccaagcgcgctcccttcgacctcttcgagaccaagaagaccaagagcaacattaagctctacgtccgccgggtcttcatcaccgagcatgctaccgacctcgtccccgagtggctcagcttcatcaagggtgttgtcgactctgaggatctccccctcaacctgtctcgtgagactctccagcagaacaagatcatgaaggtcatcaagaagaacatcgtcaagaagtccatcgagctcttcaacgagattgctgaggacaaggagcagttcgacaagttctactctgccttctccaagaacatcaagcttggtatccacgaggatgcccagaaccgcagcgcccttgccaagctcctccgcttccactccaccaagtctggtgacgagatgacctctctctccgactacgttgctcgcatgcccgagcaccagaagaacatctactacatcactggcgagtccatcaaggccgtctccaagtctcccttccttgacgccctcaaggagaagggcttcgaggttctcttccttgtcgaccccattgatgagtacgccatgactcagctcaaggagttcgagggcaagaagcttgtcgacatcaccaaggacttcgagctcgaggaaaccgaggaggagaagaagcagcgtgagcaggaggagaaggagtacgaggatctctgcaaggccctcaagaacattctcggtgacaaggtcgagaaggtcgtcgtcgtctctcacaagctcgtcggctctccttgcgccatccgtactggccagttcggctggtccgccaacatggagcgtataatgaaggcccaggccctccgtgacacctccatgtctagctacatgtcttccaagaagaccttcgagatctcgcccaagagccccatcatcaaggagctcaagaagaaggttgagactgatggcgagaacgacaagactgtcaagtccatcgtccagctcctctatgagacctctcttctcgtctccggcttcaccatcgatgagcctgccagcttgccgagggggatccacaagctcgtctccctcggccaaaacctcgatgaggagcctgaggctgctgccgatgcccctgctgccgctgagggtactcccgccgccgagactggcgactccgccatggaggaggttgactaa

SEQ ID NO: 129324 - protein, 695 aa, Neurospora crassa
MATAETFEFQAEISQLLSLIINTVYSNKEIFLRELISNASDALDKIRYEVPCSDPSKPGLLQDHSSIDIIPDKANKTLTIRDTGIGMTKADLVNNLGTIARSGTKQFMEALTAGADISMIGQFGVGFYSAYLVADRVTVVSKHNDDEQYIWESSAGGTFTIRPDTEGEPLAKIILHLKEEQLDYLNESRIKEVVKKHSEFISYPIYLHVQISQEVTEEGDDKNPKIEEVDEEEEEKKKRRRSRTIKETRSEEEELNKQKPIWTRNPQDITQEEYAAFYKSLSNDWEDHLAVKHFSVEGQLEFRAILFVPKRAPFDLFETKKTKSNIKLYVRRVFITEHATDLVPEWLSFIKGVVDSEDLPLNLSRETLQQNKIMKVIKKNIVKKSIELFNEIAEDKEQFDKFYSAFSKNIKLGIHEDAQNRSALAKLLRFHSTKSGDEMTSLSDYVARMPEHQKNIYYITGESIKAVSKSPFLDALKEKGFEVLFLVDPIDEYAMTQLKEFEGKKLVDITKDFELEETEEEKKQREQEEKEYEDLCKALKNILGDKVEKVVVVSHKLVGSPCAIRTGQFGWSANMERIMKAQALRDTSMSSYMSSKKTFEISPKSPIIKELKKKVETDGENDKTVKSIVQLLYETSLLVSGFTIDEPASLPRGIHKLVSLGQNLDEEPEAAADAPAAAEGTPAAETGDSAMEEVD

SEQ ID NO: 129325 - DNA, 2103 bp, Triticum aestivum
  CDS (1)..(2103)
atggcgacggagaccgagaccttcgccttccaggccgagatcaaccagctcctctcgctcatcatcaacacctcctactccaacaaggagatcttcctccgcgagctcatctccaactcctccgatgccttggacaagatcaggttcgagagcctcacggacaagagcaagctcgatgcgcagcccgagctcttcatccacatcatccccgacaaggcgaccagcacgctcacgatcgtcgacagcggcattggcatgaccaagtcggacctcgtcaacaacctcgggaccatcgccaggtcggggaccaaggagttcatggaggcactcgctgccggcgctgacgtgtccatgattgggcagttcggtgttgggttctactccgcctacctcgtcgccgagagggtcgtcgtcaccaccaagcacaacgacgacgagcagtacgtgtgggagtctcaggccggtggctccttcaccgtcactcgtgatacgtctggggagcagctcggcaggggtaccaagatggtgctctacctcaaggacgaccagatggaataccttgaggagcgccgcatcaaggatctagttaagaagcactctgagtttatcagctaccccatctccctgtggaccgagaagaccactgagaaggaaatttctgacgatgaagatgaggaggagaagaaggatactgaggagggcaaggttgaggatgttgatgaggagaaggaagagaaggaaaagaagaaaaagaagatcaaggaagtctctcatgagtggaacttggtcaacaagcagaagcctatctggatgaggaagccagaggagatcaacaaggaagagtatgctgctttctacaagagcttgaccaatgactgggaggagcatttggctgtcaagcacttctctgttgagggccagcttgagttcaaggctgtcctgtttgtgcccaagagggccccctttgacctcttcgacaacaagaagaaggccaacaacatcaagctgtatgtgcgccgtgtcttcatcatggacaactgtgaggagttgatccctgagtacctgagctttgtcaagggcattgttgattcagaggacttgcccctgaacatctcccgtgagaccctccagcagaacaagatcctcaaggtcatcaggaagaaccttttcaagaagtgcattgagctcttctttgagattgctgagaacaaggaggactacaacaatttctacgaggccttctccaagaacctcaagcttggcatccacgaggactcccagaacaggaccaagattgctgagcttctgaggtaccactccaccaagagtggtgatgagctgacgagcctcaaggactatgtgactaggatgaaggagggacagaacgagatctactacatcaccggtgagagcaagaaggctgtggagaactctcccttccttgagaagctgaagaagaagggctatgaggtcatctacatggttgacgccattgatgagtatgccattggtcagctcaaggagtttgagggcaagaagcttgtctctgccaccaaggagggtctgaagctcgatgagagcgaggacgagaagaagaaacaggaggagctcaaggagaagttcgaggggctgtgcaaggtcatcaaggaggtgctgggcgacaaggtggagaaggtcatcgtctctgaccgtgttgtggactccccttgctgtctggtgactggcgagaatgggtggacccccaacatggagaggatcatgaaggcccaggccttgagggactcgagcatggctggctacatgtcaagcaagaagaccatggagatcaaccctgagaacgccatcatggacgagctccccaagcgcgccgacgccgacaagagcgacaagtcagtcaaggacctggtgatgctgctcttcgagacctccctgctcacctccggcttcagcctggaggaccccaacaccttcggcaccaggatccaccgcatgctcaagcttggcctgagcattgacgaggacgatgaggcgcctgagaacgacaccgacatgccgcccctggaggacgacgctggtgagagcaagatggaggaggtcgactaa

SEQ ID NO: 129326 - protein, 700 aa, Triticum aestivum
MATETETFAFQAEINQLLSLIINTSYSNKEIFLRELISNSSDALDKIRFESLTDKSKLDAQPELFIHIIPDKATSTLTIVDSGIGMTKSDLVNNLGTIARSGTKEFMEALAAGADVSMIGQFGVGFYSAYLVAERVVVTTKHNDDEQYVWESQAGGSFTVTRDTSGEQLGRGTKMVLYLKDDQMEYLEERRIKDLVKKHSEFISYPISLWTEKTTEKEISDDEDEEEKKDTEEGKVEDVDEEKEEKEKKKKKIKEVSHEWNLVNKQKPIWMRKPEEINKEEYAAFYKSLTNDWEEHLAVKHFSVEGQLEFKAVLFVPKRAPFDLFDNKKKANNIKLYVRRVFIMDNCEELIPEYLSFVKGIVDSEDLPLNISRETLQQNKILKVIRKNLFKKCIELFFEIAENKEDYNNFYEAFSKNLKLGIHEDSQNRTKIAELLRYHSTKSGDELTSLKDYVTRMKEGQNEIYYITGESKKAVENSPFLEKLKKKGYEVIYMVDAIDEYAIGQLKEFEGKKLVSATKEGLKLDESEDEKKKQEELKEKFEGLCKVIKEVLGDKVEKVIVSDRVVDSPCCLVTGENGWTPNMERIMKAQALRDSSMAGYMSSKKTMEINPENAIMDELPKRADADKSDKSVKDLVMLLFETSLLTSGFSLEDPNTFGTRIHRMLKLGLSIDEDDEAPENDTDMPPLEDDAGESKMEEVD

SEQ ID NO: 129327 - DNA, 2682 bp, Hordeum vulgare
  CDS (48)..(2477)
actctgcctgctgcaaccaaaactggtgagtgaagcggccggcgacgatgcgcaagtgggcgctctcctgcgcgctcctcctcgtcctcctcctcaccaccctccccgatccagctaagaagctccaagtcaatgccgaggagagcagcgacgaggttggcgattttcccaaggtagaggagaagcttggggccgtgccccatggcttgtccaccgactccgaggttgtccagagggagtccgagtcgatctcgaggaagaccctcaggaactcggccgagaagtttgagttccaggccgaggtgtccaggctcatggacatcatcatcaactcactctacagcaacaaggacatcttcctgagggagctcatttccaatgcatctgatgctttggacaagattaggttccttgccctcaccgataaggaggttatgggtgaaggtgacactgctaagcttgaaatccagattaagttggataaggagaacaagattctctctattcgcgataggggtgttggtatgaccaaggaagatctcattaagaaccttggaaccattgccaagtctggaacttcagcttttgtggaaaaaatgcagactggaggtgacctcaatctcattgggcagtttggtgttggtttctactcagtatacctggttgctgactatgttgaagtggtcagcaagcacaacgatgacaaacagtatgtatgggagtccaaagctgatggatcattcgctatttctgaggatacatggaatgaacccctgggccgtggaactgagatcaaactgcatctccgcgatgaggctaaggagtacttggaagaaggaaagctgaaggacttggtgaagaagtactctgagttcatcaacttccccatctacttgtgggcaaccaaggaggttgatgttgaagtgccagctgatgaggaggaatcaaacgaagaggaggaatcaaccacagagaccacagaggaagaagagacagaagatgatgaagagaagaagcctaagacaaagactgtaaaggaaactactactgaatgggagcttcttaatgatatgaaggccgtgtggcttcgtagccccaaggaggttaccgaagaggagtatgcaaagttttaccactcacttgctaaggactttggtgacgacaagcctatgtcttggagccacttcagtgctgagggagatgttgagttcaaagctttgctctttgttcccccgaaggctccacatgatctgtacgagagctactacaatgctaacaagtcaaacctcaagctgtatgttagaagggttttcatctctgatgaattcgatgatcttcttccaaaatacctcagctttttgatgggtattgttgactcagacacattgcccctcaatgtatcccgagaaatgcttcaacaacatagcagtctgaagaccatcaagaagaaactgatccgcaaggctcttgacatgattaggaaacttgctgaggaggatcctgatgagtacagcaacaaagaaaagacagatgatgaaaagagtgcaatggaggagaagaagggccagtatgccaagttctggaacgagtttggcaaatcagtcaagctgggaatcattgaagatgcaacaaacaggaaccgtcttgcaaagcttctgagattcgagagttccaagtcagatggcaaacttgtctcccttgatgagtatatttcaaggatgaaatcagggcagaaggacatcttctaccttacaggaagcagcaaggaacagctagagaaatctccattccttgagcagctaaccaagaaaaactacgaggttatctacttcaccgaccccgtggatgagtacctgatgcaatacctcatggactacgaggacaagaagttccagaacgtgtccaaggagggcctgaagctcggcaaggactcgaagctcaaggacctcaaggagtcgttcaaggagctgaccgactggtggaagaaggccctggacacggagggcattgactctgtgaagatcagcaaccggctgcacaacaccccctgtgtggtggtcacctccaagtatggatggagctccaacatggagaagatcatgcaggcacagaccctgtcggacgcgagcaagcaggcgtacatgcgcggcaagagggtcctggagatcaacccccggcaccccatcatcaaggagctccgcgacaaggtcgcccaggacagcgacagcgagggcctgaagcagacggcgaggctggtgtaccagacggcgctgatggagagcgggttcaacctgccggaccccaaggactttgcgtcgagcatctaccggtcggtgcagaagagcctggacctgagccccgacgctgccgtggaggaggaagaggaggtggaggagccagaggtggaggagaaggagtcggccaagcaggaggcggaggagccggaacacgagcagtacgacaaggacgagctgtagttgctcatatcgcccatttagctttcatttcattagaaagaaatgttggactggaaatgtgatggttttgagggacgtccatttttaccgcgcggaagacgattaatcatcgatcgtgatacggggggttttgtccgtgtaatgtactactgtacctagtttcttgtttaatgacgataccctagctagttggaattagcgtgca

SEQ ID NO: 129328 - protein, 809 aa, Hordeum vulgare
MRKWALSCALLLVLLLTTLPDPAKKLQVNAEESSDEVGDFPKVEEKLGAVPHGLSTDSEVVQRESESISRKTLRNSAEKFEFQAEVSRLMDIIINSLYSNKDIFLRELISNASDALDKIRFLALTDKEVMGEGDTAKLEIQIKLDKENKILSIRDRGVGMTKEDLIKNLGTIAKSGTSAFVEKMQTGGDLNLIGQFGVGFYSVYLVADYVEVVSKHNDDKQYVWESKADGSFAISEDTWNEPLGRGTEIKLHLRDEAKEYLEEGKLKDLVKKYSEFINFPIYLWATKEVDVEVPADEEESNEEEESTTETTEEEETEDDEEKKPKTKTVKETTTEWELLNDMKAVWLRSPKEVTEEEYAKFYHSLAKDFGDDKPMSWSHFSAEGDVEFKALLFVPPKAPHDLYESYYNANKSNLKLYVRRVFISDEFDDLLPKYLSFLMGIVDSDTLPLNVSREMLQQHSSLKTIKKKLIRKALDMIRKLAEEDPDEYSNKEKTDDEKSAMEEKKGQYAKFWNEFGKSVKLGIIEDATNRNRLAKLLRFESSKSDGKLVSLDEYISRMKSGQKDIFYLTGSSKEQLEKSPFLEQLTKKNYEVIYFTDPVDEYLMQYLMDYEDKKFQNVSKEGLKLGKDSKLKDLKESFKELTDWWKKALDTEGIDSVKISNRLHNTPCVVVTSKYGWSSNMEKIMQAQTLSDASKQAYMRGKRVLEINPRHPIIKELRDKVAQDSDSEGLKQTARLVYQTALMESGFNLPDPKDFASSIYRSVQKSLDLSPDAAVEEEEEVEEPEVEEKESAKQEAEEPEHEQYDKDEL

SEQ ID NO: 129329 - DNA, 2100 bp, Oryza sativa
  CDS (1)..(2100)
atggcctcggagacggagacgttcgccttccaggcggagatcaaccagctgctgtcgctcatcatcaacacgttctactccaacaaggagatcttcctccgcgagctcatctccaactcctccgatgcgttggacaagatcaggttcgagagcttgacggacaagagcaagctggatgctcagccagagctgttcatccatattgttcctgacaaggcctccaacacactgtcgatcattgacagtggtattggtatgaccaagtcagatcttgtgaacaacctgggtaccattgccaggtcagggactaaggagtttatggaggcactggctgctggtgctgatgtgtccatgattggtcagttcggtgttggattctactctgcctaccttgttgccgagagagtagttgtgaccaccaagcacaacgatgacgagcagtatgtgtgggagtctcaggctggtgggtccttcactgtcacacgtgacacatctggggagcagcttgggaggggtactaagatcaccctctacctcaaggatgatcagttggaataccttgaagagcgccgcctcaaggacctgatcaagaagcactctgagtttatcagctaccctatctctctatggactgagaagaccactgagaaggaaatttctgatgatgaagatgaggaagagaagaaggatgctgaggagggcaaggttgaggatgttgatgaagagaaggaagaaaaggagaagaaaaagaagaagatcaaggaggtttctcatgagtggtccctggtcaacaaacagaagcctatctggatgaggaagcctgaggagatcactaaggaggagtatgctgctttctacaagtccctgacaaacgactgggaggagcatcttgctgtcaagcacttctctgtggagggtcagctggaattcaaagctgttctctttgttcccaagagggcaccattcgacctctttgatacgaggaagaagctcaacaacatcaagctctacgtccgccgagtcttcatcatggacaactgtgaggagctgatccctgagtggctgagctttgtcaagggcattgttgactccgaggatcttcccctcaacatctcccgtgagatgctgcagcagaacaagattctcaaggtcatcaggaagaaccttgtcaagaagtgcgttgagctcttcttcgagattgctgagaacaaggaagactacaacaagttctatgaagccttctccaagaacctcaagctcggtatccacgaggactccaccaacagaaacaagattgccgagctcctgaggtaccactccaccaagagcggcgatgagctgaccagcctcaaggattacgtgacgaggatgaaggaaggccagaacgacatatactacatcaccggcgagagcaagaaggccgtggagaactcccccttcttggagaagctgaagaagaagggttacgaggtcctctacatggttgatgccatcgacgagtatgctgttggccagctcaaggagtttgagggcaagaagctcgtctctgccaccaaggagggactcaagcttgatgagagcgaggacgagaagaagcggaaggaggagctcaaggagaaattcgagggtctctgcaaggtcatcaaggaggtgctcggagacaaggtcgagaaggtggtggtctcggaccgtgtggtggactccccgtgctgcctcgtcaccggcgagtatggctggacggccaacatggagaggatcatgaaggcccaggcgctgagggactcgagcatggccgggtacatgtcgagcaagaagacgatggagatcaacccggagaacgccatcatggaggagctccgcaagcgcgccgacgccgacaagaacgacaagtccgtcaaggacctcgtcttgctcctcttcgagacggccctcctcacctccggcttcagcctcgacgaccccaacaccttcggcagcaggatccaccgcatgctcaagctcggcctgagcatcgacgaggacgagacggcggaggccgacaccgacatgccgccgctcgaggacgacgccggcgagagcaagatggaggaggtcgactaa

SEQ ID NO: 129330 - protein, 699 aa, Oryza sativa
MASETETFAFQAEINQLLSLIINTFYSNKEIFLRELISNSSDALDKIRFESLTDKSKLDAQPELFIHIVPDKASNTLSIIDSGIGMTKSDLVNNLGTIARSGTKEFMEALAAGADVSMIGQFGVGFYSAYLVAERVVVTTKHNDDEQYVWESQAGGSFTVTRDTSGEQLGRGTKITLYLKDDQLEYLEERRLKDLIKKHSEFISYPISLWTEKTTEKEISDDEDEEEKKDAEEGKVEDVDEEKEEKEKKKKKIKEVSHEWSLVNKQKPIWMRKPEEITKEEYAAFYKSLTNDWEEHLAVKHFSVEGQLEFKAVLFVPKRAPFDLFDTRKKLNNIKLYVRRVFIMDNCEELIPEWLSFVKGIVDSEDLPLNISREMLQQNKILKVIRKNLVKKCVELFFEIAENKEDYNKFYEAFSKNLKLGIHEDSTNRNKIAELLRYHSTKSGDELTSLKDYVTRMKEGQNDIYYITGESKKAVENSPFLEKLKKKGYEVLYMVDAIDEYAVGQLKEFEGKKLVSATKEGLKLDESEDEKKRKEELKEKFEGLCKVIKEVLGDKVEKVVVSDRVVDSPCCLVTGEYGWTANMERIMKAQALRDSSMAGYMSSKKTMEINPENAIMEELRKRADADKNDKSVKDLVLLLFETALLTSGFSLDDPNTFGSRIHRMLKLGLSIDEDETAEADTDMPPLEDDAGESKMEEVD

SEQ ID NO: 129331 - DNA, 2100 bp, Arabidopsis thaliana
  CDS (1)..(2100)
atggcggacgctgaaacctttgctttccaagctgagatcaaccagttgctttccctcatcatcaataccttttactctaacaaggagatcttcctccgtgaactcatcagtaactcttctgatgctttggacaagattagattcgagtccttgacggacaagagcaagctcgatggtcagcctgagctcttcattcacatcattcccgacaagactaacaacaccttgaccattattgatagtggtattggcatgaccaaggctgatttggtcaacaaccttggaacaattgcaagatctggaaccaaggaattcatggaagcactggctgctggagctgatgttagcatgattggtcagtttggtgttggtttctactctgcttacttggttgctgacaaggttgttgttactaccaagcacaatgacgatgagcagtacgtgtgggagtctcaggccgggggatctttcactgtgaccagagacacctctggggagactcttggtagaggaacaaagatggttctttacctcaaggaagaccagttggagtaccttgaggagcgaaggcttaaggatttggtgaagaagcactctgagttcatcagctacccaatctctctctggattgagaagaccattgagaaggagatctctgatgatgaagaggaggaagagaagaaggatgaggaaggcaaggttgaggaagttgatgaggagaaagaaaaggaggagaagaaaaagaagaagattaaggaggtttctcatgagtgggatttggtgaacaagcagaagcctatctggatgaggaagccagaggagatcaacaaggaggagtacgctgctttctacaagagtctcagcaatgattgggaggagcatttggctgtgaagcatttctctgttgaaggacagcttgagttcaaagctatcctctttgttcccaagagagctccttttgatctctttgacactaagaagaagcccaacaacatcaagctctatgtccgtcgtgtcttcatcatggacaactgtgaagacatcatccctgagtacctcggatttgtgaaaggtattgtcgactctgaagatcttcctctcaacatctcgagagagacattgcagcagaacaagatcctcaaggtcatccgcaagaaccttgtgaagaagtgccttgagctcttctttgagattgctgagaacaaggaagactacaacaagttctacgaggctttctctaagaacctgaagctcggtatccatgaggactcccaaaacagaaccaagattgctgagttgctccgttaccactcaaccaagagcggtgatgaattgactagtctcaaggactacgtgacaaggatgaaggaaggtcagaacgatatcttctacatcactggtgagagcaagaaggctgttgagaactctccattccttgagaagctcaagaagaaaggtattgaagttctctacatggttgatgcgattgatgagtacgctattggtcagcttaaggaattcgagggaaagaaacttgtttctgcaaccaaggaaggtctgaaactggatgagaccgaagatgaaaagaagaagaaagaagagctcaaggagaagtttgaaggactctgcaaagtgatcaaagacgttttgggtgacaaggtcgagaaggttattgtttctgaccgtgttgtggactcaccgtgctgtcttgtaaccggcgaatacggctggactgcaaacatggagaggatcatgaaagctcaagccttgagagacagcagcatggctggttacatgtcgagtaagaagacaatggagattaatccagagaactccatcatggatgagttgagaaagcgagctgacgcagacaagaacgacaagtctgtgaaggaccttgtgcttctcctctttgagaccgctcttctcacttctggtttcagccttgatgagccaaacactttcggaagcaggatccacaggatgctgaagcttggactgagcattgatgacgatgatgctgttgaagccgatgctgagatgcctccccttgaagacgatgctgatgccgaaggtagcaagatggaggaagtcgactaa

SEQ ID NO: 129332 - protein, 699 aa, Arabidopsis thaliana
MADAETFAFQAEINQLLSLIINTFYSNKEIFLRELISNSSDALDKIRFESLTDKSKLDGQPELFIHIIPDKTNNTLTIIDSGIGMTKADLVNNLGTIARSGTKEFMEALAAGADVSMIGQFGVGFYSAYLVADKVVVTTKHNDDEQYVWESQAGGSFTVTRDTSGETLGRGTKMVLYLKEDQLEYLEERRLKDLVKKHSEFISYPISLWIEKTIEKEISDDEEEEEKKDEEGKVEEVDEEKEKEEKKKKKIKEVSHEWDLVNKQKPIWMRKPEEINKEEYAAFYKSLSNDWEEHLAVKHFSVEGQLEFKAILFVPKRAPFDLFDTKKKPNNIKLYVRRVFIMDNCEDIIPEYLGFVKGIVDSEDLPLNISRETLQQNKILKVIRKNLVKKCLELFFEIAENKEDYNKFYEAFSKNLKLGIHEDSQNRTKIAELLRYHSTKSGDELTSLKDYVTRMKEGQNDIFYITGESKKAVENSPFLEKLKKKGIEVLYMVDAIDEYAIGQLKEFEGKKLVSATKEGLKLDETEDEKKKKEELKEKFEGLCKVIKDVLGDKVEKVIVSDRVVDSPCCLVTGEYGWTANMERIMKAQALRDSSMAGYMSSKKTMEINPENSIMDELRKRADADKNDKSVKDLVLLLFETALLTSGFSLDEPNTFGSRIHRMLKLGLSIDDDDAVEADAEMPPLEDDADAEGSKMEEVD

SEQ ID NO: 129333 - DNA, 2115 bp, Ashbya gossypii
  CDS (1)..(2115)
atgtctagccaagagacctatgaattccaagctgagatcactcagttgatgagtttgatcatcaacacagtgtactcgaacaaggagatcttcttgagagagttgatctcgaacgcgtcggatgcgttggacaagatcagataccagtctctatcggaccccaaggtgctagagagcgacccagagctgttcatccgcttgacgcctaagcctgaggagaaggtgttggagatccgcgactccggtatcggtatgaccaaggcggagttgatcaacaacttgggtacgatcgccaagtcgggtacgaaggcgttcatggaggcattgtctgctggcgctgacgtgtcgatgatcggtcagttcggtgtcggtttctactcgctattcttggtggccgaccgggtgcaggtaatctcgaaacacaacgacgacgagcagtacatctgggagtccaacgcaggtggctcgttcaccgttacgctggacgaggtcaacgagcgcatcggcagaggtacgattttgcgtttgttcttgaaggaggaccagcttgagtacttggaggagaagagaatcaaggaggtcgtcaagagacactcggagtttgttgcctacccaattcagcttctagtgaccaaggaggtcgagaaggaggtgccagttgaggaggaggagaagaaggaggagaccgaagacgacaagaagcctaagctagaagaggttgacgaggaagaggaggacaaggagaagtccaagaccaagaaggtcaaggagaacgtcaaggagttggaggagttgaacaagaccaagcctttgtggaccagaaacccatctgaggtcacccaggaggagtacaacgccttctacaagtccatctccaacgactgggaggacccattggctgtcaagcacttctcggtcgagggtcagctagagttcagagccattttgttcattcctaagagagctccatttgacttgttcgagtccaagaagaagaagaacaacatcaagctatacgtccgtcgtgtgttcatcaccgacgaggctgaggagttgatcccagagtggttgtccttcgtcaagggtgttgtcgactctgaggacttgccattgaacttgtccagagagatgttgcagcagaacaagatcatgaaggtcatcaagaagaacatcgtcaagaagttgatcgaggccttcaacgagatcgccgaggactccgagcagttcgagaagttctactccgcatttgccaagaacatcaagttgggtatccacgaggactcccagaacagagcttctttggccaagctattgagatacaactccaccaagtctgtcgacgagcagacctctttggctgactacgtcaccagaatgccagaacaccagaagaatgtttacttcatcaccggtgagtccatcaaggctgtcgagaagtctccattcttggacgccttgaaggcaaagaactttgaagtcttgttcttggtcgacccaattgacgagtacgccttccagcaattgaaggagttcgagggtaagcagttggttgacatcaccaaggacttcgagttggaggaatccgaggaggagaagaagcagagagaggaggagatcaaggagttcgagcctttgaccgccgccttgaaggaggtcttgggtgaccaggtcgagaaggttgtcgtttcgtacaagttgattgacgctccagccgctatcagaactggccagttcggctggtccgcaaacatggagagaatcatgaaggctcaggccttgagagactctaccatgtcctcctacatggcctccaagaagatcttcgagatctctccaaagtccgccatcatcaaggagttgaagaagagagtcgaggacaacggcgcccaggacagaaccgtcaaggacttgaccagcttgttgtacgagactgcgttgctaacctctggtttcaccttggaggagccagccagcttcgctaccagaatcaaccggttgatctctttgggtctaaacattgacgaggaggagtccaccgagactgctgccgagacggctactgaggccccagttgaggaggtcgctccagagactgcgatggaagaggttgactaa

SEQ ID NO: 129334 - protein, 704 aa, Ashbya gossypii
MSSQETYEFQAEITQLMSLIINTVYSNKEIFLRELISNASDALDKIRYQSLSDPKVLESDPELFIRLTPKPEEKVLEIRDSGIGMTKAELINNLGTIAKSGTKAFMEALSAGADVSMIGQFGVGFYSLFLVADRVQVISKHNDDEQYIWESNAGGSFTVTLDEVNERIGRGTILRLFLKEDQLEYLEEKRIKEVVKRHSEFVAYPIQLLVTKEVEKEVPVEEEEKKEETEDDKKPKLEEVDEEEEDKEKSKTKKVKENVKELEELNKTKPLWTRNPSEVTQEEYNAFYKSISNDWEDPLAVKHFSVEGQLEFRAILFIPKRAPFDLFESKKKKNNIKLYVRRVFITDEAEELIPEWLSFVKGVVDSEDLPLNLSREMLQQNKIMKVIKKNIVKKLIEAFNEIAEDSEQFEKFYSAFAKNIKLGIHEDSQNRASLAKLLRYNSTKSVDEQTSLADYVTRMPEHQKNVYFITGESIKAVEKSPFLDALKAKNFEVLFLVDPIDEYAFQQLKEFEGKQLVDITKDFELEESEEEKKQREEEIKEFEPLTAALKEVLGDQVEKVVVSYKLIDAPAAIRTGQFGWSANMERIMKAQALRDSTMSSYMASKKIFEISPKSAIIKELKKRVEDNGAQDRTVKDLTSLLYETALLTSGFTLEEPASFATRINRLISLGLNIDEEESTETAAETATEAPVEEVAPETAMEEVD

SEQ ID NO: 129335 - DNA, 2148 bp, Zea mays
  CDS (1)..(2148)
  misc_feature (1419)..(1419): n is a, g, c or t
atggcgtctgcggacgtgcacatggctggcggtgcggagacggagaccttcgcattccaggccgagatcaaccagctgctctccctcatcatcaataccttctactcgaacaaggagatcttcctcagagagctcatctccaacgcatcggatgcgcttgacaagatccgcttcgagagcctgacggacaagtcgaacgtgaacgcgcagccggagctcttcatccggctcgtcccggacaaggccagcaagacgctgtccatcatcgactccggcgtgggcatgaccaagtccgaccttgtcaacaacctcggcaccatcgcgcggtcgggcaccaaggagttcatggaggcgctggccgcgggcgccaccgacgtgtcgatgatcggccagttcggcgtcggcttctactccgcctacctcgtcgcggacagggtcatggtcaccaccaagcacaacgacgacgagcagtacgtgtgggagtcccaggccggcgggtccttcaccgtcacgcatgacaccacgggggagcagctcggtcggggcaccaagatcacgctcttcctcaaggacgaccagctcgagtacctggaggagcgccgcctcaaggacctcgtcaagaagcactcggagttcatcagctaccccatctacctgtggacggagaagaccaccgagaaggagatcagcgacgacgaggaggaggaggacaacaagaaggaggaggagggcgacgtcgaggaggtggacgacgaggacaaggacaccaaggataagagtaaaaagaagaagaaggtgaaggaggtgagccacgagtgggtgcagatcaacaagcagaagcccatctggctccgcaagcccgaggagatcacgcgcgacgagtacgcctccttctacaagtctctgaccaacgactgggaggaccacctcgccgtgaagcacttctcggtggaggggcagctggagttcaaggccatcctgttcgtgccccgccgcgcccccttcgacctgttcgacacgcgcaagaagctcaacaacatcaagctctacgtccgccgtgtcttcatcatggacaactgcgaggagctcatcccggagtggctgggcttcgtgaagggcgtggtggattccgacgatctgccgctcaacatctctcgcgagacgctgcagcagaacaagatcctcaaggtcatccgcaagaacctggtcaagaagtgcatcgagatgttcttcgagatcgcggagaacaaggacgactacgccaagttctacgacgccttctccaagaacatcaagctgggcatccacgaggactcgcagaaccgcgccaagctcgccgacctcctgcgctaccactccaccaagagcggcgacgagacgacgagcctcaaggactacgtgacgcgcatgaaggagggncagaaggacatctactacatcaccggcgagagcaggaaggccgtggagaactcgccgttcctggagcgtctcaagaagaagggctacgaggtgctgttcatggtggacgccatcgacgagtacgccgtggggcagctcaaggagtacgacggcaagaagctggtgtcggcaaccaaggaaggcctaaagctggacgacgaggacgacgaggaggccaagaagcggcgggaggagcgcaagaagcggttcgaggagctgtgcaaggtgatcaaggacatcctgggcgaccgcgtcgagaaggtggtggtgtcggaccgcatcgtcgactcgccgtgctgcctggtgacgggcgagtacgggtggaccgccaacatggagcggatcatgaaggcgcaggcgctacgtgacagcagcatgagcgcgtacatgtcctccaagaagaccatggagatcaacccggacaacggcatcatggaggagctccggaagcgcgccgaggccgaccggaacgacaagtccgtcaaggacctcgtgctgctgctcttcgagacggcgctgctcacctcggggttcagcctcgacgaccccaacacgttcgcggccaggatccacaggatgctcaagctcggcctcaacatcgacgaggatgcggccgccgatgaggacgccgacatgcccgcgcttgacgagggcgccgccgaggagagcaagatggaggaggtcgactga

SEQ ID NO: 129336 - protein, 715 aa, Zea mays
MASADVHMAGGAETETFAFQAEINQLLSLIINTFYSNKEIFLRELISNASDALDKIRFESLTDKSNVNAQPELFIRLVPDKASKTLSIIDSGVGMTKSDLVNNLGTIARSGTKEFMEALAAGATDVSMIGQFGVGFYSAYLVADRVMVTTKHNDDEQYVWESQAGGSFTVTHDTTGEQLGRGTKITLFLKDDQLEYLEERRLKDLVKKHSEFISYPIYLWTEKTTEKEISDDEEEEDNKKEEEGDVEEVDDEDKDTKDKSKKKKKVKEVSHEWVQINKQKPIWLRKPEEITRDEYASFYKSLTNDWEDHLAVKHFSVEGQLEFKAILFVPRRAPFDLFDTRKKLNNIKLYVRRVFIMDNCEELIPEWLGFVKGVVDSDDLPLNISRETLQQNKILKVIRKNLVKKCIEMFFEIAENKDDYAKFYDAFSKNIKLGIHEDSQNRAKLADLLRYHSTKSGDETTSLKDYVTRMKEGQKDIYYITGESRKAVENSPFLERLKKKGYEVLFMVDAIDEYAVGQLKEYDGKKLVSATKEGLKLDDEDDEEAKKRREERKKRFEELCKVIKDILGDRVEKVVVSDRIVDSPCCLVTGEYGWTANMERIMKAQALRDSSMSAYMSSKKTMEINPDNGIMEELRKRAEADRNDKSVKDLVLLLFETALLTSGFSLDDPNTFAARIHRMLKLGLNIDEDAAADEDADMPALDEGAAEESKMEEVD

SEQ ID NO: 129337 - DNA, 2130 bp, Saccharomyces cerevisiae
  CDS (1)..(2130)
atggctagtgaaacttttgaatttcaagctgaaattactcagttgatgagtttgatcatcaacaccgtctattctaacaaggaaattttcttgagagaactgatatctaatgcctcggatgcgttggataaaattagatacaaatctttgtctgatccaaagcaattggaaacagaaccagatctctttattagaatcactccaaagccagagcaaaaagttttggaaatcagagattctggtattggtatgaccaaggctgaattgattaataacttgggtaccattgccaagtctggtaccaaagccttcatggaagctctatctgctggtgccgatgtatccatgattggtcaattcggtgttggtttttactctttattcttagttgccgacagagttcaggttatttcaaagagcaacgacgacgaacaatacatctgggaatccaacgctggtggttctttcactgttactctagacgaagttaatgaaagaattggtaggggtaccatcttgaggttattcttgaaagatgaccaattggagtacttggaagaaaagagaataaaggaagttatcaagagacattctgagttcgtggcctacccaatccaattagtcgtcaccaaggaagttgaaaaggaagttccaattccagaagaagaaaagaaagacgaggaaaagaaggatgaggaaaagaaggatgaagacgacaagaaaccaaaattggaagaagtcgatgaagaagaggaaaagaagccaaagacgaaaaaagttaaagaagaagttcaagagatagaagaactaaacaagactaagcctttgtggactagaaacccatctgatatcactcaagaagaatacaatgctttctataagtctatttcaaacgactgggaagacccattgtacgttaagcatttctccgttgaaggtcaattggaatttagagctatcttattcattccaaagagagcaccattcgacttgtttgagagtaaaaagaagaagaataatatcaagttgtacgttcgtcgtgttttcatcactgatgaagctgaagacttgattccagagtggttatctttcgtcaagggtgttgttgactctgaggatttaccattgaatttgtccagagaaatgttacaacaaaataagatcatgaaggttattagaaagaacattgtcaaaaagttgattgaagccttcaacgaaattgctgaagactctgaacaatttgaaaagttctactcggctttctccaaaaatatcaagttgggtgtacatgaagatacccaaaacagggctgctttggctaagttgttacgttacaactctaccaagtccgtagatgagttgacttccttaactgattacgttaccagaatgccagaacaccaaaagaacatctactacatcactggtgaatctctaaaggctgtcgaaaagtctccatttttggatgccttgaaggctaaaaacttcgaggttttgttcttgaccgacccaattgatgaatacgccttcactcaattgaaggaattcgaaggtaaaactttggttgacattactaaagatttcgaattggaagaaactgacgaagaaaaagctgaaagagagaaggagatcaaagaatatgaaccattgaccaaggccttgaaagaaattttgggtgaccaagtggagaaagttgttgtttcttacaaattgttggatgccccagctgctatcagaactggtcaatttggttggtctgctaacatggaaagaatcatgaaggctcaagccttgagagactcttccatgtcctcctacatgtcttccaagaagactttcgaaatttctccaaaatctccaattatcaaggaattgaaaaagagagttgacgaaggtggtgctcaagacaagactgtcaaggacttgactaagttattatatgaaactgctttgttgacttccggcttcagtttggacgaaccaacttcctttgcatcaagaattaacagattgatctctttgggtttgaacattgatgaggatgaagaaacagagactgctccagaagcatccaccgcagctccggttgaagaggttccagctgacaccgaaatggaagaggtagattag

SEQ ID NO: 129338 - protein, 709 aa, Saccharomyces cerevisiae [sequence omitted]

SEQ ID NO: 129339 - DNA, 2163 bp, Anopheles gambiae
  CDS (1)..(2163)
atgccggaaccacaagagggcgagaccttcgcatttcaggctgagattgctcagctgatgtccctgatcatcaacacgttctactcgaacaaggaaatcttcctgcgtgagttgatctcgaactcgtccgatgcgctggacaagatccgctatgaatcgctgacggatccctcgaagctggagtcgggcaaggagctgttcatcaagatcatcccgaacaaggaggccggcacactgacgctgatcgataccggtatcggcatgacgaaggccgacctggtgaacaacctcggaacgattgccaagtcgggcacgaaggcgttcatggaggcgctgcaggccggcgcagacatcagcatgatcggccagttcggtgtcggtttctactcggcgtacctggtcgccgacaaggtggtggtgacgtcgaagaacaacgacgacgagcagtacgtgtgggagtcgtcggccggcggctcgttcacggtgcgcccggacagcggggagccgctgggccgcggtaccaagatcgtgctgcacatcaaggaggaccagctggagtacctggaggagagcaagatcaagcagatcgtgaacaagcactcgcagttcatcggctacccgatcaagctgctggtggagaaggagcgcgagaaggaggtgagcgacgacgaggccgaggaggagaagaaggaagagaaggaggagaagaaggacgacgagccgaagctggaggacgccgaggacgatgaggacaagaaggacaagaagaagaagaccgtgaaggtgaagtacaccgaggacgaggagctgaacaagacgaagccgatctggacgcgcaacgcggacgacatctcgcaggaggagtacggcgagttctacaaatcgctcaccaacgactgggaggaccatctggcggtgaagcacttctcggtggagggccagctggacttccgcgcgctgctgttcgtgccccgccgcatgccgttcgatctgttcgagaacaagaagaagaagaacaacatcaagctgtacgtgcgccgtgtgttcatcatggacaactgcgaggagctgatcccggactacctgaacttcatcaagggcgtggtcgactcggaggacctgccgctgaacatttcccgcgagatgctgcagcagaacaagatcctgaaggtgatccgcaagaacctggtgaagaagtgtctggagctgttcgaggagctggccgaggacaaggagacgtacaagaagttctacgaccagttcagcaagaacctgaagctgggcgtgcacgaggacagccagaaccggcagaagctggccgatctgctgcgcttcaacacgtccgcgtccggggacgagtactgctcgctgaacgactacgtgggccgcatgaaggagaaccagacgcagatctacttcatcacgggcgagagcatcgaccaggtgaagaactcggcgttcgtggagcgcgtgaagaagcgcggcttcgaggtgatctacatgacggaaccgatcgacgagtacgtgatccagcagctgaaggagtacaagggcaagcagctggtgtcggtgacgaaggagggcctggagctgccggaggacgaggccgagaagaagaagcgcgaggaggacaaggccaagttcgagaacctgtgcaaggtgatgaagtcggtgctggagagcaaggtggagaaggtgatggtgtcgaaccggctggtggactcgccctgctgcatcgtgacgtcgcagtacggctggtcggccaacatggagcgcatcatgaaggcgcaggcgctgcgtgactcgtcggccatgggctacatggcgggcaagaagcatcttgagatcaacccggaccatgccatcatcgagacgctgcgccagcgcgccgaggccgacaagaacgataaggcggtgaaggatctggtgattctgctgttcgagacggcgctgctgtcctccggcttctcgctggacgagcccggaacccatgcgtcccgcatctaccgcatgatcaagctgggtctgggcatcgacgaggacgagccgatgacgacggaggagagcagcagcggtgctgcggcggcggccccagcgtcgggtgatgctccgccgctggtggacgactcggaggatctgtcgcacatggaggaggttgattaa

SEQ ID NO: 129340 - protein, 720 aa, Anopheles gambiae
MPEPQEGETFAFQAEIAQLMSLIINTFYSNKEIFLRELISNSSDALDKIRYESLTDPSKLESGKELFIKIIPNKEAGTLTLIDTGIGMTKADLVNNLGTIAKSGTKAFMEALQAGADISMIGQFGVGFYSAYLVADKVVVTSKNNDDEQYVWESSAGGSFTVRPDSGEPLGRGTKIVLHIKEDQLEYLEESKIKQIVNKHSQFIGYPIKLLVEKEREKEVSDDEAEEEKKEEKEEKKDDEPKLEDAEDDEDKKDKKKKTVKVKYTEDEELNKTKPIWTRNADDISQEEYGEFYKSLTNDWEDHLAVKHFSVEGQLDFRALLFVPRRMPFDLFENKKKKNNIKLYVRRVFIMDNCEELIPDYLNFIKGVVDSEDLPLNISREMLQQNKILKVIRKNLVKKCLELFEELAEDKETYKKFYDQFSKNLKLGVHEDSQNRQKLADLLRFNTSASGDEYCSLNDYVGRMKENQTQIYFITGESIDQVKNSAFVERVKKRGFEVIYMTEPIDEYVIQQLKEYKGKQLVSVTKEGLELPEDEAEKKKREEDKAKFENLCKVMKSVLESKVEKVMVSNRLVDSPCCIVTSQYGWSANMERIMKAQALRDSSAMGYMAGKKHLEINPDHAIIETLRQRAEADKNDKAVKDLVILLFETALLSSGFSLDEPGTHASRIYRMIKLGLGIDEDEPMTTEESSSGAAAAAPASGDAPPLVDDSEDLSHMEEVD

SEQ ID NO: 129341 - DNA, 2100 bp, Arabidopsis thaliana
  CDS (1)..(2100)
atggcggacgcagaaacctttgctttccaagctgagatcaaccagttgctctccctcatcatcaataccttttactctaacaaggagatcttccttcgtgaactcatcagtaactcttctgatgctttggacaagattaggtttgagtccttgacagacaagagcaagctcgatggtcagccagagctcttcattcacatcattcccgacaagactaacaacaccttgacgattatcgatagtggtattgggatgaccaaggctgatctggtgaacaaccttggaacaattgcaagatctggaaccaaagaattcatggaggcgttggctgctggagctgatgttagcatgattggacagtttggtgttggtttctactctgcttacttggttgctgacaaggttgttgttactaccaagcacaatgacgatgagcagtacgtgtgggagtctcaggccggtggatctttcaccgtcaccagagacacctctggtgaggctcttggtagaggaactaagatggtcctttacctcaaggaagaccagatggagtacattgaggagcgaaggcttaaggatttggtgaagaagcactctgagttcatcagctacccaatctctctctggattgagaagaccattgagaaggagatctctgatgatgaagaggaggaagagaagaaggatgaggaaggcaaggttgaggaagttgatgaggagaaagaaaaggaggagaagaaaaagaagaagattaaggaggtttctcatgagtgggatttggtgaacaagcagaaaccgatttggatgaggaagccagaggagatcaacaaggaggagtacgctgctttctacaagagtttgagcaatgactgggaagagcatttggctgtgaagcatttctcagttgaaggacagcttgagttcaaagctatcctctttgttcccaagagagctccttttgatctctttgacactaagaagaagcccaacaacatcaagctctatgtccgtcgtgtcttcatcatggacaactgtgaagacatcattcctgagtaccttgggtttgtcaagggtattgttgactctgaagatcttcctctcaacatctcaagagaaacattgcagcagaacaagatcctcaaggtcatccgcaagaaccttgtgaagaagtgtcttgagctcttctttgagattgctgagaacaaggaggactacaacaagttctatgaggctttctctaagaacctgaagctcggtatccatgaggactcccaaaacagaaccaagattgctgagttgctccgttaccactcaaccaagagcggtgatgaattgaccagtctcaaggactacgtgacaaggatgaaggaaggtcagaacgatatcttctatatcactggtgagagcaagaaggctgttgagaactctccattccttgagaagctcaagaagaagggtattgaagttctctacatggttgacgctatcgatgagtatgctattggtcagctcaaggaattcgaaggaaagaagcttgtctctgcaaccaaggaaggtctgaaactggatgagactgaagacgagaagaagaagaaagaagagctcaaggagaagtttgagggactctgcaaagtgatcaaggacgttttgggagacaaggttgagaaggttatcgtctctgaccgtgttgtggactcaccctgctgtcttgtaacaggcgagtatggctggactgcaaacatggagaggatcatgaaagctcaagccttgagagacagcagcatgggtggctacatgtcgagcaagaagacaatggagattaacccagagaactccatcatggatgagctgagaaagagagctgatgcagacaagaacgacaagtctgtgaaggaccttgtacttcttctctttgagaccgctcttctcacttctggtttcagcctcgatgagcccaacactttcgggagcaggattcacaggatgttgaagcttggattgagcattgatgacgatgatgttgttgaagccgatgctgacatgcctccacttgaagatgatgccgatgctgaaggtagcaagatggaggaagttgactaa

SEQ ID NO: 129342 - protein, 699 aa, Arabidopsis thaliana
MADAETFAFQAEINQLLSLIINTFYSNKEIFLRELISNSSDALDKIRFESLTDKSKLDGQPELFIHIIPDKTNNTLTIIDSGIGMTKADLVNNLGTIARSGTKEFMEALAAGADVSMIGQFGVGFYSAYLVADKVVVTTKHNDDEQYVWESQAGGSFTVTRDTSGEALGRGTKMVLYLKEDQMEYIEERRLKDLVKKHSEFISYPISLWIEKTIEKEISDDEEEEEKKDEEGKVEEVDEEKEKEEKKKKKIKEVSHEWDLVNKQKPIWMRKPEEINKEEYAAFYKSLSNDWEEHLAVKHFSVEGQLEFKAILFVPKRAPFDLFDTKKKPNNIKLYVRRVFIMDNCEDIIPEYLGFVKGIVDSEDLPLNISRETLQQNKILKVIRKNLVKKCLELFFEIAENKEDYNKFYEAFSKNLKLGIHEDSQNRTKIAELLRYHSTKSGDELTSLKDYVTRMKEGQNDIFYITGESKKAVENSPFLEKLKKKGIEVLYMVDAIDEYAIGQLKEFEGKKLVSATKEGLKLDETEDEKKKKEELKEKFEGLCKVIKDVLGDKVEKVIVSDRVVDSPCCLVTGEYGWTANMERIMKAQALRDSSMGGYMSSKKTMEINPENSIMDELRKRADADKNDKSVKDLVLLLFETALLTSGFSLDEPNTFGSRIHRMLKLGLSIDDDDVVEADADMPPLEDDADAEGSKMEEVD

SEQ ID NO: 129343 - DNA, 2151 bp, Drosophila auraria
  CDS (1)..(2151)
atgcctgaggaagcagagaccttcgctttccaggctgagatcgctcagctgatgtcgctgatcatcaacacattctactcgaacaaggagatcttcctgcgcgagttgatctcgaacgcctccgatgctctggacaagatccgctacgagtcgctgactgaccccagcaagcttgactctggcaaggagctgtacatcaagctcattcccaacaagacggccggcacgctgaccatcatcgataccggtatcggcatgaccaagtccgatttggtcaacaacctgggaaccatcgccaagtctggcaccaaggcgttcatggaggctctgcaggccggcgccgacatttccatgatcggtcagttcggtgtgggtttctactccgcctacttggtcgccgacaaggtgactgtcacctcgaagaacaacgatgacgagcagtacatctgggagtcgtctgccggcggttccttcaccgtgcgcgctgacaactctgagcctcttggccgcggcaccaagatcgttctgtacatcaaggaggatcagaccgattaccttgaggagagcaagatcaaggagatcgtgaacaagcactcgcagttcatcggctatcccatcaagctgctcgtcgagaaggagcgcgagaaggaggtcagcgacgatgaggctgatgatgacaagaaggaggacgagaagaaggagatggacaccgatgagcccaagatcgaggatgttggcgaagatgaggatgcggacaagaaggacaaggatgccaagaagaagaagaccatcaaggagaagtacaccgaggatgaggagctgaacaagaccaagcccatctggactcgcaaccccgatgatatctcccaggaggaatacggcgagttctacaagtctctgaccaacgactgggaggaccatttggccgtgaagcacttctcggtggagggacagttggagttccgcgctctgctcttcatcccccgtcgcacccccttcgatctgttcgagaaccaaaagaagcgcaacaacatcaagctctacgtgcgccgcgtgttcatcatggacaactgcgaggatctcattcccgagtacttgaacttcatcaagggcgtggtcgactctgaggatctgcctctgaacatctcccgtgagatgttgcagcagaacaaggtgctgaaggtgatccgcaagaacttggtcaagaagaccatggagctgatcgaggagctgaccgaggacaaggagaactacaagaagttctacgaccagttcagcaagaaccttaagctgggcgtgcacgaggacagcaacaaccgcgccaagctggccgatttcttgcgcttccacacctccgcctctggcgacgatttctgctccctgtccgactacgtgtcgcgcatgaaggagaaccagaagcacgtttacttcatcactggcgagtccaaggatcaggtcagcaactctgccttcgtggagcgcgtcaaggcccgcggcttcgaggtcgtctacatgaccgagcccatcgatgagtacgtcatccagcatctgaaggagtacaagggcaagcagctggtgtccgtcaccaaggagggtctggagctgcccgaagacgatgccgagaagaagaagcgcgaggaggacaaggccaagttcgagagcctgtgcaagctgatgaatgccattctggacaacaaggtcgagaaggtcgtggtctcgaaccgtctggtcgactctccctgctgcatcgtcacctcgcagttcggctggtccgccaacatggagcgcatcatgaaggctcaggctcttcgggacaccgccaccatgggctacatggccggtaagaagcagctggagattaaccccgatcaccccattgtggagactctgcgccagaaggccgatgcggataagaacgataaggccgtcaaggatctggtcatcctgctgttcgagacctcgctgctctcatctggcttctctctggacagcccccaggtgcacgccagccgcatctatcgcatgatcaagctgggtctgggcatcgacgaggacgagccgatgaccaccgaggatgcccagagcgccggcgatgccccctcgctggttgaggacaccgaggacgcttcccacatggaggaggtcgattaa

SEQ ID NO: 129344 - protein, 716 aa, Drosophila auraria
MPEEAETFAFQAEIAQLMSLIINTFYSNKEIFLRELISNASDALDKIRYESLTDPSKLDSGKELYIKLIPNKTAGTLTIIDTGIGMTKSDLVNNLGTIAKSGTKAFMEALQAGADISMIGQFGVGFYSAYLVADKVTVTSKNNDDEQYIWESSAGGSFTVRADNSEPLGRGTKIVLYIKEDQTDYLEESKIKEIVNKHSQFIGYPIKLLVEKEREKEVSDDEADDDKKEDEKKEMDTDEPKIEDVGEDEDADKKDKDAKKKKTIKEKYTEDEELNKTKPIWTRNPDDISQEEYGEFYKSLTNDWEDHLAVKHFSVEGQLEFRALLFIPRRTPFDLFENQKKRNNIKLYVRRVFIMDNCEDLIPEYLNFIKGVVDSEDLPLNISREMLQQNKVLKVIRKNLVKKTMELIEELTEDKENYKKFYDQFSKNLKLGVHEDSNNRAKLADFLRFHTSASGDDFCSLSDYVSRMKENQKHVYFITGESKDQVSNSAFVERVKARGFEVVYMTEPIDEYVIQHLKEYKGKQLVSVTKEGLELPEDDAEKKKREEDKAKFESLCKLMNAILDNKVEKVVVSNRLVDSPCCIVTSQFGWSANMERIMKAQALRDTATMGYMAGKKQLEINPDHPIVETLRQKADADKNDKAVKDLVILLFETSLLSSGFSLDSPQVHASRIYRMIKLGLGIDEDEPMTTEDAQSAGDAPSLVEDTEDASHMEEVD

SEQ ID NO: 129345 - DNA, 2154 bp, Drosophila melanogaster
  CDS (1)..(2154)
atgccagaagaagcagagacctttgcattccaggctgagattgctcagctgatgtccctgatcatcaacacattctactcgaacaaggagattttcctgcgcgagttgatctcgaacgcttccgatgccctggacaagatccgctatgagtcccttactgaccccagcaagctggactctggcaaggagctgtacatcaagctgatccctaacaagacggctggtactctgaccatcattgataccggtatcggtatgaccaagtccgacctggtcaacaacttgggaaccatcgccaagtccggaaccaaggccttcatggaggctctgcaggctggtgccgacatttccatgatcggtcagttcggtgtgggtttctactccgcctacctggtcgccgacaaggtgactgtcacctccaagaacaacgatgacgagcagtacgtgtgggagtcctctgccggaggctctttcacagtccgtgccgacaactctgagcccctgggccgtggcaccaagatcgtgctgtacatcaaggaggaccagaccgactatctggaggagagcaagatcaaggagattgttaacaagcactcccagttcattggctaccccatcaagctgctcgtagagaaggagcgcgagaaggaggtcagcgacgatgaggctgatgatgagaagaaggaaggtgatgagaagaaggagatggagactgatgagcccaaaatcgaggatgttggcgaggatgaggatgccgacaagaaggacaaggatgccaagaagaagaagaccatcaaggagaagtacactgaggatgaggagctgaacaagaccaagcccatctggacccgcaatcccgatgatatctcccaggaggagtacggcgagttctacaaatccctgaccaacgactgggaggatcatctggccgtcaagcacttctccgtggagggtcagctggagttccgtgctctgctcttcattccccgtcgcacgcccttcgatctctttgagaaccagaagaagcgcaacaacatcaagctgtacgtgcgtcgtgtcttcatcatggacaactgcgaggacctcattccagagtacttgaacttcatgaagggtgtggtcgactccgaggatctgcccctcaacatctcacgtgagatgctgcagcagaacaaggtcctaaaggtgatccgcaagaacctggtcaagaagaccatggagctgattgaggagctcaccgaggacaaggagaactacaagaagttctatgaccagttcagcaagaacctgaagctgggtgtgcacgaggacagcaacaaccgtgccaagttggccgacttccttcgcttccacacctctgcctccggcgacgatttctgctccctggccgactacgtgtcgcgcatgaaggataaccagaagcacgtgtacttcatcactggcgagtccaaggaccaggtcagcaactctgccttcgtggagcgcgtcaaggcccgtggcttcgaggtggtctacatgaccgagcccatcgatgagtatgtcatccagcacttgaaggagtacaagggcaagcagctggtctctgtcaccaaggagggtctggagctgcctgaggatgagagcgagaagaagaagcgcgaggaggacaaggccaagttcgagagcctgtgcaagctgatgaagtccatcctggacaacaaggtcgagaaggtggtggtgtccaaccgcctggtggattcgccctgctgcattgtcacttcgcagttcggctggtccgctaacatggagcgcatcatgaaggcccaggctctgcgtgataccgccacaatgggctacatggccggcaagaagcagctggagatcaaccccgatcacccaattgtggagactctccgccagaaggccgatgccgacaagaacgataaggccgtcaaggatctggtcatcctgctgttcgagacctctctgctgtcctctggattctcgctggacagcccccaggtgcacgccagccgcatctaccgcatgatcaagctgggcttgggaatcgacgaggacgagcctatgactaccgacgatgcccagagcgccggagatgccccctcgctggttgaggacaccgaggacgcttcccacatggaggaggtcgattaa

SEQ ID NO: 129346 - protein, 717 aa, Drosophila melanogaster
MPEEAETFAFQAEIAQLMSLIINTFYSNKEIFLRELISNASDALDKIRYESLTDPSKLDSGKELYIKLIPNKTAGTLTIIDTGIGMTKSDLVNNLGTIAKSGTKAFMEALQAGADISMIGQFGVGFYSAYLVADKVTVTSKNNDDEQYVWESSAGGSFTVRADNSEPLGRGTKIVLYIKEDQTDYLEESKIKEIVNKHSQFIGYPIKLLVEKEREKEVSDDEADDEKKEGDEKKEMETDEPKIEDVGEDEDADKKDKDAKKKKTIKEKYTEDEELNKTKPIWTRNPDDISQEEYGEFYKSLTNDWEDHLAVKHFSVEGQLEFRALLFIPRRTPFDLFENQKKRNNIKLYVRRVFIMDNCEDLIPEYLNFMKGVVDSEDLPLNISREMLQQNKVLKVIRKNLVKKTMELIEELTEDKENYKKFYDQFSKNLKLGVHEDSNNRAKLADFLRFHTSASGDDFCSLADYVSRMKDNQKHVYFITGESKDQVSNSAFVERVKARGFEVVYMTEPIDEYVIQHLKEYKGKQLVSVTKEGLELPEDESEKKKREEDKAKFESLCKLMKSILDNKVEKVVVSNRLVDSPCCIVTSQFGWSANMERIMKAQALRDTATMGYMAGKKQLEINPDHPIVETLRQKADADKNDKAVKDLVILLFETSLLSSGFSLDSPQVHASRIYRMIKLGLGIDEDEPMTTDDAQSAGDAPSLVEDTEDASHMEEVD

SEQ ID NO: 129347 - DNA, 2121 bp, Aspergillus fumigatus
  CDS (1)..(2121)
atgtcttccgaaacctttgaattccaggctgagatctctcagcttctctcgctgatcatcaacactgtctactccaacaaggagatcttcctgcgagaactcatctcgaacgcctccgatgctctcgacaagatccgctaccagtccttgtcggatcctaccaagctcgacacgggcaaggacctccgcatcgacatcatccccgacaaggagaacaagaccctcactattcgtgataccggtattggtatgaccaaggctgatttgatcaacaacctcggtaccattgcccgttctggcaccaagcagttcatggaggcgctctccgccggtgctgatatctccatgattggtcagttcggtgttggtttctactctgcttaccttgttgccgaccgcgtcaccgttgtctccaagaacaatgatgatgagcagtacatctgggagtctgccgctggtggcaccttcaccctcacccaggataccgagggtgagcaactcggccgtggtaccaagatcattctgcacttgaaggatgagcagaccgactacttgaacgagagccgtatcaaggaggttgttcgcaagcactccgagttcatctcctaccccatctacctccacgtcctgaaggagactgagaaggaggttcctgacgaggaggctgaggagaccaaggaggaagaggatgaggagaagaaggccaagatcgaggaggtcgatgacgaggaggaggaggagaagaagaagaagaagaagaccaagactgtgaaggagagcaagatcgaggaggaggagctcaacaagaccaagcccatctggacccgcaaccctgcggatatcacccaggaggagtatgcctccttctacaagtccctctctaacgactgggaggaccatcttgctgtcaaacacttctctgtcgagggtcagctcgagttccgcgctatcctttacgtccccaagcgtgctcctttcgacctcttcgagaccaagaagactaagaacaacatcaagctctacgtccgtcgtgtcttcatcactgatgacgccaccgatctcatccccgagtggctgggcttcatcaagggtgttgtcgactctgaggatctgcctctcaacctgtctcgtgagactctccagcagaacaagattatgaaggtcatcaagaagaacattgtcaagaagactctggagctcttcaacgagattgccgaggatcgtgagcagttcgacaagttctactctgccttcagcaagaacatcaagctcggtatccacgaggatgctcagaaccgccagactcttgccaagctgctccgctaccagtctaccaagtctggtgacgaggccacctccctcgccgactacgtcacccgcatgcctgagcaccagaagcagatctactacatcactggcgagtctatcaaggctgttgcaaagtctcccttccttgacagcctcaagcagaagaactttgaggttctgttcctggttgaccccatcgatgagtacgctttcactcagctgaaggagttcgatggcaagaagctggtggacatcaccaaggacttcgagctcgaggagaccgaggaggagaaggctgagcgcgagaaggaggagaaggagtacgagaacctggctaagagcctcaagaacattcttggcgacaaggttgagaaggtcgtcgtgtcccataagctcgtcggctctccttgcgctatccgtactggccagttcggctggtccgccaacatggagcgtatcatgaaggctcaggctctgcgtgacacctccatgagctcttacatgtcctccaagaagaccttcgagatctctcccaagtcctccatcatcaaggagctgaagaagaaggttgaggccgacggtgaaaacgaccgcactgtcaagtccatcacccagctgctcttcgagacctccctccttgtttccggcttcaccatcgaggagcctgccagcttcgctgagcgcattcacaagctcgtgtctcttggtctgaacattgatgaggaggccgagactaccgaggaaaaggccactgaggaggctgctcctgccgaggccaccactggcgagagtgccatggaggaggttgactag

SEQ ID NO: 129348 - protein, 706 aa, Aspergillus fumigatus
MSSETFEFQAEISQLLSLIINTVYSNKEIFLRELISNASDALDKIRYQSLSDPTKLDTGKDLRIDIIPDKENKTLTIRDTGIGMTKADLINNLGTIARSGTKQFMEALSAGADISMIGQFGVGFYSAYLVADRVTVVSKNNDDEQYIWESAAGGTFTLTQDTEGEQLGRGTKIILHLKDEQTDYLNESRIKEVVRKHSEFISYPIYLHVLKETEKEVPDEEAEETKEEEDEEKKAKIEEVDDEEEEEKKKKKKTKTVKESKIEEEELNKTKPIWTRNPADITQEEYASFYKSLSNDWEDHLAVKHFSVEGQLEFRAILYVPKRAPFDLFETKKTKNNIKLYVRRVFITDDATDLIPEWLGFIKGVVDSEDLPLNLSRETLQQNKIMKVIKKNIVKKTLELFNEIAEDREQFDKFYSAFSKNIKLGIHEDAQNRQTLAKLLRYQSTKSGDEATSLADYVTRMPEHQKQIYYITGESIKAVAKSPFLDSLKQKNFEVLFLVDPIDEYAFTQLKEFDGKKLVDITKDFELEETEEEKAEREKEEKEYENLAKSLKNILGDKVEKVVVSHKLVGSPCAIRTGQFGWSANMERIMKAQALRDTSMSSYMSSKKTFEISPKSSIIKELKKKVEADGENDRTVKSITQLLFETSLLVSGFTIEEPASFAERIHKLVSLGLNIDEEAETTEEKATEEAAPAEATTGESAMEEVD

SEQ ID NO: 129349 - DNA, 2124 bp, Candida albicans
  CDS (1)..(2124): transl_table=12
atggctgacgcaaaagttgaaactcacgaattcactgctgagatctctcagttgatgtctttgatcattaacacagtctattcaaacaaggaaattttcttaagagaattgatctccaatgcttctgatgctttggacaaaatcagataccaagccttgtctgatccatcccaattggaatccgaaccagaattgttcattagaatcatccctcaaaaggaccaaaaagttttggaaattagagattctggtattggtatgaccaaagctgacttggtcaacaatttgggtactattgctaaatctggtaccaaatcctttatggaagctttaagtgctggtgctgacgtttctatgattggtcaatttggtgttggtttctactccttgttcttggttgctgatcacgtccaagttatctccaaacacaatgacgacgaacaatacgtttgggaatctaacgctggtggtaagttcactgttactttggatgaaactaacgaaagattgggtcgtggtaccatgttgagattgttcttgaaggaagatcaattggaatacttggaagaaaaaagaatcaaagaagttgtcaagaaacactctgaattcgttgcttatccaatccaattagttgtcaccaaagaagttgaaaaagaagttccagaaaccgaagaagaagacaaagctgctgaagaagacgacaagaaaccaaaattggaagaagtcaaggatgaagaagacgaaaagaaagaaaagaagaccaagactgtcaaagaagaggttactgaaactgaagagttgaacaagaccaaaccattatggaccagaaacccatctgatatcactcaagatgaatacaatgcattctacaagtctatttccaacgactgggaagacccattggctgtcaaacacttttctgttgaaggtcaattagaattcagagctatcttgtttgttccaaagagagctccatttgatgcctttgaatccaagaagaagaagaacaacatcaaattatacgtccgtagagtgtttatcactgatgatgctgaagagttgattccagaatggttaagtttcatcaagggggttgtcgattccgaagacttgccattgaacttgtccagagaaatgttgcaacaaaacaagattttgaaagttatcagaaagaacattgtcaaaaagatgattgaaactttcaatgaaatctctgaagaccaagagcaattcaaccaattctacactgctttctccaagaacatcaaattgggtattcatgaagatgctcaaaacagacaatctttggctaaattgttgagattctactctaccaaatcttctgaagaaatgacttccttgtctgactacgttactagaatgccagaacaccaaaagaatatctactacatcactggtgaatccatcaaagccgttgaaaaatcaccattcttggatgccttgaaagctaagaactttgaagtcttgttcatggtggatccaatcgatgaatatgccatgactcaattgaaggaatttgaagacaagaaattggttgatattaccaaagactttgaattggaagaaagtgacgaagaaaaagctgctagagaaaaggaaatcaaagaatacgaaccattgaccaaagctttgaaagatattcttggtgatcaagttgaaaaagttgttgtttcctacaaacttgttgatgctccagctgccattagaactggtcaatttggttggtctgccaatatggaaagaatcatgaaggctcaagctttgagagacaccaccatgtcttcttacatgtcctctaagaagacctttgaaatttctccatcttccccaattatcaaggaattgaagaagaaagttgaaaccgatggagctgaagacaagaccgttaaggacttgaccactttgttgtttgatactgcattgttgacttctggtttcaccttggacgaaccatccaactttgcccacagaattaacagattgattgccttgggattgaatattgacgatgattcagaagaaactgctgttgaacctgaagctactactactgcctcaactgacgaaccagctggagaatctgctatggaagaagttgattaa

SEQ ID NO: 129350 - protein, 707 aa, Candida albicans
MADAKVETHEFTAEISQLMSLIINTVYSNKEIFLRELISNASDALDKIRYQALSDPSQLESEPELFIRIIPQKDQKVLEIRDSGIGMTKADLVNNLGTIAKSGTKSFMEALSAGADVSMIGQFGVGFYSLFLVADHVQVISKHNDDEQYVWESNAGGKFTVTLDETNERLGRGTMLRLFLKEDQLEYLEEKRIKEVVKKHSEFVAYPIQLVVTKEVEKEVPETEEEDKAAEEDDKKPKLEEVKDEEDEKKEKKTKTVKEEVTETEELNKTKPLWTRNPSDITQDEYNAFYKSISNDWEDPLAVKHFSVEGQLEFRAILFVPKRAPFDAFESKKKKNNIKLYVRRVFITDDAEELIPEWLSFIKGVVDSEDLPLNLSREMLQQNKILKVIRKNIVKKMIETFNEISEDQEQFNQFYTAFSKNIKLGIHEDAQNRQSLAKLLRFYSTKSSEEMTSLSDYVTRMPEHQKNIYYITGESIKAVEKSPFLDALKAKNFEVLFMVDPIDEYAMTQLKEFEDKKLVDITKDFELEESDEEKAAREKEIKEYEPLTKALKDILGDQVEKVVVSYKLVDAPAAIRTGQFGWSANMERIMKAQALRDTTMSSYMSSKKTFEISPSSPIIKELKKKVETDGAEDKTVKDLTTLLFDTALLTSGFTLDEPSNFAHRINRLIALGLNIDDDSEETAVEPEATTTASTDEPAGESAMEEVD

SEQ ID NO: 129351 - DNA, 2115 bp, Schizosaccharomyces pombe
  CDS (1)..(2115)
atgtcgaacacagaaactttcaagtttgaggctgaaatcagccagttgatgtctttaatcatcaacactgtttattctaacaaggaaattttccttcgtgagcttatttccaacgcttccgatgccttggacaaaattcgttatcaaagcctttccgatcctcatgccttagacgctgagaaggatcttttcattcgcattactcctgacaaggagaacaaaatccttagcattcgcgataccggtattggtatgaccaagaatgaccttatcaacaaccttggtgttatcgccaagtctggtactaagcagtttatggaagctgctgcttctggtgctgatatctccatgattggtcaattcggtgttggtttctactctgcatacttggttgccgacaaggtccaagtcgtaagtaagcataatgacgatgagcaatacatctgggaatcctctgctggtggtagcttcaccgtcactttggacaccgatggacctcgcttgttacgtggtaccgagattcgtctcttcatgaaagaagaccaacttcaatacctcgaggaaaagactatcaaagataccgtcaagaaacatagtgagttcatctcttaccccattcaattagttgttacccgtgaggttgagaaggaggtccctgaagaagaagagaccgaagaagttaagaatgaagaagacgataaggctcctaagattgaggaggttgatgatgaatctgagaagaaggagaagaagaccaagaaggtcaaggagaccaccactgagactgaggagttgaacaagaccaagcccatttggactcgcaaccccagtgaagttaccaaggaagagtatgcctctttctacaagtctttgactaacgactgggaagaccatttggccgtcaagcacttcagcgttgaaggtcaattggaattccgtgccattcttttcgtcccccgccgcgctcctatggacctttttgaggccaagcgtaagaagaacaacatcaagctctatgttcgccgtgttttcattaccgacgactgtgaagagttgattcctgaatggttgggtttcattaagggtgttgttgattctgaggacttgcccttgaacttgtctcgtgagatgcttcaacaaaacaagatcatgaaggttattcgtaagaaccttgtccgtcgttgtcttgatatgttcaacgagattgccgaggacaaggagaacttcaagactttctacgatgctttcagcaagaatttgaagcttggtatccatgaggatgctgctaaccgccctgctttagccaagcttttgcgttacaactcccttaactcccctgatgatcttatcagtcttgaggactacatcactaagatgcccgaacatcaaaagaacatttatttcatcactggtgaatctaagcaagccgttgagaactctcccttcttggaaatcttccgtgccaagaagtttgatgttctcttcatggttgaccccattgatgagtacgctgtcactcaactcaaggaattcgagggcaagaaattggttaacattactaaggatggtcttgagttggaagagactgacgaggagaaggctgctcgcgagaagctcgaaaaagagtatgaggagtttgctaagcaacttaagaccattttgggtgacaaggttgaaaaggttgttgtttctaacaagattgttggttctccttgcttgttaactaccggtcaatatggttggtctgctaacatggaacgtatcatgaaggctcaagcccttcgtgatacttctatgagtgcctatatgtctagccgcaagacttttgagattaaccccaagtctcccatcattgctgagctcaagaagaaggttgaggagaatggtgccgaagaccgctctgtgaaggatcttgctactattttgtatgagaccgccttgttgtcctctggtttcactcttgatgaccctagtgcttatgctcaacgtatcaaccgtcttatttctcttggtcttagcattgacgaagaggaggaggctcctattgaggaaatttctaccgaatccgtcgctgctgaaaacaatgctgagagcaagatggaggaagtcgattaa

SEQ ID NO: 129352 - protein, 704 aa, Schizosaccharomyces pombe
MSNTETFKFEAEISQLMSLIINTVYSNKEIFLRELISNASDALDKIRYQSLSDPHALDAEKDLFIRITPDKENKILSIRDTGIGMTKNDLINNLGVIAKSGTKQFMEAAASGADISMIGQFGVGFYSAYLVADKVQVVSKHNDDEQYIWESSAGGSFTVTLDTDGPRLLRGTEIRLFMKEDQLQYLEEKTIKDTVKKHSEFISYPIQLVVTREVEKEVPEEEETEEVKNEEDDKAPKIEEVDDESEKKEKKTKKVKETTTETEELNKTKPIWTRNPSEVTKEEYASFYKSLTNDWEDHLAVKHFSVEGQLEFRAILFVPRRAPMDLFEAKRKKNNIKLYVRRVFITDDCEELIPEWLGFIKGVVDSEDLPLNLSREMLQQNKIMKVIRKNLVRRCLDMFNEIAEDKENFKTFYDAFSKNLKLGIHEDAANRPALAKLLRYNSLNSPDDLISLEDYITKMPEHQKNIYFITGESKQAVENSPFLEIFRAKKFDVLFMVDPIDEYAVTQLKEFEGKKLVNITKDGLELEETDEEKAAREKLEKEYEEFAKQLKTILGDKVEKVVVSNKIVGSPCLLTTGQYGWSANMERIMKAQALRDTSMSAYMSSRKTFEINPKSPIIAELKKKVEENGAEDRSVKDLATILYETALLSSGFTLDDPSAYAQRINRLISLGLSIDEEEEAPIEEISTESVAAENNAESKMEEVD

SEQ ID NO: 129353 - DNA, 1908 bp, Bordetella parapertussis
  CDS (1)..(1908): transl_table=11
atgagccagaccaccacgaattccgcatccgaaaccctggggttccaggccgaggtgaagcagctgctgcacctgatgattcactctctctacagcaacaaggagatcttcctgcgcgagctggtgtcgaacgcgtcggacgcgtgcgacaagctgcgcttcgaggcgatcgaccagccgggcttgctggacggcgacggggagctggcgatccgcgtggattacgacaaggccgcccgcacgatcacgatttccgataacggtatcggcctgtcgcgcgacgaggcggtggccaatctgggcacgattgcccgctcgggcacgcgcgagtttttctcgcagctgacgggcgacaagcagaaggacgcgcagctgatcggccagttcggggtggggttctattcctcgttcatcgtggcagacaaggtgacggtgctgagccgccgcgccggcctggcggccaatgaggcgatccgctgggagtcggacggacagggcgagttcagcatcgcgccggccgagaaggccgggcgcggtacggatgtggtgctgcacttgcgcgccgacgaggacgagttgctcaatggctggaagctgcgcgagatcctgcgccgctattcggaccatatttcgctgccgatccgcatggccaaggaggattgggacgcggagaagggcgagcaggtcaagggcgatgagctggagacggtgaaccaggcgaatgcgctgtggacgcgcaataaatcggatattaccgacgagcagtatcgcgagttctacaagacggtgtcgcacgattatgacgatccgctggcgtggacgcataaccgggtggagggccgcagcgagtatacgcagctgctgtatgtgcccaggcacgcgccgttcgatctgtgggaccgcgatgcgcgccgcggggtgaagctgtatgtgaagcgggtgttcatcatggacgacgcggagcagttgctgccgtcgtatctgcgtttcgtgcgcggggtgatcgattcggcggatctgccgctgaacgtgtcgcgcgagatcctgcaggagagccgcgatgtgcgggcgatccgcgagggttcggccaagcgggtgctgtcgctgctggaggacatggcggagaacaaggcggaggattacgcgacgttctggacggagttcggccaggtgctgaaggaaggcacgggcgaggacgcggccaaccgcgagcgcatcgccaggctgctgtgttttgcgtcgacgcacgatggcgagcaggcgcagacggtgtcgttcgcggattatgtgggccgcatgaaggatggccaggacaagatttactacgtgacggcggatacgttcacggcggcggcgaacagtccgcacctggagattttccggaagaagggcatcgaggtgctgctgctgtcggatcgggtggacgagtggatgctgtcctatctgcgcgagttcgacggcaagtcgctggtgtcggtggccaagggcggcctggatctggcggagctggcggacgaggaagagaagaagcgccagtccgaggtggccgagacgttcaagccgctggtcgagcgcctgcagcaggcgctggccgagcaggtgaaggaggtgcgggtgacgcagcgcctggtggattcgccggcctgcgtggtggtgggccagaacgagctcagcccgcatctgctgcgcatgctgaaggcggcgggccaggaggcgccggaggtcaagccggtgctggagatcaacccggaccacgcgctgatcgcgcggatccgcgatgccagcgatgcggagttcggcgattgggccgcgctgctgctggaccaggcgctgctggccgaaggcgcgcagatcgccgacccggcggccttcgtgaagcgcttgaacgggttgctgttgaaggcttga

SEQ ID NO: 129354 - protein, 635 aa, Bordetella parapertussis
MSQTTTNSASETLGFQAEVKQLLHLMIHSLYSNKEIFLRELVSNASDACDKLRFEAIDQPGLLDGDGELAIRVDYDKAARTITISDNGIGLSRDEAVANLGTIARSGTREFFSQLTGDKQKDAQLIGQFGVGFYSSFIVADKVTVLSRRAGLAANEAIRWESDGQGEFSIAPAEKAGRGTDVVLHLRADEDELLNGWKLREILRRYSDHISLPIRMAKEDWDAEKGEQVKGDELETVNQANALWTRNKSDITDEQYREFYKTVSHDYDDPLAWTHNRVEGRSEYTQLLYVPRHAPFDLWDRDARRGVKLYVKRVFIMDDAEQLLPSYLRFVRGVIDSADLPLNVSREILQESRDVRAIREGSAKRVLSLLEDMAENKAEDYATFWTEFGQVLKEGTGEDAANRERIARLLCFASTHDGEQAQTVSFADYVGRMKDGQDKIYYVTADTFTAAANSPHLEIFRKKGIEVLLLSDRVDEWMLSYLREFDGKSLVSVAKGGLDLAELADEEEKKRQSEVAETFKPLVERLQQALAEQVKEVRVTQRLVDSPACVVVGQNELSPHLLRMLKAAGQEAPEVKPVLEINPDHALIARIRDASDAEFGDWAALLLDQALLAEGAQIADPAAFVKRLNGLLLKA

SEQ ID NO: 129355 - DNA, 1908 bp, Bordetella pertussis
  CDS (1)..(1908): transl_table=11
atgagccagaccaccacgacttccgcatccgaaaccctggggttccaggccgaggtgaagcagctgctgcacctgatgattcactctctctacagcaacaaggagatcttcctgcgcgagctggtgtcgaacgcgtcggacgcgtgcgacaagctgcgcttcgaggcgatcgaccagccgggcttgctggaaggcgacggggagctggcgatccgggtgggttacgacaaggccgcccgcacgatcacgatttccgataacggtatcggcctgtcgcgcgacgaggcggtggccaatctgggcacgattgcccgctcgggcacgcgcgagtttttctcgcagctgacgggcgacaagcagaaggacgcgcagctgatcggccagttcggggtggggttctattcctcgttcatcgtggccgacaaggtgacggtgctgagccgccgcgccggcctggcggccaatgaggcgatccgctgggagtcggacgggcagggcgagttcagcatcgcgccggccgagaaggccgggcgcggtacggatgtggtgctgcacttgcgcgccgacgaggacgagttgctcaatggttggaagctgcgcgagatcctgcgccgctattcggaccatatttcgctgccgatccgcatggccaaggaggattgggacgcggagaagggcgagcaggtcaagggcgatgagctggagacggtgaaccaggcgaatgcgctgtggacgcgcaacaaatcggatattaccgacgagcagtatcgcgagttctacaaaacggtgtcgcacgattatgacgatccgctggcgtggacgcataaccgggtggagggccgcagcgagtatacgcagctgctgtatgtgcccaagcatgcgccgttcgatctgtgggaccgcgatgcgcgccgcggggtgaagctgtatgtgaagcgggtgttcatcatggacgacgcggagcagttgctgccgtcgtatctgcgtttcgtgcgcggggtgatcgattcggcggatttgccgctgaacgtgtcgcgcgagatcctgcaggagagccgcgatgtgcgggcgatccgcgagggttcggccaagcgggtgctgtcgctgctggaggacatggcggagaacaaggcggaggattacgcgacgttctggacggagttcggccaggtgctgaaggaaggcacgggcgaggacgcggccaaccgcgagcgcatcgccaggctgctgcgctttgcgtcgacgcacgatggcgagcaggcgcagacggtgtcgttcgcggattatgtgggccgcatgaaggatggccaggacaagatttactacgtgacggcggatacgttcacggcggcggcgaacagtccgcacctggagattttccggaagaagggcatcgaggtgctgctgctgtcggatcgggtggacgagtggatgctgtcctatctgcgcgagttcgacggcaagtcgctggtgtcggtggccaagggcggcctggatctggcggagttggcggacgaagaagagaagaagcgtcagtccgaggtggccgagacgttcaagccgctggtcgagcgcctgcagcaggcgctggccgagcaggtgaaggaggtgcgggtgacgcagcgcctggtggattctccggcctgcgtggtggtgggccagaacgagctcagcccgcatctgctgcgcatgctgaaggcggccggccaggaggcgccggaggtcaagccggtgctggagatcaacccggaccacgcgctggtcgcgcggatccgcgatgccagcgatgcggagttcggcgattgggccgcgctgctgctggaccaggcgctgctggccgaaggcgcgcagatcgccgacccggcggccttcgtgaagcgcttgaatgggttgctgttgaaggcttga

SEQ ID NO: 129356 - protein, 635 aa, Bordetella pertussis
MSQTTTTSASETLGFQAEVKQLLHLMIHSLYSNKEIFLRELVSNASDACDKLRFEAIDQPGLLEGDGELAIRVGYDKAARTITISDNGIGLSRDEAVANLGTIARSGTREFFSQLTGDKQKDAQLIGQFGVGFYSSFIVADKVTVLSRRAGLAANEAIRWESDGQGEFSIAPAEKAGRGTDVVLHLRADEDELLNGWKLREILRRYSDHISLPIRMAKEDWDAEKGEQVKGDELETVNQANALWTRNKSDITDEQYREFYKTVSHDYDDPLAWTHNRVEGRSEYTQLLYVPKHAPFDLWDRDARRGVKLYVKRVFIMDDAEQLLPSYLRFVRGVIDSADLPLNVSREILQESRDVRAIREGSAKRVLSLLEDMAENKAEDYATFWTEFGQVLKEGTGEDAANRERIARLLRFASTHDGEQAQTVSFADYVGRMKDGQDKIYYVTADTFTAAANSPHLEIFRKKGIEVLLLSDRVDEWMLSYLREFDGKSLVSVAKGGLDLAELADEEEKKRQSEVAETFKPLVERLQQALAEQVKEVRVTQRLVDSPACVVVGQNELSPHLLRMLKAAGQEAPEVKPVLEINPDHALVARIRDASDAEFGDWAALLLDQALLAEGAQIADPAAFVKRLNGLLLKA

SEQ ID NO: 129357 - DNA, 1878 bp, Bradyrhizobium japonicum
  CDS (1)..(1878): transl_table=11
atgacgacgtcagattcagctgtgcatacgcagcccttccaggccgaggtttccgagctgctgcacctcatggtgcactccgtctattcggagaccgacatcttcctgcgcgagctcgtctccaacgcctcggatgcctgtgacaagctccgctacgaggcgatcgaaagtcccgcgctgctgggcgagggcgacgcgctcaagatccgcatcatcccgaacaagacggccggaacgctcacgatcgccgataacggcatcggcatggagcggcaggagctgatcgaccatctcggcaccatcgcccgctccggcaccaaggcgttcgtctcgaagctgaaggaggccaaggacggcctcggcctgatcggccagttcggcgtcggcttctattccgccttcatggtcgccgacaagatcatcgtggtcagccgccgcgccggcgagagcgacgtctggagctggacgtcctccggcggctccggcttcgagatcgcgcgggccagcgaggaagacgcggcgcgcgtgacacgcggcaccgagatcgtcctgcacctgaaggacgacgccaagaaatatctcgagacctacgagatcgagcgcatcgtcggtgcctattccgacaacatcctgtttcccatcgagctggtgccggaagagggcgagccgcgccagatcaactcggcgagcgcgctgtggcagcgatcgaaatcggagctttcagccgaggactacaagaaggcctatcagcagatcgcctccgccttcgacgaccctgcgatgacgctgcactaccgcgccgagggccgctactcctacgccgtgctgctgtttgcgccgtcgacaaagccgttcgacctgttcgagccctcgcgcaaggggcgcgtcaggctctatgtccgccgcgtcttcatcaccgatgatgccgatctgctcccgggctatctgcgcttcatccgcggcgtcgtcgacagcgaggatcttccgctcaacatctcgcgcgagatgctccagaacaatccgcagctcgtgcagatccgcaaggccgtggcgacccgtgtcgtgtccgagctcgagggcctcgccgagaaggacgcggagaacttcgcgaagatctgggatgctttcggcgcggtgctgaaagagggcatctacgaggatttcgagcgtcgcgaaaagctgctggcgctgtcgcgcttcaccaccacgacgggcgagaagcggtcgctgaagcaggttgtcgccgatttcaagccgaaccagaccgagatctattatctcgtcggtgacagcatcgaacggctgaagtccaacccgcggctcgaggcggcgaccgcgcgcggcatcgaggtgctgctgctgtccgatccggtcgatgccttctggacctcgatgccgacggagttcgagggcaagccgctgaagtcgctgagccagggcgatctcaatctcgacctgatcccgcgcgtcgacgcgacggacgaggcgaagaaggacgagccggaggcggacgaggccgccaccatcgcggtcatcaaggccgccctcggcgagcgcgtcagcgacgtcaaggcgtccacgcgcctcaccagctcggcctcctgcctcgttgccgacagccagggtccgagccgcgaactcgagcgtatcctgtcgcagcagaaccgcggcatgcgcgccaagccggtcctcgagatcaatctgcgccatccgatggtgggggcgatcaccaaggctcaggccggctccaaggcggtcgacgatctcagcttgctcctgctcgagcaggcacagatcctggacggcgagttgccggaggacccggcggcgtttgcggcgaggttgaaccggctcgtgttgcaggggctcggcggatag

SEQ ID NO: 129358 - protein, 625 aa, Bradyrhizobium japonicum
MTTSDSAVHTQPFQAEVSELLHLMVHSVYSETDIFLRELVSNASDACDKLRYEAIESPALLGEGDALKIRIIPNKTAGTLTIADNGIGMERQELIDHLGTIARSGTKAFVSKLKEAKDGLGLIGQFGVGFYSAFMVADKIIVVSRRAGESDVWSWTSSGGSGFEIARASEEDAARVTRGTEIVLHLKDDAKKYLETYEIERIVGAYSDNILFPIELVPEEGEPRQINSASALWQRSKSELSAEDYKKAYQQIASAFDDPAMTLHYRAEGRYSYAVLLFAPSTKPFDLFEPSRKGRVRLYVRRVFITDDADLLPGYLRFIRGVVDSEDLPLNISREMLQNNPQLVQIRKAVATRVVSELEGLAEKDAENFAKIWDAFGAVLKEGIYEDFERREKLLALSRFTTTTGEKRSLKQVVADFKPNQTEIYYLVGDSIERLKSNPRLEAATARGIEVLLLSDPVDAFWTSMPTEFEGKPLKSLSQGDLNLDLIPRVDATDEAKKDEPEADEAATIAVIKAALGERVSDVKASTRLTSSASCLVADSQGPSRELERILSQQNRGMRAKPVLEINLRHPMVGAITKAQAGSKAVDDLSLLLLEQAQILDGELPEDPAAFAARLNRLVLQGLGG

SEQ ID NO: 129359 - DNA, 1899 bp, Burkholderia thailandensis
  CDS (1)..(1899): transl_table=11
atgactcagcaaaccatgagctttcaggcagaggtcaagcagctcctccacctgatgattcattcgctttacagcaacaaggaaatcttcctgcgcgaactcgtgtccaacgcgtccgacgccgctgacaagctccgtttcgaggctctggaaaacaacgcgctgtacgagagcgatccgaacctgcgcatccgcctgtcgttcgacaaggccgcgcgcacgctcacgatcgacgacaacgggatcggcatgagccgcgacgaggcgatcgcgaacctcggcacgatcgcgcgctcgggcacgaaggagttcttctcgaagctctccggcgaccagcagaaggacgcggccctcatcggccagttcggcgtcggcttctactcgggattcatcgtcgcggacaagatcaccgtcgagacgcgccgcgcgggcctgcccgcgtccgagggcgtgcgctgggagagcgcgggcgaaggcgacttctcggtcgacacgatcgagcgcgccgcgcgcggcacgacgatcacgctgcatctgcgcgaaggcgaggacgagctgctgtcgtcgtatcggctgaaatcgatcgtccagaagtattcggatcacgtcgcgctgccgatcctgatgaagaaggaagagtgggatcaggaaaagggcgagatggtcgagaaggacgaggacgagaccgtcaaccaggcgagcgcgctgtggacccgcgcgaagagcgacgtcaccgaagagcagtacaagcagttctaccagcacgtcgcgcacgatcaccaggacccgctcgcgtggacgcacaaccgtgtcgagggccgcagcgaatacacgcaactgctgttcgtgccgtcgcacgcgccgttcgacctgtggaaccgcgactatcgcggcggcctcaagctgtacgtgaagcgcgtgttcatcatggacgacgccgagcaactgctgccgcagtacctgcgcttcatcaagggcgtggtcgattcgtcggatctgccgctgaacgtgtcgcgcgagatcctgcaggaaagccgcgacgtgaaggcgatccgcgaaggcgtgaccaagcgcgcgctgtcgatgctcgaggagctcgcgaacgccgaggacgatgcgggcaaggagaagtacaagacgttctggagcgcgttcggccaggtgctgaaggagggcgtcggcgaggatcacgcgaaccgcgagcgcgtcgcgaagctgctgcgcttcgcgtcgacgcacggcgacaccgacgctcaggacgtggcgctcgccgattacgtcgcgcggatgaagcccgagcaaacgaagatctactacgtgacggccgacacgtggcaggccgcgaagaacagcccgcatctcgaagtgttccgcaagaagggcgtcgaggtgctgctgctcaccgatcgcgtcgacgaatggatgctgtcgttcctgcacgagttcgacggcaagccgctcgcgagcgtcgcgcgcggcgatctcgatctcggcgcgctgaacgacgacgagaagaaggcgcaggaagagacgggcgaggcgatgaagcctgtcgtcgacaagatgaaggaaacgctcggcggcaaggtgaaggacgtgcgcgtcacgttccggctgaccgattcgccgtcgtgcctcgtcgcggacgacaacgacatgagcggctacctgcagcggatgctgaaggcggcgggccagaacgcgccgtcgttccagccgattctcgagatcaatccggagcatccgctcgtcaaggcgctgaaggccgacggcgcggatttcggcgactggtgccatctgttgttcgatcaggcgctgctcgccgaaggcggcgcgctcgaggacccggcgagcttcgtgaagcggaccaacgcgctgttgctgtcgcgcgcggcgtga

SEQ ID NO: 129360 - protein, 632 aa, Burkholderia thailandensis
MTQQTMSFQAEVKQLLHLMIHSLYSNKEIFLRELVSNASDAADKLRFEALENNALYESDPNLRIRLSFDKAARTLTIDDNGIGMSRDEAIANLGTIARSGTKEFFSKLSGDQQKDAALIGQFGVGFYSGFIVADKITVETRRAGLPASEGVRWESAGEGDFSVDTIERAARGTTITLHLREGEDELLSSYRLKSIVQKYSDHVALPILMKKEEWDQEKGEMVEKDEDETVNQASALWTRAKSDVTEEQYKQFYQHVAHDHQDPLAWTHNRVEGRSEYTQLLFVPSHAPFDLWNRDYRGGLKLYVKRVFIMDDAEQLLPQYLRFIKGVVDSSDLPLNVSREILQESRDVKAIREGVTKRALSMLEELANAEDDAGKEKYKTFWSAFGQVLKEGVGEDHANRERVAKLLRFASTHGDTDAQDVALADYVARMKPEQTKIYYVTADTWQAAKNSPHLEVFRKKGVEVLLLTDRVDEWMLSFLHEFDGKPLASVARGDLDLGALNDDEKKAQEETGEAMKPVVDKMKETLGGKVKDVRVTFRLTDSPSCLVADDNDMSGYLQRMLKAAGQNAPSFQPILEINPEHPLVKALKADGADFGDWCHLLFDQALLAEGGALEDPASFVKRTNALLLSRAA

SEQ ID NO: 129361 - DNA, 1953 bp, Chromobacterium violaceum; identical to SEQ ID NO: 129167
  CDS (58)..(1953): transl_table=11

SEQ ID NO: 129362 - protein, 631 aa, Chromobacterium violaceum
MSAQKETLGFQTEVKQLLKLMIHSLYSNKEIFLRELISNASDAADKLRFEGLAKPELFENDPELKIRIAFDKDARTITIADNGIGMSRDEVVSHIGTIAKSGTKSFFEQLSGDEKKDAHLIGQFGVGFYSAFIVADKVTLTTRRAGEAEAVRWESHGEGEYTLESVEKAERGTEIVLHLKEGEDELLNDWKLKGIIRKYSDHISIPIEMKKGNSYGENGEVIVSDEMEAVNSASALWTRSKNDISEEQYQEFYKHVAHDFTAPLAWSHARVEGRQEYTELLYIPSRAPFDLYDRERKQGVKLYVRRVFIMEDTEKLMPHYLRFVRGVIDSNDLPLNVSREILQESKDIDAIRAGCVKKVLGLLEDLSANQPEKYAEFWKEFGQVLKEGVGEDFANKERIAKLLRFVSTASEDAEPTVSLADYIGRMKEGQDKIYYITADTLAAAKNSPHLEVFKKKGVEVLLLTDRVDEWVTGSLFEFDGKALQSVAKGALDLGALEDEADKEAQKQVEEASKPVVEKVQKALGDKVKEVRATARLVESPACLVAGEHDMSAHLERMLKAAGQKIEGSKPTLEINPEHVLVKRLAEESDEARAGDLAAVLYDQALLAEGGKLEDPASFVKRINKLMLELSV

SEQ ID NO: 129363 - DNA, 1902 bp, Coxiella burnetii
  CDS (1)..(1902): transl_table=11
atgtccttacaaccgcaagctgaaacgctatcctttgaagctgaagtcaaacagttattacatttggtagctcattcactttatagtaacaaagaaatttttcttcgcgagttaatttctaacagctctgatgcagccgataaattacgttaccaggcgctttccgatgccgctttatacgaaaatgacgcggacttaaaaatttggattgatttcgataaagacaatcgcaccatcaccattcgcgataatggaattggcatgagccgagaagaagtgatcgaaaatttaggaacgatagcgaaatcaggaacgcgagccttccgcgaattattagccgaaaagaaggcagaagactcacaattgatcggccaatttggcgtcgggttttattcggctttcattgtggctgatcgagtcgtcgttcgcacacgacgggctggcatgaaagctgaccaaggggtggaatgggaatcgacaggagagggtgaatatacccttaaaaacatcgataaaccgacgcgaggcacggaagttgttttgcatctgaaagaaagtgaagaagaatttcttgatcccttgcgattgcgcgccattatcaccaagtattccgatcatattttattgcctatcgtcatgaaaaaaataaaaaccagtggtgctgacgatgaagataaaaacgaaactccagaagaagaagttgtcaatcgcgccaacgctttgtgggtgctgccgaaggataaaattaaagacgaagaatataaagaattatataaacacattgcgcacgattttgaagacccattagcgtgggtccacaataaagtcgaaggtaaattagaatacaccactttattgtatatcccagcccgtgcgccgtttgatctttggaatcgcgaagggcaacggggattaaaactttacgttaaacgcattttcattatggatgatgccgaacatttcatgccaatgtacctgcgttttgtcaaaggtattgttgactcaaacgatttgcccctcaatatttcacgcgaattattacaatccaacgaagtcattaacaaaataaaagctggctgtgtgaagcgcattttgagtttgttggaagatctggcgaagaatgacaaagagaaatacgccagcttctggaaagctttcggtcaagtattaaaagagggcccagcagaagatttcgctaatcgcgatcgtatcgctaatttattgcgttttgcgtcaactcataatgacacagatgaacaaaacgttagcttgcaagactatatcagccgaatgaagcccgaacaaaataaaatttattatattgttgcagacacctataccagcgctaaaaatagccctctgctcgaagtttttcgcaaaaaagacatcgaagtattgcttatgtccgatcgagtggatgagtggctggttgctcatcttaacgaatttgaaggcaagtctttgcagtccatcgcaaaagggactttagatctcggtgatcttgaaaaagaagaaaaggttgaaacggaaaagtttgaaaaagattttgatgaacttttaaagcaatttaaagaagttttaggcgaaaaaataaaagacgtgcgaattactcatcgattaacagattcgcctacgtgtgttgtttttgatgaaaatgaaatgagtggccatttgcaaagattattaattcaaacgggtcaggatttcatgcaggcaaaacctattttagaaattaatccatcgcaccccttaattttacgggtgaaaaatgaatctgataaaacacgctttaatcgttgggccgatttattgcttaatcaagcgctcctagctgaaggagagcagcttaaagaccctgccagttttgtgaaagggctaaatgaattattattagattcctaa

SEQ ID NO: 129364 - protein, 633 aa, Coxiella burnetii
MSLQPQAETLSFEAEVKQLLHLVAHSLYSNKEIFLRELISNSSDAADKLRYQALSDAALYENDADLKIWIDFDKDNRTITIRDNGIGMSREEVIENLGTIAKSGTRAFRELLAEKKAEDSQLIGQFGVGFYSAFIVADRVVVRTRRAGMKADQGVEWESTGEGEYTLKNIDKPTRGTEVVLHLKESEEEFLDPLRLRAIITKYSDHILLPIVMKKIKTSGADDEDKNETPEEEVVNRANALWVLPKDKIKDEEYKELYKHIAHDFEDPLAWVHNKVEGKLEYTTLLYIPARAPFDLWNREGQRGLKLYVKRIFIMDDAEHFMPMYLRFVKGIVDSNDLPLNISRELLQSNEVINKIKAGCVKRILSLLEDLAKNDKEKYASFWKAFGQVLKEGPAEDFANRDRIANLLRFASTHNDTDEQNVSLQDYISRMKPEQNKIYYIVADTYTSAKNSPLLEVFRKKDIEVLLMSDRVDEWLVAHLNEFEGKSLQSIAKGTLDLGDLEKEEKVETEKFEKDFDELLKQFKEVLGEKIKDVRITHRLTDSPTCVVFDENEMSGHLQRLLIQTGQDFMQAKPILEINPSHPLILRVKNESDKTRFNRWADLLLNQALLAEGEQLKDPASFVKGLNELLLDS

SEQ ID NO: 129365 - DNA, 1911 bp, Dechloromonas aromatica
  CDS (1)..(1911): transl_table=11
atgtccgagtctgcaaccgcgaatgcgaatcgcgaaaccctgggtttccaggctgaagtaaagcaactgctgcaattgatgatccactccttgtacagcaacaaggagattttcctgcgtgaactggtttccaacgcgtccgatgcctgcgacaagctgcgtttcgaggcgctgaacaatagcgcgctctatggcgatgattccgaattgaagattcgcattgccttcgacaaagacgctcgtacgatcaccatttccgacaacggcattggcttgtcgcgtgatgaggcggttgagcatctcggcaccatcgcgaagtccggtaccaaggagtttttctcggcactgaccggtgatcaggccaaggatgcccacctgatcgggcagttcggcgtcggcttctactcatcattcatcattgccgacaaggtcacggtggtttcccgccgcgctggtgtcgaggccaatcaggccgtttgctgggaatccggtggcgagggggattacaccgtcgaaatggtcgagaaggccacgcgtggtactgatgtcaccttgcatctgcgcgaaggcgaggatgaattcctcggtggctggaagctgaaatcgatcattcgcaagtactccgatcacatcaccttgcctatcgtgatgaaaaaggaggactggaaggacggcgagcaggtgatgaccgaggaagacgagaccgtcaaccaggccaatgcgctgtgggttcgctcgaagtccgacattaccgaggagcagtacaaggagttctacaagcacgtcgcacacgacttcgaggatccgctggcgtggacgcatgcccgtgtcgaaggcaagcaggaatacacgcagttgctctacattccggctcgtgcgccgtttgacctgtgggaccgcaatgcccgtcacggcatcaagctctatgtgcgccgcgtcttcatcatggacgatgccgaacaactaatgccgctctacatgcgtttcgtgcgcggggtggtcgattcgtccgatctgccgctcaacgtctctcgtgaaatcctgcagcagagcaaggatatcgacggcatccgcagcggttgtacgcgcaaggtgctgggcatgctggaagacctggccgagaacgacaaggagaaatacgccaagttctgggaagcctttggctctgtgctcaaggaaggtgttggcgaggatcatgccaacaaggaaaagatcgccggcctgatccgtttctcctcaacgcacaacgatacggcggagcaaaatgtttcgttggctgactacatcggccgcatgaaggaaggccaggagaagatttacttcgtcaccgccgacaccttcaatgctgccaagaatagtccgcatcttgagatcttccgcaagaagggtatcgaagtgctgctgctgtctgatcgtgtcgacgagtgggtggttgggcacctgaccgagttcgacggcaagcacctgcaatcggtcgccaagggcggtcttgatctgggcaagctggaagatgaagccgagaagcaggaagccgaaaaggctgctgatgactacaaggaactgctcgagaaggtgaaaacctcgctcggcgacaaggtcaaggatgttcgcgtaacttatcgcctgaccgattcgccgtcctgcctggtgtctgacgagcatgacccgtccggcaatctggcccgcctgatgaaggcggctggtcagccaatgccgaactcgaagcctatcctcgaaatcaacccgcagcacccggcggtgatgcgcttgaagtacgaggaaagccgtttcgacgactgggcggcgctgctgttcgaacaggcaaccctggcggaaggtggccaactcgacgatccggctggcttcgtgaagcgcatcaacgatctgatgatggcgctgtcagcgaagtaa

SEQ ID NO: 129366 - protein, 636 aa, Dechloromonas aromatica
MSESATANANRETLGFQAEVKQLLQLMIHSLYSNKEIFLRELVSNASDACDKLRFEALNNSALYGDDSELKIRIAFDKDARTITISDNGIGLSRDEAVEHLGTIAKSGTKEFFSALTGDQAKDAHLIGQFGVGFYSSFIIADKVTVVSRRAGVEANQAVCWESGGEGDYTVEMVEKATRGTDVTLHLREGEDEFLGGWKLKSIIRKYSDHITLPIVMKKEDWKDGEQVMTEEDETVNQANALWVRSKSDITEEQYKEFYKHVAHDFEDPLAWTHARVEGKQEYTQLLYIPARAPFDLWDRNARHGIKLYVRRVFIMDDAEQLMPLYMRFVRGVVDSSDLPLNVSREILQQSKDIDGIRSGCTRKVLGMLEDLAENDKEKYAKFWEAFGSVLKEGVGEDHANKEKIAGLIRFSSTHNDTAEQNVSLADYIGRMKEGQEKIYFVTADTFNAAKNSPHLEIFRKKGIEVLLLSDRVDEWVVGHLTEFDGKHLQSVAKGGLDLGKLEDEAEKQEAEKAADDYKELLEKVKTSLGDKVKDVRVTYRLTDSPSCLVSDEHDPSGNLARLMKAAGQPMPNSKPILEINPQHPAVMRLKYEESRFDDWAALLFEQATLAEGGQLDDPAGFVKRINDLMMALSAK

SEQ ID NO: 129367 - DNA, 1953 bp, Geobacter metallireducens
  CDS (1)..(1953): transl_table=11
atgacgaagaccaccaagaaattcgaaaccgaggtccagcagctcctcgatctcgtaattcactccctttactccaacaaggacatcttcctccgggaactcatctccaactcttccgacgccatcgacaaggtcctcttcgaggctcaccagaatgcggcggtcattgagggagagccggaagggaaaatcaagctgatccccgacaaagaggccggcaccatcaccatccgcgacaacggggtcggcatgaccatggaggaggtggagaagaacatcggcaccatcgcccattcggggaccaaggcgttcctggcgaacctgaaggagcagaacgtgtccgagcacccggagctgatcggccagttcggggtcggcttctacgcttcgttcatggtggccgaccgggtcaccctcgtcacccgccgtgccggccaggacaaggccgccggggtccgctgggagtccaccggcgacggcacctacaccgttgaagaagcagtcaaggagacccgcggcaccgaaatcaccctccacctgaaagaagagatgaaggaatatctcgacgagtggaagatccgctccatcgtacgtaaatactccgactacgtccagtaccccgtcgtcatggatgtgacccggaccgaagtcccgaaaggggtgaacggcgaggaaatcgaaggggccggcaccatcgagaaaactgtggaagagactctcaactccatgaaggccatctgggcccgcgccaagagcgaagtgaccgaggaggagtacgaggagttctacaagcacgtctcccacgatttcgagaaacccctcaagaccatccactattcggccgaaggggtgagcgagttcaaggcactcctctacctgccggcccacaaacccttcgacctcttcatgcccgagcgcaagaaaggggtccagctctacgtgcgccgggtcttcatcaccgactcctgcgagcagctcatccccgactacctccgcttcgtgaagggggtggtggactccagcgacctgccactcaacgtgtcgcgggaaatcctccaggaagatgtccagatcaagcggatccagaaaagcctcgtttccaagatcatctccaccctctcagaaatgcgggagaaggaggccgacgactacctcgccttctacaaggagttcggccaggtcctcaaggaaggggtccacttcgattacgccaaccgggagaagctccaggacctcctcctcttcgaaagcaccaggaccgaggcggggaaattcacctccctcaaggagtacgtggagcggatgcccgcggggcaggaagagatctacttcatcactggcacgagccgcacggccctggagcagtccccccacctggagatcttccggaagaaggaatacgaggtcctcttcctgaccgatcccgtggacgagtgggtggtgcagggggtcacggagtacgacggcaagaagctcaaggccgtggaccggggcgatgtcatccccgccaccgaagaggagaagaaggagcaggaggccaagcgggaagaggcgttcaagcagtacggcgacctcctctccttcgtgaaggagaagctcgacgcgcgggtgaaggaagtgcgcctttccagccgcctcaccgacagcgcctgctgcctcgtggccgacgagcacggtctcaacgccaacatggagcggattctccgggccatgaaccaggatgtccccgagtcgaagcggattctggagctgaacccggatcaccccctcatgcaggtgatggcaaacctctttgcccgggacaaggccaacccgcgcctgggcgactactgcgacctcctctacgaccaggctctgctcaccgaaggctcgcccatcagcgacccgctccggttcacgcggctcgtggcggagctgatggtggcggacgggaaagcggctgcgggggagtaa

SEQ ID NO: 129368 - protein, 650 aa, Geobacter metallireducens
MTKTTKKFETEVQQLLDLVIHSLYSNKDIFLRELISNSSDAIDKVLFEAHQNAAVIEGEPEGKIKLIPDKEAGTITIRDNGVGMTMEEVEKNIGTIAHSGTKAFLANLKEQNVSEHPELIGQFGVGFYASFMVADRVTLVTRRAGQDKAAGVRWESTGDGTYTVEEAVKETRGTEITLHLKEEMKEYLDEWKIRSIVRKYSDYVQYPVVMDVTRTEVPKGVNGEEIEGAGTIEKTVEETLNSMKAIWARAKSEVTEEEYEEFYKHVSHDFEKPLKTIHYSAEGVSEFKALLYLPAHKPFDLFMPERKKGVQLYVRRVFITDSCEQLIPDYLRFVKGVVDSSDLPLNVSREILQEDVQIKRIQKSLVSKIISTLSEMREKEADDYLAFYKEFGQVLKEGVHFDYANREKLQDLLLFESTRTEAGKFTSLKEYVERMPAGQEEIYFITGTSRTALEQSPHLEIFRKKEYEVLFLTDPVDEWVVQGVTEYDGKKLKAVDRGDVIPATEEEKKEQEAKREEAFKQYGDLLSFVKEKLDARVKEVRLSSRLTDSACCLVADEHGLNANMERILRAMNQDVPESKRILELNPDHPLMQVMANLFARDKANPRLGDYCDLLYDQALLTEGSPISDPLRFTRLVAELMVADGKAAAGE

SEQ ID NO: 129369 - DNA, 1953 bp, Geobacter sulfurreducens
  CDS (1)..(1953): transl_table=11
atgagcaagaccgtcaagaaattcgaaaccgaagtccagcagctcctggacctcgtgatccactccctctactccaacaaggacatcttcctgcgggagctcatctccaacgcctccgacgccatcgacaaagtcctcttcgagtcccaccagaacgcggcggtcatcgagggcgagcccgaagggaagatcaagctgatccccgacaaggatgccggcacccttaccatccgcgacaacggggtcggcatgaccctggaggaagtggagaagaacatcggcaccatcgcccattcgggcaccaaggcattcctggccaacctgaaggagcagaacgtggccgaccacccggagctgatcggccagttcggggtcggcttctacgcctcgttcatggtggccgaccgggtcaccctcgtcacccgccgggccggccacgacaaggcggccggggtccgctgggagtccaccggcgacggcacctacaccgtggaggaatgcgccaaagagacccgcggcaccgagatcaccctccacctgaaagaagagatgaaggaatacctggacgagtggaagatccgctccatcgtccgcaagtactccgactacgtccagtaccccatcgtcatggacgtgacccgcaccgaagtgcccaagggggtgaacggcgaagagatcgaaggggccggcaccatcgagaagaccgaagaggaaaccctcaactccatgaaggccatctggacccgctccaaaagcgaggtgaccgaggaggagtacgaggagttctacaagcacgtctcccacgactttgaaaagccgctgaagaccatccactactcggccgaggggaccagcgagttcaaggccctcctctacctgccggcccacaagcccttcgacctcttcatgcccgagcgcaagaaaggggtccagctctacgtgcgccgggtcttcatcaccgactcctgcgaacagctcctccccgactacctccgcttcgtcaagggagtggtggactccagcgacctgcccctcaacgtctcccgcgagatcctgcaggaggacgtgcagatcaagcgcatccagaagagcctcgtctccaagatcctctcaaccctctccgagatgagggaaaaagaggccgacagctacctggacttctacaaggagttcggcccggtcctcaaggaaggggtccacttcgactacgccaaccgggacaagctccaggaccttctcctgttcgagagcaccgccaccgacgcgggttcgttcgtctccctcaaggaatacgtggagcggatgcccgaggggcaggaagagatctacttcatcaccggcaccagccgggcggccctggagcagtcgccgcacctggagatcttccgcaagaaggggtacgaagtcctgttcctgaccgatccggtggacgagtgggtggtgcaggggctgccggaatacggcggcaaaaagctcaaggccgttgaccggggcgacgtgatccccgccaccgaagaagagaaaaaagagcaggaagccaagcgggaagaggcggccaagcagtacggcgacctcctctccttcgtaaaggagaagctggccgagcgggtgaaagaagtgcggctctccaaccgcctcaccgacagcgcctgctgcctggtggccgacgagcacggcctcaacgccaacatggagcggattctccgggccatgaaccagaccgtgcccgagtccaagcgaatcctggagctgaacccggaccaccccatcatgcaggtcatggccaccctcttcggcaaggacaagaccaacccgcgcctggccgactactgcgacctcctctacgaccaggccctgctcaccgagggatcgcccatcgccgacccgctccggttcacccgcctcgttgccgagctgatggtggcggacggcaaggccgccgcgggagaatag

SEQ ID NO: 129370 - protein, 650 aa, Geobacter sulfurreducens
MSKTVKKFETEVQQLLDLVIHSLYSNKDIFLRELISNASDAIDKVLFESHQNAAVIEGEPEGKIKLIPDKDAGTLTIRDNGVGMTLEEVEKNIGTIAHSGTKAFLANLKEQNVADHPELIGQFGVGFYASFMVADRVTLVTRRAGHDKAAGVRWESTGDGTYTVEECAKETRGTEITLHLKEEMKEYLDEWKIRSIVRKYSDYVQYPIVMDVTRTEVPKGVNGEEIEGAGTIEKTEEETLNSMKAIWTRSKSEVTEEEYEEFYKHVSHDFEKPLKTIHYSAEGTSEFKALLYLPAHKPFDLFMPERKKGVQLYVRRVFITDSCEQLLPDYLRFVKGVVDSSDLPLNVSREILQEDVQIKRIQKSLVSKILSTLSEMREKEADSYLDFYKEFGPVLKEGVHFDYANRDKLQDLLLFESTATDAGSFVSLKEYVERMPEGQEEIYFITGTSRAALEQSPHLEIFRKKGYEVLFLTDPVDEWVVQGLPEYGGKKLKAVDRGDVIPATEEEKKEQEAKREEAAKQYGDLLSFVKEKLAERVKEVRLSNRLTDSACCLVADEHGLNANMERILRAMNQTVPESKRILELNPDHPIMQVMATLFGKDKTNPRLADYCDLLYDQALLTEGSPIADPLRFTRLVAELMVADGKAAAGE

SEQ ID NO: 129371 - DNA, 1896 bp, Haemophilus influenzae
  CDS (16)..(1896): transl_table=11
atgaaggaaaaaattatgtcacaaaatcaagaaactcgcggcttccaatctgaagtcaaacaactactccaattaatgattcattctttgtactctaacaaagaaattttcttacgtgaattgatttctaatgcttctgatgcggcagataaattacgctttaaagcactttccaaccctgctttatatgaaggcgatggcgacttgcgtgtgcgtgttagctttgatgcggataaaggcactatcacaattagcgataacggcattggtatgactcgtgagcaagtcatcgatcatttggggacgattgcaaaatcaggaacaaaagaatttttaaccgcacttggccaagatcaagcaaaaaatagccagcttattgggcagtttggtgtgggtttttattctgcttttattgtggcagataaagtgactgtaaaaactagagcggctggcgaagaggcggataaagctgtgctttgggaatctgcgggcgaaggcgaatattctgtggcggatattgagaaaaaatctcgtggtacagatgtgattttacatttacgtgaagatgaaaaagaatttttaaatgaatggcgtttgcgtgaaattattggtaaatattctgaccatattggcttgccagtggaaatgctgacgaaagaatacgatgatgagggcaaagagtgcggcgaaaaatgggaaaaaatcaataaatctgatgccctttggacgcgttctaaaaatgatgtttccgatgaggaatacaaagcgttttacaaacacttaagccatgattttgttgatcctgtgacttgggcgcataacaaagtggaaggaaatcaagcatatactagtttgctttatgtaccagctaaagcaccttgggatttatttaatcgcgaacataaacacggcttaaaactttatgttcaacgtgtatttattatggatgatgctgagcaatttatgccgaattatctacgttttatgcgtggtttaatcgatagtaatgacttgccattaaatgtatctcgtgaaattttacaggataacaaaattacggctgcactacgcaaagcattaactaagcgttcattacaaatgctagaaaaattagcaaaagatgatgcagaaaaatatcttaaattctggaaagagtttggtttagtcttaaaagaaggccctgcagaagattttgctaacaaagaaactatcgcaaagttattgcgttttgcttcgacacataatgatggtagtgagcaaactgtctctttagaagattacatcttgcgtatgaaagaggggcaaaaagctatctattacattacagcggatagttatgttgcagcgaaaaatagcccacacttggaattattcaataaaaaaggcattgaggttttattactttccgatcgtattgatgaatggatgttaagctatttaactgaatttgacggtaaacaattacaaagtatcacgaaagcagatttggatttaggcgatttagcggataaagaatctgaaacacaaaaacaacaagataaagcctttggtagttttattgagcgtgtgaaaaacttgcttggcgaacgtgtgaaaacggtgcgtttaactcacaatttaacggatacaccagcggtggtttctacggataacgatcaaatgacgacccaaatggcgaaattgtttgcagccgcagggcaacctgtaccagaagtaaaatacacatttgaactgaatccagaacactatttagtgaaaaaagtggctgatattgcagatgaaactgaatttgctgattgggtggaactgttgcttgaacaagctatgttagcagagcgcggatctttggaaaatccagctgcgtttattaaacgtatcaataagttgttaggttaa

SEQ ID NO: 129372 - protein, 626 aa, Haemophilus influenzae
MSQNQETRGFQSEVKQLLQLMIHSLYSNKEIFLRELISNASDAADKLRFKALSNPALYEGDGDLRVRVSFDADKGTITISDNGIGMTREQVIDHLGTIAKSGTKEFLTALGQDQAKNSQLIGQFGVGFYSAFIVADKVTVKTRAAGEEADKAVLWESAGEGEYSVADIEKKSRGTDVILHLREDEKEFLNEWRLREIIGKYSDHIGLPVEMLTKEYDDEGKECGEKWEKINKSDALWTRSKNDVSDEEYKAFYKHLSHDFVDPVTWAHNKVEGNQAYTSLLYVPAKAPWDLFNREHKHGLKLYVQRVFIMDDAEQFMPNYLRFMRGLIDSNDLPLNVSREILQDNKITAALRKALTKRSLQMLEKLAKDDAEKYLKFWKEFGLVLKEGPAEDFANKETIAKLLRFASTHNDGSEQTVSLEDYILRMKEGQKAIYYITADSYVAAKNSPHLELFNKKGIEVLLLSDRIDEWMLSYLTEFDGKQLQSITKADLDLGDLADKESETQKQQDKAFGSFIERVKNLLGERVKTVRLTHNLTDTPAVVSTDNDQMTTQMAKLFAAAGQPVPEVKYTFELNPEHYLVKKVADIADETEFADWVELLLEQAMLAERGSLENPAAFIKRINKLLG

SEQ ID NO: 129373 - DNA, 1866 bp, Helicobacter pylori J99
  CDS (1)..(1866): transl_table=11
atgtctaatcaagaatacaccttccaaactgaaatcaaccagcttttggatttgatgatccactctttgtattctaataaagagatttttttaagggagttgatttctaacgcgagcgacgctttggataagctgaattatttgatgctaaccgatgagaaattaaaagggctgaataccacgcctagcatccatttgagttttgatagccaaaaaaaaaccttaacgattaaagacaatggtataggcatggataaaagcgatctcatcgagcatttaggcacgatcgctaaatcaggcacgaagagttttttaagcgctttgagtggggataagaaaaaagatagcgccttaattggccaatttggcgtgggcttttattcggcgttcatggtagcgagtaagattgtcgttcaaaccaaaaaagttaccagtcatcaagcttatgcatgggtgagcgatggtaagggcaagtttgaaatcagcgaatgcgtcaaagaggagcaaggcacagaaatcaccctctttttaaaagaagaagattctcattttgcgagccgttgggagattgatagcgttgttaaaaagtattctgagcatatccctttccctatttttttaacttacaccgatacgaaatttgagggcgaaggggataataaaaaagaagttaaagaagaaaaatgcgatcagatcaatcaagcgagcgctttatggaaaatgaataagagcgaattgaaagaaaaggattacaaagacttttaccaatcgtttgcgcatgataacagcgagcctttgagctatatccataataaagtggaaggctctttagaatacacgacgcttttttatatccctagcaaagcgccctttgatttgtttagggtggattataaaagcggggtcaaactttatgttaaacgggtgtttatcactgatgatgacaaagaattgttgccgtcttatttgaggtttgttaaaggcgtgattgacagcgaagatttgcccttgaacgtgagtcgtgaaatcttacagcagaataagattttagccaatatccgttcggcttcagtgaaaaagattttaagcgagattgaaaggctgagcaaggataacaagaattaccataaattctatgagccttttgggaaagtgttaaaagaaggcttgtatggggattttgaaaacaaagaaaaacttttagaattgttgagattctattctaaagacaaaggagaatggatttctttaaaagaatacaaagaaaatttaaaagaaaatcaaaaaagcatttactaccttttaggcgaaaatttagacttattaaaagcgtccccccttttagaaaaatacgctcaaaaaggctatgatgttttgttattgagcgatgaaattgatgcgtttgtgatgccaggcgtgaatgaatacgataaaacgccctttagagacgctagccatagtgagagtttgaaagagcttggtttggcagaaatccatgatgaggtaaaagatcagtttaaagatttaatcaaagcgtttgaagaaaatcttaaagatgagattaagggcgtagagctttctggtcatctcacttcagcggtggctttaataggcgatgaaccaaatgcgatgatggctaattggatgcgtcaaatggggcaaagcgtgcctgaaagcaagaaaactttagaattaaaccctaaccatgcgattttgcaaaaactcttaaaatgcgaagataaagagcagttgagcgcttttatctggttgctttatgatggggcgaagcttttagaaaaaggggctttaaaagacgctaaaagttttaacgaacgcctaaatagcgtgctattgaaggcgttgtag

SEQ ID NO: 129374 - protein, 621 aa, Helicobacter pylori J99
MSNQEYTFQTEINQLLDLMIHSLYSNKEIFLRELISNASDALDKLNYLMLTDEKLKGLNTTPSIHLSFDSQKKTLTIKDNGIGMDKSDLIEHLGTIAKSGTKSFLSALSGDKKKDSALIGQFGVGFYSAFMVASKIVVQTKKVTSHQAYAWVSDGKGKFEISECVKEEQGTEITLFLKEEDSHFASRWEIDSVVKKYSEHIPFPIFLTYTDTKFEGEGDNKKEVKEEKCDQINQASALWKMNKSELKEKDYKDFYQSFAHDNSEPLSYIHNKVEGSLEYTTLFYIPSKAPFDLFRVDYKSGVKLYVKRVFITDDDKELLPSYLRFVKGVIDSEDLPLNVSREILQQNKILANIRSASVKKILSEIERLSKDNKNYHKFYEPFGKVLKEGLYGDFENKEKLLELLRFYSKDKGEWISLKEYKENLKENQKSIYYLLGENLDLLKASPLLEKYAQKGYDVLLLSDEIDAFVMPGVNEYDKTPFRDASHSESLKELGLAEIHDEVKDQFKDLIKAFEENLKDEIKGVELSGHLTSAVALIGDEPNAMMANWMRQMGQSVPESKKTLELNPNHAILQKLLKCEDKEQLSAFIWLLYDGAKLLEKGALKDAKSFNERLNSVLLKAL

SEQ ID NO: 129375 - DNA, 1914 bp, Idiomarina loihiensis
  CDS (1)..(1914): transl_table=11
atggcggaagccggtcaaatggaaaaacatggatttcagacagaagtaaaacaattgcttcacctgatgatccattccttgtattccaataaagaaattttcttacgcgaattggtctctaatgcgtccgacgcagcagataaattgcgctttaaagccttaagcgacaactctctgtacggtgacgacagtgacctgcacgttcgtgtttctgttgataaagacagccgcactattaccatcagcgacaatggcgttggtatgacgcgcgacgacgtgatgaataatctgggaaccattgccaagtcaggcactgcggagttctttggtcagctgtccggcgacgaagcaaaagacagtaagcttatcggtcagtttggtgttggcttctattcagcctttattgttgctgatgaagttaccgtaagaacccgttcagcattagataaagacgctcgcggagtcgaatggcgctcgcaaggtgaaggcgatttcgaaattgctgacattgataaagcccgtcgcggcacggacattattttgcacctgaaagacgatgccgatgaattcttagatgaaaatcgtctgcgcggcattatcaataagtattcagaacacctgagtatcccggttcaaatgtggaaagaaccggtacctgagtcagaagacgacgaaggcaacaaagtggaagggcagcccggtgaatgggagactgtaaactcaggtcaggcactctggactcgtgaaaagtcagacattacggacgaagaatacaaagagttctataagaccgtagcgcacgactttgatgaaccactgctgtggagccacaacaaagttgaaggcacaaccgaatacactaatttgctgtacattccaaaacgcgctccgtgggacttatggaaccgcgaacaacagcacggcgttaagctttatgttaagcgtgttttcattatggacgacgctgagcagttaatgccgacttacctgcgttttgtgcgtggtttggttgactcaaatgacttaccgctgaacgtttcgcgtgaaattttgcaggataataaaattacccgtgcaatgcgtaatggcagtaccaaaaaagtactgcaaatgctgaagaagctggcaaaagacgacaaagaacagtatcaacagttctgggataccttcgggaatgtgctgaaagaaggtccggcggaagatcacactaaccgtgagcgtattgccgaactgctacgttttgcttcaacgcataacgacggtgcagtgcagtcagtcagcctggacgactacattgagcgtatgaaagaaggtcaggataaaatcttctacattgttgctgacagctacgaagccgccagaaataaccctgcactggaaatcttcaacaagaaaggcattgaagtgttgctgctttcagagcgcattgatgaatggttgatgagccacctgactgaatttaaagagaaacagttgcagtcagtgactcgaggtgaccttgatttaggcgaactggacgacgaagaagacaaggccgagcaggaaaaagccgaagaagcctttaaagaaaacctggaacgctttgaaaaagccttaggtgataaagttaagaaggttcgtgtgactaaccgcttaaccaactcgccggcctgtatcattaccgatgacaatgatatgagtacgcaaatggctaagttgatggaagccgccggtcaggcggttcctgaaactaagtacatctttgaagtaaatccagaacatccgttggttcaacgcatgctgaccaaagaggatgataccttcaaagaatgggctgaagtgttattagatcaggccactttagcggagcggggcaacctgaaagatccagcctccttcgttacccgccttaacaaattaatgcttaacgcttaa

SEQ ID NO: 129376 - protein, 637 aa, Idiomarina loihiensis
MAEAGQMEKHGFQTEVKQLLHLMIHSLYSNKEIFLRELVSNASDAADKLRFKALSDNSLYGDDSDLHVRVSVDKDSRTITISDNGVGMTRDDVMNNLGTIAKSGTAEFFGQLSGDEAKDSKLIGQFGVGFYSAFIVADEVTVRTRSALDKDARGVEWRSQGEGDFEIADIDKARRGTDIILHLKDDADEFLDENRLRGIINKYSEHLSIPVQMWKEPVPESEDDEGNKVEGQPGEWETVNSGQALWTREKSDITDEEYKEFYKTVAHDFDEPLLWSHNKVEGTTEYTNLLYIPKRAPWDLWNREQQHGVKLYVKRVFIMDDAEQLMPTYLRFVRGLVDSNDLPLNVSREILQDNKITRAMRNGSTKKVLQMLKKLAKDDKEQYQQFWDTFGNVLKEGPAEDHTNRERIAELLRFASTHNDGAVQSVSLDDYIERMKEGQDKIFYIVADSYEAARNNPALEIFNKKGIEVLLLSERIDEWLMSHLTEFKEKQLQSVTRGDLDLGELDDEEDKAEQEKAEEAFKENLERFEKALGDKVKKVRVTNRLTNSPACIITDDNDMSTQMAKLMEAAGQAVPETKYIFEVNPEHPLVQRMLTKEDDTFKEWAEVLLDQATLAERGNLKDPASFVTRLNKLMLNA

SEQ ID NO: 129377 - DNA, 1881 bp, Mannheimia succiniciproducens
  CDS (1)..(1881): transl_table=11
atgagcaataaagaaacttgtggatttcaaaccgaagtaaaacaacttttacaattaatgattcattctctttattccaataaagagatttttttgcgcgagctgatttcaaacgcatcggatgcggcggacaaactccgttttaaagcgctttccgcaccggaactttatgaaggcgacggcgatttaaaagtgcgcattagctttgacgacaaaaaaggtacgttaaccgtgagcgataacggtatcggtatgacccgggaacaagccgtcgatcatttaggtacgattgcaaaatcaggcacaaaagaatttttaagcgcgctaggaaatgatcaggcgaaagacagtcagttaatcggtcagttcggggtcggattttattccgcatttatcgttgccgacaaagtggaagtgcgtagtcgtgccgccggtgtcgcggcggataaaggcgtgctttgggcttctgccggcgaaggcgaatattcggtagaaaatattgagaaaaaggatcgcggtacggaaattaccttattcctgcgtgaggatgaaaaagaattcttaaacgaatggcgtttacgggaaattatcggcaaatattccgatcatatcgggttgccggtggaaattctgacgaaagaatatgacgaagaaggtaaagaatccggtgtgaaatgggaaaaaatcaataaggcgcaagccctttggacccgttctaaagcggaaatttccgatgacgaatataaagaattttataaacatatcagccatgattttgccgatccgttaagctggatgcacaataaagtggaaggcaatcaggaatataccagtctgctttatgtgccgggcaaagcgccttgggatttattcaaccgcgaacaaaaacacggtttaaaactctatgtgcaacgcgtattcattatggatgacgccgaagtctttatgccgaattatttacgctttatgcgcggtttgttagacagcaacgatttgccgttaaacgtttcccgcgaaattttacaggataataaaaccacggcggcgttgcgcaaagccttgaccaaacgttcgttacaaatgctggaaaaattagcgaaagacgaacctgaaaaatacgccgtattctggaaagaattcggcttggtgctgaaagaaggcgtggcggaagatttcgctaataaagaacaaattgccaaactttaccgtttcgcttctactcacacggacagcagcgaacaaaatgtgtcctttgaggactatatttcccgtatgaaagaagggcaaaaagccgtctattacattaccgcggacagctatgtggcggcgaaaaacagccctcacttggaattgttcaacaaaaaaggcattgaagtattattactttccgatcgtatcgacgaatggatgttgagttatttaacggaattcgacggtaaaccgttgcaatccgtcaccaaagcggatttggatttaggcgatttggcggataaagaggaagaaaatcaaaaagaacaggatgaaaaattcgattcctttatccaacgggtgaaatctttgcttggtgagcgagtaaaagatgtacgtataacccaccgcctaacggatacgccggcggtagtttcaacggataatgaccaaatgactacacaaatggcgaaactttttgccatgagcggtcaaccggtgccggaagtaaaatatacctttgagattaatccgcagcacgaattagtgaaaaaagcggcgaaggtgaccgatgaaaccgaattcggcgattggattgaattgctgttaaatcaagccatgcttgcggaacgcggttctttggaaaatccggtggcgttcattaaacttgtgaatgctttattggcgaaataa

SEQ ID NO: 129378 - protein, 626 aa, Mannheimia succiniciproducens
MSNKETCGFQTEVKQLLQLMIHSLYSNKEIFLRELISNASDAADKLRFKALSAPELYEGDGDLKVRISFDDKKGTLTVSDNGIGMTREQAVDHLGTIAKSGTKEFLSALGNDQAKDSQLIGQFGVGFYSAFIVADKVEVRSRAAGVAADKGVLWASAGEGEYSVENIEKKDRGTEITLFLREDEKEFLNEWRLREIIGKYSDHIGLPVEILTKEYDEEGKESGVKWEKINKAQALWTRSKAEISDDEYKEFYKHISHDFADPLSWMHNKVEGNQEYTSLLYVPGKAPWDLFNREQKHGLKLYVQRVFIMDDAEVFMPNYLRFMRGLLDSNDLPLNVSREILQDNKTTAALRKALTKRSLQMLEKLAKDEPEKYAVFWKEFGLVLKEGVAEDFANKEQIAKLYRFASTHTDSSEQNVSFEDYISRMKEGQKAVYYITADSYVAAKNSPHLELFNKKGIEVLLLSDRIDEWMLSYLTEFDGKPLQSVTKADLDLGDLADKEEENQKEQDEKFDSFIQRVKSLLGERVKDVRITHRLTDTPAVVSTDNDQMTTQMAKLFAMSGQPVPEVKYTFEINPQHELVKKAAKVTDETEFGDWIELLLNQAMLAERGSLENPVAFIKLVNALLAK

SEQ ID NO: 129379 - DNA, 1887 bp, Methylobacillus flagellatus
  CDS (1)..(1887): transl_table=11
atgtccacagagacactacagaaggaaaccctgggtttccaggcggaagtcaaacagcttctgcaattgatgattcattcgctctacagcaataaggaaatcgtattgcgcgagttgatttccaacgccagtgatgccgcggataagctgcgattcgaagcactggcagataacagcctctatggcaatgacagcgacctcaaaatccgtgtcagcttcgacaagcaggcgcgcaccatcactatctccgataacggcattggcatgagccgcgaggaggtgatcaacaatattggcactattgccaagtctggcaccaaggaattcctacaatcactcactggcgaccaagccaaggatgccaacctgatcggccaattcggcgtgggcttctactctgcattcattattgccgacaaagtgaccctgaccacccgccgtgcaggcagcaatgaggctgtgcgctgggagtccaccggcgagggcgattacaccctggagcctgccgagaaggaaagccgcggtacagatatcgttctgcatttgcgcgaaggcgaagatgagttcctcaacgattggaaactcaaatccattatccgcaagtattccgaccatatcaccctgcccatcgtcatgaagaaatccgagtggaaggatggcgagcaagtgccgacggatgaggatgaaaccgtgaacaaggcttctgccttgtgggcgcgcaacaagagtgatatttccgaacaagaataccaggaattctacaagcacgtctcacacgatttcgagaacccgttgacttggagccataaccgggtggaaggcaagcaggaatacatttccctgctctatattccttccaaggcgccgttcgacctctatgaccgtgagcgccagcacggcattaagctttatgtgaagcgcgtattcatcatggatgatgccgaacaattgatgccgcaatatctgcgcttcgtgcgcggcgtcatcgatagcgccgacctgcctctgaacgtgtcgcgcgagatcctgcaacactccaaggatatcgaggccatcaagaccgcctccgtgaaacgcgtattgagcatgttggaagacctggccgagaacaagccggaagagtatgccaagttctggaaagagtttggtcgcgtgctcaaagagggcccaggagaagattttgccaacaaggaacgcattgcgggtttgttgcgcttcgccagcacgcatgccgatactgacgaacaggtggtttccttcaaggattacatcgcccgcatgaaggaagggcaagaggccatctactatattaccgctgatagctttgctgcggccaagcatagtccgcacctcgaaatcttccgcaagaaaggcattgaggtcctgctgctgtcagatcgcgtcgatgagtggctggtgagcagcctgaccgagttcgatggcaagaagctgcagtctgttgccaagggcgacctggacttgggcaagctggaagatgaagccgagaaggagcagcagaaaaaaaccgaggacgaatacaaaccattggtcgaacgtatccaggccgcactgggcgatagcgtgaaagaagtacgcgtgactcaccgcctcacggactccccagcttgcctggtggcgggcgaacacgatctatccggcaacctggagcgcctgctcaaggctgcaggccagaaaacgccgggcagcaagcccatcctcgaaatcaaccccgatcacggcattgtgcagcgcctgaaggatgtgacggatgaggcgaaatttgccgactgggcgcatcttctgtttgatcaggcattgttggcagagggcggccagctggaagacccagctgctttcgtgcgccgcgtgaacgcgatgcttgcctga

SEQ ID NO: 129380 - protein, 628 aa, Methylobacillus flagellatus
MSTETLQKETLGFQAEVKQLLQLMIHSLYSNKEIVLRELISNASDAADKLRFEALADNSLYGNDSDLKIRVSFDKQARTITISDNGIGMSREEVINNIGTIAKSGTKEFLQSLTGDQAKDANLIGQFGVGFYSAFIIADKVTLTTRRAGSNEAVRWESTGEGDYTLEPAEKESRGTDIVLHLREGEDEFLNDWKLKSIIRKYSDHITLPIVMKKSEWKDGEQVPTDEDETVNKASALWARNKSDISEQEYQEFYKHVSHDFENPLTWSHNRVEGKQEYISLLYIPSKAPFDLYDRERQHGIKLYVKRVFIMDDAEQLMPQYLRFVRGVIDSADLPLNVSREILQHSKDIEAIKTASVKRVLSMLEDLAENKPEEYAKFWKEFGRVLKEGPGEDFANKERIAGLLRFASTHADTDEQVVSFKDYIARMKEGQEAIYYITADSFAAAKHSPHLEIFRKKGIEVLLLSDRVDEWLVSSLTEFDGKKLQSVAKGDLDLGKLEDEAEKEQQKKTEDEYKPLVERIQAALGDSVKEVRVTHRLTDSPACLVAGEHDLSGNLERLLKAAGQKTPGSKPILEINPDHGIVQRLKDVTDEAKFADWAHLLFDQALLAEGGQLEDPAAFVRRVNAMLA

SEQ ID NO: 129381 - DNA, 1944 bp, Mycobacterium bovis
  CDS (1)..(1944): transl_table=11
atgaacgcccatgtcgagcagttggagtttcaggcggaggcccggcaactgctggatttgatggtccactcggtctactccaataaggacgcgtttctgcgggagttgatctcgaatgcctccgatgcgctagacaagctgcggattgaggcgctgcggaacaaggacctggaggtcgacacctccgatctgcacatcgagatcgacgcagacaaagctgcaaggactcttaccgttcgtgacaacggcatcgggatggcgcgcgaggaggtggtggatctgattggcacgctggccaagtcgggcaccgccgagctgcgcgcacagctgcgtgaggccaagaacgcggccgcctccgaggaactgatcggtcagttcggcatcggcttctactcgtcgttcatggtggccgacaaggtccaactgcttacccgcaaggctggcgagagcgcggccaccagatgggagtccagcggtgagggcacctacaccatcgagtccgtcgaggatgccccccagggcacgtcggtcaccctgcacctcaagccggaagacgccgaggacgacctgcacgactacacctcggaatggaagatccgtaacctggtcaagaaatactccgacttcatcgcctggcccatccggatggacgtcgagcgccgcaccccagcctcccaggaagaagggggggaaggcggcgaggagaccgtcaccatcgaaaccgaaaccctcaactcgatgaaggcgctgtgggcgaggcccaaagaagaggtgtctgagcaggagtacaaggagttctacaaacacgtcgcgcacgcctgggacgacccgctcgagatcatcgcgatgaaggccgagggcaccttcgagtaccaggccctgctgttcatcccgtctcatgccccgttcgatctgttcgaccgggacgcccacgtcggtatccagctctacgtcaagcgggtgttcatcatgggcgactgcgaccagctcatgcccgagtacttgcgttttgtcaagggtgtggtcgacgcgcaggacatgtcgctcaacgtttctcgcgaaatcctgcagcaggaccggcagatcaaggccatccgccggcggctgaccaagaaggtgctgtccacgatcaaggacgtgcagtccagccggccggaggactaccgcacgttctggacacagttcggcagggtcctcaaagagggactgctgtcagacatcgataaccgggagaccctgctcggtatttcttcgtttgtctccacgtacagcgaggaggaacccaccacgctggccgaatacgtcgagcgcatgaaggacggtcagcaacagatcttctacgccaccggcgagacgcgccaacaactgctgaagtcaccgcacctggaggcgtttaaggccaaggggtacgaagtgctgctgctcaccgacccggtcgacgaggtctgggtgggaatggtgccggagttcgacggcaaaccgctgcagtcggttgccaagggcgaggtggacttgagttccgaagaggacaccagcgaggccgagcgcgaggagcggcagaaggaatttgccgacctgctgacctggttgcaggagacgttgagcgatcacgtcaaggaggtgcggctgtccacccgcctgaccgagtcaccggcctgtctgatcaccgatgccttcgggatgacacccgcgctcgcgcgcatctaccgggcttccggccaggaggttccggtcggcaagcggatacttgagctcaacccgagccatccgttggtgaccggcctgcgccaagcccaccaggaccgcgcagacgatgccgagaaatcattggccgaaaccgcggaattactttacggcacagcgcttctcgccgaaggcggcgcactcgaggatccggcgaggttcgccgagctgctggccgaacgtctcgcgcgtaccttgtag

SEQ ID NO: 129382 - protein, 647 aa, Mycobacterium bovis
MNAHVEQLEFQAEARQLLDLMVHSVYSNKDAFLRELISNASDALDKLRIEALRNKDLEVDTSDLHIEIDADKAARTLTVRDNGIGMAREEVVDLIGTLAKSGTAELRAQLREAKNAAASEELIGQFGIGFYSSFMVADKVQLLTRKAGESAATRWESSGEGTYTIESVEDAPQGTSVTLHLKPEDAEDDLHDYTSEWKIRNLVKKYSDFIAWPIRMDVERRTPASQEEGGEGGEETVTIETETLNSMKALWARPKEEVSEQEYKEFYKHVAHAWDDPLEIIAMKAEGTFEYQALLFIPSHAPFDLFDRDAHVGIQLYVKRVFIMGDCDQLMPEYLRFVKGVVDAQDMSLNVSREILQQDRQIKAIRRRLTKKVLSTIKDVQSSRPEDYRTFWTQFGRVLKEGLLSDIDNRETLLGISSFVSTYSEEEPTTLAEYVERMKDGQQQIFYATGETRQQLLKSPHLEAFKAKGYEVLLLTDPVDEVWVGMVPEFDGKPLQSVAKGEVDLSSEEDTSEAEREERQKEFADLLTWLQETLSDHVKEVRLSTRLTESPACLITDAFGMTPALARIYRASGQEVPVGKRILELNPSHPLVTGLRQAHQDRADDAEKSLAETAELLYGTALLAEGGALEDPARFAELLAERLARTL

SEQ ID NO: 129383 - DNA, 1971 bp, Mycobacterium leprae
  CDS (1)..(1971): transl_table=11
atgagcgcacaagtcgaacagctggagtttcaggcggaggcacgccaacttctggacttgatggtccattcggtctactccaataaagatgcatttttgcgggagctgatctcgaatgcctccgacgcgctggacaagcttcggcttgaagcgtttcggaacaaagacttggacccacgtacagttgacacctccgatctgcacatcgagatcgaagtggacaaaaatacacgcattttaaccgtccgtgacaacggcataggtatgacacgcgcggaggtggtggacttgatcggtacactggccaagtcagggaccgccaagctgcgtcagaaattgcatgcggccaaaaatctgaaagacaccgccgcctctgaaggactgatcggtcagttcggtatcggtttttactcgagtttcatggtagccaacaaggtcgaacttctcacccgtaaagccggtgagactgcggccacgagatggtcatcggacggtgaggccacctacaccatcgaatccgtcgacgaagctccgcagggaacatcagtgacgttgcacctcaaacccgaagacttcgaggacgagttgcacgactacacctcggaatggaagatcagggagctggtcaagaagtactccgacttcatcgcctggcctatccggatggaagttgagcgacgcgcgccggccacctcggacggagaaggggcggatggtgaagagcaagtcaccatcgaaacccagaccatcaactcaatgaaggcgttgtggactaagtcaaaagacgaggtctcagaggacgaatacaaggagttctacaagcacatcgcccacgcctgggatgacccactcgaggtgatcgcgatgaaggccgagggcaccttcgagtaccaggcgctgctttttattccttcgcacgctccgttcgacctgtttaactccgacgccaaaatcggcatgcagctgtatgtcaaacgcgtcttcatcatgtccgactgcgatcagctcatgccgatgtacttgcgtttcgtcaaaggggttgtagacgcagaggacatgtcgctcaatgtttctcgagaaatcctgcaacagaatcggcaaatcaatgcgatccgtcgccggctgaccaagaaggtcctttcagcaatcaaagatctgcaggccgaacgaccacaggactaccgcacgttctggacacagttcggcaaggtcctcaaagagggactcatgtcggactccgacaatcgagacacactgcttcacatttcctcgttcgcctcgacacacagcgacgaagaacccaccaccctggcccaatacgtagaacgcatgaaagacggccaagaccaaatcttctacgccacaggagagtcgcgtcagcaagtcatgaattcgccacatctcgaagcattcaaggccaagggctatgaggtgctgttgctgaccgacccggtcgacgaggtttgggtaggaatggcacccgagttcgacggcaagccgttgaaatcggtagctaggggcgaggtggacctcgaatccgaagaggaaaagacagcgcacgaagctgaacgcaaggagcaggagcagaattttgctgggctggtgaactggttgaaagagaccttgagtgatcacgtcaaagaggtacggttatccacacgcctcaccgagtcgccagcctgcctgatcactgatgccttcggtattacgccggcgctggcgcgcatctaccgggcttccgggcaggacgttccgttcggaaaacggattttggaactcaatccaaatcatccactgatcactggcctgcaacaggcacacgagaacggcggtgatgatactcacctgcgtcaactctccgaaactgccgaattgttgtacggtaccgcccttctcgctgaaggcggagcactagagaatccggcaaagttcgccggattgctcgcggatcttctgtcccggtcgatgtag

SEQ ID NO: 129384 - protein, 656 aa, Mycobacterium leprae
MSAQVEQLEFQAEARQLLDLMVHSVYSNKDAFLRELISNASDALDKLRLEAFRNKDLDPRTVDTSDLHIEIEVDKNTRILTVRDNGIGMTRAEVVDLIGTLAKSGTAKLRQKLHAAKNLKDTAASEGLIGQFGIGFYSSFMVANKVELLTRKAGETAATRWSSDGEATYTIESVDEAPQGTSVTLHLKPEDFEDELHDYTSEWKIRELVKKYSDFIAWPIRMEVERRAPATSDGEGADGEEQVTIETQTINSMKALWTKSKDEVSEDEYKEFYKHIAHAWDDPLEVIAMKAEGTFEYQALLFIPSHAPFDLFNSDAKIGMQLYVKRVFIMSDCDQLMPMYLRFVKGVVDAEDMSLNVSREILQQNRQINAIRRRLTKKVLSAIKDLQAERPQDYRTFWTQFGKVLKEGLMSDSDNRDTLLHISSFASTHSDEEPTTLAQYVERMKDGQDQIFYATGESRQQVMNSPHLEAFKAKGYEVLLLTDPVDEVWVGMAPEFDGKPLKSVARGEVDLESEEEKTAHEAERKEQEQNFAGLVNWLKETLSDHVKEVRLSTRLTESPACLITDAFGITPALARIYRASGQDVPFGKRILELNPNHPLITGLQQAHENGGDDTHLRQLSETAELLYGTALLAEGGALENPAKFAGLLADLLSRSM

SEQ ID NO: 129385 - DNA, 1935 bp, Mycobacterium paratuberculosis
  CDS (1)..(1935): transl_table=11
atgaacgcgcgcgtcgagcagttggagtttcaagccgaggctcggcaactgctggatctgatggtccactccgtctactccaacaaggactcgttcctgcgggagttgatctcgaacgcttccgacgcactggacaagctgcggctggaagccttccgcaacaaggacctcgacgtcgacacctccgacctgcacatccagatcgaggtggacaaggatgcgcgcaccctgaccatccgcgacaacggcatcggcatgacccgcgccgaggtggtcgacctgatcggcaccctggccaagtcgggcaccgccgaattgcgccaacaactccgggaagccaagaacgcccagaacgaagccgcctcagaggaactcatcggccagttcggcatcggcttctactccagcttcatggtggccgacaaggtcgaactgctcacccgcaaggccggcgagagcgaggccaccaaatgggagtcgagcggcgagggcacctacaccatcgaatcggtcgagaacgccccgcagggaacctcggtcaccctgcatctgaagcccgaggacaccgaggacgagctgcacgactacacctcggagttcaagatcaagagcctggtcaagaagtactccgacttcatcgcctggcccatccggatggaggtggagcggcgcacgcccgccaccgaagagggcggcgaggagaccgtcacccgggaggtcgagaccctcaactcgatgaaggccctgtgggcccggcccaaggacgaggtctccgaggaggagtacaaggagttctacaagcacatcgcgcacgcctgggacgacccgctcgaggtcatcgcgatgaaggccgagggcaccttcgagtaccaggcgctgctgttcatcccgtcccacgccccgttcgacctgttcaaccgggacgcgcacaccggcatccagctctacgtcaagcgggtgttcatcatgggtgactgcgaccagctgatgcccgaatacctgcgcttcgtcaagggtgtcgttgacgcacaggacatgtcgctcaacgtgtcccgcgagatcctgcaacaggaccggcagatcaaggccatccggcggcggctgaccaagaaggttctgtccaccatcaaggagttgcaatccgagcggctcgacgactaccggaccttctggactcagttcggccgggtggtcaaggagggtctgctgtcggacttcgacaaccaggagacgctggtgcagctctgctccttcgcctcgacgcacagcgaggaggaggccaccacgctggcccagtacgtcgagcggatgaaggaagggcagacgcagatcttctacgccaccggcgaaacgcgccagcagatcctcaagtcgccgcatctggaggcgttcaaggccaagggctacgaggtgctgctgctcaccgacccggtcgacgaggtctgggtgggaaccgtcaccgagttcgacggcaagccgctgcagtcaatcgccaagggcgaggtggacctgagcgccgagggcgaggagagccaggccgagcgggatgagcagcagaaggaattcgccgatctgctcgcctggctgaaggacaccctgtccgaccacgtcaaggaggtccggctgtccaaccgactgaccgactcgccggcctgcctgatcaccgacgccttcggcatcacaccggcgctggcccggctctaccgcgcctccgggcaggacattccggtgggcaagcgaatactggaactcaatcccaagcacccactggtcaccggcctgcgccaagcccaccaggaccgcgccgacgatccgtccgtcgccgagaccgcggaattgctttacggcacagcgcttctggccgagggcggcgccctcgacgacccggcccggttcgccgagatactggccgaccggttggcccgcaccctgtag

SEQ ID NO: 129386 - protein, 644 aa, Mycobacterium paratuberculosis
MNARVEQLEFQAEARQLLDLMVHSVYSNKDSFLRELISNASDALDKLRLEAFRNKDLDVDTSDLHIQIEVDKDARTLTIRDNGIGMTRAEVVDLIGTLAKSGTAELRQQLREAKNAQNEAASEELIGQFGIGFYSSFMVADKVELLTRKAGESEATKWESSGEGTYTIESVENAPQGTSVTLHLKPEDTEDELHDYTSEFKIKSLVKKYSDFIAWPIRMEVERRTPATEEGGEETVTREVETLNSMKALWARPKDEVSEEEYKEFYKHIAHAWDDPLEVIAMKAEGTFEYQALLFIPSHAPFDLFNRDAHTGIQLYVKRVFIMGDCDQLMPEYLRFVKGVVDAQDMSLNVSREILQQDRQIKAIRRRLTKKVLSTIKELQSERLDDYRTFWTQFGRVVKEGLLSDFDNQETLVQLCSFASTHSEEEATTLAQYVERMKEGQTQIFYATGETRQQILKSPHLEAFKAKGYEVLLLTDPVDEVWVGTVTEFDGKPLQSIAKGEVDLSAEGEESQAERDEQQKEFADLLAWLKDTLSDHVKEVRLSNRLTDSPACLITDAFGITPALARLYRASGQDIPVGKRILELNPKHPLVTGLRQAHQDRADDPSVAETAELLYGTALLAEGGALDDPARFAEILADRLARTL

SEQ ID NO: 129387 - DNA, 1965 bp, Myxococcus xanthus
  CDS (1)..(1965): transl_table=11
atgaccgtcgaaaacgccccccagcgggagacccacgcattccaggcggaaatcaatcagctcctcagcctggtcatcaattcgctctacagccacaaggagatttttctccgcgagctggtgtccaacgcgtccgacgcgctcgacaagctccggttccgcgcgattacggagccggagttgctggcggacgagccggccctggagctgcgcctcatcccggacgaggcgaagggcaccctcaccatcgaggacaccggcatcggcatgtcgcatgacgagctggtgaagaacctgggcaccatcgcccactccggctcgcgcgagttcatcgaggcgctggcgcagaagggccagcagaaggacatgcagctcatcggccagttcggcgtgggcttctacagcgcctatctggtcgcggaccgcgtggaggtggtcagccgcgccgccggccagggccagtccgcctggcggtggacgtcggaagccaagggctccttcacggtggagcccgccgagcgcgccgcgcgcggcacctccatcaccctgcacctgaaggaggaccagaaggagttcctgggcgagtggcggctgcggtcgctcatcacgcagtactccgactacgtgggccaccccatcaagctccaggtgagcaagacgacggggaccggcgacgaggcgaagacggagacgtcgttggaggtcgtcaacaaggccagcgccctgtggcagcgctccaagtccgaaatcacggacgagcagtaccaggagttctacaagcacctgacgcacgactgggaagcgccgctggcgtggacgcacttcaaggcggacggcaacacccagttcaccggcctgctcttcgtgcccaagcagcctccgttcgatttggacgcgcagcagcagcgcggggtgcggctgttcgtcaagcgcgtgttcatcatggaccgctgcgaggagctggtgccgcagtggctgcgcttcgtgcgcggcgtcatcgattcggatgacctgccgctgaacgtgtcgcgcgagctgctccaggactcgcaggtggtgcgcgccatccgcaagcacgtggtgaagaagtccgtggacctgctggagaagctggccaaggacaagccggacgactacctcaccttctggaaggccttcggcacggtgctgaaggaaggcctggccacggaggccgagcagaaggacaagctgggcggtctgctgcgctacgagagctcgcgcgaggagggcctgacgtccctggcggactacgtgggccgcatgaaggaaggccaggaggccatctattacgtctacggcgagtcccggaaggcggtggcggacagcccccacctggaggcgctgaagcagcgcggcttcgaggtcctctacatgacggacccggtggacgagtgggccgcgcagggcctgcgcgagttccagggcaagccgctggtgtccgcgctccaggcggacctgaagctccagtccacggacgagcagaagaaggagcaggagcagcacgccgaaggcctgaagacgctcacctcgaagatgaaggacgtgctccaggagtcggtgcgcgaggtgcgcgtgtcggaccgcctgacggactcgcccgtgtgcctcgtcgtgccagagggcggctcgccggcctacctggagcgcctgctccagcagcgcggccggggcgcgggcatgccgcgcgtgaagcgcatcctggaagtgaatccgaagcaccccgtcatcgagcacctgaaggccgtgcatgaccgcgacccggccgcggcccaggtggcggagtggattgagctgctccacgaccaggcgctgctcaccgagggcagcaccatcgccgaccccaaccgcttcgcccgccgcatgacggggctgttgacgcaggtggcggccctggcggcggcgcccgcgccagcgcagacccccgcctcggcgacggcgagctga

SEQ ID NO: 129388 - protein, 654 aa, Myxococcus xanthus
MTVENAPQRETHAFQAEINQLLSLVINSLYSHKEIFLRELVSNASDALDKLRFRAITEPELLADEPALELRLIPDEAKGTLTIEDTGIGMSHDELVKNLGTIAHSGSREFIEALAQKGQQKDMQLIGQFGVGFYSAYLVADRVEVVSRAAGQGQSAWRWTSEAKGSFTVEPAERAARGTSITLHLKEDQKEFLGEWRLRSLITQYSDYVGHPIKLQVSKTTGTGDEAKTETSLEVVNKASALWQRSKSEITDEQYQEFYKHLTHDWEAPLAWTHFKADGNTQFTGLLFVPKQPPFDLDAQQQRGVRLFVKRVFIMDRCEELVPQWLRFVRGVIDSDDLPLNVSRELLQDSQVVRAIRKHVVKKSVDLLEKLAKDKPDDYLTFWKAFGTVLKEGLATEAEQKDKLGGLLRYESSREEGLTSLADYVGRMKEGQEAIYYVYGESRKAVADSPHLEALKQRGFEVLYMTDPVDEWAAQGLREFQGKPLVSALQADLKLQSTDEQKKEQEQHAEGLKTLTSKMKDVLQESVREVRVSDRLTDSPVCLVVPEGGSPAYLERLLQQRGRGAGMPRVKRILEVNPKHPVIEHLKAVHDRDPAAAQVAEWIELLHDQALLTEGSTIADPNRFARRMTGLLTQVAALAAAPAPAQTPASATAS

SEQ ID NO: 129389 - DNA, 1923 bp, Nitrosomonas europaea
  CDS (1)..(1923): transl_table=11
atgcaaactgcggaaaacatcgaacatttgaactttcaggctgaagccaaccagcttttgaagctgatgatccattccctgtacagtaataaagaaatatttctgcgagagttgatttcgaatgcatcagatgcggcagacaagctgcggtttgaagggttgtccgatgcggcgctgtacgaatccgaccctgatcttaagatccgtattgcttacgataaagaggctcgcaccatcacgattatcgataacggtatcggtatgtccagacaggaagtgatcaataatatcgggactattgccaaatccggtacgcgtgaattttttgattcactgacaggtgaccaggccaaggatgccaacctgatcggacagtttggtgtgggtttttattcggcattcattgttgcagataaagtaaccctgactacgcgccgtgctggattgacaatcgaacacggtgtgcgctgggaatccggtggcgagggtgagtacacgctggaaactgtggaaaagccggatcgaggtactgaaatcgttctgcatctgcgggaaggagaagatgaactgctgagcagttttcagctgcgttccatcatccgtaagtactctgaccacatcacgcttcccattgtcatgaaaaaggaagtgtgggatgacgagagcaaatcgtaccggctgagcgacgaggatgaaaccatcaatcaggccagcgcgatctgggcccggccaaagaatgaaattacgcaggagcagtacgacgaattctataagcacgttgctcatgatttcgaaccgccacttgctcatgtgcatgcccgagtcgaaggtaagcaggaatatatccagttgctgtatatcccggctcatgccccgtttgatttgtttgatcgtgaacatcgtcatggcctcaaactttacgtcaggcgggtattcatcatggatgatgcggaaaaactgttgccaggatatttgcgttttgtccgcggtatcatcgattcaagtgatctgcccctgaatgtctcgcgtgagatcctgcaggaatcgaaagatatcgacagtattcgtgcaggctcagtcaagaaggtgctgggattgatcgaagatcttgccatgagtgacaagagtgaagatcaggaaaaattcaaaaccttctggcgcgaattcggccaggtgctgaaggaggggattgcagaagactatagcaaccgcgagcgtatcgccaagctgttgagattcacttcgacacatgatgaacgtgaagaacagaccgtttcgctggatgattacattgcccggatgaagccggaacaggaaaaaatctattacattactgctgacggcctgaaggcagcccaaagcagcccgcatctggagatattccgtaagaagggaattgaagtgctgctgttgtgtgaccgtatcgatgaatggctggtggccaatctgaatgaatatacgggcaagtctttacaatccattgccaagggtaatctggatctgggcaaactggaagatgaagaagaaaagaaagagcatgaaaaagaggctggagattttcaggaattgacaaacaaaatgaaggaagtgttgggcgaacaggtaaaagatgtgcgcatcacctaccgcttgacagaatcaccagcctgtctggtcgctgatactcatgatgtgagtggcaatcttggacgcttgttgaaatctgccgggcagaaagttccggacagcaaacctttcctggaaatcaatccacatcacccgatgattcagcggttgaaatatgaagaagccaagtttgccgactggagtcatattctgtttgatcaggctttactggccgaaggggggcagcttgaggatccggccggtttcgtcaaacgactgaatgatttactactgcaaaacatcttgagcggaaaatga

SEQ ID NO: 129390 - protein, 640 aa, Nitrosomonas europaea
MQTAENIEHLNFQAEANQLLKLMIHSLYSNKEIFLRELISNASDAADKLRFEGLSDAALYESDPDLKIRIAYDKEARTITIIDNGIGMSRQEVINNIGTIAKSGTREFFDSLTGDQAKDANLIGQFGVGFYSAFIVADKVTLTTRRAGLTIEHGVRWESGGEGEYTLETVEKPDRGTEIVLHLREGEDELLSSFQLRSIIRKYSDHITLPIVMKKEVWDDESKSYRLSDEDETINQASAIWARPKNEITQEQYDEFYKHVAHDFEPPLAHVHARVEGKQEYIQLLYIPAHAPFDLFDREHRHGLKLYVRRVFIMDDAEKLLPGYLRFVRGIIDSSDLPLNVSREILQESKDIDSIRAGSVKKVLGLIEDLAMSDKSEDQEKFKTFWREFGQVLKEGIAEDYSNRERIAKLLRFTSTHDEREEQTVSLDDYIARMKPEQEKIYYITADGLKAAQSSPHLEIFRKKGIEVLLLCDRIDEWLVANLNEYTGKSLQSIAKGNLDLGKLEDEEEKKEHEKEAGDFQELTNKMKEVLGEQVKDVRITYRLTESPACLVADTHDVSGNLGRLLKSAGQKVPDSKPFLEINPHHPMIQRLKYEEAKFADWSHILFDQALLAEGGQLEDPAGFVKRLNDLLLQNILSGK

SEQ ID NO: 129391 - DNA, 1896 bp, Pasteurella multocida
  CDS (1)..(1896): transl_table=11
atgtcgacgaatcaagaaacgcgtggttttcaatcagaagtcaaacaacttcttcaactaatgatccattctctctattccaataaagaaattttcttacgtgaattaatttccaatgcctctgatgcggcagataaattgcgttttaaagccttgtctgtgccagagctttatgaaggtgatggggatttaaaagtgcgtattcgttttgatgaagagaaaggtaccttaaccattagtgataatggcattgggatgacgcgtgatgaagtaatcgatcatttaggtaccattgccaaatcgggtaccaaagaatttttaagtgcattaggacaagatcaagccaaagatagccaattaattggtcagtttggggtcggtttttattccgcctttattgtggcagataaagtcactgtgaaaacgcgtgcagcaggcgtaagtgcagataaagcggtgctttgggaatcggcaggcgaaggtgagtattctgtggcggatattgacaaaaaagaacgcggtaccgaaattacccttcacttacgtgaagatgaaaaagcctttttaaatgattggcgcttacgtgaaattatcggcaaatattcggatcatattggtttgccagtagaaattctagccaaagaatatgacgatgaaggcaaagaaaccggcattaaatgggaaaaaatcaataaagcgcaagccttgtggacacgtgcaaaaaatgagatttcggaggaagaatatcaagagttctataagcatttaagtcatgattttaccgatccgttactttgggcacacaataaagtagaaggaaatcaagaatataccagtttactttatgtgccagcaaaagccccttgggatttatttaatcgcgaacataaacacggcttaaagctgtatgtgcaacgtgtctttattatggatgatgcgcaagtctttatgccaaattatctgcgttttatgcgtggtttattagattccaatgatttgccactgaatgtatcgcgcgaaattttacaagataacaaagtcacgagtgctttacgtaaagccctaacgaaacgtgcattgcaaatgctcgaaaaattagccaaagacgatgcagagaaataccaacgcttttggcaagagtttggtttggtgttaaaagaaggtccagcagaagattttgcaaataaagaaacgattgcaaaattattacgttttgcttcaacacacaatgacagcagccaacaaagcgtgtcgttagaagactatgtggcacgtatgaaagaaggacaaaaggcgatttattatattacggcagatacttatgtcgccgcgaaaaactcaccgcacttagaattgttcaataagaaaggcattgaagtattattgttgtccgatcgtattgatgaatggatgttaagctacttaacggaatttgatggtaagccactgcaaaccatcagtaaagcggatttagatctaggtgatttagcggataaagaggaagacagtcaaaaagcacaagatgagcaatatgcttcttttgtggaacgtgtgaaaaccttgcttggcgagcgcgtgaaagaagtgcgcttaactcaccgtttaacggatacgccagcggttgtttcgacgggtgatgaccagatgaccacccaaatggcgaaattgttcgctgcggcgggtcaagcgatgccagaggttaaatacaccttcgaattaaatccagaacatggtttagtacaaaaagtagcagaaattgccgatgagcagcaatttgccgattggattgaattgctacttgaacaagcaatgttggctgagcgtggtagccttgaaaatccagttgcctttattaaacgcatgaacaccttgttaagtaaactcacaagtcattaa

SEQ ID NO: 129392 - protein, 631 aa, Pasteurella multocida
MSTNQETRGFQSEVKQLLQLMIHSLYSNKEIFLRELISNASDAADKLRFKALSVPELYEGDGDLKVRIRFDEEKGTLTISDNGIGMTRDEVIDHLGTIAKSGTKEFLSALGQDQAKDSQLIGQFGVGFYSAFIVADKVTVKTRAAGVSADKAVLWESAGEGEYSVADIDKKERGTEITLHLREDEKAFLNDWRLREIIGKYSDHIGLPVEILAKEYDDEGKETGIKWEKINKAQALWTRAKNEISEEEYQEFYKHLSHDFTDPLLWAHNKVEGNQEYTSLLYVPAKAPWDLFNREHKHGLKLYVQRVFIMDDAQVFMPNYLRFMRGLLDSNDLPLNVSREILQDNKVTSALRKALTKRALQMLEKLAKDDAEKYQRFWQEFGLVLKEGPAEDFANKETIAKLLRFASTHNDSSQQSVSLEDYVARMKEGQKAIYYITADTYVAAKNSPHLELFNKKGIEVLLLSDRIDEWMLSYLTEFDGKPLQTISKADLDLGDLADKEEDSQKAQDEQYASFVERVKTLLGERVKEVRLTHRLTDTPAVVSTGDDQMTTQMAKLFAAAGQAMPEVKYTFELNPEHGLVQKVAEIADEQQFADWIELLLEQAMLAERGSLENPVAFIKRMNTLLSKLTSH

SEQ ID NO: 129393 - DNA, 1905 bp, Pseudomonas aeruginosa
  CDS (1)..(1905): transl_table=11
atgagcgtggaaacccaaaaagagacactgggctttcagactgaagtgaagcaactgcttcacctgatgattcattctctctattcgaacaaggaaatcttcctccgcgaactgatttccaacgcctcggacgccgccgacaagctgcgtttcgaagccctggccaatcccgagctgctcgagggcggcgccgagctgaagatccgcgtcagcttcgacaaggaagccaacaccgtcaccctggaagacaacggcatcggcatgagccgcgaggatgtggtgactcacctgggcaccatcgccaagtccgggaccgccgacttcctgaagaacttgtctggcgaccagaagaaggattcgcacctgatcggccagttcggcgtcggtttctacagcgccttcatcgtcgccgacaaggtcgatgtctactcccgtcgcgccggccagccggccagcgaaggcgtgcactggtcgtcgaagggcgagggcgagttcgacgtcgccaccatcgacaagcccgagcgcggcacccgcatcgtcctccacctgaaaaagggcgaggaggagttcgccgatggctggcgcctgcgcaacgtgatcaagaaatactccgatcacatcgctttgccgatcgagctacccaaggaattccacggcgaagaggccgacaagccggccgagccggaatgggaaacggtcaaccgcgccagcgcgctgtggacccgtccgcgcgccgaggtgaaggacgaggaataccaggagttctacaagcacgtcgcccatgacttcgagaacccgctgagctggagccacaacaaggtcgaaggcaagctggaatacacctcgctgctctacgtgccgggccgcgcgccgttcgacctgtaccatcgcgaagcgccgcggggcctgaagctgtacgtacagcgcgtgttcatcatggaccaggccgacgagttcctgccgctgtacctgcgcttcatcaagggtgtggtcgactccaacgacctgtcgctgaacgtctcccgggaaatcctgcagaaggatccggtgatcgactcgatgaagtcggcgttgaccaagcgcgtgctggacatgctggagaagctggcgaagaacgagccggagcagtacaagaccttctggaagaacttcggccaggtcctcaaggaaggcccggcggaagacttcggcaacaaggagaagatcgccggcctgctgcgcttcgcctccaccggcgacgattcgggcgagcagagcgtagcgctggccgactacatcggtcggatgaaggaaggccaggacaagatctactacctcaccggcgagagctactcgcaggtgaagaacagcccgcacctggaagtcttccgcaagaagggcatcgaggtgctgctgctcaccgatcgcatcgacgagtggctgatgagctacctgccggagttcgacggcaagcagttcgtcgatgtcgcccgcggcgacctggacctgggcagcctggactcggaagaggacaagaaggcccaggaagaagtcgccaagagcaaggaaggcctgatcgagcgcctgaagaaggtgctcgacgagcaggtcagcgaagtccgcgtttcccaccgcctgaccgattcgccggcgatcctcgccatcggcgaacaggaccttggcctgcagatgcgccagatcctcgaggccagcgggcagaaagtgccggactcgaagccgatcttcgagatcaacccgcagcatccgctgatcgagaagctggatgcggagccggacgaggaccgcttcggcgagctgtcgcatattctcttcgaccaggccgccctggccgcgggggacagcctcaaggatccgggcgcctacgtacgccgactgaacaagctgctggtggagctgtccgcttaa

SEQ ID NO: 129394 - protein, 634 aa, Pseudomonas aeruginosa
MSVETQKETLGFQTEVKQLLHLMIHSLYSNKEIFLRELISNASDAADKLRFEALANPELLEGGAELKIRVSFDKEANTVTLEDNGIGMSREDVVTHLGTIAKSGTADFLKNLSGDQKKDSHLIGQFGVGFYSAFIVADKVDVYSRRAGQPASEGVHWSSKGEGEFDVATIDKPERGTRIVLHLKKGEEEFADGWRLRNVIKKYSDHIALPIELPKEFHGEEADKPAEPEWETVNRASALWTRPRAEVKDEEYQEFYKHVAHDFENPLSWSHNKVEGKLEYTSLLYVPGRAPFDLYHREAPRGLKLYVQRVFIMDQADEFLPLYLRFIKGVVDSNDLSLNVSREILQKDPVIDSMKSALTKRVLDMLEKLAKNEPEQYKTFWKNFGQVLKEGPAEDFGNKEKIAGLLRFASTGDDSGEQSVALADYIGRMKEGQDKIYYLTGESYSQVKNSPHLEVFRKKGIEVLLLTDRIDEWLMSYLPEFDGKQFVDVARGDLDLGSLDSEEDKKAQEEVAKSKEGLIERLKKVLDEQVSEVRVSHRLTDSPAILAIGEQDLGLQMRQILEASGQKVPDSKPIFEINPQHPLIEKLDAEPDEDRFGELSHILFDQAALAAGDSLKDPGAYVRRLNKLLVELSA

SEQ ID NO: 129395 - DNA, 1905 bp, Pseudomonas fluorescens
  CDS (1)..(1905): transl_table=11
atgagtgtggaaactcaaaaggaaaccctgggcttccagaccgaggtgaagcaactgctgcacctcatgatccattcgctgtattccaacaaggaaatcttccttcgcgaattgatctcgaacgcctctgacgccgtcgacaaattgcgcttcgaagccctggccaagcctgagctgctcgaagatggcgctgaactgaaaatccgtgtgagcttcgacaaggacgccaagaccgtcaccctcgaagacaacggcatcggcatgaaccgtgacgatgtgatcacccacctgggtaccatcgccaaatccggcactgccgatttcatgaaaaacctgtccggcgatcagaagaaggattcgcacctgatcggtcagttcggtgtgggtttctactcggccttcatcgttgctgacaaagttgacgtgtacagccgtcgcgccggcactgctgccagcgaaggcgtgcactggtcgtcgaaaggcgagggcgaattcgaagtcgccaccatcgacaagccggagcgcggcacccgcatcgtcctgcacctgaaatccggtgaagaggagtttgccgatggctggcgcctgcgcaacatcatcaagaagtactccgaccacatcgcgctgccgatcgagctgccgaaagaagtggccgctgccgaaggcgaagagaagcctgaagttgaatgggaaaccgtcaaccgcgccagcgccctgtggacccgccctcgcaccgaagtgaaggacgaggaataccaggagttctacaaacatatcgctcacgacttcgaaaacccgctgtcgtggagtcacaacaaggttgaaggcaagcttgagtacagctcgctgctgtatgtgccggcccgcgcaccgttcgatctgtaccagcgtgaagcgccgaaaggcctgaagctgtacgtgcagcgcgtgttcgtgatggatcaggccgagtccttcctgccgctgtacctgcgcttcatcaagggcgtggtcgattccaacgacctgtcgctgaacgtgtcgcgggaaatcctgcagaaagacccgatcatcgactcgatgaagtcggcgctgaccaagcgtgttctggacatgctggaaaaactggcgaagaacgagcctgagcaatacaagggcttctggaaaaacttcggtcaggtcatgaaagaaggcccggcagaagatttcgccaacaaggaaaaaattgccggtctgttgcgtttcgcatcgaccaacggcaccgatggcgagcagatcgtcggtctggccgagtacctggcgcgcgccaaggaaggtcaggacaagatctactacctcaccggcgaaacctacgcgcaggtcaagaacagcccgcacctggaagtcttccgcaagaaaggcatcgaagtgctgctgctgaccgaccgtatcgacgagtggctgatgagctacctcagcgaattcgacggcaagacgtttgtcgacgtcgcgcgcggtgacctggacctgggcaacctggactcggaagaggacaagaaggccgcagaagaagtcgccaagtcgaaagaaggtctggtcgagcgtctgaaaaccgcactgggcgattccgttgccgaagtccgggtttcccatcgcctgaccgattcgccggccatcctggcgattggcgagcaggacctgggtctgcaaatgcgtcagatccttgaagccagtgggcagaaggtgccggattcgaagcctatcttcgaattcaacccgagccacccgctgatcgagaagctcgacaacgaggccagcgaagatcgcttcagcgacctgtcgcacatcctcttcgaccaggccgccctggcggcgggcgacagcttgaaagacccggccgcttacgtgagccgtctgaacaagctgctggttgagctgtcggcctga

SEQ ID NO: 129396 - protein, 634 aa, Pseudomonas fluorescens
MSVETQKETLGFQTEVKQLLHLMIHSLYSNKEIFLRELISNASDAVDKLRFEALAKPELLEDGAELKIRVSFDKDAKTVTLEDNGIGMNRDDVITHLGTIAKSGTADFMKNLSGDQKKDSHLIGQFGVGFYSAFIVADKVDVYSRRAGTAASEGVHWSSKGEGEFEVATIDKPERGTRIVLHLKSGEEEFADGWRLRNIIKKYSDHIALPIELPKEVAAAEGEEKPEVEWETVNRASALWTRPRTEVKDEEYQEFYKHIAHDFENPLSWSHNKVEGKLEYSSLLYVPARAPFDLYQREAPKGLKLYVQRVFVMDQAESFLPLYLRFIKGVVDSNDLSLNVSREILQKDPIIDSMKSALTKRVLDMLEKLAKNEPEQYKGFWKNFGQVMKEGPAEDFANKEKIAGLLRFASTNGTDGEQIVGLAEYLARAKEGQDKIYYLTGETYAQVKNSPHLEVFRKKGIEVLLLTDRIDEWLMSYLSEFDGKTFVDVARGDLDLGNLDSEEDKKAAEEVAKSKEGLVERLKTALGDSVAEVRVSHRLTDSPAILAIGEQDLGLQMRQILEASGQKVPDSKPIFEFNPSHPLIEKLDNEASEDRFSDLSHILFDQAALAAGDSLKDPAAYVSRLNKLLVELSA

SEQ ID NO: 129397 - DNA, 1905 bp, Pseudomonas putida
  CDS (1)..(1905): transl_table=11
atgactgtggaaacacaaaaggaaacgctgggcttccagaccgaggtgaagcaactgctgcacctcatgattcactcgctgtactcgaacaaggaaatcttcctgcgggagctgatttccaacgcttccgacgccgccgacaagctgcgtttcgaagccctggccaagccagagctgttcgagggcgatgctgacctgaagattcgcctgagcttcgacaaggacgccggtaccgtgaccctcgaggacaacggcatcggcatgagccgcgaagacgtcattgcccacctgggcaccatcgccaagtccggtactgccgacttcatgaagaacctcaccggtgaccagaagaaggactcgcacctgatcggtcagttcggcgtgggcttctactccgcgttcatcgttgccgacaaggtcgacgtgtacagccgccgtgccggccagccagcggccgaaggtgtgcactggtcgtcgaaaggcgagggcgaattcgaagtcgccaccatcgacaaaccacagcgcggtacccgtatcgtcctgcacctgaagaaggacgagcaggagttcgccgatggctggcgcctgcgcaacgtggtcaagaaatactccgaccacatcgccctgccgattcaactgccgaaagagcaggccgccaccgaaggtgaagagcagccggccgaagagtgggaaaccgtcaaccgcgccagcgccctgtggacccgttcgcgcaccgaagtgaaggacgaggagtaccaggagttctacaagcacatcggccatgacttcgaaaacccgctggcctggagccacaacaaggtcgaaggcaagctcgaatacaactcgctgctgtacgtgccggcccgtgcgccgttcgacctgtaccagcgcgaagcgccgcgcggcctgaagctgtacgtgcagcgtgtgttcatcatggaccaggccgagtcgttcctgccgctgtacctgcgcttcatcaagggtgtggttgattccaatgacctgtcgctgaacgtgtcgcgtgaaatcctgcagaaagacccgatcatcgattcgatgaagaccgcgctgaccaagcgtgtgctggacatgctggagaagctggcgaagaacgaacccgagaaatacaagggcttctggaaaaacttcggtcaggtgctgaaagagggcccggccgaagacttcgccaacaaggagaaaatcgccggtctgctgcgctttgcgtccacccaggacgacagcggcgagcagagcgtcgccctggccgactacctggcccgcgccaaggaaggtcaggacaagatctactatctcaccggcgagtcgtacgcgcaggtcaagaacagcccgcacctggaagtcttccgcaagaaaggcatcgaagtgctgctgctcactgatcgcatcgacgagtggctgatgagctacctcaacgaattcgacggcaaggcctttgtcgatattgcccgtggcgacctggacctgggcaagctggattcggaagaagacaagaaagcccaggaagaagtcgccaaggacaaggaaggtttggtcgagcgactgaaaggtgcgctgggtgacagcgtggccgaagtgcgcgtctcgcaccgcctgaccgactcgccggcgatcctggccattggcgagcaggacctgggcctgcagatgcgccagatcctggaagccagcgggcagaaagtgccggagtccaagccgatcttcgagttcaacccgagccacccgctgatcgagaagctggatcacgagcagagcgaagaccgtttcgccgagctgtcgcacatcctgttcgatcaggcggccctggcggccggtgacagcctgaaggacccggcggcttacgttcgtcgcctgaacaagctactggtcgagctgtctgcttga

SEQ ID NO: 129398 - protein, 634 aa, Pseudomonas putida
MTVETQKETLGFQTEVKQLLHLMIHSLYSNKEIFLRELISNASDAADKLRFEALAKPELFEGDADLKIRLSFDKDAGTVTLEDNGIGMSREDVIAHLGTIAKSGTADFMKNLTGDQKKDSHLIGQFGVGFYSAFIVADKVDVYSRRAGQPAAEGVHWSSKGEGEFEVATIDKPQRGTRIVLHLKKDEQEFADGWRLRNVVKKYSDHIALPIQLPKEQAATEGEEQPAEEWETVNRASALWTRSRTEVKDEEYQEFYKHIGHDFENPLAWSHNKVEGKLEYNSLLYVPARAPFDLYQREAPRGLKLYVQRVFIMDQAESFLPLYLRFIKGVVDSNDLSLNVSREILQKDPIIDSMKTALTKRVLDMLEKLAKNEPEKYKGFWKNFGQVLKEGPAEDFANKEKIAGLLRFASTQDDSGEQSVALADYLARAKEGQDKIYYLTGESYAQVKNSPHLEVFRKKGIEVLLLTDRIDEWLMSYLNEFDGKAFVDIARGDLDLGKLDSEEDKKAQEEVAKDKEGLVERLKGALGDSVAEVRVSHRLTDSPAILAIGEQDLGLQMRQILEASGQKVPESKPIFEFNPSHPLIEKLDHEQSEDRFAELSHILFDQAALAAGDSLKDPAAYVRRLNKLLVELSA

SEQ ID NO: 129399 - DNA, 1899 bp, Salmonella typhimurium
  CDS (25)..(1899): transl_table=11
atggcattgttgaggtctatccacatgaaaggacaagaaacgcgtggttttcagtcagaagttaaacagcttctgcacctgatgatccattctctttattccaataaagaaatcttcctgcgtgaactcatctctaacgcctcagatgcggcggacaagctgcgtttccgcgctctgtcaaacccggatctgtatgaaggagatggcgagctgcgtgtgcgcgtctctttcgataaagataagcgtacgttgaccattgccgataacggcgtggggatgaatcgtgatgaggtgattgaccacttaggcaccattgccaagtccggcaccaaatctttcctcgaatcaatggggtccgatcaggcgaaagatagccagctcatcggtcagtttggcgtaggcttctactccgcgtttattgtggccgataaagtgaccgtacgtactcgtgcggcaggcgacaagccggaaaatggcgtgttctgggaatcggcaggcgaaggcgaatacaccgttgccgatatcaccaaaaatgaccgtggtacggaaatcaccttacacctgcgtgaaggcgaagatgaattcctcgatgactggcgcgtacgctcgattatcagcaaatattccgatcacatcgcattgccggtagagattgaaaaacgggaagaaaaagacggcgaaaccgtgatttcctgggagaaaatcaacaaggcccaggcgttgtggacccgtaacaagtcggaaattaaagacgacgagtacaacgagttttacaagcacatcgcgcatgatttcaccgatccgctgacctggagccacaaccgcgtggaaggtaagcaggagtacaccagcctgctgtatatcccgtcgcaggcgccgtgggatctgtggaaccgcgatcacaaacatggtctgaagctgtacgtacagcgcgtgttcattatggacgatgccgagcagttcatgccgaactatctgcgtttcgtgcgcggcctgattgattctaatgacctgccgttgaacgtctcccgtgaaatcctgcaggacagcacggtaacgcgtaatctgcgtagcgctctgaccaaacgcgtcctgcaaatgctggaaaaactggcgaaagacgacgcggaaaaataccaaaccttctggaaacagttcggtctggtgctgaaagaaggcccggcggaagatcacgccaaccaggaagcgatcgctaaactgttgcgctttgcctccacccataccgactcttccgcccagaccgtgtcgctggaagattacgtctcccggatgaaagaagggcaggaaaaaatctactacatcaccgcagacagctatgcggcggcgaaaaacagcccgcacctggaactgctgcgtaagaaaggcatcgaagtgctgctgctctccgatcgcatcgacgagtggatgatgaactacctgaccgagtttgacggtaaagcattccagtcggtcgctaaagccgatgaatccatcgaaaaactggcggatgaagtcgacgaaaacgcgaaagaagcggaaaaggcgcttgagccgtttgtggagcgtgtcaaaaccctgctgggcgatcgcgtgaaagacgtgcgtctgacgcaccgtttaaccgacacgccggcgattgtcaccaccgatgcggatgaaatgagcacccagatggcgaaactgttcgccgcggctggtcagtccgtgccggaagtgaaatacatctttgagctcaacccggatcatgtgctggttaaacgcactgccgataccaaggatgaagcgcagtttaaagagtgggttgagctgctgctggatcaggcgctgttcgctgaacgcggtacgctggaagatccgaaccagtttatccgccgtatgaaccagttgctggtgtcctga

SEQ ID NO: 129400 - protein, 624 aa, Salmonella typhimurium
MKGQETRGFQSEVKQLLHLMIHSLYSNKEIFLRELISNASDAADKLRFRALSNPDLYEGDGELRVRVSFDKDKRTLTIADNGVGMNRDEVIDHLGTIAKSGTKSFLESMGSDQAKDSQLIGQFGVGFYSAFIVADKVTVRTRAAGDKPENGVFWESAGEGEYTVADITKNDRGTEITLHLREGEDEFLDDWRVRSIISKYSDHIALPVEIEKREEKDGETVISWEKINKAQALWTRNKSEIKDDEYNEFYKHIAHDFTDPLTWSHNRVEGKQEYTSLLYIPSQAPWDLWNRDHKHGLKLYVQRVFIMDDAEQFMPNYLRFVRGLIDSNDLPLNVSREILQDSTVTRNLRSALTKRVLQMLEKLAKDDAEKYQTFWKQFGLVLKEGPAEDHANQEAIAKLLRFASTHTDSSAQTVSLEDYVSRMKEGQEKIYYITADSYAAAKNSPHLELLRKKGIEVLLLSDRIDEWMMNYLTEFDGKAFQSVAKADESIEKLADEVDENAKEAEKALEPFVERVKTLLGDRVKDVRLTHRLTDTPAIVTTDADEMSTQMAKLFAAAGQSVPEVKYIFELNPDHVLVKRTADTKDEAQFKEWVELLLDQALFAERGTLEDPNQFIRRMNQLLVS

SEQ ID NO: 129401 - DNA, 1914 bp, Shewanella oneidensis
  CDS (1)..(1914): transl_table=11
atgtcacaacaagaaactcatggttttcaaactgaagtcaaacagctgttgcatttgatgatccactctttgtattccaacaaagaaattttcttgcgtgaactggtctccaacgctgcggatgcggctgataagctgcgttaccttgcgttgaccaatgacgcattatacgaaggtgacggtgagctgcgggtgcgcattagtgcagacaaagaaaaaggcactgtgaccattgaagataacggcgtggggatgactcgcgatggcgtgattgagcatttagggacgatcgccaaatcgggcaccgctgaattctttaaaaacctctctggcgaagcctcaaaggattctcagctaatcggtcaattcggtgtgggcttctattccgcctttatcgtagcgaaaaaagtcaccgttcgtacccgcgcggcaggccataaggccaatgaagccgtattgtgggaatcggaaggtgagggtagcttcacggttgaaaccatcaccaaggcgactcgtggtactgaaattaccctgcacctgcgtgatgacgaaaaagaatttgctgacgattggcgcctgcgctccatcatcaccaagtactcagatcatatttcaattccagtagaaatgtggcaggaaggcacccctgagcgcgatggcccagacggtgaaaaaatccctgcaaccgagggttactggaaagccatgaacaaggcgacagcgctgtggatgcgcaataagtctgagatcactgacgaagagtaccaagaattttataagcacatttcccacgattacacggatgcattgctgtggagccataaccgtgtagaaggtaaacaggaatacactaacctgttgtatattccttcaaaagcgccttgggatctgtggaaccgcgaccgtaaacatggtctgaaactctttgttcagcgcgtgtttattatggatgatgccgagcagtttatgccatcttacctgcgctttgtgcaaggtttgattgactcaaacgatctgccgctgaacgtatcccgcgagattttgcaagataaccacatcaccaaagcgatgcgcaccggtatcactaagcgcgtgctggggatgttggaaaaactggcaaaagacgatgcggaaaaataccaacaattctgggccgaatttggccaagtgttgaaggaaggtcctgcggaagactttgcaaaccgtgagcgtattgctggcttattgcgctttgcgtctacccatacgggcagcgccgcaccgactgtatcactcgatgactacattagccgcatgaaggaaggccaaaccaagatttactatatcgttgccgacagccacgaagcggctgccaatagcccgcacttagaactgctgcgtaagaaaggcatcgaagtgttgctgatgtctgagcgtatcgacgaatggttaatcaaccacttaactgagtacaaagaaaaacaattgcactcagtcacccgtggcgagctggaattaggcgagcttgaagatgcggctgagaaggaagcgcaggagaaactcgcagaagagtctgcaccactgattgagcgcatcaaagcggcattaggtgcaagcgtggccgatgtgaaagtcacctcgcgcttaaccgataccccagcctgtgtggtcacgggcgaaggtgaaatgtcgacgcaaatgatcaaactgatgcaggctgccggccaaccagtgccagaggttaagccgacgtttgaggtaaacccagcgcatccattagtgtcgcgcttgaatgatcttcaagatgaagccgccttcgcagattggtcaaacttactgctacaacaggcgcaattgtcagagaagggtagccttgcggatccatcggcctttattaagctgatgaaccaaatgttattggcgaacctgaagtaa

SEQ ID NO: 129402 - protein, 637 aa, Shewanella oneidensis
MSQQETHGFQTEVKQLLHLMIHSLYSNKEIFLRELVSNAADAADKLRYLALTNDALYEGDGELRVRISADKEKGTVTIEDNGVGMTRDGVIEHLGTIAKSGTAEFFKNLSGEASKDSQLIGQFGVGFYSAFIVAKKVTVRTRAAGHKANEAVLWESEGEGSFTVETITKATRGTEITLHLRDDEKEFADDWRLRSIITKYSDHISIPVEMWQEGTPERDGPDGEKIPATEGYWKAMNKATALWMRNKSEITDEEYQEFYKHISHDYTDALLWSHNRVEGKQEYTNLLYIPSKAPWDLWNRDRKHGLKLFVQRVFIMDDAEQFMPSYLRFVQGLIDSNDLPLNVSREILQDNHITKAMRTGITKRVLGMLEKLAKDDAEKYQQFWAEFGQVLKEGPAEDFANRERIAGLLRFASTHTGSAAPTVSLDDYISRMKEGQTKIYYIVADSHEAAANSPHLELLRKKGIEVLLMSERIDEWLINHLTEYKEKQLHSVTRGELELGELEDAAEKEAQEKLAEESAPLIERIKAALGASVADVKVTSRLTDTPACVVTGEGEMSTQMIKLMQAAGQPVPEVKPTFEVNPAHPLVSRLNDLQDEAAFADWSNLLLQQAQLSEKGSLADPSAFIKLMNQMLLANLK

SEQ ID NO: 129403 - DNA, 1875 bp, Shigella flexneri
  CDS (1)..(1875): transl_table=11
atgaaaggacaagaaactcgtggttttcagtcagaagtgaaacagcttctgcacctgatgatccattctctctattccaataaagaaatcttcctgcgtgagcttatctctaacgcctccgatgcggcggacaagctgcgtttccgtgcgctatctaacccggacctgtacgaaggtgatggcgaactgcgcgttcgtgtctctttcgataaagacaagcgcacgctgaccatctccgataacggcgtggggatgacccgcgacgaagtgattgaccatctggggactatcgctaaatccggtaccaaatcattcctcgaatccctgggttctgaccaagcgaaagacagccagctgatcggtcagtttggtgttggtttctactctgcgtttatcgtggccgacaaagtgaccgtgcgtactcgcgcggcaggcgaaaaaccagaaaacggcgtcttctgggaatcggctggcgaaggtgaatataccgttgccgatatcaccaaagaagatcgtggtactgaaatcaccctgcatctgcgtgaaggcgaagacgagttcctcgatgactggcgcgtgcgttccatcatcagcaaatactccgaccatatcgcgctgccggtagagatcgaaaaacgcgaagagaaagatggcgaaaccgttatctcctgggcaaaaatcaacaaagcgcaggcgctgtggactcgtaacaagtcggaaatcaccgatgaagagtataaagagttctacaaacacatcgcccacgactttaacgatccgctgacctggagccacaaccgcgttgaaggtaagcaggagtacaccagcctgctgtacatcccgtcccaggctccgtgggatatgtggaaccgtgatcataaacacggcctgaaactgtacgttcaacgcgtgtttatcatggacgacgctgaacagttcatgccgaactatctgcgcttcgtgcgtggtctgattgactccagcgatctgccgctgaacgtttcccgtgaaatcctccaggacagcacggtaacgcgtaacctgcgcaatgcgctgaccaagcgtgtgctgcaaatgctggaaaaactggcgaaagacgacgcggaaaaataccagaccttctggcaacagtttggcctggtactgaaagaaggtccggcggaagatttcgctaaccaggaagcgatcgccaaactgctgcgttttgcttctacttataccgattcttctgcgcagaccgtgtctctggaagactacgtttcccgcatgaaagaagggcaggagaaaatctactacatcactgcagacagctatgcggcagcgaagagcagcccgcacctggaactgctgcgtaagaaaggcatcgaagttctgctgctttccgaccgcatcgatgagtggatgatgaactatctgactgagttcgacggtaaaccgttccagtcggtgtctaaagttgacgagtcgctggaaaaactggctgacgaagttgatgagagcgcgaaagaagcggagaaagcactgactccgttcatcgaccgcgtgaaagctctgctcggcgagcgcgtgaaagatgtccgtctgactcaccgtctgaccgatacgccagcgatcgtttcgaccgacgcggacgaaatgagcactcagatggcgaaactgttcgctgcggcgggccagaaagtgccagaagtgaaatacatcttcgaactgaacccggatcacgtactggtgaaacgtgcggcagatactgaagatgaagccaagttcagcgagtgggtagaactgctgctggatcaggcgctgctggcagaacgcggcacgctggaagatccgaacctgtttattcgtcgtatgaatcagctgctggtttcctga

SEQ ID NO: 129404 - protein, 624 aa, Shigella flexneri
MKGQETRGFQSEVKQLLHLMIHSLYSNKEIFLRELISNASDAADKLRFRALSNPDLYEGDGELRVRVSFDKDKRTLTISDNGVGMTRDEVIDHLGTIAKSGTKSFLESLGSDQAKDSQLIGQFGVGFYSAFIVADKVTVRTRAAGEKPENGVFWESAGEGEYTVADITKEDRGTEITLHLREGEDEFLDDWRVRSIISKYSDHIALPVEIEKREEKDGETVISWAKINKAQALWTRNKSEITDEEYKEFYKHIAHDFNDPLTWSHNRVEGKQEYTSLLYIPSQAPWDMWNRDHKHGLKLYVQRVFIMDDAEQFMPNYLRFVRGLIDSSDLPLNVSREILQDSTVTRNLRNALTKRVLQMLEKLAKDDAEKYQTFWQQFGLVLKEGPAEDFANQEAIAKLLRFASTYTDSSAQTVSLEDYVSRMKEGQEKIYYITADSYAAAKSSPHLELLRKKGIEVLLLSDRIDEWMMNYLTEFDGKPFQSVSKVDESLEKLADEVDESAKEAEKALTPFIDRVKALLGERVKDVRLTHRLTDTPAIVSTDADEMSTQMAKLFAAAGQKVPEVKYIFELNPDHVLVKRAADTEDEAKFSEWVELLLDQALLAERGTLEDPNLFIRRMNQLLVS

SEQ ID NO: 129405 - DNA, 1917 bp, Streptomyces coelicolor
  CDS (1)..(1917): transl_table=11
atgacgaccgaaacgtttgagttccaggtagaggcgcgtcagctgctccagctgatgattcactccgtctactcgaacaaggatgtcttcctgcgcgagctcgtctccaacgcctccgacgcgctcgacaagctgcgcctcgccgccctgcgcgacgacgctccggacgccgacgtgagcgacctgcacatcgagttggaggtcgacaaggacgcccgcaccctgaccgtgcgcgacaacggcatcggcatgtcgtacgacgaggtcacccggctgatcggcacgatcgccaactcgggcaccgccaagttcctggaggagctgcgggaggccaaggacgcggccggggccgacggtctcatcggacagttcggcgtcggcttctactcgggcttcatggtggcggacgaggtcaccctggtcacccggcacgccggcgagaccgagggcacccggtggacctcccgcggcgagggcacgtacaccctggagcggatcggcgaagccccgcagggcaccgcggtcacgctgcacctcaagccggccgacgtcgagaaccagctgcacgactacacctccgcgtggaagatcaaggagatcgtcaagcggtactcggacttcatcacctggccggtccgcctgctgccggagcccggcggcgacggcagcgacggcgagggcgccgaggcccgcgaggcggagacgctcaactcgatgaaggccctgtgggcgcgcccgcgcgacgaggtgtccgacgacgagtaccacgagctgtacaagcacatcgcccacgactggcgcgacccgctggagacgatccggctccaggcggagggcaccttcgagtaccaggccctgctcttcgtgccctcgcacgccccgcacgacctgttcacccagggctaccagcgcggcgtccagctgtacgtgaagcgcgtcttcatcatggacgactgcgaggagctgctgccgccgcacctccgcttcgtcaagggcgtcgtcgacgcgcaggacctctcgctcaacgtctcccgcgagatcctccagcaggaccgccacatccggatgatccagcgccggctgacgaagaaggtcctctcgacggtcaaggacctcaggacctccgcgccggaccgctacgccacgttctggcgcgagttcggcgcggtgctcaaggaaggcctggtgaccgactccgacaaccgggacgcgatcctcgccgcctgctcgttcgcctccacccacgacgccgaggagcccaccgcgctcaaggactacgtggagcggatgaaggaggggcaggacgacatctactacatgacgggcgagtcccggcaggccatcgagaactccccgcacatggaggcgttccgggccaagggtgtggaggtcctcctgctcaccgacgccgtcgacgaggtctgggtcgacgcggtgggggagtacgagggcaagacgctgcgctcggtggccaagggggagatcgacctctccggcaccgaggcggacaagagcgacgccgagaaggagaagcagggcgaggagtacgccgggctgctcggctggatgaccgagcacctgggcgaggaggtcaaggaggtccggctctcctcccgcctcaccgtctccccggcgtgcgtcgtctccgacgcgggtgaactgacgcccgccctggagaacatgtaccgggcgatgggccaggaggtgcccggcgccaagcggatcctggaactcaaccccgagcaccagctggtgaagtccctgaaccgggcctggaccgaccggcaggaccgcgccgagctgaccgagaccgccgaactgctgcacgccctcgcggtgctcgccgagggcggccggcccaaggagcccgcccggttcgtgcagctgatggcggaccgcctggagcgcaccctgtaa

SEQ ID NO: 129406 - protein, 638 aa, Streptomyces coelicolor
MTTETFEFQVEARQLLQLMIHSVYSNKDVFLRELVSNASDALDKLRLAALRDDAPDADVSDLHIELEVDKDARTLTVRDNGIGMSYDEVTRLIGTIANSGTAKFLEELREAKDAAGADGLIGQFGVGFYSGFMVADEVTLVTRHAGETEGTRWTSRGEGTYTLERIGEAPQGTAVTLHLKPADVENQLHDYTSAWKIKEIVKRYSDFITWPVRLLPEPGGDGSDGEGAEAREAETLNSMKALWARPRDEVSDDEYHELYKHIAHDWRDPLETIRLQAEGTFEYQALLFVPSHAPHDLFTQGYQRGVQLYVKRVFIMDDCEELLPPHLRFVKGVVDAQDLSLNVSREILQQDRHIRMIQRRLTKKVLSTVKDLRTSAPDRYATFWREFGAVLKEGLVTDSDNRDAILAACSFASTHDAEEPTALKDYVERMKEGQDDIYYMTGESRQAIENSPHMEAFRAKGVEVLLLTDAVDEVWVDAVGEYEGKTLRSVAKGEIDLSGTEADKSDAEKEKQGEEYAGLLGWMTEHLGEEVKEVRLSSRLTVSPACVVSDAGELTPALENMYRAMGQEVPGAKRILELNPEHQLVKSLNRAWTDRQDRAELTETAELLHALAVLAEGGRPKEPARFVQLMADRLERTL

SEQ ID NO: 129407 - DNA, 1902 bp, Thiobacillus denitrificans
  CDS (1)..(1902): transl_table=11
atgtccgccaccagcagcaaagaaaccctgggctttcaagccgaagtcaaacagctcctgcagctgatgatccattccttgtattcgaacaaggacatattcctccgcgaactgatctccaacgcctccgacgccgccgacaagctgcgcttcgaagccttgtcggacgccgcgctgttcgagaacgaccccgagctcaagatccgcatcgccttcgaccgcgacgcgcgcacgctcaccatttccgacaacggcatcggcatgagccggcaggaggtcatcgaccacatcggcacgatcgccaagtccggcacgcgcgaattcttcagccagctttccggcgaccagaagaaggacgccgcgctgatcggccagttcggcgtcggcttctattccgccttcatcgtcgccgaccgcgtcacgctcacgacccgccgcgccggccttaccgccgagcacggtgtgcgctgggaatccgagggcgccggcgactacacgctggaaacggtcgagaagccccaacgcggcaccgagatcgtgctgcatctgcgtgaaggcgaggacgaattcctctccgactggaagatcaagtcggtcatccgcacctattccgaccacatcacgctgccgatcgtgatgaagaagaccgaatggaaggacggcgtcgagacgccgaccgacgaggacgaaacggtcaacaaagcctcggccttgtgggctcgcccgaagaaggacatcagcgacgacgagtacaacgagttctacaagcacgtcgcccacgacttcgagccgccgctcgcctggtcgcataaccgcgtcgagggcaagcaggaatacatctccctgctctacgtgccctcgcacgcgccgttcgacctctacgaccgagagaagcgccacggcatcaaactttatgtgcgccgcgtcttcatcatggacgacgccgagcagctgatgccgcaatacctgcgcttcgtccgcggcgtcatcgactcggccgacctgcccttgaacgtctcgcgcgaaatcctgcagtcgagccgcgacatcgacgccatcaagaacggctcggtgaagaaggtgctcggcatgctcgaagacctcgccgagaaccagcccgaaaaatacgtcgagttctggaaagagttcggcaaggtcatgaaggaaggcccgggcgaggacttcgccaacaaggagaagatcgccggcctgctccgcttcgcctccacccacaccgacaccgacgcgcaggtcgtgtcgctcaaggactacgtcggccgcatgaaggaaggccagaccgcgatctactacatcaccgccgacagcttcgccgccgcccagcacagcccgcacctcgaaatcttccgcaagaaaggcatcgaagtcctgctgctgtccgaccgcgtcgacgaatggctcaccggcaacctgcatgagttcgacggcaagccgctcaagtccgtcgccaagggcggcctcgacctcggcgaactcgaagacgaagccgagaagaccgcgcagaaggaagccgaggagtcgatgaagccgctggtcgagcgcatcaaggccatgctcggcgagcgcgtcaaggacgtccgcgtcacccaccgcctcaccgattcgcccgcctgcctcgtcaccggcgaaggcgacatgagcgccaacctcgaacggctattgaaagccgccggccaagccgcgcccaccgtgaagcccacgctggagatcaacccgtcgcacgcgttggtcacgcggctcgacagcgaatccgacgaagaccgcttcaaggactgggccaacctgctgttcgagcaggcgctgctggcggaaggtggacagctcgacgatccggcgagttttgtgcggcggttgaatgggttgctggcgatgttgccgggttga

SEQ ID NO: 129408 - protein, 633 aa, Thiobacillus denitrificans
MSATSSKETLGFQAEVKQLLQLMIHSLYSNKDIFLRELISNASDAADKLRFEALSDAALFENDPELKIRIAFDRDARTLTISDNGIGMSRQEVIDHIGTIAKSGTREFFSQLSGDQKKDAALIGQFGVGFYSAFIVADRVTLTTRRAGLTAEHGVRWESEGAGDYTLETVEKPQRGTEIVLHLREGEDEFLSDWKIKSVIRTYSDHITLPIVMKKTEWKDGVETPTDEDETVNKASALWARPKKDISDDEYNEFYKHVAHDFEPPLAWSHNRVEGKQEYISLLYVPSHAPFDLYDREKRHGIKLYVRRVFIMDDAEQLMPQYLRFVRGVIDSADLPLNVSREILQSSRDIDAIKNGSVKKVLGMLEDLAENQPEKYVEFWKEFGKVMKEGPGEDFANKEKIAGLLRFASTHTDTDAQVVSLKDYVGRMKEGQTAIYYITADSFAAAQHSPHLEIFRKKGIEVLLLSDRVDEWLTGNLHEFDGKPLKSVAKGGLDLGELEDEAEKTAQKEAEESMKPLVERIKAMLGERVKDVRVTHRLTDSPACLVTGEGDMSANLERLLKAAGQAAPTVKPTLEINPSHALVTRLDSESDEDRFKDWANLLFEQALLAEGGQLDDPASFVRRLNGLLAMLPG

SEQ ID NO: 129409 - DNA, 1923 bp, Treponema denticola
  CDS (1)..(1923): transl_table=11
atggcacagtacaagtttgaaactgaagtgaaccagcttttgtcgctcattattcattcgctttattcaaacaaggaaatctttttaagggaacttgtttccaatgcttcggatgcattagataagttaaagtatttaaccctttccgatgaggcttataagcagattaaattcgagcccagaatcgatatctgttttgacgatacggccaatacgcttaccgtgcgggataccggcttgggtatgaacgaggaagatctaaaaaataatttgggaacgatagcaaggtccggaacaaaggcttttttagatcagcttgcagccgccgataaaaaagattcaaaccttatcggtcagttcggtgtaggtttttattcggcctttatggcagcctctaccatcgatgttatttccaaaaaagccggagagaacgatgtttggaagtggacttcggacggaaagggtgcctacgacttggaaaaggttgacgatacggccttccccataatagatggtgtacccgaaggagcaaacggaacctgtgttattcttcacttaaataatgaggactcggagtatgctacccgttggcgtattgaagaaataattaaaacctattccgaccacatcgccttcccaatctatcttcattttaccgaaaagcaatatgacgataagggaaaagtaaaatcggaagcctctaaaacggaacagataaacgatgcaggagctatttggcaaaagcccaaatcggaattaaaagaagaagattattttaacttttataaatccctttcgcacgattctcaagagcctttactatatgtgcacacaaaggcggaaggaactcaagaatacacaaccctcttttatgttccgtcgaaagctcccttcgacatgttccatgcggattataggccgggagttaagctctttgtaaagagggtctttattaccgatgatgaaaaagagcttctgcccacatacctccgctttgtgcgcggtgttatagacagcgaagatttgcccctaaatgtaagccgcgaaatcttgcagcaaaatagaattctttcaaacattaaaaacgcttcggttaaaaaacttttaggagagtttaaaaagctcgccgaaaacgacaaagaaaaatacaataaattcatcgccgaatttaaccgcccattaaaagaaggcttgtacagcgattatgaacacagggaagagctcgccgatttggtacgctttaagacaacttcacccgaagtaaaagaagatgagtggaccagctttgccgattatgtttcaagaatgaaaagcgatcaaaaggctatctactacattacgggtgaagatgaaaaaaccttgcgtcaatctcctcatcttgaagtatacaaacaaaaaggctttgaagttttaattatgcccgatgaaattgacgacataattattccttcattgggaaaatacaaggactgggaattaaaggctgcaaacagagccggctccgataaagaacttaataccgaagaagaaactaaggaagccgaaaaaaaagaaaaggactttaagcccgtactcgaaaagattaaagaggttctcggcgataaggtaaaagaggtacgcttttcaaaacgcctttccgattctccttcatgtatagttgtggacgaaaccgatcccagcttacagatggaaagaatgatgagggctatggggcagtttaatacaagtgccgtaaaaccgattttggaagtaaatgccgatcatcccttggttcaaaaattaaaggattcgaaggataaagaatttgtagaagatatgtccaacctccttttggaacaagccctcttggttgaaagcggagagctaaaggctccggtcgattttgtaaaaaggcttaacaggctgatgacaaacttaaaatag

SEQ ID NO: 129410 - protein, 640 aa, Treponema denticola
MAQYKFETEVNQLLSLIIHSLYSNKEIFLRELVSNASDALDKLKYLTLSDEAYKQIKFEPRIDICFDDTANTLTVRDTGLGMNEEDLKNNLGTIARSGTKAFLDQLAAADKKDSNLIGQFGVGFYSAFMAASTIDVISKKAGENDVWKWTSDGKGAYDLEKVDDTAFPIIDGVPEGANGTCVILHLNNEDSEYATRWRIEEIIKTYSDHIAFPIYLHFTEKQYDDKGKVKSEASKTEQINDAGAIWQKPKSELKEEDYFNFYKSLSHDSQEPLLYVHTKAEGTQEYTTLFYVPSKAPFDMFHADYRPGVKLFVKRVFITDDEKELLPTYLRFVRGVIDSEDLPLNVSREILQQNRILSNIKNASVKKLLGEFKKLAENDKEKYNKFIAEFNRPLKEGLYSDYEHREELADLVRFKTTSPEVKEDEWTSFADYVSRMKSDQKAIYYITGEDEKTLRQSPHLEVYKQKGFEVLIMPDEIDDIIIPSLGKYKDWELKAANRAGSDKELNTEEETKEAEKKEKDFKPVLEKIKEVLGDKVKEVRFSKRLSDSPSCIVVDETDPSLQMERMMRAMGQFNTSAVKPILEVNADHPLVQKLKDSKDKEFVEDMSNLLLEQALLVESGELKAPVDFVKRLNRLMTNLK

SEQ ID NO: 129411 - DNA, 1911 bp, Xylella fastidiosa
  CDS (1)..(1911): transl_table=11
atgaccctcgaagcagacaaacagacccacggcttccaaacggaagtcaaacagttactacaactgatgatccactccctgtactcaaacaaggagattttcctacgcgaattaatctccaatgctgccgatgctgcggacaaactgcgctttgaggcattgagcgccccctcattactggaagaagatcccaacctgcgcatccgcgttgagtttgataaacaagcacacaccatcaccattgatgacaacggcattgggatgagtcgtgatgaggccattgcacacctgggcacgattgccaagtcaggcaccgccgatttcctcaaagcactgtctggcgatcaacgcaaagacgccaacctcattggccaattcggtgtcggcttctacagtgcctttattgtcgccgaccacgtcgacgtctacagccgccgcgccggactgacagcagccgagggcgtacactggtcgagcaaaggtgaaggcaactttgaagtggccaccattgataaaccgcaacgcggcacccgcgtcgtgctccacctgaaagaaaatgagcaacactttgcagaaggatggaccctgcgcagcaccctgaaaaaatattccgaccacatcggcctccccattgaaatgctcaaggaacaccacggcaaggaggaagaaaaagacaccccccaagaagccgagtgggaagccgtcaacaaagccagcgccctatggacacgccccaaaaacgacatcaaggatgaggaataccaggaattctacaaacacatctcacacgatatgaccaacccgctcgcctggagccataacaaggtcgaaggcaagctggaatacacctccttactctatgtcccaacacgcgcaccatttgacctgtaccaccgcaatgctgccaagggactgaaactgtatgtacaacgtgttttcatcatggatcaagcggaacagttcctgccgctctacctgcgtttcatcaagggcgttgttgactctgccgacctctcgctgaacgtctcccgcgagatcctccaatctggcccagtcgtggactccatgaaaaccgcactgagcaaacgcgccctggacatgcttgaaaaactcgccaaagacgccccagaagattacaaaaccttctggaaaaactttggccaggtactgaaagaaggacccgccgaggattacagcaaccgcgagaaagtcgccagcctgctgcgctttgcctcaacctacgacacctccggtgatccctccgtcgcactcaccgattacatcgcacgcatgaaagaaggtcaggacaagctctactacctgaccggagaatcctacgcacaaatcaaggacagcccatacctggaagtattccgtaaaaaaggcattgaagtactgctactggtagaccgcattgacgagtggttgatgaactacttacatgaattcgacggaaaatcctttgtcgacattgcacgcggcgatctggacctcggaaacctcgacagcgaagcagacaaaaaagcacaagaggaaatcgcaaaaacaaaagaagcattagccagccggatcaaagccacactaggagaagatgttgccgaagtgcgcgtctcacatcgcctgaccgattcacccgcagtactcgccatcggcgaaggcgatctcggcctgcaaatgcgtcagttactcgaagctagcggccagaaagttccagaaacaaaacccgtcttcgaattcaacccaagccacccactcatcgaaaaactggacgccgaacaagacatggaccgttttgcagacctgagccgcatcctgttcgatcaagccgcactcgctgccggagacagtttgaaagacccggccaactacgtgcgccgcctcaacaaactcctactggaactatcggcctaa

SEQ ID NO: 129412 - protein, 636 aa, Xylella fastidiosa
MTLEADKQTHGFQTEVKQLLQLMIHSLYSNKEIFLRELISNAADAADKLRFEALSAPSLLEEDPNLRIRVEFDKQAHTITIDDNGIGMSRDEAIAHLGTIAKSGTADFLKALSGDQRKDANLIGQFGVGFYSAFIVADHVDVYSRRAGLTAAEGVHWSSKGEGNFEVATIDKPQRGTRVVLHLKENEQHFAEGWTLRSTLKKYSDHIGLPIEMLKEHHGKEEEKDTPQEAEWEAVNKASALWTRPKNDIKDEEYQEFYKHISHDMTNPLAWSHNKVEGKLEYTSLLYVPTRAPFDLYHRNAAKGLKLYVQRVFIMDQAEQFLPLYLRFIKGVVDSADLSLNVSREILQSGPVVDSMKTALSKRALDMLEKLAKDAPEDYKTFWKNFGQVLKEGPAEDYSNREKVASLLRFASTYDTSGDPSVALTDYIARMKEGQDKLYYLTGESYAQIKDSPYLEVFRKKGIEVLLLVDRIDEWLMNYLHEFDGKSFVDIARGDLDLGNLDSEADKKAQEEIAKTKEALASRIKATLGEDVAEVRVSHRLTDSPAVLAIGEGDLGLQMRQLLEASGQKVPETKPVFEFNPSHPLIEKLDAEQDMDRFADLSRILFDQAALAAGDSLKDPANYVRRLNKLLLELSA

SEQ ID NO: 129413 - DNA, 1875 bp, Yersinia pestis
  CDS (7)..(1875): transl_table=11
atgaatatgaaaggtcaagaaacccgtggattccagtctgaagtaaaacagctcctccatttgatgattcactcgctttattccaataaagaaatttttctgcgcgagctgatctccaatgcttctgatgctgcagataaactccgtttccgtgccctgtctaaccccgaactctttgaaggggatggcgaactgagagtgcgtttatcttttgataaagagaaacgtactttaaccctgagtgataacggcatcggtatgacccgtgacgaagtcattgataatcttggtactatcgccaaatcagggactaaagcatttcttgaatcaatcggttctgatcaggccaaagacagccaattaatcggtcaatttggtgtgggtttctactcagcatttattgttgccgataaagttaccgtacgtacccgagctgccggtgcccctgccgataccggtgtattctgggaatctgctggtgaaggtgattacaccatcgccgatataactaaagacgagcgtggtactgaaattacgctacatttgcgtgaaggcgaagacgagtatctggatgactggcgtctacgttctgttatcagcaaatactcagatcatattgcactgccggttgaaattcaggttaaaaatgaagaagacggcactgtcacctgggaaaaaatcaacaaagctcaggcgctgtggacccgtggtaaagcagaaatctctgacgacgaatacaaagcattttacaaacatattgcccatgattttaccgatccactcagttggagtcacaaccgcgttgaagggaagcaggaatacaccagcttgctgtatatccccgcgcaggcaccatgggatatgtggaaccgtgatcacaaacatggtttaaaactttatgtgcagcgtgtgtttatcatggatgaagctgagcagtttatgccgaactatctgcggtttgtccgtggtttgatagattcgaacgatctgccgctgaacgtctcccgtgagattttacaagacagtcgtattacacagaatctgcgcagtgcattgactaagcgtgtgctgcaaatgctggaaaaactggctaaagatgatgctgagaaatatcagcaattctggcaacaattcggcatggcattaaaagaaggcccagcggaagatggtagcaataaagagactatcgctaagctattgcgctttgcttcaacgcataccgacagttccgcacagaccgtgtcactggaagactatgtcagccgtatggcagaagggcaggagaaaatttattacatcactgctgacagctatgctgctgcgaagagtagcccgcatctggaactgttccgtaaaaaaggtatcgaggtcctattgttatccgatcgtatcgacgaatggatgatgagctacctgactgagttcgaaggtaaagcgttccaatcggtcagtaaagcagatgactcactgaataaattggctgatgaagaaaatccagagcagcaagaagcagagaaagcactggagcccttcgttgaacgcgtgaaaacgttattgggtgagcgtgttaaagacgtgcgcttgacacatcgcctaacggatacacccgcaatcgtaacgactgatgcggatgaaatgagtacgcagatggctaagctattcgcggccgcgggtcaacaggctccggaagtgaagtacatctttgaactgaacccagatcatggcttggttaagcgtgctgcggaagttacagatgacactcaatttgcacaatgggttgagttattactggatcaggcgctgctcgcggagaggggaacattggaagaccctaaccagtttattcgtcgaatgaatcagttactcacggcttaa

SEQ ID NO: 129414 - protein, 622 aa, Yersinia pestis
MKGQETRGFQSEVKQLLHLMIHSLYSNKEIFLRELISNASDAADKLRFRALSNPELFEGDGELRVRLSFDKEKRTLTLSDNGIGMTRDEVIDNLGTIAKSGTKAFLESIGSDQAKDSQLIGQFGVGFYSAFIVADKVTVRTRAAGAPADTGVFWESAGEGDYTIADITKDERGTEITLHLREGEDEYLDDWRLRSVISKYSDHIALPVEIQVKNEEDGTVTWEKINKAQALWTRGKAEISDDEYKAFYKHIAHDFTDPLSWSHNRVEGKQEYTSLLYIPAQAPWDMWNRDHKHGLKLYVQRVFIMDEAEQFMPNYLRFVRGLIDSNDLPLNVSREILQDSRITQNLRSALTKRVLQMLEKLAKDDAEKYQQFWQQFGMALKEGPAEDGSNKETIAKLLRFASTHTDSSAQTVSLEDYVSRMAEGQEKIYYITADSYAAAKSSPHLELFRKKGIEVLLLSDRIDEWMMSYLTEFEGKAFQSVSKADDSLNKLADEENPEQQEAEKALEPFVERVKTLLGERVKDVRLTHRLTDTPAIVTTDADEMSTQMAKLFAAAGQQAPEVKYIFELNPDHGLVKRAAEVTDDTQFAQWVELLLDQALLAERGTLEDPNQFIRRMNQLLTA

SEQ ID NO: 129415 - DNA, 2112 bp, Oryza sativa
  CDS (1)..(2112)
atggcggcggcgggggacgtgcagatggcggagaaggagacgttcgcgttccaggcagagatcaaccagctgctctccctcatcatcaacaccttctactccaacaaggagatcttcctccgcgagctcatctccaactcttctgatgcgcttgacaagatccgcttcgagagcctcaccgacaagagcaagctggacgcccagccggagctcttcatccgcctcgtcccctacaagccctccaagactctctccatcatcgacagcggcgtcggcatgaccaagtccgacctcgtgaacaatttgggcaccatcgcgcgctccggcaccaaggagttcatggaggcgctgcaggcgggcgccgacgtgagcatgatcgggcagttcggcgtcggcttctactccgcctacctcgtcgccgagaaggtggtggtcaccaccaagcacaacgacgacgagcagtacgtgtgggagtcgcaggccggcggctccttcaccgtcaccctcgacaccgccggcgagcgcctcggccgcggcaccaagatcaccctcttcctcaaggacgaccagctcgagtacctggaggagcgccgcctcaaggacctcgtcaagaagcactccgagttcatcagctaccccatctacctctggtccgagaagaccaccgagaaggagatcagcgacgacgaggacgacgacattgacgactccaaaggcaaggagaaggaaggcgacatcgaggaggtcaaagataagaagaagaagaagaaggtgaacgaggtgagccatgaatgggtgcagatcaacaagcagaagcccatctggctgcggaagccggaggagatcagccgggaggagtacgcgtccttctacaagagcctcaccaacgactgggaggaccacctcgccgtgaagcacttctccgtggaggggcagctggagttcaaggccatcctcttcgtgccccgccgcgcgcccttcgacctgttcgacacccgcaagaagatgaacaacatcaagctctacgtgcgccgcgtcttcatcatggacaactgcgaggagctcatcccggagtggctcggcttcgtcaagggcgtcgtcgactccgacgacctcccgctcaacatctcccgcgagatgctgcagcagaacaagatcctcaaggtcatccgcaagaacctcgtcaagaaatgcatcgagatgttcttcgagatcgccgacaacaaggaggattacgccaagttctacgaggccttctccaagaacctcaagctggggatccacgaggactcgcagaaccgcggcaagctcgccgacctgctccggtaccactccaccaagtccggcaacgagctcaccagcctcaaggactatgtgacccggatgaaggaagggcagaaggaggtctactacatcaccggcgagagccgcaaggccgtggagaactcgccgttcctggagaagctgaagaagaaggggtacgaggtgctgttcatggtggacgccatcgacgagtacgccgtcgggcagctcaaggagtacgacggcaagaagctggtgtccgccaccaaggaagggctcaagctggacgacgacgacgacgccaaggagaggaagaggtcgttcgagccgctctgcaaggtgatcaaggacattctgggcgatcgcgtggagaaggtggtggtctcggaccggatcgtggactcgccgtgctgcctggtcaccggcgagtacggctggacggcgaacatggagcggatcatgaaggcgcaggcgctgcgggacagcagcatgggcgcgtacatgtcgagcaagaagacgatggagatcaacccggagaacgggatcatggaggagctccggaagcgcgccgacgctgacgccaacgacaagtccgtcagggacctcgtcctcctcctcttcgagacggcgctgctcacctccggcttcagcctcgacgacccaaacaccttcgccgccaggatccaccgcatgctcaagctcggcctcaacatcgacgacgacgacgccgccgcggccgacgacgacgctgacatgcccgcgctcgatgacgccgccgccgaggagagcaagatggaggaggtggactga

SEQ ID NO: 129416 - protein, 703 aa, Oryza sativa
MAAAGDVQMAEKETFAFQAEINQLLSLIINTFYSNKEIFLRELISNSSDALDKIRFESLTDKSKLDAQPELFIRLVPYKPSKTLSIIDSGVGMTKSDLVNNLGTIARSGTKEFMEALQAGADVSMIGQFGVGFYSAYLVAEKVVVTTKHNDDEQYVWESQAGGSFTVTLDTAGERLGRGTKITLFLKDDQLEYLEERRLKDLVKKHSEFISYPIYLWSEKTTEKEISDDEDDDIDDSKGKEKEGDIEEVKDKKKKKKVNEVSHEWVQINKQKPIWLRKPEEISREEYASFYKSLTNDWEDHLAVKHFSVEGQLEFKAILFVPRRAPFDLFDTRKKMNNIKLYVRRVFIMDNCEELIPEWLGFVKGVVDSDDLPLNISREMLQQNKILKVIRKNLVKKCIEMFFEIADNKEDYAKFYEAFSKNLKLGIHEDSQNRGKLADLLRYHSTKSGNELTSLKDYVTRMKEGQKEVYYITGESRKAVENSPFLEKLKKKGYEVLFMVDAIDEYAVGQLKEYDGKKLVSATKEGLKLDDDDDAKERKRSFEPLCKVIKDILGDRVEKVVVSDRIVDSPCCLVTGEYGWTANMERIMKAQALRDSSMGAYMSSKKTMEINPENGIMEELRKRADADANDKSVRDLVLLLFETALLTSGFSLDDPNTFAARIHRMLKLGLNIDDDDAAAADDDADMPALDDAAAEESKMEEVD

SEQ ID NO: 129417 - DNA, 2439 bp, Oryza sativa
  CDS (1)..(2439)
atgcgcaagtgggcgctctcctccgcgctcctcctcctcctcctcctcctcaccacactccccgatccagctaagaagctccaagtcaatgctgatgacagcactgatgagttagttgatccgccgaaggtagaggagaagattggtggtgttccccatggcctgtccacggactctgaggttgttcagagggaggctgagtcaatctcgaggaagaccctcaggagctcagcggagaaatttgagttccaggctgaggtgtccagactcatggacatcatcatcaactcactctacagcaacaaggacattttcctgagggagctcatctccaatgcttctgatgctttggacaagattaggttcctggctctcactgataaggaggttttgggcgaaggtgacactgctaagcttgaaatccagattaagctggataaggagaagaagattctctccattcgggataggggtattggtatgaccaaggaagatctcattaagaaccttgggaccattgccaaatctggaacttcagcttttgtggaaaagatgcagactgggggtgacctcaatctcattgggcaattcggtgttggtttctattcagtatacttggttgctgactatgttgaagtgatcagcaagcacaatgacgacaaacagcatgtctgggagtccaaagctgatggatcattcgctatctctgaggatacatggaatgaacccctgggccgtggaactgaaataagactgcacctccgagatgaagccaaggagtacgtggaagaagacaagctaaaggatttggtgaagaagtactctgagttcatcaatttccccatttacttgtgggcaaccaaggaggttgatgtggaagtgccagctgatgaggatgagtcaagtgaatcaagtgaagaagaggaatcatcccctgagtctacagaggaagaagagacagaagagagtgaagagaagaagcccaagacaaagacagtaaaggaaaccactactgagtgggagcttctgaatgatgtgaaggctatatggcttcgtagccctaaggaggttactgaagaagaatacacaaagttttaccactcacttgctaaggactttggtgatgacaagcccttgtcttggagccacttcactgctgagggagatgttgagttcaaagctttgctctttgttcctcccaaggctccacatgatctctatgagagttactacaactctaacaagtcaaaccttaagttgtatgttagaagggttttcatctctgatgaatttgatgagcttcttccgaagtatctcagctttttgaagggtctcgtcgactcggacacattgcctctcaatgtatcacgagaaatgctccaacaacatagcagcctgaagaccatcaagaagaaactaatccgcaaagctcttgacatgattagaaaacttgctgaggaagatcctgatgagtacagcaacaaagataagacagatgaagaaaaaagtgcaatggaggagaaaaagggccagtatgccaagttctggaatgagtttggaaaatcagtcaagttgggcatcattgaagacgcaactaacaggaaccgtcttgcaaagcttctgagatttgaaagtaccaagtcggaaggcaaacttgcctctcttgatgagtacatttcaaggatgaagccagggcagaaggacatcttttacattaccggaagcagcaaggaacaattagagaaatcaccgttccttgagaggctaaccaaaaagaactacgaggttatctacttcactgaccctgttgacgagtacttgatgcaatacctcatggactacgaggacaagaagttccagaacgtctccaaggagggtctcaaactcggcaaggactctaagctcaaggacctcaaggagtccttcaaggagctgaccgactggtggaagaaggctcttgacaccgagagcgtggactcggtgaagatcagcaaccggctgagcgacaccccctgcgtggtggtgacatccaagtacgggtggagcgccaacatggagaagatcatgcagtcacagaccctctcggatgccagcaagcaggcgtacatgcgcggcaagagggtactcgagatcaaccccaggcaccccatcatcaaggaactccgtgacaaggtcgcccaggacagcgagagcgagagcttgaagcagacggcgaagctggtgtaccagacggccctcatggagagcggcttcaaccttcctgatcccaaggacttcgcctccagcatctacaggtcggtgcagaagagccttgacctgagccccgacgcggccgtggaagaggaagaggaggtcgaggaggccgaggttgaagagaaggaatcatccaacatcaaggaggaggcggagccgtcgtcgtatgataaggacgagctgtag

SEQ ID NO: 129418 - protein, 812 aa, Oryza sativa
MRKWALSSALLLLLLLLTTLPDPAKKLQVNADDSTDELVDPPKVEEKIGGVPHGLSTDSEVVQREAESISRKTLRSSAEKFEFQAEVSRLMDIIINSLYSNKDIFLRELISNASDALDKIRFLALTDKEVLGEGDTAKLEIQIKLDKEKKILSIRDRGIGMTKEDLIKNLGTIAKSGTSAFVEKMQTGGDLNLIGQFGVGFYSVYLVADYVEVISKHNDDKQHVWESKADGSFAISEDTWNEPLGRGTEIRLHLRDEAKEYVEEDKLKDLVKKYSEFINFPIYLWATKEVDVEVPADEDESSESSEEEESSPESTEEEETEESEEKKPKTKTVKETTTEWELLNDVKAIWLRSPKEVTEEEYTKFYHSLAKDFGDDKPLSWSHFTAEGDVEFKALLFVPPKAPHDLYESYYNSNKSNLKLYVRRVFISDEFDELLPKYLSFLKGLVDSDTLPLNVSREMLQQHSSLKTIKKKLIRKALDMIRKLAEEDPDEYSNKDKTDEEKSAMEEKKGQYAKFWNEFGKSVKLGIIEDATNRNRLAKLLRFESTKSEGKLASLDEYISRMKPGQKDIFYITGSSKEQLEKSPFLERLTKKNYEVIYFTDPVDEYLMQYLMDYEDKKFQNVSKEGLKLGKDSKLKDLKESFKELTDWWKKALDTESVDSVKISNRLSDTPCVVVTSKYGWSANMEKIMQSQTLSDASKQAYMRGKRVLEINPRHPIIKELRDKVAQDSESESLKQTAKLVYQTALMESGFNLPDPKDFASSIYRSVQKSLDLSPDAAVEEEEEVEEAEVEEKESSNIKEEAEPSSYDKDEL

SEQ ID NO: 129419 - DNA, 2376 bp, Oryza sativa
  CDS (1)..(2376)
atggcgccggcgctgagcaggagcctgggggcgtcgtccgttgcggcgctgaggccgaccccgtcgcggggccggggtcccacgctgcggagcgcggtcgcggtgcaggggaggggagcggcggcggtggccgcgagaggggtgaggtgggaggccgggaggaggaaggggaaggggaggatggtcggggtcaggtgcgaggccgccgtcaccgagaagcccgccggggaggaggaggcggccggcgagcagttcgagtaccaggctgaggtcagccgattgctggatttgattgtccacagcctgtatagccacaaggaggtttttctccgtgaactcgtaagtaatgcaagtgacgcgctggataagctgagatttctcagtgtaactgattcctctgtattgtccgatggcggtgagttggaaattaggatcaaacccgacccagaggctggcacaattactatcactgatactggcattgggatgaccaaagatgaactcaaagattgccttggaaccatcgcccaaagtggcacctccaaatttttgaaggctcttaaggagaacaaagatcttggtgcagataatggacttattggtcaatttggtgtgggattttattcggcttttcttgttgcagagaaggttgtggtttccactaagagtccaaaggcagacaaacagtatgtatgggaagctatggctgacagcagctcatatgttattaaggaagaaaccgatcctgagaaaatgttgacacgcggaacacagattactctgtttttaagagatgatgataagtacgagtttgctgaccctggacgtattcaaggtttagttaagaactattcccagtttgtttcattccccatatatacatggcaggagaaatcaagaacagttgaggttgaagaagaagaaccgaaagaaggtgaagaggcaacagagggtgaaaagaagaagaaaaagaaaacaatcactgagaagtactgggattgggaattggctaatgaaacaaagcccatatggatgagaaatccaaaggaagttgagaaaactgagtacaatgaattctacaagaaggcattcaatgagtttttggatcctcttgcttacacccactttacaacagagggtgaggtggaattcaggagcgtcctctacattccaggaatggcacctcttagcaatgaggagataatgaaccctaagaccaagaatatccggctgtatgttaagagagtcttcatatcagatgacttcgatggcgagttgttccctagatacttaagctttgtaaagggtgtagtggactcaaatgatcttcctctcaatgtttcccgtgagattcttcaagaaagtcgtattgtcaggatcatgcgcaaaagacttgtcaggaagacatttgatatgattcaggagattgctgagaaagaggacaaggaggactacaaaaaattttgggagagttttggcaaatttgttaaacttggctgcattgaggacacaggaaatcacaaacgccttgctcctctgttgcggttttactcttccaaaaatgagacagatttgataagtcttgatcagtatgtagagaacatgccagaaaaccaaaaggcaatctactacattgctacagacagtcttcagagtgcaaagactgctcctttcttggaaaagttggttcaaaaagacattgaagttctctaccttatcgagccgattgatgaggttgccattcagaatttacagacatacaaagagaaaaaatttgttgatatcagcaaagaagacctggaattgggtgatgaagatgaggacaaggaaaatgagagcaagcaggaatacactcttctatgtgactggataaagcaacagcttggtgacaaagttgccaaggttcagatatcaaaccggcttagctcttcgccatgtgttcttgtatctggcaaatttggttggtcagcaaacatggaaaggcttatgaaggcacaaacacttggtgatacttcaagcttagagttcatgagaggaagaagaatttttgaaatcaaccccgaccacccaattgtcaaggacttgagtgctgcttgcaaaaacgagcctgaaagtaccgaagccaagagggccgttgagctgttgtacgagactgcgctgatctccagtggatatactcctgacagcccagctgagttgggtggcaagatctacgagatgatgaccatcgctcttggcgggagatggggaagaccggaggagtctgaagccgccaccagcgaatccaacgttgaggtagagtcttctgaaggttccgcgacggaagttgttgagccctctgaagtgaggcccgagagtgatccatggaaggattaa

SEQ ID NO: 129420 - protein, 791 aa, Oryza sativa
MAPALSRSLGASSVAALRPTPSRGRGPTLRSAVAVQGRGAAAVAARGVRWEAGRRKGKGRMVGVRCEAAVTEKPAGEEEAAGEQFEYQAEVSRLLDLIVHSLYSHKEVFLRELVSNASDALDKLRFLSVTDSSVLSDGGELEIRIKPDPEAGTITITDTGIGMTKDELKDCLGTIAQSGTSKFLKALKENKDLGADNGLIGQFGVGFYSAFLVAEKVVVSTKSPKADKQYVWEAMADSSSYVIKEETDPEKMLTRGTQITLFLRDDDKYEFADPGRIQGLVKNYSQFVSFPIYTWQEKSRTVEVEEEEPKEGEEATEGEKKKKKKTITEKYWDWELANETKPIWMRNPKEVEKTEYNEFYKKAFNEFLDPLAYTHFTTEGEVEFRSVLYIPGMAPLSNEEIMNPKTKNIRLYVKRVFISDDFDGELFPRYLSFVKGVVDSNDLPLNVSREILQESRIVRIMRKRLVRKTFDMIQEIAEKEDKEDYKKFWESFGKFVKLGCIEDTGNHKRLAPLLRFYSSKNETDLISLDQYVENMPENQKAIYYIATDSLQSAKTAPFLEKLVQKDIEVLYLIEPIDEVAIQNLQTYKEKKFVDISKEDLELGDEDEDKENESKQEYTLLCDWIKQQLGDKVAKVQISNRLSSSPCVLVSGKFGWSANMERLMKAQTLGDTSSLEFMRGRRIFEINPDHPIVKDLSAACKNEPESTEAKRAVELLYETALISSGYTPDSPAELGGKIYEMMTIALGGRWGRPEESEAATSESNVEVESSEGSATEVVEPSEVRPESDPWKD

SEQ ID NO: 129421 - DNA, 2493 bp, Oryza sativa
  CDS (1)..(2493)
atggcgtcggagaccgagacgttcgccttccaggccgagatcaaccagctgctgtccctcatcatcaacaccttctactccaacaaggagatcttcctccgcgagctcatctccaactcctccgatgcattggataagattaggttcgagagcctcacggacaagagcaagctcgatgcgcagccggagctgttcatccacattgtccccgacaaggctagcaacaccctgtcgatcatcgacagtggtgtcggcatgaccaagtcggacctcgtcaacaacctcggtaccatcgccaggtcggggaccaaggagttcatggaggcgctcgctgctggtgctgatgtgtccatgattgggcagtttggtgtcgggttctactccgcctaccttgttgctgagagggttgttgtgaccaccaagcacaacgacgacgagcagtatgtgtgggagtcacaggccggtgggtccttcactgttacacgtgatacctctggtgagcagcttggacggggtactaagatcaccctctacctcaaggatgatcagctggaataccttgaggagcgtcgcctcaaggatctggtgaagaagcattctgagttcatcagctaccctatctccctatggactgagaagacaactgagaaggagatttctgatgatgaagacgaggaagagaagaaggatgctgaggagggaaaggttgaggatgttgatgaggagaaggaagagaaagagaagaaaaagaagaagatcaaggaagtctctcacgagtggaacgtgatgaacaagcagaaacccatttggttgaggaagccagaggagatcaccaaggaagagtacgctgctttctacaagagcttgacaaacgactgggaggaacatctggctgtcaagcacttctctgtggagggtcagcttgaattcaaggccatcctgtttgtaccaaagagagcgccatttgacctctttgacaccaggaagaagcaaaacaacatcaagctgtacgtacgccgggtgtttatcatggacaactgtgaggagttgatcccagagtggctcagctttgtcaagggcattgttgattctgaagaccttcccctcaacatctcacgtgagatgctccagcagaacaagatcctgaaggtgatccgcaagaaccttgtgaagaagtgcgtggagctcttctttgagatcgctgagaacaaggaagactacaacaagttctacgaggctttctccaagaatctcaagcttggcatccatgaggattccaccaacaggaccaagattgctgagctcctgaggtatcactccaccaagagtggtgatgagttgaccagcctcaaggactacgtaacccggatgaaggagggccagagtgagatctattacatcactggtgagagcaagaaggctgttgagaactcccccttcctcgagaagctgaagaagaagggttatgaggtcctgtacatggttgatgccattgatgagtacgctgttggtcagcttaaggagtttgaaggcaagaagctcgtctctgccaccaaggaaggtctgaagcttgatgagagtgaggacgagaagaagcggcaggaggaactcaaggagaagttcgagggtctgtgcaaggtgatcaaggaggtgctcggtgacaaggtggagaaggttgttgtctctgaccgtgtggtggactctccctgctgtctagtcactggggagtatggctggactgctaacatggagaggatcatgaaggcccaggctctgagggactccagcatggccggctacatgtctagcaagaagaccatggagatcaacccggagaatgccatcatggacgagctccgcaagcgtgccgatgcggacaagaatgacaagtccgtgaaggacctggtgatgctgctcttcgagactgccctgctgacctccggtttcagcttggaggaccccaacaccttcggcaccaggatccaccgcatgctcaagctcggcctgagcatcgacgaggacgagtccgccgaggctgacgccgacatgccgccgctggaggacgacgccggcgagagcaagatggaggaggtcaagtacacattcagagaaacaaggctgcactcttgctgcagatcaagcggaggacttgcaatggaggcaaccaaggagacccagcagcagcagcagcagaggaagccggacgccggcgacacggtgcagctgccgatggacaccagcccgtacgtgcagtacaagaaggacgacggcctggaggactacaagctgcgcgcctacggcgcccgcggccacctccccgtctccgacgtcccccacggcggctgcggcaccgacgcccccaccatccccggcaccgccgtccccgtcgccacacagcgccgccaccaacaaggcgacaccgccgctgccgccgccggcaccggccgcgttgacaccgccaccgacgccatcaatcaccatggcgtgccatag

SEQ ID NO: 129422 - protein, 830 aa, Oryza sativa
MASETETFAFQAEINQLLSLIINTFYSNKEIFLRELISNSSDALDKIRFESLTDKSKLDAQPELFIHIVPDKASNTLSIIDSGVGMTKSDLVNNLGTIARSGTKEFMEALAAGADVSMIGQFGVGFYSAYLVAERVVVTTKHNDDEQYVWESQAGGSFTVTRDTSGEQLGRGTKITLYLKDDQLEYLEERRLKDLVKKHSEFISYPISLWTEKTTEKEISDDEDEEEKKDAEEGKVEDVDEEKEEKEKKKKKIKEVSHEWNVMNKQKPIWLRKPEEITKEEYAAFYKSLTNDWEEHLAVKHFSVEGQLEFKAILFVPKRAPFDLFDTRKKQNNIKLYVRRVFIMDNCEELIPEWLSFVKGIVDSEDLPLNISREMLQQNKILKVIRKNLVKKCVELFFEIAENKEDYNKFYEAFSKNLKLGIHEDSTNRTKIAELLRYHSTKSGDELTSLKDYVTRMKEGQSEIYYITGESKKAVENSPFLEKLKKKGYEVLYMVDAIDEYAVGQLKEFEGKKLVSATKEGLKLDESEDEKKRQEELKEKFEGLCKVIKEVLGDKVEKVVVSDRVVDSPCCLVTGEYGWTANMERIMKAQALRDSSMAGYMSSKKTMEINPENAIMDELRKRADADKNDKSVKDLVMLLFETALLTSGFSLEDPNTFGTRIHRMLKLGLSIDEDESAEADADMPPLEDDAGESKMEEVKYTFRETRLHSCCRSSGGLAMEATKETQQQQQQRKPDAGDTVQLPMDTSPYVQYKKDDGLEDYKLRAYGARGHLPVSDVPHGGCGTDAPTIPGTAVPVATQRRHQQGDTAAAAAGTGRVDTATDAINHHGVP

SEQ ID NO: 129423 - DNA, 2436 bp, Oryza sativa
  CDS (1)..(2436)
atgctcggggcctcgaggcgttccgtctgcaccgccgcggcggcggcggcggccgggtcacgccgccgcgccgccgccggcgtcgcctccgccgtttccggggattcctccgtctcgtcttcctcggcgcccccacgctcggtgattaatggggagcctggtgtccctcagcttcagaagaggttgctctctgtgcttgctgcgcccaagcttaccgggaccgacaatgctgcctccctcaagctgagggagggttcccttgttggcaggcgatatgaatcgagtgctgcagcagttgattcttctgatacgccacctgtggagaagcatgagtaccaggcagaggtcaataggctcatggacttgattgttcacagcttgtatagcaacaaggaggtgtttcttcgagagcttgtcagcaatgcaagtgatgcacttgataagttgcggtatcttagtgtcactgatcctgatcttataaaggatggtgctggtcttgacattcgcatccaaacagataaggagaatggaataataacaatcactgatactgggattggtatgacgaggcaagaacttgttgattctcttggaactatagcgagcagtggaactgccaaattccttaaggcactaaaggagagccaagaggctggtgttgacagcaacttgattggtcaatttggtgttggattctattctgcgtttcttgtttctgataaggttgcagtgtcaactaagagcccaaaatctgacaagcaatatgtttgggaaggcgaggcagaatctagttcttacaccattagagaggagacagacccagagaagctccttcctaggggaactcgccttactctgtaccttaagcgtgaggacaagggtttcgcacaccctgagaagattcagaaacttgtgaagaattactcacagtttgtttccttccctatttatacttggcaagagaaaggttacacaaaagaggttgaggtcgatgaacctgttgaagctaaagaaggcgacgatgagactaaaacagaggttaagaaaaagacaaaaacagttgttgagaagtactgggattgggagcttacaaatgaaacacaacctatatggcttcggaaccctagagaggtatcaactgaggagtacaatgagttttacaagaagacattcaatgagtacatggatcccttagcatcctcacactttactacagagggggaagtagaattcagatctattctctatgtgcctgctacaaagaaggaggatataactgataggaagaccaaaaatatcaggctttatgttaagcgcgtgtttatatcagacgactttgatggggaactgttcccaagatacctgagctttgtgaggggtgttgttgactcaaatgaccttccattaaatgtttctcgtgagatcctgcaagaaagccgaattgtgcgtataatgagaaagaggttggtgcgaaaggcctttgatatgatacttggcatctcttgtagcgaaaacagagatgactatgaaaggttctgggaaaactatggcaagttcttaaagctgggttgcatggaagacaaggaaaatcacaagagaattgctcctttgctccgattcttttcttctcaaagcaatgaagaattaattagcttggatgaatacgtggaaaatatgaaacctgagcaaaaggacatttactacattgctgcggacagtttgagtagtgcaaaacatgctcctttcctggagaagctcaatgaaaaagagtacgaggttctatttttagttgacccaatggatgaagtgtctgtcacaaatctgaactcctacaaggataagcgtttcgttgatattagcaaggaagacttggacttaggtgataagaatgaggaaaaagagaaggagatcaagcaggaatacagccaaacatgtgactggatcaagaaacgcttgggtgaaaaggttgctcgagttgatatatcaaaccgtctcagctcatcaccatgtgttctagttgcagctaagtttggttggtctgcgaacatggaaaggttgatgagagcgcaatctatgggtgacatgtcatctctggatttcatgcgttctaggaaagtttttgaaatcaacccagagcatgagatcatcaagggcttgaatgctgcctgcagagccaaccctgatgacccagaagctctaaaggctgtagatatcctgtttgaaacttctatgatctctagtggctttacacctgacaaccctgccgagctaagtgggaagatatatgagatgatgagcacagctatggccagcaagtgggcctcgcacgctcaacccgctgagatgaacctgcagcgagactcacctgtcagctctgagccgattgaagccgaggtgattgagccggagttggtggacgatagccagaagaaataa

SEQ ID NO: 129424 - protein, 811 aa, Oryza sativa
MLGASRRSVCTAAAAAAAGSRRRAAAGVASAVSGDSSVSSSSAPPRSVINGEPGVPQLQKRLLSVLAAPKLTGTDNAASLKLREGSLVGRRYESSAAAVDSSDTPPVEKHEYQAEVNRLMDLIVHSLYSNKEVFLRELVSNASDALDKLRYLSVTDPDLIKDGAGLDIRIQTDKENGIITITDTGIGMTRQELVDSLGTIASSGTAKFLKALKESQEAGVDSNLIGQFGVGFYSAFLVSDKVAVSTKSPKSDKQYVWEGEAESSSYTIREETDPEKLLPRGTRLTLYLKREDKGFAHPEKIQKLVKNYSQFVSFPIYTWQEKGYTKEVEVDEPVEAKEGDDETKTEVKKKTKTVVEKYWDWELTNETQPIWLRNPREVSTEEYNEFYKKTFNEYMDPLASSHFTTEGEVEFRSILYVPATKKEDITDRKTKNIRLYVKRVFISDDFDGELFPRYLSFVRGVVDSNDLPLNVSREILQESRIVRIMRKRLVRKAFDMILGISCSENRDDYERFWENYGKFLKLGCMEDKENHKRIAPLLRFFSSQSNEELISLDEYVENMKPEQKDIYYIAADSLSSAKHAPFLEKLNEKEYEVLFLVDPMDEVSVTNLNSYKDKRFVDISKEDLDLGDKNEEKEKEIKQEYSQTCDWIKKRLGEKVARVDISNRLSSSPCVLVAAKFGWSANMERLMRAQSMGDMSSLDFMRSRKVFEINPEHEIIKGLNAACRANPDDPEALKAVDILFETSMISSGFTPDNPAELSGKIYEMMSTAMASKWASHAQPAEMNLQRDSPVSSEPIEAEVIEPELVDDSQKK

SEQ ID NO: 129425 - DNA, 2094 bp, Brassica napus
  CDS (1)..(2094)
atggcagacgccgagacattcgcattccaggcggagatcaaccaattgctctccttaatcatcaacaccttttacagcaacaaggagatcttcctccgtgaactcatcagcaactcctccgatgcgttggacaagattaggttcgagtcgttgacggacaagagcaagctcgatgggcagcctgagctcttcatccacatcatccccgacaaggccaacaacaccttgaccatcgtcgacagtggtgtcggtatgaccaaggctgatctggtcaacaacctcgggaccattgctaggtccggcaccaaggagttcatggaggccttggctgctggtgctgacgtcagcatgattggtcagtttggtgttggtttctactctgcttacttggttgccgacaaggttgttgtcaccaccaagcacaacgatgatgagcagtacgtgtgggagtcccaggctggtggttctttcaccgttacgagagatacctccggggagagtcttggcaggggtacgaagatgacgcttcatctcaaggaggatcagttggagtatctcgaggagcggaggcttaaggatttggtcaagaagcactctgagtttatcagctaccctatctccttgtgggttgagaagactgttgagaaggagatttctgatgatgaggatgaggatgagaagaaggatgaggaaggcaatgtggaggaagtagatgaggagaaagagaagaagaagaagaagaagattaaagaggtttctcacgagtgggagttggtgaacaagcagaagcctatttggatgaggaagcctgaggagatcaccaaggaggagtacgctgctttctacaagagtctcagcaacgactgggaagagcatttggctgtcaagcacttctctgtcgaaggacagctcgagttcaaagctgttctctttgttccgaagagggctccttttgatctctttgacactaagaagaagcctaacaacatcaagctctacgtccgtcgtgtcttcatcatggacaactgtgaggacatcattcccgagtggctaggctttgttaaaggtattgttgattccgaggatcttcctctcaacatctcgagagagacattgcagcagaacaagatcctcaaggtcatccgcaagaacctcgtgaagaagtgccttgagctcttctttgagattgctgagaacaacgaggactacaacaagttctacgaagctttctccaagaatctgaagctcggtatccatgaggactctcagaacaggaccaagattgctgagttgctccgttaccactccaccaagagcggcgatgagctgacgagtctcaaggactacgtgactaggatgaaggagggtcagaacgatatcttctacatcaccggtgagagcaagaaggctgttgagaactctccattccttgagaagctcaagaagaaggggtatgaagttctgtacatggttgacgcgatcgacgagtatgctattggccagctcaaggagtttgaagggaagaaacttgtgtctgcaaccaaggaaggcttgaaactcgacgagtctgaggatgagaagaagaaaaaggaagagctaaaggagaagtttgaaggactatgcaaagtgatcaaggacgtgttgggagacaaagtggagaaggttatcgtctctgaccgtgtggttgactcaccgtgctgtcttgtgacgggcgaatacggctggacagcaaacatggagaggatcatgaaagcacaagctttgagagatagcagcatggcgggctacatgtcgagcaagaagacgatggagattaatccagagaatgcgatcatggaggagctgaggaaaagagctgaagctgataagaatgacaagtctgtcaaggatctcgttcttctcctctttgaaactgctcttctcacctctggtttcagcttggacgagcccaacactttcgggaacaggatccacaggatgttgaagcttggattgagcatcgatgaagatgatgctgttgaaggtgatgcagagatgcctcctcttgaagatgacgctgatgctgaaggcagcaagatggaggaagtcgattaa

SEQ ID NO: 129426 - protein, 697 aa, Brassica napus
MADAETFAFQAEINQLLSLIINTFYSNKEIFLRELISNSSDALDKIRFESLTDKSKLDGQPELFIHIIPDKANNTLTIVDSGVGMTKADLVNNLGTIARSGTKEFMEALAAGADVSMIGQFGVGFYSAYLVADKVVVTTKHNDDEQYVWESQAGGSFTVTRDTSGESLGRGTKMTLHLKEDQLEYLEERRLKDLVKKHSEFISYPISLWVEKTVEKEISDDEDEDEKKDEEGNVEEVDEEKEKKKKKKIKEVSHEWELVNKQKPIWMRKPEEITKEEYAAFYKSLSNDWEEHLAVKHFSVEGQLEFKAVLFVPKRAPFDLFDTKKKPNNIKLYVRRVFIMDNCEDIIPEWLGFVKGIVDSEDLPLNISRETLQQNKILKVIRKNLVKKCLELFFEIAENNEDYNKFYEAFSKNLKLGIHEDSQNRTKIAELLRYHSTKSGDELTSLKDYVTRMKEGQNDIFYITGESKKAVENSPFLEKLKKKGYEVLYMVDAIDEYAIGQLKEFEGKKLVSATKEGLKLDESEDEKKKKEELKEKFEGLCKVIKDVLGDKVEKVIVSDRVVDSPCCLVTGEYGWTANMERIMKAQALRDSSMAGYMSSKKTMEINPENAIMEELRKRAEADKNDKSVKDLVLLLFETALLTSGFSLDEPNTFGNRIHRMLKLGLSIDEDDAVEGDAEMPPLEDDADAEGSKMEEVD

SEQ ID NO: 129427 - DNA, 2367 bp, Brassica napus
  CDS (1)..(2367)
atggcccctgctctgagtagaagcctctacacgacccctttgacctctgttccattcactccagcaaaccaacctcgcctctctcatctcagaaccgcgtttctccctcgcgccggcagtggactaagaaccggcgtttcatgtagctggaacctcgagaagagatgtaaccgcttcgccgtcaagtgcgacgccgccgtggcggagaaagagacgactgatgaagaagggtccggcgagaagttcgagtaccaagccgaggttagcagattgttggatttgattgttcatagcttgtacagtcacaaggaggttttcctcagggagcttgtaagtaacgcaagtgatgcgttggataagctgaggttcttgagtgtgacagagcctgctatgcttggagatggtggtgaccttgagatccggatcaagcctgatcctgataacggcaccataaccattactgatactggaattggaatgacaaaggaagaacttatagactgccttggaactattgctcagagtggcacttccaaattcttgaaggctcttaaggaaaacaaggaccttggtgctgacaacggtttgataggacagtttggtgttgggttttactctgctttcttagttgctgaaaaggttgttgtgtccaccaaaagccccaaatctgacaagcaatatgtttgggagtcggtagctgatagtagctcatatgtgatcagagaagaaaccgaccctgacaactttctacgccgtggaacgcaaataactttgtatctaagggaggatgataaatacgaatttgcggagtctacaagaatcaagaaccttgtgaagaactactctcagttcgttgggtttcccatctacacatggcaggagaaatcaaggactgttgaggttgaagaggaagaaccagctaaggaaggagaagaagagaaagagggtgagccaaagaagacgaagaagactactaaaactgagaagtactgggattgggaactagccaacgaaacaaaaccgttatggatgcgcaattcgaaggaagtgtcaaaggaggagtacaatgagttttacaagaaagctttcaatgagttcttggatccactcgctcatacacacttcacaaccgagggagaggttgagttcaggagcattctatacatccctgggatgggtccacttaacaatgaggacgttacaaacccgaagacaaagaacattcgtctccacgtcaagcgtgtgtttatctctgatgactttgatggagagctgttcccaagatacttgagctttgtgaagggtgtggtggactcaaacgatctcccactcaacgtctcacgtgaaattctccaagaaagcagaatcgtaagaatcatgagaaagaggctcattaggaagactttcgacatgatacaagaaatctccaaaagtgaaaacaaagaggattacaaaaagttctgggagaactttggtaaattcattaaactgggttgtattgaagacactggcaaccacaagcgtatcacaccgctgcttagattctacagttccaagaacgaagaggagttgacaagcttggatgagtacatcgagaacatgggagagaaccaaaaggctatctactaccttgccaccgacagcctcaaaagtgccaagtcagctccgttcctggagaagctcattcaaaaggacattgaggttctatacttggttgaacctatcgatgaagttgcgattcagaacttacaaacctacaaggaaaagaagtttgttgatatcagcaaagaagatttggaacttggtgatgaagatgaagtcaaggatagggaagctaaacaagagttcaatcttctctgtgactggatgaagcaacagctcggtgacaaagttgccaaagtccaagtctcaaatcgtttgagctcttctccctgtgtgcttgtctcaggcaaattcgggtggtcggctaatatggaaaggttaatgaaggcacaagcacttggagacacttcaagcttggagttcatgagaggtaggagaatactagagatcaatccagatcatcctatcatcaaagacttgaatgctgcttgtaagaatgcacctgagagcagtgaagcaacaagagtggttgatctcttatatgacactgctataatctcaagtggtttcactcctgatagcccggctgagctggggaacaagatctatgagatgatggctatggctgttggaggaagatggggacgagttgaagaagaagaaggaagctcgaatgtgaatgaaggagaaggtacaaaagatggagaagcagaagtaattgaaccatctgaagttagggcagagagtgatccgtggcaagattga

SEQ ID NO: 129428 - protein, 788 aa, Brassica napus
MAPALSRSLYTTPLTSVPFTPANQPRLSHLRTAFLPRAGSGLRTGVSCSWNLEKRCNRFAVKCDAAVAEKETTDEEGSGEKFEYQAEVSRLLDLIVHSLYSHKEVFLRELVSNASDALDKLRFLSVTEPAMLGDGGDLEIRIKPDPDNGTITITDTGIGMTKEELIDCLGTIAQSGTSKFLKALKENKDLGADNGLIGQFGVGFYSAFLVAEKVVVSTKSPKSDKQYVWESVADSSSYVIREETDPDNFLRRGTQITLYLREDDKYEFAESTRIKNLVKNYSQFVGFPIYTWQEKSRTVEVEEEEPAKEGEEEKEGEPKKTKKTTKTEKYWDWELANETKPLWMRNSKEVSKEEYNEFYKKAFNEFLDPLAHTHFTTEGEVEFRSILYIPGMGPLNNEDVTNPKTKNIRLHVKRVFISDDFDGELFPRYLSFVKGVVDSNDLPLNVSREILQESRIVRIMRKRLIRKTFDMIQEISKSENKEDYKKFWENFGKFIKLGCIEDTGNHKRITPLLRFYSSKNEEELTSLDEYIENMGENQKAIYYLATDSLKSAKSAPFLEKLIQKDIEVLYLVEPIDEVAIQNLQTYKEKKFVDISKEDLELGDEDEVKDREAKQEFNLLCDWMKQQLGDKVAKVQVSNRLSSSPCVLVSGKFGWSANMERLMKAQALGDTSSLEFMRGRRILEINPDHPIIKDLNAACKNAPESSEATRVVDLLYDTAIISSGFTPDSPAELGNKIYEMMAMAVGGRWGRVEEEEGSSNVNEGEGTKDGEAEVIEPSEVRAESDPWQD

SEQ ID NO: 129429 - DNA, 2469 bp, Brassica napus
  CDS (1)..(2469)
atgaggaagaggacgctcgtgtccgtcttgttcctattctccctcctcttccttctcccagatcaaggaagaaagcttcacgcgaatgcggaagatagctccgacgaggtttcagatccacccaaggtggaggagaaactcggcggtcacggcggtttatcaacggattcagatgtcgttcatagagagtctgagtcgatctcgaagaagtcacttcgcagtaacgcggagaagtttgagttccaggctgaggtttctcggctgatggacattatcatcaactctctatacagcaacaaggatattttccttagagagttgatctccaatgcttctgatgctttggataagattaggttccttgcactcactgataaagatgttttgggtgaaggtgacaatgccaagcttgagatccagattaagttagataaagctaagaagattctttctattcgggaccgtggtattggaatgactaaggaggacttgatcaagaaccttggtaccattgcaaaatccggaacgtcagcttttgttgagaaaatgcaatcaagtggggatcttaaccttattggacaatttggagttggattctactctgcctatcttgttgctgactacattgaagtcattagcaagcacaacgatgacatccaacatgtatgggaatcaaaggctgatggtaaatttgctgtttccgaggatacatggaatgagcctcttggacgtggaactgagattagactacatcttagagatgaagctggcgagtaccttgaggagagtaaacttaaggatttggtgaagagatattctgaattcattaacttccctatcaacctctgggctagcaaagaggttgaaactgaggtcccagctgaggaagatgaatcaactgaagaggaaactgaaaccacctctaccgaggaagagaaggaagaagatgctgaggatgaagacagtgagaagaagcagaaaaccaagaaggtgaaagaaacggtttatgaatgggagcttctgaatgatgttaaggctatatggctgagaagtcccaaggaggtgacagaggaagagtacactaaattctaccactctctctcaaaggatttctctgacgagaagccaatggcttggagtcacttcaatgctgaaggtgatgttgaattcaaggctgtgttgtatgttcctccgaaagctgcccatgatcagtacgagagctactacaacaccaacaaggcgaacttgaagctctacgtcaggagggtcttcatctcggatgaatttgatgagcttctgcctaaatatttgagtttcttgaagggtcttgttgactctgacacgttgcctctaaatgtatcacgagaaatgcttcaacaacacagcagcttaaagacaattaagaagaagctcatccgaaaggctcttgatatgatccgcaagcttgctgaagaagaccctgatgaggtccatgacgatgacaaaaaagatgtggagaagtctggtgagaatgacgagaagaagggtcaatacaccaagttctggaacgagtttggcaagtcgattaaacttggcatcattgaggatgcttctaacaggaaccgcctaccaaaacttcttcgttttgagacaactaagtccgatggaaaactgacttcactggatcagtacatcaagagaatgaaaaaggggcaaaaggacgtattttacattactggaagcagcaaggagcaactggagaaatctccattcctcgagaggctaatcaaaaagggctatgaggttatcttcttcacagaccccgttgatgagtacttgatgcaatacctgatggattacgaggacaagaagttccagaatgtgtcaaaagaaggactgaaggttgggaaagactcgaaagtgaaggagctaaaagaagcattcaaggagttaaccaagtggtggaaagagagtctcgctagtgagaacgtggacgacgtcaaaatcagtaaccgtttggctgacactccctgtgtagttgtaacatctaagtttggatggagtgcaaacatggagaggatcatgcagtcccaaactctctccgatgcaaacaagcaagcttacatgcgcggaaagagagtccttgagatcaacccacgacacccgatcatcaaagaactcaaggaaagagttgctagcgacccagaggatgagagtgtgaaagaaacagcacagctcatgtaccagacggctttgatcgagagtggattcatactcaacgacccaaaagactttgcaggccgtatttacaactctgtcaagagcagcctgaagattagccctgatgcagtagccgaagaggaagtagagacagaggaaacagagaccagtgaggaagccactgagacaaaatcagatgacttgcctggtggtctaaacattgaagccgaacctgttgaggaagagacaccaaccaaggacgaactatag

SEQ ID NO: 129430 - protein, 822 aa, Brassica napus
MRKRTLVSVLFLFSLLFLLPDQGRKLHANAEDSSDEVSDPPKVEEKLGGHGGLSTDSDVVHRESESISKKSLRSNAEKFEFQAEVSRLMDIIINSLYSNKDIFLRELISNASDALDKIRFLALTDKDVLGEGDNAKLEIQIKLDKAKKILSIRDRGIGMTKEDLIKNLGTIAKSGTSAFVEKMQSSGDLNLIGQFGVGFYSAYLVADYIEVISKHNDDIQHVWESKADGKFAVSEDTWNEPLGRGTEIRLHLRDEAGEYLEESKLKDLVKRYSEFINFPINLWASKEVETEVPAEEDESTEEETETTSTEEEKEEDAEDEDSEKKQKTKKVKETVYEWELLNDVKAIWLRSPKEVTEEEYTKFYHSLSKDFSDEKPMAWSHFNAEGDVEFKAVLYVPPKAAHDQYESYYNTNKANLKLYVRRVFISDEFDELLPKYLSFLKGLVDSDTLPLNVSREMLQQHSSLKTIKKKLIRKALDMIRKLAEEDPDEVHDDDKKDVEKSGENDEKKGQYTKFWNEFGKSIKLGIIEDASNRNRLPKLLRFETTKSDGKLTSLDQYIKRMKKGQKDVFYITGSSKEQLEKSPFLERLIKKGYEVIFFTDPVDEYLMQYLMDYEDKKFQNVSKEGLKVGKDSKVKELKEAFKELTKWWKESLASENVDDVKISNRLADTPCVVVTSKFGWSANMERIMQSQTLSDANKQAYMRGKRVLEINPRHPIIKELKERVASDPEDESVKETAQLMYQTALIESGFILNDPKDFAGRIYNSVKSSLKISPDAVAEEEVETEETETSEEATETKSDDLPGGLNIEAEPVEEETPTKDEL

SEQ ID NO: 129431 - DNA, 2472 bp, Brassica napus
  CDS (1)..(2472)
atgaggaagaggacgctcgtgtccgtcttgttcctattctccctcctcttccttctcccagatcaaggaagaaagcttcacgcgaatgcggaagatagctccgacgaggtttcagatccacccaaggtggaggagaaactcggcggtcacggcggtttatcaacggattcagatgtcgttcatagagagtctgagtcgatctcgaagaagtcacttcgcagtaacgcggagaagtttgagttccaggctgaggtttctcggctgatggacattatcatcaactctctatacagcaacaaggatattttccttagagagttgatctccaatgcttctgatgctttggataagattaggttccttgcactcactgataaagatgttttgggtgaaggtgacaatgccaagcttgagatccagattaagttagataaagctaagaagattctttctattcgggaccgtggtattggaatgactaaggaggacttgatcaagaaccttggtaccattgcaaaatccggaacgtcagcttttgttgagaaaatgcaatcaagtggggatcttaaccttattggacaatttggtgttggattctactctgcctatcttgttgctgactacattgaagtcattagcaagcacaacgatgatatccaacatgtatgggaatcaaaggctgatggtaaatttgctgtttccgaggatacatggaatgagcctcttggacgtggaactgagattagactacatcttagagatgaagctggcgagtaccttgaggagagtaaacttaaggatttggtgaagagatattctgaattcattaacttccctatcaacctctgggctagcaaagaggttgaaactgaggtcccagctgaggaagatgaatcaactgaagaggaaactgaaaccacctctaccgaggaagagaaggaagaagatgctgaggatgaagacagtgagaagaagcagaaaaccaagaaggtgaaagaaacagtttatgaatgggagcttctgaatgatgttaaggctatatggctgagaagtcccaaggaggtgacagaggaagagtacactaaattctaccattctcttgcaaaggatttctctgacgagaagccaatggcttggagtcactttaatgcggaaggtgatgttgaattcaaggctgtgttgtatgttcctccgaaagctgcccatgatcagtacgagagctactacaacaccaacaaggcgaacttgaagctctacgtcaggagggtcttcatctcggatgaatttgatgagcttctgcctaaatatttgagtttcttgaagggtcttgttgactctgacacattgcctctaaatgtatcacgagaaatgcttcaacaacacagcagcttaaagacaattaagaagaagctcatccgaaaggctcttgatatgatccgcaagcttgctgaagaagaccctgatgaggtccatgacgatgacaaaaaagatgtggagaagtctggtgagaatgacgagaagaagggtcaatacaccaagttctggaacgagtttggcaagtcgattaaacttggcatcattgaggatgcttctaacaggaaccgcctggcaaaacttcttcgttttgagacaactaagtccgatggaaaactgacttcactggatcagtacatcaagagaatgaaaaaggggcaaaaggacgtattttacattactggaagcagcaaggagcaactggagaaatctccattcctcgagaggctaatcaaaaagggctatgaggttatcttcttcacagaccccgttgatgagtacttgatgcaatacctgatggattacgaggacaagaagttccagaatgtgtcaaaagaaggactgaaggttgggaaagactcgaaagtgaaggagctaaaagaagcattcaaggagttaaccaagtggtggaaagagagtctcgctagtgagaacgtggacgacgtcaaaatcagtaaccgattggctgacactccctgtgtagttgtaacgtccaagtttggatggagtgcaaacatggagaggatcatgcagtcccaaactctctccgatgcaaacaagcaagcttacatgcgaggaaagagagtccttgagatcaaccctcgacaccctatcatcaaagaactcaaggaaagagttgctagcgacccagaggatgagagtgtgaaagaaacagcacagctcatgtaccagacggctttgatcgagagtggattcatactcaacgacccaaaagactttgcaggccgtatttacaactccgtcaagagcagtcttaaaatcagtcctgatgcagtagcggaagaggaagtggaagcagaggaaacagagaccagtgaggacgctactgaggcaaaatcagacgacttgcctggtggtggtctgaacattgaagctgaacaggttgaggatgaggccccaaccaaggatgaactgtag

SEQ ID NO: 129432 - protein, 823 aa, Brassica napus
MRKRTLVSVLFLFSLLFLLPDQGRKLHANAEDSSDEVSDPPKVEEKLGGHGGLSTDSDVVHRESESISKKSLRSNAEKFEFQAEVSRLMDIIINSLYSNKDIFLRELISNASDALDKIRFLALTDKDVLGEGDNAKLEIQIKLDKAKKILSIRDRGIGMTKEDLIKNLGTIAKSGTSAFVEKMQSSGDLNLIGQFGVGFYSAYLVADYIEVISKHNDDIQHVWESKADGKFAVSEDTWNEPLGRGTEIRLHLRDEAGEYLEESKLKDLVKRYSEFINFPINLWASKEVETEVPAEEDESTEEETETTSTEEEKEEDAEDEDSEKKQKTKKVKETVYEWELLNDVKAIWLRSPKEVTEEEYTKFYHSLAKDFSDEKPMAWSHFNAEGDVEFKAVLYVPPKAAHDQYESYYNTNKANLKLYVRRVFISDEFDELLPKYLSFLKGLVDSDTLPLNVSREMLQQHSSLKTIKKKLIRKALDMIRKLAEEDPDEVHDDDKKDVEKSGENDEKKGQYTKFWNEFGKSIKLGIIEDASNRNRLAKLLRFETTKSDGKLTSLDQYIKRMKKGQKDVFYITGSSKEQLEKSPFLERLIKKGYEVIFFTDPVDEYLMQYLMDYEDKKFQNVSKEGLKVGKDSKVKELKEAFKELTKWWKESLASENVDDVKISNRLADTPCVVVTSKFGWSANMERIMQSQTLSDANKQAYMRGKRVLEINPRHPIIKELKERVASDPEDESVKETAQLMYQTALIESGFILNDPKDFAGRIYNSVKSSLKISPDAVAEEEVEAEETETSEDATEAKSDDLPGGGLNIEAEQVEDEAPTKDEL

SEQ ID NO: 129433 - DNA, 2109 bp, Glycine max
  CDS (1)..(2109)
atggcttcggagactgagacgttcgcttttcaggccgagatcaaccagctcctcagtctaatcatcaacaccttctacagcaacaaggagatctttcttcgtgagctcatcagcaatgcctctgatgctttggacaagattcgatttgagagtcttacagacaagagcaagcttgatgctcagccagagttgttcattcacattattcctgacaagaccaacaacacattgtctatcattgacagtggtattggcatgactaaggccgatttggtgaataacctcggtactattgcaaggtctgggaccaaggaattcatggaagccctggctgctggtgctgatgtgagcatgattggacagtttggtgttggtttctactcggcttatcttgtagctgacaaggttattgttaccacaaagcacaatgatgatgagcagtatgtctgggagtcccatgctggtggctcatttactgtgacaagggatacatctggtgagaaccttggtaggggaacaaagataactttgtttctcaaggaagatcaacttgagtatcttgaggaacgccgtctgaaggatttgataaagaagcattctgaattcattagctatccaatttctctttggattgagaagaccactgaaaaggagatttctgatgatgaggacgaggaagagaagaaggatgaggagggtaaagttgaagatgtggatgaagataaggagaaggaggagaagaaaaagaagaccattaaggaggtatctcatgagtggtcattggtgaacaagcagaagcctatttggatgaggaaacctgaagagatcacaaaagaagaatatgctgctttctacaagagtcttaccaatgattgggaagagcatttggctgttaagcacttttctgttgagggtcagctggagtttaaggctgtcctctttatccccaagagggcaccttttgatctttttgacactaagaagaagcctaacaacatcaaactgtatgtccgccgtgttttcatcatggacaactgtgaggagttgatgccagaatatcttagctttgttaagggtattgtggattctgaggatcttcctctcaacatttctagagaaatgctgcagcagaacaagatcctgaaagtcatcaggaagaacttggtcaagaagtgcattgagatgttctttgaaattgctgagaacaaggaagactataacaagttttatgaagccttctctaagaatctgaaacttggtattcatgaggattctcagaacaagacaaaacttgctgaattgctcaggtatcactccaccaagagtggtgatgagatgaccagcctcaaggactatgttaccaggatgaaggaagggcagaatgacatctactacattactggtgaaagcaagaaagctgttgagaattcccctttccttgaaaagcttaagaagaaggggttcgaggttctctacatggttgatgctattgacgagtatgctgttggtcagcttaaggaatttgagggaaagaagttggtctctgctactaaggaaggcctgaaacttgacgagagcgaagacgaaaagaaaaagaaggaagaattgaaggagaaatttgagggtctctgccatgtgatcaaggatgtgttgggtgacaaggtggagaaagttgtggtgtctgatcgtgttgtggattctccttgctgtctcgtgactggtgaatatgggtggacagccaacatggaaaggattatgaaagcacaggcattgagggacagcagcatggctggatacatgtcgagcaagaagaccatggagattaaccctgagaaccccatcatggatgaactgaggaagcgagctgatgctgacaagaatgacaaatctgtgaaggatctcgttctcctactctttgagactgctcttctaacttctgggttcagccttgatgatcccaacactttcggtaacaggattcacaggatgctgaagcttggactgagcattgatgaagatgctggtgaagcagatgctgacatgcctcctctcgaggacgccgatgctgatgccgatgctgagggtagcaagatggaagaagttgattaa

SEQ ID NO: 129434 - protein, 702 aa, Glycine max
MASETETFAFQAEINQLLSLIINTFYSNKEIFLRELISNASDALDKIRFESLTDKSKLDAQPELFIHIIPDKTNNTLSIIDSGIGMTKADLVNNLGTIARSGTKEFMEALAAGADVSMIGQFGVGFYSAYLVADKVIVTTKHNDDEQYVWESHAGGSFTVTRDTSGENLGRGTKITLFLKEDQLEYLEERRLKDLIKKHSEFISYPISLWIEKTTEKEISDDEDEEEKKDEEGKVEDVDEDKEKEEKKKKTIKEVSHEWSLVNKQKPIWMRKPEEITKEEYAAFYKSLTNDWEEHLAVKHFSVEGQLEFKAVLFIPKRAPFDLFDTKKKPNNIKLYVRRVFIMDNCEELMPEYLSFVKGIVDSEDLPLNISREMLQQNKILKVIRKNLVKKCIEMFFEIAENKEDYNKFYEAFSKNLKLGIHEDSQNKTKLAELLRYHSTKSGDEMTSLKDYVTRMKEGQNDIYYITGESKKAVENSPFLEKLKKKGFEVLYMVDAIDEYAVGQLKEFEGKKLVSATKEGLKLDESEDEKKKKEELKEKFEGLCHVIKDVLGDKVEKVVVSDRVVDSPCCLVTGEYGWTANMERIMKAQALRDSSMAGYMSSKKTMEINPENPIMDELRKRADADKNDKSVKDLVLLLFETALLTSGFSLDDPNTFGNRIHRMLKLGLSIDEDAGEADADMPPLEDADADADAEGSKMEEVD

SEQ ID NO: 129435 - DNA, 2100 bp, Glycine max
  CDS (1)..(2100)
atggcggagaccgagacgtttgctttccaggctgagatcaaccagctcctcagtctcatcatcaacaccttctactccaacaaggaaatcttccttcgtgaactcatcagcaacgcctctgatgctttggacaagattagatttgagagtttgacggacaagagcaagctcgatgctcagccagagttgttcattcatattattcccgacaagactaacaattcgctgaccattgttgacagtggcattggcatgaccaaagctgatttggtaaacaacttgggtacaattgctaggtctggtaccaaggaattcatggaagccttggctgctggtgctgatgttagtatgattggacagtttggtgtggggttctactctgcatatcttgttgccgaaaaggtcattgttacctccaagcacaatgatgatgagcagtacgtttgggagtcccaagctggaggttcattcactgtcaccagggatacctctggtgaggttcttggcaggggtactaagatcactctcttcctcaaggaggatcagctagagtaccttgaggagcgccggttgaaggatttgattaagaagcattctgagttcattagctacccaatttctctttgggttgagaagactaccgagaaggagatttctgacgatgaggatgaggaagagaagaaggatgaggagggtaaggtggaggatgttgatgaggagaaggagaaggaagaaaaaaaaaaaaagaagatcaaggaagtgtcacatgaatggtccttggtgaacaagcagaagcccatttggatgaggaagcctgaggagatcacaaaggaggagtatgctgctttctacaagagtcttaccaatgactgggaagaacatctggctgtcaagcacttctctgttgaggggcagttggagtttaaggctatactctttgatcccaagagggcaccttttgacctctttgacacaaggaagaagcctaacaacattaagctctatgtccgccgtgtctttattatggacaactgcgaggagttgattcctgagtatttgggctttgtcaagggtattgttgattctgaagatctcccactcaacatttcaagagaaatgttgcaacagaacaagatcttgaaggtcatccgtaagaacttggtcaagaagtgccttgagctcttctttgaaattgcagagaacaaggaggattacaacaagttctatgaggctttctctaagaacttaaagcttggtatccatgaggattcccagaacaagggaaagattgctgaattgctcaggtaccactccaccaagagtggtgatgagctgacaagcctcaaggattatgtgaccaggatgaaggaaggtcagagtgacatctactacatcaccggtgaaagcaagaaggctgttgagaactccccattcttggagaagttgaagaagaaagggtatgaggttctttacatggttgatgccattgatgaatatgctgttggtcagctcaaggaatttgagggcaagaagcttgtctctgccaccaaggaagggctcaagcttgacgagagtgaagatgagaagaagaagcaagaagagttgaaggagaagtttgacaacctctgcaaggtgatcaaggatgttttgggtgacaaggttgagaaggttgtggtctctgaccgcgttgtagattcaccatgctgtcttgtgactggcgaatacggttggaccgcaaacatggaaaggataatgaaggcccaagctctaagggacaacagcatggcagggtacatgtcaagcaagaagaccatggagatcaaccctgagaacccaatcatggaggagctcaggaagcgtgctgatgcagacaagaatgacaaatccgtgaaggaccttgttctgttgctgtttgagactgctcttctcacttctggtttcagccttgacgagcccaacacttttggaaacaggatccacagaatgttgaagcttggactgagcattgacgaggatgcaggtgaagctgatgctgaaatgcccccactggaggaggccgaggctgatgctgagggcagcaagatggaggaggttgattaa

SEQ ID NO: 129436 - protein, 699 aa, Glycine max
MAETETFAFQAEINQLLSLIINTFYSNKEIFLRELISNASDALDKIRFESLTDKSKLDAQPELFIHIIPDKTNNSLTIVDSGIGMTKADLVNNLGTIARSGTKEFMEALAAGADVSMIGQFGVGFYSAYLVAEKVIVTSKHNDDEQYVWESQAGGSFTVTRDTSGEVLGRGTKITLFLKEDQLEYLEERRLKDLIKKHSEFISYPISLWVEKTTEKEISDDEDEEEKKDEEGKVEDVDEEKEKEEKKKKKIKEVSHEWSLVNKQKPIWMRKPEEITKEEYAAFYKSLTNDWEEHLAVKHFSVEGQLEFKAILFDPKRAPFDLFDTRKKPNNIKLYVRRVFIMDNCEELIPEYLGFVKGIVDSEDLPLNISREMLQQNKILKVIRKNLVKKCLELFFEIAENKEDYNKFYEAFSKNLKLGIHEDSQNKGKIAELLRYHSTKSGDELTSLKDYVTRMKEGQSDIYYITGESKKAVENSPFLEKLKKKGYEVLYMVDAIDEYAVGQLKEFEGKKLVSATKEGLKLDESEDEKKKQEELKEKFDNLCKVIKDVLGDKVEKVVVSDRVVDSPCCLVTGEYGWTANMERIMKAQALRDNSMAGYMSSKKTMEINPENPIMEELRKRADADKNDKSVKDLVLLLFETALLTSGFSLDEPNTFGNRIHRMLKLGLSIDEDAGEADAEMPPLEEAEADAEGSKMEEVD

SEQ ID NO: 129437 - DNA, 2451 bp, Glycine max
  CDS (1)..(2451)
atgaggaagtggacggttgcttccgctctccttcttctctctctcctctttctctttgcagatcaaggtcgaaagtttcaggcgaatgccgagggagattccgacgagcttgtagatccacccaaggtggaggacaagatcggtgctgtgcctcatggcctttcaaccgattcagatgtcgtcaagagggaggcggagtcgatctcgaagagatctctccggagcaacgcggagaagtttgagttccaagcggaagtgtcgcggcttatggatatcatcatcaattctctctacagtaacaaggatatcttcctcagagagttgatttccaatgcttctgatgctttggacaagattaggttcctctccctcacggataaggaggtgttgggagaaggtgataacaccaagcttgatattcagattaagttggacaaggaaaaaaaaattctctcaattcgagacagaggtatcggtatgacgaaggaggatttgataaagaatttggggacaatagcgaaatctggaacttctgcatttgttgagaagatgcaaacaagtggagatctcaatctgattggccagtttggagtcggcttctactctgtttatcttgtggccgactatgtcgaagttattagcaagaataacgatgataagcagtatgtatgggaatcaaaagctgatggagcattcgctatttcagaagatacatggaatgaaccacttggacgaggaactgagattagattacacctcaaggaagaggctggggaatacttggaggagtctaaactgaaagaattggtgaagagatactctgaatttattaacttccctatctatatttgggcaagcaaagaagttgatgtggaggttcccgctgatgaagatgattccagtgatgaagaggattcatctgaaagcagctccaaggaggaaagcgaagatgaagatgctgataaaagtgaagatgaagaaaaaaagcctaagacaaagacagtgaaggaaacaacttatgagtgggaacttttaaatgatgtgaaagctatatggctgaggaatccaaaagaggttacagaagaagaatacaccaaattctaccactctcttgccaaggatttcagtgatgagaaacctttagcatggagtcatttcactgctgagggtgatgttgagttcaaggcagtcctgtttgtaccacctaaggcacctcaagatttatatgagagctattataacgcaaacaaatcgaacctgaagttgtatgttagacgtgtgttcatttcagatgaatttaatgaactgttgcccaagtacctaaactttttgctgggtcttgttgattctgacactttgccacttaatgtatcacgagaaatgcttcaacaacatagtagtctgaagacaatcaagaagaaacttattaggaaagcccttgatatgatccgcaggattgctgatgaggatcctgacgagtcaactgacaaagaaaagaaagaagatgcatcctctgacaatgatgagaagaaaggtcaatattctaagttctggaatgagtttggtaaatccattaaacttggtatcatcgaggatgccaccaacagaaatcgtttggcaaaactgctcagatttgagagcaccaagtctgagggtaaattgacatctctggatcagtacatatctagaatgaaaactgggcagaaggatatcttttacataactggaaccagcaaagaacaactggaaaactctcccttccttgagcggcttaagaagaaaaattttgaggttattttcttcacggatccagttgatgagtacttgatgcaatacctgatggattatgaagacaagaagttccaaaatgtgtccaaggagggtttgaaacttgggaaagattcaaaagacaaggaactgaaggaatcttttaaggatcttaccaagtggtggaaaactgctctttccaaagacaatgttgatgatgtgaagatttccaaccgattagataacactccttgtgtagtggtgacatcaaaatttggttggagtgctaacatggagagaatcatgcagtctcaaactttgtcagatgctagcaagcaagcatacatgcgcggcaagagggttcttgagatcaatcctaggcaccctattatcaaggagctccgagagagagtagtaaagaaccctgaggatgagggtgtgaagcatacagcacagctgatgtaccagactgcactctttgaaagcggcttcctgcttgatgatcccaaggattttgcttcccggatttatgattcagtgaagactagcctggacatcagtcctgaagcaacagttgaggaggaagatgacactgaagtagaggctgaaagtgacgcgaaagaagattcaaagcctgaaactgatgctgttaacgatgataatgatgtcaaggacgagttgtag

SEQ ID NO: 129438 - protein, 816 aa, Glycine max
MRKWTVASALLLLSLLFLFADQGRKFQANAEGDSDELVDPPKVEDKIGAVPHGLSTDSDVVKREAESISKRSLRSNAEKFEFQAEVSRLMDIIINSLYSNKDIFLRELISNASDALDKIRFLSLTDKEVLGEGDNTKLDIQIKLDKEKKILSIRDRGIGMTKEDLIKNLGTIAKSGTSAFVEKMQTSGDLNLIGQFGVGFYSVYLVADYVEVISKNNDDKQYVWESKADGAFAISEDTWNEPLGRGTEIRLHLKEEAGEYLEESKLKELVKRYSEFINFPIYIWASKEVDVEVPADEDDSSDEEDSSESSSKEESEDEDADKSEDEEKKPKTKTVKETTYEWELLNDVKAIWLRNPKEVTEEEYTKFYHSLAKDFSDEKPLAWSHFTAEGDVEFKAVLFVPPKAPQDLYESYYNANKSNLKLYVRRVFISDEFNELLPKYLNFLLGLVDSDTLPLNVSREMLQQHSSLKTIKKKLIRKALDMIRRIADEDPDESTDKEKKEDASSDNDEKKGQYSKFWNEFGKSIKLGIIEDATNRNRLAKLLRFESTKSEGKLTSLDQYISRMKTGQKDIFYITGTSKEQLENSPFLERLKKKNFEVIFFTDPVDEYLMQYLMDYEDKKFQNVSKEGLKLGKDSKDKELKESFKDLTKWWKTALSKDNVDDVKISNRLDNTPCVVVTSKFGWSANMERIMQSQTLSDASKQAYMRGKRVLEINPRHPIIKELRERVVKNPEDEGVKHTAQLMYQTALFESGFLLDDPKDFASRIYDSVKTSLDISPEATVEEEDDTEVEAESDAKEDSKPETDAVNDDNDVKDEL

SEQ ID NO: 129439 - DNA, 2382 bp, Glycine max
  CDS (1)..(2382)
atggctcctgtgccgagcagaaccgtggccacggcctctctcgcctcgctccttccttcttcccccttcgcgagggcttctcttctcagaagcgcttttctgccgccgcaaatagggcgcgacaggaagtgcttctcccccgccgcagggctgcggtggacgcagcggcgccaggggaggagggacgggctcgccgtgcggtgcgaggccgccgtggcggagaaggacgaggccaccggtgagaagtttgagtaccaggccgaggtgagtcgattgttggatttgattgttcacagtctgtatagccacaaggaagttttccttcgtgaacttgtcagtaatgctagtgatgctttggacaagttgagattcttaagtgtgactgagccttctttgcttggagatgctggagatctagagatacatatcaagtctgatccagacaatggaactattactataacagatactggtattggaatgactaaagaagagctcattgattgtcttggaactattgctcagagtggtacctcaaaatttttgaaggcacttaaggaaaacaaggatctaggagcagataatggtctgattggtcaatttggtgttggattctactcggcttttcttgttgctgagagggttgttgtttctacaaagagcccaagatcagataagcaatatgtgtgggaagcagaagctgacagtagctcttatgtgataaaagaagaaactgatcctgaaaaggttctgcgtcgtggtacacagattacactctatttaagagaggatgacaagtatgaattctcagagccaagcaggattcagggtttggtgaagaattactcacagttcgtttccttccccatctacacatggcaagaaaagtcaagaactgtggaggtggaagaggaggaagaacccaaagaaggggaagaaccaaaagaagagggtgagaaaaagaaggtgaaaaagactaaaactgagaagtactgggactgggaattggccaatgaaacaaagccaatatggatgcgcaacccaaaggaagttgaaaaggaggagtacaatgaattttataagaagacatttagtgaattcttagaaccacttgcacatactcacttcactactgagggtgaggttgagttcagaagtattctgtatgttccgggaatgggacctcttaacaatgaagaagtagtgaaccctaaaacaaagaacatacgcttgtatgttaagcgtgtattcatttcagatgattttgatggggagctgtttccacgttacctgagctttgtgaggggtgtggttgattcagatgatcttcctctcaatgtttctcgggagatccttcaagaaagcagaattgtaagaataatgagaaagagacttgtaaggaaggcatttgatatgattcaagaccttgctgaaagtgaaaataaagaggactacaaaaaattctgggagaactttggtaggttcataaaattaggttgcattgaagacactgcaaatcataagcgcattacaccactattgaggttttacacttccaaaagtgaggaggagcttaaaagcctagatgattatgttgaaaatatgggtgaaaaccaaaaggctatcttttatctagcaactgacagcttgaagagtgcaaagactgctccatttttggagaaattggttcaaaaagatattgaggttctttatttggtcgaacctattgatgaggttgccattcagaacctacagacatacaaagaaaataaatttgttgatatcagcaaggaggatttggaattaggtgatgaggacgaggtcaaagagagggaaaacaagcaagaatacaacctactctgtgattggataaaacaacaacttggtgacaaggtggccaaagttcaaatctcaaagcgcttgagttcatctccctgtgtgcttgtatcagggaagtttggttggtctgcaaacatggagagactaatgaaggcacaagcccttggggacactgcaagtttggagtttatgagggggaggagaatattggaaattaatacagatcacccaattatcaaagacttgagtgctgcctgcaagaatgcacctgacagcagcgaagctaagcgagcagttgacctcttatatgacacagcactaatttctagtggattttctcctgacagccctgctgagttgggaaataagatttatgaaatgatggccttggccttgggaggaagatggggtagatcagaagaagaggagggagatgcacctgttgaagctgctgattcaagcacaagtgaagaaagttcagagccagaagtttatgaaccttctgaagtcattgcagagagtgatccatggacaactgattag

SEQ ID NO: 129440 - protein, 793 aa, Glycine max
MAPVPSRTVATASLASLLPSSPFARASLLRSAFLPPQIGRDRKCFSPAAGLRWTQRRQGRRDGLAVRCEAAVAEKDEATGEKFEYQAEVSRLLDLIVHSLYSHKEVFLRELVSNASDALDKLRFLSVTEPSLLGDAGDLEIHIKSDPDNGTITITDTGIGMTKEELIDCLGTIAQSGTSKFLKALKENKDLGADNGLIGQFGVGFYSAFLVAERVVVSTKSPRSDKQYVWEAEADSSSYVIKEETDPEKVLRRGTQITLYLREDDKYEFSEPSRIQGLVKNYSQFVSFPIYTWQEKSRTVEVEEEEEPKEGEEPKEEGEKKKVKKTKTEKYWDWELANETKPIWMRNPKEVEKEEYNEFYKKTFSEFLEPLAHTHFTTEGEVEFRSILYVPGMGPLNNEEVVNPKTKNIRLYVKRVFISDDFDGELFPRYLSFVRGVVDSDDLPLNVSREILQESRIVRIMRKRLVRKAFDMIQDLAESENKEDYKKFWENFGRFIKLGCIEDTANHKRITPLLRFYTSKSEEELKSLDDYVENMGENQKAIFYLATDSLKSAKTAPFLEKLVQKDIEVLYLVEPIDEVAIQNLQTYKENKFVDISKEDLELGDEDEVKERENKQEYNLLCDWIKQQLGDKVAKVQISKRLSSSPCVLVSGKFGWSANMERLMKAQALGDTASLEFMRGRRILEINTDHPIIKDLSAACKNAPDSSEAKRAVDLLYDTALISSGFSPDSPAELGNKIYEMMALALGGRWGRSEEEEGDAPVEAADSSTSEESSEPEVYEPSEVIAESDPWTTD

SEQ ID NO: 129441 - DNA, 2451 bp, Glycine max
  CDS (1)..(2451)
atgaggaagtggacggttgcttccgctctccttcttctctctctcctctttctctttgcagatcaaggtcgaaagtttcaggcgaatgccgagggagattccgacgagcttgtagatcctccgaaggtggaggacaagatcggtgctgtgcctcatggcctttccaccgattcagatgtcgtcaagagggagtcggagtcgatctcgaagagatctctccggagcaatgcggagaagtttgagttccaagcggaagtgtcacggcttatggatatcatcatcaattctctctacagtaacaaggatatcttcctcagagagttgatttccaatgcttctgatgctttggacaagattaggttcctctccctcacggataaggaggtgttgggagaaggtgataacaccaagcttgatattcagattaagttggacaaggaaaagaaaattctctcaattcgagacagaggtatcggtatgacgaaggaggatttgataaagaatttggggacaatagcgaaatctggaacttctgcatttgttgagaagatgcaaacaagtggagatctcaatctgattgggcagtttggagtcggcttctactctgtttatcttgtggccgactatgtcgaagttattagcaagaataacgatgataagcagtatgtatgggaatcaaaagctgatggagcattcgctatttcagaagatacatggaatgaaccacttggacgaggaactgagattagattacacctcaaggaagaggctggggaatacttggaggagtctaaactgaaagaattggtgaagagatactctgaatttattaacttccctatctatatttgggcaagcaaagaagttgatgtggaggttcccgctgatgaagatgattccagtgatgaagaggattcatctgaaagcagctccaaggaggaaagcgaagatgaagatgctgataaaagtgaagacgaagaaaaaaagcctaagacaaagacagtgaaggaaacaacttatgagtgggaacttttaaatgatgtgaaagctatatggctgaggaatccaaaagaggttacagaagaagaatacaccaaattctaccactctcttgccaaggatttcagtgatgagaaacctttagcatggagtcatttcactgctgagggtgatgttgagttcaaggcagtcctgtttgtaccacctaaggcacctcaagatttatatgagagctattataacgcaaacaaatcgaacctgaagttgtatgttagacgtgtgttcatttcagatgaatttaatgaactgttgcccaagtacctaaactttttgctgggtcttgttgattctgacactttgccacttaatgtatcacgagaaatgcttcaacaacatagtagtctgaagacaatcaagaagaaacttattaggaaagcccttgatatgatccgcaggattgctgatgaggatcctgacgagtcaactgacaaagaaaagaaagaagatacgtcatctgacaataatgagaagaaaggtcaatattccaagttctggaatgagtttggtaaatccattaaacttggtatcatcgaggatgccaccaacagaaatcgtttggcaaaactgctcagatttgagagcaccaagtctgagggtaaattgacatctctggatcagtacatatctagaatgaaaactgggcagaaggatatcttttacataactggaaccagcaaagaacaactggaaaactctccattccttgagcggcttaagaagaaaaattttgaggttattttcttcacggatccagttgatgaatacttgatgcaatacctgatggattatgaagacaagaagttccaaaatgtgtccaaggagggtttgaaactcgggaaagattcaaaagacaaggaactgaaggaatccttcaaggaccttaccaagtggtggaaaactgctctttccaaagacaatgttgatgatgtgaagatttccaaccgattagataacactccttgtgtagtggtgacatcaaaatttggttggagtgctaacatggagagaatcatgcagtctcaaactttgtcagatgctagcaagcaagcatacatgcgcggcaagagggttcttgagatcaatcctaggcaccctattatcaaggagctccgagagagagtagtaaagaaccctgaggatgagggtgtgaagcatacagcacagctgatgtaccagactgcactctttgaaagcggcttcctgcttgatgatcccaaggattttgcttcccggatttatgattcagtgaagactagcctggacatcagtcctgaagcaacagttgaggaggaagatgacactgaagtagaggctgaaagtgacgcgaaagaagattcaaagcctgaaactgatgctgttaacgatgataatgatgtcaaggacgagttgtag

SEQ ID NO: 129442 - protein, 816 aa, Glycine max
MRKWTVASALLLLSLLFLFADQGRKFQANAEGDSDELVDPPKVEDKIGAVPHGLSTDSDVVKRESESISKRSLRSNAEKFEFQAEVSRLMDIIINSLYSNKDIFLRELISNASDALDKIRFLSLTDKEVLGEGDNTKLDIQIKLDKEKKILSIRDRGIGMTKEDLIKNLGTIAKSGTSAFVEKMQTSGDLNLIGQFGVGFYSVYLVADYVEVISKNNDDKQYVWESKADGAFAISEDTWNEPLGRGTEIRLHLKEEAGEYLEESKLKELVKRYSEFINFPIYIWASKEVDVEVPADEDDSSDEEDSSESSSKEESEDEDADKSEDEEKKPKTKTVKETTYEWELLNDVKAIWLRNPKEVTEEEYTKFYHSLAKDFSDEKPLAWSHFTAEGDVEFKAVLFVPPKAPQDLYESYYNANKSNLKLYVRRVFISDEFNELLPKYLNFLLGLVDSDTLPLNVSREMLQQHSSLKTIKKKLIRKALDMIRRIADEDPDESTDKEKKEDTSSDNNEKKGQYSKFWNEFGKSIKLGIIEDATNRNRLAKLLRFESTKSEGKLTSLDQYISRMKTGQKDIFYITGTSKEQLENSPFLERLKKKNFEVIFFTDPVDEYLMQYLMDYEDKKFQNVSKEGLKLGKDSKDKELKESFKDLTKWWKTALSKDNVDDVKISNRLDNTPCVVVTSKFGWSANMERIMQSQTLSDASKQAYMRGKRVLEINPRHPIIKELRERVVKNPEDEGVKHTAQLMYQTALFESGFLLDDPKDFASRIYDSVKTSLDISPEATVEEEDDTEVEAESDAKEDSKPETDAVNDDNDVKDEL

SEQ ID NO: 129443 - DNA, 2100 bp, Zea mays
  CDS (1)..(2100)
atggcgacagagacggagaccttcgcctttcaggctgagatcaaccagctgctctcactcatcatcaacaccttctattccaacaaggagatcttcctccgggagctcatttccaactcttccgatgcgttggacaaaatcaggttcgagagcctcactgacaagagcaagctcgatgcgcagccggagctgttcatccacattgtaccagacaaggcttcgaacacgctctccatcatcgacagcggcatcggcatgaccaagtccgaccttgtcaacaacctcggtaccatcgccaggtccgggaccaaggagttcatggaagcccttgctgctggcgctgatgtgtctatgattgggcagttcggtgtcggtttctactctgcctacctcgtcgccgagagggtcgtcgtgaccaccaagcataacgatgacgagcagtacgtgtgggaatcccaggcgggcgggtcgttcactgttactcgtgacacgtctggggagcagcttggcaggggtactaagattacacttttcctcaaggaagatcagttagaataccttgaggagcgtcgcctcaaggatttggtcaagaagcactctgagttcatcagctaccccatctccctgtggaccgaaaagacaacggagaaggagatttctgatgatgaagatgaggaagagaagaaagacgctgaggagggaaaggttgaggatgttgacgaggagaaggaagagaaagaaaaaaagaaaaagaagatcaaggaggtttctcacgagtggtcattgatcaacaagcagaagcccatctggatgaggaagccagaagagatcacaaaggaagaatacgctgccttctacaaaagcttgacaaatgactgggaggagcatctggctgtgaagcacttctctgtggagggtcagctggagttcaaggctgttctctttgttcctaagagggccccatttgatctcttcgacacaaggaagaagcaaaacaacatcaagctctatgtgcgcagggtgtttatcatggacaactgtgaggaactgatccctgagtggctgagctttgttaagggtattgttgactctgaggaccttcccctcaatatctcccgcgagactcttcagcagaacaagatcctgaaggtgatccggaagaaccttgtgaagaagtgtgtcgagctcttctttgagattgctgaaaacaaggaggactacaacaagttttatgaggctttctccaagaacctcaagcttggcatccatgaggactcgcagaacaggagcaagattgctgagcttctgagataccactccacgaagagcggtgatgagctgaccagcctcaaggattatgtgacgaggatgaaggagggacagaacgacatctactatatcactggtgagagcaagaaggcagtggagaactcccctttcctggagaagctgaagaagaggggctacgaggtcctgtacatggttgatgccattgatgagtatgctgttggtcagctcaaggagtttgagggcaagaagcttgtctcggccaccaaggagggtctgaagcttgatgagaccgaggatgagaagaagaggaaggaggagctgaaggagaagtttgagggtctgtgcaagatcatcaaggaggttctgggcgacaaggttgagaaggttgtggtgtctgaccgtgtcgtggactcaccgtgctgccttgtcactggtgagtatggctggacagccaacatggagaggatcatgaaggcgcaggccctgagggactctagcatgtcggggtacatgtcgagcaaaaagactatggaaatcaacccggagaacccaatcatggatgagctccgtaagcgcgccgaggctgacaagaatgacaagtcagtcaaggatcttgtgatgttgctgttcgagacagctctcctgacctccggcttcagcctggatgaccccaacacctttggcacccggatccatcgcatgctaaagctcggtctgagcatcgatgaggacgagtctgctgaggccgaagctgagatgcctccgctggaggatgacgccggcgaaagcaagatggaggaggtcgactaa

SEQ ID NO: 129444 - protein, 699 aa, Zea mays
MATETETFAFQAEINQLLSLIINTFYSNKEIFLRELISNSSDALDKIRFESLTDKSKLDAQPELFIHIVPDKASNTLSIIDSGIGMTKSDLVNNLGTIARSGTKEFMEALAAGADVSMIGQFGVGFYSAYLVAERVVVTTKHNDDEQYVWESQAGGSFTVTRDTSGEQLGRGTKITLFLKEDQLEYLEERRLKDLVKKHSEFISYPISLWTEKTTEKEISDDEDEEEKKDAEEGKVEDVDEEKEEKEKKKKKIKEVSHEWSLINKQKPIWMRKPEEITKEEYAAFYKSLTNDWEEHLAVKHFSVEGQLEFKAVLFVPKRAPFDLFDTRKKQNNIKLYVRRVFIMDNCEELIPEWLSFVKGIVDSEDLPLNISRETLQQNKILKVIRKNLVKKCVELFFEIAENKEDYNKFYEAFSKNLKLGIHEDSQNRSKIAELLRYHSTKSGDELTSLKDYVTRMKEGQNDIYYITGESKKAVENSPFLEKLKKRGYEVLYMVDAIDEYAVGQLKEFEGKKLVSATKEGLKLDETEDEKKRKEELKEKFEGLCKIIKEVLGDKVEKVVVSDRVVDSPCCLVTGEYGWTANMERIMKAQALRDSSMSGYMSSKKTMEINPENPIMDELRKRAEADKNDKSVKDLVMLLFETALLTSGFSLDDPNTFGTRIHRMLKLGLSIDEDESAEAEAEMPPLEDDAGESKMEEVD

SEQ ID NO: 129445 - DNA, 2043 bp, Zea mays
  CDS (1)..(2043)
atggcgagtgagacggagaccttcgcatttcaggctgagatcaaccagctgctctcactcatcatcaacaccttctactccaacaaggagatcttcctccgcgagcttatctccaactcttccgatgcgctggacaagatcaggttcgagagtctcactgacaagagcaagctcgatgcgcagcctgagcttttcatccaccttgtcccagacaaggccacgaacacgctctccatcatcgacagcggcatcggcatgaccaagtccgaccttgtcaacaacctcggtaccatcgccaggtccgggacgaaggagttcatggaagcccttgctgccggcgctgatgtgtccatgattggccagttcggcgtcggtttctactctgcctacctcgtcgccgatagagttgtcgtgaccaccaagcacaacgatgacgagcagtacgtgtgggagtcccaagcgggcgggtcgttcactgttactcgtgacacgtcacgggagcaccttgaggagcagcgccacaaagatctggtcaagaagcactctgagttcatcagctaccccatctccctgtggactgaaaagacaacagagaaggaaatttctgacgacgaagacgaggaagagaagaaagatgctgaggaaggaaaggttgaggatgttgatgagaaggaagagaaagaaaagaagaaaaagaagatcaaggaggtttctcatgagtggtcattggtcaacaagcagaagcccatatggatgaggaagccagaagaaatcacaaaagaagaatatgctgccttctataagagcttgacaaatgactgggaggagcatctggctgtgaagcacttctctgtggagggtcaactggagttcaaggctgttctctttgttcctaagagggccccctttgatctctttgacaccaagaagaagcaaaacaacatcaagctctatgtgcgcagggtgttcatcatggacaactgcgaagagctgatccctgagtggctgagcttcgttaagggtattgttgactctgaggaccttcccctcaatatctctcgtgagactcttcagcagaacaagatcctgaaggtgatcaggaagaaccttgtgaagaagtgtgttgagctcttctttgagattgctgagaacaaggaggactacaacaagttttacgaggctttctccaagaacctcaagcttggcatccacgaggactcgcagaacaggaccaagatcgccgagcttctgagataccactccaccaagagtggtgatgagctgaccagcctcaaggactacgtgaccaggatgaaggagggacagaatgacatatactatatcactggtgagagcaagaaggcagtggagaactcccccttccttgagaagctgaagaagaggggctatgaggttctgtacatggttgatgccattgacgagtatgctgttggtcagctcaaggagtttgagggcaagaagcttgtctctgccaccaaggagggtctgaagcttgatgagactgaggacgagaagaagaggaaggaggagctgaaggagaagtttgaggggctgtgcaaggtcatcaaggaggttctgggtgacaaagttgagaaggtggtggtgtctgatcgcgttgtggactcaccgtgctgccttgtgactggcgagtatggctggaccgccaacatggagaggatcatgaaggcacaggccctgagggactcgagcatggcgggctacatgtcgagcaaaaagacaatggagatcaacccagagaaccctatcatggatgagctccgcaagcgtgccgaggctgacaagaatgacaagtcagtcaaggatctcgtgatgctgctgttcgagactgctctcctgacctccggcttcagcctggatgaccccaacaccttcggcaaccggatccaccgcatgctcaaactcggtctgagcatcgatgaggacgagcctgttgaggcagaggctgagatgcctcagcttgaggacgacgctggtgaaagcaagatggaggaggtcgactaa

SEQ ID NO: 129446 - protein, 680 aa, Zea mays
MASETETFAFQAEINQLLSLIINTFYSNKEIFLRELISNSSDALDKIRFESLTDKSKLDAQPELFIHLVPDKATNTLSIIDSGIGMTKSDLVNNLGTIARSGTKEFMEALAAGADVSMIGQFGVGFYSAYLVADRVVVTTKHNDDEQYVWESQAGGSFTVTRDTSREHLEEQRHKDLVKKHSEFISYPISLWTEKTTEKEISDDEDEEEKKDAEEGKVEDVDEKEEKEKKKKKIKEVSHEWSLVNKQKPIWMRKPEEITKEEYAAFYKSLTNDWEEHLAVKHFSVEGQLEFKAVLFVPKRAPFDLFDTKKKQNNIKLYVRRVFIMDNCEELIPEWLSFVKGIVDSEDLPLNISRETLQQNKILKVIRKNLVKKCVELFFEIAENKEDYNKFYEAFSKNLKLGIHEDSQNRTKIAELLRYHSTKSGDELTSLKDYVTRMKEGQNDIYYITGESKKAVENSPFLEKLKKRGYEVLYMVDAIDEYAVGQLKEFEGKKLVSATKEGLKLDETEDEKKRKEELKEKFEGLCKVIKEVLGDKVEKVVVSDRVVDSPCCLVTGEYGWTANMERIMKAQALRDSSMAGYMSSKKTMEINPENPIMDELRKRAEADKNDKSVKDLVMLLFETALLTSGFSLDDPNTFGNRIHRMLKLGLSIDEDEPVEAEAEMPQLEDDAGESKMEEVD

SEQ ID NO: 129447 - DNA, 2451 bp, Glycine max
  CDS (1)..(2451)
atgaggaagtggacggttgcttccgctctccttcttctctctctcctctttctctttgcagatcaaggtcgaaagtttcaggcgaatgccgagggagattccgacgagcttgtagatccacccaaggtggaggacaagatcggtgctgtgcctcatggcctttcaaccgattcagatgtcgtcaagagggaggcggagtcgatctcgaagagatctctccggagcaacgcggagaagtttgagttccaagcggaagtgtcgcggcttatggatatcatcatcaattctctctacagtaacaaggatatcttcctcagagagttgatttccaatgcttctgatgctttggacaagattaggttcctctccctcacggataaggaggtgttgggagaaggtgataacaccaagcttgatattcagattaagttggacaaggaaaagaaaattctctcaattcgagacagaggtatcggtatgacgaaggaggatttgataaagaatttggggacaatagcgaaatctggaacttctgcatttgttgagaagatgcaaacaagtggagatctcaatctgattgggcagtttggagtcggcttctactctgtttatcttgtggccgactatgtcgaagttattagcaagaataacgatgataagcagtatgtatgggaatcaaaagctgatggagcattcgctatttcagaagatacatggaatgaaccacttggacgaggaactgagattagattacacctcaaggaagaggctggggaatacttggaggagtctaaactgaaagaattggtgaagagatactctgaatttattaacttccctatctatatttgggcaagcaaagaagttgatgtggaggttcccgctgatgaagatgattccagtgatgaagaggattcatctgaaagcagctccaaggaggaaagcgaagatgaagatgctgataaaagtgaagatgaagaaaaaaagcctaagacaaagacagtgaaggaaacaacttatgagtgggaacttttaaatgatgtgaaagctatatggctgaggaatccaaaagaggttacagaagaagaatacaccaaattctaccactctcttgccaaggatttcagtgatgagaaacctttagcatggagtcatttcactgctgagggtgatgttgagttcaaggcagtcctgtttgtaccacctaaggcacctcaagatttatatgagagctattataacgcaaacaaatcgaacctgaagttgtatgttagacgtgtgttcatttcagatgaatttaatgaactgttgcccaagtacctaaactttttgctgggtcttgttgattctgacactttgccacttaatgtatcacgagaaatgcttcaacaacatagtagtctgaagacaatcaagaagaaacttattaggaaagcccttgatatgatccgcaggattgctgatgaggatcctgacgagtcaactgacaaagaaaagaaagaagatgcatcctctgacaatgatgagaagaaaggtcaatattctaagttctggaatgagtttggtaaatccattaaacttggtatcatcgaggatgccaccaacagaaatcgtttggcaaaactgctcagatttgagagcaccaagtctgagggtaaattgacatctctggatcagtacatatctagaatgaaaactgggcagaaggatatcttttacataactggaaccagcaaagaacaactggaaaactctcccttccttgagcggcttaagaagaaaaattttgaggttattttcttcacggattcagttgatgagtacttgatgcaatacctgatggattatgaagacaagaagttccaaaatgtgtccaaggagggtttgaaacttgggaaagattcaaaagacaaggaactgaaggaatcttttaaggatcttaccaagtggtggaaaactgctctttccaaagacaatgttgatgatgtgaagatttccaaccgattagataacactccttgtgtagtggtgacatcaaaatttggttggagtgctaacatggagagaatcatgcagtctcaaactttgtcagatgctagcaagcaagcatacatgcgcggcaagagggttcttgagatcaatcctaggcaccctattatcaaggagctccgagagagagtagtaaagaaccctgaggatgagggtgtgaagcatacagcacagctgatgtaccagactgcactctttgaaagcggcttcctgcttgatgatcccaaggattttgcttcccggatttatgattcagtgaagactagcctggacatcagtcctgaagcaacagttgaggaggaagatgacactgaagtagaggctgaaagtgacgcgaaagaagattcaaagcctgaaactgatgctgttaacgatgataatgatgtcaaggacgagttgtag

SEQ ID NO: 129448 - protein, 816 aa, Glycine max
MRKWTVASALLLLSLLFLFADQGRKFQANAEGDSDELVDPPKVEDKIGAVPHGLSTDSDVVKREAESISKRSLRSNAEKFEFQAEVSRLMDIIINSLYSNKDIFLRELISNASDALDKIRFLSLTDKEVLGEGDNTKLDIQIKLDKEKKILSIRDRGIGMTKEDLIKNLGTIAKSGTSAFVEKMQTSGDLNLIGQFGVGFYSVYLVADYVEVISKNNDDKQYVWESKADGAFAISEDTWNEPLGRGTEIRLHLKEEAGEYLEESKLKELVKRYSEFINFPIYIWASKEVDVEVPADEDDSSDEEDSSESSSKEESEDEDADKSEDEEKKPKTKTVKETTYEWELLNDVKAIWLRNPKEVTEEEYTKFYHSLAKDFSDEKPLAWSHFTAEGDVEFKAVLFVPPKAPQDLYESYYNANKSNLKLYVRRVFISDEFNELLPKYLNFLLGLVDSDTLPLNVSREMLQQHSSLKTIKKKLIRKALDMIRRIADEDPDESTDKEKKEDASSDNDEKKGQYSKFWNEFGKSIKLGIIEDATNRNRLAKLLRFESTKSEGKLTSLDQYISRMKTGQKDIFYITGTSKEQLENSPFLERLKKKNFEVIFFTDSVDEYLMQYLMDYEDKKFQNVSKEGLKLGKDSKDKELKESFKDLTKWWKTALSKDNVDDVKISNRLDNTPCVVVTSKFGWSANMERIMQSQTLSDASKQAYMRGKRVLEINPRHPIIKELRERVVKNPEDEGVKHTAQLMYQTALFESGFLLDDPKDFASRIYDSVKTSLDISPEATVEEEDDTEVEAESDAKEDSKPETDAVNDDNDVKDEL

SEQ ID NO: 129449 - DNA, 2094 bp, Zea mays
  CDS (1)..(2094)
atggcctccgagacggagacgttcgccttccaggcggagatcaaccagctgctatcgctcatcatcaacaccttctactccaacaaggagatcttccttagggagctcatttcaaactcctccgatgccttggataagatcaggttcgagagtttgacggacaagagcaagctggatgcccagccggagctgttcatccacatcgtccctgacaaggccaacaataccctgacaatcattgacagtggcattggtatgaccaagtcagaccttgtgaacaaccttggtaccattgcacgatctggcacaaaagagttcatggaggcactggctgctggtgccgatgtgtccatgattggtcagtttggtgtcggtttctactcggcataccttgttgctgagagggttgtcgtgaccaccaagcacaacgatgatgagcagtatgtatgggagtctcaggccggtggctccttcactgtcacacgtgatacctctggggagcaacttggcaggggtacaaagatgaccctttacctcaaggatgatcagttggagtatcttgaggagcgccgcctgaaggatctgatcaagaagcactcagagttcattagctacccaatctctctctggattgagaagaccactgagaaggaaatttctgatgatgaggatgaggaagataagaaggacgaggagggcaaggttgaggatgttgatgagaaggaagaaaaggaaaagaagaagaagaagatcaaggaggtttctcatgagtggcaattggttaacaagcagaagcctatctggatgagaaagcctgaggagattaccaaagaagagtatgctgctttctacaagagcttgaccaacgactgggaggagcatctcgccgtgaagcacttctctgttgagggtcagcttgagttcaaggctgtcctgtttgtgccgaagagggccccctttgacctcttcgacaccaggaagaaaccgaacaacatcaagctctatgtgcgccgtgtcttcatcatggacaactgtgaggagctgatcccagagtggctgagctttgtcaagggcattgttgactctgaggaccttcccctcaacatctcccgtgagaccctccagcagaacaagatcctcaaggtcatccggaagaacctggtgaagaagtgcattgagctgttctttgagattgctgagaacaaggaggactacaacaagttctatgagtccttctcgaagaacctgaagcttggcatccatgaggactccacgaacaggaacaagattgcggagctgctgaggtaccactccaccaagagcggagatgagctgacaagcctcaaggactatgtgacgaggatgaaggagggccagaatgacatctactacatcactggcgagagcaagaaggccgtggagaactcccccttcctcgagaagctgaagaagaagggctatgaagtcctgtacatggtggacgccatcgatgagtatgctattggccagctcaaggagttcgagggcaagaagctcgtctcggccaccaaggagggcctgaagctcgacgagagtgaggatgagaagaagcggaaggaggagcttaaggagaagttcgagggcctgtgcaaggtgatcaaggaggtgctgggcgacaaggtggagaaggttgtggtctctgaccgcgtggtggactccccctgctgcctggtgacgggcgagtacggctggacggccaacatggagaggatcatgaaggcacaggcgctcagggactcgagcatgtctgggtacatgtcctccaagaagaccatggagatcaacccggacaacgccatcatggaggagctgcgcaagcgcgcggaggccgacaagaacgacaagtctgtcaaggaccttgtcatgcttctgttcgagacggcgctgctcacctcgggcttcagccttgacgaccccaacaccttcggcggccgcatccaccgcatgctcaagctgggcctcagcatcgacgaggacgaggctccggaggccgacaccgacatgcctcctctggaggatgacgctggcgagagcaagatggaggaggtcgactag

SEQ ID NO: 129450 - protein, 697 aa, Zea mays
MASETETFAFQAEINQLLSLIINTFYSNKEIFLRELISNSSDALDKIRFESLTDKSKLDAQPELFIHIVPDKANNTLTIIDSGIGMTKSDLVNNLGTIARSGTKEFMEALAAGADVSMIGQFGVGFYSAYLVAERVVVTTKHNDDEQYVWESQAGGSFTVTRDTSGEQLGRGTKMTLYLKDDQLEYLEERRLKDLIKKHSEFISYPISLWIEKTTEKEISDDEDEEDKKDEEGKVEDVDEKEEKEKKKKKIKEVSHEWQLVNKQKPIWMRKPEEITKEEYAAFYKSLTNDWEEHLAVKHFSVEGQLEFKAVLFVPKRAPFDLFDTRKKPNNIKLYVRRVFIMDNCEELIPEWLSFVKGIVDSEDLPLNISRETLQQNKILKVIRKNLVKKCIELFFEIAENKEDYNKFYESFSKNLKLGIHEDSTNRNKIAELLRYHSTKSGDELTSLKDYVTRMKEGQNDIYYITGESKKAVENSPFLEKLKKKGYEVLYMVDAIDEYAIGQLKEFEGKKLVSATKEGLKLDESEDEKKRKEELKEKFEGLCKVIKEVLGDKVEKVVVSDRVVDSPCCLVTGEYGWTANMERIMKAQALRDSSMSGYMSSKKTMEINPDNAIMEELRKRAEADKNDKSVKDLVMLLFETALLTSGFSLDDPNTFGGRIHRMLKLGLSIDEDEAPEADTDMPPLEDDAGESKMEEVD

SEQ ID NO: 129451 - DNA, 2097 bp, Zea mays
  CDS (1)..(2097)
atggcgagtgagacggagaccttcgcatttcaggctgagatcaaccagctgctctcactcatcatcaacaccttctactccaacaaggagatcttcctccgcgagcttatctccaactcttccgatgcgctggacaagatcaggttcgagagtctcactgacaagagcaagctcgatgcgcagcctgagcttttcatccaccttgtcccagacaaggccacgaacacgctctccatcatcgacagcggcatcggcatgaccaagtccgaccttgtcaacaacctcggtaccatcgccaggtccgggaccaaggagttcatggaagcccttgctgccggcgctgatgtgtccatgattggccagttcggcgtcggtttctactctgcctacctcgtcgccgatagagttgtcgtgaccaccaagcacaacgatgacgagcagtacgtgtgggagtcccaagcgggcgggtcgttcactgttactcgtgacacgtcaggggagcagcttggcaggggcactaagatcacactgttccttaaggacgatcagctggagtaccttgaggagcgtcgcctcaaggatctggtcaagaagcactctgagttcatcagctaccccatctccctgtggactgaaaagacaacagagaaggaaatttctgacgacgaagacgaggaagagaagaaagatgctgaggaaggaaaggttgaggatgttgatgagaaggaagagaaagaaaagaagaaaaagaagatcaaggaggtttctcatgagtggtcattggtcaacaagcagaagcccatatggatgaggaagccagaagaaatcacaaaagaagaatatgctgccttctataagagcttgacaaatgactgggaggagcatctggctgtgaagcacttctctgtggagggtcaactggagttcaaggctgttctctttgttcctaagagggccccctttgatctctttgacaccaagaagaagcaaaacaacatcaagctctatgtgcgcagggtgttcatcatggacaactgcgaagagctgatccctgagtggctgagcttcgttaagggtattgttgactctgaggaccttcccctcaatatctctcgtgagactcttcagcagaacaagatcctgaaggtgatcaggaagaaccttgtgaagaagtgtgttgagctcttctttgagattgctgagaacaaggaggactacaacaagttttacgaggctttctccaagaacctcaagcttggcatccacgaggactcgcagaacaggaccaagatcgccgagcttctgagataccactccaccaagagtggtgatgagctgaccagcctcaaggactacgtgaccaggatgaaggagggacagaatgacatatactatatcactggtgagagcaagaaggcagtggagaactcccccttccttgagaagctgaagaagaggggctatgaggttctgtacatggttgatgccattgacgagtatgctgttggtcagctcaaggagtttgagggcaagaagcttgtctctgccaccaaggagggtctgaagcttgatgagactgaggacgagaagaagaggaaggaggagctgaaggagaagtttgaggggctgtgcaaggtcatcaaggaggttctgggtgacaaagttgagaaggtggtggtgtctgatcgcgttgtggactcaccgtgctgccttgtgactggcgagtatggctggaccgccaacatggagaggatcatgaaggcacaggccctgagggactcgagcatggcgggctacatgtcgagcaaaaagacaatggagatcaacccagagaaccctatcatggatgagctccgcaagcgtgccgaggctgacaagaatgacaagtcagtcaaggatctcgtgatgctgctgttcgagactgctctcctgacctccggcttcagcctggatgaccccaacaccttcggcaaccggatccaccgcatgctcaaactcggtctgagcatcgatgaggacgagcctgttgaggcagaggctgagatgcctcagcttgaggacgacgctggtgaaagcaagatggaggaggtcgactaa

SEQ ID NO: 129452 - protein, 698 aa, Zea mays
MASETETFAFQAEINQLLSLIINTFYSNKEIFLRELISNSSDALDKIRFESLTDKSKLDAQPELFIHLVPDKATNTLSIIDSGIGMTKSDLVNNLGTIARSGTKEFMEALAAGADVSMIGQFGVGFYSAYLVADRVVVTTKHNDDEQYVWESQAGGSFTVTRDTSGEQLGRGTKITLFLKDDQLEYLEERRLKDLVKKHSEFISYPISLWTEKTTEKEISDDEDEEEKKDAEEGKVEDVDEKEEKEKKKKKIKEVSHEWSLVNKQKPIWMRKPEEITKEEYAAFYKSLTNDWEEHLAVKHFSVEGQLEFKAVLFVPKRAPFDLFDTKKKQNNIKLYVRRVFIMDNCEELIPEWLSFVKGIVDSEDLPLNISRETLQQNKILKVIRKNLVKKCVELFFEIAENKEDYNKFYEAFSKNLKLGIHEDSQNRTKIAELLRYHSTKSGDELTSLKDYVTRMKEGQNDIYYITGESKKAVENSPFLEKLKKRGYEVLYMVDAIDEYAVGQLKEFEGKKLVSATKEGLKLDETEDEKKRKEELKEKFEGLCKVIKEVLGDKVEKVVVSDRVVDSPCCLVTGEYGWTANMERIMKAQALRDSSMAGYMSSKKTMEINPENPIMDELRKRAEADKNDKSVKDLVMLLFETALLTSGFSLDDPNTFGNRIHRMLKLGLSIDEDEPVEAEAEMPQLEDDAGESKMEEVD

SEQ ID NO: 129453 - DNA, 2394 bp, Zea mays
  CDS (1)..(2394)
atggcgccggcgctgagcaggaccctggggccgtcgtcggtggccgcgctgcgcccgagcccgtcgtgccggggtctgttacgggccgcgctcgcgccgcagggcaggggcgcctccgcgaggtgcgcggtaggggtgagatgggaggcagccaggcggaggaggatggccggggtgaggtgcgacgccgccgtcgctgagaagcctgccggcgaggaggagacggccggcgagaagtacgagtaccaggctgaggttacccgcttgatggacttaattgtacacagtttatacagccacaaggaagtatttttacgtgagcttgtaagtaacgcgagtgatgcactggataagctgagattcctcagcgtaactgatccttctgtgttggctgatggcggtgagttggagataaggattaaacccgacctagaggcggggacaatcactatcacagatactggcattggaatgactaaagatgagctcaaagactgtcttggaaccattgcacaaagtggcacctcaaagtttttgaaggctctaaaggagaacaaagaccttggtgcagataatggactcattggtcaattcggtgttgggttctattccgctttccttgttgcagagagggttgtggtgtctactaaaagtccaaaggcagataagcagtatgtgtgggaagcagaggctgacagcagctcgtatgttatcaaggaagaaaatgatcctgagaaaatgctttcacgtggaacagaaattactctttatttgagagatgatgacaaatatgagtttgctgaccctaccaggattcaaggcttagttaagaactactcgcagtttgtctcattccccatatatacatggcaggaaaaatcaagaacagttgaggttgaagaggaggaagaatcaaaaggtgaagaggctactgaagaatcaaaaagtgaagaggctactgagggtgaaaagcagaaaaagaagaaaaccataactgagaagtactgggactgggaattggctaatgaaacgaagcccatatggatgaggaatccaaaggaagttgagaaaactgagtacaatgaattctacaagaagacatttaatgagtttctggatccgcttgcttacactcacttcaccactgagggagaggtggaatttcggagtgttctctatgtcccagggatggcgcctcttagtaatgaggagataatgaatccaaagaccaaaaacatccgattgtatgtcaaaagagtgttcatatcagatgattttgatggcgagctgtttcccagatacttgagctttgtgaaaggtgtagttgactcaaatgatctccctctcaatgtttctcgtgagatccttcaagaaagtagaattgtcagaattatgcgtaagagacttgttaggaagacatttgacatgattcaagagattgccgagaaggatggcaaagaggactacaacaaattctgggagagctttggcaagttcatgaagcttggttgcatcgaggacacaggaaaccacaagcgtcttgcaccattgctgagattctactcttccaaaaacgagacagatttaataagtctggaccagtatgtagaaaacatgcctgaaaaccagaaggcgatctattatatcgctactgatagtctccagagcgcgaagactgctcctttcttggaaaagctggttcagaaagatattgaggttctttacctcattgagccaattgatgaggttgccattcagaatttacagacatacaaagagaagaagtttgtagatattagcaaagaggatttggaattgggtgatgaagatgaggacaaggagaaagaaagcaagcaggagtatactcttctatgcgactggataaagcagcagcttggcgataaagtcgccaaggtccagatctcgaagcgactcagctcttctccatgtgttcttgtttctggtaaatttggctggtcagccaacatggaaaggctcatgaaggcacagacccttggtgacacatcaagcctggagttcatgagaggtagacgaatttttgagatcaaccctgaccatcctatcatcaaggacctgaacgctgcttgcaaaaacgagcctgaaagtactgaagccaagagggcggcagagttgctatacgaggctgcgctgatctccagtgggtatactcctgacagtccagcggagctgggaggcaagatctacgagatgatgaccatggccctcggcgggagatgggggaggttggagacagaggaggctgaagtcatcgccagcatcgacgacgcggactcgtctgaaggtgccacgaccacgacagaggtagtcgagccctctgaggtcaggacagagagcgacccgtggaaggattag

SEQ ID NO: 129454 - protein, 797 aa, Zea mays
MAPALSRTLGPSSVAALRPSPSCRGLLRAALAPQGRGASARCAVGVRWEAARRRRMAGVRCDAAVAEKPAGEEETAGEKYEYQAEVTRLMDLIVHSLYSHKEVFLRELVSNASDALDKLRFLSVTDPSVLADGGELEIRIKPDLEAGTITITDTGIGMTKDELKDCLGTIAQSGTSKFLKALKENKDLGADNGLIGQFGVGFYSAFLVAERVVVSTKSPKADKQYVWEAEADSSSYVIKEENDPEKMLSRGTEITLYLRDDDKYEFADPTRIQGLVKNYSQFVSFPIYTWQEKSRTVEVEEEEESKGEEATEESKSEEATEGEKQKKKKTITEKYWDWELANETKPIWMRNPKEVEKTEYNEFYKKTFNEFLDPLAYTHFTTEGEVEFRSVLYVPGMAPLSNEEIMNPKTKNIRLYVKRVFISDDFDGELFPRYLSFVKGVVDSNDLPLNVSREILQESRIVRIMRKRLVRKTFDMIQEIAEKDGKEDYNKFWESFGKFMKLGCIEDTGNHKRLAPLLRFYSSKNETDLISLDQYVENMPENQKAIYYIATDSLQSAKTAPFLEKLVQKDIEVLYLIEPIDEVAIQNLQTYKEKKFVDISKEDLELGDEDEDKEKESKQEYTLLCDWIKQQLGDKVAKVQISKRLSSSPCVLVSGKFGWSANMERLMKAQTLGDTSSLEFMRGRRIFEINPDHPIIKDLNAACKNEPESTEAKRAAELLYEAALISSGYTPDSPAELGGKIYEMMTMALGGRWGRLETEEAEVIASIDDADSSEGATTTTEVVEPSEVRTESDPWKD

SEQ ID NO: 129455 - DNA, 2100 bp, Zea mays
  CDS (1)..(2100)
atggcgacagagacggagaccttcgcctttcaggctgagatcaaccagctgctctcactcatcatcaacaccttctattccaacaaggagatcttcctccgggagctcatttccaactcttccgatgcgttggacaaaatcaggttcgagagcctcactgacaagagcaagctcgatgcgcagccggagctgttcatccacattgtaccagacaaggcttcgaacacgctctccatcatcgacagcggcatcggcatgaccaagtccgaccttgtcaacaacctcggtaccatcgccaggtccgggaccaaggagttcatggaagcccttgctgctggcgctgatgtgtctatgattgggcagttcggtgtcggtttctactctgcctacctcgtcgccgagagggtcgtcgtgaccaccaagcataacgatgacgagcagtacgtgtgggaatcccaggcgggcgggtcgttcactgttactcgtgacacgtctggggagcagcttggcaggggtactaagattacacttttcctcaaggaagatcagttagaataccttgaggagcgtcgcctcaaggatttggtcaagaagcactctgagttcatcagctaccccatctccctgtggaccgaaaagacaacggagaaggagatttctgatgatgaagatgaggaagagaagaaagacgctgaggagggaaaggttgaggatgttgacgaggagaaggaagagaaagaaaaaaagaaaaagaagatcaaggaggtttctcacgagtggtcattgatcaacaagcagaagcccatctggatgaggaagccagaagagatcacaaaggaagaatatgctgccttctacaaaagcttgacaaatgactgggaggagcatctggctgtgaagcacttctctgtggagggtcagctggagttcaaggctgttctctttgttcctaagagggccccgtttgatctcttcgacacaaggaagaagcaaaacaacatcaagctctatgtgcgcagggtgtttatcatggacaactgtgaggaactgatccctgagtggctgagttttgttaagggtattgttgactctgaggaccttcccctcaatatctcccgtgagactcttcagcagaacaagatcctgaaggtgatccggaagaaccttgtgaagaagtgtgttgagctcttctttgagattgctgaaaacaaggaggactacaacaagttttatgaggctttctccaagaacctcaagcttggcatccatgaggactcgcagaacaggggcaggattgctgagcttctgagataccactccacgaagagcggtgatgagctgaccagcctcaaggattatgtgacgaggatgaaggagggacagaacgacatctactatatcactggtgagagcaagaaggcagtggagaactcccctttcctggagaagctgaagaagaggggctacgaggtcctgtacatggttgatgccattgatgagtatgctgttggtcagctcaaggagtttgagggcaagaagcttgtctcggccaccaaggagggtctgaagcttgatgagaccgaggatgagaagaagaggaaggaggagctgaaggagaagtttgagggtctgtgcaagatcatcaaggaggttctgggcgacaaggttgagaaggttgtggtgtctgaccgtgttgtggactcaccgtgctgccttgtcactggtgagtatggctggacagccaacatggagaggatcatgaaggcgcaggccctgagggactctagcatgtcggggtacatgtcgagcaaaaagactatggaaatcaacccggagaacccaatcatggatgagctccgtaagcgcgccgaggctgacaagaatgacaagtcagtcaaggatcttgtgatgttgctgttcgagacagctctcctgacctccggcttcagcctggatgaccccaacacctttggcacccggatccatcgcatgctaaagctcggtctgagcatcgatgaggacaagtctgctgaggccgaagctgagatgcctccgctggaggatgacgccggcgaaagcaagatggaggaggtcgactaa

SEQ ID NO: 129456 - protein, 699 aa, Zea mays
MATETETFAFQAEINQLLSLIINTFYSNKEIFLRELISNSSDALDKIRFESLTDKSKLDAQPELFIHIVPDKASNTLSIIDSGIGMTKSDLVNNLGTIARSGTKEFMEALAAGADVSMIGQFGVGFYSAYLVAERVVVTTKHNDDEQYVWESQAGGSFTVTRDTSGEQLGRGTKITLFLKEDQLEYLEERRLKDLVKKHSEFISYPISLWTEKTTEKEISDDEDEEEKKDAEEGKVEDVDEEKEEKEKKKKKIKEVSHEWSLINKQKPIWMRKPEEITKEEYAAFYKSLTNDWEEHLAVKHFSVEGQLEFKAVLFVPKRAPFDLFDTRKKQNNIKLYVRRVFIMDNCEELIPEWLSFVKGIVDSEDLPLNISRETLQQNKILKVIRKNLVKKCVELFFEIAENKEDYNKFYEAFSKNLKLGIHEDSQNRGRIAELLRYHSTKSGDELTSLKDYVTRMKEGQNDIYYITGESKKAVENSPFLEKLKKRGYEVLYMVDAIDEYAVGQLKEFEGKKLVSATKEGLKLDETEDEKKRKEELKEKFEGLCKIIKEVLGDKVEKVVVSDRVVDSPCCLVTGEYGWTANMERIMKAQALRDSSMSGYMSSKKTMEINPENPIMDELRKRAEADKNDKSVKDLVMLLFETALLTSGFSLDDPNTFGTRIHRMLKLGLSIDEDKSAEAEAEMPPLEDDAGESKMEEVD

SEQ ID NO: 129457 - DNA, 25 bp, Artificial sequence
  primer
atggctggtgaaacttttgaatttc

SEQ ID NO: 129458 - DNA, 25 bp, Artificial sequence
  primer
ttaatcaacttcttccatctcggtg

SEQ ID NO: 129459 - protein, 764 aa, Artificial sequence
  consensus sequence
  Variant (2)..(4): Xaa in position 2 to 4 is any amino acid
  Variant (7)..(7): Xaa in position 7 is any amino acid
  Variant (9)..(11): Xaa in position 9 to 11 is any amino acid
  Variant (13)..(14): Xaa in position 13 to 14 is any amino acid
  Variant (16)..(16): Xaa in position 16 is any amino acid
  Variant (18)..(20): Xaa in position 18 to 20 is any amino acid
  Variant (35)..(35): Xaa in position 35 is any amino acid
  Variant (39)..(39): Xaa in position 39 is any amino acid
  Variant (42)..(42): Xaa in position 42 is any amino acid
  Variant (44)..(46): Xaa in position 44 to 46 is any amino acid
  Variant (47)..(47): Xaa in position 47 is any or no amino acid
  Variant (49)..(58): Xaa in position 49 to 58 is any amino acid
  Variant (59)..(63): Xaa in position 59 to 63 is any or no amino acid
  Variant (65)..(65): Xaa in position 65 is any amino acid
  Variant (66)..(66): Xaa in position 66 is any or no amino acid
  Variant (68)..(79): Xaa in position 68 to 79 is any amino acid
  Variant (81)..(81): Xaa in position 81 is any amino acid
  Variant (83)..(83): Xaa in position 83 is any amino acid
  Variant (88)..(95): Xaa in position 88 to 95 is any amino acid
  Variant (101)..(101): Xaa in position 101 is any amino acid
  Variant (105)..(106): Xaa in position 105 to 106 is any amino acid
  Variant (108)..(110): Xaa in position 108 to 110 is any amino acid
  Variant (112)..(115): Xaa in position 112 to 115 is any amino acid
  Variant (116)..(122): Xaa in position 116 to 122 is any or no amino acid
  Variant (124)..(124): Xaa in position 124 is any amino acid
  Variant (125)..(126): Xaa in position 125 to 126 is any or no amino acid
  Variant (137)..(139): Xaa in position 137 to 139 is any amino acid
  Variant (142)..(143): Xaa in position 142 to 143 is any amino acid
  Variant (145)..(145): Xaa in position 145 is any amino acid
  Variant (147)..(157): Xaa in position 147 to 157 is any amino acid
  Variant (158)..(164): Xaa in position 158 to 164 is any or no amino acid
  Variant (168)..(170): Xaa in position 168 to 170 is any amino acid
  Variant (172)..(181): Xaa in position 172 to 181 is any amino acid
  Variant (182)..(193): Xaa in position 182 to 193 is any or no amino acid
  Variant (197)..(198): Xaa in position 197 to 198 is any amino acid
  Variant (199)..(199): Xaa in position 199 is any or no amino acid
  Variant (201)..(213): Xaa in position 201 to 213 is any amino acid
  Variant (214)..(225): Xaa in position 214 to 225 is any or no amino acid
  Variant (227)..(227): Xaa in position 227 is any amino acid
  Variant (229)..(230): Xaa in position 229 to 230 is any amino acid
  Variant (232)..(233): Xaa in position 232 to 233 is any amino acid
  Variant (234)..(234): Xaa in position 234 is any or no amino acid
  Variant (237)..(243): Xaa in position 237 to 243 is any amino acid
  Variant (244)..(306): Xaa in position 244 to 306 is any or no amino acid
  Variant (308)..(312): Xaa in position 308 to 312 is any amino acid
  Variant (314)..(314): Xaa in position 314 is any amino acid
  Variant (316)..(323): Xaa in position 316 to 323 is any amino acid
  Variant (326)..(327): Xaa in position 326 to 327 is any amino acid
  Variant (331)..(333): Xaa in position 331 to 333 is any amino acid
  Variant (334)..(334): Xaa in position 334 is any or no amino acid
  Variant (336)..(339): Xaa in position 336 to 339 is any amino acid
  Variant (340)..(341): Xaa in position 340 to 341 is any or no amino acid
  Variant (343)..(345): Xaa in position 343 to 345 is any amino acid
  Variant (347)..(349): Xaa in position 347 to 349 is any amino acid
  Variant (352)..(353): Xaa in position 352 to 353 is any amino acid
  Variant (354)..(355): Xaa in position 354 to 355 is any or no amino acid
  Variant (357)..(360): Xaa in position 357 to 360 is any amino acid
  Variant (362)..(363): Xaa in position 362 to 363 is any amino acid
  Variant (365)..(366): Xaa in position 365 to 366 is any amino acid
  Variant (369)..(369): Xaa in position 369 is any amino acid
  Variant (372)..(379): Xaa in position 372 to 379 is any amino acid
  Variant (380)..(383): Xaa in position 380 to 383 is any or no amino acid
  Variant (388)..(388): Xaa in position 388 is any amino acid
  Variant (393)..(393): Xaa in position 393 is any amino acid
  Variant (395)..(399): Xaa in position 395 to 399 is any amino acid
  Variant (400)..(401): Xaa in position 400 to 401 is any or no amino acid
  Variant (403)..(404): Xaa in position 403 to 404 is any amino acid
  Variant (406)..(406): Xaa in position 406 is any amino acid
  Variant (408)..(409): Xaa in position 408 to 409 is any amino acid
  Variant (411)..(412): Xaa in position 411 to 412 is any amino acid
  Variant (415)..(415): Xaa in position 415 is any amino acid
  Variant (421)..(421): Xaa in position 421 is any amino acid
  Variant (425)..(425): Xaa in position 425 is any amino acid
  Variant (428)..(454): Xaa in position 428 to 454 is any amino acid
  Variant (455)..(478): Xaa in position 455 to 478 is any or no amino acid
  Variant (480)..(481): Xaa in position 480 to 481 is any amino acid
  Variant (483)..(485): Xaa in position 483 to 485 is any amino acid
  Variant (487)..(490): Xaa in position 487 to 490 is any amino acid
  Variant (492)..(492): Xaa in position 492 is any amino acid
  Variant (494)..(495): Xaa in position 494 to 495 is any amino acid
  Variant (498)..(499): Xaa in position 498 to 499 is any amino acid
  Variant (501)..(504): Xaa in position 501 to 504 is any amino acid
  Variant (505)..(506): Xaa in position 505 to 506 is any or no amino acid
  Variant (508)..(508): Xaa in position 508 is any amino acid
  Variant (512)..(520): Xaa in position 512 to 520 is any amino acid
  Variant (521)..(525): Xaa in position 521 to 525 is any or no amino acid
  Variant (528)..(529): Xaa in position 528 to 529 is any amino acid
  Variant (531)..(532): Xaa in position 531 to 532 is any amino acid
  Variant (535)..(537): Xaa in position 535 to 537 is any amino acid
  Variant (539)..(540): Xaa in position 539 to 540 is any amino acid
  Variant (544)..(554): Xaa in position 544 to 554 is any amino acid
  Variant (555)..(556): Xaa in position 555 to 556 is any or no amino acid
  Variant (559)..(560): Xaa in position 559 to 560 is any amino acid
  Variant (562)..(566): Xaa in position 562 to 566 is any amino acid
  Variant (567)..(568): Xaa in position 567 to 568 is any or no amino acid
  Variant (571)..(577): Xaa in position 571 to 577 is any amino acid
  Variant (580)..(584): Xaa in position 580 to 584 is any amino acid
  Variant (586)..(590): Xaa in position 586 to 590 is any amino acid
  Variant (592)..(597): Xaa in position 592 to 597 is any amino acid
  Variant (598)..(603): Xaa in position 598 to 603 is any or no amino acid
  Variant (605)..(606): Xaa in position 605 to 606 is any amino acid
  Variant (607)..(608): Xaa in position 607 to 608 is any or no amino acid
  Variant (610)..(624): Xaa in position 610 to 624 is any amino acid
  Variant (625)..(634): Xaa in position 625 to 634 is any or no amino acid
  Variant (636)..(639): Xaa in position 636 to 639 is any amino acid
  Variant (641)..(642): Xaa in position 641 to 642 is any amino acid
  Variant (643)..(643): Xaa in position 643 is any or no amino acid
  Variant (645)..(647): Xaa in position 645 to 647 is any amino acid
  Variant (649)..(650): Xaa in position 649 to 650 is any amino acid
  Variant (652)..(655): Xaa in position 652 to 655 is any amino acid
  Variant (656)..(656): Xaa in position 656 is any or no amino acid
  Variant (659)..(659): Xaa in position 659 is any amino acid
  Variant (660)..(661): Xaa in position 660 to 661 is any or no amino acid
  Variant (663)..(675): Xaa in position 663 to 675 is any amino acid
  Variant (677)..(681): Xaa in position 677 to 681 is any amino acid
  Variant (683)..(689): Xaa in position 683 to 689 is any amino acid
  Variant (690)..(699): Xaa in position 690 to 699 is any or no amino acid
  Variant (701)..(703): Xaa in position 701 to 703 is any amino acid
  Variant (705)..(705): Xaa in position 705 is any amino acid
  Variant (708)..(714): Xaa in position 708 to 714 is any amino acid
  Variant (716)..(728): Xaa in position 716 to 728 is any amino acid
  Variant (729)..(748): Xaa in position 729 to 748 is any or no amino acid
  Variant (750)..(752): Xaa in position 750 to 752 is any amino acid
  Variant (754)..(754): Xaa in position 754 is any amino acid
  Variant (756)..(757): Xaa in position 756 to 757 is any amino acid
  Variant (759)..(759): Xaa in position 759 is any amino acid
  Variant (760)..(760): Xaa in position 760 is any or no amino acid
  Variant (762)..(763): Xaa in position 762 to 763 is any amino acid
EXXXFQXEXXXLXXLXIXXXYSNKEIFLRELISNXSDAXDKXRXXXXLXXXXXXXXXXXXXXXLXXIXXXXXXXXXXXXIXDXGIGMXXXXXXXXLGTIAXSGTXXFXXXLXXXXXXXXXXXDXXXIGQFGVGFYSXXXVAXXVXVXXXXXXXXXXXXXXXXXXWESXXXGXXXXXXXXXXXXXXXXXXXXXXRGTXXXLXXXXXXXXXXXXXXXXXXXXXXXXXKXSXXIXXXPIXXXXXXXXXXXXXXXXXXXXXXXXXXXXXXXXXXXXXXXXXXXXXXXXXXXXXXXXXXXXXXXXXXXXXXNXXXXXWXRXXXXXXXXEYXXFYKXXXXDXXXXXXLXXXHXXXEGXXXXEXXXXLXXPXXAPXDLXXXXXXXXXXXXKLYVXRVFIXDXXXXXXXPXXLXFXXGXXDSXDLPLNXSREXLQXXXXXXXXXXXXXXXXXXXXXXXXXXXXXXXXXXXXXXXXXXXXXXXXXXXYXXFXXXFXXXXKXGXXEDXXNXXXXXXAXLLRXXXXXXXXXXXXXXSLXXYXXRMXXXQXXIYYXXXXXXXXXXXXXSPXXEXXXXXXXEVXXXXXXXDEXXXXXLXXXXXKXXXXXXXXXXXXKXXXXLXXXXXXXXXXXXXXXXXXXXXXXXXLXXXXKXXXLXXXVXXVXXXXXRLXXXPXXXXXXXXXXXXXMXXXXXAXXXXXXXXXXXXXXXXXKXXXEXNPXXXXXXXLXXXXXXXXXXXXXXXXXXXXXXXXXXXXXXXXXLXXXAXLXXGXXLXXP

SEQ ID NO: 129460 - protein, 39 aa, Artificial sequence
  protein pattern
  Variant (2)..(2): Xaa in position 2 is Ala, Ser or Thr
  Variant (4)..(4): Xaa in position 4 is Ala, Ile or Val
  Variant (5)..(5): Xaa in position 5 is any amino acid
  Variant (6)..(6): Xaa in position 6 is Gln or Arg
  Variant (7)..(8): Xaa in position 7 to 8 is Leu or Met
  Variant (9)..(9): Xaa in position 9 is any amino acid
  Variant (10)..(10): Xaa in position 10 is Ile or Leu
  Variant (11)..(11): Xaa in position 11 is Ile, Met or Val
  Variant (12)..(12): Xaa in position 12 is Ile or Val
  Variant (13)..(13): Xaa in position 13 is any amino acid
  Variant (14)..(14): Xaa in position 14 is Ala, Ser or Thr
  Variant (15)..(15): Xaa in position 15 is any amino acid
  Variant (17)..(18): Xaa in position 17 to 18 is any amino acid
  Variant (19)..(19): Xaa in position 19 is Lys or Arg
  Variant (20)..(20): Xaa in position 20 is Asp or Glu
  Variant (21)..(21): Xaa in position 21 is any amino acid
  Variant (27)..(27): Xaa in position 27 is Ile or Val
  Variant (30)..(30): Xaa in position 30 is any or no amino acid
  Variant (32)..(32): Xaa in position 32 is any or no amino acid
  Variant (35)..(35): Xaa in position 35 is any amino acid
  Variant (38)..(38): Xaa in position 38 is Ile or Leu
QXEXXXXXXXXXXXXYXXXXXFLRELXSNXSXDAXDKXR

SEQ ID NO: 129461 - protein, 40 aa, Artificial sequence
  protein pattern
  Variant (2)..(2): Xaa in position 2 is any amino acid
  Variant (3)..(3): Xaa in position 3 is Trp or Tyr
  Variant (4)..(4): Xaa in position 4 is Leu or Met
  Variant (5)..(5): Xaa in position 5 is any amino acid
  Variant (6)..(6): Xaa in position 6 is Phe or Met
  Variant (7)..(7): Xaa in position 7 is Ile, Leu, Met or Val
  Variant (8)..(8): Xaa in position 8 is any amino acid
  Variant (10)..(11): Xaa in position 10 to 11 is Ile, Leu or Val
  Variant (14)..(14): Xaa in position 14 is any amino acid
  Variant (20)..(20): Xaa in position 20 is Ile, Leu or Val
  Variant (24)..(24): Xaa in position 24 is any amino acid
  Variant (27)..(31): Xaa in position 27 to 31 is any amino acid
  Variant (32)..(39): Xaa in position 32 to 39 is any or no amino acid
PXXXXXXXGXXDSXDLPLNXSREXLQXXXXXXXXXXXXXK

SEQ ID NO: 129462 - protein, 41 aa, Artificial sequence
  protein pattern
  Variant (2)..(13): Xaa in position 2 to 13 is any amino acid
  Variant (14)..(15): Xaa in position 14 to 15 is any or no amino acid
  Variant (17)..(17): Xaa in position 17 is any amino acid
  Variant (19)..(19): Xaa in position 19 is Ile, Leu or Val
  Variant (22)..(22): Xaa in position 22 is Ala, Asp, Glu, Asn, Ser or Thr
  Variant (23)..(23): Xaa in position 23 is Glu, His, Lys or Arg
  Variant (24)..(24): Xaa in position 24 is any amino acid
  Variant (25)..(25): Xaa in position 25 is Asp, Glu, Gly or Gln
  Variant (26)..(26): Xaa in position 26 is Ala, Ile, Leu or Val
  Variant (27)..(29): Xaa in position 27 to 29 is any amino acid
  Variant (35)..(35): Xaa in position 35 is any amino acid
  Variant (39)..(40): Xaa in position 39 to 40 is any amino acid
IXXXXXXXXXXXXXXDXGXGMXXXXXXXXLGTIAXSGTXXF

SEQ ID NO: 129463 - protein, 25 aa, Artificial sequence
  protein pattern
  Variant (11)..(11): Xaa in position 11 is any amino acid
  Variant (12)..(12): Xaa in position 12 is Phe or Tyr
  Variant (13)..(13): Xaa in position 13 is Ile, Leu or Val
  Variant (16)..(17): Xaa in position 16 to 17 is any amino acid
  Variant (19)..(19): Xaa in position 19 is any amino acid
  Variant (21)..(21): Xaa in position 21 is any amino acid
  Variant (22)..(22): Xaa in position 22 is Ser or Thr
  Variant (23)..(23): Xaa in position 23 is Lys or Arg
  Variant (24)..(24): Xaa in position 24 is any amino acid
  Variant (25)..(25): Xaa in position 25 is Ala, Asn or Pro
IGQFGVGFYSXXXVAXXVXVXXXXX

SEQ ID NO: 129464 - protein, 22 aa, Artificial sequence
  protein pattern
  Variant (2)..(2): Xaa in position 2 is any amino acid
  Variant (4)..(6): Xaa in position 4 to 6 is any amino acid
  Variant (7)..(7): Xaa in position 7 is Asp or Glu
  Variant (8)..(8): Xaa in position 8 is Ile, Leu or Val
  Variant (9)..(10): Xaa in position 9 to 10 is any amino acid
  Variant (11)..(11): Xaa in position 11 is Ala, Asp, Glu, Gln or Thr
  Variant (14)..(15): Xaa in position 14 to 15 is any amino acid
  Variant (18)..(21): Xaa in position 18 to 21 is any or no amino acid
WXRXXXXXXXXEYXXFYXXXXK

SEQ ID NO: 129465 - protein, 19 aa, Artificial sequence
  protein pattern
  Variant (2)..(2): Xaa in position 2 is any or no amino acid
  Variant (4)..(4): Xaa in position 4 is Ile, Leu or Val
  Variant (5)..(5): Xaa in position 5 is any amino acid
  Variant (6)..(6): Xaa in position 6 is Asn or Arg
  Variant (8)..(10): Xaa in position 8 to 10 is any amino acid
  Variant (12)..(13): Xaa in position 12 to 13 is any amino acid
  Variant (14)..(14): Xaa in position 14 is Ile, Leu, Met or Val
  Variant (15)..(15): Xaa in position 15 is Phe or Tyr
  Variant (16)..(16): Xaa in position 16 is any amino acid
  Variant (17)..(17): Xaa in position 17 is Ile, Leu, Met or Val
  Variant (18)..(18): Xaa in position 18 is any amino acid
  Variant (19)..(19): Xaa in position 19 is Ala, Gly, Ser or Thr
DXYXXXMXXXQXXXXXXXX

SEQ ID NO: 129466 - protein, 21 aa, Artificial sequence
  protein pattern
  Variant (2)..(3): Xaa in position 2 to 3 is any amino acid
  Variant (4)..(4): Xaa in position 4 is Ala or Val
  Variant (7)..(8): Xaa in position 7 to 8 is any amino acid
  Variant (9)..(9): Xaa in position 9 is Ala, Glu or Thr
  Variant (10)..(10): Xaa in position 10 is Phe or Tyr
  Variant (11)..(11): Xaa in position 11 is any amino acid
  Variant (12)..(12): Xaa in position 12 is Ala, Glu, Asn, Gln, Ser or Thr
  Variant (13)..(13): Xaa in position 13 is Ile, Leu, Met or Val
  Variant (15)..(15): Xaa in position 15 is Phe or Tyr
  Variant (16)..(16): Xaa in position 16 is any amino acid
  Variant (18)..(20): Xaa in position 18 to 20 is any amino acid
HXXXEGXXXXXXXLXXPXXXP

SEQ ID NO: 129467 - protein, 26 aa, Artificial sequence
  protein pattern
  Variant (2)..(2): Xaa in position 2 is any or no amino acid
  Variant (4)..(9): Xaa in position 4 to 9 is any amino acid
  Variant (10)..(10): Xaa in position 10 is any or no amino acid
  Variant (13)..(13): Xaa in position 13 is Trp or Tyr
  Variant (14)..(15): Xaa in position 14 to 15 is any amino acid
  Variant (16)..(16): Xaa in position 16 is Gly, Asn, Gln, Ser or Thr
  Variant (17)..(17): Xaa in position 17 is any amino acid
  Variant (18)..(18): Xaa in position 18 is Ile, Leu or Met
  Variant (19)..(19): Xaa in position 19 is any amino acid
  Variant (20)..(20): Xaa in position 20 is Asp or Glu
  Variant (21)..(21): Xaa in position 21 is Phe or Tyr
  Variant (22)..(22): Xaa in position 22 is any amino acid
  Variant (23)..(23): Xaa in position 23 is Asp, Glu, Gly or Ser
  Variant (25)..(25): Xaa in position 25 is any amino acid
  Variant (26)..(26): Xaa in position 26 is Phe or Leu
EXVXXXXXXXDEXXXXXXXXXXXKXX

SEQ ID NO: 129468 - protein, 12 aa, Artificial sequence
  protein pattern
  Variant (4)..(4): Xaa in position 4 is any or no amino acid
  Variant (6)..(6): Xaa in position 6 is any or no amino acid
  Variant (10)..(10): Xaa in position 10 is any amino acid
  Variant (12)..(12): Xaa in position 12 is Asp, Glu, Asn, Gln or Ser
LYVXRXVFIXDX

SEQ ID NO: 129469 - protein, 19 aa, Artificial sequence
  protein pattern
  Variant (2)..(2): Xaa in position 2 is Trp or Tyr
  Variant (3)..(3): Xaa in position 3 is any amino acid
  Variant (4)..(4): Xaa in position 4 is Ala, Glu, Asn, Gln or Ser
  Variant (5)..(5): Xaa in position 5 is Phe or Tyr
  Variant (6)..(6): Xaa in position 6 is Ala, Gly or Ser
  Variant (7)..(8): Xaa in position 7 to 8 is any amino acid
  Variant (9)..(9): Xaa in position 9 is Ile, Leu, Met or Val
  Variant (11)..(11): Xaa in position 11 is any amino acid
  Variant (13)..(14): Xaa in position 13 to 14 is any amino acid
  Variant (17)..(17): Xaa in position 17 is any amino acid
  Variant (18)..(18): Xaa in position 18 is Ala, Glu, Gly, Asn, Gln, Ser or Thr
FXXXXXXXXKXGXXEDXXN

SEQ ID NO: 129470 - DNA, 1161 bp, Saccharomyces cerevisiae
  CDS (1)..(1161)
atgcgaattgcccgaatagtgaagcatttgtatcaaagtgatgaccgctctttcctttcaaaccatgtattgaggcccttttggagaaagtttgcgactatttttccactatggatggcacccaatttggtaacattattagggttctgctttattatatttaatgtgttaacaacactttactacgacccgtattttgaccaggaatcgccacgttggacctatttctcctatgctataggtttgtttttataccagacttttgatgcttgcgatggaatgcatgcacgtcgtacaggccagcagggccctctaggggaattgtttgaccattgtattgattcaatcaacacaactttgtcaatgattcctgtctgttccatgacaggtatgggttacacatatatgaccattttttcacaatttgcgatattgtgcagcttttacttgagcacatgggaagagtatcacacccacaaactttatctagctgaattctgcggtcctgttgaaggtattattgttttgtgtatttctttcattgcagtcggaatttacggacctcaaaccatctggcacactaaagtagcgcaattctcctggcaagattttgtgtttgatgttgaaaccgttcatctaatgtatgcattttgcacaggagcattaatatttaatattgtcacagctcatacaaacgtcgtgaggtattacgaatcccaatcgaccaaatctgcaactccaagcaaaactgcagaaaatataagtaaagcagtaaatggtcttttgccattctttgcatacttctcttcaatttttaccttagtcttgattcaaccatcttttatttctttggctttaattttatcgattggtttttcggttgcctttgtagttggtcggatgattattgctcatttaaccatgcaaccattcccaatggtcaatttcccatttttaatcccaactatccaattggtattgtacgcatttatggtttacgttttagattaccaaaaaggaagcatagtttctgcattggtttggatgggactcggcttgacacttgctatccatggaatgttcatcaatgatattatctatgacatcactacctttctggatatttacgctttatcaattaaacatccaaaagaaatttag

SEQ ID NO: 129471 - protein, 386 aa, Saccharomyces cerevisiae
MRIARIVKHLYQSDDRSFLSNHVLRPFWRKFATIFPLWMAPNLVTLLGFCFIIFNVLTTLYYDPYFDQESPRWTYFSYAIGLFLYQTFDACDGMHARRTGQQGPLGELFDHCIDSINTTLSMIPVCSMTGMGYTYMTIFSQFAILCSFYLSTWEEYHTHKLYLAEFCGPVEGIIVLCISFIAVGIYGPQTIWHTKVAQFSWQDFVFDVETVHLMYAFCTGALIFNIVTAHTNVVRYYESQSTKSATPSKTAENISKAVNGLLPFFAYFSSIFTLVLIQPSFISLALILSIGFSVAFVVGRMIIAHLTMQPFPMVNFPFLIPTIQLVLYAFMVYVLDYQKGSIVSALVWMGLGLTLAIHGMFINDIIYDITTFLDIYALSIKHPKEI

SEQ ID NO: 129472 - DNA, 1014 bp, Arabidopsis thaliana
  CDS (1)..(1014)
atggggttcatgtttcttctcacatctgctctcttaggctatatatactcacctaagttggattctccacctcctcgatgggtccactttgcacacggcttacttctgtttttatatcagacatttgatgcggttgatgggaagcaagcacgaagaacaaattcatctagcccactaggagagctttttgaccatggttgcgatgcacttggctgtgcgttagaaacaatggcatatgggagtactgctatgtgtggaagagatactttctggttttgggttatttctgctgttccattttttggagcaacatgggaacactattttaccaatacgcttactcttccggtagtcaatggtcctacagaaggtcttgcacttatatactgtggccatttcttcacagccattgttggtgcggagtggtgggctcagccgtttgggaagtcgattcctttgtttagttgggttccgtttttgaacgagatgcaaatgtccagaataatactattctccatgattttctttgctgttataccaacccttgcaatcaacacgtctaatgtttacaaagttgtacattcaagaaatggaagcatgcttctagcattagctatgctatatcccttagtcacgttaattgcaggagttctgatttgggattacttgtctccaattgatctcataagaaactaccctcacttagttgtgttgggaactggtcttgcatttggattccttgtgggaagaatgattctagctcacttatgtgacgaaccaaaaggattgaaaacaaacatgtgtatgtcactgctttaccttccatttgcactagcaaatgctctaaccgctagactcaacgacggggttcctcttgtggatgagttttgggttcttcttggatattgtatattcacattgtcactatatgcgcattttgcaacttcagtcattcatgagatcacaactgcacttggaatctactgcttcaggattactcggaaagaagcttga

SEQ ID NO: 129473 - protein, 337 aa, Arabidopsis thaliana
MGFMFLLTSALLGYIYSPKLDSPPPRWVHFAHGLLLFLYQTFDAVDGKQARRTNSSSPLGELFDHGCDALGCALETMAYGSTAMCGRDTFWFWVISAVPFFGATWEHYFTNTLTLPVVNGPTEGLALIYCGHFFTAIVGAEWWAQPFGKSIPLFSWVPFLNEMQMSRIILFSMIFFAVIPTLAINTSNVYKVVHSRNGSMLLALAMLYPLVTLIAGVLIWDYLSPIDLIRNYPHLVVLGTGLAFGFLVGRMILAHLCDEPKGLKTNMCMSLLYLPFALANALTARLNDGVPLVDEFWVLLGYCIFTLSLYAHFATSVIHEITTALGIYCFRITRKEA

SEQ ID NO: 129474 - DNA, 1170 bp, Arabidopsis thaliana
  CDS (1)..(1170)
atgggttacataggagctcatggtgtagcagctcttcataggtacaaatacagtggagtggatcactcttatcttgccaaatacgtcctccaacctttttggactcgatttgtcaaagtcttccctctatggatgccaccaaacatgataacgcttatggggtttatgtttctagtcacttcctccctgctaggctatatatattcacctcagttggattctcctcctccacgatgggttcacttcgcacatggtttacttctcttcttgtatcagacatttgatgcggttgatgggaagcaagcaagaaggacaaattcctctagccccctaggagagctcttcgatcatggttgtgacgcgcttgcttgtgcgtttgaagccatggcatttggaagcactgcaatgtgtggaagagatactttctggttctgggttatttcagctattccattttatggagctacatgggaacactatttcaccaacacacttattcttccggttatcaatgggcctacagaggggcttgcacttatatttgtcagccacttcttcacagccatcgtcggtgctgaatggtgggctcagcagttagggcagtcaataccattgtttagttgggtgccatttgtgaatgagattcaaacttctagagcagtgctatacatgatgatcgcttttgctgttataccaaccgttgcattcaatgtaacaaatgtctacaaagtcgttcgatcaagaaacgggagcatggtgttagcgttagctatgctgtatcccttcgttgtcttacttggaggagttttgatatgggattacttgtctccaatcaatctcatagcaacatatcctcacttagttgtactcggaactggacttgcatttggatttttagtgggaagaatgattcttgctcacttgtgtgatgagcctaaaggactaaaaacaaacatgtgcatgtcactactctatcttccctttgcacttgcaaatgcgctaaccgcaagattgaatgctggggttcctctagtcgacgaattatgggttcttcttggctactgcatattcacagtgtcattatacttgcactttgcaacatcagtcatccatgagatcactgaggcccttggaatctactgctttaggatcacgcgtaaagaagcttga

SEQ ID NO: 129475 - protein, 389 aa, Arabidopsis thaliana
MGYIGAHGVAALHRYKYSGVDHSYLAKYVLQPFWTRFVKVFPLWMPPNMITLMGFMFLVTSSLLGYIYSPQLDSPPPRWVHFAHGLLLFLYQTFDAVDGKQARRTNSSSPLGELFDHGCDALACAFEAMAFGSTAMCGRDTFWFWVISAIPFYGATWEHYFTNTLILPVINGPTEGLALIFVSHFFTAIVGAEWWAQQLGQSIPLFSWVPFVNEIQTSRAVLYMMIAFAVIPTVAFNVTNVYKVVRSRNGSMVLALAMLYPFVVLLGGVLIWDYLSPINLIATYPHLVVLGTGLAFGFLVGRMILAHLCDEPKGLKTNMCMSLLYLPFALANALTARLNAGVPLVDELWVLLGYCIFTVSLYLHFATSVIHEITEALGIYCFRITRKEA

SEQ ID NO: 129476 - DNA, 1170 bp, Arabidopsis thaliana
  CDS (1)..(1170)
atgggttacataggagctcatggtgtagctgctcttaagaaacacaaatacagtggtgttgatcactcttatcttgccaaatatgttctccaacctttttggaaccgttttgtcaaaatcttccctctatggatgccccccaacatgataacacttatggggttcatgtttcttctcacatctgctctcttaggctatatatactcacctaagttggattctccacctcctcgatgggtccactttgcacacggcttacttctgtttttatatcagacatttgatgcggttgatgggaagcaagcacgaagaacaaattcatctagcccactaggagagctttttgaccatggttgcgatgcacttggctgtgcgttagaaacaatggcatatgggagtactgctatgtgtggaagagatactttctggttttgggttatttctgctgttccattttttggagcaacatgggaacactattttaccaatacgcttactcttccggtagtcaatggtcctacagaaggtcttgcacttatatactgtggccatttcttcacagccattgttggtgcggagtggtgggctcagccgtttgggaagtcgattcctttgtttagttgggttccgtttttgaacgagatgcaaatgtccagaataatactattctccatgattttctttgctgttataccaacccttgcaatcaacacgtctaatgtttacaaagttgtacattcaagaaatggaagcatgcttctagcattagctatgctatatcccttagtcacgttaattgcaggagttctgatttgggattacttgtctccaattgatctcataagaaactaccctcacttagttgtgttgggaactggtcttgcatttggattccttgtgggaagaatgattctagctcacttatgtgacgaaccaaaaggattgaaaacaaacatgtgtatgtcactgctttaccttccatttgcactagcaaatgctctaaccgctagactcaacgacggggttcctcttgtggatgagttttgggttcttcttggatattgtatattcacattgtcactatatgcgcattttgcaacttcagtcattcatgagatcacaactgcacttggaatctactgcttcaggattactcggaaagaagcttga

SEQ ID NO: 129477 - protein, 389 aa, Arabidopsis thaliana
MGYIGAHGVAALKKHKYSGVDHSYLAKYVLQPFWNRFVKIFPLWMPPNMITLMGFMFLLTSALLGYIYSPKLDSPPPRWVHFAHGLLLFLYQTFDAVDGKQARRTNSSSPLGELFDHGCDALGCALETMAYGSTAMCGRDTFWFWVISAVPFFGATWEHYFTNTLTLPVVNGPTEGLALIYCGHFFTAIVGAEWWAQPFGKSIPLFSWVPFLNEMQMSRIILFSMIFFAVIPTLAINTSNVYKVVHSRNGSMLLALAMLYPLVTLIAGVLIWDYLSPIDLIRNYPHLVVLGTGLAFGFLVGRMILAHLCDEPKGLKTNMCMSLLYLPFALANALTARLNDGVPLVDEFWVLLGYCIFTLSLYAHFATSVIHEITTALGIYCFRITRKEA

SEQ ID NO: 129478 - DNA, 1161 bp, Schizosaccharomyces pombe 972h-
  CDS (1)..(1161)
atgcagttaaaccggaagcagttaaagaatcttcataactataaatatagtgcgattgataactcacttctttcaaaatatattttgaagccgtactggtggaatcaacttttgaaggtgattcccatgtctatggcacctaatttgattactttgatcgggcttggattcgttgttatcaatatccttactatgcttgtgtacaagtatcattatgagatggatgctttcccatcatgggtgtatgcttcttgggcgattggcctttttctttaccaaagttttgacgctattgatggctcgcaagcgcgtcgtactggcacatcatctccattaggtcaattatttgaccatggagtagacgccatcaatacgagctttgaagttttactgacgattgaactgctgcaactagatatgtttagctcaatccttactcaatttgccagcttattatacttttacatctctacttgggaagaataccatacgggtactttgtacctttcatacttctcgggtcctgtcgaaggaattgtaatggttattggactatttgcccttacagctattaagggtgattctttctggctcaagctacatcccactcccgagtcatggggatttgtacgttcctttctgccatactacacatatggatcatgcttgtacaactttatggcatttgccctgctattgaatgtcttacaaagtttacgaaatgctcttcaagccgtccaaaagaacaacggaagtgtgattaaagcattgagtggtatccttccctatttcctccaatggatggctgtcttttcactctatgccaagtatcctgctttctttgaacatcatttcctcactattttttgcttgaacgcttttatctttgcttattcggttggagtggtaattgtttctcacattaccgaatctcccttcccatactggaatgtgcttattcttccattcttggtggatgccgtggacgcctatacttttggcgtattaaaaaacgttcagacggaatactttttttgctacgttggaatttgcattggtgtttacggcaactttgttgcacatgtcattgccatgattacggaagagtacggcattaaatgtttgactattccatccaaaccagagtccaagaagaattga

SEQ ID NO: 129479 - protein, 386 aa, Schizosaccharomyces pombe 972h-
MQLNRKQLKNLHNYKYSAIDNSLLSKYILKPYWWNQLLKVIPMSMAPNLITLIGLGFVVINILTMLVYKYHYEMDAFPSWVYASWAIGLFLYQSFDAIDGSQARRTGTSSPLGQLFDHGVDAINTSFEVLLTIELLQLDMFSSILTQFASLLYFYISTWEEYHTGTLYLSYFSGPVEGIVMVIGLFALTAIKGDSFWLKLHPTPESWGFVRSFLPYYTYGSCLYNFMAFALLLNVLQSLRNALQAVQKNNGSVIKALSGILPYFLQWMAVFSLYAKYPAFFEHHFLTIFCLNAFIFAYSVGVVIVSHITESPFPYWNVLILPFLVDAVDAYTFGVLKNVQTEYFFCYVGICIGVYGNFVAHVIAMITEEYGIKCLTIPSKPESKKN

SEQ ID NO: 129480 - DNA, 1254 bp, Drosophila melanogaster
  CDS (1)..(1254)
atggcgctgctcgcctaccgggacaagcacatcctgagtgcccagcagctgaggaagctcagcgaacacaagtactcctgcttcagtgtcagcctgctcgatccgctgctgcagccgtggtggaactggctggtcgcccagacgcccctttggctggcccccaatctcattaccatcgtgggactgatcctcaatgtggtcaccaccctgatattaatctgttatagcccaaatggcgttgaggctccgccgcgttggacctgcttgctctgcgcgctgggtttgttcatctaccagagtctggactccatcgacgggaagcaggcgcgacgcacgaatacctcatcgccgttgggcgaacttttcgaccatggctgtgactccatatcgacggtgtttgtggccctctcggcgtgcatctcctgccaactgggccactatcccaactggctgttcttccagtgcttctgtgctattgcgctcttctactgcgcccactggcagacgtatgtgtctggaacgatgcggttcggcagaattgatgtgacagaggctcagttctcaattatagccattcatttggtttcggctgcactgggtcctgagatctggctcaccaagataccaatcgtgggcctttcatggaattacacaatattagtatttatcacattcggttataccttgaatataatcaatttcctaaaaatgtttactcaaggcggcagtggcaaaaacggctcctcagttgctggcaccagtgtcctctcgcccagcattccgctcacgctggtggtgctgcccgccctgatgattgcccagaagtcgccgcagaacctcttcaccgagcacgcatcggtgtacatcatggcgttcggcatggtggccgccaaggtcaccaataagctggtgatcgctcacatgaccaaggcggagatggagtatctggactggtcgctgctcggcccctcgctgctgttcctcaaccagtacttcaactgcatcgtgccagagatctggctactgtggttcacgctcatctggggcacccaggatctgctgcgctactgcgcccaggtgtgcctcgagatttgccagcacctgcgcatcgatctcttccggataccgtacacgcccaaaggcgcgaccccgcatccagccaccgcatcggtgagcagccagagcaactttggcagcagtgcggacaagaacggtggcagcgcgcatcgaaagtcgaagagcaaaccgcactag

SEQ ID NO: 129481 - protein, 417 aa, Drosophila melanogaster
MALLAYRDKHILSAQQLRKLSEHKYSCFSVSLLDPLLQPWWNWLVAQTPLWLAPNLITIVGLILNVVTTLILICYSPNGVEAPPRWTCLLCALGLFIYQSLDSIDGKQARRTNTSSPLGELFDHGCDSISTVFVALSACISCQLGHYPNWLFFQCFCAIALFYCAHWQTYVSGTMRFGRIDVTEAQFSIIAIHLVSAALGPEIWLTKIPIVGLSWNYTILVFITFGYTLNIINFLKMFTQGGSGKNGSSVAGTSVLSPSIPLTLVVLPALMIAQKSPQNLFTEHASVYIMAFGMVAAKVTNKLVIAHMTKAEMEYLDWSLLGPSLLFLNQYFNCIVPEIWLLWFTLIWGTQDLLRYCAQVCLEICQHLRIDLFRIPYTPKGATPHPATASVSSQSNFGSSADKNGGSAHRKSKSKPH

SEQ ID NO: 129482 - DNA, 1041 bp, Arabidopsis thaliana
  CDS (1)..(1041)
atggatgccgtaagtgtgataacgcttatggggtttatgtttctagtcacttcctccctgctaggctatatatattcacctcagttggattctcctcctccacgatgggttcacttcgcacatggtttacttctcttcttgtatcagacatttgatgcggttgatgggaagcaagcaagaaggacaaattcctctagccccctaggagagctcttcgatcatggttgtgacgcgcttgcttgtgcgtttgaagccatggcatttggaagcactgcaatgtgtggaagagatactttctggttctgggttatttcagctattccattttatggagctacatgggaacactatttcaccaacacacttattcttccggttatcaatgggcctacagaggggcttgcacttatatttgtcagccacttcttcacagccatcgtcggtgctgaatggtgggctcagcagttagggcagtcaataccattgtttagttgggtgccatttgtgaatgagattcaaacttctagagcagtgctatacatgatgatcgcttttgctgttataccaaccgttgcattcaatgtaacaaatgtctacaaagtcgttcgatcaagaaacgggagcatggtgttagcgttagctatgctgtatcccttcgttgtcttacttggaggagttttgatatgggattacttgtctccaatcaatctcatagcaacatatcctcacttagttgtactcggaactggacttgcatttggatttttagtgggaagaatgattcttgctcacttgtgtgatgagcctaaaggactaaaaacaaacatgtgcatgtcactactctatcttccctttgcacttgcaaatgcgctaaccgcaagattgaatgctggggttcctctagtcgacgaattatgggttcttcttggctactgcatattcacagtgtcattatacttgcactttgcaacatcagtcatccatgagatcactgaggcccttggaatctactgctttaggatcacgcgtaaagaagcttga

SEQ ID NO: 129483 - protein, 346 aa, Arabidopsis thaliana
MDAVSVITLMGFMFLVTSSLLGYIYSPQLDSPPPRWVHFAHGLLLFLYQTFDAVDGKQARRTNSSSPLGELFDHGCDALACAFEAMAFGSTAMCGRDTFWFWVISAIPFYGATWEHYFTNTLILPVINGPTEGLALIFVSHFFTAIVGAEWWAQQLGQSIPLFSWVPFVNEIQTSRAVLYMMIAFAVIPTVAFNVTNVYKVVRSRNGSMVLALAMLYPFVVLLGGVLIWDYLSPINLIATYPHLVVLGTGLAFGFLVGRMILAHLCDEPKGLKTNMCMSLLYLPFALANALTARLNAGVPLVDELWVLLGYCIFTVSLYLHFATSVIHEITEALGIYCFRITRKEA

SEQ ID NO: 129484 - DNA, 1248 bp, Nasonia vitripennis
  CDS (1)..(1248)
atgcagttctttcacaaggacaagatcctgtcgcccggacagctgaagcggctcagcgaacacaagtacagctgctcgagcgccagcttgctcgacggcttcctgcagccctggtgggactggctcgtgagcaaggtgccgatatggctcgcgcctaacctcatcaccgtcctcggcctcatcgtcaacatcgttaccaccctcgtgctcgtctggtacagccccgatgccaaggccgagccaccacgatgggcctgtttcttgtgtgcagttggactgtttttttatcaaagtctggatgctattgatggaaaacaagcaagaagaacaggcacctcaacacccttgggtgaactctttgatcatggctgcgattctatttcaacagtatttgttgccctgtcagcatgtatagcagtacaactgggttactatcctacatggatgtttttccaatgcttttgtgccatgacgcttttctactgtgctcattggcaaacatacgtgtcaggatctctgaggtttggaaaagttgatgtgacggaagcccaatttacgataatagcaattcatctcatctcttcaatttttggacctggcatctggatgaaggagataccagtgcctaacatgggtacatactctaatctcgtagcagtaacattttatgcaggctacgttaatgtgttcattcagttctgtaaagtctttgaatctggtggggttggaaagaatggttcgacaatagcaggaacgtcggtattatcacccatcatacccttcagtttcgtggttgtgccagcctttataatctatagaaagagcgctgagcatgtttacgagaatcatccggcgctgtacatacttgcgtttggaatggtagctgcaaaagtcacaaaccgactcgtggttgctcacatgacgaaaaacgaaatgcagtacctcgatagttcattaataggaccagccatgctgttcctcaaccagtactttaactttttcatcaaagagtattacgttctttggctatgcttcatttgggtcaccttggatttacttcgatatagcgcacaagtctgcacggaaatttgcgatcatttgaacatacaactcttcaggataccgtatgccgatcatcatcacctgcatcaaaatcaacgcaacagtggcgcgcaaggtgtcaccgaaaaaaatggtactacgattactacgagatctcaaagtagaaggttatcaaagaaacactag

SEQ ID NO: 129485 - protein, 415 aa, Nasonia vitripennis
MQFFHKDKILSPGQLKRLSEHKYSCSSASLLDGFLQPWWDWLVSKVPIWLAPNLITVLGLIVNIVTTLVLVWYSPDAKAEPPRWACFLCAVGLFFYQSLDAIDGKQARRTGTSTPLGELFDHGCDSISTVFVALSACIAVQLGYYPTWMFFQCFCAMTLFYCAHWQTYVSGSLRFGKVDVTEAQFTIIAIHLISSIFGPGIWMKEIPVPNMGTYSNLVAVTFYAGYVNVFIQFCKVFESGGVGKNGSTIAGTSVLSPIIPFSFVVVPAFIIYRKSAEHVYENHPALYILAFGMVAAKVTNRLVVAHMTKNEMQYLDSSLIGPAMLFLNQYFNFFIKEYYVLWLCFIWVTLDLLRYSAQVCTEICDHLNIQLFRIPYADHHHLHQNQRNSGAQGVTEKNGTTITTRSQSRRLSKKH

SEQ ID NO: 129486 - DNA, 1305 bp, Magnaporthe grisea 70-15
  CDS (1)..(1305)
atgcccaccgacagtaaaacggccgccgccgagtgcatctcggacgacgcactgatccacctcaagtcgtacaagtattcgagcgtcgacaagtcgcccatttccaaatacatcctacagccctactggaatgccgcagtcaagctgctgcccatgtggctcgcgcccaacatggtcactttaattggcttcatgttcattctcggcaacgtaggcttgctactcgtatatatgccagatctggagggaccaggtccgtcatggctttactacagttttgccttcggtctattcatgtaccagacgttggacaatctggacggcaagcaggcccgacgtacaggaatgtctagcggactcggtgagctattcgaccacggcatagactcgcttaactgcaccttggccagtctgcttgagaccgcagccatgggccttggtgtgtccaaatccggcgtcttcaccgctctctgcccctgcttgccgatgtttttctcaacgtgggagacgtaccactcgcacacgctctacctgggccgcatcaacggaccgaccgaaggcatcctgatagcctgcaccattatgatcctctccggctactacgggcccggcatctggactgaacggttgattgatcttttcggggagaagtacttgatgggctacgccgacatcgttggcgactactcgatccgcgacgtctggattggaatcatcgtcagctcgcttgtcctcacccacattccgccctgcatctaccacgttgccatcgcacgccgcagcaggggccaggccattgcgccagtgttcctcgagtggacgcctctgctcttctactcgctttccatcggagcatgggtttactcccccttttcgactctgcgcagccacaaccacatcgtcctgttctgttgcaccatgtcatttgtgtttgggcgcatgacgaccaagatgatcctcgcacatctgacccgccagccgttcccatactggaccgttatgctgtggccgcttttgggtggtgctgtcctcgtaaaccttccaaggtttggctttcaggccgtctcgcacgaggtcgagctcggatacttgtggggatacttcgtgtttgcagcagcggtctactcgcgctgggcatatgttgtcatcacaagcatttgtgatttcttggagataaacgccctgacgattccgaaagagaagcaggcagagaacaagcgcaagatgcagctggagcgggccaagcctctgctcaacggcaatggtgcttccaatggtgctttgaacggcaagaaggtgcaatga

SEQ ID NO: 129487 - protein, 434 aa, Magnaporthe grisea 70-15
MPTDSKTAAAECISDDALIHLKSYKYSSVDKSPISKYILQPYWNAAVKLLPMWLAPNMVTLIGFMFILGNVGLLLVYMPDLEGPGPSWLYYSFAFGLFMYQTLDNLDGKQARRTGMSSGLGELFDHGIDSLNCTLASLLETAAMGLGVSKSGVFTALCPCLPMFFSTWETYHSHTLYLGRINGPTEGILIACTIMILSGYYGPGIWTERLIDLFGEKYLMGYADIVGDYSIRDVWIGIIVSSLVLTHIPPCIYHVAIARRSRGQAIAPVFLEWTPLLFYSLSIGAWVYSPFSTLRSHNHIVLFCCTMSFVFGRMTTKMILAHLTRQPFPYWTVMLWPLLGGAVLVNLPRFGFQAVSHEVELGYLWGYFVFAAAVYSRWAYVVITSICDFLEINALTIPKEKQAENKRKMQLERAKPLLNGNGASNGALNGKKVQ

SEQ ID NO: 129488 - DNA, 1233 bp, Magnaporthe grisea 70-15
  CDS (1)..(1233)
atggtctacgtacgtcaggagcagctcccagcgctcaaagagtacaagtactctggcgtcgaccactcgctgctgtccaaatacgtgctcaagcccttttacaccaatgtcgtcatcaaaatcttccccatgtccatggcgccgaacctcatcaccctgaccggattcacctttgtcgtcgcgaacctcctcaccctgctgtggtacaaccccactctcgaccaggactgcccaccttgggtctactacagctgggcgctcggcttgttcttgtaccagacctttgacgccgtcgacggcacgcaggcacgtcgtacccaccagtccggaccgctcggcgagctctttgaccatggcgttgacgccgtcaacacttccctcgaggtcctcctctttgccggcagtcagaacatgggccagagctggtacactgttgccgtgctcttttcatccctcctgaccttctacgtccagacctgggatgagtaccacaccaagaccctgactctcggcatcgtcaacgggcccgtcgagggcgtcctgaccatcgtcgtcgtcttcatcctgacgggctacctcggcggagcctcgttctggcaacaacccatgcttccgaccctcggcgttcccgtcttcgagttcctccccagcttcctgtacaagctctccttcacccagatctggatggtgcagggcacgctggttctggtccacaacacgctcgagtcgtgccgcaatgtgatcaaggcccgtcgcgcacagggcgaccgctcccgctacgcccttgtcggcctgctccccttcttcggcacctggtcctgcatcctggcgtatctgttcctgcagcccaacatcaggcagggccacctggttccgtttgcgctctttgccggcatcgtcaacgcctactcggtcgggcagatcatcacggcccacctggtccacctcaagttcccctacacaaacgtcctgaccttgcccctggcctggggcgtcgtcgactcgctcggcccctggctgctgtccacttttggcttcggctggccctcggccctcggcgacggcgtctaccaggtcgccttcatgttctgcctcctcggcatggccattggcgtctacggcagctttgtcgttgacgtcatcgttaccatctgcgactacctcgacatttggtgcttgaccatcaagcacccctatgtcgaggggcaggataatggcaaaaagacgaactag

SEQ ID NO: 129489 - protein, 410 aa, Magnaporthe grisea 70-15
MVYVRQEQLPALKEYKYSGVDHSLLSKYVLKPFYTNVVIKIFPMSMAPNLITLTGFTFVVANLLTLLWYNPTLDQDCPPWVYYSWALGLFLYQTFDAVDGTQARRTHQSGPLGELFDHGVDAVNTSLEVLLFAGSQNMGQSWYTVAVLFSSLLTFYVQTWDEYHTKTLTLGIVNGPVEGVLTIVVVFILTGYLGGASFWQQPMLPTLGVPVFEFLPSFLYKLSFTQIWMVQGTLVLVHNTLESCRNVIKARRAQGDRSRYALVGLLPFFGTWSCILAYLFLQPNIRQGHLVPFALFAGIVNAYSVGQIITAHLVHLKFPYTNVLTLPLAWGVVDSLGPWLLSTFGFGWPSALGDGVYQVAFMFCLLGMAIGVYGSFVVDVIVTICDYLDIWCLTIKHPYVEGQDNGKKTN

SEQ ID NO: 129490 - DNA, 1242 bp, Gibberella zeae PH-1
  CDS (1)..(1242)
atggtctacgtgcggcaaaaggagctcccggcgctcagggagtacaagtactctggagttgaccattcgctgctctccaaatatgttctcaagcctttctataccaatttcgttataaagtgcttccccatgagtatggccccgaacgctatcaccttaacgggattttcttttgtcgttgcaaactttttggccatgctgtggtacacgccctcattggaccaggattgtccctcatgggtatactactcttgggccctgggattgttcctgtatcaaacatttgacgctgtagacggaacccaagcgcgacgaacccgacaatccggacctcttggcgagctctttgaccatggtgtggacgcttgtaacacatcactcgaagtccttctatttgccgcttctcagaacatgggacaaagctggcaaactgtggctgtgttgttcgcatctctcttgaccttctacgttcagacctgggagacctaccacaccaagactctgactctcggcattgtcaacggtcccgttgagggcgttctcgcaattgtcctggttttcatctttacaggatacgtcggcggtgcgcacttctggcaacagagcatgttccaaaccattggtgtaccttccaccgttggcgtcccttctttcatctacaatctcaccttcactgagtggtatcttgttcagggcagtatcatgctagttttcaacaccgttgaatcttctctcaacgttatccgtgctcgtcgagcccgtggagatcgttctcgtggtgctctccttggcctagtgccgttcttcagcatctggtctatggtcgtcgcctatctataccttcagcccaagatccgccagtgccatctcgtcccattcgccctcttcgctggcctcgtcaatgcttacagtgttggacaaatgattacagctcaccttgttcacttgcgattcccttactggaatgtgctgggtctgccccttgctttcggtgtcatcgactccctgggacccatcttccaacaacatcttggcgtcggctggcctagcgctcttggtgatagtgtttatcaagttgccttcatgttcatgatgctcggaaccgctgttggtgtgtatggcagtttcgttgttgatgtcatcgtcaccatctgcgattatcttgacatctggtgcctgaccatcaagcacccttacgtcgagaacgaaggaccccaggccaacggtactaagaaggactag

SEQ ID NO: 129491 - protein, 413 aa, Gibberella zeae PH-1
MVYVRQKELPALREYKYSGVDHSLLSKYVLKPFYTNFVIKCFPMSMAPNAITLTGFSFVVANFLAMLWYTPSLDQDCPSWVYYSWALGLFLYQTFDAVDGTQARRTRQSGPLGELFDHGVDACNTSLEVLLFAASQNMGQSWQTVAVLFASLLTFYVQTWETYHTKTLTLGIVNGPVEGVLAIVLVFIFTGYVGGAHFWQQSMFQTIGVPSTVGVPSFIYNLTFTEWYLVQGSIMLVFNTVESSLNVIRARRARGDRSRGALLGLVPFFSIWSMVVAYLYLQPKIRQCHLVPFALFAGLVNAYSVGQMITAHLVHLRFPYWNVLGLPLAFGVIDSLGPIFQQHLGVGWPSALGDSVYQVAFMFMMLGTAVGVYGSFVVDVIVTICDYLDIWCLTIKHPYVENEGPQANGTKKD

SEQ ID NO: 129492 - DNA, 1308 bp, Gibberella zeae PH-1
  CDS (1)..(1308)
atgtctacaagcgagacactcccactctacaatccatcggccaccgacccggacggtaccaacatggcgcccaacacgaagaagaatgttgctgagtgcatctctgatgacgcacttgtgcacttcaagtcgtacaaatactcaagtgtcgacatgtcgccagtctcgaaatacgttctaggccctttctggaacgcctctgtcaacctcctcccattatggatcgcccccaacatggtcacccttttgggtttctgcttcattctcgcaaacgttgctttctgcgcaatctggatgcctgatctggttggacctgctccatcatggctctacttcagctttgcgttcggtctcttcatgtaccaaacgatggacaaccttgacggaaagcaagcgcgacgaaccggaacctcaagcggcctcggtgaacttttcgaccacggtatcgactctctcaactgcacgctgggaagtctgctcggaaccgcctccatgggcctcggaacctcgacagccggtatcgtcaccgcgctctgcccctgcctgcctatgttcttctcgacctgggagacctaccacactcacactctcttcctcggctacatcaacggtcccaccgagggtattcttattgcctgtggaatcatgatcatttctggcatttggggacctggtgtctgggccattcctctggctaacggcatcaaggatcgtctccccggccttgctgagatgctcggtgagacaagcttcaaggatgtctgggtcggtttgatcctcggctctctcatcttcacacagattcccttctgtgttctcaacgttgccaaggctcgcagatctcgaggagagcccattctccccgtcttcatcgagtggattcccatgggtgtttacaccatctcaattgctgcctgggttttctccccctacagcaccattcgatccgagaaccacctcatgctcttctgcttcattatgtcatttgtctttggtcgcttgacaaccaagattattctcgcccacttgacacaccaacctttcccctggtggactgtcatgctctaccctcttgttggtggtgctatccttgccaacctcccccgagtcggacttccccagctcagcgcccagtttgaacatttctacctgtgggcctaccttctattttccatggttgtctacttccgctgggcctggctcgttgttaccagcatctgcaactacctcggtatcaacgcccttactatccccaaggagaagcagattgccaacaaggcggctcaggctgccaacaagctgcattaa

SEQ ID NO: 129493 - protein, 435 aa, Gibberella zeae PH-1
MSTSETLPLYNPSATDPDGTNMAPNTKKNVAECISDDALVHFKSYKYSSVDMSPVSKYVLGPFWNASVNLLPLWIAPNMVTLLGFCFILANVAFCAIWMPDLVGPAPSWLYFSFAFGLFMYQTMDNLDGKQARRTGTSSGLGELFDHGIDSLNCTLGSLLGTASMGLGTSTAGIVTALCPCLPMFFSTWETYHTHTLFLGYINGPTEGILIACGIMIISGIWGPGVWAIPLANGIKDRLPGLAEMLGETSFKDVWVGLILGSLIFTQIPFCVLNVAKARRSRGEPILPVFIEWIPMGVYTISIAAWVFSPYSTIRSENHLMLFCFIMSFVFGRLTTKIILAHLTHQPFPWWTVMLYPLVGGAILANLPRVGLPQLSAQFEHFYLWAYLLFSMVVYFRWAWLVVTSICNYLGINALTIPKEKQIANKAAQAANKLH

SEQ ID NO: 129494 - DNA, 1194 bp, Candida glabrata CBS 138
  CDS (1)..(1194)
atgggttattttattcctaaggaagctattgctaatttgaagtactataagtatcaaagtgaagacagatccttgatctctaattacattttgcgaccatactggagatggttttcgcagctgttcccaatgtggatggcaccaaacttggttacactatctggtttaggtttcattatcctaaatgtgctgactgtgttgtattatgatccttatttaaacacagaaacgcccagatggacatacttctcctatgccctaggtttattcctgtaccaaacatttgatgcttgtgatggtatgcatgcgcgtcgtactggtcaatcaagcccattgggggagctattcgatcattgtattgactctttgaataccaccttatccctgtttcctgtttgttcaatgcttggttgtggttattctatgattttgattggtacacaatttatggttctcggaaatttctacttgagtacatgggaggagttctatacccacagattgtttctaagtgaattttcgggtcctgttgaaggtattttattgcttgtcttccagttcatactatgtggtctttttggtactcagagagtttggcacactaaactgctatcgattcacttacctttgactattggtaactcagatattttcgaattggaaactgttcatttgatgatctgtttttctacatttgctctattatttaacattcttgcggcaactagtaatgtcttccagtatttcaaagagcacaataagaagaatgacatggaagaagtcgaggctgagaagaaagaagccatgattgcccttatgccattctttatttattttgctactgttttcgctttagttgcagtagataacttgttcatttcattcccatttatcatttcagttggtttgacaatggcatttgttgtgggccgtatgattgttggtcatctaactaagcaaaagttcccattagtcaactttccaatgtttatcccaatctctcagttgatcatgtacataattttcgtttgctatttcaaatctgatagagagaccatggtattggctttattgtggggtggatttggtgtcagtctaggtatccatgcgatgttcataaatgagattatctatgaattcaccacctaccttgatgtttatgccttaagtatcaaacatccaaaatctacttag

SEQ ID NO: 129495 - protein, 397 aa, Candida glabrata CBS 138
MGYFIPKEAIANLKYYKYQSEDRSLISNYILRPYWRWFSQLFPMWMAPNLVTLSGLGFIILNVLTVLYYDPYLNTETPRWTYFSYALGLFLYQTFDACDGMHARRTGQSSPLGELFDHCIDSLNTTLSLFPVCSMLGCGYSMILIGTQFMVLGNFYLSTWEEFYTHRLFLSEFSGPVEGILLLVFQFILCGLFGTQRVWHTKLLSIHLPLTIGNSDIFELETVHLMICFSTFALLFNILAATSNVFQYFKEHNKKNDMEEVEAEKKEAMIALMPFFIYFATVFALVAVDNLFISFPFIISVGLTMAFVVGRMIVGHLTKQKFPLVNFPMFIPISQLIMYIIFVCYFKSDRETMVLALLWGGFGVSLGIHAMFINEIIYEFTTYLDVYALSIKHPKST

SEQ ID NO: 129496 - DNA, 1173 bp, Candida glabrata CBS 138
  CDS (1)..(1173)
atgggttattttgttcctcaagacaaaatagcgaacttaaaatactacaagtatcaaagcgaggatctctctgttgtgtcgaaatatgttcttaagccattttggctgaaatttcaaaagatatttccctcatggatggcacctaacgttatcacgttatcaggactaggatttatcctgttcaacctattgattgtgctgtattatgatcccaatttagataaagaaactccaagatggacttacatttcctatgcattcggtatgtttatgtaccagacgtttgatggctgtgatggaatccatgctcgtctaactggccaatccggtccattaggtgaattatttgatcatagcattgatgctttaaacacaactctatctttgttcttattctgctcggctgcatctgtgggatatacaccaaaatttttgttctgtcaattttgttgcttgttgaacttttatttaagcacatgggaagagtatcacacacatattttatttctaagtgaaatgtctgggcctgttgaaggaatcttaaccatagcttcttcacttttcttaacgggggtttttggaccggacttaatgtggcacaccgcttggttcaacttaacatttaataattacacctacggggtaacatttttagatatatttttgttctctttgtttgtcggtgtcatttttaatgttaagtcgtccctgaagaatgttcaaagatactacaaggactcttttgttactaatcatggcactgaaaatgcaactacagagtcaaatagagggctgatccctttctttgcttactccggatcagtttttttgttgattctgagctatcctcaaattatttctcttccactaattttatcaattggtctaactgctgcattcatggtcggtagaattattgtggcacatttaacaaagcaagagttccctttcattcatttcccaatgtttattccgattcttcaacttctcactgcatccgtggttgttgagtatttaggacatgatatatttcaaacgtgttttgccttagcctggttaggtttcggagtcactttagggattcatggcttgttctttaacgaaattatctatgagttcaccaactacttggatgtctatgctctatcaattaaacatcctaaacacaagtaa

SEQ ID NO: 129497 - protein, 390 aa, Candida glabrata CBS 138
MGYFVPQDKIANLKYYKYQSEDLSVVSKYVLKPFWLKFQKIFPSWMAPNVITLSGLGFILFNLLIVLYYDPNLDKETPRWTYISYAFGMFMYQTFDGCDGIHARLTGQSGPLGELFDHSIDALNTTLSLFLFCSAASVGYTPKFLFCQFCCLLNFYLSTWEEYHTHILFLSEMSGPVEGILTIASSLFLTGVFGPDLMWHTAWFNLTFNNYTYGVTFLDIFLFSLFVGVIFNVKSSLKNVQRYYKDSFVTNHGTENATTESNRGLIPFFAYSGSVFLLILSYPQIISLPLILSIGLTAAFMVGRIIVAHLTKQEFPFIHFPMFIPILQLLTASVVVEYLGHDIFQTCFALAWLGFGVTLGIHGLFFNEIIYEFTNYLDVYALSIKHPKHK

SEQ ID NO: 129498 - DNA, 1176 bp, Kluyveromyces lactis NRRL Y-1140
  CDS (1)..(1176)
atgggtgttttcattccacattacaagctttcgaagctaaaggagtacagttaccaaggtgaggacaggtcgattatctctaagtatactttgaagccattctggtctcaatttgtgaaaatttttccattatggatggcacctaatgttgttacgctttcagggtttggattcatcattgttaatgttttgacagtcttgtacttaaatccaaccttagatcaagaacagccacgttgggcatacttttcgtatgcgttaggtctcttcttgtatcaaacgtttgatgcatgtgatggagcacatgcacgtcggacaggccaatcggggccgttgggtgaattgtttgatcattgtattgatgcattgaacactactctgtcaatgtttatattttgttctgtgtgtggcgttggatataaaccgatgatacttttcatccagttcgctttgttgtgcaacttctatttgagtacttgggaagaatatcatactcacaaactatttctaagtgaattcagtgggcctgtcgagggtattttgttgattgttgcgtctttcattatcacaggtatttatggaccacagaaagtttggcacagagagctatttgcgttccaattgtttgaacaggactttgtgttagaatctatgcatgtaatgttcttcttatcaggtatcggacttattttcaatatcttatctgccagaagaaatgtcgttgagcattacctcaagagctctggtactgcagaatcaaaaacagccaacatcaaggctgctgatagaggtttgctgccatttttcatttatttcgctaccgtgtttttaactgcattccttcagccaaagtttattgcactaccgttcatcatgagtattggcctaacgatggctttcactgttggtagaatcatcattggacatttaacagatcaagaattcccaatgaggcatccactcatgtttattccatctcttcaactgatcatatgctacgtatttgtttacggtttgaaatatgattctaacgccattgtcaatgacttgaactggtttgggttcggactaactttgggtattcacggaatgttcataacagaggtcatttatgaattcacaacatatttggatatctacgctctttccatcaagcatccgaagaaggttgagtaa

SEQ ID NO: 129499 - protein, 391 aa, Kluyveromyces lactis NRRL Y-1140
MGVFIPHYKLSKLKEYSYQGEDRSIISKYTLKPFWSQFVKIFPLWMAPNVVTLSGFGFIIVNVLTVLYLNPTLDQEQPRWAYFSYALGLFLYQTFDACDGAHARRTGQSGPLGELFDHCIDALNTTLSMFIFCSVCGVGYKPMILFIQFALLCNFYLSTWEEYHTHKLFLSEFSGPVEGILLIVASFIITGIYGPQKVWHRELFAFQLFEQDFVLESMHVMFFLSGIGLIFNILSARRNVVEHYLKSSGTAESKTANIKAADRGLLPFFIYFATVFLTAFLQPKFIALPFIMSIGLTMAFTVGRIIIGHLTDQEFPMRHPLMFIPSLQLIICYVFVYGLKYDSNAIVNDLNWFGFGLTLGIHGMFITEVIYEFTTYLDIYALSIKHPKKVE

SEQ ID NO: 129500 - DNA, 1191 bp, Debaryomyces hansenii CBS767
  CDS (1)..(1191)
atgggacttttcattgatggaaacaaattagagaatttgaaactctacaagtactctgcggaggatcattcgattatttcgaagtttatcttgaaaaaatggtggaactcctttgtggagatttttccactttcaatggcgcccaacgctgtgacattgcttggtttagggtttattttattaaacttgttgtgtgtgttttactacgatccgtttttggatgaagcgtcacctagatggtgctatttcttctatgcgtttgggttgttcatgtaccagacgtttgacggttgtgacgggtgtcatgcgagaagaacagggcaaagtgggccattgggagagttgtttgatcattctgttgacgccatcaataccacattgggcacgattgtatttggatcggtgttcaacttggggtacggttggttgtttcttatcgcgcagtttgcatctgtatgcaatttctacacttcgacctgggaagaatatcacactcatactttgtatttgtcggagttcagtggaccagttgagggtattttgatgatttgcgtgtgctttatcttgacggggatctttgggcgtgagttgtggtctatcaagttgcttgaactcgacttgagctctattggctatagtgacaattatgttctcgatagctcgagtatcattgttgttcttggcttgggctcgttgtactttaacatctcgtcggccatggctaacgttaacaagaagtacgcctctgaacatgctggtgattcgtcaaaggcgaagactgtcaccttggaagcatacaaaggtttgataccattctttgggtattatgccaccattgttttgttcgtcgtattatatccagaaatcatttcgcaatttggctttccattggtgatttccattggttgttccattgcattttcagtcggtagaattattttggctcacttgacgttgcaatatttcccaatggttcaatatccaatgttcatgccactcgtacagttatttttagccaaagtactgattagtgtttatggctacgactactacaaggtcttgggtgcggtcagttggttaggttgtggagtcaccctaggcatccatgcgttttttatcactgaaattattagtgaaattacttcctatttggatatctatgctttaactataaagcataagagagcttag

SEQ ID NO: 129501 - protein, 396 aa, Debaryomyces hansenii CBS767
MGLFIDGNKLENLKLYKYSAEDHSIISKFILKKWWNSFVEIFPLSMAPNAVTLLGLGFILLNLLCVFYYDPFLDEASPRWCYFFYAFGLFMYQTFDGCDGCHARRTGQSGPLGELFDHSVDAINTTLGTIVFGSVFNLGYGWLFLIAQFASVCNFYTSTWEEYHTHTLYLSEFSGPVEGILMICVCFILTGIFGRELWSIKLLELDLSSIGYSDNYVLDSSSIIVVLGLGSLYFNISSAMANVNKKYASEHAGDSSKAKTVTLEAYKGLIPFFGYYATIVLFVVLYPEIISQFGFPLVISIGCSIAFSVGRIILAHLTLQYFPMVQYPMFMPLVQLFLAKVLISVYGYDYYKVLGAVSWLGCGVTLGIHAFFITEIISEITSYLDIYALTIKHKRA

SEQ ID NO: 129502 - DNA, 1185 bp, Yarrowia lipolytica CLIB122
  CDS (1)..(1185)
atgggcgtattcattaaacaggagcagcttccggctctcaagaagtacaagtactccgccgaggatcactcgttcatctccaacaacattctgcgccccttctggcgacagtttgtcaaaatcttccctctgtggatggcccccaacatggtgactctgttgggcttcttctttgtcattgtgaacttcatcaccatgctcattgttgatcccacccacgaccgcgagcctcccagatgggtctacctcacctacgctctgggtctgttcctttaccagacatttgatgcctgtgacggatcccatgcccgacgaactggccagagtggaccccttggagagctgtttgaccactgtgtcgacgccatgaatacctctctgattctcacggtggtggtgtccaccacccatatgggatataacatgaagctgctgattgtgcagattgccgctctcggaaacttctacctgtcgacctgggagacctaccataccggaactctgtacctttctggcttctctggtcctgttgaaggtatcttgattctggtggctcttttcgtcctcaccttcttcactggtcccaacgtgtacgctctgaccgtctacgaggctcttcccgaatccatcacttcgctgctgcctgccagcttcctggacgtcaccatcacccagatctacattggattcggagtgctgggcatggtgttcaacatctacggcgcctgcggaaacgtgatcaagtactacaacaacaagggcaagagcgctctccccgccattctcggaatcgccccctttggcatcttctacgtcggcgtctttgcctgggcccatgttgctcctctgcttctctccaagtacgccatcgtctatctgtttgccattggggctgcctttgccatgcaagtcggccagatgattcttgcccatctcgtgcttgctcccttcccccactggaacgtgctgctcttcttcccctttgtgggactggcagtgcactacattgcacccgtgtttggctgggacgccgatatcgtgtcggttaacactctcttcacctgttttggcgccaccctctccatttacgccttctttgtgcttgagatcatcgacgagatcaccaactacctcgatatctggtgtctgcgaatcaagtaccctcaggagaagaagactgagtaa

SEQ ID NO: 129503 - protein, 394 aa, Yarrowia lipolytica CLIB122
MGVFIKQEQLPALKKYKYSAEDHSFISNNILRPFWRQFVKIFPLWMAPNMVTLLGFFFVIVNFITMLIVDPTHDREPPRWVYLTYALGLFLYQTFDACDGSHARRTGQSGPLGELFDHCVDAMNTSLILTVVVSTTHMGYNMKLLIVQIAALGNFYLSTWETYHTGTLYLSGFSGPVEGILILVALFVLTFFTGPNVYALTVYEALPESITSLLPASFLDVTITQIYIGFGVLGMVFNIYGACGNVIKYYNNKGKSALPAILGIAPFGIFYVGVFAWAHVAPLLLSKYAIVYLFAIGAAFAMQVGQMILAHLVLAPFPHWNVLLFFPFVGLAVHYIAPVFGWDADIVSVNTLFTCFGATLSIYAFFVLEIIDEITNYLDIWCLRIKYPQEKKTE

SEQ ID NO: 129504 - DNA, 1332 bp, Yarrowia lipolytica CLIB122
  CDS (1)..(1332)
atgggtaaaagcccctctatgattgggacttgcggttgggttgggctgggtacaaacacatgctatgctcatcagctcagccgtgccatgggccatcaaccaacttttctcccgaccctaatcccctccacactactaatgccaggattccaccacatcaaccccgacagtctagtgcatctaaagtcgtaccagtacagaagcgtcgataaatcctacctgtctaagtacatcctgaacccatggtggacttacgcagcaaccttcatgcctgattggctggctcccaacgccatcactctcatcggtgtctccggcatgctcctgtcaatcttcttcaccgtctggtacacccccgagctcaccggcgacggtccctcctggatctacttcttctctgccttttcgctcttcttctaccagaccatggacaatattgacggcaagcaggcccgtcgaactggctcttcctctcctctgggagagctgtttgaccacggaatcgactccctcaactgcacctacggcggaattgtcaactgcggtgctgtggcccttggttccacctcctacggaggcctcatggttctgtccacctgtattggtatgtacttttctacctgggagacttactacacccacactctttacctgggagttgttaacggccccaccgaagggctagtggtggccctgtctaccatgctaatctccggcttcatgggcaccgacatctggaaggaggatgccgttgaggtgctccccttcctctccttcatggttcccgagtacctcaagctcaacgagttctgggtctgggtcgtcatgttcaccctcgtggtgctgcacgtgcctttctgcgtgtggaacgtctattgggcctgcaaggaggacgatgtgcctttctccgaggctctggtgggcctcctgccctttggcgtggccggaggagctgcctacgtgtggctgcagagtccttattccactgtgctggttgacaaccaccttgtgctatttggactgaccgcctcgtgggtctttggccggctgaccaccggtgtgattctcaaccacctcaccaagctcgagttccctctgtggaactccaccctgattcctcttctgggagccaccgttctgttctacctgctccctgccctgggtctactgccccaggacaatccccacttcgagactctgtatctgtggggcttctttgtctacgctgccgcgaactttttgacctgggctgttaacaccatcaatgtcatctgttcctaccttggcatccgatgtctgtctctgcgacccgtggacaacaagaccaactag

SEQ ID NO: 129505 - protein, 443 aa, Yarrowia lipolytica CLIB122
MGKSPSMIGTCGWVGLGTNTCYAHQLSRAMGHQPTFLPTLIPSTLLMPGFHHINPDSLVHLKSYQYRSVDKSYLSKYILNPWWTYAATFMPDWLAPNAITLIGVSGMLLSIFFTVWYTPELTGDGPSWIYFFSAFSLFFYQTMDNIDGKQARRTGSSSPLGELFDHGIDSLNCTYGGIVNCGAVALGSTSYGGLMVLSTCIGMYFSTWETYYTHTLYLGVVNGPTEGLVVALSTMLISGFMGTDIWKEDAVEVLPFLSFMVPEYLKLNEFWVWVVMFTLVVLHVPFCVWNVYWACKEDDVPFSEALVGLLPFGVAGGAAYVWLQSPYSTVLVDNHLVLFGLTASWVFGRLTTGVILNHLTKLEFPLWNSTLIPLLGATVLFYLLPALGLLPQDNPHFETLYLWGFFVYAAANFLTWAVNTINVICSYLGIRCLSLRPVDNKTN

SEQ ID NO: 129506 - DNA, 1218 bp, Apis mellifera
  CDS (1)..(1218)
atgcagttttataaggaaaaacttctatcgcctgggcaattgaaacgtcttagtgaacacaaatatagttgtacgacaagcagtcttttggatggatttcttcaaccctggtgggattggcttgttagcaaagtacctctttggcttgcacccaatttaatcactatcgtaggtctaatcgtcaacattgcaactactttggttcttgtatattacagccctgatgctaaaactgaggcacctagatgggcatgttttttatgtgcacttggtttatttatttatcaaagtttggatgccatagatggcaagcaagctagaagaacaggaacttcaacaccattaggtgaactatttgatcatggatgtgattccatatcaactgtttttattgctttatcagcatgtatagcagtgcaattaggatattatccagcatggatgttttttcaatgcttttgtgctatgacacttttttattgtgctcattggcaaacatatgtttcaggttctttaagatttggcaaaatagatgttacagaagcacaatttaccattataataattcatctcatttctgcaatttttggacccaaaatatggatgatggagataccatacatagatggttttatgtttaagtatttaataggagttatgacagtaatttgtgcagtggcaaacttatattccatcttttcggtgattttcaccggaggagtgggcaagaatggttcaactgtggctggaacatcagttttatctccaattattccatttagttttgtggtagtaccagcttttataatttatagaaaaagtgctgaacatgtgtatgaaaatcatcctgcattgtacatacttgcatttggaatggttgcagctaaagttaccaatcgattagtggttgcacatatgacaaaaaatgaaatggaatatttagatagttcactaattggaccagcaatgctattcttgaatcaatatttcaatttctttatcaaagaatattatgttctatggttatgttttatttgggttactttagatttgctccgatatagttctcaaatttgtcttgaaatttgtgattatatgaagatcaaactatttaggataccattaggagatcatcgaatgagcctggtttctaatacagctgagaaaaatggtactaataggtcccaacgtaatagattgcaaaagaaacatcactag

SEQ ID NO: 129507 - protein, 405 aa, Apis mellifera
MQFYKEKLLSPGQLKRLSEHKYSCTTSSLLDGFLQPWWDWLVSKVPLWLAPNLITIVGLIVNIATTLVLVYYSPDAKTEAPRWACFLCALGLFIYQSLDAIDGKQARRTGTSTPLGELFDHGCDSISTVFIALSACIAVQLGYYPAWMFFQCFCAMTLFYCAHWQTYVSGSLRFGKIDVTEAQFTIIIIHLISAIFGPKIWMMEIPYIDGFMFKYLIGVMTVICAVANLYSIFSVIFTGGVGKNGSTVAGTSVLSPIIPFSFVVVPAFIIYRKSAEHVYENHPALYILAFGMVAAKVTNRLVVAHMTKNEMEYLDSSLIGPAMLFLNQYFNFFIKEYYVLWLCFIWVTLDLLRYSSQICLEICDYMKIKLFRIPLGDHRMSLVSNTAEKNGTNRSQRNRLQKKHH

SEQ ID NO: 129508 - DNA, 1239 bp, Aspergillus nidulans FGSC A4
  CDS (1)..(1239)
atggtgtacatccggcaacatgaattatcgaacttgaagaactatcgatatgcaggcgtggaccattcgctcatcagtcgatatgtcctcaaaccgttctataataattttgtgatcaagttctttcccatgagcatggcacctaatgctatcactttgacaggcctattcttcgtcttgatcaacctctttaccgttctatactataacccaagcctggatcaggactgtccaccatgggtctatgccagttgcgccatcgggctattcttgtaccagacgtttgacgctgtagacggaatccaagcaaggagaactaagcagagcggccctcttggcgagctttttgatcacagtgttgacgcctgcaacacggccctgggagtcttgatattcgccggagtcatgaacctcggccagacttgggctactgttctgacactttttggatctaccatgaccttctatgtccagacctgggatatgtattatacacaagtgttgacgttgggcatcgtctctggtcctgttgaaggggtactgacgctttgtgttgtcttcgggttcaccgcatatatgggaggcggaagtttctggcaccagcctatgttcgaaacgatcggtgttcctaaactcgagttcatccctaagcagctctatgacttgcccttcacgcagtggtatctcatttatggtgcggtcatgcttttcttcgccactggctcgagcatcgcgcatgtcatccaggttcgcaaggaacgtggtaaggattcgattggtccactcttcggtatccttcctctcgccttgacgtgggtagttgtaccggcgtacctgtacctaaacccgacaatcctcgagaactacctggttccctttgccctgtatgtcggcctggtcaacgcgtatgccgttggacgaataatatgtgcccatttggtacaccaagactttccctatttcaacattcttcttggacctcttgctttggctgttgttgacagtgccggtgcactttttggtgtctggtcgtcaactctgattggtacaatcggacagcctgctttcgttttcctatgcctgggtctgggccttggcgtctacgggagctttgtgcatgatatcattaccaccatttgtgattatattgatatctggtgtttgacaatcaagcacccctatgtgccagaggagtccgtcaacggcaatgtggttcgagcagctaagaagaacctatag

SEQ ID NO: 129509 - protein, 412 aa, Aspergillus nidulans FGSC A4
MVYIRQHELSNLKNYRYAGVDHSLISRYVLKPFYNNFVIKFFPMSMAPNAITLTGLFFVLINLFTVLYYNPSLDQDCPPWVYASCAIGLFLYQTFDAVDGIQARRTKQSGPLGELFDHSVDACNTALGVLIFAGVMNLGQTWATVLTLFGSTMTFYVQTWDMYYTQVLTLGIVSGPVEGVLTLCVVFGFTAYMGGGSFWHQPMFETIGVPKLEFIPKQLYDLPFTQWYLIYGAVMLFFATGSSIAHVIQVRKERGKDSIGPLFGILPLALTWVVVPAYLYLNPTILENYLVPFALYVGLVNAYAVGRIICAHLVHQDFPYFNILLGPLALAVVDSAGALFGVWSSTLIGTIGQPAFVFLCLGLGLGVYGSFVHDIITTICDYIDIWCLTIKHPYVPEESVNGNVVRAAKKNL

SEQ ID NO: 129510 - DNA, 1209 bp, Candida albicans SC5314
  CDS (1)..(1209): transl_table=12
atgggacttttcattccaactaacaagttacaaaacttgaaattatataaatattcatctgaagatcattcaattatatcgaaatatatattgaaaaaatggtggaatttttttgttcaaatatttcctttatcaatggcacctaatgttgttacattattaggattatttttcattattgggaatttaatgacagtattttattatgatccttatttaaatgaaactcaaccaacttggtgttattttttttatgcctttggattatttatgtatcaaacatttgatggatgtgatggatgtcatgctcgtagaacgggtcaaagtggtcccttgggggaattatttgatcattcaattgatgccataaatactactttaggaacatttgtttttgctagtgttttaaaaatgggatatggaggattattattattaagtcaatttgcatcagtttgtaatttttatacttcaacttgggaagaatatcatactcatactttatttttaagtaaatttagtggtcccgttgaaggtatattgatgatttgtattgtttatatcattaccgggatttttggtcctgatatttggacaattgatttatttgaattaaatttaacaagtttaggttatggttattataaagttgatacttcaattatttataccattattggattgacttcattatattttaatattgcttctgccatgtttaatgtttctaaacattataagaaaagtagtaccaataacagtactaatggcgacaaagatgaatcaactaaagatcaaatttctcaagcttatcgaggattatatccatttttcatttattatggatttgttttcttacttttatggatttatccacaaattctttatgattatggtttcccattagtgatatctattggttgtactattgcattttctgttggaagaattattttggctcatttaactttacaagaattcccatttattcaatatccaatgtttgtccctattggtcaattgattttgagtaaaattttaattgatatttatggttatggtactgctaaagtgttacatgccattagttggttaggttgtggaataactttaggtattcatggaatttttgttgctgaagtgattactgaaatcactacttatttagatatttatgcattatcaattaagcataaaaaaataaactag

SEQ ID NO: 129511 - protein, 402 aa, Candida albicans SC5314
MGLFIPTNKLQNLKLYKYSSEDHSIISKYILKKWWNFFVQIFPLSMAPNVVTLLGLFFIIGNLMTVFYYDPYLNETQPTWCYFFYAFGLFMYQTFDGCDGCHARRTGQSGPLGELFDHSIDAINTTLGTFVFASVLKMGYGGLLLLSQFASVCNFYTSTWEEYHTHTLFLSKFSGPVEGILMICIVYIITGIFGPDIWTIDLFELNLTSLGYGYYKVDTSIIYTIIGLTSLYFNIASAMFNVSKHYKKSSTNNSTNGDKDESTKDQISQAYRGLYPFFIYYGFVFLLLWIYPQILYDYGFPLVISIGCTIAFSVGRIILAHLTLQEFPFIQYPMFVPIGQLILSKILIDIYGYGTAKVLHAISWLGCGITLGIHGIFVAEVITEITTYLDIYALSIKHKKIN

SEQ ID NO: 129512 - DNA, 1257 bp, Tribolium castaneum
  CDS (1)..(1257)
atgatgaagttgtacaaagagagactcctctccgatgcccagttaaaacgtttaggtgaacaccagtattcgtgtcaaagtgttagtattttggacaagttactgcagccctattggaattggctgacgtcgaaagtgcccatttggctcgcacctaacctcattacaattttggggctcattgtaaatattgtcacggctttaattcttatatggttttcaccagacgcaaagcaggaggccccccgatgggcgtgcggcttgtgcgggttcggcctgttcgtgtaccaaagcctggacgccatcgacggcaagcaggcgcgaagaaccggcactgcgaaccctttaggtgagctcttcgaccacggttgcgactcaatatctacggttttcgtggcgttgtcggcatgtattgccgtccagttggggtattatcccggatggatgttttttcagtgtttttgtgctatgacacttttctattgcgcgcattggcagacgtacgtttccgggacgttacgtttcgggaggattgacgtgacggaggcgcaatacaccatcatggggatcctcctcttgtcgacgattttcgggcccagcgtttggtccacgaaggtgagaatcgttttcgggtttactttccattgggctcacgtggtgtgtaccgttttttacctgggatttttccagttgttttacacttttttcgaacgtatcaaagagggaggatgtggcaagaacggatcgacagttgctggaacaagtgtcttatcacccgttatacccttttcgatggtgctggtaccagcgtttatcatttaccaaaagtcaacgcaacacgtgtatgaggaacacccagcgttgtacattttggcgttcggattagtcgctgcgaaagtaaccaatcgtcttgtggttgctcatatgactaaaagtgagatggattatatggattggtcgcttctagggcccactatgctctttttgaaccaatattttaacactttcatcaaagaatattacattctatggttatgcatgatttgggtgatcgtggatttgctgcgctactgttaccaaatttgccaggaaatttgtgatttcctccacgtcgaattgtttagaataccttatcctggaggacctcagcgagtggtgacgctcccttcagagaaaaatggtaaatctgaaaagaaaatacacctttctgacggagaagacgttgtgcctttgttacaatcggaagagaattcgtaa

SEQ ID NO: 129513 - protein, 418 aa, Tribolium castaneum
MMKLYKERLLSDAQLKRLGEHQYSCQSVSILDKLLQPYWNWLTSKVPIWLAPNLITILGLIVNIVTALILIWFSPDAKQEAPRWACGLCGFGLFVYQSLDAIDGKQARRTGTANPLGELFDHGCDSISTVFVALSACIAVQLGYYPGWMFFQCFCAMTLFYCAHWQTYVSGTLRFGRIDVTEAQYTIMGILLLSTIFGPSVWSTKVRIVFGFTFHWAHVVCTVFYLGFFQLFYTFFERIKEGGCGKNGSTVAGTSVLSPVIPFSMVLVPAFIIYQKSTQHVYEEHPALYILAFGLVAAKVTNRLVVAHMTKSEMDYMDWSLLGPTMLFLNQYFNTFIKEYYILWLCMIWVIVDLLRYCYQICQEICDFLHVELFRIPYPGGPQRVVTLPSEKNGKSEKKIHLSDGEDVVPLLQSEENS

SEQ ID NO: 129514 - DNA, 1167 bp, Tribolium castaneum
  CDS (1)..(1167)
atggaggttgaatatctaacgaaagaacaattggttgggtttgataaatacaagtacagctgcaaagacacgggccctctgagcctctacgtcatgcaccccttctggaactggctggtccaatttttcccccgttgggtggcccccaatttgatgactttctcaggatttgtgttcgccgttttaacatttttcctgttcacttggaaggattacagtttttacgcctcggacccgaaccacccggactaccccgcgctccccaagtggacgttcacagtggcagctatatttttgttcctagcgtacactttagatggcatcgacgggaagcaggcccgcaggaccggctccagcggccccctgggtgaattgttcgatcacgggctggattcgtttacggccggcttgattccggtctctgcctattctctgttcggacgcggttccagatacagcatcattccattccgaatgtttttcatattgtggaatattttatacaatttttatttgtcccactgggagaagtacaatacgggtgtcttattcttgccttggggctacgatttctcgatgtgggccaccattttaatgtttctgattgccggggtcacgggacacgaaagctggcagtttgttttacccggggggatcaccacaggcctcatgttcgaaattttgatatacaacatggccctggtcaccaatatacctgttatactttacaatatttacgtatcctacaaggagaagacggggcatatgaggacgtttggcgaagcaatgcggcctctagttcccgtcacgctgtttttttttattactttaatgtgggtcatatattcgcccggcaatattatcgagagggacccgagagcagtctttgttataatcagtacaattttttcaaacatttgctgccgattgatcgtggctcagatgagcaacacaagatgcgaaatttttaactgggttttggttcctacgacttttatcattttcctctgcgtctggctgaagagtcctgtgattgagctgttgctgacgtacattctctgtattttaagtacaggggcacatatccattacgggacgcatgtggtgcaacaaatgtgtaaacacttgcgaatcaattgttttagcataaagaaatcctcagattga

SEQ ID NO: 129515 - protein, 388 aa, Tribolium castaneum
MEVEYLTKEQLVGFDKYKYSCKDTGPLSLYVMHPFWNWLVQFFPRWVAPNLMTFSGFVFAVLTFFLFTWKDYSFYASDPNHPDYPALPKWTFTVAAIFLFLAYTLDGIDGKQARRTGSSGPLGELFDHGLDSFTAGLIPVSAYSLFGRGSRYSIIPFRMFFILWNILYNFYLSHWEKYNTGVLFLPWGYDFSMWATILMFLIAGVTGHESWQFVLPGGITTGLMFEILIYNMALVTNIPVILYNIYVSYKEKTGHMRTFGEAMRPLVPVTLFFFITLMWVIYSPGNIIERDPRAVFVIISTIFSNICCRLIVAQMSNTRCEIFNWVLVPTTFIIFLCVWLKSPVIELLLTYILCILSTGAHIHYGTHVVQQMCKHLRINCFSIKKSSD

SEQ ID NO: 129516 - DNA, 1248 bp, Tribolium castaneum
  CDS (1)..(1248)
atgatgaagttgtacaaagagagactcctctccgatgcccagttaaaacgtttaggtgaacaccagtattcgtgtcaaagtgttagtattttggacaagttactgcagccctattggaattggctgacgtcgaaagtgcccatttggctcgcacctaacctcattacaattttggggctcattgtaaatattgtcacggctttaattcttatatggttttcaccagacgcaaagcaggaggccccccgatgggcgtgcggcttgtgcgggttcggcctgttcgtgtaccaaagcctggacgccatcgacggcaagcaggcgcgaagaaccggcactgcgaaccctttaggtgagctcttcgaccacggttgcgactcaatatctacggttttcgtggcgttgtcggcatgtattgccgtccagttggggtattatcccggatggatgttttttcagtgtttttgtgctatgacacttttctattgcgcgcattggcagacgtacgtttccgggacgttacgtttcgggaggattgacgtgacggaggcgcaatacaccatcatggggatcctcctcttgtcgacgattttcgggcccagcgtttggtccacgaagttttttagcggtactgtttgtttatggtacttaattcccttaagcactttaatatgcggcctgtggtcgctttaccaaagtattattgtgatattcaccggcggtgtcggcaagaacggatcgacagttgctggaacaagtgtcttatcacccgttatacccttttcgatggtgctggtaccagcgtttatcatttaccaaaagtcaacgcaacacgtgtatgaggaacacccagcgttgtacattttggcgttcggattagtcgctgcgaaagtaaccaatcgtcttgtggttgctcatatgactaaaagtgagatggattatatggattggtcgcttctagggcccactatgctctttttgaaccaatattttaacactttcatcaaagaatattacattctatggttatgcatgatttgggtgatcgtggatttgctgcgctactgttaccaaatttgccaggaaatttgtgatttcctccacgtcgaattgtttagaataccttatcctggaggacctcagcgagtggtgacgctcccttcagagaaaaatggtaaatctgaaaagaaaatacacctttctgacggagaagacgttgtgcctttgttacaatcggaagagaattcgtaa

SEQ ID NO: 129517 - protein, 415 aa, Tribolium castaneum
MMKLYKERLLSDAQLKRLGEHQYSCQSVSILDKLLQPYWNWLTSKVPIWLAPNLITILGLIVNIVTALILIWFSPDAKQEAPRWACGLCGFGLFVYQSLDAIDGKQARRTGTANPLGELFDHGCDSISTVFVALSACIAVQLGYYPGWMFFQCFCAMTLFYCAHWQTYVSGTLRFGRIDVTEAQYTIMGILLLSTIFGPSVWSTKFFSGTVCLWYLIPLSTLICGLWSLYQSIIVIFTGGVGKNGSTVAGTSVLSPVIPFSMVLVPAFIIYQKSTQHVYEEHPALYILAFGLVAAKVTNRLVVAHMTKSEMDYMDWSLLGPTMLFLNQYFNTFIKEYYILWLCMIWVIVDLLRYCYQICQEICDFLHVELFRIPYPGGPQRVVTLPSEKNGKSEKKIHLSDGEDVVPLLQSEENS

SEQ ID NO: 129518 - DNA, 1248 bp, Tribolium castaneum
  CDS (1)..(1248)
atgatgaagttgtacaaagagagactcctctccgatgcccagttaaaacgtttaggtgaacaccagtattcgtgtcaaagtgttagtattttggacaagttactgcagccctattggaattggctgacgtcgaaagtgcccatttggctcgcacctaacctcattacaattttggggctcattgtaaatattgtcacggctttaattcttatatggttttcaccagacgcaaagcaggaggccccccgatgggcgtgcggcttgtgcgggttcggcctgttcgtgtaccaaagcctggacgccatcgacggcaagcaggcgcgaagaaccggcactgcgaaccctttaggtgagctcttcgaccacggttgcgactcaatatctacggttttcgtggcgttgtcggcatgtattgccgtccagttggggtattatcccggatggatgttttttcagtgtttttgtgctatgacacttttctattgcgcgcattggcagacgtacgtttccgggacgttacgtttcgggaggattgacgtgacggaggcgcaatacaccatcatggggatcctcctcttgtcgacgattttcgggcccagcgtttggtccacgaagatacccggcttggatatggaggtgaagttgattcccattggcgtggcgtgtgcagtcgctcttcttctcgcccaagctaacgtttctattattttcacgggaggagtgggcaaaaatggatcaacggtcgctggaacaagtgtcttatcacccgttatacccttttcgatggtgctggtaccagcgtttatcatttaccaaaagtcaacgcaacacgtgtatgaggaacacccagcgttgtacattttggcgttcggattagtcgctgcgaaagtaaccaatcgtcttgtggttgctcatatgactaaaagtgagatggattatatggattggtcgcttctagggcccactatgctctttttgaaccaatattttaacactttcatcaaagaatattacattctatggttatgcatgatttgggtgatcgtggatttgctgcgctactgttaccaaatttgccaggaaatttgtgatttcctccacgtcgaattgtttagaataccttatcctggaggacctcagcgagtggtgacgctcccttcagagaaaaatggtaaatctgaaaagaaaatacacctttctgacggagaagacgttgtgcctttgttacaatcggaagagaattcgtaa

SEQ ID NO: 129519 - protein, 415 aa, Tribolium castaneum
MMKLYKERLLSDAQLKRLGEHQYSCQSVSILDKLLQPYWNWLTSKVPIWLAPNLITILGLIVNIVTALILIWFSPDAKQEAPRWACGLCGFGLFVYQSLDAIDGKQARRTGTANPLGELFDHGCDSISTVFVALSACIAVQLGYYPGWMFFQCFCAMTLFYCAHWQTYVSGTLRFGRIDVTEAQYTIMGILLLSTIFGPSVWSTKIPGLDMEVKLIPIGVACAVALLLAQANVSIIFTGGVGKNGSTVAGTSVLSPVIPFSMVLVPAFIIYQKSTQHVYEEHPALYILAFGLVAAKVTNRLVVAHMTKSEMDYMDWSLLGPTMLFLNQYFNTFIKEYYILWLCMIWVIVDLLRYCYQICQEICDFLHVELFRIPYPGGPQRVVTLPSEKNGKSEKKIHLSDGEDVVPLLQSEENS

SEQ ID NO: 129520 - DNA, 1530 bp, Brassica campestris
  CDS (90)..(1259)
tttttttcggacacagaaactcaaagggcttgtccttttaactttgcctgctactaaccaccggaaccgtatagtagagttggagaaagatgggttacataggagcacatggtgtggcagcacttcataggtacaaatacagtggagtggatcactcttatcttgccaaatacgtgcttcaacctttttggactcgttttgtcaaagtcttccctctctggatgccaccaaacatgataacgcttatggggttcatgtttctagtcacatcttctctgctaggctacatatattcaccacagttggattctcctcctccacgatgggttcacttcgcacatggtttacttctattcttgtatcagacattcgatgcggttgatgggaagcaagcaagaaggacaaattcctctagccccttaggagagctcttcgatcatggttgtgatgcacttgcttgtgcgtttgaagccatggcatttggaagcactgcaatgtgtggaagagatactttttggttctgggttatttcagctattcccttctatggagctacatgggagcactatttcaccaacacacttattcttccggtcatcaatggacctacagagggtcttgcacttatattcgtcagccacttcttcacagccattgtcggtgctgaatggtgggctcagcaattggggcagtccataccattgtttagttgggtgccatttgttaatgcgatccaaacttccagagcagttctatatatgatgatcgcttttgccgttataccaacagtcgcattcaatgtgtcaaatgtctacaaagttgttcaatcaagaaaagggagcatgctgttagcattagctatgctgtatcctttcgtggttcttcttggaggtgttttgatatgggattacttgtcaccaatcaacctcatagaaacataccctcacttggttgttcttggaactggacttgcatttggatttctagtgggaagaatgattcttgctcacttgtgtgatgagccgaaaggactaaaaacaaacatgtgcttgtctctagtctaccttccatttgcacttgcaaacgctttaaccgcaagattgaatgatggggttcctctagttgatgagttatgggttctccttggctactgtatattcacagtgtcattatacttgcacttcgccacatctgtcatccatgagatcactactgctcttggaatctattgtttcaggatcacgcgtaaagaagcttgaagaagaaacctcaagggtgctgtttttctgtgtggaccgttggatcaatacggcgaatgatcaatatggtttagatcagtattttgtttatgcatattgacaaaaaaaaatgaaaattatttataaatgctgtctatgcctcaatgaggtgagcttccatagatcagtgtaatttgtttacagttaaatttgttattagttcttacacttcacctcttcaggtgaataaagaatcaaatattatgtcttcataaaaaaaaaaaaaaaaaaa

SEQ ID NO: 129521 - protein, 389 aa, Brassica campestris
MGYIGAHGVAALHRYKYSGVDHSYLAKYVLQPFWTRFVKVFPLWMPPNMITLMGFMFLVTSSLLGYIYSPQLDSPPPRWVHFAHGLLLFLYQTFDAVDGKQARRTNSSSPLGELFDHGCDALACAFEAMAFGSTAMCGRDTFWFWVISAIPFYGATWEHYFTNTLILPVINGPTEGLALIFVSHFFTAIVGAEWWAQQLGQSIPLFSWVPFVNAIQTSRAVLYMMIAFAVIPTVAFNVSNVYKVVQSRKGSMLLALAMLYPFVVLLGGVLIWDYLSPINLIETYPHLVVLGTGLAFGFLVGRMILAHLCDEPKGLKTNMCLSLVYLPFALANALTARLNDGVPLVDELWVLLGYCIFTVSLYLHFATSVIHEITTALGIYCFRITRKEA

SEQ ID NO: 129522 - DNA, 1600 bp, Pimpinella brachycarpa
  CDS (15)..(1184)
aaaaagagtaagagatgggttatataggggctcatggtgttgctgccttgcataagcacaagtacagtggggttgatcactcttatcttgctaaatatgtcttgcaacccttttggactaaatgtgttaccttcttccctctttggatgccacccaatatgattactctcgtgggatctatgttcttggtcacttctgctgctcttggctttatatattcacctcacttagattcgcctccacccagatgggttcatgttgctcacggtctacttctattcctgtaccagacttttgatgctgtggatggcaagcaagcaagaaggaccaattcttctagtccattgggagagctgtttgatcatggatgtgatgcacttgcatgtacctttgaggcgttagcctttgggagcactgccatgtgtgggaaagatactttctggttttgggtgatatcagctgttccattttatggtgccacatgggaacactttttcaccaatacacttatccttcccgttgttaatggacctacagagggtctcatgctgatatacgtgggccatatctttacagctatagttggggccgagtggtgggtccatcagtttggaaaatctgtaccgttcttgagttgggtcccaattttaagtgaagttccgacatatcgagcagtattgtatttgatgattgcttttgctgttattccgacgttgacattcaatgtgcaaaatgtttacaaagttgtccaggcaagaaaaggaagcatgcttctagctttagcaatgctttacccatttgtggtgctaatggcagggatcttgatctgggattatttgtctccatatgatataatggtgaattatccatatatggttgtgttgggaactggacttgcttttgggtttctggtggggagaatggttctggctcacttgtgtgatgaaccaaagggattgaaaactaatatgtgcctgtcactgttgtatctcccatttgccattgcaaatacactcactgccagactaaatgatggggttccattggttgaagagaaatgggttctccttggttattgtgtatacacaggtgcactttatctgcatttcgcaacatcagttatccacgaaataacgactgctctcggaatctattgcttcaggataacaagaaaggaggcttgagaatgtgcacttgttctttacttctttactataggaacctcagattcaggtggcagattggtctgaaaggtttatctgtgaattcaactggagaagtattgtcaatcaacgaaaattttgggttcttgcagaatgcagtagaaaatctatcacaattacttgatctagttgattccgtgattcattatatatgtacttggctatatgccattcatgacatcttattcctcattaattgatggaaaacccataatagtaatacttccttgtattttgcttcagggatagtagaagtggtgatggaaaatcgtcttttgtaatctctttggaaagtttgctttggctgcaacctaatactttcgtcaccaatattatgtgtgcttcttgaaaaaaaaaaaaaaaaaaaaaaaaaaaaa

SEQ ID NO: 129523 - protein, 389 aa, Pimpinella brachycarpa
MGYIGAHGVAALHKHKYSGVDHSYLAKYVLQPFWTKCVTFFPLWMPPNMITLVGSMFLVTSAALGFIYSPHLDSPPPRWVHVAHGLLLFLYQTFDAVDGKQARRTNSSSPLGELFDHGCDALACTFEALAFGSTAMCGKDTFWFWVISAVPFYGATWEHFFTNTLILPVVNGPTEGLMLIYVGHIFTAIVGAEWWVHQFGKSVPFLSWVPILSEVPTYRAVLYLMIAFAVIPTLTFNVQNVYKVVQARKGSMLLALAMLYPFVVLMAGILIWDYLSPYDIMVNYPYMVVLGTGLAFGFLVGRMVLAHLCDEPKGLKTNMCLSLLYLPFAIANTLTARLNDGVPLVEEKWVLLGYCVYTGALYLHFATSVIHEITTALGIYCFRITRKEA

SEQ ID NO: 129524 - DNA, 1547 bp, Glycine max
  CDS (162)..(1331)
cagaagccacgctgttctttcaaatcgtaaccgaagaatgaagatggtgcgctgctgtcggtgcttcgcctgagtctcattccgtttgcgcccactatcacaggttgtgctgaggcttaactggttcttgaagcatatttcagagttttatcagagaacaaatgggttatattgggactcacggtgttgcagctctgcacagatataaatatagtggagtagatcattcctatgtggccaaatatgtactacaacccttttggagtcgctttgttaattttttccccctatggatgcctccaaacatgataactcttatgggatttatgttcttactactgtctgcattgcttggttatatatactccccacaattggacacagctcctccaagatgggttcattttgctcatggactacttctgtttttataccagacatttgatgctgttgatgggaagcaagctagacgaacaaattcctcaagcccattgggggagctctttgatcatgggtgtgatgcacttgcttgcacatttgaagcattggcttttgggagcacagccatgtgtggaagaactactttctggtggtggttaatatctgcaattacattttatggtgcaacctgggagcattatttcaccaatacacttatactgcctgttataaatgggcctacagagggtcttatgataatatacatctgtcactttttcactgctatcgtgggtgctgagtggtgggttcagcaatttggaaagtctttgccattcttaaattggcttccttatcttgggggaatcccgacattcaaagctatattgtgtttaatgatagcttttggtgttacaccaacagtcacatgcaatgttagtaatgtttacaaggttgtgaagggaaagaatggaagcatgccacttgcattggcaatgctttacccatttgttgtacttgtgggaggagtgcttgtgtgggattatttgtcaccatcagacatcatggggaaatatccacatttagttgttataggaacaggacttactttcggatatcttgtggggaggatgattttggcacacttatgtgatgaacctaagggtctgaaaactgggatgtgcatgtccctcatgtttctcccattggccattgccaatgtacttgcatccaggctaaatgatggggttcctttagtagatgagagactagttcttcttggttactgtgcattttcagtgacactatacttgcattttgccacatcagtcattcatgaaattaccaatgccctgggaatatattgtttcaggataactaggaaggaagcttgaatccacccaagatttcctttagcttgcaagtcgagcaaaatattggcaagggtcagtactaattttgctttatttgactaacatggatcttgtaattatatattgattctttatccttttttttttaagttcttaagttttatatgtgaccaggtctgttgaaatttacatcgttgattatgatcacaatataagtcatacaacgttttatctttt

SEQ ID NO: 129525 - protein, 389 aa, Glycine max
MGYIGTHGVAALHRYKYSGVDHSYVAKYVLQPFWSRFVNFFPLWMPPNMITLMGFMFLLLSALLGYIYSPQLDTAPPRWVHFAHGLLLFLYQTFDAVDGKQARRTNSSSPLGELFDHGCDALACTFEALAFGSTAMCGRTTFWWWLISAITFYGATWEHYFTNTLILPVINGPTEGLMIIYICHFFTAIVGAEWWVQQFGKSLPFLNWLPYLGGIPTFKAILCLMIAFGVTPTVTCNVSNVYKVVKGKNGSMPLALAMLYPFVVLVGGVLVWDYLSPSDIMGKYPHLVVIGTGLTFGYLVGRMILAHLCDEPKGLKTGMCMSLMFLPLAIANVLASRLNDGVPLVDERLVLLGYCAFSVTLYLHFATSVIHEITNALGIYCFRITRKEA

SEQ ID NO: 129526 - DNA, 1005 bp, Oryza sativa subsp
  CDS (1)..(1005)
atgtttctattgacatcggcattccttggctttttttattcccctcatctcgatacagcaccacctagatgggtgcaccttgcacatggaatgcttctcttcctttaccagacttttgatgctgtggatggtaaacaagcaagacgtaccaactcatcaagtcctttaggcgagctatttgaccacggatgtgatgcgcttgcatgtgcttttgaggccttggcttttggaagcacggcaatgtgtggaaaagctaccttctggtattggttcattgctgctgtcccattttactgcgcaacctgggaacactttttcacaaacacactaattcttcctatagtcaacggaccgactgaaggccttatgctaatctatttgtgccattttttcaccttcttcacaggagctgaatggtgggcacaagatttccggaagtcaatacccctactaaactgggtacctcttgttcctgaggtcccagtatatggaattgcactgtttctaatgatagcttttgctgtaattccgacgattggatctaacattcacaatgtgtacaaagtggtcgaggcaagaaaaggaagcatgctgctggcactagcaatgctctttccttttggtttgctgttggccggagttcttgtctggtcctacctatctccttcagatataatgagaaaccagccacatcttctagttattggaactggttttgcatttggctttcttgtgggcagaatgattctggctcacttatgtgatgagcccaaaggtctgaagacagggatgtgcatgtccctagcatatttcccatttgcaattgcaaatgcgctgactgcacggcttgatgatggaaacccccttgttgatgagcagctagttctcctaatgtactgcttatttaccgtggctctctacatgcattttgctacatctgttatccatgaaatcaccaatgctctcgggattcattgcttcaggatcactaggaaaaaggcataa

SEQ ID NO: 129527 - protein, 334 aa, Oryza sativa subsp
MFLLTSAFLGFFYSPHLDTAPPRWVHLAHGMLLFLYQTFDAVDGKQARRTNSSSPLGELFDHGCDALACAFEALAFGSTAMCGKATFWYWFIAAVPFYCATWEHFFTNTLILPIVNGPTEGLMLIYLCHFFTFFTGAEWWAQDFRKSIPLLNWVPLVPEVPVYGIALFLMIAFAVIPTIGSNIHNVYKVVEARKGSMLLALAMLFPFGLLLAGVLVWSYLSPSDIMRNQPHLLVIGTGFAFGFLVGRMILAHLCDEPKGLKTGMCMSLAYFPFAIANALTARLDDGNPLVDEQLVLLMYCLFTVALYMHFATSVIHEITNALGIHCFRITRKKA

SEQ ID NO: 129528 - DNA, 1170 bp, Brassica napus
  CDS (1)..(1170)
atgggatacataggagcacatggggtagcagctcttcatagacacaaatcaagtggtgttggatcactcttaccttgccaaatacgtcctccaactttttggaatcgttttgtcaaaatcttccctctctggatgccaccccaacatgataacacttacggggttcatgtttctcatcatatctgcgctcttaggctatgtatactcacctcagttggattctcctcctcctcgatggttcacttggcacatggactccttctgtttttgtatcagacatttgatgcggttgatggaaagcaagcacgaagaacaaactccagtagcccactcggagagctctttgatcatggttgtgatgcacttgcttgtgcgtttgaaacgatggcatatgggagtactgctatgtgtggaagaaatactttctggttctggattatatcagctattccatttattggatctacatgggaaacctattttaccaatatactgactctcccggtagtcaatggtcctacagaaagtccttgcacttatatactgtggtcacttcttccacagccattgttggtgctgaatggtgggctcagcagttggagagtcaatcccttgtttagttggggtgccttcttgaaggagattacaacatcaagagtagtactaataacggatggttgcttttgctgttataccaacacttgcattcagcgtgtccaatgtatacaaagttatacagccaagaaaaggaagcatgtttgtagcattattatgctgtttccattcgttgggctacttgcaggagttttgatttgggactacttgtctccaactgatctcataagaaactaccctcacttagttgtactgggaactggtcttgcatttggattcattgtgggaagaataattttagctcacatatgtgatgaaccaaaaggattaaaaacaaacatgtgcatgtcactgctttaccttccctttgcactagcaaatgctctaaccgctagactcaacaacggggttgctctagtggatgagtttggtgcttcttggttattgtatattcaacaatggcactataacatgcattttgcaacctcagtcattcatgaaatcactactgcacttggaatctactgcttcaggattacacgtaaggaagcttga

SEQ ID NO: 129529 - protein, 389 aa, Brassica napus
MGYIGAHGVAALHRHKSSGVGSLLPCQIRPPTFWNRFVKIFPLWMPPQHDNTYGVHVSHHICALRLCILTSVGFSSSSMVHLAHGLLLFLYQTFDAVDGKQARRTNSSSPLGELFDHGCDALACAFETMAYGSTAMCGRNTFWFWIISAIPFIGSTWETYFTNILTLPVVNGPTESPCTYILWSLLPQPLLVLNGGLSSWRVNPLFSWGAFLKEITTSRVVLITDGCFCCYTNTCIQRVQCIQSYTAKKRKHVCSIIMLFPFVGLLAGVLIWDYLSPTDLIRNYPHLVVLGTGLAFGFIVGRIILAHICDEPKGLKTNMCMSLLYLPFALANALTARLNNGVALVDEFGASWLLYIQQWHYNMHFATSVIHEITTALGIYCFRITRKEA

SEQ ID NO: 129530 - DNA, 1032 bp, Sorghum bicolor
  CDS (1)..(1032)
atggggtttatcggcgcgcacggcgtcgagacgctgaagcggtacaggtacagcggggaggaccgctcggtggtggccaagtacgtgctccagcccttctggagccgatgcgtcaccctcttcccgctctggatgcctaaatggttatgctttccgacatttcagatcacacttacaggattttcgtttctagttctatcagcgctgcttggctatatatattcgcctcgccttgacactgctccccctaggtgggttcatcttgcccatggattactcctcttcttgtaccagacttttgatgctgttgatggtaaacaagcgaggcgtactagctcatcaagccctcttggagaactttttgatcatggatgtgatgcacttgcctgtgcttttgaagctttggctcttggaagcaccttgatgtgtggaggatggacattctggttctgggtggttgctgctgtcccgttctatcttgcaacctgggaacacttctttacaaatacactcattcttcctacaataaatggaccaacggagggcctgatgctgatctatgtatcccatttgtttacatttcttactggcgctgaatggtgggcacaggattttcggaaatcactaccctttttgggttggattccacttccatttctttccgaaatcaaaatccccttgtatgttcttgtgctgattcttatgattgtatgtgctgttatacctactgttagatccaatgtcagcaatgtccaagaggtagttgagacgcgaaaaggaagcatggcattagcattagccatgatccttccttttattacactgttagctggagttgctatctggtcttatctttctccttcaagtataatgaggaaccaaccacatttgctcgtaattggaactggctttaattttggatatttggtgggaagaatgatacttgctcatttgtgtgacgagcccaaaggtctaaaatctgggatgttcatggtgaacctgagcattcagtttcatacttgcatcttatga

SEQ ID NO: 129531 - protein, 343 aa, Sorghum bicolor
MGFIGAHGVETLKRYRYSGEDRSVVAKYVLQPFWSRCVTLFPLWMPKWLCFPTFQITLTGFSFLVLSALLGYIYSPRLDTAPPRWVHLAHGLLLFLYQTFDAVDGKQARRTSSSSPLGELFDHGCDALACAFEALALGSTLMCGGWTFWFWVVAAVPFYLATWEHFFTNTLILPTINGPTEGLMLIYVSHLFTFLTGAEWWAQDFRKSLPFLGWIPLPFLSEIKIPLYVLVLILMIVCAVIPTVRSNVSNVQEVVETRKGSMALALAMILPFITLLAGVAIWSYLSPSSIMRNQPHLLVIGTGFNFGYLVGRMILAHLCDEPKGLKSGMFMVNLSIQFHTCIL

SEQ ID NO: 129532 - DNA, 1502 bp, Brassica campestris
  CDS (143)..(1312)
gtcccgcttcgccgttcttttgggcaaaagagagagagaactagagactcttcgtctctttttcggacacggacgctcgaaaggctcttccttgactttcgccgacacaaaccacctgaaccatccaaggggttagagagtaatgggttatataggagcacatggtgcagcagctcttcataggtacaaatacagtggagaggatcactcttatcttgccaaataccttctgcaacctttttggactcgttttgtcaaagtcttccctctatggatgccaccgaacatgataacgcttatggggttcatgtttctagtcacatcttccctgctaggatacatatattcacctcagttggattctcctcctccacgatgggttcacttcgcacagggtttgcttctcttcttgtatcagacattcgatgcggttgatgggaagcaagcaagaagaacgaactcctctagccccctaggagagcttttcgatcatggttgtgatgcactggcttgtgcattggaagccatggcgtttggaagcactgcaatgtgtggaagagaaactttccggtcttgggtaatttcagctattcccctccaaggggctacatgggaacactatttcaccaacacactaattcttcgggaaatcaatggacctacagagggccttgcacttatatacgtcagccacctcttcaccgcccttgtcggtgctgaatggtgggctcagcagttagggcagtccataccattgtttagttgggtgccgtttgtgaatgcgattcaaacttcaagagcagtactatacatgatgatcgcttttgctgttataccaaccgtcgcaatcaatgtgtcaaatgtctataaagttgttcaatcaagaaaagggagcatgctgctagcattagctatgctttatcctttcgtggttcttcttggaggtgttttgatatgggattccttgtctccaatcaatctcatagaaacataccctcacttggttgtacttggaactggacttgcttttggatttctagtgggaagaatgattcttgctcacttgtgtgacgagccaaaaggactgaaaacaaacatgtgcatgtcgctgctctatcttccctttgcacttgcaaacgctctaaccgcaagattgaatgcaggggttcctttagtcgacgagttatgggttcttctcggctactgtatattcacagtgtcgttatacttgcactttgcgacttcggtcatccatgagatcactgcggctcttggaatctactgcttcaggatcacgaggaaggaagcctagttggtccattttttttgtggatgcttggcagctaatatgtagctatgcgcaccagttagcttaatgtctagcgttccaggaggtcacctcctagtctacttctcagcttctaagtctccttaactgcggagttctgatgggatccggtgcattagtgctggtataatcgcatgtacataaaaaaaaaaaa

SEQ ID NO: 129533 - protein, 389 aa, Brassica campestris
MGYIGAHGAAALHRYKYSGEDHSYLAKYLLQPFWTRFVKVFPLWMPPNMITLMGFMFLVTSSLLGYIYSPQLDSPPPRWVHFAQGLLLFLYQTFDAVDGKQARRTNSSSPLGELFDHGCDALACALEAMAFGSTAMCGRETFRSWVISAIPLQGATWEHYFTNTLILREINGPTEGLALIYVSHLFTALVGAEWWAQQLGQSIPLFSWVPFVNAIQTSRAVLYMMIAFAVIPTVAINVSNVYKVVQSRKGSMLLALAMLYPFVVLLGGVLIWDSLSPINLIETYPHLVVLGTGLAFGFLVGRMILAHLCDEPKGLKTNMCMSLLYLPFALANALTARLNAGVPLVDELWVLLGYCIFTVSLYLHFATSVIHEITAALGIYCFRITRKEA

SEQ ID NO: 129534 - DNA, 1170 bp, Oryza sativa
  CDS (1)..(1170)
atggggtacgtggggcagcacggggtggcgacgctgcggaggtacaagtacagcggcgtcgaccactcgctcgtcgccaagtacatcctccagcccttctggtcacgattcgtcaacctcttcccgctctggttcccgccaaatatgattacactgacaggcttcatgtttctattgacatcggcattccttggctttttttattcccctcatctcgatacagcaccacctagatgggtgcaccttgcacatggaatgcttctcttcctttaccagacttttgatgctgtggatggtaaacaagcaagacgtaccaactcatcaagtcctttaggcgagctatttgaccacggatgtgatgcgcttgcatgtgcttttgaggccttggcttttggaagcacggcaatgtgtggaaaagctaccttctggtattggttcattgctgctgtcccattttactgcgcaacctgggaacactttttcacaaacacactaattcttcctatagtcaacggaccgactgaaggccttatgctaatctatttgtgccattttttcaccttcttcacaggagctgaatggtgggcacaagatttccggaagtcaatacccctactaaactgggtacctcttgttcctgaggtcccagtatatggaattgcactgtttctaatgatagcttttgctgtaattccgacgattggatctaacattcacaatgtgtacaaagtggtcgaggcaagaaaaggaagcatgctgctggcactagcaatgctctttccttttggtttgctgttggccggagttcttgtctggtcctacctatctccttcagatataatgagaaaccagccacatcttctagttattggaactggttttgcatttggctttcttgtgggcagaatgattctggctcacttatgtgatgagcccaaaggtctgaagacagggatgtgcatgtccctagcatatttcccatttgcaattgcaaatgcgctgactgcacggcttgatgatggaaacccccttgttgatgagcagctagttctcctaatgtactgcttatttaccgtggctctctacatgcattttgctacatctgttatccatgaaatcaccaatgctctcgggattcattgcttcaggatcactaggaaaaaggcataa

SEQ ID NO: 129535 - protein, 389 aa, Oryza sativa
MGYVGQHGVATLRRYKYSGVDHSLVAKYILQPFWSRFVNLFPLWFPPNMITLTGFMFLLTSAFLGFFYSPHLDTAPPRWVHLAHGMLLFLYQTFDAVDGKQARRTNSSSPLGELFDHGCDALACAFEALAFGSTAMCGKATFWYWFIAAVPFYCATWEHFFTNTLILPIVNGPTEGLMLIYLCHFFTFFTGAEWWAQDFRKSIPLLNWVPLVPEVPVYGIALFLMIAFAVIPTIGSNIHNVYKVVEARKGSMLLALAMLFPFGLLLAGVLVWSYLSPSDIMRNQPHLLVIGTGFAFGFLVGRMILAHLCDEPKGLKTGMCMSLAYFPFAIANALTARLDDGNPLVDEQLVLLMYCLFTVALYMHFATSVIHEITNALGIHCFRITRKKA

SEQ ID NO: 129536 - DNA, 1170 bp, Brassica napus
  CDS (1)..(1170)
atgggttacataggagcgcatggtgtggcagctcttcataggtacaaatacagtggagtggatcactcttatcttgccaaatacgtccttcaacctttttggactcgttttgtcaaagtcttccctctttggatgccaccaaacatgataacgcttatggggttcatgtttctagtcacatcgtccctgctaggctacatatattcaccacagttggattctcctcctccacgatgggttcacttcgcacacggtttacttctattcttgtatcagacatttgatgcggttgatgggaagcaagcaagaaggacaaattcctctagccccttaggagagctcttcgatcatggttgtgatgcacttgcttgtgcgtttgaagccatggcatttggaagcactgcgatgtgtggaagagacactttctggttctgggttatttcagctattcccttctatggagctacatgggagcactatttcaccaacacacttattcttccggtcatcaatggaccaacagagggtcttgcacttatattcgtcagccacttcttcactgccattgtcggtgctgaatggtgggctcagcaattggggcagtccataccattgtttagttgggtgccatttgttaatgcgatcaaaacttccagagcagtcctatacatgatgatcgctttcgccgttataccaaccgtagcattcaatgtgtcaaatgtctacaaagttgttcaattaagaaaagggagcatgctgttagcattagctatgctgtatcctttcgtggttcttcttggaggtgttttgatatgggactacttgtctccaataaatctcatagaaacataccctcacttggttgtacttggaactgggcttgcatttggatttctggtgggaagaatgattcttgctcacttgtgtgatgagccgaaaggactgaaaacaaacatgtgcttgtctctagtctatcttccctttgcacttgcaaacgctttaaccgcaagattgaatgatggggttcctctagttgatgagttatgggttcttcttggctactgtatattcacagtgtcattatacttgcacttcgccacatctgtcatccatgagatcactactgctcttggaatctactgtttcaggatcacgcgtaaagaagcttga

SEQ ID NO: 129537 - protein, 389 aa, Brassica napus
MGYIGAHGVAALHRYKYSGVDHSYLAKYVLQPFWTRFVKVFPLWMPPNMITLMGFMFLVTSSLLGYIYSPQLDSPPPRWVHFAHGLLLFLYQTFDAVDGKQARRTNSSSPLGELFDHGCDALACAFEAMAFGSTAMCGRDTFWFWVISAIPFYGATWEHYFTNTLILPVINGPTEGLALIFVSHFFTAIVGAEWWAQQLGQSIPLFSWVPFVNAIKTSRAVLYMMIAFAVIPTVAFNVSNVYKVVQLRKGSMLLALAMLYPFVVLLGGVLIWDYLSPINLIETYPHLVVLGTGLAFGFLVGRMILAHLCDEPKGLKTNMCLSLVYLPFALANALTARLNDGVPLVDELWVLLGYCIFTVSLYLHFATSVIHEITTALGIYCFRITRKEA

SEQ ID NO: 129538 - DNA, 1170 bp, Brassica napus
  CDS (1)..(1170)
atgggatacataggagcacatggggtagcagctctgcatagacacaaatacagtggtgtggatcactcttatcttgccaaatacgttctccaacctttttggaatcgttttgtcaaaatcttccctctctggatgccacccaacatgataacactgacagggttcatgtttctcatcatatctgcgctcttaggctatgtatactcacctcagttggattctcctcctcctcgatgggttcacttggcacatggacttcttctctttttgtatcagacatttgatgcggttgatgggaaacaagcacgaagaacaaactccagtagcccactcggagagctctttgatcacggttgtgatgcacttgcttgtgcgtttgaaacaatggcatatgggagtactgccatgtgtggaagagatacgttctggttctggattatatcagctattccatttattggatctacatgggaaacctattttaccaatatactgactcttccggtagtcaatggtcctacagaaggtcttgcacttatttactgtggtcacttcttcacagccattgttggtgctgaatggtgggctcagcagtttggagaatcaatccccttgtttagttgggtgcccttcttgagcgagattacaacatcaagagtagtactaataacgatggttgcttttgctgttataccaacacttgcattcagcgtgtcgaatgtatacaaagttatacagccaagaaaaggaagcatgtttgtagcattatctatgctgtttccattcgttgggttacttgcaggagttttgatttgggactacttgtctccaactgatctcataagaaactatcctcacttagttgtactgggaactggtcttgcatttggattcattgtgggaagaataattctagctcacatatgtgatgaaccaaaaggattaaaaacaaacatgtgcatgtcactgctttaccttccctttgcactagcaaatgctctaaccgctagactcaacaacggggttgctcttgtggatgagttttgggtgcttcttggttattgtatattcacaatggcactatacatgcattttgcaacctcagtcattcatgaaatcactactgcacttggaatctactgcttcaggattacacgtaaagaagcttga

SEQ ID NO: 129539 - protein, 389 aa, Brassica napus
MGYIGAHGVAALHRHKYSGVDHSYLAKYVLQPFWNRFVKIFPLWMPPNMITLTGFMFLIISALLGYVYSPQLDSPPPRWVHLAHGLLLFLYQTFDAVDGKQARRTNSSSPLGELFDHGCDALACAFETMAYGSTAMCGRDTFWFWIISAIPFIGSTWETYFTNILTLPVVNGPTEGLALIYCGHFFTAIVGAEWWAQQFGESIPLFSWVPFLSEITTSRVVLITMVAFAVIPTLAFSVSNVYKVIQPRKGSMFVALSMLFPFVGLLAGVLIWDYLSPTDLIRNYPHLVVLGTGLAFGFIVGRIILAHICDEPKGLKTNMCMSLLYLPFALANALTARLNNGVALVDEFWVLLGYCIFTMALYMHFATSVIHEITTALGIYCFRITRKEA

SEQ ID NO: 129540 - DNA, 1170 bp, Brassica napus
  CDS (1)..(1170)
atgggatacataggagcacatggggtagcagctctgcatagacacaaatacagtggtgtggatcactcttatcttgccaaatacgttctccaacctttttggaatcgttttgtcaaaatcttccctctctggatgccacccaacatgataacactgacagggttcatgtttctcatcatatctgcgctcttaggctatgtatactcacctcagttggattctcctcctcctcgatgggttcacttggcacatggactccttctctttttgtatcagacatttgatgcggttgatggaaagcaagcacgaagaacaaactccagtagcccactcggagagctctttgatcatggttgtgatgcacttgcttgtgcgtttgaaacgatggcatatgggagtactgctatgtgtggaagagatactttctggttctggattatatcagctattccatttattggatctacatgggaaacctattttaccaatatactgactctcccggtagtcaatggtcctacagaaggtcttgcacttatatactgtggtcacttcttcacagccattgttggtgctgaatggtgggctcagcagtttggagagtcaatccccttgtttagttgggtgcccttcttgaacgagattacaacatcaagagtagtactaataacgatggttgcttttgctgttataccaacacttgcattcagcgtgtcgaatgtatacaaagttatacagccaagaaaaggaagcatgtttgtagcattatctatgctgtttccattcgttgggttacttgcaggagttttgatttgggactacttgtctccaactgatctcataagaaactatcctcacttagttgtactgggaactggtcttgcatttggattcattgtgggaagaataattctagctcacatatgtgatgaaccaaaaggattaaaaacaaacatgtgcatgtcactgctttaccttccctttgcactagcaaatgctctaaccgctagactcaacaacggggttgctcttgtggatgagttttgggtgcttcttggttattgtatattcacaatggcactatacatgcattttgcaacctcagtcattcatgaaatcactactgcacttggaatctactgcttcaggattacacgtaaggaagcttga

SEQ ID NO: 129541 - protein, 389 aa, Brassica napus
MGYIGAHGVAALHRHKYSGVDHSYLAKYVLQPFWNRFVKIFPLWMPPNMITLTGFMFLIISALLGYVYSPQLDSPPPRWVHLAHGLLLFLYQTFDAVDGKQARRTNSSSPLGELFDHGCDALACAFETMAYGSTAMCGRDTFWFWIISAIPFIGSTWETYFTNILTLPVVNGPTEGLALIYCGHFFTAIVGAEWWAQQFGESIPLFSWVPFLNEITTSRVVLITMVAFAVIPTLAFSVSNVYKVIQPRKGSMFVALSMLFPFVGLLAGVLIWDYLSPTDLIRNYPHLVVLGTGLAFGFIVGRIILAHICDEPKGLKTNMCMSLLYLPFALANALTARLNNGVALVDEFWVLLGYCIFTMALYMHFATSVIHEITTALGIYCFRITRKEA

SEQ ID NO: 129542 - DNA, 24 bp, Artificial sequence
  primer
atgcgaattgcccgaatagtgaag

SEQ ID NO: 129543 - DNA, 28 bp, Artificial sequence
  primer
ctaaatttcttttggatgtttaattgat

SEQ ID NO: 129544 - protein, 415 aa, Artificial sequence
  consensus sequence
  Variant (2)..(5): Xaa in position 2 to 5 is any amino acid
  Variant (7)..(11): Xaa in position 7 to 11 is any amino acid
  Variant (13)..(17): Xaa in position 13 to 17 is any amino acid
  Variant (18)..(18): Xaa in position 18 is any or no amino acid
  Variant (20)..(20): Xaa in position 20 is any amino acid
  Variant (22)..(22): Xaa in position 22 is any amino acid
  Variant (24)..(30): Xaa in position 24 to 30 is any amino acid
  Variant (31)..(31): Xaa in position 31 is any or no amino acid
  Variant (33)..(35): Xaa in position 33 to 35 is any amino acid
  Variant (36)..(42): Xaa in position 36 to 42 is any or no amino acid
  Variant (45)..(46): Xaa in position 45 to 46 is any amino acid
  Variant (48)..(48): Xaa in position 48 is any amino acid
  Variant (49)..(49): Xaa in position 49 is any or no amino acid
  Variant (51)..(64): Xaa in position 51 to 64 is any amino acid
  Variant (65)..(65): Xaa in position 65 is any or no amino acid
  Variant (67)..(72): Xaa in position 67 to 72 is any amino acid
  Variant (73)..(81): Xaa in position 73 to 81 is any or no amino acid
  Variant (83)..(83): Xaa in position 83 is any amino acid
  Variant (85)..(92): Xaa in position 85 to 92 is any amino acid
  Variant (95)..(95): Xaa in position 95 is any amino acid
  Variant (99)..(99): Xaa in position 99 is any amino acid
  Variant (101)..(102): Xaa in position 101 to 102 is any amino acid
  Variant (105)..(105): Xaa in position 105 is any amino acid
  Variant (111)..(112): Xaa in position 111 to 112 is any amino acid
  Variant (114)..(114): Xaa in position 114 is any amino acid
  Variant (123)..(124): Xaa in position 123 to 124 is any amino acid
  Variant (126)..(156): Xaa in position 126 to 156 is any amino acid
  Variant (157)..(163): Xaa in position 157 to 163 is any or no amino acid
  Variant (165)..(167): Xaa in position 165 to 167 is any amino acid
  Variant (170)..(171): Xaa in position 170 to 171 is any amino acid
  Variant (173)..(173): Xaa in position 173 is any amino acid
  Variant (175)..(176): Xaa in position 175 to 176 is any amino acid
  Variant (178)..(178): Xaa in position 178 is any amino acid
  Variant (180)..(181): Xaa in position 180 to 181 is any amino acid
  Variant (182)..(183): Xaa in position 182 to 183 is any or no amino acid
  Variant (186)..(186): Xaa in position 186 is any amino acid
  Variant (188)..(202): Xaa in position 188 to 202 is any amino acid
  Variant (204)..(263): Xaa in position 204 to 263 is any amino acid
  Variant (264)..(284): Xaa in position 264 to 284 is any or no amino acid
  Variant (286)..(312): Xaa in position 286 to 312 is any amino acid
  Variant (313)..(317): Xaa in position 313 to 317 is any or no amino acid
  Variant (319)..(328): Xaa in position 319 to 328 is any amino acid
  Variant (330)..(330): Xaa in position 330 is any amino acid
  Variant (333)..(358): Xaa in position 333 to 358 is any amino acid
  Variant (359)..(403): Xaa in position 359 to 403 is any or no amino acid
  Variant (405)..(407): Xaa in position 405 to 407 is any amino acid
  Variant (409)..(409): Xaa in position 409 is any amino acid
  Variant (411)..(414): Xaa in position 411 to 414 is any amino acid
LXXXXYXXXXXSXXXXXXLXPXWXXXXXXXXPXXXXXXXXXXPNXXTXXGXXXXXXXXXXXXXXXPXXXXXXXXXXXXXXXPXWXXXXXXXXLFXYQTXDXXDGXQARRTXXSXPLGELFDHXXDXXXXXXXXXXXXXXXXXXXXXXXXXXXXXXXXXXXXXXFXXXTWXXYXTXXLXLXXXXGPXEXXXXXXXXXXXXXXXGXXXXXXXXXXXXXXXXXXXXXXXXXXXXXXXXXXXXXXXXXXXXXXXXXXXXXXXXXXXXXXXXXXXXXXXXXXXXXXXXXPXXXXXXXXXXXXXXXXXXXXXXXXXXXXXXXXGXXXXXXXXXXIXAHXXXXXXXXXXXXXXXXXXXXXXXXXXXXXXXXXXXXXXXXXXXXXXXXXXXXXXXXXXXXXXXXXXXXXXXIXXXLXIXXXXI

SEQ ID NO: 129545 - protein, 23 aa, Artificial sequence
  protein pattern
  Variant (2)..(3): Xaa in position 2 to 3 is any or no amino acid
  Variant (5)..(5): Xaa in position 5 is Asp or Glu
  Variant (6)..(6): Xaa in position 6 is any amino acid
  Variant (7)..(7): Xaa in position 7 is Phe or Tyr
  Variant (8)..(8): Xaa in position 8 is Phe, His or Tyr
  Variant (9)..(9): Xaa in position 9 is Ser or Thr
  Variant (10)..(11): Xaa in position 10 to 11 is any amino acid
  Variant (13)..(13): Xaa in position 13 is any amino acid
  Variant (15)..(16): Xaa in position 15 to 16 is any amino acid
  Variant (17)..(17): Xaa in position 17 is Phe, Ile, Met or Val
  Variant (18)..(18): Xaa in position 18 is Cys, Asn or Ser
  Variant (21)..(21): Xaa in position 21 is Thr or Val
  Variant (23)..(23): Xaa in position 23 is Gly or Ser
TXXWXXXXXXXLXLXXXXGPXEX

SEQ ID NO: 129546 - DNA, 2727 bp, Saccharomyces cerevisiae
  CDS (1)..(2727)
atggccaaaaataaccacatttctgccagtggtaacagtacctctggagaccatcgtcttaaagaggaggttctgaccccaactacatctgcctcgactcctcatagaatatttagcgtggacgatgatccaaaggagatccaaaacgatatcaggtatcttgagggtctgcatgaagggttgaagttcgccctgcatgccaataaatccaagcgatctgtaagctcgcaatcaccaatcgtacatagcagcaacaacacgctgcaccaccacgagcaccaacaacacttgccgcccacactagagtcgctatcctccaagtcgcactctgtgccagacttaaatacagctactcccagctctccgaaacgaatgcattcatctatccgggaattacctcatgatgacaatgatgacgaggacgccaatgatgacagtcggttcattatacacgactcgcacggccatgatttacttatagacgagatcaattgccagtcgccttcacacttggaaaacaatgaccaggcgtctaatgcttcgtccacagagtcattcactttacgagaaagacaggacgccatcaacgagacccaccccttcggtatcaggatatggaagcctgctttatataagaaacaccgttcagttcaaagaaccgcggcgcaagacattcacgagactcagttgaagactattacctgggaggtgacttgttccaatgtgctatggtttattttgttcggtttccccattgcgatactcttctactcggcggctattgtggtatttttactaggcggcggaggactggtaacgaactctgcgaaggagtactccaagtgtctgtataaactcgccaattatttcctttggccttttggcaaaatggtatacttgttgcaggacgagcaatatttacaagaagataaggatgaaggtattagtatgcagcaattctacaattgggtgacttcatactccaacaggctggtcttccaccagtctcaggccaagtttcagcaaagagaggaccatccggcccctgcaacggaatcttcgtctttgatgccgcccgctaacacaacagcaacaccgcttaactcgaaccatccatcatataattctattagacacgaaattccgcacgcagcggctcaaagacggtactttgggagaggaaaatggagctggggtcgtgttcttttctatacaatcttccatctcgtcttgcaacccatccttgccgtcttatctctttgcctctggctcctggtgtttaccattcccatgagtaatgttctttggcaaattatgtatcattgcagaagacatccgcttgcattaggcttcaaatatgtcgagaactcctcccaatcgcacgaaaatgaaataacccagcagcaattgaacaaaaatatcctcttatgtacgttccgtgccgctggctggcattactacaagtacacagttgatggtacaaatgttattgttgtgaatttaatatccatcgttttctttacaatttttgacttttatgttttgaaaaatttcctgcattggaaaacgtggttcacatacgaatcctcaatattcattctttgtttgacatccaccatcccactagcattttacattggacaagcagtcgcatcgatctctgctcaaacttccatgggtgtcggtgctgtcattaatgcatttttctcgaccattgtggaaattttcttgtactgcgttgcattgcaacaaaaaaagggtcttctagtggaaggatccatgattggttccattctaggtgccgttctattattaccaggtctgtccatgtgcggtggtgctctaaataggaaaacacaaagatacaaccctgctagcgctggtgtctcttccgcattgttaatattttccatgattgtaatgtttgtccccaccgttttatacgagatatatggcggctactcggtaaactgtgcagacggtgctaacgaccgtgactgtactttctcgcatcctcccctgaagttcaaccgtttattcactcatgttattcaacctatgtccatatcttgtgccattgttctcttctgtgcttatatcattggcttgtggttcacccttagaacacatgcaaagatgatttggcaattgcctattgcggacccaacctcgaccgcaccagaacaacaggaacaaaattctcacgatgcacccaattggtcaagaagcaagtctacttgtattttacttatgtctacgctcctgtacgcaataattgcagaaatccttgtttcctgtgttgatgctgtcctagaagatattccctccttgaatccaaagtttctaggtctcaccatttttgctctgatccccaatacgacagagtttttgaatgccatttcatttgccatccatggtaatgtagcgttatcaatggaaatcggtagtgcttatgctttacaggtttgtcttttacaaatcccatccttagtcatttattccattttctatacgtggaatgttaaaaagtcgatgattaatatcagaacacagatgttcccattagtctttccccgttgggacatatttggtgctatgacgagtgttttcatgttcacctatttgtatgctgagggtaaaagtaactatttcaagggttccatgttgatattactatatatcattattgttgtaggattctacttccagggagctctttcggagtag

SEQ ID NO: 129547 - protein, 908 aa, Saccharomyces cerevisiae
MAKNNHISASGNSTSGDHRLKEEVLTPTTSASTPHRIFSVDDDPKEIQNDIRYLEGLHEGLKFALHANKSKRSVSSQSPIVHSSNNTLHHHEHQQHLPPTLESLSSKSHSVPDLNTATPSSPKRMHSSIRELPHDDNDDEDANDDSRFIIHDSHGHDLLIDEINCQSPSHLENNDQASNASSTESFTLRERQDAINETHPFGIRIWKPALYKKHRSVQRTAAQDIHETQLKTITWEVTCSNVLWFILFGFPIAILFYSAAIVVFLLGGGGLVTNSAKEYSKCLYKLANYFLWPFGKMVYLLQDEQYLQEDKDEGISMQQFYNWVTSYSNRLVFHQSQAKFQQREDHPAPATESSSLMPPANTTATPLNSNHPSYNSIRHEIPHAAAQRRYFGRGKWSWGRVLFYTIFHLVLQPILAVLSLCLWLLVFTIPMSNVLWQIMYHCRRHPLALGFKYVENSSQSHENEITQQQLNKNILLCTFRAAGWHYYKYTVDGTNVIVVNLISIVFFTIFDFYVLKNFLHWKTWFTYESSIFILCLTSTIPLAFYIGQAVASISAQTSMGVGAVINAFFSTIVEIFLYCVALQQKKGLLVEGSMIGSILGAVLLLPGLSMCGGALNRKTQRYNPASAGVSSALLIFSMIVMFVPTVLYEIYGGYSVNCADGANDRDCTFSHPPLKFNRLFTHVIQPMSISCAIVLFCAYIIGLWFTLRTHAKMIWQLPIADPTSTAPEQQEQNSHDAPNWSRSKSTCILLMSTLLYAIIAEILVSCVDAVLEDIPSLNPKFLGLTIFALIPNTTEFLNAISFAIHGNVALSMEIGSAYALQVCLLQIPSLVIYSIFYTWNVKKSMINIRTQMFPLVFPRWDIFGAMTSVFMFTYLYAEGKSNYFKGSMLILLYIIIVVGFYFQGALSE

SEQ ID NO: 129548 - DNA, 3363 bp, Gibberella zeae PH-1
  CDS (1)..(3363)
atggatccccaaagacgtgagaactcgtcgcctaggcgccatcttggcgagtcctcgtccggcactgcgtctcccgccgacacgcgtcaacagcctgcccagaccgagtctgccgtatctcctattacttatggagagaatttgcccgagaatttccagcccgcagatacaatgcgccctagaacagagggctatggttcgataagcggcccagctggttcttctgcccaacaatcaaaagaaacctctcaagagcgcggtttagttcgccctgcccaaccctcacgtccttctcgaggcactgagcgaatgcgatctgctacccgattgcgaaaacccccgatgcctcgacgaccctcttcaaataccccctatcgcggcggagtcttctccgccgacgacgaagttcacgaagtagaagccgatgctgctgtgcgccaacagtcctaccgtcgcagaccaggtctgccgacccagctttcccgcgttcaatcgcgtccggacgacgaagatgacaatgaccgaagcgaccagcccaccgagactcccaccgaaaccccgcaggaggatgaggaagagactcccctcgaggagcatgacgattcggacagcgatgtcagtgaggcagagagcttcaccctgaaggataggcaacaggccataaaccagactcacccctttggtattcgagtgtggaaacctgccttgtacaagaaggatcgttcgattcaaaaattcgcccaagcagatattcactctgccccaggaggtcgcgttaacaactggcttcttacctttaatctgctttggacgctcctctttggttggtggttggctacgttggcagctctgggtgccatcgtatgcctgctttttgctgctgcccctagcgggagagagtacggcagggttctctggggtctcgccgggtacatgttctatccttttggtaagtttgtccgcctggaaaaggatgagacctacatgcacgaggaccaagacgagggacgcagtatctcggaatacgaacaatggcaaagtggcgacattgaacacgggcgactattctttggacccgatagcgagcacaatcgctcgatcgtgggacgatcgagaagaagcatcgactcagagcccagtgagacggaaagccttctaggccgaggccgacgtggtgagcatgtcgataccgatttgtctcatcagcacaagcgacgactttttggccgtggcgagtggaatgttggccgtgtcatctttttcgtcttcttctactgcctcatctcaccctcgcttctgttcgtttctgccatctgctggttcttggtcttctggatccccatgggcaagaccacatttttgctcttcgaccatctccgacgacaccctctggccttgtccttcgagagtgatataagatacattcgcgaggatggcggcccaagctcgtctgttctcctctgcacgtaccgcgctgttggatcaagatactggaagtataccgttgatggaaccaacatcttcctcatcaacctcatggtggttgtcatctttgtcatctttgactggcttgtgattgagggtgttttccatgtcgagggcttcattacatctcccgcatttctcttctgcgccggcctcctatctatcattccccttgcctactttatcggccaagctgttgcttctatctcggcacagtcatctatgggtgtgggcgctgccatcaatgcctttttcgcgactgtcgtggaggtgttcctttactgtgttgctcttagccagggcaagggtcaactcgtcgaaggcagtatcgtgggcagtattttcgccggtatactgttcttgcctggaatttccatgtgctttggtgccatcaaacgaaagactcagcgtttcaatgcgcggtccgcgggtgtaacatccacaatgttgctctttgcgattgtcggagcttttggcccaaccctgttttaccagatttacggaacccacgagctcaactgcatggactgcgaagactacaacaccggcgagaacggtagggactgccgccgctgctacttcagccaggctccatcgctcagcgacagattttatctggaggcggtgcgcccttactgctacatggcagcgaccacgctattcttctcgtacctgatcggtttgtggttcactctccgaactcatgctgctgtcatttggaacgtcgaggttgatgagaagcgacacgaagaccacatgcattcttcgagtatgcgaacctctcaagttcacggccatgcccattctcatactcacaacccaacaactgccgagaccagtggtgccgatgttcgcgactctcaactttataagcgcattctgggtcagtccctgaagcagtctgggtttggagaggaactttcccgccaaaattctaccactgggcagtcagttggcgccaacggctcagcttctacccttcatgtcgtgcctcccaagtctagtggtggtgagccgtcgcactccgctctccatgttccaggtctcagcgaagccgacaacaagatgcttgtgcgcgaggttgccgagattgccgccacagctgctaccattgcctcgcgtgaacgaatgacaagaaagccttcagctgtgcccgctaatcacggagcagccgctcgtcctacgccgagccgtcagcacacccacaacgatgttgcggagactgagggtcctgctacggaggctcaccaagcacatggtggccacgatgcccccaactggagtcgtgccaagagttccattatccttctcggagcaactgttctatatgcgatcatcgccgaaatcctcgttgacactgtggatgttgttttggaaagcttcgcgattgatcaaaagttcctcggtatcaccttgttcgctcttgtgcccaacaccactgaatttctgaacgccatctccttcgctatgaacggaaatattgcgctgtccatggagattggttcagcttatgctctgcaagtgtgccttttacagattcccgccctcgtgttctactcggccttctggcctggtgtgcccgaaggtggcgatccggcgctttacactttctctctcctattccctcaatgggaccttgttatgacaattctttgtgtgttcttactgagctacatgtatggtgaaggaaaaagtaactacttcaagggaagcattctcatgctgacctacttggttgtcatcatcggatactatttcagtggctttacgtctgataccatgggcatgcagcgtttcgatgtcatgggagccgatggcaactaccaaagctacaagacgatcggaagatcgacaaggggtgtggcttttccagcctag

SEQ ID NO: 129549 - protein, 1120 aa, Gibberella zeae PH-1
MDPQRRENSSPRRHLGESSSGTASPADTRQQPAQTESAVSPITYGENLPENFQPADTMRPRTEGYGSISGPAGSSAQQSKETSQERGLVRPAQPSRPSRGTERMRSATRLRKPPMPRRPSSNTPYRGGVFSADDEVHEVEADAAVRQQSYRRRPGLPTQLSRVQSRPDDEDDNDRSDQPTETPTETPQEDEEETPLEEHDDSDSDVSEAESFTLKDRQQAINQTHPFGIRVWKPALYKKDRSIQKFAQADIHSAPGGRVNNWLLTFNLLWTLLFGWWLATLAALGAIVCLLFAAAPSGREYGRVLWGLAGYMFYPFGKFVRLEKDETYMHEDQDEGRSISEYEQWQSGDIEHGRLFFGPDSEHNRSIVGRSRRSIDSEPSETESLLGRGRRGEHVDTDLSHQHKRRLFGRGEWNVGRVIFFVFFYCLISPSLLFVSAICWFLVFWIPMGKTTFLLFDHLRRHPLALSFESDIRYIREDGGPSSSVLLCTYRAVGSRYWKYTVDGTNIFLINLMVVVIFVIFDWLVIEGVFHVEGFITSPAFLFCAGLLSIIPLAYFIGQAVASISAQSSMGVGAAINAFFATVVEVFLYCVALSQGKGQLVEGSIVGSIFAGILFLPGISMCFGAIKRKTQRFNARSAGVTSTMLLFAIVGAFGPTLFYQIYGTHELNCMDCEDYNTGENGRDCRRCYFSQAPSLSDRFYLEAVRPYCYMAATTLFFSYLIGLWFTLRTHAAVIWNVEVDEKRHEDHMHSSSMRTSQVHGHAHSHTHNPTTAETSGADVRDSQLYKRILGQSLKQSGFGEELSRQNSTTGQSVGANGSASTLHVVPPKSSGGEPSHSALHVPGLSEADNKMLVREVAEIAATAATIASRERMTRKPSAVPANHGAAARPTPSRQHTHNDVAETEGPATEAHQAHGGHDAPNWSRAKSSIILLGATVLYAIIAEILVDTVDVVLESFAIDQKFLGITLFALVPNTTEFLNAISFAMNGNIALSMEIGSAYALQVCLLQIPALVFYSAFWPGVPEGGDPALYTFSLLFPQWDLVMTILCVFLLSYMYGEGKSNYFKGSILMLTYLVVIIGYYFSGFTSDTMGMQRFDVMGADGNYQSYKTIGRSTRGVAFPA

SEQ ID NO: 129550 - DNA, 2925 bp, Candida glabrata CBS 138
  CDS (1)..(2925)
atgtccctcagacccactgtttctaaggacaagagcagaccagtgctggtgaagcgcgtattcagtgtggacgatgacgccaacgaggtccagaatgatatacgctacttcgagaacctcgcagacggtgtcaagatagtgctgccggggtccgagaacaacatccaggacagtgctgcgctctccaccggcgggaatgtcgcggtgcccgtgccgcaggggctgcgggatgaggcgctggtgcccgtggactcgctcaggtccttgtccacgccggacctgatggaatctatcactaacttgcagcagaaactggtgacgccgcggatcaacggcgtcgcggcgcatggaaacgtcggctcgccgcgcttcatcatacatgaccacacacatacgcacccgggcgataagaagagcgccacgcaccatgacttgtacatagaggagctgcccgcccagcggtcgaacagcagtcaagcgttgcctgccggaagtgtggccggcggcaacggcaccagcagcctcacggatataccgcccgtggacctcgaggctagcaatctcggagaaacagagagactggacccagacaacgcctcccgagcatcgtccatcgaatcctacaccttgagagagagacaggacgcgatcaacgagacacaccccttcggtatcagaatatggaagccagcgctgtacaagaagaaaagatcagtggagaaggctgccgatgaggatatccacgagactaagttgaaaaagatcacctgggctgtgaaggcaaccaattggatctgggtagctacttgcggactgttcttgttcacggtgttcgcttccgcctctataacggttttaatagcgggtctatttaccaaatcagcgagggactactctagactaatgctcagactggcaagatatttactgtaccccttcggcaaagtagtgtatttgatacaggacaaacaatacttggaagaagatagagatgagggtattagcgttcagcagttttataactgggtgacttcatacaagagcaggctatttttccacgaatcacaaactcgtccaactgagtcagacgctcttgggaacaatatgcatcacacatcgtatggctccatacagaaggtggtcggcgagcaaactaacacagagagtaataatccaatgttggataataatggttatacggaattaccacattcaacttcgttccagaatcccagtaatgatcatcaaaactctgctgccactcagagaagattgtttggaagagggaagtggtcacttggtagaattgtgttttatgcaattttccacatcgtcttacagcctattgtcttgttcctttcattattgacctggttggctgtattcacaatacctatgagtaatatactttggaatttgatgtaccattgtagacgccatcccttggcgttaggcttcaagagtataaaaaattcaagtaaccagatcatagagcattatgatgataagaatattttattgtgcactttcagatgtgccggatggcattactataaatttacaatagacggtactaatgttatagttgttaacttaatcgctatggttttctttacaattttcgatttctatgcattgaaggagttctttaatattgacttatggataacaagtgaatcaacagtctttatattatgtttagcctcgattattccattggctttttatattggccaagccgttgcatctatttcagcgcaaacttcaatgggtcttggtgctgttatcaatgcatttttctcaacaattgtggaaatattcttatactgcgttgcccttcagcaaaagaaaggtttgctggtcgaaggttcaatgatcggatcaatattgggtgctgtgttattgctacctggtctttccatgtgtggtggtgccttgaaccggaagacacaaagatataaccccagaagtgcgggtgtctcatctgctttactgatcttttcaatgatagtgatgtttgttccaacacttttatatatgatgtacagtggttatgacgtcatttgtgatgatttagacgccacattaccactagacctctattctgcctataaggtgatgagtacgtcaaaatgccatttctctcacccacctctaaagttcgacaagttgtatacccatgtcattgaaccgatgtcaatcgtatgtgcattcgttctattcttagcttacactattggtttatggtttactctgagaacacatgcagcaaccatatggcaacttccaattgctgatccaccaagagagattgtcaatactgaggcaaacggtatcgacggaatattatcccatgaagaagaccataatgatgaaggtggtgggcatgacgcaccaaattggtctagatcaaaatctacactaatacttctacttgcgacattgttatatgcaatcattgccgagattcttgtttcttgtgtagactctgtcttggaagatttcccatccttaagtcccaaattcttaggtcttacaatatttgccttggttccaaataccacggaattcttgaatgccatttcatttgcaatgcatggaaacattgccctgtcgatggaaattggttcggcttacgcattacaagtgtgtctactacaaatacccgctctggttctattctcagtaatcaccgccatcggtgttgataaagctttaatcagcatcagagatcaaatgttcccattagtatttccaacctgggacctggttgcaagtatggcaagcatatttgtatttacctatctgtacgcagagggtaagtcaaactactttaagggatcaatacttatcctattgtatgtgatcatcataatgggtttttactaccaaggactgatcgccgaatggggtatcattacataa

SEQ ID NO: 129551 - protein, 974 aa, Candida glabrata CBS 138
MSLRPTVSKDKSRPVLVKRVFSVDDDANEVQNDIRYFENLADGVKIVLPGSENNIQDSAALSTGGNVAVPVPQGLRDEALVPVDSLRSLSTPDLMESITNLQQKLVTPRINGVAAHGNVGSPRFIIHDHTHTHPGDKKSATHHDLYIEELPAQRSNSSQALPAGSVAGGNGTSSLTDIPPVDLEASNLGETERLDPDNASRASSIESYTLRERQDAINETHPFGIRIWKPALYKKKRSVEKAADEDIHETKLKKITWAVKATNWIWVATCGLFLFTVFASASITVLIAGLFTKSARDYSRLMLRLARYLLYPFGKVVYLIQDKQYLEEDRDEGISVQQFYNWVTSYKSRLFFHESQTRPTESDALGNNMHHTSYGSIQKVVGEQTNTESNNPMLDNNGYTELPHSTSFQNPSNDHQNSAATQRRLFGRGKWSLGRIVFYAIFHIVLQPIVLFLSLLTWLAVFTIPMSNILWNLMYHCRRHPLALGFKSIKNSSNQIIEHYDDKNILLCTFRCAGWHYYKFTIDGTNVIVVNLIAMVFFTIFDFYALKEFFNIDLWITSESTVFILCLASIIPLAFYIGQAVASISAQTSMGLGAVINAFFSTIVEIFLYCVALQQKKGLLVEGSMIGSILGAVLLLPGLSMCGGALNRKTQRYNPRSAGVSSALLIFSMIVMFVPTLLYMMYSGYDVICDDLDATLPLDLYSAYKVMSTSKCHFSHPPLKFDKLYTHVIEPMSIVCAFVLFLAYTIGLWFTLRTHAATIWQLPIADPPREIVNTEANGIDGILSHEEDHNDEGGGHDAPNWSRSKSTLILLLATLLYAIIAEILVSCVDSVLEDFPSLSPKFLGLTIFALVPNTTEFLNAISFAMHGNIALSMEIGSAYALQVCLLQIPALVLFSVITAIGVDKALISIRDQMFPLVFPTWDLVASMASIFVFTYLYAEGKSNYFKGSILILLYVIIIMGFYYQGLIAEWGIIT

SEQ ID NO: 129552 - DNA, 2946 bp, Kluyveromyces lactis NRRL Y-1140
  CDS (1)..(2946)
atgcctaaaaagtcaattaaaccggtaaagagtaattcttcagagggtacgaagcggatcttttctgtagacgatgatgccgaggagttagaacgcgattaccattatttagaaggagtgaaagatggactgaagctgaaaagagttggtactttatcttcgaagcaggaccccacattgcacagaattggttcgcgtttcagtgttagtgaagacaatgataggataatagttcatgatggagacagacatctggttttgcaagaggagcaaagaaaaaatggtgatacttatgatggcgatgaggatgcaagagatggatcgaatagtggaaatacccatgatggaaataagcatgctattaccgctgcatctcataataacgaaccgaatagcagtaaaaaaaagaataaaaatgatatcgaaaatgactatgacgagaatccattggacactttgattattgatgacgacagtgaaagttctaatattcaggatatcgaaacaggaagcattagctctgttgaatcgtatacgttacgagaaagacaagaagcgattaataaaacacatccgtttggtattaggatatggaaaccggctctttataagaagaaaagatcagtgcagcaagctgcagatgaggatatccatgaaacaaaaatcagaaacattacccttggtgttcaaatcactaatttaatatggtctttcactgttggtctgtttttatttttgattttcacaatggcttcatgtttagtattgatctttggaggattcactggatctgcgatcgagtattctttagtgttttatcggttgggacgctatttactctggccattcggaaagattgtattgatgaaatcagatgcgcaatatcttgtagaagatcaggacgaaggtatcagtgcccagcaattctacaaatggattaccaattatagcaatcggttattttttcatgaatcacaagctatcaatgataataatgccagcacaaataattcgaataacttttcttccagccaaaacgccagggccaacattagtaataatgacacatccactcgcaataacagcaataacataatcacggcaagaaacaacattaataaccatagacaagattcgtatggatcaatacctataattacagagagaactgacacaaacgacgatcaaagtgacgaagaaaacggacatttacatcgtcgtctatttgggcgtggtaaatggacaattggcagattcattttttatttcatgttccacattgtcgttcaaccagttgtgatgttgctgtccctaacaacttggttgtttgtattcactattccaatgagtaatatcttgtggaatttaatgtatcattgcagaaaacatcctttggctttgagaatcattgacgtaaaaagtgctacgtcagcagtggcaaccactccaatcgaagatatcaaaggccaaaatgtcttattatgcaccttccgttgcgctgggttacactactataaattcacagtggatggtactaacgttatggtcatgaacttgattgccttggttatattcaccatattcgacttttatgcaattaaaaatatctggcaaatcgacacttggctaactgatggatctactattttcatgttgtgtttattgtctattatacctttggcattttacatcggacaagcagttgcttctatttcagctcagagttcgatgggtgtggcagctgtaattaatgcgtttttctccaccattgtcgagattttcttatactgtgtcgcacttcaacaagagaaaggtctactagtggaaggttcattgattggatctattctagctgccgttctattattacctggtatgtccatgtgtggtggcgctttcaaaagaaaaactcagcgttataaccccgccagtgccggtgtttcttgcgcgatgttaattttctcgatggtagttatgtttattccatcagtgttgtatgaaatatatggtgagtgggatttactttgcaatgaaaatggagagaaatgtcattttgtacagcctcaattaaagtttgacaaaatgtactctgctatccttagacccattgtactattctgtacggttgcattgttccttcaatatattatcggtatgtggttcacattaagaacgcacgctaaactgatttgggaattaccgattgctgaaacgaaagatgtgaacaatgatcaaagtcagctgactactagcatgtctatgagccaaaattcctttgctccattaaataaaaccaattccaatattcttggtgtcacaagtagcacatctggagcaaataatgcagcgaaagcgaccaataattgtgatcaaagtagtggccacgacgcaccaaattggtctaaaacgaaatcaacatgtattctattaggcgcaactttcttgtatgccattattgcagaaatattagtagattgcgtggatcaggtcctcgaacaatatccagctgtgaatccaaaatttttgggattgaccatttttgctcttgttcctaataccacagaatttttaaatgctatttctttcgcagtcaatggtaatgttgcactttcaatggaaatcggtagtgcttatgcattgcaagtatgcttgttacaaattccagccttagtcatattctctatgctatacgtttggggtaaagatttgactcaaattagcattagagatagaatgttcccgatggtgtttcccagatgggatttacttgcatcagtagtgtcagtgtttctattcacttacttatatgcagaggggaaatcgaattatttcaaaggaagcattttaatattattatacctggttgtcattttcgggttctatttgcaagaaataatagatgatgatttctgggatatatctcttttcgttagattcataaactaa

SEQ ID NO: 129553 - protein, 981 aa, Kluyveromyces lactis NRRL Y-1140
MPKKSIKPVKSNSSEGTKRIFSVDDDAEELERDYHYLEGVKDGLKLKRVGTLSSKQDPTLHRIGSRFSVSEDNDRIIVHDGDRHLVLQEEQRKNGDTYDGDEDARDGSNSGNTHDGNKHAITAASHNNEPNSSKKKNKNDIENDYDENPLDTLIIDDDSESSNIQDIETGSISSVESYTLRERQEAINKTHPFGIRIWKPALYKKKRSVQQAADEDIHETKIRNITLGVQITNLIWSFTVGLFLFLIFTMASCLVLIFGGFTGSAIEYSLVFYRLGRYLLWPFGKIVLMKSDAQYLVEDQDEGISAQQFYKWITNYSNRLFFHESQAINDNNASTNNSNNFSSSQNARANISNNDTSTRNNSNNIITARNNINNHRQDSYGSIPIITERTDTNDDQSDEENGHLHRRLFGRGKWTIGRFIFYFMFHIVVQPVVMLLSLTTWLFVFTIPMSNILWNLMYHCRKHPLALRIIDVKSATSAVATTPIEDIKGQNVLLCTFRCAGLHYYKFTVDGTNVMVMNLIALVIFTIFDFYAIKNIWQIDTWLTDGSTIFMLCLLSIIPLAFYIGQAVASISAQSSMGVAAVINAFFSTIVEIFLYCVALQQEKGLLVEGSLIGSILAAVLLLPGMSMCGGAFKRKTQRYNPASAGVSCAMLIFSMVVMFIPSVLYEIYGEWDLLCNENGEKCHFVQPQLKFDKMYSAILRPIVLFCTVALFLQYIIGMWFTLRTHAKLIWELPIAETKDVNNDQSQLTTSMSMSQNSFAPLNKTNSNILGVTSSTSGANNAAKATNNCDQSSGHDAPNWSKTKSTCILLGATFLYAIIAEILVDCVDQVLEQYPAVNPKFLGLTIFALVPNTTEFLNAISFAVNGNVALSMEIGSAYALQVCLLQIPALVIFSMLYVWGKDLTQISIRDRMFPMVFPRWDLLASVVSVFLFTYLYAEGKSNYFKGSILILLYLVVIFGFYLQEIIDDDFWDISLFVRFIN

SEQ ID NO: 129554 - DNA, 3438 bp, Yarrowia lipolytica CLIB122
  CDS (1)..(3438)
atgcccgaaagtgactcgaccaaggccaagggagacgcccaacactcacgtgagccgtcacgtgagtcgttgcaggccccgcaacacgacatttactcgtcttcgatagataccattcgcccgggcgagttccgctcggtgagccctcgaacggcgccaaaccccaactcgaccgcgacccccaaccccggtcccaatcctgggccttccggatcgagcaaccctggccctgccgccgtcaagcccagcccaaacctcacggcgctgtcgcaaccctcgcccagtctcaaccccaaacagccgtcgctggttctgccccaacccagatcttccctaagccggggcacctcgacctctcacgagcgacgataccagtactccgtcgacgacgacgagtacgaattcgaagccgatctggaacgggagtttctggagggatatgcaaaggccatcaaggaccaggagcgaaaacggcgacggaaaaagagtcacgtgcccggaggaggcagcatcagcggcggatcacgtgagcgcgacgcgagccgtggccactcgctcagtcacgtacgttctcgggactcggtgccgcgggagtcgccgtcaccgatcattaagcaggacttcaacccggcttactcagaccacgatgctgaccaatgcgacgtcgacggggaccacgacttgcacgaccccgcgggcagccacgtgacgcacgccgacggggaccacgctgactcaacggaaattgctgactcagccggcctcgacgacgacgacgacgccgacgcagatgactcagccgacgcagatgactcagccgacgacaacgcgtcggtcctctccaacgagtccttcactctcaaggagcggcaggccgccatcaacaccacccacccattcggaatccgaatctggaaacccgcaatttacaaaaaaaaccggtctgtgcaggcccaggcggaaggcgatattcacatgactccgggaaagacggtgggatggcggattttcttaggtaatgcgctgtggaccttgtcgttcggcctgttgctctacatggtttgtgggctagggtttattacgtgctcgctgtttttctggtccaattccgcccgccagtacggccgtgtcttacataagacgggcttctatcttctctatccgtttgggcagtttgtgcagctcgcggccgacgaaaactatctgcatgaggatgagggcgagggtaggactctgggagagtatgagcggtggcaggcgggtgatttggagcatggccggctcttttttggaccggattcgaaccatggccaccctacccagggaaccaaccctacctctcaccctaaccaccctaaccaccacgaccccagctctggcgcccacgtagaccccgtgagaacccccctgctgggccgcaaccggtcgtcgctgtcgtccgcgtccgaagactcgctcggagaagactcggaaaccggcgtctcacgtaagcgacggttctttggccggggcgaatggaatctcggccgaattctcttctacacgtggttttacgtaatcatcacccctgtcatctacgccgtctccctcatctgctggttcctcgtctttctcatccccatgggcaaggtgactaatgtgctctgctaccatttgcgacggcatccattagccctcaagttcaagtccgactcgcaatattatgagctcaacggctccggcgacggctccggggccattctgctgtgcacataccgcgcctttggctggaagtattacaaatacaccattgacggcaccaacatttttttcatcaatctcattggcgtggtgtttttcggcatcttttcaaactactttctacggctccacctgggactcgacctgctaattactcagccgctcttcatcttcttggtcagcttagtcagcgtcatccccctcgcctacttcattggccaggccgtcgcctccatctccgcacagacctccatgggaatgggcgccgccattaacgcctttttctccactattgtcgaggtttttctctactgtgtcgccctacaacagggtaagtcagccctggtggagggcagtatcattggaagcattttggccggcgtcttgctgttgccaggcctcagtatgtgcacgggagcgatcaagcgcaagactcagcggtacaatcccaagtctgcgggcgtttcgtccaccatgttgttgtttgcgattctgggcacgtttgcgccgacgtttttctaccagattcatgggtcatatgagctgcggtgcgatggcgagtgcgagggtcctaatctcatgatgggtcgcaacctgattagtcatgctgggtcagcgctcgcaaacggccagcaggtgcttgctgagtcagccaccgccgctgccagcttctgctcgcgctgccaattcttccaggtcccgctcgtctacgacgacctctatcaaaaggctctcaagccgctttccggcatctgtgccattctgctgtttgtgtcttacataatcgggctgtggttcactctgcggacccacgcggccatgatttggcagacgccgattcacgagaaaaaggaggtggtccaggttaaccccaaccctggtgctgggggccggagttcttccgtcgccactccggtgcatcgcgccactccggctaccattctcgacgaccccgccggtttgaagcatcgtccgggcaccaacccgggacatcccaactctggtaaccccaaccctggcaaccccaaccccaaccctggtaaccccaaccctggctctggtccaaccgtcaccctggcaactccgctcgtggtctccgcccccgtcgaagaggccccctcgggacacagccctgacgccaactggtcacgttccaagtccaccttcattctgctctcggccactctgctctatgctgtggttgccgaaatgctggtagataccgtcgatgtagttctggagaacgcggcgatcggcgaaaagttgcttggaatcaccattttcgccctcgtgcccaacaccaccgagtttctcaacgccatttcgttcgccatgggtggcaatatcgcgctgtcgatggaaatcggctccgcctacgccctccaggtctgtctgctgcaaatcccggcgctggtgctctactccatgtggaacaacaatgtcgacatggacacggcgcacatgttcactctcattttcccgcggtgggatctgtttgtggtgatgatctgtgtctttctgttttcgtacatttacgccgagggcaaaagcaactacttcaagggctccattttggtgcttgcgtggtgcgtggtcatggtgggcttctatttcgacggagtcgtgtctgaagatggatttggcgattctccgggaatgctgagtgccttgttgctgccccagagaatggttagatag

SEQ ID NO: 129555 - protein, 1145 aa, Yarrowia lipolytica CLIB122
MPESDSTKAKGDAQHSREPSRESLQAPQHDIYSSSIDTIRPGEFRSVSPRTAPNPNSTATPNPGPNPGPSGSSNPGPAAVKPSPNLTALSQPSPSLNPKQPSLVLPQPRSSLSRGTSTSHERRYQYSVDDDEYEFEADLEREFLEGYAKAIKDQERKRRRKKSHVPGGGSISGGSRERDASRGHSLSHVRSRDSVPRESPSPIIKQDFNPAYSDHDADQCDVDGDHDLHDPAGSHVTHADGDHADSTEIADSAGLDDDDDADADDSADADDSADDNASVLSNESFTLKERQAAINTTHPFGIRIWKPAIYKKNRSVQAQAEGDIHMTPGKTVGWRIFLGNALWTLSFGLLLYMVCGLGFITCSLFFWSNSARQYGRVLHKTGFYLLYPFGQFVQLAADENYLHEDEGEGRTLGEYERWQAGDLEHGRLFFGPDSNHGHPTQGTNPTSHPNHPNHHDPSSGAHVDPVRTPLLGRNRSSLSSASEDSLGEDSETGVSRKRRFFGRGEWNLGRILFYTWFYVIITPVIYAVSLICWFLVFLIPMGKVTNVLCYHLRRHPLALKFKSDSQYYELNGSGDGSGAILLCTYRAFGWKYYKYTIDGTNIFFINLIGVVFFGIFSNYFLRLHLGLDLLITQPLFIFLVSLVSVIPLAYFIGQAVASISAQTSMGMGAAINAFFSTIVEVFLYCVALQQGKSALVEGSIIGSILAGVLLLPGLSMCTGAIKRKTQRYNPKSAGVSSTMLLFAILGTFAPTFFYQIHGSYELRCDGECEGPNLMMGRNLISHAGSALANGQQVLAESATAAASFCSRCQFFQVPLVYDDLYQKALKPLSGICAILLFVSYIIGLWFTLRTHAAMIWQTPIHEKKEVVQVNPNPGAGGRSSSVATPVHRATPATILDDPAGLKHRPGTNPGHPNSGNPNPGNPNPNPGNPNPGSGPTVTLATPLVVSAPVEEAPSGHSPDANWSRSKSTFILLSATLLYAVVAEMLVDTVDVVLENAAIGEKLLGITIFALVPNTTEFLNAISFAMGGNIALSMEIGSAYALQVCLLQIPALVLYSMWNNNVDMDTAHMFTLIFPRWDLFVVMICVFLFSYIYAEGKSNYFKGSILVLAWCVVMVGFYFDGVVSEDGFGDSPGMLSALLLPQRMVR

SEQ ID NO: 129556 - DNA, 2772 bp, Candida albicans SC5314
  CDS (1)..(2772): transl_table=12
atgtcaaacacaccaatacagggatcatcaagcaaaccgaatgtggctgccgaggactactcacgcagctccagccgtaccaacatactgtctgtaaggaatcggtcagccaccagaatgaaaaagaactcaagacccaatttaaaacgacttggctcggttagccacccccaaggattggtttattctgttgacgacgatataaatgaaaatgacaaggacgacagcaccaaagagtcggaacccaaaagcgacagagactatttagagggatacaacgacgccttacgagcattgtcaaaccgcaaaggcagaacatcttctggccacctttcgatcgctggaacaccacttaggtctcccgaggaaattgccaccattgaatctaaactagccaaagatttgacggacgcagaagaacaaatgaggttactagaagatctcgacagtggccccacccccaatgttaccgacgagtttgttgagcccgaagacaacaacgaagatgctgggtcaatcaagtcgacatccacagtcgagtcgctcaacttaaaggaaagacaaaacgccatcaactcgacccacccgtttggtataaagatttggaaaccttcgttatacaaaaagaaacggtcagtggctacccgtgccgaagaagacatccacgatttcgacccacgtaaaccaacagcaaggatttactggggcgtaaagttgaccaacatcgtatggtccttaactgcgggattactcatctgcctcatctgcttgcttggcgcagcatttgtatttatcttttcggggtttgctattgagagaaaactgagaccttacgtcaaggcattgttaaagttgggacattactggttatacccatttggtaaatttgtattgttgaaccgagaacaaaactacttggacgaagaccaattagaaggaagaaccatcaacgaattccatcaatggagactccaggaagaaggaagattgtttttcgccccaccaagaaggtacactggatccgaatcaacacgaccattgctaaaagaccaccgaggtcgacctttgcgagatgcatactcgctgttggacgacggtatacaagaagaagaagacgagcaggacaacgacgctaacgacatcaaagtcaggtttttcggacgtggtgactggagttttggaagaatcgcattttacgtatacttttacggtattatccagccaatttcctttttcatcggcatcttgtgctggctcatcgtgttcaccatccccatggcgaaaatcacaaacaccatgaacgaccatatgagacgacacccattggcattggactacgagctcgaaaaggattactacaaaagggttgaacgcaccccaagaaagaagaaccaggtcatcttgttatgtacctacaggtgctgcggattccattactacaagtataccatcgacggtaccaacatctttttcataaacctattgtcagtggtcatctttgcaatcttggactactacttcctaaaggaaaccatgcactgggactcctggataaccgagtccaactttattttctgcttgtcgttgttttcaatcataccattggcatatttcattggccaggccgttgcatctatctccgcacaatcgtcaatgggcgtgggtgcggtgatcaacgcctttttctcaacaattgtggaaatctttttgtactgtgttgccctcaaccaagcaaagggaaaattagtcgaagggtccatgattgggtcaattttgggtgcagtgttgttgttgccagggttgtcaatgtgcgggggtgcattcaaacggaaaactcagagatacaacccgagatctgctggtgtctcctcaacaatgttactgtatgccatggtggtgatgtttgccccatcgatcttctaccaaatgtacggaagctacgaaatgaaatgcaaagactgcacatcccccggagtttgcggccggtgcagatttatccagcccacatttgtcttggactccctctactcaacagtcatcaaaccattttcgttgattgtcacagtggccttgtttgcagcatacgtttgtgggttatttttcactttacgaacccacgcatccttgatctgggcaactacgtctcacgaaccaaaacgcgacgactatttcagatcaaacagtgttgtcagcatgagcacaccaacccaaacaccaaaacccaccaccccattaccggccaagccagaagaagaccaaggtggcggccacgacgcacccaattggtcaagatcgaaatctacaatcatattgcttggggcaacaattttatatgccattatcgcagaaatcctagtcgacaacgtggactccatcttggcagatttccccataaaccccaaattcttgggactaacggtttttgcattggttccaaataccacagagttccttaatgccatatcgtttgccgtcggcggcaatgtcgccttgtcgttagagatcggtagtgcatacgctttgcaggtggtgttgatccaaattccgtgcttggtcctctactcaatataccagaactttgaaaatgtcgagcagacattcacgttgattttcccactgtgggatatcatcgccacactcatttccatatacttgttcacctacatctacgccgagggtaaatcaaactactttaaaggtgtcattttgatattgatctatgttgttgttctctctgggttctggtttaacgatattatcgatagcatctag

SEQ ID NO: 129557 - protein, 923 aa, Candida albicans SC5314
MSNTPIQGSSSKPNVAAEDYSRSSSRTNISSVRNRSATRMKKNSRPNLKRLGSVSHPQGLVYSVDDDINENDKDDSTKESEPKSDRDYLEGYNDALRALSNRKGRTSSGHLSIAGTPLRSPEEIATIESKLAKDLTDAEEQMRLLEDLDSGPTPNVTDEFVEPEDNNEDAGSIKSTSTVESLNLKERQNAINSTHPFGIKIWKPSLYKKKRSVATRAEEDIHDFDPRKPTARIYWGVKLTNIVWSLTAGLLICLICLLGAAFVFIFSGFAIERKSRPYVKALLKLGHYWLYPFGKFVLLNREQNYLDEDQLEGRTINEFHQWRLQEEGRLFFAPPRRYTGSESTRPLLKDHRGRPLRDAYSSLDDGIQEEEDEQDNDANDIKVRFFGRGDWSFGRIAFYVYFYGIIQPISFFIGILCWLIVFTIPMAKITNTMNDHMRRHPLALDYELEKDYYKRVERTPRKKNQVILLCTYRCCGFHYYKYTIDGTNIFFINLLSVVIFAILDYYFLKETMHWDSWITESNFIFCLSLFSIIPLAYFIGQAVASISAQSSMGVGAVINAFFSTIVEIFLYCVALNQAKGKLVEGSMIGSILGAVLLLPGLSMCGGAFKRKTQRYNPRSAGVSSTMLSYAMVVMFAPSIFYQMYGSYEMKCKDCTSPGVCGRCRFIQPTFVLDSLYSTVIKPFSLIVTVALFAAYVCGLFFTLRTHASLIWATTSHEPKRDDYFRSNSVVSMSTPTQTPKPTTPLPAKPEEDQGGGHDAPNWSRSKSTIILLGATILYAIIAEILVDNVDSILADFPINPKFLGLTVFALVPNTTEFLNAISFAVGGNVALSLEIGSAYALQVVLIQIPCLVLYSIYQNFENVEQTFTLIFPSWDIIATLISIYLFTYIYAEGKSNYFKGVILILIYVVVLSGFWFNDIIDSI

SEQ ID NO: 129558 - DNA, 2922 bp, Aspergillus oryzae
  CDS (1)..(2922)
atggcaacccctccccttcgtttcaaccagaaacgtactttagaaccctcagaaagggaggagcctgattcacgcctggacgaaagtcgaccggagagttcgaaccgcatccctccgtctcaatcgccatcaacggtaacccaatccgacaaaccaaggaaaccatccgtcacgcgtcgcatgtcctctaagcggacgataccccataagggtcaggagttctctactgatgatgatgtacaagaagttgaggaagacatcgctaagcaacaggctacgaatcctcagaattcaccaaggatgcgccctttacgaaagcaaagctcgagcctcaggagaagaatcaatgctcgcatcaatcctctgacacgagcagatcctgcggacaatgaagatgagaacaccgttctaccagcatctagcttggaagtagccggaaatggcacctcttctcagcactctgagggtggaagccaagatagtaatgacaataacgacgaggacgtcagcgatgcggaaagttttacactgaaggatcggcagcaggctatcaatgaaacgcatccttttggaataaggctatggaaacctgccctatacaaaaagagtcgttcagtggagaagaccgctgaaggtgatattcattcgtcacctggcggtcgagtagggaccatgctgttcctaacaaacttattgtggacggcattcttcggatggtggcttgctttggctgcgcttattggttctgtcgcctgcttcatcttcgcgtactctccaagtgctgtggaatatgggaaagtcttctccggcctctcttggtacctgatatacccgttcggatcgtttgtccgtcttgacaccgatgagaattacgcagaggaagatgaaggcgaaggccgcagcattagcgagtatgaacaatggcagaacggtgacctagaacatggaaggctgttctttggccctcgccgtggccgatccctcgtgggcagaagaagaaatagcattgattcggccagtgaacaggacagtctgctgggacggacccaaagagccagttcacacgatagtcctctaggtcatcataaacgacgtttgtttggccgtggcgagtggacccttggtcgtgtcgtgttctttgtctttttttatttcctcgtgggacctttgatgctattggtatctctcctctgctggttgctggtcttctggattccaatgggacgcgtgaccattatattatttgatcatcttcgtcgtcatcccctcgctctctcataccattctgatacctcatatacacggctaagcccaaactcctcttcatctattcttttatgcacctatcgcgccgccgggttaaggtactggaaatacacggttggcggcaccaacatcttcttgatcaatcttctcggtgttgtactgtttgtgatttttgactacttctttttggaaaaaactctaggtgttcaaaactccttgactcacccgggcttaattttcaccctggcccttgtttccatcatccccctggcttatttcattggacaggccgtcgcttcgatctccgcacaatcctcaatgggtatgggtgctgcagttaacgctttcttttcaacggtggtcgaggtttacctgtactgtgttgctttaaccgagggtaaaggccagcttgttgaaggtagtatcataggtagtatcttcgcaggcatcctgtttctccctggattatctatgtgctttggagccatcaagcgtaaaacacagaggtttaatgttaaatcagccggtgtcacctctacgatgcttatgttcgctgtgattgctgccttcgggcccacactgttctatcaaatttatggcagccatgaattaaactgtcgcccctgcttcagcacgatagatgcgggcggtagtgattgccgtcgttgttacttctctcaggtccctgctgttaatgatagcttttttcgaaaggctgtaaagccttattcatggtttgcggctttatttctgtttctatcgtatatcattggtttatggtttacgcttagaacccacgctgccctcatatgggctacagaaattgaagagaagaaagcggcggctgtcgtccaggagcacggcccttacgagccaaggcacctcctccagagcgggccaccagcggctgctggtgcaaacgctggtccaggtccaaagggttccaccccagcacgccatagtaacagaggatccactgacccagtcaaggcggtagtagaggagcttgatgatattggactcgagaacggccaaaccagtggcgggcatgatgcaccaaactggagcaaggctaggagctcaatcattcttctaggagccaccgttttctatgcaatcattgctgaaattcttgtgaacaccgtagatgtggtgctggagagtgttgacattgatgaaaagttccttggaatcacactatttgctctagtccccaacacgacggagttcttgaatgccatctctttcgccatgaatgggaacatagccttgtcgatggagatcggttcagcctacgccttgcaggtttgccttctccagattccagccctggtactgttcagcgctatttatgaacgcttgattgatcccgcagaacttctaactcacaccttcaaccttattttcccgcaatgggacatggtttcagtaatactttgtgtctttctcctatcctatgtctacggtgaagggaagagcaactacttcaaaggatctatccttgtcctcacatatcttgtcgttgtgattggtttttacttgtctggctacagcaacatggacgtcatgggtgtcgatcgcctcgacacattggcgcttggcacctcccaaacatttcacactctcggtaggtcaaagagtggcatggcctattga

SEQ ID NO: 129559 - protein, 973 aa, Aspergillus oryzae
MATPPLRFNQKRTLEPSEREEPDSRLDESRPESSNRIPPSQSPSTVTQSDKPRKPSVTRRMSSKRTIPHKGQEFSTDDDVQEVEEDIAKQQATNPQNSPRMRPLRKQSSSLRRRINARINPLTRADPADNEDENTVLPASSLEVAGNGTSSQHSEGGSQDSNDNNDEDVSDAESFTLKDRQQAINETHPFGIRLWKPALYKKSRSVEKTAEGDIHSSPGGRVGTMLFLTNLLWTAFFGWWLALAALIGSVACFIFAYSPSAVEYGKVFSGLSWYLIYPFGSFVRLDTDENYAEEDEGEGRSISEYEQWQNGDLEHGRLFFGPRRGRSLVGRRRNSIDSASEQDSLLGRTQRASSHDSPLGHHKRRLFGRGEWTLGRVVFFVFFYFLVGPLMLLVSLLCWLLVFWIPMGRVTIILFDHLRRHPLALSYHSDTSYTRLSPNSSSSILLCTYRAAGLRYWKYTVGGTNIFLINLLGVVLFVIFDYFFLEKTLGVQNSLTHPGLIFTLALVSIIPLAYFIGQAVASISAQSSMGMGAAVNAFFSTVVEVYLYCVALTEGKGQLVEGSIIGSIFAGILFLPGLSMCFGAIKRKTQRFNVKSAGVTSTMLMFAVIAAFGPTLFYQIYGSHELNCRPCFSTIDAGGSDCRRCYFSQVPAVNDSFFRKAVKPYSWFAALFLFLSYIIGLWFTLRTHAALIWATEIEEKKAAAVVQEHGPYEPRHLLQSGPPAAAGANAGPGPKGSTPARHSNRGSTDPVKAVVEELDDIGLENGQTSGGHDAPNWSKARSSIILLGATVFYAIIAEILVNTVDVVLESVDIDEKFLGITLFALVPNTTEFLNAISFAMNGNIALSMEIGSAYALQVCLLQIPALVLFSAIYERLIDPAELLTHTFNLIFPQWDMVSVILCVFLLSYVYGEGKSNYFKGSILVLTYLVVVIGFYLSGYSNMDVMGVDRLDTLALGTSQTFHTLGRSKSGMAY

SEQ ID NO: 129560 - DNA, 25 bp, Artificial sequence
  primer
atggccaaaaataaccacatttctg

SEQ ID NO: 129561 - DNA, 22 bp, Artificial sequence
  primer
ctactccgaaagagctccctgg

SEQ ID NO: 129562 - protein, 953 aa, Artificial sequence
  consensus sequence
  Variant (2)..(3): Xaa in position 2 to 3 is any amino acid
  Variant (6)..(6): Xaa in position 6 is any amino acid
  Variant (9)..(10): Xaa in position 9 to 10 is any amino acid
  Variant (13)..(13): Xaa in position 13 is any amino acid
  Variant (17)..(17): Xaa in position 17 is any amino acid
  Variant (25)..(25): Xaa in position 25 is any amino acid
  Variant (34)..(34): Xaa in position 34 is any amino acid
  Variant (38)..(40): Xaa in position 38 to 40 is any amino acid
  Variant (42)..(43): Xaa in position 42 to 43 is any amino acid
  Variant (47)..(60): Xaa in position 47 to 60 is any amino acid
  Variant (61)..(64): Xaa in position 61 to 64 is any or no amino acid
  Variant (66)..(67): Xaa in position 66 to 67 is any amino acid
  Variant (69)..(72): Xaa in position 69 to 72 is any amino acid
  Variant (74)..(94): Xaa in position 74 to 94 is any amino acid
  Variant (95)..(98): Xaa in position 95 to 98 is any or no amino acid
  Variant (100)..(102): Xaa in position 100 to 102 is any amino acid
  Variant (104)..(109): Xaa in position 104 to 109 is any amino acid
  Variant (111)..(112): Xaa in position 111 to 112 is any amino acid
  Variant (114)..(116): Xaa in position 114 to 116 is any amino acid
  Variant (120)..(121): Xaa in position 120 to 121 is any amino acid
  Variant (123)..(123): Xaa in position 123 is any amino acid
  Variant (125)..(126): Xaa in position 125 to 126 is any amino acid
  Variant (128)..(129): Xaa in position 128 to 129 is any amino acid
  Variant (131)..(132): Xaa in position 131 to 132 is any amino acid
  Variant (135)..(136): Xaa in position 135 to 136 is any amino acid
  Variant (139)..(146): Xaa in position 139 to 146 is any amino acid
  Variant (148)..(153): Xaa in position 148 to 153 is any amino acid
  Variant (154)..(155): Xaa in position 154 to 155 is any or no amino acid
  Variant (160)..(202): Xaa in position 160 to 202 is any amino acid
  Variant (203)..(242): Xaa in position 203 to 242 is any or no amino acid
  Variant (245)..(245): Xaa in position 245 is any amino acid
  Variant (250)..(250): Xaa in position 250 is any amino acid
  Variant (252)..(253): Xaa in position 252 to 253 is any amino acid
  Variant (256)..(257): Xaa in position 256 to 257 is any amino acid
  Variant (259)..(261): Xaa in position 259 to 261 is any amino acid
  Variant (263)..(267): Xaa in position 263 to 267 is any amino acid
  Variant (269)..(273): Xaa in position 269 to 273 is any amino acid
  Variant (275)..(277): Xaa in position 275 to 277 is any amino acid
  Variant (279)..(280): Xaa in position 279 to 280 is any amino acid
  Variant (283)..(283): Xaa in position 283 is any amino acid
  Variant (287)..(295): Xaa in position 287 to 295 is any amino acid
  Variant (297)..(297): Xaa in position 297 is any amino acid
  Variant (305)..(323): Xaa in position 305 to 323 is any amino acid
  Variant (324)..(329): Xaa in position 324 to 329 is any or no amino acid
  Variant (334)..(334): Xaa in position 334 is any amino acid
  Variant (336)..(337): Xaa in position 336 to 337 is any amino acid
  Variant (339)..(340): Xaa in position 339 to 340 is any amino acid
  Variant (342)..(342): Xaa in position 342 is any amino acid
  Variant (344)..(344): Xaa in position 344 is any amino acid
  Variant (346)..(346): Xaa in position 346 is any amino acid
  Variant (351)..(354): Xaa in position 351 to 354 is any amino acid
  Variant (357)..(359): Xaa in position 357 to 359 is any amino acid
  Variant (361)..(361): Xaa in position 361 is any amino acid
  Variant (363)..(363): Xaa in position 363 is any amino acid
  Variant (367)..(380): Xaa in position 367 to 380 is any amino acid
  Variant (382)..(386): Xaa in position 382 to 386 is any amino acid
  Variant (388)..(390): Xaa in position 388 to 390 is any amino acid
  Variant (392)..(392): Xaa in position 392 is any amino acid
  Variant (394)..(394): Xaa in position 394 is any amino acid
  Variant (399)..(400): Xaa in position 399 to 400 is any amino acid
  Variant (412)..(412): Xaa in position 412 is any amino acid
  Variant (416)..(416): Xaa in position 416 is any amino acid
  Variant (419)..(419): Xaa in position 419 is any amino acid
  Variant (427)..(427): Xaa in position 427 is any amino acid
  Variant (430)..(430): Xaa in position 430 is any amino acid
  Variant (438)..(438): Xaa in position 438 is any amino acid
  Variant (440)..(440): Xaa in position 440 is any amino acid
  Variant (443)..(443): Xaa in position 443 is any amino acid
  Variant (449)..(449): Xaa in position 449 is any amino acid
  Variant (454)..(457): Xaa in position 454 to 457 is any amino acid
  Variant (459)..(459): Xaa in position 459 is any amino acid
  Variant (463)..(463): Xaa in position 463 is any amino acid
  Variant (467)..(467): Xaa in position 467 is any amino acid
  Variant (470)..(471): Xaa in position 470 to 471 is any amino acid
  Variant (477)..(477): Xaa in position 477 is any amino acid
  Variant (479)..(480): Xaa in position 479 to 480 is any amino acid
  Variant (485)..(485): Xaa in position 485 is any amino acid
  Variant (487)..(488): Xaa in position 487 to 488 is any amino acid
  Variant (490)..(490): Xaa in position 490 is any amino acid
  Variant (492)..(496): Xaa in position 492 to 496 is any amino acid
  Variant (498)..(498): Xaa in position 498 is any amino acid
  Variant (500)..(502): Xaa in position 500 to 502 is any amino acid
  Variant (504)..(505): Xaa in position 504 to 505 is any amino acid
  Variant (508)..(512): Xaa in position 508 to 512 is any amino acid
  Variant (514)..(519): Xaa in position 514 to 519 is any amino acid
  Variant (520)..(556): Xaa in position 520 to 556 is any or no amino acid
  Variant (558)..(558): Xaa in position 558 is any amino acid
  Variant (560)..(566): Xaa in position 560 to 566 is any amino acid
  Variant (568)..(575): Xaa in position 568 to 575 is any amino acid
  Variant (577)..(584): Xaa in position 577 to 584 is any amino acid
  Variant (587)..(588): Xaa in position 587 to 588 is any amino acid
  Variant (590)..(590): Xaa in position 590 is any amino acid
  Variant (602)..(603): Xaa in position 602 to 603 is any amino acid
  Variant (606)..(624): Xaa in position 606 to 624 is any amino acid
  Variant (625)..(786): Xaa in position 625 to 786 is any or no amino acid
  Variant (794)..(795): Xaa in position 794 to 795 is any amino acid
  Variant (798)..(799): Xaa in position 798 to 799 is any amino acid
  Variant (803)..(803): Xaa in position 803 is any amino acid
  Variant (806)..(806): Xaa in position 806 is any amino acid
  Variant (817)..(818): Xaa in position 817 to 818 is any amino acid
  Variant (821)..(821): Xaa in position 821 is any amino acid
  Variant (825)..(830): Xaa in position 825 to 830 is any amino acid
  Variant (831)..(831): Xaa in position 831 is any or no amino acid
  Variant (836)..(836): Xaa in position 836 is any amino acid
  Variant (838)..(838): Xaa in position 838 is any amino acid
  Variant (856)..(857): Xaa in position 856 to 857 is any amino acid
  Variant (860)..(860): Xaa in position 860 is any amino acid
  Variant (881)..(881): Xaa in position 881 is any amino acid
  Variant (884)..(885): Xaa in position 884 to 885 is any amino acid
  Variant (887)..(897): Xaa in position 887 to 897 is any amino acid
  Variant (898)..(904): Xaa in position 898 to 904 is any or no amino acid
  Variant (906)..(906): Xaa in position 906 is any amino acid
  Variant (908)..(908): Xaa in position 908 is any amino acid
  Variant (911)..(911): Xaa in position 911 is any amino acid
  Variant (914)..(921): Xaa in position 914 to 921 is any amino acid
  Variant (923)..(925): Xaa in position 923 to 925 is any amino acid
  Variant (927)..(927): Xaa in position 927 is any amino acid
  Variant (929)..(929): Xaa in position 929 is any amino acid
  Variant (942)..(942): Xaa in position 942 is any amino acid
  Variant (944)..(944): Xaa in position 944 is any amino acid
  Variant (946)..(950): Xaa in position 946 to 950 is any amino acid
SXXESXTLXXRQXAINXTHPFGIRXWKPALYKKXRSVXXXAXXDIHXXXXXXXXXXXXXXXXXXNXXWXXXXGXXXXXXXXXXXXXXXXXXXXXXXXXSXXXYXXXXXXLXXYXXXPFGXXVXLXXDXXYXXEDXXEGXXXXXXXXWXXXXXXXXRLFFXXXXXXXXXXXXXXXXXXXXXXXXXXXXXXXXXXXXXXXXXXXXXXXXXXXXXXXXXXXXXXXXXXXXXXXXXXXXXXXXXXXRRXFGRGXWXXGRXXFXXXFXXXXXPXXXXXSXXXWXXVFXIPMXXXXXXXXXHXRRHPLALXXXXXXXXXXXXXXXXXXXXXXXXXLLCTXRXXGXXYXKXTXDGTNXXXXNLXXXVXFXIFDXXXXXXXXXXXXXXTXXXXXFXXXLXSXIPLAXXIGQAVASISAQXSMGXGAXINAFFSTXVEXFLYCVALXQXKGXLVEGSXIGSIXXXXLXLPGXSMCXGAXXRKTQRXNXXSAGVXSXXLXFXXXXXFXPXXXYXXYGXXXXXCXXXXXXXXXXXXXXXXXXXXXXXXXXXXXXXXXXXXXXXXXXXCXFXXXXXXXDXXXXXXXXPXXXXXXXXLFXXYXIGLWFTLRTHAXXIWXXXXXXXXXXXXXXXXXXXXXXXXXXXXXXXXXXXXXXXXXXXXXXXXXXXXXXXXXXXXXXXXXXXXXXXXXXXXXXXXXXXXXXXXXXXXXXXXXXXXXXXXXXXXXXXXXXXXXXXXXXXXXXXXXXXXXXXXXXXXXXXXXXXXXXXXXXXXXXXXXXXXXXXXXXXXXXXXXXXXXHDAPNWSXXKSXXILLXATXLYAIIAEILVXXVDXVLEXXXXXXXKFLGXTXFALVPNTTEFLNAISFAXXGNXALSMEIGSAYALQVCLLQIPXLVXXSXXXXXXXXXXXXXXXXXXFXLXFPXWDXXXXXXXXFXXXYXYXEGKSNYFKGSILXLXYXXXXXGFY

SEQ ID NO: 129563 - protein, 61 aa, Artificial sequence
  protein pattern
  Variant (2)..(2): Xaa in position 2 is any or no amino acid
  Variant (6)..(6): Xaa in position 6 is any or no amino acid
  Variant (8)..(8): Xaa in position 8 is any or no amino acid
  Variant (20)..(20): Xaa in position 20 is Ser or Thr
  Variant (24)..(24): Xaa in position 24 is Leu, Met or Val
  Variant (27)..(27): Xaa in position 27 is Ala or Val
  Variant (28)..(28): Xaa in position 28 is Ile or Val
  Variant (33)..(33): Xaa in position 33 is Ala or Ser
  Variant (35)..(35): Xaa in position 35 is Ile or Val
  Variant (38)..(38): Xaa in position 38 is Ile or Val
  Variant (39)..(39): Xaa in position 39 is Phe or Tyr
  Variant (46)..(46): Xaa in position 46 is Asn, Gln, Ser or Thr
  Variant (47)..(47): Xaa in position 47 is Glu or Gln
  Variant (48)..(48): Xaa in position 48 is any amino acid
  Variant (50)..(50): Xaa in position 50 is Gly or Ser
  Variant (51)..(51): Xaa in position 51 is any amino acid
  Variant (57)..(57): Xaa in position 57 is Ile or Met
  Variant (58)..(58): Xaa in position 58 is Ile or Val
IXPLAXYXIGQAVASISAQXSMGXGAXXNAFFXTXVEXXLYCVALXXXKXXLVEGSXXGSI

SEQ ID NO: 129564 - protein, 60 aa, Artificial sequence
  protein pattern
  Variant (2)..(2): Xaa in position 2 is any amino acid
  Variant (3)..(3): Xaa in position 3 is any or no amino acid
  Variant (5)..(5): Xaa in position 5 is any or no amino acid
  Variant (7)..(7): Xaa in position 7 is any or no amino acid
  Variant (10)..(10): Xaa in position 10 is Ile or Leu
  Variant (14)..(14): Xaa in position 14 is any amino acid
  Variant (17)..(17): Xaa in position 17 is Phe, Ile or Leu
  Variant (18)..(18): Xaa in position 18 is any amino acid
  Variant (24)..(24): Xaa in position 24 is Phe or Tyr
  Variant (26)..(26): Xaa in position 26 is Ala, Pro or Val
  Variant (27)..(27): Xaa in position 27 is any amino acid
  Variant (32)..(32): Xaa in position 32 is Ser or Thr
  Variant (34)..(34): Xaa in position 34 is Ala or Thr
  Variant (35)..(35): Xaa in position 35 is Leu or Met
  Variant (37)..(37): Xaa in position 37 is any amino acid
  Variant (38)..(38): Xaa in position 38 is Phe or Tyr
  Variant (39)..(39): Xaa in position 39 is Ala or Ser
  Variant (40)..(40): Xaa in position 40 is Ile, Met or Val
  Variant (41)..(41): Xaa in position 41 is Ile, Leu or Val
  Variant (42)..(42): Xaa in position 42 is Ala, Gly or Val
  Variant (43)..(43): Xaa in position 43 is any amino acid
  Variant (45)..(45): Xaa in position 45 is Ala, Gly or Val
  Variant (47)..(47): Xaa in position 47 is Ser or Thr
  Variant (48)..(48): Xaa in position 48 is Phe, Ile, Leu or Val
  Variant (49)..(49): Xaa in position 49 is Phe or Leu
  Variant (51)..(51): Xaa in position 51 is any amino acid
  Variant (52)..(52): Xaa in position 52 is Ile or Met
  Variant (53)..(53): Xaa in position 53 is His or Tyr
  Variant (54)..(54): Xaa in position 54 is Gly or Ser
  Variant (55)..(55): Xaa in position 55 is Gly, Ser or Thr
  Variant (56)..(56): Xaa in position 56 is His or Tyr
  Variant (57)..(57): Xaa in position 57 is Asp, Glu or Ser
  Variant (58)..(58): Xaa in position 58 is Leu, Met or Val
  Variant (59)..(59): Xaa in position 59 is any amino acid
GXXLXLXPGXSMCXGAXXRKTQRXNXXSAGVXSXXLXXXXXXXFXPXXXYXXXXXXXXXC

SEQ ID NO: 129565 - protein, 53 aa, Artificial sequence
  protein pattern
  Variant (2)..(3): Xaa in position 2 to 3 is any or no amino acid
  Variant (5)..(5): Xaa in position 5 is Phe or Tyr
  Variant (8)..(8): Xaa in position 8 is Lys or Arg
  Variant (9)..(9): Xaa in position 9 is Asp or Glu
  Variant (12)..(12): Xaa in position 12 is Ala, Asp, Glu or Gln
  Variant (16)..(16): Xaa in position 16 is any amino acid
  Variant (24)..(24): Xaa in position 24 is Ile, Leu or Val
  Variant (29)..(29): Xaa in position 29 is Ile or Leu
  Variant (33)..(33): Xaa in position 33 is any amino acid
  Variant (36)..(36): Xaa in position 36 is Ile or Val
  Variant (37)..(37): Xaa in position 37 is Glu or Gln
  Variant (38)..(39): Xaa in position 38 to 39 is any amino acid
  Variant (41)..(41): Xaa in position 41 is Ala, Asp, Glu or Gln
  Variant (42)..(42): Xaa in position 42 is Ala, Glu, Gly or Gln
  Variant (46)..(46): Xaa in position 46 is any amino acid
  Variant (47)..(47): Xaa in position 47 is Ala, Ser or Thr
  Variant (48)..(48): Xaa in position 48 is any amino acid
  Variant (49)..(49): Xaa in position 49 is Gly, Ile or Leu
  Variant (50)..(51): Xaa in position 50 to 51 is any amino acid
  Variant (52)..(52): Xaa in position 52 is Ile or Val
  Variant (53)..(53): Xaa in position 53 is Gly, Asn or Thr
EXXSXTLXXRQXAINXTHPFGIRXWKPAXYKKXRSXXXXAXXDIHXXXXXXXX

SEQ ID NO: 129566 - protein, 38 aa, Artificial sequence
  protein pattern
  Variant (5)..(5): Xaa in position 5 is Phe or Tyr
  Variant (7)..(7): Xaa in position 7 is any or no amino acid
  Variant (9)..(9): Xaa in position 9 is any or no amino acid
  Variant (11)..(11): Xaa in position 11 is any amino acid
  Variant (12)..(12): Xaa in position 12 is His, Lys or Arg
  Variant (14)..(14): Xaa in position 14 is Trp or Tyr
  Variant (16)..(16): Xaa in position 16 is Phe or Tyr
  Variant (18)..(18): Xaa in position 18 is Ile or Val
  Variant (19)..(19): Xaa in position 19 is Asp or Gly
  Variant (23)..(23): Xaa in position 23 is Ile or Val
  Variant (24)..(24): Xaa in position 24 is Phe, Ile or Met
  Variant (25)..(25): Xaa in position 25 is Phe, Leu or Val
  Variant (26)..(26): Xaa in position 26 is Ile, Met or Val
  Variant (29)..(29): Xaa in position 29 is Ile, Leu or Met
  Variant (30)..(30): Xaa in position 30 is Ala, Gly, Ser or Val
  Variant (31)..(31): Xaa in position 31 is Ile, Leu, Met or Val
  Variant (33)..(33): Xaa in position 33 is Phe, Ile or Leu
  Variant (35)..(35): Xaa in position 35 is Gly, Thr or Val
  Variant (38)..(38): Xaa in position 38 is Asp or Ser
LLCTXRXAXGXXYXKXTXXGTNXXXXNLXXXVXFXIFX

SEQ ID NO: 129567 - protein, 35 aa, Artificial sequence
  protein pattern
  Variant (3)..(3): Xaa in position 3 is any amino acid
  Variant (6)..(6): Xaa in position 6 is Ile, Leu or Met
  Variant (7)..(7): Xaa in position 7 is Phe, Leu or Val
  Variant (8)..(8): Xaa in position 8 is any amino acid
  Variant (9)..(9): Xaa in position 9 is Ala, Ser, Thr or Val
  Variant (10)..(10): Xaa in position 10 is Ile, Met or Val
  Variant (11)..(11): Xaa in position 11 is any amino acid
  Variant (12)..(12): Xaa in position 12 is Cys or Ser
  Variant (13)..(13): Xaa in position 13 is Ile or Val
  Variant (15)..(15): Xaa in position 15 is Leu, Met or Val
  Variant (16)..(16): Xaa in position 16 is Phe or Leu
  Variant (17)..(17): Xaa in position 17 is Ser or Thr
  Variant (19)..(19): Xaa in position 19 is Ile, Leu, Met or Val
  Variant (21)..(21): Xaa in position 21 is Ala or Gly
  Variant (32)..(32): Xaa in position 32 is Ile or Met
  Variant (34)..(34): Xaa in position 34 is Ile, Met or Val
FPXWDXXXXXXXXFXXXYXYXEGKSNYFKGSXLXL

SEQ ID NO: 129568 - protein, 22 aa, Artificial sequence
  protein pattern
  Variant (3)..(3): Xaa in position 3 is any amino acid
  Variant (4)..(4): Xaa in position 4 is Ala, Gln or Ser
  Variant (6)..(6): Xaa in position 6 is any or no amino acid
  Variant (8)..(8): Xaa in position 8 is any or no amino acid
  Variant (10)..(10): Xaa in position 10 is Leu or Met
  Variant (19)..(20): Xaa in position 19 to 20 is any amino acid
LFXXYXIXGXWFTLRTHAXXIW

SEQ ID NO: 129569 - protein, 33 aa, Artificial sequence
  protein pattern
  Variant (3)..(3): Xaa in position 3 is any amino acid
  Variant (8)..(8): Xaa in position 8 is Glu or Lys
  Variant (10)..(10): Xaa in position 10 is Asn, Ser or Thr
  Variant (11)..(11): Xaa in position 11 is any amino acid
  Variant (14)..(14): Xaa in position 14 is Phe, Ile or Val
  Variant (15)..(15): Xaa in position 15 is Ile, Leu or Val
  Variant (17)..(17): Xaa in position 17 is Phe or Tyr
  Variant (18)..(19): Xaa in position 18 to 19 is any amino acid
  Variant (21)..(21): Xaa in position 21 is His or Tyr
  Variant (22)..(22): Xaa in position 22 is any amino acid
  Variant (23)..(24): Xaa in position 23 to 24 is Ile, Leu or Val
  Variant (25)..(25): Xaa in position 25 is Gly, Gln, Ser or Thr
  Variant (27)..(27): Xaa in position 27 is any amino acid
  Variant (28)..(28): Xaa in position 28 is Ile, Leu, Met or Val
  Variant (29)..(30): Xaa in position 29 to 30 is any amino acid
  Variant (31)..(31): Xaa in position 31 is Leu or Val
  Variant (33)..(33): Xaa in position 33 is Ala or Leu
RRXFGRGXWXXGRXXFXXXFXXXXXPXXXXXSX

SEQ ID NO: 129570 - protein, 48 aa, Artificial sequence
  protein pattern
  Variant (2)..(2): Xaa in position 2 is Ala or Gly
  Variant (3)..(3): Xaa in position 3 is any amino acid
  Variant (4)..(4): Xaa in position 4 is Asp, Glu or Gln
  Variant (6)..(6): Xaa in position 6 is Gly or Ser
  Variant (7)..(8): Xaa in position 7 to 8 is any amino acid
  Variant (9)..(9): Xaa in position 9 is Phe, Leu or Met
  Variant (10)..(12): Xaa in position 10 to 12 is any amino acid
  Variant (13)..(13): Xaa in position 13 is Ala, Gly or Ser
  Variant (14)..(14): Xaa in position 14 is any amino acid
  Variant (16)..(16): Xaa in position 16 is Phe, Leu or Met
  Variant (17)..(17): Xaa in position 17 is Phe, Ile or Leu
  Variant (18)..(18): Xaa in position 18 is Trp or Tyr
  Variant (22)..(22): Xaa in position 22 is any amino acid
  Variant (23)..(23): Xaa in position 23 is Phe, Ile, Met or Val
  Variant (25)..(25): Xaa in position 25 is any or no amino acid
  Variant (27)..(28): Xaa in position 27 to 28 is any amino acid
  Variant (29)..(29): Xaa in position 29 is any or no amino acid
  Variant (31)..(31): Xaa in position 31 is any amino acid
  Variant (32)..(32): Xaa in position 32 is Asn, Gln or Thr
  Variant (34)..(35): Xaa in position 34 to 35 is any amino acid
  Variant (38)..(38): Xaa in position 38 is any amino acid
  Variant (39)..(39): Xaa in position 39 is Asp or Gly
  Variant (42)..(46): Xaa in position 42 to 46 is any amino acid
  Variant (47)..(47): Xaa in position 47 is any or no amino acid
SXXXYXXXXXXXXXYXXXPFGXXVXLXXXDXXYXXEDXXEGXXXXXXY

SEQ ID NO: 129571 - protein, 9 aa, Artificial sequence
  protein pattern
  Variant (2)..(2): Xaa in position 2 is any amino acid
HXRRHPLAL

SEQ ID NO: 129572 - protein, 10 aa, Artificial sequence
  protein pattern
  Variant (2)..(2): Xaa in position 2 is Phe or Leu
  Variant (3)..(3): Xaa in position 3 is Phe, Ile or Leu
  Variant (6)..(6): Xaa in position 6 is any amino acid
  Variant (10)..(10): Xaa in position 10 is Ala, Gly or Ser
WXXVFXIPMX

SEQ ID NO: 129573 - protein, 12 aa, Artificial sequence
  protein pattern
  Variant (2)..(2): Xaa in position 2 is Thr or Val
  Variant (6)..(7): Xaa in position 6 to 7 is any amino acid
  Variant (9)..(9): Xaa in position 9 is any amino acid
  Variant (10)..(10): Xaa in position 10 is Asp, Glu or Gln
  Variant (11)..(11): Xaa in position 11 is any amino acid
SXDDDXXEXXXD

SEQ ID NO: 129574 - DNA, 1314 bp, Saccharomyces cerevisiae; identical to SEQ ID NO: 27759
  CDS (1)..(1314)

SEQ ID NO: 129575 - protein, 437 aa, Saccharomyces cerevisiae [sequence omitted]

SEQ ID NO: 129576 - DNA, 1628 bp, Glycine max
  CDS (35)..(1387)
agtgcagtgtgaagtgcgtataatccatattctcatggcttccgttgcattcagaaacctaaattctaagcgcttccttttctctttgcatttcacaaatgctaattaccattcactctctcgtggaacttgcaccgtcatatcccaaaactgcaataatgcatttcctttggagctcgtttctctacggagatccttagccactttcgctcgaacaaagccccatcttaacgtgggcacaattgggcatgttgatcatgggaaaaccacactgactgctgcaattaccaaggtgctagctgaagaaggtaaagctaaggccattgcctttgaggacatagacaaggctcccgaggagaagaagagagggattactattgcgactgctcatgtagagtacgagacagcaaagaggcactatgcccatgttgattgcccaggacatgcagactatgttaagaacatgataactggagctgcacaaatggatggtggaattcttgtcgtttctgctcctgatgggccaatgcctcaaacaaaggaacatatactgcttgctcgtcaggttggtgtgccatcattggtctgctttctaaataaggttgatgctgttgatgatccagagttgcttgaacttgtggaaatggagcttcgtgaactgcttaatttctacaaatttcctggggatgatattccaattgtacgaggttctgctctggctgcattgcagggaactaatgaagaacttggaaagaaggctatcttaaaactaatggatgctgtggatgaatacatttcggatcctgtgcggcaacttgacaaacctttcttaatgccagtagaagatgttttctcaattcaggggcgtggaactgttgtgactggtcgtgttgaacaaggcaccatcaaagtaggtgaggaggttgaagtattgggactaacacagagtggacctttgaagactactgtaactggtgtggaaatgttcaagaaaattttggatcgaggggaagctggtgataatgtgggacttcttctacgtggtctgaagcgcgatgatgtacagagaggaatggtcgtgaccaagcctggtgcatttaaaacatataagaagtttgaagcagagatttatgttctctcaaaagatgaaggtggccgtcatactgcttttttctctaattataagccacagttttacttgaggactgcagatgttaccggaaaggtggaattaccggaaagtgttaagatggttatgcctggtgataatgtgactgctacttttgagctgatatcacctgttcctcttgaaataggacaaagatttgctttgagagagggaggcagaacagttggtgcaggagttgtttccaaagtgatggcctaggatgttggtctaaattctacaacatcttttgtaatttgtaaataagttgagtagggactgagagctatgttctaggaggattctatggtgtgactattttttgacacttggtgcgctggttccgtttcaatgtgttttgttttgtttattttagagaattatactagttcattatgtttttcgtggaccagagggaaaatggttcaaattttttggtttagttaataatgtcaatttcttc

SEQ ID NO: 129577 - protein, 450 aa, Glycine max
MASVAFRNLNSKRFLFSLHFTNANYHSLSRGTCTVISQNCNNAFPLELVSLRRSLATFARTKPHLNVGTIGHVDHGKTTLTAAITKVLAEEGKAKAIAFEDIDKAPEEKKRGITIATAHVEYETAKRHYAHVDCPGHADYVKNMITGAAQMDGGILVVSAPDGPMPQTKEHILLARQVGVPSLVCFLNKVDAVDDPELLELVEMELRELLNFYKFPGDDIPIVRGSALAALQGTNEELGKKAILKLMDAVDEYISDPVRQLDKPFLMPVEDVFSIQGRGTVVTGRVEQGTIKVGEEVEVLGLTQSGPLKTTVTGVEMFKKILDRGEAGDNVGLLLRGLKRDDVQRGMVVTKPGAFKTYKKFEAEIYVLSKDEGGRHTAFFSNYKPQFYLRTADVTGKVELPESVKMVMPGDNVTATFELISPVPLEIGQRFALREGGRTVGAGVVSKVMA

SEQ ID NO: 129578 - DNA, 1386 bp, Apis mellifera; identical to SEQ ID NO: 27043
  CDS (1)..(1386)

SEQ ID NO: 129579 - protein, 461 aa, Apis mellifera; identical to SEQ ID NO: 27044

SEQ ID NO: 129580 - DNA, 1398 bp, Bombyx mori; identical to SEQ ID NO: 27045
  CDS (1)..(1398)

SEQ ID NO: 129581 - protein, 465 aa, Bombyx mori; identical to SEQ ID NO: 27046

SEQ ID NO: 129582 - DNA, 1362 bp, Oryza sativa (japonica cultivar-group); identical to SEQ ID NO: 27769
  CDS (1)..(1362)

SEQ ID NO: 129583 - protein, 453 aa, Oryza sativa (japonica cultivar-group); identical to SEQ ID NO: 27770

SEQ ID NO: 129584 - DNA, 1185 bp, Neisseria meningitidis MC58; identical to SEQ ID NO: 27055
  CDS (1)..(1185): transl_table=11

SEQ ID NO: 129585 - protein, 394 aa, Neisseria meningitidis MC58; identical to SEQ ID NO: 27056

SEQ ID NO: 129586 - DNA, 1470 bp, Drosophila melanogaster; identical to SEQ ID NO: 27059
  CDS (1)..(1470)

SEQ ID NO: 129587 - protein, 489 aa, Drosophila melanogaster; identical to SEQ ID NO: 27060

SEQ ID NO: 129588 - DNA, 1221 bp, Brucella melitensis 16M; identical to SEQ ID NO: 27061
  CDS (1)..(1221): transl_table=11

SEQ ID NO: 129589 - protein, 406 aa, Brucella melitensis 16M; identical to SEQ ID NO: 27062

SEQ ID NO: 129590 - DNA, 1371 bp, Drosophila melanogaster; identical to SEQ ID NO: 27063
  CDS (1)..(1371)

SEQ ID NO: 129591 - protein, 456 aa, Drosophila melanogaster; identical to SEQ ID NO: 27064

SEQ ID NO: 129592 - DNA, 1230 bp, Thermosynechococcus elongatus BP-1; identical to SEQ ID NO: 27065
  CDS (1)..(1230): transl_table=11

SEQ ID NO: 129593 - protein, 409 aa, Thermosynechococcus elongatus BP-1; identical to SEQ ID NO: 27066

SEQ ID NO: 129594 - DNA, 1221 bp, Chaetosphaeridium globosum; identical to SEQ ID NO: 27067
  CDS (1)..(1221): transl_table=11

SEQ ID NO: 129595 - protein, 406 aa, Chaetosphaeridium globosum; identical to SEQ ID NO: 27068

SEQ ID NO: 129596 - DNA, 1197 bp, Streptococcus agalactiae 2603V/R; identical to SEQ ID NO: 27069
  CDS (1)..(1197): transl_table=11

SEQ ID NO: 129597 - protein, 398 aa, Streptococcus agalactiae 2603V/R; identical to SEQ ID NO: 27070

SEQ ID NO: 129598 - DNA, 1200 bp, Bifidobacterium longum NCC2705; identical to SEQ ID NO: 27071
  CDS (1)..(1200): transl_table=11

SEQ ID NO: 129599 - protein, 399 aa, Bifidobacterium longum NCC2705; identical to SEQ ID NO: 27072

SEQ ID NO: 129600 - DNA, 1185 bp, Shewanella oneidensis MR-1; identical to SEQ ID NO: 27075
  CDS (1)..(1185): transl_table=11

SEQ ID NO: 129601 - protein, 394 aa, Shewanella oneidensis MR-1; identical to SEQ ID NO: 27076

SEQ ID NO: 129602 - DNA, 1191 bp, Bradyrhizobium japonicum USDA 110; identical to SEQ ID NO: 27077
  CDS (1)..(1191): transl_table=11

SEQ ID NO: 129603 - protein, 396 aa, Bradyrhizobium japonicum USDA 110; identical to SEQ ID NO: 27078

SEQ ID NO: 129604 - DNA, 1194 bp, Tropheryma whipplei TW08/27
  CDS (1)..(1194): transl_table=11
atggcaaaggccaagtttgagcggactaaaccccatgtgaatattgggactataggtcatgttgaccacggtaaaaccacactgaccgccgccatatcgagggttttgtccgagaggcttccttcgaatacgaatgtaaagcaggactttgatgcaattgactcggccccggaagagcgccagaggggtattacgatcaatatttcgcatatcgagtacgagacggaaaagaggcactacgcccatgttgatgccccaggacatgccgattacataaagaatatgattactggcgccgctcagatggatggtgcgattcttgttgttgcggcgacagacggtgcaatggcccagacccgtgagcatgtcttgcttgccaagcaggtcggcgtcccctatctccttgtggcactcaataaagccgatatggtgtctgatgaggaaatactcgagcttgttgagcttgaggtgcgcgagctgttgtcaactcacggctttgacggtgagaatgttcccgttgtacgcgtatctggccttaaagcacttgaaggtgatcaaaagtggggcgatgcggttatggagcttatgaaagccgttgatgagagcattccggaccccgttagagatagggataaaccctttttgatgcccattgaggatgtgttcacaatcactgggcgcggaacggttgttacaggccgtgcagagcgtggtgttcttgcggttaattccgaggttgaaatagtcggtatacgcccgacgcagaaaaccactgtaacgggaattgaaatgtttcgcaagcagttggatgaggcgtgggcaggtgagaactgcggcctgctgcttcgcggcacaaaacgggaagatgtcgagcgtgggcaggttgttgtgaaacctggcagtgttacaccgcatacaaagtttgagggaaaggcgtatattctgtcgaaagatgagggtggaaggcataacccgttctatagtaactatcgcccacagttttacttcaggacaactgacgtgactggcgttataacccttcctgagggaacagaaatggttatgcccggcgataccatctctataacagtcgacttgattcagccaattgctatggaagaaggcttgggttttgcgattcgcgagggtggcagaactgttggcgcaggcactgtagtgaaaattcttgaatag

SEQ ID NO: 129605 - protein, 397 aa, Tropheryma whipplei TW08/27
MAKAKFERTKPHVNIGTIGHVDHGKTTLTAAISRVLSERLPSNTNVKQDFDAIDSAPEERQRGITINISHIEYETEKRHYAHVDAPGHADYIKNMITGAAQMDGAILVVAATDGAMAQTREHVLLAKQVGVPYLLVALNKADMVSDEEILELVELEVRELLSTHGFDGENVPVVRVSGLKALEGDQKWGDAVMELMKAVDESIPDPVRDRDKPFLMPIEDVFTITGRGTVVTGRAERGVLAVNSEVEIVGIRPTQKTTVTGIEMFRKQLDEAWAGENCGLLLRGTKREDVERGQVVVKPGSVTPHTKFEGKAYILSKDEGGRHNPFYSNYRPQFYFRTTDVTGVITLPEGTEMVMPGDTISITVDLIQPIAMEEGLGFAIREGGRTVGAGTVVKILE

SEQ ID NO: 129606 - DNA, 1188 bp, Enterococcus faecalis V583; identical to SEQ ID NO: 27081
  CDS (1)..(1188): transl_table=11

SEQ ID NO: 129607 - protein, 395 aa, Enterococcus faecalis V583; identical to SEQ ID NO: 27082

SEQ ID NO: 129608 - DNA, 1194 bp, Coxiella burnetii RSA 493; identical to SEQ ID NO: 27031
  CDS (1)..(1194): transl_table=11

SEQ ID NO: 129609 - protein, 397 aa, Coxiella burnetii RSA 493; identical to SEQ ID NO: 27032

SEQ ID NO: 129610 - DNA, 1191 bp, Nitrosomonas europaea ATCC 19718; identical to SEQ ID NO: 27083
  CDS (1)..(1191): transl_table=11

SEQ ID NO: 129611 - protein, 396 aa, Nitrosomonas europaea ATCC 19718; identical to SEQ ID NO: 27084

SEQ ID NO: 129612 - DNA, 1200 bp, Helicobacter hepaticus ATCC 51449; identical to SEQ ID NO: 27087
  CDS (1)..(1200): transl_table=11

SEQ ID NO: 129613 - protein, 399 aa, Helicobacter hepaticus ATCC 51449; identical to SEQ ID NO: 27088

SEQ ID NO: 129614 - DNA, 1185 bp, Candidatus Blochmannia floridanus
  CDS (1)..(1185): transl_table=11
gtgtctaaagaaaaatttcagcgcattaggactcatattaatgtcggtactattggtcatgtagatcatggtaaaactacgttaactgctgctataacaacggtgttatctaagaaatatggtggatgtgctcgagcttttgatcaaattgataatgctccagaagaaaaggcccgaggtattaccattaatacttctcatgttgagtatgatactgaatttagacattacgcacatgttgattgtccaggtcatgctgattatgtaaagaatatgattactggagctgcgcagatggatggggctattttagttgttgctgctactgacgggcctatgcctcaaactcgagagcatatattattagcgcgtcaagtgggagtgcctcatattgttgtatttttaaacaaatgtgatatggttgacgatttggagttattggagttagttgagatggaagttagagaattgttatctcaatatgattttccaggggatagtgctcctattattcaaggatcagctttgaaggcgttagaaggtgatgaaaaatggtctagtaaagtattagaattatctagtatattagataattatattccggaacctaaacgttctatagataaaccatttttattacctatagaggatgtgttttctatttctggaagaggaacggtagtaacaggtcgagttgaaagtggaattattaaggttggagaggaagtagagatagttggaataaaagacacagtgaaaactacgtgcactgggattgaaatgtttagaaaattgttagatgaagggcgggctggtgaaaatgtaggggtattattaagagggactaagagagatgaggtagagagaggtcaggttttatctaaacctggatgtattaagcctcattcaaattttgaatcagaggtgtatattttaaataaagatgaaggaggtcgacatactccattttttaaaggatatcggccgcaattttattttcgcacgactgatgttactggtactattgagttacccaaagaagtagaaatggtgatgccaggagataatataaaaatggttgtgcatttgatttctcctatagcaatggatgatggattacgttttgcaattagagagggtggtcgtactgttggtgctggtgtagtatctagagttatttcttaa

SEQ ID NO: 129615 - protein, 394 aa, Candidatus Blochmannia floridanus
MSKEKFQRIRTHINVGTIGHVDHGKTTLTAAITTVLSKKYGGCARAFDQIDNAPEEKARGITINTSHVEYDTEFRHYAHVDCPGHADYVKNMITGAAQMDGAILVVAATDGPMPQTREHILLARQVGVPHIVVFLNKCDMVDDLELLELVEMEVRELLSQYDFPGDSAPIIQGSALKALEGDEKWSSKVLELSSILDNYIPEPKRSIDKPFLLPIEDVFSISGRGTVVTGRVESGIIKVGEEVEIVGIKDTVKTTCTGIEMFRKLLDEGRAGENVGVLLRGTKRDEVERGQVLSKPGCIKPHSNFESEVYILNKDEGGRHTPFFKGYRPQFYFRTTDVTGTIELPKEVEMVMPGDNIKMVVHLISPIAMDDGLRFAIREGGRTVGAGVVSRVIS

SEQ ID NO: 129616 - DNA, 1191 bp, Bordetella bronchiseptica RB50; identical to SEQ ID NO: 27089
  CDS (1)..(1191): transl_table=11

SEQ ID NO: 129617 - protein, 396 aa, Bordetella bronchiseptica RB50; identical to SEQ ID NO: 27090

SEQ ID NO: 129618 - DNA, 1191 bp, Chromobacterium violaceum ATCC 12472; identical to SEQ ID NO: 27093
  CDS (1)..(1191): transl_table=11

SEQ ID NO: 129619 - protein, 396 aa, Chromobacterium violaceum ATCC 12472; identical to SEQ ID NO: 27094

SEQ ID NO: 129620 - DNA, 1185 bp, Photorhabdus luminescens subsp. laumondii TTO1; identical to SEQ ID NO: 27097
  CDS (1)..(1185): transl_table=11

SEQ ID NO: 129621 - protein, 394 aa, Photorhabdus luminescens subsp. laumondii TTO1; identical to SEQ ID NO: 27098

SEQ ID NO: 129622 - DNA, 1191 bp, Corynebacterium diphtheriae NCTC 13129
  CDS (1)..(1191): transl_table=11
gtggcaaaggctaagttcgagcgtaccaagccgcacgtcaacatcggcaccatcggtcacgttgaccacggtaagaccaccaccaccgctgctatcaccaaggttttggcagacgcttacccagagctgaacgaagctttcgctttcgatgccatcgataaggcaccggaagagaaagagcgtggtattaccatcaacatctcccacgtggagtaccagaccgagaagcgccactacgcacacgttgacgctccaggtcacgctgactacatcaagaacatgatcaccggtgctgctcagatggacggcgcaatcctcgttgttgctgccaccgacggcccaatgcctcagacccgtgagcacgttctgctcgctcgccaggtcggcgttccttacatcctcgttgctctgaacaagtgcgacatggttgatgatgaggaaatcatcgagctcgtcgagatggagatccgtgagctgctcgctgagcaggattacgacgaagaggctccaatcatccacatctccgcactgaaggctcttgagggcgacgagaagtggacccagtccatcatcgacctcatgcaggcttgcgatgattccatcccagacccagagcgtgagaccgacaagccattcctcatgcctatcgaggacatcttcaccatcaccggccgcggtaccgttgttaccggccgtgttgagcgtggctccctgaaggtcaacgaggacgtcgagatcatcggtatccgcgagaaggctaccaccaccaccgttaccggtatcgagatgttccgtaagcttctcgactacaccgaggctggcgacaactgtggtctgcttctccgtggcgttaagcgcgaagacgttgagcgtggccaggttgttgttaagccaggcgcttacacccctcacaccgagttcgagggctctgtctacgttctgtccaaggacgagggtggccgccacaccccattcttcgacaactaccgcccacagttctacttccgcaccaccgacgttaccggtgttgtgaagcttcctgagggcaccgagatggtcatgcctggcgacaacgtcgacatgtccgtcaccctgatccagcctgtcgctatggatgagggcctgcgcttcgctatccgcgagggctcccgcaccgtcggcgctggtcgcgttaccaagatcatcaagtaa

SEQ ID NO: 129623 - protein, 396 aa, Corynebacterium diphtheriae NCTC 13129
MAKAKFERTKPHVNIGTIGHVDHGKTTTTAAITKVLADAYPELNEAFAFDAIDKAPEEKERGITINISHVEYQTEKRHYAHVDAPGHADYIKNMITGAAQMDGAILVVAATDGPMPQTREHVLLARQVGVPYILVALNKCDMVDDEEIIELVEMEIRELLAEQDYDEEAPIIHISALKALEGDEKWTQSIIDLMQACDDSIPDPERETDKPFLMPIEDIFTITGRGTVVTGRVERGSLKVNEDVEIIGIREKATTTTVTGIEMFRKLLDYTEAGDNCGLLLRGVKREDVERGQVVVKPGAYTPHTEFEGSVYVLSKDEGGRHTPFFDNYRPQFYFRTTDVTGVVKLPEGTEMVMPGDNVDMSVTLIQPVAMDEGLRFAIREGSRTVGAGRVTKIIK

SEQ ID NO: 129624 - DNA, 1191 bp, Rhodopseudomonas palustris CGA009; identical to SEQ ID NO: 27099
  CDS (1)..(1191): transl_table=11

SEQ ID NO: 129625 - protein, 396 aa, Rhodopseudomonas palustris CGA009; identical to SEQ ID NO: 27100

SEQ ID NO: 129626 - DNA, 1185 bp, Onion yellows phytoplasma OY-M; identical to SEQ ID NO: 27101
  CDS (1)..(1185): transl_table=11

SEQ ID NO: 129627 - protein, 394 aa, Onion yellows phytoplasma OY-M; identical to SEQ ID NO: 27102

SEQ ID NO: 129628 - DNA, 1191 bp, Geobacter sulfurreducens PCA; identical to SEQ ID NO: 27103
  CDS (1)..(1191): transl_table=11

SEQ ID NO: 129629 - protein, 396 aa, Geobacter sulfurreducens PCA; identical to SEQ ID NO: 27104

SEQ ID NO: 129630 - DNA, 1191 bp, Bdellovibrio bacteriovorus HD100; identical to SEQ ID NO: 27107
  CDS (1)..(1191): transl_table=11

SEQ ID NO: 129631 - protein, 396 aa, Bdellovibrio bacteriovorus HD100; identical to SEQ ID NO: 27108

SEQ ID NO: 129632 - DNA, 1188 bp, Treponema denticola ATCC 35405
  CDS (1)..(1188): transl_table=11
atggcaaaggaaaaatttaacagaacgaaagttcacatgaatgttggtaccatcggtcacgttgaccatggtaagaccactctttcggcagcgatcactacgtattgtgcaaagaagtatggtgataagcttctaaaatatgacgagatcgacaatgctccggaagaaaaagagcgcggtattactatcaatacccgacacttggaatatcagtccgataagagacactatgcacacatcgactgccccggccacgctgactatgttaaaaacatgatcaccggtgctgctcagatggacggtgctattcttgtagtttctgctccggactcggttatgccccagacaaaagaacacttgcttcttgcccgtcaggtaggtgtaccttcaatcatcgtcttccttaataaggttgaccttgttgatgatcccgaacttgtagaattggtagaagaagaagttagagagaccttgacatcttacggtttccccgaagacacacccattatcaagggttctgcttttaaggctcttcaagagggtgcaactgctgaagatacggcttgcattgaggagcttcttaaaacaatggatgaatactttaaggatcccgtccgcgattcggataagcccttccttcttcccattgaagatatcttcacaattcagggacgcggtaccgttgttacgggaagaatcgaacgcggtgttatcaagatgaacgaagaagttgaaattgtaggtattaagcccacaaagaaaaccgttgttaccggtatcgaaatgttcaacaagcttcttgatgaaggtgaagcaggagacaacgtaggtcttctcttgcgaggtattgaaaagaaagaagttgaacgcggacaggttcttgccaagcccggttcaattcatccccacaccaaatttgaagctcagatttacgttctttcaaaagaggaaggcggacgacacagtcccttcttctcaggttacagacctcagttctattttagaacaaccgatattaccggaactgtaaaccttcctgaaggaacagacatggttaagcccggtgataatacaaagattatcggtgaacttattcaccctatagctatggatcaaggtcttaaactcgctattcgcgaaggcggacgaactattgcttcgggtcaggtaactaacattatcgaataa

SEQ ID NO: 129633 - protein, 395 aa, Treponema denticola ATCC 35405
MAKEKFNRTKVHMNVGTIGHVDHGKTTLSAAITTYCAKKYGDKLLKYDEIDNAPEEKERGITINTRHLEYQSDKRHYAHIDCPGHADYVKNMITGAAQMDGAILVVSAPDSVMPQTKEHLLLARQVGVPSIIVFLNKVDLVDDPELVELVEEEVRETLTSYGFPEDTPIIKGSAFKALQEGATAEDTACIEELLKTMDEYFKDPVRDSDKPFLLPIEDIFTIQGRGTVVTGRIERGVIKMNEEVEIVGIKPTKKTVVTGIEMFNKLLDEGEAGDNVGLLLRGIEKKEVERGQVLAKPGSIHPHTKFEAQIYVLSKEEGGRHSPFFSGYRPQFYFRTTDITGTVNLPEGTDMVKPGDNTKIIGELIHPIAMDQGLKLAIREGGRTIASGQVTNIIE

SEQ ID NO: 129634 - DNA, 1386 bp, Strongylocentrotus purpuratus
  CDS (1)..(1386)
atgcctaaggaaaaagcccatatcaacatcgtggtcgtcggtcacgtagattccggcaaatcaaccaccaccggtcatctcatctacaaatgcggtggaatcgacaagcgtgtcatcgagaaattcgagaaggaagcttccgaccttggaaagggatcgttcaagtatgcctgggttctcgacaagctgaaggcagagcgtgaacgtggcatcaccattgacatcgccctgtggaagtttgaaaccccaaagtactgtgtcactgtcatcgatgcacctggtcatcgtgatttcatcaagaacatgatcactggaacctcacaggccgactgtgccgtgttggttgttgccgctggtattggagagtttgaggctggtatctccaaggatgggcagacacgagagcatgccctgctgtgctacaccttgggtgtcaagcagctcattgttgctgtcaacaagatggacagcgcacaatacaatgaagcccgtttcaaagaaatcgtcagggaggtctctggctacatcaagaaggttggctacaacccaaaggctgtgcccttcatcccaatctcaggatgggttggtgacaacatgatggaggcagccacaacgactatgccatggttcaaggggtggtcaattgaacgcaaggataataatgccagtggagtgaccctgttgaatgcccttgatgctatcatgctccctaagaggccacatgacaagcctcttcgtctaccactccaggatgtctacaaaattggaggtattggaactgtgccagtgggccgtgttgaaagtggaacaatcaaggccggtatgatcgctaggtttgcccctgccaatttgaccactgaggtgaagtctgtggagatgcaccatgaaactttggaaaaggcattgccaggtgacaacgtcggcttcaatgtcaagaacgtctctatcaaggatatcaggcgtggtatggtttgcggagaatccaaggacaatcccccaatggctgccaagtccttccaggctcaggtcattgtcatgaaccaccccggtgagatccatgctggctacaccccggttttggattgtcacacagctcacattgcctgcaagttcgcagaactcaaggagaagctcgaccgtcgatcaggcaagagtcttgaggataaccccaagtttgtgaagagtggtgatgccgtcattgccaaactgattccctccaagcagatggtggttgagagttacacagattttgctcctcttggacgttttgctgtccgtgacatgaggcagaccgtagccgtcggtgtggtgaagtctgtcgaaaaggatgaagcatctacaggcaaggttaccaagtctgcccagaaggctggcaagaagaaatga

SEQ ID NO: 129635 - protein, 461 aa, Strongylocentrotus purpuratus; identical to SEQ ID NO: 27112

SEQ ID NO: 129636 - DNA, 1359 bp, Strongylocentrotus purpuratus; identical to SEQ ID NO: 27113
  CDS (1)..(1359)

SEQ ID NO: 129637 - protein, 452 aa, Strongylocentrotus purpuratus; identical to SEQ ID NO: 27114

SEQ ID NO: 129638 - DNA, 1386 bp, Nasonia vitripennis; identical to SEQ ID NO: 27115
  CDS (1)..(1386)

SEQ ID NO: 129639 - protein, 461 aa, Nasonia vitripennis; identical to SEQ ID NO: 27116

SEQ ID NO: 129640 - DNA, 1419 bp, Nasonia vitripennis; identical to SEQ ID NO: 27117
  CDS (1)..(1419)

SEQ ID NO: 129641 - protein, 472 aa, Nasonia vitripennis; identical to SEQ ID NO: 27118

SEQ ID NO: 129642 - DNA, 1386 bp, Nasonia vitripennis; identical to SEQ ID NO: 27119
  CDS (1)..(1386)

SEQ ID NO: 129643 - protein, 461 aa, Nasonia vitripennis; identical to SEQ ID NO: 27120

SEQ ID NO: 129644 - DNA, 1389 bp, Nasonia vitripennis; identical to SEQ ID NO: 27121
  CDS (1)..(1389)

SEQ ID NO: 129645 - protein, 462 aa, Nasonia vitripennis; identical to SEQ ID NO: 27122

SEQ ID NO: 129646 - DNA, 1422 bp, Magnaporthe grisea 70-15; identical to SEQ ID NO: 27123
  CDS (1)..(1422)

SEQ ID NO: 129647 - protein, 473 aa, Magnaporthe grisea 70-15; identical to SEQ ID NO: 27124

SEQ ID NO: 129648 - DNA, 1332 bp, Magnaporthe grisea 70-15; identical to SEQ ID NO: 27125
  CDS (1)..(1332)

SEQ ID NO: 129649 - protein, 443 aa, Magnaporthe grisea 70-15; identical to SEQ ID NO: 27126

SEQ ID NO: 129650 - DNA, 1338 bp, Gibberella zeae PH-1; identical to SEQ ID NO: 27127
  CDS (1)..(1338)

SEQ ID NO: 129651 - protein, 445 aa, Gibberella zeae PH-1; identical to SEQ ID NO: 27128

SEQ ID NO: 129652 - DNA, 1383 bp, Gibberella zeae PH-1; identical to SEQ ID NO: 27129
  CDS (1)..(1383)

SEQ ID NO: 129653 - protein, 460 aa, Gibberella zeae PH-1; identical to SEQ ID NO: 27130

SEQ ID NO: 129654 - DNA, 1410 bp, Apis mellifera; identical to SEQ ID NO: 27131
  CDS (1)..(1410)

SEQ ID NO: 129655 - protein, 469 aa, Apis mellifera; identical to SEQ ID NO: 27132

SEQ ID NO: 129656 - DNA, 1299 bp, Candida glabrata CBS 138; identical to SEQ ID NO: 27133
  CDS (1)..(1299)

SEQ ID NO: 129657 - protein, 432 aa, Candida glabrata CBS 138; identical to SEQ ID NO: 27134

SEQ ID NO: 129658 - DNA, 1377 bp, Candida glabrata CBS 138; identical to SEQ ID NO: 27135
  CDS (1)..(1377)

SEQ ID NO: 129659 - protein, 458 aa, Candida glabrata CBS 138; identical to SEQ ID NO: 27136

SEQ ID NO: 129660 - DNA, 1293 bp, Kluyveromyces lactis NRRL Y-1140; identical to SEQ ID NO: 27137
  CDS (1)..(1293)

SEQ ID NO: 129661 - protein, 430 aa, Kluyveromyces lactis NRRL Y-1140; identical to SEQ ID NO: 27138

SEQ ID NO: 129662 - DNA, 1377 bp, Kluyveromyces lactis NRRL Y-1140; identical to SEQ ID NO: 27139
  CDS (1)..(1377)

SEQ ID NO: 129663 - protein, 458 aa, Kluyveromyces lactis NRRL Y-1140; identical to SEQ ID NO: 27140

SEQ ID NO: 129664 - DNA, 1275 bp, Debaryomyces hansenii CBS767; identical to SEQ ID NO: 27141
  CDS (1)..(1275)

SEQ ID NO: 129665 - protein, 424 aa, Debaryomyces hansenii CBS767; identical to SEQ ID NO: 27142

SEQ ID NO: 129666 - DNA, 1377 bp, Debaryomyces hansenii CBS767; identical to SEQ ID NO: 27143
  CDS (1)..(1377)

SEQ ID NO: 129667 - protein, 458 aa, Debaryomyces hansenii CBS767; identical to SEQ ID NO: 27144

SEQ ID NO: 129668 - DNA, 1287 bp, Yarrowia lipolytica CLIB122; identical to SEQ ID NO: 27145
  CDS (1)..(1287)

SEQ ID NO: 129669 - protein, 428 aa, Yarrowia lipolytica CLIB122; identical to SEQ ID NO: 27146

SEQ ID NO: 129670 - DNA, 1389 bp, Anopheles gambiae str. PEST; identical to SEQ ID NO: 27147
  CDS (1)..(1389)

SEQ ID NO: 129671 - protein, 462 aa, Anopheles gambiae str. PEST; identical to SEQ ID NO: 27148

SEQ ID NO: 129672 - DNA, 1377 bp, Candida albicans SC5314
  CDS (1)..(1377): transl_table=12
atgggtaaagaaaaaactcacgttaacgttgttgttattggtcacgtcgattccggtaaatctactaccaccggtcacttaatttacaagtgtggtggtattgataaaagaaccattgaaaaatttgaaaaagaagctgctgaattgggtaaaggttctttcaaatacgcttgcgtcttggacaaattgaaggctgaaagagaaagaggtatcaccattgatatcgctttgtggaaattcgaaactccaaaataccacgttaccgtcattgatgctccaggtcacagagatttcatcaagaatatgatcactggtacttctcaagctgattgtgctattttgattattgctggtggtactggtgaattcgaagccggtatttctaaggatggtcaaaccagagaacacgctttgttggcttacactttgggtgtcaaacaattgattgttgctgtcaacaagatggactctgtcaaatgggataaaaacagatttgaagaaatcatcaaggaaacctccaatttcgtcaagaaggttggttacaacccaaagactgttccattcgttccaatctctggttggaatggtgacaacatgattgaaccatccaccaactgtccatggtacaagggttgggaaaaggaaaccaaatccggtaaagttactggtaagaccttgttagaagctattgacgctattgaaccaccaaccagaccaaccgacaaaccattgagattgccattgcaagatgtttacaagatcggtggtattggtactgtgccagtcggtagagttgaaactggtatcatcaaagccggtatggttgttactttcgccccagctggtgttaccactgaagtcaaatccgttgaaatgcatcacgaacaattggctgaaggtgttccaggtgacaatgttggtttcaacgttaagaacgtttccgttaaagaaattagaagaggtaacgtttgtggtgactccaagaacgatccaccaaagggttgtgactctttcaatgcccaagtcattgttttgaaccatccaggtcaaatctctgctggttactctccagtcttggattgtcacactgcccacattgcttgtaaattcgacactttggttgaaaagattgacagaagaactggtaagaaattggaagaaaatccaaaattcgtcaaatccggtgatgctgctatcgtcaagatggtcccaaccaaaccaatgtgtgttgaagctttcactgactacccaccattaggtagattcgctgtcagagatatgagacaaaccgttgctgttggtgtcatcaaatctgttgaaaaatccgacaaagctggtaaagttaccaaggctgctcaaaaagctgctaagaaataa

SEQ ID NO: 129673 - protein, 458 aa, Candida albicans SC5314
MGKEKTHVNVVVIGHVDSGKSTTTGHLIYKCGGIDKRTIEKFEKEAAELGKGSFKYACVLDKLKAERERGITIDIALWKFETPKYHVTVIDAPGHRDFIKNMITGTSQADCAILIIAGGTGEFEAGISKDGQTREHALLAYTLGVKQLIVAVNKMDSVKWDKNRFEEIIKETSNFVKKVGYNPKTVPFVPISGWNGDNMIEPSTNCPWYKGWEKETKSGKVTGKTLLEAIDAIEPPTRPTDKPLRLPLQDVYKIGGIGTVPVGRVETGIIKAGMVVTFAPAGVTTEVKSVEMHHEQLAEGVPGDNVGFNVKNVSVKEIRRGNVCGDSKNDPPKGCDSFNAQVIVLNHPGQISAGYSPVLDCHTAHIACKFDTLVEKIDRRTGKKLEENPKFVKSGDAAIVKMVPTKPMCVEAFTDYPPLGRFAVRDMRQTVAVGVIKSVEKSDKAGKVTKAAQKAAKK

SEQ ID NO: 129674 - DNA, 1377 bp, Candida albicans SC5314; identical to SEQ ID NO: 27151
  CDS (1)..(1377): transl_table=12

SEQ ID NO: 129675 - protein, 458 aa, Candida albicans SC5314; identical to SEQ ID NO: 27152

SEQ ID NO: 129676 - DNA, 1281 bp, Candida albicans SC5314; identical to SEQ ID NO: 27153
  CDS (1)..(1281): transl_table=12

SEQ ID NO: 129677 - protein, 426 aa, Candida albicans SC5314; identical to SEQ ID NO: 27154

SEQ ID NO: 129678 - DNA, 1413 bp, Ustilago maydis 521; identical to SEQ ID NO: 27155
  CDS (1)..(1413)

SEQ ID NO: 129679 - protein, 470 aa, Ustilago maydis 521; identical to SEQ ID NO: 27156

SEQ ID NO: 129680 - DNA, 1380 bp, Ustilago maydis 521; identical to SEQ ID NO: 27157
  CDS (1)..(1380)

SEQ ID NO: 129681 - protein, 459 aa, Ustilago maydis 521; identical to SEQ ID NO: 27158

SEQ ID NO: 129682 - DNA, 1389 bp, Tribolium castaneum; identical to SEQ ID NO: 27165
  CDS (1)..(1389)

SEQ ID NO: 129683 - protein, 462 aa, Tribolium castaneum; identical to SEQ ID NO: 27166

SEQ ID NO: 129684 - DNA, 1386 bp, Tribolium castaneum; identical to SEQ ID NO: 27167
  CDS (1)..(1386)

SEQ ID NO: 129685 - protein, 461 aa, Tribolium castaneum; identical to SEQ ID NO: 27168

SEQ ID NO: 129686 - DNA, 1395 bp, Tribolium castaneum; identical to SEQ ID NO: 27169
  CDS (1)..(1395)

SEQ ID NO: 129687 - protein, 464 aa, Tribolium castaneum; identical to SEQ ID NO: 27170

SEQ ID NO: 129688 - DNA, 1392 bp, Tribolium castaneum; identical to SEQ ID NO: 27171
  CDS (1)..(1392)

SEQ ID NO: 129689 - protein, 463 aa, Tribolium castaneum; identical to SEQ ID NO: 27172

SEQ ID NO: 129690 - DNA, 1200 bp, Prochlorococcus marinus str. MIT 9303
  CDS (1)..(1200): transl_table=11
atggctcgcgagaagtttgagaggaacaagcctcacgtcaacattggcaccatcggccatgtcgaccacggcaaaacaaccctgaccgcagccatcacaagtgtgcttgcgaaaaaaggtcaagccaaggtgcaagattacgccgagatcgacggcgcacctgaagagcgtgagcgcggcatcacgatcaacaccgcccacgtggaatacgaaaccgatgggcgtcactatgcacacgtggactgccccggccacgcggattatgtcaagaacatgattaccggtgcggcccagatggacggcgcaatccttgtttgcgcagcaaccgatggtcccatggctcaaaccaaggagcacatccttcttgccaagcaggtgggcgttcctgcactggttgtcgctctcaacaaatgcgacatggtcgacgacgaggaaattattgagctcgttgaaatggagatccgtgaactcctgagcagctacgacttccctggtgatgacatccccatagtccaagtatctgggctcaaagccattgaaggtgaagctgaatgggaagcaaagatcgatgagttaatggacgcagttgacacgtccataccagaacccgagcgagaaatcgaaaaacctttcctaatggccgtagaggacgttttctcaatcactggtcgtggcaccgttgccaccggacgaatcgaacgcggcaaggtcaaaaaaggcgaggaaattgaaattgtcggcattagagacagccgcaaaaccaccgtgaccggtgtggaaatgttccgtaaagatcttgacgaaggcttagcgggagacaattgcgggctcctacttcgcggcatcgagaaggaagacatcgagcgcggcatggtcctcgtcaagccaggctcaattacacctcacactaaattcgagggtcaggtttacgtcctcaaaaaagaagaaggtggacgccacacccccttcttcgccggataccgtccacagttctacatccgaaccactgacgtgactggccaaattaccgccttcacagccgaagacggctccaatgtggagatggtgatgccaggcgacaacatcaaaatgactggtgaattgatctgccctgtggccatcgaacagggtatgcgcttcgccattcgcgaaggaggccgcaccatcggtgccggagttgtctcgaagatcatccaatga

SEQ ID NO: 129691 - protein, 399 aa, Prochlorococcus marinus str. MIT 9303
MAREKFERNKPHVNIGTIGHVDHGKTTLTAAITSVLAKKGQAKVQDYAEIDGAPEERERGITINTAHVEYETDGRHYAHVDCPGHADYVKNMITGAAQMDGAILVCAATDGPMAQTKEHILLAKQVGVPALVVALNKCDMVDDEEIIELVEMEIRELLSSYDFPGDDIPIVQVSGLKAIEGEAEWEAKIDELMDAVDTSIPEPEREIEKPFLMAVEDVFSITGRGTVATGRIERGKVKKGEEIEIVGIRDSRKTTVTGVEMFRKDLDEGLAGDNCGLLLRGIEKEDIERGMVLVKPGSITPHTKFEGQVYVLKKEEGGRHTPFFAGYRPQFYIRTTDVTGQITAFTAEDGSNVEMVMPGDNIKMTGELICPVAIEQGMRFAIREGGRTIGAGVVSKIIQ

SEQ ID NO: 129692 - DNA, 1233 bp, Chlorokybus atmophyticus; identical to SEQ ID NO: 27175
  CDS (1)..(1233): transl_table=11

SEQ ID NO: 129693 - protein, 410 aa, Chlorokybus atmophyticus; identical to SEQ ID NO: 27176

SEQ ID NO: 129694 - DNA, 1221 bp, Thermus thermophilus HB27; identical to SEQ ID NO: 27183
  CDS (1)..(1221): transl_table=11

SEQ ID NO: 129695 - protein, 406 aa, Thermus thermophilus HB27; identical to SEQ ID NO: 27184

SEQ ID NO: 129696 - DNA, 1194 bp, Desulfovibrio vulgaris subsp. vulgaris str. Hildenborough
  CDS (1)..(1194): transl_table=11
atgggtaaggaaaaatttgaacgcaagaagccgcacgtcaatatcggcaccatcggtcacatcgaccatggtaagaccactctgacggcagccatcaccaagaccgcaggcctcctcggtcagggcaagttcatcgcgtacgacgaaatcgacaaggctcctgaagaaaaggaacgtggcatcaccattgccaccgcccacgtcgagtacgagaccgctacgcgtcactacgcgcacgtcgactgccccggtcacgccgactacatcaagaacatgatcaccggtgcggcccagatggacggtgccatcatcgtcgtcgccgccaccgacggtcccatgccccagacccgtgagcacatcctgctcgcccgtcaggtcggcgtgccctacatcgtcgtgttcctgaacaagtgcgacatggtcgatgacgaagagcttctcgaactcgttgaactcgaagttcgcgaacttctcaccagctacggcttccccggcgacgacgttccggtcgtgcgcggctccgccctcaaggctctcgagtccgacgatcccaactctgacgcctgcaagcccatccgcgagctgctcgccgcttgcgacagctacatccccgagcctcagcgcgacatcgacaagcccttcctgatgcccatcgaagacgtgttctcgatctccggccgcggtaccgttgttaccggtcgtgtcgagcgcggtgtcatcaaggtcggtgaagaagtcgaaatcgtcggcatcaaggacaccaccaagtcgacctgcaccggcgtcgaaatgttccgcaagctgctcgatcagggtcaggctggcgacaacatcggtgccctgctccgtggcgtgaagcgtgacgacgtggaacgcggccaggttcttgccgctcccaagtccatcactccccaccgcaagttcaaggctgaagtgtacgtcctttccaaggaagaaggcggtcgtcacactccgttcttctcgggttaccgtccccagttctacttccgtaccacggacatcactggtgtgatcacccttgaagaaggcgtcgagatggtgatgcccggcgataacgccaccttcaacgtggaactcatcgcccccatcgccatggaactcggtctccgcttcgctatccgcgaaggtggccgtaccgtcggcgcaggcgtggtttccgagatcgtggagtaa

SEQ ID NO: 129697 - protein, 397 aa, Desulfovibrio vulgaris subsp. vulgaris str. Hildenborough
MGKEKFERKKPHVNIGTIGHIDHGKTTLTAAITKTAGLLGQGKFIAYDEIDKAPEEKERGITIATAHVEYETATRHYAHVDCPGHADYIKNMITGAAQMDGAIIVVAATDGPMPQTREHILLARQVGVPYIVVFLNKCDMVDDEELLELVELEVRELLTSYGFPGDDVPVVRGSALKALESDDPNSDACKPIRELLAACDSYIPEPQRDIDKPFLMPIEDVFSISGRGTVVTGRVERGVIKVGEEVEIVGIKDTTKSTCTGVEMFRKLLDQGQAGDNIGALLRGVKRDDVERGQVLAAPKSITPHRKFKAEVYVLSKEEGGRHTPFFSGYRPQFYFRTTDITGVITLEEGVEMVMPGDNATFNVELIAPIAMELGLRFAIREGGRTVGAGVVSEIVE

SEQ ID NO: 129698 - DNA, 1176 bp, Bartonella henselae str. Houston-1; identical to SEQ ID NO: 27185
  CDS (1)..(1176): transl_table=11

SEQ ID NO: 129699 - protein, 391 aa, Bartonella henselae str. Houston-1; identical to SEQ ID NO: 27186

SEQ ID NO: 129700 - DNA, 1230 bp, Acinetobacter sp. ADP1; identical to SEQ ID NO: 27187
  CDS (1)..(1230): transl_table=11

SEQ ID NO: 129701 - protein, 409 aa, Acinetobacter sp. ADP1; identical to SEQ ID NO: 27188

SEQ ID NO: 129702 - DNA, 1191 bp, Desulfotalea psychrophila LSv54
  CDS (1)..(1191): transl_table=11
atgtcaaaagaaaaatttgaaaggacaaaaccgcatgttaatgtgggcaccattggtcatattgatcatggtaaaaccactttgactgctgctattactcgcgtattgtctactaagggacaggccagcttcactgattttagtgatattgataaggcccctgaagagaaagagcgcggaattactattgcaaccgctcacgttgagtatgagactgtaaatcgtcactatgctcatgttgactgtcctggtcacgccgattatatcaagaatatgatcaccggtgctgctcagatggacggtgcaattttggttgttgctgcaaccgatggtgctatgcctcagacccgtgagcacattttgcttgctcgtcaggttggtgtaccggctatggtcgtatttcttaacaaatgcgacatggttgatgatgatgagcttattgagctcgttgagatggagcttcgtgagcttcttgatgattatgagttccctggcgacgatgtacctttcattcatggttctgcgcttctcgctcttgagaatccagaagatgaagataaggctgcatgtatctgggcgcttatggaagcaatcgattcttacattccagaaccagagcgtgatgtagatcagcctttccttatgcctgttgaagatgtcttctctatctccggtcgtggtactgttgcaaccggtcgtgttgagcgtggtattatcaaggttggagaggaagttgcgatagttggcgttaaagataccgtcaagaccacctgtactggtgtggaaatgtttcgcaaactacttgacgaaggccgtgctggtgataatattggtgctctccttcgtggtgttaagcgcgaagatattgagcgtggtcaggttcttgctaagccaggtaccattacacctcataccaagtttaaagcagagtgctacatcctcgggaaagacgagggtggacgacatactccatttttcaatggttatcgtccacagttctacttcagaaccactgacgtgactggtgttgtaagtctcccagagggaattgaaatggttatgcctggtgataacgtatcggttgacgctacgcttattaccccaatcgcgatggacgcaggtcttcgttttgctatccgtgagggtggtagaactgtaggtgctggtgttattagtgaaattatagaataa

SEQ ID NO: 129703 - protein, 396 aa, Desulfotalea psychrophila LSv54
MSKEKFERTKPHVNVGTIGHIDHGKTTLTAAITRVLSTKGQASFTDFSDIDKAPEEKERGITIATAHVEYETVNRHYAHVDCPGHADYIKNMITGAAQMDGAILVVAATDGAMPQTREHILLARQVGVPAMVVFLNKCDMVDDDELIELVEMELRELLDDYEFPGDDVPFIHGSALLALENPEDEDKAACIWALMEAIDSYIPEPERDVDQPFLMPVEDVFSISGRGTVATGRVERGIIKVGEEVAIVGVKDTVKTTCTGVEMFRKLLDEGRAGDNIGALLRGVKREDIERGQVLAKPGTITPHTKFKAECYILGKDEGGRHTPFFNGYRPQFYFRTTDVTGVVSLPEGIEMVMPGDNVSVDATLITPIAMDAGLRFAIREGGRTVGAGVISEIIE

SEQ ID NO: 129704 - DNA, 1188 bp, Symbiobacterium thermophilum IAM 14863
  CDS (1)..(1188): transl_table=11
atggctaagcagaggtttgagcgtaccaagccgcacgtgaacatcggcaccatcggccacgtcgaccatggcaagaccacgctgacggcggcgatcaccaaggtcctcgccgagaagggcaaggcccagttcatggcctacgacgcgatcgacaaggcgcccgaggagcgggagcgcggcatcaccatcaacacctcccacgtggagtacgagaccgacgcccggcactacgcccacgtcgactgcccgggacacgcggactacgtgaagaacatgatcaccggcgcggcccagatggacggcgcgatcctggtggtctccgccgctgacggccccatgccgcagacccgtgagcacatcctgctggcccgccaggtgggcgtgcccgccatcgtggtcttcctgaacaagtgcgacatggtcgatgacgaggagctgctggagctggtggagctcgaggtccgcgagctgctgaaccagtacgagttccccggcgacgagatcccgttcatccgcggctcggccctgaaggccctcgagggcgatcccaagtacgtcaaggccatcgaggagctcatggacgccgtcgacagctacatcccgacgccgcagcgtgacgccgacaagccgttcctgatgcccatcgaggacgtcttcaccatcaccggccgcggtaccgtggtgaccggccgtgtggagcgcggcaagtgcaaggtcggcgaccaggtggagatcgtcggcctccgtgaggagagcaagacgaccgtcgtcaccggcctcgagatgttccgcaaaatcctggacgaggtccaggcgggcgacaacgtgggcgccctgctgcgcggcatcgagaagaaggaggtcgagcgcggccaggtgctggcgaagcccggctccatcaagccgcacaccaagttctccggcgccatctacgtgctgaccaaggaagagggcggccggcactccccgttcttcaacggctaccgtccgcagttctacttccggaccaccgacgtcaccggcaccatcaagctgcccgagggcgttgagatggtcatgcctggcgacaacgtggagatcgccgtcgagctgatccaccccatcgccattgaggagggtctccggttcgccgttcgcgagggcggccgcacggtggcttccggtcgggtgaccaaggtcagcgagtaa

SEQ ID NO: 129705 - protein, 395 aa, Symbiobacterium thermophilum IAM 14863
MAKQRFERTKPHVNIGTIGHVDHGKTTLTAAITKVLAEKGKAQFMAYDAIDKAPEERERGITINTSHVEYETDARHYAHVDCPGHADYVKNMITGAAQMDGAILVVSAADGPMPQTREHILLARQVGVPAIVVFLNKCDMVDDEELLELVELEVRELLNQYEFPGDEIPFIRGSALKALEGDPKYVKAIEELMDAVDSYIPTPQRDADKPFLMPIEDVFTITGRGTVVTGRVERGKCKVGDQVEIVGLREESKTTVVTGLEMFRKILDEVQAGDNVGALLRGIEKKEVERGQVLAKPGSIKPHTKFSGAIYVLTKEEGGRHSPFFNGYRPQFYFRTTDVTGTIKLPEGVEMVMPGDNVEIAVELIHPIAIEEGLRFAVREGGRTVASGRVTKVSE

SEQ ID NO: 129706 - DNA, 1185 bp, Mannheimia succiniciproducens MBEL55E; identical to SEQ ID NO: 27193
  CDS (1)..(1185): transl_table=11

SEQ ID NO: 129707 - protein, 394 aa, Mannheimia succiniciproducens MBEL55E; identical to SEQ ID NO: 27194

SEQ ID NO: 129708 - DNA, 1191 bp, Legionella pneumophila subsp. pneumophila str. Philadelphia 1; identical to SEQ ID NO: 27197
  CDS (1)..(1191): transl_table=11

SEQ ID NO: 129709 - protein, 396 aa, Legionella pneumophila subsp. pneumophila str. Philadelphia 1; identical to SEQ ID NO: 27198

SEQ ID NO: 129710 - DNA, 1191 bp, Methylococcus capsulatus str. Bath; identical to SEQ ID NO: 27199
  CDS (1)..(1191): transl_table=11

SEQ ID NO: 129711 - protein, 396 aa, Methylococcus capsulatus str. Bath; identical to SEQ ID NO: 27200

SEQ ID NO: 129712 - DNA, 1176 bp, Silicibacter pomeroyi DSS-3
  CDS (1)..(1176): transl_table=11
atggcaaaggaaaagtttgagcgtagtaaaccgcacgtcaacatcggtacgattggccacgttgaccacggcaagacgacgctgaccgcagcgatcaccaagtatttcggcgatttcaaggcgtatgaccagatcgacggcgcgccggaagagaaagcgcgcgggatcaccatctcgaccgcccacgtggaatacgagaccgactcgcgtcactacgctcacgtcgactgccccggccacgccgactatgtgaagaacatgatcaccggcgcggcgcagatggacggcgcgatcctggttgtgaacgccgctgacggcccgatgccgcagacccgcgagcacatcctgctgggccgtcaggtcggcattcccttcatggttgtctacatgaacaaggtcgaccaggtggatgacgaggaactgctggaactggtggagatggaaatccgcgagctgctgtcctcgtacgattatccgggcgatgacattccgatcattcggggttcggcgctgcacgcgatgaacggcaccgagccgtcgatgggcgaagaatcgatccgcgcgctgatggcggcggtcgacgagtacatcccgaccccggcgcgtgcggtcgaccagcccttcctgatgccgatcgaagacgtgttctcgatctcgggccgtggcaccgtggtgaccgggcgtgtggaacgtggcgtgatcaacgttggcgactcgatcgagatcgtcggcattcgcgacaccaagaccaccacctgcaccggtgtggaaatgttccgcaagctgctggaccgcggtgaagccggcgacaacatcggcgcgctgctgcgtggtatcgatcgtgaaggcgtcgagcgcggccaggtgctgtgcaagcccggttcggtgaccccgcacaccaagttcgaagccgaagcctatatcctgaccaaggaagagggcggccgtcacaccccgttcttcgcgaactaccgtccgcagttctacttccggaccaccgacgtgaccggcaccgtgacgctggccgaaggcaccgagatggtgatgccgggtgacaacgttggcttcaccgtcgagctgatcgccccgatcgcgatggaagacggcctgcgtttcgccatccgcgaaggcggccgcaccgtcggcgccggcgttgtgtcgaagatcatcgagtaa

SEQ ID NO: 129713 - protein, 391 aa, Silicibacter pomeroyi DSS-3
MAKEKFERSKPHVNIGTIGHVDHGKTTLTAAITKYFGDFKAYDQIDGAPEEKARGITISTAHVEYETDSRHYAHVDCPGHADYVKNMITGAAQMDGAILVVNAADGPMPQTREHILLGRQVGIPFMVVYMNKVDQVDDEELLELVEMEIRELLSSYDYPGDDIPIIRGSALHAMNGTEPSMGEESIRALMAAVDEYIPTPARAVDQPFLMPIEDVFSISGRGTVVTGRVERGVINVGDSIEIVGIRDTKTTTCTGVEMFRKLLDRGEAGDNIGALLRGIDREGVERGQVLCKPGSVTPHTKFEAEAYILTKEEGGRHTPFFANYRPQFYFRTTDVTGTVTLAEGTEMVMPGDNVGFTVELIAPIAMEDGLRFAIREGGRTVGAGVVSKIIE

SEQ ID NO: 129714 - DNA, 1191 bp, Psychrobacter arcticus 273-4; identical to SEQ ID NO: 27207
  CDS (1)..(1191): transl_table=11

SEQ ID NO: 129715 - protein, 396 aa, Psychrobacter arcticus 273-4; identical to SEQ ID NO: 27208

SEQ ID NO: 129716 - DNA, 1185 bp, Colwellia psychrerythraea 34H; identical to SEQ ID NO: 27209
  CDS (1)..(1185): transl_table=11

SEQ ID NO: 129717 - protein, 394 aa, Colwellia psychrerythraea 34H; identical to SEQ ID NO: 27210

SEQ ID NO: 129718 - DNA, 1191 bp, Dechloromonas aromatica RCB; identical to SEQ ID NO: 27213
  CDS (1)..(1191): transl_table=11

SEQ ID NO: 129719 - protein, 396 aa, Dechloromonas aromatica RCB; identical to SEQ ID NO: 27214

SEQ ID NO: 129720 - DNA, 1194 bp, Thermobifida fusca YX; identical to SEQ ID NO: 27215
  CDS (1)..(1194): transl_table=11

SEQ ID NO: 129721 - protein, 397 aa, Thermobifida fusca YX; identical to SEQ ID NO: 27216

SEQ ID NO: 129722 - DNA, 1191 bp, Thiobacillus denitrificans ATCC 25259; identical to SEQ ID NO: 27219
  CDS (1)..(1191): transl_table=11

SEQ ID NO: 129723 - protein, 396 aa, Thiobacillus denitrificans ATCC 25259; identical to SEQ ID NO: 27220

SEQ ID NO: 129724 - DNA, 1230 bp, Anabaena variabilis ATCC 29413; identical to SEQ ID NO: 27221
  CDS (1)..(1230): transl_table=11

SEQ ID NO: 129725 - protein, 409 aa, Anabaena variabilis ATCC 29413; identical to SEQ ID NO: 27222

SEQ ID NO: 129726 - DNA, 1203 bp, Carboxydothermus hydrogenoformans Z-2901; identical to SEQ ID NO: 27225
  CDS (1)..(1203): transl_table=11

SEQ ID NO: 129727 - protein, 400 aa, Carboxydothermus hydrogenoformans Z-2901; identical to SEQ ID NO: 27226

SEQ ID NO: 129728 - DNA, 1200 bp, Synechococcus sp. CC9605
  CDS (1)..(1200): transl_table=11
atggcacgcgagaagttcgaaaggaacaagccccacgtcaacatcggcaccatcggccacgttgaccacggcaagaccaccctcaccgctgcgatcaccaacgtgctcgccaagaagggtcaggctgaagtgcagaactacgccgacatcgacggcgcccctgaagagcgtgagcgcggcatcaccatcaacaccgctcacgttgagtacgagaccgagacccgtcactacgcccacgtggactgccctggccacgcggactatgtgaagaacatgatcaccggtgccgctcagatggacggcgccatcctggtgtgtgccgccaccgacggcccgatggcccagaccaaggagcacatcctgctggccaagcaggtgggcgttcccgctctggtggttgcactgaacaagtgcgacatggtcgatgacgaagagatcatcgaactggtggagatggagatacgcgaactgctctccagctacgacttccccggcgacgacatccccgtggttcaggtctccggcctgaaggccatcgagggcgaggctgagtgggaagccaagatcgaggaactgatggcggctgttgactccagcattcctgagcctgagcgggaagttgacaagcccttcctgatggctgtggaagacgtcttctccatcaccggtcgcggcaccgtggccacaggccgtatcgagcgcggaatagtcaaggtcggcgaagaaatcgaaattgtcggtatcaaggacacccgcaagaccaccgtcaccggtgtggaaatgttccgcaagctgctcgatgagggcatggctggcgacaacgttggtctgctgcttcgcggcatccagaaggaagacatcgagcgcggcatggtgctcgtgaagcccggttccatcacccctcacaccaagtttgagggtcaggtgtacgtgctcaagaaggaagaaggcggccgccacactcctttcttcgctggctaccgcccgcagttctacatccgtacaacggacgtgacaggccaaatcactgccttcaccgcggaagacggttccaacgtggaaatggtgatgcctggtgacaacatccagatgaccggtgagctgatctgccccgtcgccatcgagcagggcatgcgcttcgccatccgcgaaggcggccgcaccatcggtgctggcgtggtctccaagatcattgagtga

SEQ ID NO: 129729 - protein, 399 aa, Synechococcus sp. CC9605
MAREKFERNKPHVNIGTIGHVDHGKTTLTAAITNVLAKKGQAEVQNYADIDGAPEERERGITINTAHVEYETETRHYAHVDCPGHADYVKNMITGAAQMDGAILVCAATDGPMAQTKEHILLAKQVGVPALVVALNKCDMVDDEEIIELVEMEIRELLSSYDFPGDDIPVVQVSGLKAIEGEAEWEAKIEELMAAVDSSIPEPEREVDKPFLMAVEDVFSITGRGTVATGRIERGIVKVGEEIEIVGIKDTRKTTVTGVEMFRKLLDEGMAGDNVGLLLRGIQKEDIERGMVLVKPGSITPHTKFEGQVYVLKKEEGGRHTPFFAGYRPQFYIRTTDVTGQITAFTAEDGSNVEMVMPGDNIQMTGELICPVAIEQGMRFAIREGGRTIGAGVVSKIIE

SEQ ID NO: 129730 - DNA, 1191 bp, Rhodospirillum rubrum ATCC 11170
  CDS (1)..(1191): transl_table=11
atgtcgaaagaaaagtttgcgcggacgaagccccattgcaacgtcggaacgattggtcacgttgaccatggcaagacgtcgctgacggcggcgatcacgaaggttctggccgaagcgggcggggcgacgttccaggcctacgaccagatcgacaaggcgccggaagagcgtgcgcgcggcatcacgatttcgacggcgcacgttgagtacgagacggaagcgcgtcactacgcgcacgtcgactgcccgggccacgccgactatgtgaagaacatgatcaccggcgcggcgcagatggacggggcgatcctggtggtttcggccgccgacggcccgatgccgcagacccgcgagcacattcttctggcccgtcaggtcggcgttccggccctggtggtgttcctgaacaagtgcgacatggtcgacgacgaggagctgcttgagctggtcgagctcgaggttcgcgagttgctgacgagctacgacttccccggcgatgatattcccatcgtcaagggctcggctctggccgctctggaagacagcgacccgaagcttggtcacgatgccatcctcgagctgatgaaggcggtggacgattacattccgcagcccgagcgcccgaaggacaagccgttcctgatgccgatcgaagacgtgttctcgatctcgggtcgtggtacggtggtgaccggtcgtgtcgagcgcggcatcgtcaaggttggcgaggaaatcgagatcatcggtatccgcgacacccagaagacgacctgcaccggcgttgagatgttccgcaagctgcttgatcagggcgaggccggcgacaacatcggcgcgctgctgcgcggcaccaagcgtgatgacgtcgagcgcggtcaggttctggccaagccgggttcgatcaccccgcacaccaagttcaagtgcgaggcctatatcctgacgaaggaagagggtggccgtcacacgccgttcttctccaactatcgtccgcagttctatttccgcacgaccgacgtgaccgggacgatcgagctgccggaaggcaccgagatggttatgcccggtgacaacatcggcatgacggtgcagctgatcgcgccgattgccatggacgagggtctgcggttcgccatccgcgagggtggccgtaccgtcggtgccggcgtcgtcgccagcatcgttcagtaa

SEQ ID NO: 129731 - protein, 396 aa, Rhodospirillum rubrum ATCC 11170
MSKEKFARTKPHCNVGTIGHVDHGKTSLTAAITKVLAEAGGATFQAYDQIDKAPEERARGITISTAHVEYETEARHYAHVDCPGHADYVKNMITGAAQMDGAILVVSAADGPMPQTREHILLARQVGVPALVVFLNKCDMVDDEELLELVELEVRELLTSYDFPGDDIPIVKGSALAALEDSDPKLGHDAILELMKAVDDYIPQPERPKDKPFLMPIEDVFSISGRGTVVTGRVERGIVKVGEEIEIIGIRDTQKTTCTGVEMFRKLLDQGEAGDNIGALLRGTKRDDVERGQVLAKPGSITPHTKFKCEAYILTKEEGGRHTPFFSNYRPQFYFRTTDVTGTIELPEGTEMVMPGDNIGMTVQLIAPIAMDEGLRFAIREGGRTVGAGVVASIVQ

SEQ ID NO: 129732 - DNA, 1203 bp, Moorella thermoacetica ATCC 39073; identical to SEQ ID NO: 27231
  CDS (1)..(1203): transl_table=11

SEQ ID NO: 129733 - protein, 400 aa, Moorella thermoacetica ATCC 39073; identical to SEQ ID NO: 27232

SEQ ID NO: 129734 - DNA, 1194 bp, Syntrophus aciditrophicus SB; identical to SEQ ID NO: 27233
  CDS (1)..(1194): transl_table=11

SEQ ID NO: 129735 - protein, 397 aa, Syntrophus aciditrophicus SB; identical to SEQ ID NO: 27234

SEQ ID NO: 129736 - DNA, 1191 bp, Novosphingobium aromaticivorans DSM 12444; identical to SEQ ID NO: 27237
  CDS (1)..(1191): transl_table=11

SEQ ID NO: 129737 - protein, 396 aa, Novosphingobium aromaticivorans DSM 12444; identical to SEQ ID NO: 27238

SEQ ID NO: 129738 - DNA, 1182 bp, Anaplasma phagocytophilum HZ; identical to SEQ ID NO: 27239
  CDS (1)..(1182): transl_table=11

SEQ ID NO: 129739 - protein, 393 aa, Anaplasma phagocytophilum HZ; identical to SEQ ID NO: 27240

SEQ ID NO: 129740 - DNA, 1293 bp, Neorickettsia sennetsu str. Miyayama
  CDS (1)..(1293): transl_table=11
atggctgttaaacagaagcaggtcttcgtcaacgatagaccgcatttaaatataggtacgatagggcacgttgatcatggaaagacgaccttgactgctgcgattaccaagttttgttcagaggaaggtggtggctatgaggctgattttagggcgtatgataatattgataaggccccagaagagaggcagcgtggtattaccatttccactgcgcacgttgagtataagactccggagcgtcactatgcacacgtggactgtccgggacacgcggattatatcaagaatatgatcacgggtgctgcacaaatggacggtgctatacttgtggttgcgggtacagatggtgccatgcagcaaacaaaggagcacatccttttagcaaagcaggttggtgtcgggagtatagttgtttacatcaacaagtgtgattcttctgagcttgatgaggagcttctggagcttgttgagagtgatatcaaggatcttttgatatcacatggattcgatttgccagaggatgaggaagatggaagtaatccggcaatcataaggggttccgcactattggcgcttaatggcgaggaaagtgagcttggcaagggttctattcgcaagttgcttgctgcgtgcgataagtatattgcgcttcctgaaagggcggttgatggtgattttctcatgtctattgaggatgtcttttccatttccggacgtggaactgttgttacaggaaaaattgagcggggctgtatcaaagttggtgatggggttgagattgttggtataagggatacacaaaaaactacctgtactggagtcgaaatgtttaacaagcttgttgaacaaggtgaggctggatttaatgttggtatccttctccgtggttcgaaaagagaagatgtatgtaggggacaagttctctgtaagccgggttcgattactcctcataggaagttgagggcgaggatcgtgactcttacaaaagaggaaggtggcagaaggacagggttcgtgtctgggtataagccgcagttttatttccgtacgacagatgttactggcacggcgtacttgcctgtagatggggctgaaattgtcatgccaggtgatgatttggagatttttgtggagctcttgaatccgattgcgatggagaaagggtctaggtttgcaatcagagaggggggagtgacagtaggcgctggtcaagtgttggagattatggattctaagactgatgccgaaatagcaaagatgttcaaaattgtgagagctgtgaagaattga

SEQ ID NO: 129741 - protein, 430 aa, Neorickettsia sennetsu str. Miyayama
MAVKQKQVFVNDRPHLNIGTIGHVDHGKTTLTAAITKFCSEEGGGYEADFRAYDNIDKAPEERQRGITISTAHVEYKTPERHYAHVDCPGHADYIKNMITGAAQMDGAILVVAGTDGAMQQTKEHILLAKQVGVGSIVVYINKCDSSELDEELLELVESDIKDLLISHGFDLPEDEEDGSNPAIIRGSALLALNGEESELGKGSIRKLLAACDKYIALPERAVDGDFLMSIEDVFSISGRGTVVTGKIERGCIKVGDGVEIVGIRDTQKTTCTGVEMFNKLVEQGEAGFNVGILLRGSKREDVCRGQVLCKPGSITPHRKLRARIVTLTKEEGGRRTGFVSGYKPQFYFRTTDVTGTAYLPVDGAEIVMPGDDLEIFVELLNPIAMEKGSRFAIREGGVTVGAGQVLEIMDSKTDAEIAKMFKIVRAVKN

SEQ ID NO: 129742 - DNA, 1188 bp, Ehrlichia chaffeensis str. Arkansas
  CDS (1)..(1188): transl_table=11
atggtagaagaaaggaaaccacatataaatgtagggacaatagggcatgttgatcatggtaagacaacattaacagcagcgttaacaacagtgttagcgaagaggttgagtggagaaggtaataaaagtgtaaagtatgacgaaatagataaagcaccagaagagaaagcaagaggaataaccatttcaacagcacatgtagaatatgaaacagagaatagacattatgcgcatgtagattgtccaggacatgctgattatataaaaaatatgataacaggtgctgcacaaatggatgcagcaatattagtagtatctgcaacagatggagcaatgccacaaacaagagaacatatactattagcaaaacaagttggagtaaaagatatagtagtatggatgaataagtgtgatgttgtagatgatgaagaaatgttgtcattagttgagatggaaataagagaattattatcaaaatatggatatccaggagatgatatagatgttgtaagaggatctgcagttaaggcattggaagaagaaacaggttcaggagtctggagtgaaaaaataatggaattgatgaatgccttagaaaaaataagtttaccaacaagagaaaaagataagccatttttaatgtcaatagaagatgtattttcaatacctggaagaggtacagtagtaacaggaagaatagagagaggagtaattagagtaggagataaaatagagatagtagggttacgagatatacagagcacagtatgtacaggtgttgaaatgtttcataaagcattagatgcaggagaagcaggggataatgcaggtatattgttaagaggaataaagaaagaggatgtagagagagggcaagtattgagtgcgcctggtcaaatacattcgtataagaaatttaaagcagaggtatatatattaaagaaagaagagggaggaaggcatacaccgtttttctcaaattatcagccacaattttatgttagaacaactgatgtaacaggtagtataaaattacctgagggggtagagatggtaatgcctggggataatataagtatcgaagtaagtttagataagcctgttgctattgataaaggattgagatttgcaattcgtgaaggtggtagaactgtaggctctggtattattactgaaattttggagtag

SEQ ID NO: 129743 - protein, 395 aa, Ehrlichia chaffeensis str. Arkansas
MVEERKPHINVGTIGHVDHGKTTLTAALTTVLAKRLSGEGNKSVKYDEIDKAPEEKARGITISTAHVEYETENRHYAHVDCPGHADYIKNMITGAAQMDAAILVVSATDGAMPQTREHILLAKQVGVKDIVVWMNKCDVVDDEEMLSLVEMEIRELLSKYGYPGDDIDVVRGSAVKALEEETGSGVWSEKIMELMNALEKISLPTREKDKPFLMSIEDVFSIPGRGTVVTGRIERGVIRVGDKIEIVGLRDIQSTVCTGVEMFHKALDAGEAGDNAGILLRGIKKEDVERGQVLSAPGQIHSYKKFKAEVYILKKEEGGRHTPFFSNYQPQFYVRTTDVTGSIKLPEGVEMVMPGDNISIEVSLDKPVAIDKGLRFAIREGGRTVGSGIITEILE

SEQ ID NO: 129744 - DNA, 1203 bp, Desulfitobacterium hafniense Y51; identical to SEQ ID NO: 27243
  CDS (1)..(1203): transl_table=11

SEQ ID NO: 129745 - protein, 400 aa, Desulfitobacterium hafniense Y51; identical to SEQ ID NO: 27244

SEQ ID NO: 129746 - DNA, 1224 bp, Saccharophagus degradans 2-40; identical to SEQ ID NO: 27245
  CDS (1)..(1224): transl_table=11

SEQ ID NO: 129747 - protein, 407 aa, Saccharophagus degradans 2-40; identical to SEQ ID NO: 27246

SEQ ID NO: 129748 - DNA, 1191 bp, Methylobacillus flagellatus KT; identical to SEQ ID NO: 27249
  CDS (1)..(1191): transl_table=11

SEQ ID NO: 129749 - protein, 396 aa, Methylobacillus flagellatus KT; identical to SEQ ID NO: 27250

SEQ ID NO: 129750 - DNA, 1191 bp, Myxococcus xanthus DK 1622; identical to SEQ ID NO: 27257
  CDS (1)..(1191): transl_table=11

SEQ ID NO: 129751 - protein, 396 aa, Myxococcus xanthus DK 1622; identical to SEQ ID NO: 27258

SEQ ID NO: 129752 - DNA, 1191 bp, Myxococcus xanthus DK 1622
  CDS (1)..(1191): transl_table=11
atggccaaggaaaagttcgagcgtaacaagccccacgtgaacatcggcacgatcggacacgtggaccacggcaagacgtcgctgacggccgccatcaccaaggtgctggcgaagacgggcggcgccacgttcctggcgtacgacctgattgacaaggcgccggaggagcgtgagcgcggtatcacgatttccacctcgcacgtggagtaccagacgtcgaaccggcactacgcccacgtcgactgtccgggccacgccgactacgtgaagaacatgatcacgggcgcggcgcagatggacggcgccatcctggtggtgtcggcggcggacggcccgatgccgcagacgcgtgagcacatcctgctggcgcgccaggtcggcgttccgtacatcgtggtcttcctgaacaaggtggacatgctggacgaccccgagctgcgcgagctcgtggagatggaagtccgcgacctgctgaagaagtacgagttccctggcgatgacatccccatcatcccgggctcggcgctcaaggcgctggagggtgacaccagcgacatcggcgagccggccatcctgaagctgatggaggcggtggacagctacatcccgacgccgcagcgcgcgacggacaagcccttcctgatgccggtggaggacgtgttctccatctccggccgcggcacggtggccacgggccgcgtcgagcgcggtatcatcaaggtcggcgaggaagtggaagtcgttggtctgcgcccgacgcagaagacggtcgtcacgggcgtggagatgttccgcaagctgctggaccagggcatggcgggcgacaacatcggcgcgctggtgcgcggcctgaagcgcgaggacatggagcgcggccaggtgctggccaagccgggcagcatcaccccgcacaccaagttcaaggcgcagatctacgtgctgtcgaaggaagagggcggtcgtcacaccccgttcttcaagggctaccgcccgcagttctacttccgcaccacggacgtgacgggctcggtgaagctgccggagaacgtcgaaatggtgatgccgggcgacaacatcgccattgaggtggagctcatcacccccgtggccatggagaaggagctgcgcttcgctgtccgcgagggtggccgcacggtgggtgccggcgtcgtggcggaaatcgtcgagtag

SEQ ID NO: 129753 - protein, 396 aa, Myxococcus xanthus DK 1622
MAKEKFERNKPHVNIGTIGHVDHGKTSLTAAITKVLAKTGGATFLAYDLIDKAPEERERGITISTSHVEYQTSNRHYAHVDCPGHADYVKNMITGAAQMDGAILVVSAADGPMPQTREHILLARQVGVPYIVVFLNKVDMLDDPELRELVEMEVRDLLKKYEFPGDDIPIIPGSALKALEGDTSDIGEPAILKLMEAVDSYIPTPQRATDKPFLMPVEDVFSISGRGTVATGRVERGIIKVGEEVEVVGLRPTQKTVVTGVEMFRKLLDQGMAGDNIGALVRGLKREDMERGQVLAKPGSITPHTKFKAQIYVLSKEEGGRHTPFFKGYRPQFYFRTTDVTGSVKLPENVEMVMPGDNIAIEVELITPVAMEKELRFAVREGGRTVGAGVVAEIVE

SEQ ID NO: 129754 - DNA, 1230 bp, Helicosporidium sp. ex Simulium jonesii; identical to SEQ ID NO: 27259
  CDS (1)..(1230): transl_table=11

SEQ ID NO: 129755 - protein, 409 aa, Helicosporidium sp. ex Simulium jonesii; identical to SEQ ID NO: 27260

SEQ ID NO: 129756 - DNA, 1176 bp, Mesorhizobium sp. BNC1; identical to SEQ ID NO: 27261
  CDS (1)..(1176): transl_table=11

SEQ ID NO: 129757 - protein, 391 aa, Mesorhizobium sp. BNC1; identical to SEQ ID NO: 27262

SEQ ID NO: 129758 - DNA, 1188 bp, Cytophaga hutchinsonii ATCC 33406
  CDS (1)..(1188): transl_table=11
atggcaaaagaaaattttgaccgttcaaaaccacacgttaacgttggtactattggccacgtcgatcacggtaaaactactttaacagcagcaatcacaaaagtattggctgataaaggtttggctgagaaaagagatttctctcagatcgataacgctccagaagaaaaagaaagaggtattacgatcaatacttctcacgttgagtacgctactgcaacgcgtcactatgcacacgttgactgtccaggtcacgcggattacgtgaagaacatggttacaggtgctgcgcagatggatggtgctatccttgtagttgctgctacagatggtcctatgccacaaacacgtgagcacatccttcttgctcgtcaggtaggtgttcctgcaatggttgtgttcatgaacaaagtagatttggttgatgatcctgaattgttggaattagttgaaatggaaatccgtgagttgttatcattctacaacttccctggagatacaatgagcatcatcaaaggttctgctttaggtggtcttaacgctgatccaaaatgggttgctacgatcgaagaattaatgaacgcggtagataacgatattccgattcctccacgtttgactgatcagcctttcttgatgccggttgaagatgtattctctatcacaggtcgtggtacagttgctactggtagaattgaaagaggtgttattaactctggtgaaggtgttgacattatcggttttggtgctgagaacttaaaatctacagttactggtgttgaaatgttccgtaagatcttggatcgtggtgaagctggtgacaacgttggtcttcttcttcgtggtatcgaaaaagaatctatcaaacgtggtatggttatctgcaaaccaggttcagtaaaacctcactctgagttcaaaggtgaaatctacgttctttctaaagaagaaggtggtcgtcacacaccattctttaacaaataccgtcctcagttctacatgagaacgacagatgttactggtgaaatcgaacttcctgcaggtactgaaatggtaatgccgggtgataacatcacaattactgtaaaattgatcgctgcaattgcacttgaaaaaggtcttcgtttcgctatccgtgaaggtggtagaacagtaggtgctggtcaggttactgaaatattgaaataa

SEQ ID NO: 129759 - protein, 395 aa, Cytophaga hutchinsonii ATCC 33406
MAKENFDRSKPHVNVGTIGHVDHGKTTLTAAITKVLADKGLAEKRDFSQIDNAPEEKERGITINTSHVEYATATRHYAHVDCPGHADYVKNMVTGAAQMDGAILVVAATDGPMPQTREHILLARQVGVPAMVVFMNKVDLVDDPELLELVEMEIRELLSFYNFPGDTMSIIKGSALGGLNADPKWVATIEELMNAVDNDIPIPPRLTDQPFLMPVEDVFSITGRGTVATGRIERGVINSGEGVDIIGFGAENLKSTVTGVEMFRKILDRGEAGDNVGLLLRGIEKESIKRGMVICKPGSVKPHSEFKGEIYVLSKEEGGRHTPFFNKYRPQFYMRTTDVTGEIELPAGTEMVMPGDNITITVKLIAAIALEKGLRFAIREGGRTVGAGQVTEILK

SEQ ID NO: 129760 - DNA, 1191 bp, Rhodococcus sp. RHA1
  CDS (1)..(1191): transl_table=11
gtggcgaaggcgaagttcgagcggacgaagccgcacgtgaacatcggcaccatcggtcacgtcgaccacggcaagaccacgctgaccgcggccatcaccaaggttctgcacgacgcgtacccggatctcaacgaggcctcggccttcgacgagatcgacaaggctcctgaggagaaggctcgcggtatcacgatcaacatctcgcatgttgagtaccagaccgagaagcgccactacgcgcacgtcgatgctcccggtcacgccgactacatcaagaacatgatcaccggtgcggcgcagatggacggcgccatcctcgtggtcgcggccaccgacggcccgatgccccagacgcgtgagcacgtgctgctcgcccgccaggtcggcgtgccgtacatcctcgtcgccctgaacaaggccgacatggtggacgacgacgagatcatcgagctcgtcgagatggaggtccgtgagctcctcgctgcgcaggagttcgacgaggacgctccggttgtcaaggtctccgcactcaaggcgctcgagggcgacccggagtggaccaagaacatcctcgagctcatggctgcggtcgacgagtccatcccggacccggtccgcgagaccgagaagcccttcctcatgcccgtcgaggacgtcttcacgatcaccggtcgtggcaccgtcgtcaccggtcgtatcgagcgtggcgtgatcaacgtcaatgaggatgtcgagatcgtcggcatcaaggaaaccaagaccaagaccacggtcacgggtatcgagatgttccgcaagctcctcgactcgggccaggccggtgacaacgtcggtctgctggttcgtggtatcaagcgcgaagatgtcgagcgtggacaggttgtcgtcaagcccggcaccaccaccccgcacaccgagttcgagggccaggcgtacatcctgtccaaggacgagggcggccgccacacgccgttcttcaacaactaccgtccgcagttctacttccgtaccacggacgtgacgggcgttgtgacgctgcccgagggcaccgagatggtcatgcccggtgacaacaccgagatgtccgtcaagctgatccagcccgtcgccatggacgagggcctgcgcttcgcgatccgcgaaggcggccgtaccgtcggcgccggcaaggtcacgaagatcaacaagtga

SEQ ID NO: 129761 - protein, 396 aa, Rhodococcus sp. RHA1
MAKAKFERTKPHVNIGTIGHVDHGKTTLTAAITKVLHDAYPDLNEASAFDEIDKAPEEKARGITINISHVEYQTEKRHYAHVDAPGHADYIKNMITGAAQMDGAILVVAATDGPMPQTREHVLLARQVGVPYILVALNKADMVDDDEIIELVEMEVRELLAAQEFDEDAPVVKVSALKALEGDPEWTKNILELMAAVDESIPDPVRETEKPFLMPVEDVFTITGRGTVVTGRIERGVINVNEDVEIVGIKETKTKTTVTGIEMFRKLLDSGQAGDNVGLLVRGIKREDVERGQVVVKPGTTTPHTEFEGQAYILSKDEGGRHTPFFNNYRPQFYFRTTDVTGVVTLPEGTEMVMPGDNTEMSVKLIQPVAMDEGLRFAIREGGRTVGAGKVTKINK

SEQ ID NO: 129762 - DNA, 1230 bp, Trichodesmium erythraeum IMS101; identical to SEQ ID NO: 27265
  CDS (1)..(1230): transl_table=11

SEQ ID NO: 129763 - protein, 409 aa, Trichodesmium erythraeum IMS101; identical to SEQ ID NO: 27266

SEQ ID NO: 129764 - DNA, 1191 bp, Alkalilimnicola ehrlichei MLHE-1; identical to SEQ ID NO: 27273
  CDS (1)..(1191): transl_table=11

SEQ ID NO: 129765 - protein, 396 aa, Alkalilimnicola ehrlichei MLHE-1; identical to SEQ ID NO: 27274

SEQ ID NO: 129766 - DNA, 1191 bp, Hyphomonas neptunium ATCC 15444
  CDS (1)..(1191): transl_table=11
atgggcaaggcaaagtttgagcgtaacaagccgcacgtaaacattggcacgattggccacgttgaccacggcaagacgacgctgacagcggcgatcacgatcacgctggcgaagaccggtggcgcgacggcgaagaattacgccgacattgacgcggcgccggaagagaaggcacgcgggatcacgatcaacacggcgcacgtcgagtatgagacgcctgcccgtcactatgctcacgtcgactgccccggccacgcggactatgtgaagaacatgatcaccggcgcggcgcagatggacggcgcgatcctggtgtgttcggccgctgacggcccgatgccgcagacgcgcgagcacatccttctggcccgccaggttggcgtgccggcgctggtggtgttcctcaacaaggtcgacatggtcgacgatgaggagcttctggagctggtcgagatggaagtgcgcgagctgctttcgtcctacaacttccctggcgacgacattccgatcatcaagggctcggctctggcggctgttgaagaccgcaaccctgaaatcggccaggagcgtatcctggagctgatggccgctgtggacgagtacatcccgacgcctgagcgtccgctggacaagccgttcctgatgccggttgaagacgtgttctcgatctcgggccgcggtacggttgtgaccggccgggttgagcagggcatcgtcaaggttggcgaagaaatcgagatcgtcggcatccgcccgacggtgaagacgacctgcacgggcgttgagatgttccgcaagctgctcgaccagggccaggctggcgacaacatcggcgcgctgctgcgcggtgttgaccgtgaaggcgttgagcgcgggcaggttctctgcaagccgggctcgatcacgccgcacacgctgttcgaagccgaagcctacatcctgacgaaggaagagggtggccgtcacacgccgttcttcaccaactaccgtccgcagttctacttccgcaccaccgacgtcaccggcatcgtgaaactgcctgaggacaaagagatggttctgccgggcgacaacgtgaaaatggatgtcgagctgatcaacccgatcgccatggacaagggcctgcgcttcgccatccgcgaaggcggccgtaccgtcggcgccggcgtcgtctccgaaatcaagaaataa

SEQ ID NO: 129767 - protein, 396 aa, Hyphomonas neptunium ATCC 15444
MGKAKFERNKPHVNIGTIGHVDHGKTTLTAAITITLAKTGGATAKNYADIDAAPEEKARGITINTAHVEYETPARHYAHVDCPGHADYVKNMITGAAQMDGAILVCSAADGPMPQTREHILLARQVGVPALVVFLNKVDMVDDEELLELVEMEVRELLSSYNFPGDDIPIIKGSALAAVEDRNPEIGQERILELMAAVDEYIPTPERPLDKPFLMPVEDVFSISGRGTVVTGRVEQGIVKVGEEIEIVGIRPTVKTTCTGVEMFRKLLDQGQAGDNIGALLRGVDREGVERGQVLCKPGSITPHTLFEAEAYILTKEEGGRHTPFFTNYRPQFYFRTTDVTGIVKLPEDKEMVLPGDNVKMDVELINPIAMDKGLRFAIREGGRTVGAGVVSEIKK

SEQ ID NO: 129768 - DNA, 1191 bp, Hyphomonas neptunium ATCC 15444; identical to SEQ ID NO: 27275
  CDS (1)..(1191): transl_table=11

SEQ ID NO: 129769 - protein, 396 aa, Hyphomonas neptunium ATCC 15444; identical to SEQ ID NO: 27276

SEQ ID NO: 129770 - DNA, 1188 bp, Pediococcus pentosaceus ATCC 25745; identical to SEQ ID NO: 27279
  CDS (1)..(1188): transl_table=11

SEQ ID NO: 129771 - protein, 395 aa, Pediococcus pentosaceus ATCC 25745; identical to SEQ ID NO: 27280

SEQ ID NO: 129772 - DNA, 1191 bp, Oenococcus oeni PSU-1; identical to SEQ ID NO: 27281
  CDS (1)..(1191): transl_table=11

SEQ ID NO: 129773 - protein, 396 aa, Oenococcus oeni PSU-1; identical to SEQ ID NO: 27282

SEQ ID NO: 129774 - DNA, 1188 bp, Leuconostoc mesenteroides subsp. mesenteroides ATCC 8293; identical to SEQ ID NO: 27283
  CDS (1)..(1188): transl_table=11

SEQ ID NO: 129775 - protein, 395 aa, Leuconostoc mesenteroides subsp. mesenteroides ATCC 8293; identical to SEQ ID NO: 27284

SEQ ID NO: 129776 - DNA, 1191 bp, Magnetococcus sp. MC-1
  CDS (1)..(1191): transl_table=11
atggccaaggaaaagtttgcacgtactaaaccccacgtcaacattggcacaattggccacgttgaccatggtaagaccacattgaccgctgcgatcaccaaggtgatggcggctgcgggtcgcgcggagtttcgcgcctatgatcaaattgacggcgctcctgaagagcgtgagcgtggtattaccatctccaccgcccacgttgagtatgagaccgaggcacgtcactatgcccacgttgactgccctggacacgcagactatgtgaaaaacatgatcaccggtgctgcacagatggacggcggtattctggtggtgagtgcggcggacggccccatgccccagacccgcgagcacatcctgctggcccgtcaggttggtgtgcctgcgctggttgtcttcctgaacaaggttgatcaggtggatgacgaagagctgcttgagttggtggagatggaagtgcgtgaacttctctcttcttacgacttccctggcgacgatatccccgtcattaagggttctgcgttgaaggctcttgagggtgaagagtcggagatgggggttgatgcgatcaacaggttaatggatgccgttgacgcctacattccagagcctgagcgtcccctggaccaagctttcttgatgcccattgaagatgtgttcaccatctccggtcgtggtacggtggtaacgggtcgtattgagcgcggtattgttaaagtaggcgagcaagttgccatcatcggtattaaagataccgttgtgaccacctgtaccggcgttgagatgttccgtaaattgctggatcaaggtcaggctggcgacaacgtgggtgtgctactgcgtggcaccaagcgtgaggatgtgcaacgtggtcaggtgttggctgcgcccaactcgatcaagccgcacaccaagtttaatgctgagtcgtacattctaaccaaagaagagggcggtcgtcacaccccattcttctcgaactatcgtccccagttttacttccgcaccaccgacgtaaccggtgtgttgaagctgcctgagggtgtagagatggttatgccaggtgataacatcaccatggaagttgaactgatcgcccccatcgccatggaaaaaggtctgcgcttcgccattcgcgaaggtggccgtaccgtcggcgcaggcgtggttgccgaagtaattgactga

SEQ ID NO: 129777 - protein, 396 aa, Magnetococcus sp. MC-1
MAKEKFARTKPHVNIGTIGHVDHGKTTLTAAITKVMAAAGRAEFRAYDQIDGAPEERERGITISTAHVEYETEARHYAHVDCPGHADYVKNMITGAAQMDGGILVVSAADGPMPQTREHILLARQVGVPALVVFLNKVDQVDDEELLELVEMEVRELLSSYDFPGDDIPVIKGSALKALEGEESEMGVDAINRLMDAVDAYIPEPERPLDQAFLMPIEDVFTISGRGTVVTGRIERGIVKVGEQVAIIGIKDTVVTTCTGVEMFRKLLDQGQAGDNVGVLLRGTKREDVQRGQVLAAPNSIKPHTKFNAESYILTKEEGGRHTPFFSNYRPQFYFRTTDVTGVLKLPEGVEMVMPGDNITMEVELIAPIAMEKGLRFAIREGGRTVGAGVVAEVID

SEQ ID NO: 129778 - DNA, 1194 bp, Nocardioides sp. JS614; identical to SEQ ID NO: 27289
  CDS (1)..(1194): transl_table=11

SEQ ID NO: 129779 - protein, 397 aa, Nocardioides sp. JS614; identical to SEQ ID NO: 27290

SEQ ID NO: 129780 - DNA, 1191 bp, Azoarcus sp. BH72; identical to SEQ ID NO: 27291
  CDS (1)..(1191): transl_table=11

SEQ ID NO: 129781 - protein, 396 aa, Azoarcus sp. BH72; identical to SEQ ID NO: 27292

SEQ ID NO: 129782 - DNA, 1191 bp, Acidovorax sp. JS42; identical to SEQ ID NO: 27293
  CDS (1)..(1191): transl_table=11

SEQ ID NO: 129783 - protein, 396 aa, Acidovorax sp. JS42; identical to SEQ ID NO: 27294

SEQ ID NO: 129784 - DNA, 1191 bp, Magnetospirillum magnetotacticum MS-1; identical to SEQ ID NO: 27297
  CDS (1)..(1191): transl_table=11

SEQ ID NO: 129785 - protein, 396 aa, Magnetospirillum magnetotacticum MS-1; identical to SEQ ID NO: 27298

SEQ ID NO: 129786 - DNA, 1185 bp, Fusobacterium nucleatum subsp. vincentii ATCC 49256; identical to SEQ ID NO: 27303
  CDS (1)..(1185): transl_table=11

SEQ ID NO: 129787 - protein, 394 aa, Fusobacterium nucleatum subsp. vincentii ATCC 49256; identical to SEQ ID NO: 27304

SEQ ID NO: 129788 - DNA, 1230 bp, Crocosphaera watsonii WH 8501; identical to SEQ ID NO: 27305
  CDS (1)..(1230): transl_table=11

SEQ ID NO: 129789 - protein, 409 aa, Crocosphaera watsonii WH 8501; identical to SEQ ID NO: 27306

SEQ ID NO: 129790 - DNA, 1182 bp, Prosthecochloris aestuarii DSM 271
  CDS (1)..(1182): transl_table=11
atggcaaaagaggcctacaagagggagaaacctcatgtaaatattggtaccatcggtcacgttgaccatggtaaaacaacactgacagctgcaattaccacagttcttgcaaagaaaggtatggctcagttgcgcgaattcggtgacatcgataaggcgcctgaagaaagagagcgcggtattaccatttctaccgcacacgttgaatacgagaccgacaaacgtcactatgcgcacattgactgtccaggtcacgctgactacatcaagaatatgattaccggtgctgctcagatggacggtgctattctcgtcgttgccggtaccgatggtcctatgcctcagactcgcgagcacattctgcttgcccgtcaggtgaacgttcctgctcttgttgttttcctcaacaaagtagatatcgccgatcccgagcttatcgagcttgtcgagcttgaacttcgcgagctgctctccgagtatgagttccctggtgacgatatcccgatcatcaaaggctcggcactgaaagcccttgatggcgaccctgaatcagaggctgctatcatggaacttatggacgcagttgacagctatattcctgagcctgtccgcgacgttgacaagccgttcctgatgcctatcgaggacgttttctctatctccggtcgtggcactgttggtacaggccgtatcgagagtggtgttattaaaatcggcgaagaggtcgaaatcgtcgggatcaagccgacccgtaaatcagttgttaccggtatcgagatgttccagaaaactcttgaccagggacaggctggtgataacgcaggtattcttttccgcggtgtcgataaggaagagcttgagcgtggaatggttatcgctaaaccgggcaccatcactcctcataccaaattcaaggcagaggtgtatatccttaaaaaagaagagggtggccgccataccccattcttcaacaactatcgtccccagttctatttcagaaccactgacgttaccggtgcagttactctgcccgaaggtgttgaaatggttatgcctggtgacaacctttctgtcgaagtcgagcttatcgttcctatcgctatggacgagaaccttcgcttcgctattcgtgaaggtggccgtaccgtcggtgcaggtactgttacccagattatcgagtga

SEQ ID NO: 129791 - protein, 393 aa, Prosthecochloris aestuarii DSM 271
MAKEAYKREKPHVNIGTIGHVDHGKTTLTAAITTVLAKKGMAQLREFGDIDKAPEERERGITISTAHVEYETDKRHYAHIDCPGHADYIKNMITGAAQMDGAILVVAGTDGPMPQTREHILLARQVNVPALVVFLNKVDIADPELIELVELELRELLSEYEFPGDDIPIIKGSALKALDGDPESEAAIMELMDAVDSYIPEPVRDVDKPFLMPIEDVFSISGRGTVGTGRIESGVIKIGEEVEIVGIKPTRKSVVTGIEMFQKTLDQGQAGDNAGILFRGVDKEELERGMVIAKPGTITPHTKFKAEVYILKKEEGGRHTPFFNNYRPQFYFRTTDVTGAVTLPEGVEMVMPGDNLSVEVELIVPIAMDENLRFAIREGGRTVGAGTVTQIIE

SEQ ID NO: 129792 - DNA, 1188 bp, Croceibacter atlanticus HTCC2559
  CDS (1)..(1188): transl_table=11
atggctaaggaaacttatgacaggtccaaaccgcacttaaacgttggtactattggacacgttgaccacggtaaaacaactttaactgctgctatcactaaagttttagcagatgctggattctcagaagcttcagcttttgatcaaattgataatgctccagaagaaaaagaaagaggtattacaattaactcttctcacgtagagtatgcaactgctaaccgtcactacgcacacgttgactgtccaggtcacgcggattacgtaaagaacatggttactggtgctgcacagatggatggtgctattcttgttgttgctgcaacagatggtccaatgccacaaactcgtgagcacatccttttaggacgtcaggttggtattcctcgtatcgttgtttttatgaacaaagttgatatggttgatgatgaggagcttttagagcttgttgaaatggaaatccgtgacttattatctttctatgagtatgatggagataatggtcctgtaattcaaggttctgctttaggtgcgcttaacggtgagcaaaagtgggttgatactgttctttctttaatggaagcagttgattcttggatcgaagagccacagcgtgaggtagataagcctttcttaatgcctatcgaagatgtattctctattactggtcgtggtactgttgcaactggtcgtattgagactggtatcgctaatactggtgatccagtagagattatcggtatgggtgcagagaagttaacttctactattactggtattgaaatgttccgtcaaatccttgatagaggtgaggctggagataacgcaggtatcttattaagaggtattgagaagtctcaaatttcaagaggtatggtaattgttaagccaggttctgtaactccacacaaaaagttcaaagctgaggtttatatcttgaaaaaagaagaaggtggtcgtcacacaccattccataacaactaccgtccacagttctacgtacgtacaactgatgttacaggaacaattagtttacctgatggtgtagaaatggtaatgcctggtgataacttaactattacagttgaattacttcagacaattgcaatgaatgtaggtttacgtttcgcagttcgtgaaggtggtcgtactgtaggtgctggtcaggtaactgaaattctagattaa

SEQ ID NO: 129793 - protein, 395 aa, Croceibacter atlanticus HTCC2559
MAKETYDRSKPHLNVGTIGHVDHGKTTLTAAITKVLADAGFSEASAFDQIDNAPEEKERGITINSSHVEYATANRHYAHVDCPGHADYVKNMVTGAAQMDGAILVVAATDGPMPQTREHILLGRQVGIPRIVVFMNKVDMVDDEELLELVEMEIRDLLSFYEYDGDNGPVIQGSALGALNGEQKWVDTVLSLMEAVDSWIEEPQREVDKPFLMPIEDVFSITGRGTVATGRIETGIANTGDPVEIIGMGAEKLTSTITGIEMFRQILDRGEAGDNAGILLRGIEKSQISRGMVIVKPGSVTPHKKFKAEVYILKKEEGGRHTPFHNNYRPQFYVRTTDVTGTISLPDGVEMVMPGDNLTITVELLQTIAMNVGLRFAVREGGRTVGAGQVTEILD

SEQ ID NO: 129794 - DNA, 1176 bp, Sulfitobacter sp. EE-36; identical to SEQ ID NO: 27307
  CDS (1)..(1176): transl_table=11

SEQ ID NO: 129795 - protein, 391 aa, Sulfitobacter sp. EE-36; identical to SEQ ID NO: 27308

SEQ ID NO: 129796 - DNA, 1176 bp, Roseovarius nubinhibens ISM
  CDS (1)..(1176): transl_table=11
atggcaaaggaaaagtttgaccgcacgaaaccgcatgtgaacatcggcacgattggtcacgttgaccacggcaagacgacgctgaccgctgcgatcacgaagtatttcggcgacttcaaagcgtatgaccagatcgacggcgcgcccgaagagaaggcccgcgggatcaccatctcgaccgcacacgtggaatacgagaccgacacccgtcactacgcccacgtcgactgccccggccacgctgactatgtgaagaacatgatcaccggtgcggcgcagatggacggcgcgatcctggttgtgaacgcagccgacggcccgatgccccagacccgcgagcacatcctgctcggccgtcaggtgggcatcccctacatggtcgtgttcatgaacaaggttgaccaggtcgacgacgaggaactgctcgagttggtggaaatggaaatccgcgaactgctgagctcctacgactacccgggcgacgacattccgatcatcgcgggttcggccttggcggcgatggaaggcaacaacccggaaatcggcgaagagaaaatccgtgagctgatggcggctgtggacgagtacatcccgaccccggcacgtgccgtggatcagcccttcctgatgccggtcgaagacgtgttctcgatctcgggtcgcggtacggttgtgaccggtcgtgtggaacgtggtgtgatcaacgtgggcgacgagatcgaaatcgtcggcatccgcgacacgcagaaaaccacctgcacgggtgttgagatgttccgcaagctgctcgaccgtggggaagctggcgacaacatcggcgccctgctgcgcggcatcgaccgtgaaggcgtcgagcgtggtcaggttctgtgtaagccgggttcggtgacaccgcacaccaagttcgaagctgaggcctacatcctcaccaaggacgaaggtggccgtcacacgccgttcttcgcgaactaccgtccgcagttctacttccgtacgacggacgtgaccgggaccgtgaacctgccgtcgggcaccgagatggtgatgccgggcgacaacctgaaattcgaagttgagctgatcgcgccgatcgctatggaagacggtctgcgcttcgccatccgtgaaggcggtcgtaccgtcggcgctggcgtcgtctcgaaaatcatcgaataa

SEQ ID NO: 129797 - protein, 391 aa, Roseovarius nubinhibens ISM
MAKEKFDRTKPHVNIGTIGHVDHGKTTLTAAITKYFGDFKAYDQIDGAPEEKARGITISTAHVEYETDTRHYAHVDCPGHADYVKNMITGAAQMDGAILVVNAADGPMPQTREHILLGRQVGIPYMVVFMNKVDQVDDEELLELVEMEIRELLSSYDYPGDDIPIIAGSALAAMEGNNPEIGEEKIRELMAAVDEYIPTPARAVDQPFLMPVEDVFSISGRGTVVTGRVERGVINVGDEIEIVGIRDTQKTTCTGVEMFRKLLDRGEAGDNIGALLRGIDREGVERGQVLCKPGSVTPHTKFEAEAYILTKDEGGRHTPFFANYRPQFYFRTTDVTGTVNLPSGTEMVMPGDNLKFEVELIAPIAMEDGLRFAIREGGRTVGAGVVSKIIE

SEQ ID NO: 129798 - DNA, 1176 bp, Oceanicola batsensis HTCC2597; identical to SEQ ID NO: 27309
  CDS (1)..(1176): transl_table=11

SEQ ID NO: 129799 - protein, 391 aa, Oceanicola batsensis HTCC2597; identical to SEQ ID NO: 27310

SEQ ID NO: 129800 - DNA, 1176 bp, Erythrobacter sp. NAP1
  CDS (1)..(1176): transl_table=11
atggcgaaggaaaagtttgagcgtaataagccgcacgttaacgtcggcaccatcggtcacgttgaccacggtaagaccacgctgaccgcagcgatcaccaaggtcctgggttcggctgtcgatttcgcaaacatcgacaaggctcccgaagagcgcgagcgcggcatcaccatttcgaccgcacacgtcgaatatgaaaccgacgcacgtcactacgctcacgtcgactgcccgggtcacgctgactacgtgaagaacatgatcaccggcgcagcgcagatggacggcgctatcctggttgtgaacgcagctgacggcccgatgccgcagacccgcgagcacatcctgcttgcccgtcaggtcggcgttccggctctggtcgtttacatgaacaaggtcgaccaggttgacgacgaggaaatcctcgagctcgtcgaactggaagttcgcgaactcctcagcgagtacggcttcgacggcgacaacatcgccatcgtgaagggttcggctctggccgctctcgaaggtcgtgatccggaaatcggtgaaaactcgatcaaggaactcatggacgctgtggacgaaaacatcccgcagcccgaccgcccggtcgacaaggacttcctgatgccgatcgaagacgtgttctcgatctcgggtcgtggtacggttgttaccggccgtgttgaaaccggcgttgtgaacgttggcgacgaagttgaaatcgtcggcatcaaggacaccaccaagacgaccgtgaccggcgttgaaatgttccgcaagctgctcgattcgggtgaagctggcgacaacatcggtgccctgatccgcggcgttggccgtgaagaagttgagcgtggccaggttctcgcgaagccgggttcggttacgccgcacaccgagttcagcgcagaagtctacgtcctttcgaaggacgaaggtggccgtcacacgccgttcttcgctaactaccgtccgcagttctacttccgcaccaccgacgtgaccggcgaagtgatccttcccgaaggcaccgagatggttatgccgggcgacaacgtgaccatcggcgtcaagctgattgcaccgatcgccatggacgaaggtctgcgcttcgcaatccgcgaaggcggccgcaccgtcggctcgggcgtggtttcgaagatcaccaagtaa

SEQ ID NO: 129801 - protein, 391 aa, Erythrobacter sp. NAP1
MAKEKFERNKPHVNVGTIGHVDHGKTTLTAAITKVLGSAVDFANIDKAPEERERGITISTAHVEYETDARHYAHVDCPGHADYVKNMITGAAQMDGAILVVNAADGPMPQTREHILLARQVGVPALVVYMNKVDQVDDEEILELVELEVRELLSEYGFDGDNIAIVKGSALAALEGRDPEIGENSIKELMDAVDENIPQPDRPVDKDFLMPIEDVFSISGRGTVVTGRVETGVVNVGDEVEIVGIKDTTKTTVTGVEMFRKLLDSGEAGDNIGALIRGVGREEVERGQVLAKPGSVTPHTEFSAEVYVLSKDEGGRHTPFFANYRPQFYFRTTDVTGEVILPEGTEMVMPGDNVTIGVKLIAPIAMDEGLRFAIREGGRTVGSGVVSKITK

SEQ ID NO: 129802 - DNA, 1185 bp, Pseudoalteromonas tunicata D2; identical to SEQ ID NO: 27313
  CDS (1)..(1185): transl_table=11

SEQ ID NO: 129803 - protein, 394 aa, Pseudoalteromonas tunicata D2; identical to SEQ ID NO: 27314

SEQ ID NO: 129804 - DNA, 1191 bp, Xanthobacter autotrophicus Py2
  CDS (1)..(1191): transl_table=11
atggccaaagagaagttcaaccgctcgaagccgcactgcaacatcggcacgatcggtcacgtggatcatggcaagacgtcgctgactgcggcgatcacgaagatccttgcggagacgggcggcgcgacgttcacggcgtacgaccagatcgacaaggcgccggaggagaaggcgcgcggcatcacgatctcgaccgctcacgtggaatacgagacccagaaccggcactacgcgcacgtggactgccccgggcacgccgactatgtgaagaacatgatcaccggcgcggcgcagatggacggcgcgatcctggtggtgtcggcggccgacggcccgatgccgcagacccgcgagcacatcctgctcgcccgtcaggtcggcgtgccggcgctggtggtgttcctcaacaagtgcgacatggtcgacgacgaggagctgctggaactggtcgagctggaagtgcgcgagctgctgtccaagtacgacttccccggcgacgacatcccgatcatccgtggctcggcgctggtggcgctggagaacggcgatcccaagctcggccgcgacgcggtgctgaagctgatggaggcggtcgacgcctacatcccgcagcccgagcgtccggtggacctgccgttcctgatgcccatcgaggacgtgttctcgatctcgggccgcggcacggtggtgaccggccgcgtggagcgcggcatcatcaaggtcggtgaggaagtggaaatcgtgggcatccgcccgacgcagaagaccacggtcaccggcgtcgagatgttccgtaagctgctcgaccagggccaggccggtgacaacgtcggcatcctggtgcgcggcaccaagcgtgaggacgtggagcgcggccaggtggtgtgcaagccgggtacggtgaagccacacaccaagttcaaggccgaagcctacatcctgaccaaggaagagggcggccgtcacaccccgttcttcaccaactaccgcccgcagttctacttccggaccacggacgtgaccggcgtgtgcacgctgccggaaggcaccgagatggtgatgccgggcgacaacgtgtccatggacgtggcgctgatcgttccgatcgccatggaagagaagctgcgcttcgccatccgcgagggtggccgcacggtgggcgccggcgtcgtcgcctccatcatcgagtga

SEQ ID NO: 129805 - protein, 396 aa, Xanthobacter autotrophicus Py2; identical to SEQ ID NO: 27042

SEQ ID NO: 129806 - DNA, 1224 bp, marine gamma proteobacterium HTCC2207
  CDS (1)..(1224): transl_table=11
atggcaaaagaaaaatttgaaagaaataagccgcacgtcaacgtaggcaccattggtcacgtcgaccatggtaaaactactttgaccgctgcgatgacccgcgtctgtgcagaagtttggggcggcgaaatgaaagcctttgatcagattgataacgccccagaagagcgcgagcgcggcatcacaatctcaacagcgcacgttgagtatgattccccggatcgtcactacgcacacgtagactgcccaggtcacgccgattatgttaaaaacatgatcaccggtgctgcccagatggacggcgcaatcctggtatgtggcgcaactgacggcccaatgccgcagacacgcgaacacattctgctgtcacgtcaggtcggtgtaccttacgtattagtattcctcaacaaagctgaccttcttgcagaagattgtggcggctttggatctgaagagtacctggaaatgttagagctggttgagatggagctgcgtgagctgcttgatctttatgagttcccaggcgacgacacgccaatcattgttggttcagcgctgatggcgttggaaggtcgcgatgacaacgagctgggcactacagccgttaagaagctggtagaagctctggatgcttacatccctgagccagttcgcgctgttgatcagccgttcctgatgccaattgaagatgtattctctattgctggtcgcggtactgttgtaaccggtcgtattgagcgtggtgttgttaaggttggtgaagagatcgaaattatcggtatcactgacacagccaagactacctgtactggtgttgagatgttccgcaagctgcttgacgaaggtcgtgctggcgagaactgtggtgttctgttgcgtggtactaagcgtgaagaagttcagcgtggtcaggtactggccaagccgggttcagttaagccgcacaccaagttcacttcagagatctatgttctgtctaaagatgaaggtggtcgtcatacgccgttctttaaaggctaccgtccacagttctacttccgtactacggatgtaaccggtgcatgtgaattgccagagggaactgaaatggtaatgccaggcgacaacgtgcagatggaagttacattgattcacccgattgcgatggaagaaggtcttcgttttgcaattcgtgaaggcggccgtactgttggcgctggtgttgtagctaagatcatcgagtaa

SEQ ID NO: 129807 - protein, 407 aa, marine gamma proteobacterium HTCC2207
MAKEKFERNKPHVNVGTIGHVDHGKTTLTAAMTRVCAEVWGGEMKAFDQIDNAPEERERGITISTAHVEYDSPDRHYAHVDCPGHADYVKNMITGAAQMDGAILVCGATDGPMPQTREHILLSRQVGVPYVLVFLNKADLLAEDCGGFGSEEYLEMLELVEMELRELLDLYEFPGDDTPIIVGSALMALEGRDDNELGTTAVKKLVEALDAYIPEPVRAVDQPFLMPIEDVFSIAGRGTVVTGRIERGVVKVGEEIEIIGITDTAKTTCTGVEMFRKLLDEGRAGENCGVLLRGTKREEVQRGQVLAKPGSVKPHTKFTSEIYVLSKDEGGRHTPFFKGYRPQFYFRTTDVTGACELPEGTEMVMPGDNVQMEVTLIHPIAMEEGLRFAIREGGRTVGAGVVAKIIE

SEQ ID NO: 129808 - DNA, 1191 bp, delta proteobacterium MLMS-1
  CDS (1)..(1191): transl_table=11
  misc_feature (4)..(4): n is a, g, c or t
atgnccaaggagaaattcgaacggacaaagccgcatgtcaatgtgggcaccatcggtcatattgaccatggcaagacgaccttgacggcggcgatcacgcgggtgttgtcaaacaagggttacgccagtgcgacggcctttgaccagattgacaaggctccggaggagaaggagcgcggggtgacgatttcgacggcgcatgtggagtacgagtcggacaatcgccattacgcgcatgtggactgcccgggccatgccgactatatcaagaacatgatcaccggggcggcccagatggacggggcgattctggtggtgggggccgatgacggtcccatgccgcagacccgtgagcatatcctgctggcccgccaggtgggggtaccctccattgtggtctttttaaacaagtgcgacatggtggacgatccggagctgatcgagctggtggagatggagctgcgggagttgctgagcaagtatgattttcccggcgacgacaccccgatcatccacggcagcgccctgcaggccctggagaaccccgacgatgaagcggcggccaaaccgatctgggatttgatggccgccctggacgattttattccggcgcccgagcgtgatgtggacaagccctttttgatgccggtggaggatgtcttttcgatttccggtcgtggcacggtggccaccggtcgtatcgagcggggcattgtcaaggtgggcgatgagattgagatagtggggatccgtgatacccagaagacgacggtcaccggggtggagatgttccgcaagatcctggacgagggtcaggccggcgacaacgtgggtatcctgttgcgtggcaccaagcgtgaagagatcgagcgcggtcaggtcctggccaagcccaagagcatcacgccgcataccaagttcaaggcggagtgctatattctgagtaaggaagagggaggccgtcataccccgtttttcaatggttaccggccgcagttttattttcggaccaccgacgtcaccggggtagtgaccctgggtgagggggtggagatggtaatgcccggtgacaacgtgaccgttgacgcggagttgatcacgcccatagccatggatgagggtctgcgcttcgcgatccgggaaggcggccggacggtgggcgccggggttatcaataagattatttcgtaa

SEQ ID NO: 129809 - protein, 396 aa, delta proteobacterium MLMS-1
  misc_feature (2)..(2): The Xaa at location 2 stands for Ala, Pro, Ser, or Thr.
MXKEKFERTKPHVNVGTIGHIDHGKTTLTAAITRVLSNKGYASATAFDQIDKAPEEKERGVTISTAHVEYESDNRHYAHVDCPGHADYIKNMITGAAQMDGAILVVGADDGPMPQTREHILLARQVGVPSIVVFLNKCDMVDDPELIELVEMELRELLSKYDFPGDDTPIIHGSALQALENPDDEAAAKPIWDLMAALDDFIPAPERDVDKPFLMPVEDVFSISGRGTVATGRIERGIVKVGDEIEIVGIRDTQKTTVTGVEMFRKILDEGQAGDNVGILLRGTKREEIERGQVLAKPKSITPHTKFKAECYILSKEEGGRHTPFFNGYRPQFYFRTTDVTGVVTLGEGVEMVMPGDNVTVDAELITPIAMDEGLRFAIREGGRTVGAGVINKIIS

SEQ ID NO: 129810 - DNA, 1203 bp, Rickettsiella grylli
  CDS (1)..(1203): transl_table=11
atggccactggaaagtttgtgcgaaataaaacccacgttaacgtgggaactataggccacgttgatcatggtaagaccactttaacggcagcaattactaaatgcatggcggataaatttggtggagaggccattgcatttgataaaattgataaggctcccgaagaaaaagcacggggtattaccatttcaacttcacacgtcgaatatgaaagcgaaaaacgacactacgcgcatgtggattgtcctggccatgccgattatgtgaagaacatgattaccggcgctgcgcaaatggatggcgcgatattagtggtcagtgcggccgatggtcctatgcctcaaactcgggagcacatattgttagcacgacaagttggtgtgccaaatatcgtcgtgtttatgaataaatgtgacatggtggatgatgcggaattattagatttagttgaaatggaaattagagaattgctttctaaatatgaatttccaggtgatgatatccctgttattcgtggatcggctaagaaagccttggaaggtgattgtgaaggcggtggagtgtttgcgttgattaaagcgatggatgaatattttccagagcctgttcgtgacacggacaagccctttttaatgcctatcgaagatgtttttactatttcaggtcgtggtacagtggttaccggtcgtgttgagcgcggtgttgttaaagtaggtgatgcggtgcaggttgttggtttaagagcagtacaagatactgcggtaaccggtgttgaaatgttccgaaaattactggatcaaggtgaagcgggcgataatattggtgcgcttatcagagggttgaagcgcgaggatgtagaacggggtcaagtgttagcaaaaccaggtacggtagaagcgtggacagaatttgaagcagaaatttatgttttgacaaaagaagaaggtgggcgtcataccgcatttatgaataactacaaaccgcagttttatttcagaacaacggatgtgacagggacgattaaacttccctcaggttctgaaatggtaatgccgggtgataacgtcaagataacagtgacgctgatgaatgaatacggtgttgcgatggaacaaggtttacgttttgctattcgtgaaggtggtaaaacggttggatcgggtgtcgtttctaagcttattaaaaaaggtaaaaaggcctaa

SEQ ID NO: 129811 - protein, 400 aa, Rickettsiella grylli
MATGKFVRNKTHVNVGTIGHVDHGKTTLTAAITKCMADKFGGEAIAFDKIDKAPEEKARGITISTSHVEYESEKRHYAHVDCPGHADYVKNMITGAAQMDGAILVVSAADGPMPQTREHILLARQVGVPNIVVFMNKCDMVDDAELLDLVEMEIRELLSKYEFPGDDIPVIRGSAKKALEGDCEGGGVFALIKAMDEYFPEPVRDTDKPFLMPIEDVFTISGRGTVVTGRVERGVVKVGDAVQVVGLRAVQDTAVTGVEMFRKLLDQGEAGDNIGALIRGLKREDVERGQVLAKPGTVEAWTEFEAEIYVLTKEEGGRHTAFMNNYKPQFYFRTTDVTGTIKLPSGSEMVMPGDNVKITVTLMNEYGVAMEQGLRFAIREGGKTVGSGVVSKLIKKGKKA

SEQ ID NO: 129812 - DNA, 1224 bp, Oceanobacter sp. RED65; identical to SEQ ID NO: 27319
  CDS (1)..(1224): transl_table=11

SEQ ID NO: 129813 - protein, 407 aa, Oceanobacter sp. RED65; identical to SEQ ID NO: 27320

SEQ ID NO: 129814 - DNA, 1185 bp, Alteromonadales bacterium TW-7; identical to SEQ ID NO: 27321
  CDS (1)..(1185): transl_table=11

SEQ ID NO: 129815 - protein, 394 aa, Alteromonadales bacterium TW-7; identical to SEQ ID NO: 27322

SEQ ID NO: 129816 - DNA, 1380 bp, Pichia pastoris; identical to SEQ ID NO: 27335
  CDS (1)..(1380)

SEQ ID NO: 129817 - protein, 459 aa, Pichia pastoris; identical to SEQ ID NO: 27336

SEQ ID NO: 129818 - DNA, 1323 bp, Aspergillus niger
  CDS (1)..(1323)
atgtccagcctcgccagatctgccaacctccttttccgctctagcagggcctccctgctgcgcccccgcgctgtcaaccccatccagcatgtcttcctcggcgacaagctggctgcccgtggtatggcaaccgctttcgagcgtaccaagcctcacgtcaacattggtaccattggtcacgtcgatcacggcaagaccaccttgaccgctgccatcaccaagcaccaggcctccaagggtctcgctcagttccttgagtatggtgccattgacaaggctcctgaggagcgtaagcgtggtatcaccatctcctctgcccacatcgagtacgctaccgatgctcgtcactactcccacgtcgactgccccggtcacgccgattacatcaagaacatgatcactggtgccgccaacatggacggtgctatcattgtcgtcgccgcttccgacggtcagatgccccagactcgtgagcacttgctgcttgctcgtcaggtcggtgtccagaagatcgttgtcttcgtcaacaaggtcgatgccatcgatgacccggagatgctggagctcgtcgagctggaaatgcgcgagcttctcagcagctacggcttcgagggtgaggagacccccatcatcttcggctctgctctctgcgccattgaggaccgccgccccgacatcggtgccgagcgtatcgacgctctcctggaggccgttgacacttggatccccactccccagcgtgaccttgacaagcctttcttgatgtccattgaggaagttttctccatccctggtcgtggtaccgtcgcttccggccgtgttgagcgtggtctcctgaagcgtgatagcgaggttgagatcatcggtaccaccaacgaggtcatcaagaccaaggtcaccgacattgagaccttcaagaagtcttgcactgagtcccgtgctggtgacaactccggtctccttctccgtggtgtccgccgtgaggatctccgccgtggtatggtcattgccgctcctggcagcgccaaggccaacagcaagttcatggtctccatgtacgtcctgaccgaggctgagggtggtcgccgtaccggtttcggtgtccagtaccgtccccagctgttcatccgcactgccgatgaggctgctgagttcagcttccccgacggagaccagtcccgccgtatcatgcccggtgacaacgtcgagatgatcgtcaagacccaccgccccgtcgccgccgaggccggtcagcgcttcaacatccgtgagggtggtcgcactgttgccactggtctggtcactcgtgtcctgaccgagtaa

SEQ ID NO: 129819 - protein, 440 aa, Aspergillus niger
MSSLARSANLLFRSSRASLLRPRAVNPIQHVFLGDKLAARGMATAFERTKPHVNIGTIGHVDHGKTTLTAAITKHQASKGLAQFLEYGAIDKAPEERKRGITISSAHIEYATDARHYSHVDCPGHADYIKNMITGAANMDGAIIVVAASDGQMPQTREHLLLARQVGVQKIVVFVNKVDAIDDPEMLELVELEMRELLSSYGFEGEETPIIFGSALCAIEDRRPDIGAERIDALLEAVDTWIPTPQRDLDKPFLMSIEEVFSIPGRGTVASGRVERGLLKRDSEVEIIGTTNEVIKTKVTDIETFKKSCTESRAGDNSGLLLRGVRREDLRRGMVIAAPGSAKANSKFMVSMYVLTEAEGGRRTGFGVQYRPQLFIRTADEAAEFSFPDGDQSRRIMPGDNVEMIVKTHRPVAAEAGQRFNIREGGRTVATGLVTRVLTE

SEQ ID NO: 129820 - DNA, 1383 bp, Aspergillus niger
  CDS (1)..(1383)
atgggtaaggaggacaagactcacatcaacatcgtcgttatcggccacgtcgattccggcaagtccaccaccactggtcacctgatctacaagtgcggtggtatcgaccagcgtaccatcgagaagttcgagaaggaagccgctgagctcggtaagggttccttcaagtacgcttgggttcttgacaagctcaagtccgagcgtgagcgtggtatcaccatcgacattgccctctggaagttccagactggcaagtatgaggtcaccgtcattgacgcccccggtcaccgtgacttcatcaagaacatgatcactggtacctcccaggctgactgcgctatcctcatcattgcctccggtactggtgagttcgaggctggtatctccaaggatggccagactcgtgagcacgctctgcttgctttcaccctcggtgtccgtcagctcattgttgccctcaacaagatggacacctgcaagtggtccgaggaccgttacaacgaaatcgttaaggagacctccaacttcatcaagaaggtcggctacaaccccaagggtgttcctttcgtccccatctccggtttcaacggtgacaacatgctcgagccctcccccaactgcccctggtacaagggttgggagaaggagaccaaggccggcaaggtcaccggtaagaccctcctcgaggccatcgacgccatcgagccccccgtccgtccctccaacaagcccctccgtcttcccctccaggatgtctacaagatctccggtattggaactgttcccgtcggtcgtgtcgagaccggtatcattgcccctggtatggtcgtgaccttcgctcccgccaacgtcaccactgaagtcaagtccgttgagatgcaccaccagcagctcaaggagggtgtccccggtgacaacgttggtttcaacgtcaagaacgtttccgtcaaggaggttcgccgtggtaacgttgccggtgactccaagaacgacccccctcttggctgtgagagcttcaccgcccaggtcatcgtcctcaaccaccccggtcaggtcggcgctggttacgctcccgtcctggactgccacactgctcacattgcttgcaagttcgctgagctccttgagaagattgaccgccgtaccggaaagtctgttgaatcttcccccaagttcatcaagtccggtgacgctgccatcgtcaagatgattccctccaagcccatgtgtgttgaggctttcactgactacccccctcttggtcgtttcgctgtccgcgatatgcgccagactgttgctgtcggtgttatcaaggctgttgagaagaaggagggtggttccggtaaggttaccaaggccgcccagaaggccggtaagaaataa

SEQ ID NO: 129821 - protein, 460 aa, Aspergillus niger
MGKEDKTHINIVVIGHVDSGKSTTTGHLIYKCGGIDQRTIEKFEKEAAELGKGSFKYAWVLDKLKSERERGITIDIALWKFQTGKYEVTVIDAPGHRDFIKNMITGTSQADCAILIIASGTGEFEAGISKDGQTREHALLAFTLGVRQLIVALNKMDTCKWSEDRYNEIVKETSNFIKKVGYNPKGVPFVPISGFNGDNMLEPSPNCPWYKGWEKETKAGKVTGKTLLEAIDAIEPPVRPSNKPLRLPLQDVYKISGIGTVPVGRVETGIIAPGMVVTFAPANVTTEVKSVEMHHQQLKEGVPGDNVGFNVKNVSVKEVRRGNVAGDSKNDPPLGCESFTAQVIVLNHPGQVGAGYAPVLDCHTAHIACKFAELLEKIDRRTGKSVESSPKFIKSGDAAIVKMIPSKPMCVEAFTDYPPLGRFAVRDMRQTVAVGVIKAVEKKEGGSGKVTKAAQKAGKK

SEQ ID NO: 129822 - DNA, 1191 bp, Herbaspirillum seropedicae; identical to SEQ ID NO: 27337
  CDS (1)..(1191): transl_table=11

SEQ ID NO: 129823 - protein, 396 aa, Herbaspirillum seropedicae; identical to SEQ ID NO: 27338

SEQ ID NO: 129824 - DNA, 1671 bp, Nicotiana tabacum
  CDS (28)..(1371)
ggcttttaagtcttttttcaaatcaacatgggtaaagagaaatttcacatcaacattgtggtcattggccacgtcgactctggtaagtccactaccactggtcacttgatctacaagcttggtggtattgacaagcgtgtcattgagaggtttgagaaagaagctgctgagatgaacaagaggtcattcaagtatgcctgggtgcttgacaagctcaaggctgagcgtgagcgtggtatcaccattgatattgccttgtggaagtttgagaccaccaagtactactgcactgtgattgatgctcctggacacagggacttcatcaagaatatgattactggtacctcccaagctgactgtgctgtcctgattattgactccaccactggtggttttgaagctggtatctctaaggatggacagacccgtgaacatgcattgcttgctttcacccttggtgtcaagcaaatgatttgctgctgtaacaagatggatgctaccacccccaagtactccaaggctaggtatgatgaaatcgtgaaggaggtttcttcctacctcaagaaggtaggatacaaccctgataaaatcccctttgtccccatctctggtttcgagggtgataacatgatcgaaagatcaaccaaccttgactggtacaagggcccaactcttcttgaggctcttgaccagatcaatgagcccaagaggccctcagacaagcccctcaggctcccacttcaggatgtgtacaagattggtggtattggtactgtccctgttggtcgtgtggaaaccggtgtgctcaagcctggtatggttgtgacttttggtcccactggtctgaccactgaagttaaatctgttgagatgcaccacgaagctcttcaggaggcacttcctggtgacaatgttggattcaacgtcaagaacgttgcagttaaggatctcaagcgtgggtttgttgcttcaaactccaaggatgacccagctaagggtgctgccagctttacctcccaagtcatcatcatgaaccatccaggacagattggaaatggatatgctccagtgcttgactgccacacctcccacattgctgtcaagtttgcagaaattttgaccaagatcgacaggcgttctggtaaggagattgagaaggagcccaagttcttgaagaatggtgatgctggtatggttaagatgattcccaccaagcccatggttgttgagaccttctctgagtacccaccattgggacgttttgctgtgagggacatgcgtcaaactgttgctgttggtgttatcaagaacgttgacaagaaggacccaactggtgccaaggtcaccaaggctgctcagaagaagaaatgaacgttgcagttcaattctggtggtactcgcgatatctactacaataaagtgtgttatggagacattgttttctctgcttgtgatgtttttgttcggtctttaatgtggttcttagttctagatttctgccttgtatgactggtatccgctcccagagttgggtgcttgacaggcggtggcgagaaaaactttgttgagtctgtctgcattttcttttgaggtgccttggttttccaaggtggctcagaagttttgtttgttatgttgcttaagatacttaattcggaacttatttatttg

SEQ ID NO: 129825 - protein, 447 aa, Nicotiana tabacum; identical to SEQ ID NO: 27352

SEQ ID NO: 129826 - DNA, 1176 bp, Brucella suis
  CDS (1)..(1176): transl_table=11
atggcaaagagcaagtttgaacgtacgaagccccacgttaacatcggcacgattggtcacgttgaccatggcaagacgtcgctgacggcggcgatcacgaagtttttcggcgaattcaaggcgtatgaccagatcgacgccgcgcctgaagaacgcgcccgcggcatcacgatctcgacggcccacgtcgagtacgagaccgcaaaccgtcactatgcacacgtcgattgccccggccacgccgactatgtgaagaacatgatcaccggcgctgcccagatggatggcgcgatcctggtggtttcggctgctgacggcccgatgccgcagacccgcgagcacatcctgcttgcccgtcaggttggcgttccggcgatcgtcgtgttcctcaacaagtgcgaccaggttgacgatgcagaactgctcgaactggttgaactggaagtgcgcgaacttctgtcgaagtacgaattccccggcgacgaaatcccgatcatcaagggctcggctattgctgctctggaagattcttccaaggaactgggcgaagatgccatccgcaacctgatggacgcggttgacagctacattccgaccccggaacgcccgatcgaccagccgttcctgatgccgatcgaagacgtgttctcgatctccggccgtggtacggttgtgacgggtcgcgttgagcgcggtatcgttaaggtcggtgaagaagttgaaatcgtcggcatcaaggcgacgacgaagaccacggttaccggcgttgaaatgttccgcaagctgctcgaccagggccaggctggcgacaacattggcgcgctgatccgcggcgttggccgtgaagacgttgaacgcggccaggttctctgcaagccgggttctgtgaagccgcacaccaagtttaaggcagaagcctatattctgaccaaggacgaaggtggccgtcatacgccgttcttcaccaactaccgtccgcagttctacttccgtacgacggacgtgacgggtgttgtgacgcttccggctggcacggaaatggtcatgcctggcgataacgtcgccatggacgttaccctgatcgtgccgatcgccatggaagagaagcttcgcttcgctatccgtgaaggcggccgcaccgtcggtgccggcatcgtctcgtcgatcatcgagtaa

SEQ ID NO: 129827 - protein, 391 aa, Brucella suis
MAKSKFERTKPHVNIGTIGHVDHGKTSLTAAITKFFGEFKAYDQIDAAPEERARGITISTAHVEYETANRHYAHVDCPGHADYVKNMITGAAQMDGAILVVSAADGPMPQTREHILLARQVGVPAIVVFLNKCDQVDDAELLELVELEVRELLSKYEFPGDEIPIIKGSAIAALEDSSKELGEDAIRNLMDAVDSYIPTPERPIDQPFLMPIEDVFSISGRGTVVTGRVERGIVKVGEEVEIVGIKATTKTTVTGVEMFRKLLDQGQAGDNIGALIRGVGREDVERGQVLCKPGSVKPHTKFKAEAYILTKDEGGRHTPFFTNYRPQFYFRTTDVTGVVTLPAGTEMVMPGDNVAMDVTLIVPIAMEEKLRFAIREGGRTVGAGIVSSIIE

SEQ ID NO: 129828 - DNA, 1188 bp, Geobacillus anatolicus
  CDS (1)..(1188): transl_table=11
atggctaaagcgaaatttgagcgtacgaaaccgcacgtcaacattggcacgatcggccacgttgaccatgggaaaacgacgttgacagctgcgatcacaacagttcttgcgaaacaagggaaagcggaagcaagagcgtacgaccaaatcgacgcagctccggaagagcgtgaacgcggaatcacgatttcgacagcgcacgttgagtatgaaacggacgctcgtcactatgcgcacgttgactgcccaggccacgctgactacgtgaaaaacatgatcacgggcgcagcgcaaatggacggcgcgatccttgttgtatcggctgctgacggtccgatgccgcaaacgcgcgaacacattcttctctcccgccaagtcggtgtaccgtacatcgttgttttcttgaacaaatgcgacatggtggacgacgaagaattgcttgaactcgttgaaatggaagttcgcgatcttctctctgaatacgacttcccgggcgacgaagtgccggtcatcaaaggttcggcattaaaagcgctcgaaggcgacccgcaatgggaagaaaaaatcattgaactgatgaacgcggttgacgagtacatcccgactccgcaacgtgaagtagacaaaccgttcatgatgccggttgaggacgttttctcgatcacaggccgcggtacggttgcgacgggccgtgttgagcgcggtacgttaaaagtcggcgacccggttgaaattatcggtctttcggacgagccgaaaacgacgacggttacgggtgtagaaatgttccgtaagctgcttgaccaagcggaagctggcgacaacatcggtgcgcttctccgcggtgtatcgcgtgacgaagttgagcgcggccaagtattggcgaaaccgggctcgatcacgccgcacacgaaatttaaagcgcaagtttacgttctgacgaaagaagaaggcggacgccatactccgttcttctcgaactaccgtccgcaattctacttccgtacaacggacgtaacgggcatcatcacgcttccggaaggcgtagaaatggttatgcctggcgacaacgttgaaatgacggttgaactgatcgctccgatcgcgatcgaggaaggaacaaaattctcgatccgtgaaggcggccgcacggttggtgctggttccgtatcggaaatcattgagtaa

SEQ ID NO: 129829 - protein, 395 aa, Geobacillus anatolicus
MAKAKFERTKPHVNIGTIGHVDHGKTTLTAAITTVLAKQGKAEARAYDQIDAAPEERERGITISTAHVEYETDARHYAHVDCPGHADYVKNMITGAAQMDGAILVVSAADGPMPQTREHILLSRQVGVPYIVVFLNKCDMVDDEELLELVEMEVRDLLSEYDFPGDEVPVIKGSALKALEGDPQWEEKIIELMNAVDEYIPTPQREVDKPFMMPVEDVFSITGRGTVATGRVERGTLKVGDPVEIIGLSDEPKTTTVTGVEMFRKLLDQAEAGDNIGALLRGVSRDEVERGQVLAKPGSITPHTKFKAQVYVLTKEEGGRHTPFFSNYRPQFYFRTTDVTGIITLPEGVEMVMPGDNVEMTVELIAPIAIEEGTKFSIREGGRTVGAGSVSEIIE

SEQ ID NO: 129830 - DNA, 1344 bp, Gymnadenia conopsea; identical to SEQ ID NO: 27361
  CDS (1)..(1344)

SEQ ID NO: 129831 - protein, 447 aa, Gymnadenia conopsea; identical to SEQ ID NO: 27362

SEQ ID NO: 129832 - DNA, 1386 bp, Athalia rosae; identical to SEQ ID NO: 27365
  CDS (1)..(1386)

SEQ ID NO: 129833 - protein, 461 aa, Athalia rosae; identical to SEQ ID NO: 27366

SEQ ID NO: 129834 - DNA, 1685 bp, Solanum tuberosum
  CDS (69)..(1415)
ggtcatacgcggcaggtttagcgaagctctttctctcattttccgtttgtgaaagttttttagacatcatgggtaaagagaagattcatatcagcattgttgtcattgggcatgtcgactctggaaagtcgaccactactggtcacttgatctacaagcttggtggcattgacaagcgtgtcatcgagaggtttgagaaagaagcagctgagatgaacaagaggtccttcaagtatgcgtgggtgcttgacaagcttaaggctgagcgtgaacgtggtattactattgatattgccttgtggaagtttgagaccacaaagtactactgcactgtgattgatgcccctggacacagggatttcatcaagaatatgattactggtacctctcaggctgactgtgctgtcctcatcattgactccacaactggtggttttgaagctggtatttccaaggatggacagacccgtgagcacgcattgcttgctttcacccttggtgtcaagcaaatgatttgctgctgtaacaagatggatgctaccactcctaagtactccaaggctaggtatgatgaaattgtgaaggaagtttcttcctacctcaagaaggtaggatacaaccctgacaaaatcccctttgtccccatctctggttttgaaggagacaacatgattgagcgatcaaccaaccttgactggtacaagggcccaaccctacttgatgctcttgaccagattaacgagcccaagaggccctcagacaagcccctccgtcttccacttcaggatgtctacaagattggtggtattggaactgtgcccgtcggtcgtgttgaaactggtgtcattaagcctggtatggtcgtcacttttggtccaactggtctgaccactgaggttaaatctgttgagatgcaccaccacgaggctcttcaggaggcacttcctggtgacaatgttgggttcaacgtcaagaacgttgcagttaaggatcttaagagaggtttcgttgcctccaactccaaagatgacccagcaaagggtgctgcaagcttcactgcccaagttatcatcatgaaccaccctggtcagattggaaacggatatgccccagtgctcgactgccacacctcccacattgctgtcaagttcgctgagatcttgaccaagattgacagacgttctggtaaggaacttgagaaggagcccaagtttttgaagaacggtgatgccggtatggttaagatgattcccaccaagcccatggttgttgagacctttgctgagtacccaccattgggacgttttgctgtgagggacatgcgtcaaactgttgctgttggtgttgtcaagaacgtcgacaagaaagaccctactggtgccaaagtcaccaaggctgcccaaaagaagaagtgatttgtttttgatgagattctgcatttatgaactagttttgtttaattgcattagctattttcaattttgttttgaacattttaccagtcagacacgggtccagaagcttttgtcatggttctctagcctcttttgaggatagtggagatgttgagcaatttggtttgatccaagttgcttgacgggcagtgacaatagcacctttggatgtctttctcctgtctggttttatagcgaattccaagatgagctgctgagacggttttaata

SEQ ID NO: 129835 - protein, 448 aa, Solanum tuberosum; identical to SEQ ID NO: 27368

SEQ ID NO: 129836 - DNA, 1281 bp, Aspergillus oryzae; identical to SEQ ID NO: 27369
  CDS (1)..(1281)

SEQ ID NO: 129837 - protein, 426 aa, Aspergillus oryzae; identical to SEQ ID NO: 27370

SEQ ID NO: 129838 - DNA, 1344 bp, Gossypium hirsutum; identical to SEQ ID NO: 27387
  CDS (1)..(1344)

SEQ ID NO: 129839 - protein, 447 aa, Gossypium hirsutum; identical to SEQ ID NO: 27388

SEQ ID NO: 129840 - DNA, 1711 bp, Gossypium hirsutum
  CDS (1)..(1347)
atgggtaaggagaaggttcacatcaacattgttgtcattggccatgttgactctgggaagtcaaccacaacgggtcacttgatctacaagcttggaggtattgacaagcgtgtgatcgagagattcgagaaggaagctgctgagatgaacaaaaggtcattcaagtatgcctgggtgctcgacaagttgaaggctgagcgtgagcgcggtataaccattgatattgccttgtggaagtttgagacaaccaagtactactgcactgtcattgatgctcctggacatcgcgacttcattaagaatatgattacgggtacttctcaagctgactgtgctgtccttatcattgactccacaactggaggttttgaagctggtatttccaaggatgggcagacccgtgagcatgctctccttgccttcactcttggtgtcaagcaaatgatttgctgctgcaacaagatggatgccacaacccccaagtactcaaaggcaaggtatgatgaaattgttaaggaagtttcttcctacctgaagaaggttggttacaaccctgagaagattccattcgtccccatctctggttttgagggtgacaacatgattgagaggtccaccaacctcgattggtacaagggtccaaccctccttgaggctcttgaccagatcaatgagcccaagagaccctccgacaagcccctccgtctcccacttcaggatgtctacaagatcggtggtattggaactgtcccggtgggtcgtgttgaaactggtacccttaagcctggaatggttgttacattcggaccttctggattgaccactgaagttaagtctgttgagatgcatcatgaagctcttcaagaggctcttcctggtgacaatgttgggttcaacgtgaagaatgttgctgtcaaggatctcaagcgtggatttgttgcctccaactccaaggatgatcctgccaaggaggcagccaacttcacctcccaagttatcatcatgaaccacccagggcagattggaaatggctatgcaccggtcctagattgccacacctcccatattgctgtcaagtttgcagagctcttgaccaagattgacaggcgatctggtaaggagcttgagaaggagcctaagttcttgaagaatggtgatgctggtatgattaagatggttccgaccaagcccatggttgtagaaaccttctccgcgtaccctccacttggacgttttgccgttagggacatgagacagactgttgctgttggtgtgatcaagagtgtggagaagaaggacccaactggagccaaggtgaccaagtctgctgccaagaagggcaagtgaacctcgggggaatttgttgattcaacaaaagtttatcatggttactacaataaaattttggttcatgttagtaggtccatcactggacgtttggttacatgttttaatggttcaccgtcatctcctggatattgttcccagacctgggttcttgataggcggtggtgaggcttatctttggagtccatagtgtgtcatcattaatgttattatgccttaatgagctataaacttgatgatattttttgttcccttttttccatctaagtggtcctggagttttacctctcttcgtgggctgctttccttcactcaatgttctatctaaaccttatattatccaaaaaaaaaaaaaaaaaaaaaa

SEQ ID NO: 129841 - protein, 448 aa, Gossypium hirsutum; identical to SEQ ID NO: 27390

SEQ ID NO: 129842 - DNA, 1344 bp, Gossypium hirsutum; identical to SEQ ID NO: 27391
  CDS (1)..(1344)

SEQ ID NO: 129843 - protein, 447 aa, Gossypium hirsutum; identical to SEQ ID NO: 27392

SEQ ID NO: 129844 - DNA, 1567 bp, Gossypium hirsutum
  CDS (1)..(1344)
atgggtaaggagaaggttcacatcaacattgtggtcatcggccatgtcgactctgggaagtctacaaccactggtcatttgatctacaagcttggtggtattgacaagcgtgtgattgagaggtttgagaaggaggctgctgagatgaacaaaaggtcatttaagtatgcatgggtgcttgacaagcttaaggccgaacgtgaacgtggtattaccatcgatattgccctctggaagtttgaaactaccaaatactactgcactgtcattgatgcccctggacaccgtgacttcatcaagaacatgattactggtacctcacaggctgactgtgctgttctcattatcgactcgaccactggtggtttcgaagctggtatctcaaaggatggtcagacacgtgagcatgctttgcttgcgtttacccttggtgtcaagcagatgatttgctgctgcaacaagatggatgcaacaactccaaaatactccaaggcaaggtatgatgaaattgtgaaggaagtctcctcatatcttaagaaagttggttacaaccctgacaagatcccatttgtcccaatctctggatttgagggtgataacatgattgagaggtctaccaaccttgactggcacaagggtcccactctccttgaggctcttgaccagatcaatgagcccaagaggccttcagacaagccacttcggctcccacttcaggatgtctacaagattggtggcattggaactgtccctgttggtcgtgttgagactggtgtccttaagcctggaatggttgtgacctttggcccctctggtctgaccactgaagttaagtctgttgagatgcaccatgaagccctctctgaggctctccccggtgacaatgttggattcaacgtcaagaacgttgctgttaaggatctcaagcgtggtttcgttgcttcaaactctaaggatgatcctgcaaaggaggctgccagcttcacctctcaggtcatcatcatgaaccaccctgggcagattggaaacggatatgccccagtccttgactgccatacctcccacattgctgtgaagttttctgaattgctgaccaagatcgacaggcgatctggaaaggagcttgagaaggagcccaagttcttgaagaatggtgatgcagggatgataaagatggttcccaccaagcctatggttgtggagactttctctgagtacccaccccttggacggtttgctgtcagggacatgcgtcagactgtggctgttggtgtcatcaagagcgttgagaagaaggatccaaccggtgctaaggtcaccaaatctgctgccaagaagaaatgagattgcatttgatagtatcaaagccttttgattttggttttctatgtagtctggtacttaacagttttttagaccaattttgatatgtgttcatttggttgagactggcatctgcccacggattgtgtgtttgctttttccgtgtcaattgtagttgaattccttcaaagaatgctagtttgatatttccttgttttcttaaaaaaaaaaaaaaaaaaaaaaa

SEQ ID NO: 129845 - protein, 447 aa, Gossypium hirsutum; identical to SEQ ID NO: 27394

SEQ ID NO: 129846 - DNA, 1344 bp, Musa acuminata; identical to SEQ ID NO: 27395
  CDS (1)..(1344)

SEQ ID NO: 129847 - protein, 447 aa, Musa acuminata; identical to SEQ ID NO: 27396

SEQ ID NO: 129848 - DNA, 1738 bp, Actinidia deliciosa
  CDS (98)..(1441)
ttgctctctacgccgtctcctctgcgagagagcatcaagcggatcaatcccgtctctctctctcttcaactgttcgtcgcttaattgctgtcccaatatgggtaaagagaaagttcacattaacattgtggtcattggccatgtcgactctgggaagtcaaccaccaccggtcacttgatctacaagcttggaggtattgacaagcgtgtgattgagaggttcgagaaggaggctgctgagatgaacaaacgttcattcaagtacgcctgggtcttggacaagctcaaggctgaacgtgagcgtggtattaccattgatattgcattgtggaagtttgagaccaccaaatactactgcacagtcattgatgctcctggccatcgcgactttatcaagaacatgatcacaggcacctcacaggctgactgtgcagtccttatcattgactccaccactggtgggtttgaagctggtatttccaaggatggtcagacacgtgagcatgctttgcttgccttcacccttggtgtcaagcaaatgatctgctgttgcaataagatggacgcaactaccccaaaatattcgaaggcaaggtatgatgaaattgttaaggaagtctcctcatatctcaagaaggtggggtacaaccctgataagatcccttttgtcccaatctctgggttcgagggtgacaacatgattgagaggtcaaccaaccttgactggtacaagggcccaaccctgcttgacgcccttgacttgattagtgaacccaagaggccgtcggacaagcctcttcgtctcccacttcaggatgtctacaagattggtgggattggcactgtccctgtgggccgtgttgagactggcgttatcaaacctggcatggttgtcacttttggcccaactggtctcaccactgaagtcaagtccgtagaaatgcaccacgaggctctcttggaggcctcgccaggcgacaatgttgggtttaacgtgaagaatgttgccgtcaaagatctcaagcgtgggtttgttgcctcaaattccaaggatgatcctgcaaaggaagctgccaacttcacttcccaggttattatcatgaaccatccaggtcaaattggaaatgggtatgccccggttttggattgccacacctcccacatcgcagttaagtttgctgagcttttgaccaagattgataggaggtctggcaaagagctcgagaaggagcccaagttcttgaagaatggtgactctgggatggtgaagatgattcccaccaaacccatggtggtggagactttctcggagtacccaccgctcggtcgttttgctgtgagagacatgcgtcaaactgtggcggttggtgtcatcaagagcgtggagaagaaggatccgaccggtgccaaggtcaccaaggctgctctgaagaagaagtgaggccttcaattaaaggttttggtattaagaacagtagagtttaagtgtcctaggttggtaagttttgtctcagactcttgtggtggaccctgttgctgttcactagcctcacttgtggggatggtggtggtgttgagcattcaggtgcggatctgggtgcttgacagtcggtaacaactgggtttttattggttttctattctctgccatttattttccttttttttaatatatgttttgaacaatgcccttttgctggtatggaacttgcagtctattgaatttgaaaaaaaaaaa

SEQ ID NO: 129849 - protein, 447 aa, Actinidia deliciosa; identical to SEQ ID NO: 27398

SEQ ID NO: 129850 - DNA, 1389 bp, Mytilus galloprovincialis; identical to SEQ ID NO: 27403
  CDS (1)..(1389)

SEQ ID NO: 129851 - protein, 462 aa, Mytilus galloprovincialis; identical to SEQ ID NO: 27404

SEQ ID NO: 129852 - DNA, 1389 bp, Oncometopia nigricans; identical to SEQ ID NO: 27409
  CDS (1)..(1389)

SEQ ID NO: 129853 - protein, 462 aa, Oncometopia nigricans; identical to SEQ ID NO: 27410

SEQ ID NO: 129854 - DNA, 1383 bp, Metarhizium anisopliae; identical to SEQ ID NO: 27411
  CDS (1)..(1383)

SEQ ID NO: 129855 - protein, 460 aa, Metarhizium anisopliae; identical to SEQ ID NO: 27412

SEQ ID NO: 129856 - DNA, 1380 bp, Pichia angusta
  CDS (1)..(1380)
atgggtaaagaaaagactcacgttaacgtcgttgttattggtcacgtcgactctggtaaatctaccactaccggccacttgatctacaagtgtggtggtatcgacaagagaaccatcgagaagtttgaaaaggaggctgccgagcttggtaagggttccttcaaatacgcttgggttttggacaagttgaaggctgagagagaaagaggtatcaccattgatatcgctttgtggaaattcgagactccaaagtaccacgtcactgttattgatgctccaggtcacagagatttcatcaagaacatgattactggtacttcccaggctgactgtgctattttgattattgctggtggtaccggtgagttcgaggctggtatttccaaggacggtcaaaccagagagcacgctttgttggctttcacccttggtgtcagacaactgattgttgctgtcaacaagatggactctgttcaatggtctgaggccagattcgaggaaattgtcaaggaaacctctaacttcatcaagaaggttggttacaaccctaagactgttccattcgtcccaatttctggttggaacggtgacaacatgattgagccttcttctaactgcccatggtacaagggatggcaaaaggagaccaagtctggtgtcgtcaagggtaagactcttctcgaggccattgacgccattgagccacctgccagaccatctgacaagccattgagattgccattgcaagatgtctacaagattggtggtatcggtactgttccagtcggtagagttgagactggtgtcatcaaagctggtatggttgttactttcgccccagctggtgttaccaccgaagtcaagtccgtcgagatgcaccacgagcagcttgctgagggtcttccaggtgacaatgttggattcaacgtcaagaacgtttccgtcaaggaaattagaagaggtaacgtctgtggtgactcgaagaacgacccacctcaaggatgtgcttccttcaacgctcaagtcattatcttgaaccacccaggtcagatctctgctggttactctccagttttggactgccacactgcccacattgcctgcagattcgaccaactgctcgagaagatcgacagaagaaccggtaagaagattgaggagaaccctaagtttgtcaagtctggtgacgctgctattgttaagatgatcccatctaagccaatgtgtgttgagaccttcactgagtacccaccattgggaagatttgccgtcagagatatgagacagaccgttgccgtcggtgtcatcaagtctgttgagaagactgctgctggtgccggaaaggtcaccaaggctgctcaaaaggctgccaagaaataa

SEQ ID NO: 129857 - protein, 459 aa, Pichia angusta; identical to SEQ ID NO: 27414

SEQ ID NO: 129858 - DNA, 1389 bp, Crassostrea gigas; identical to SEQ ID NO: 27415
  CDS (1)..(1389)

SEQ ID NO: 129859 - protein, 462 aa, Crassostrea gigas; identical to SEQ ID NO: 27416

SEQ ID NO: 129860 - DNA, 1470 bp, Drosophila melanogaster; identical to SEQ ID NO: 27425
  CDS (1)..(1470)

SEQ ID NO: 129861 - protein, 489 aa, Drosophila melanogaster; identical to SEQ ID NO: 27426

SEQ ID NO: 129862 - DNA, 1671 bp, Arabidopsis thaliana
  CDS (64)..(1494)
aaaaaaaaatttcaaaccctagcttctcgatttctctcctctgctctccaattccatcttcccatgccgatttcggctccagccgcttgttcttcctcctctagaattctctgttcctactcctctccttctccttctctctgtcccgccatttccacctctggtaaactcaaaaccctaactctctcttcctccttcctcccttcttactcattaaccaccacctccgcttctcaatccactcgtcgctccttcaccgtccgcgccgctcgtggaaagttcgagaggaagaagcctcatgtcaacatcggaaccatcggtcatgttgaccatgggaaaactactttaaccgcagctctaaccatggctctcgcttccattggttccagcgtcgctaaaaagtacgacgagattgacgctgcgccggaggagagagctcgtggtatcacaatcaacactgctactgttgagtacgagactgagaatcgtcactacgctcacgttgattgtcctggtcacgctgattacgttaagaatatgattaccggagctgcacagatggacggagctatcctcgttgtttccggcgccgatggtcctatgcctcagactaaagagcatatccttttggctaagcaggttggtgttcctgatatggttgtgtttcttaacaaagaggatcaagtagatgatgcagagttgctagagctcgttgagcttgaggttcgtgagcttctctcgtcttatgaatttaacggtgatgatattccgattatctctggttctgctcttttagccgttgagactcttactgagaatcctaaggttaagagaggtgataacaaatgggtagataagatttatgaacttatggatgctgttgatgattacatccctatccctcagagacaaactgaattgccattcttgttagctgttgaggatgtgttctctatcactggacgtggtacggtggctacagggcgtgtcgagagaggtacggttaaggtaggagagactgtagatttagtgggtttgagggagactaggagttacactgtcactggggttgaaatgtttcagaagattcttgatgaggctttagctggtgacaatgtagggttgttgcttaggggtattcaaaaggctgatattcagagaggtatggttttagctaagccgggatcgattactccacataccaagtttgaagcaattatctatgtgttgaagaaagaggaaggtggaaggcattctccattctttgcagggtacaggcctcagttctacatgaggacgactgatgttacgggtaaagtgacgaagatcatgaacgacaaagatgaagagtcgaagatggttatgcccggtgatcgagtgaagattgttgttgagcttattgtgccggtggcttgtgaacaagggatgaggtttgctatcagagaaggaggaaagactgttggtgctggagttattgggacgatcctcgaatgattataaggttttagagagtttcatatagtgagcatctctacttgctttctttttgtttcactcttgattctcaaactctttgagtttttacctttttttatttatttttgtgccattttccataagaacttgaaatcaaaatgtcatatatttcttgattcaaaaaaaaaaaaaaaa

SEQ ID NO: 129863 - protein, 476 aa, Arabidopsis thaliana; identical to SEQ ID NO: 27428

SEQ ID NO: 129864 - DNA, 1350 bp, Stevia rebaudiana; identical to SEQ ID NO: 27431
  CDS (1)..(1350)

SEQ ID NO: 129865 - protein, 449 aa, Stevia rebaudiana; identical to SEQ ID NO: 27432

SEQ ID NO: 129866 - DNA, 1344 bp, Salsola komarovii; identical to SEQ ID NO: 27433
  CDS (1)..(1344)

SEQ ID NO: 129867 - protein, 447 aa, Salsola komarovii; identical to SEQ ID NO: 27434

SEQ ID NO: 129868 - DNA, 1664 bp, Bruguiera sexangula
  CDS (34)..(1383)
tctctctttacaggttaaagctaagactttataatgggtaaggagaagattcacattaacattgtggttattggccatgtcgactccggaaagtcaaccacaactggccacttgatttacaagcttggaggtatcgacaagcgtgtgattgagaggtttgagaaggaagctgctgagatgaacaagaggtcattcaagtatgcctgggtgcttgacaagctgaaggctgagcgtgagcgtggtatcaccattgatattgccttgtggaagttcgagacaaccaaatattactgcacggtcattgatgctcctggacatcgtgactttattaagaatatgatcaccgggacttcccaagctgactgtgctgtcctcatcattgactctaccactggtggctttgaggctggtatctctaaagatggtcagacccgcgagcatgccctgcttgccttcacccttggtgttaagcaaatgatttgctgctgcaacaagatggatgctaccacttccaagtattctaaggcaagatatgatgaaattgttaaggaagtgtcatcctacttgaagaaggttggttacaacccagagaagattccttttgtccccatatctggatttgagggtgacaacatgattgagagatccaccaaccttgactggtacaagggcccaactcttcttgaggccctggacatgatccaggagccaaagaggccatcagataagcccctccgtctcccacttcaggatgtgtacaagattggtggtattgggacagtcccagtgggtcgtgttgaaactggtgtcctgaagcctggaatggttgttacttttggtccctcaggactgaccactgaagttaagtctgtggagatgcaccatgaagctctccaagaggctcttcccggagacaacgttggcttcaatgttaagaatgtttccgtgaaggatcttaagcggggttatgttgcctcaaactccaaggatgatcctgccaaggaggcatctagcttcacctcccaagttatcatcatgaaccaccctggtcagattggaaatggttatgcccctgttctggattgccacacctctcacattgctgtcaagttttctgagatcctcacaaagattgataggcgatctggcaaggagcttgaaaaggagcccaagttcttgaagaatggtgatgctgggttcgtgaagatgattccgaccaagcctatggtggtggaaactttctccgagtatcctccgcttggtagatttgccgtcagggacatgcgccagactgttgcagtgggagtcatcaagagtgtcgagaaaaaggaaccttctggagctaaggtgactaaatctgctgccaagaagggtggcaaatgaaccgtgcaagtcagagttgatgtagatgaaggctattggaagaataaagactgggccctggttagcggtctaattattggatgttcagcagttggtttcgagaactacagtttcaattcagcgccatcatcacggagctgttgttcccagaattgggttcttgaccgtcggtggcattggctgttggtttgagtgacttctttgtgtcatgtttagactttatcggatttgctatttcataaagcggcttgggaattttaaaaaaaaaaaaaaaaaaaaaa

SEQ ID NO: 129869 - protein, 449 aa, Bruguiera sexangula; identical to SEQ ID NO: 27438

SEQ ID NO: 129870 - DNA, 1347 bp, Solanum tuberosum; identical to SEQ ID NO: 27439
  CDS (1)..(1347)

SEQ ID NO: 129871 - protein, 448 aa, Solanum tuberosum; identical to SEQ ID NO: 27440

SEQ ID NO: 129872 - DNA, 1176 bp, Rhodobacter capsulatus
  CDS (1)..(1176): transl_table=11
atggcaaaggcaaagtttgaacggaacaagccgcacgtgaacatcggcacgatcggccacgtggaccacggcaagacgacgctgacggcggcgatcacgaagtactacggcgaattccgcgcctatgaccagatcgacggtgcgccggaagagcgcgcgcgcgggatcacgatctcgacggcgcacgtggaatacgagacgccgaaccgtcactatgcgcacgtggactgccccggccacgccgactatgtgaagaacatgatcaccggcgcggcgcagatggacggcgcgattctggttgtggcggcctcggacggcccgatgccgcaaacgcgcgagcacattctgctcggccgtcaggtgggcatcccctacatggtcgtctacatgaacaaggttgaccttgtggacgacgaagagttgctcgagctcgtggaaatggaagtccgcgaactgctgtcgtcctacgaataccccggcgacgacattccgatcatcaagggctcggcccaccaggcgatgatcggcgagtcgaaggaaatcggcgaagattcgatccacgcgctgatgaaggccgtcgacgaatacatcccgaccccggcgcgcgccgttgaccagccgttcctgatgccgatcgaagacgtgttctcgatctcgggccgcggcaccgtggtgaccggccgtgtggaacgcggtgtgatcaacgtgggcgacgaacttgaaatcgtcggcatccgcgacaccaagaagtcggtctgcaccggcgtcgagatgttccgcaagctgctcgaccgcggcgaggcgggcgacaacatcggcgcgctgctgcgcggcatcgaccgtgacggcgtcgagcgtggtcaggtcctgtgcaagccgggttcggtgaagccgcacacgaacttcgaagccgaggcctacatcctgacgaaggaagaaggcggccgccacacgccgttctttgcgaactaccgtccgcaattctacttccgcacgacggacgtgacgggcacggtgaagctgccggaaggacgggaaatggtgatgccgggcgacaacctgaagttcgaagtcgaactgatcgcaccgatcgcgatggaagagaaactgcgcttcgcgatccgcgaaggcggccgcaccgtcggcgccggcgtcgtgtcgaagatcatcaagtaa

SEQ ID NO: 129873 - protein, 391 aa, Rhodobacter capsulatus
MAKAKFERNKPHVNIGTIGHVDHGKTTLTAAITKYYGEFRAYDQIDGAPEERARGITISTAHVEYETPNRHYAHVDCPGHADYVKNMITGAAQMDGAILVVAASDGPMPQTREHILLGRQVGIPYMVVYMNKVDLVDDEELLELVEMEVRELLSSYEYPGDDIPIIKGSAHQAMIGESKEIGEDSIHALMKAVDEYIPTPARAVDQPFLMPIEDVFSISGRGTVVTGRVERGVINVGDELEIVGIRDTKKSVCTGVEMFRKLLDRGEAGDNIGALLRGIDRDGVERGQVLCKPGSVKPHTNFEAEAYILTKEEGGRHTPFFANYRPQFYFRTTDVTGTVKLPEGREMVMPGDNLKFEVELIAPIAMEEKLRFAIREGGRTVGAGVVSKIIK

SEQ ID NO: 129874 - DNA, 1188 bp, Tremblaya princeps
  CDS (1)..(1188): transl_table=11
atggccaaagctaagttccaaaggaagaaggtacatatcaacgtgggcaccataggccacgttgaccatggcaaaaccacgctgactgcagcaatgacgagcgtgctatctagtcacgggtgcagcgtgaagaggtacgaggacattgatgccgccccagaggagcgagcacgtggcattaccataaacacggcacacatagagtacgagactgagacacggcactatgcccacgttgattgcccaggccatgctgactacgtcaagaacatgataacaggcgcagcacagatggacggcgcaatcctagtatgctcggcaactgatggaccaatgccgcagacccgggaacacatcctgctggcaaggcaggtgggcgtcccgtacatagtggtatacatgaataagtgcgacatggtggaggataaagagcttctggaccttgtcgagatggaaatcagggagctgctctcaaagtacaacttcccaggcgacagcgctccagtaataaggggctctgcaaagcaggcgctcgattgtgtggatacagagcttggcactaggtctgtgcttaggctgtctgaggtgctagacagctatatcccagaaccatcccgcccgatagactgcccattccttatgcctgttgaggatgttttctcaatatccggcaggggcacagtcgctacagggcgcatagagcgaggcacggtaaaaataggcgacgagcttgaggtggttggactcaggcccacagcaaagacagtgtgtacgggagtggagatgttccggaagctcctggacaatggtcaggctggagataatgtgggcgtattgctaagaggcctgaggcgcgaggacgtagagcgtggtcagatactagccaagcctggcacaataaccccgcacaccagcttcgtagctgaagtgtacgcactcaccaaggacgagggcggaaggcacaccccattctttgccaactacaagcctcagttctacttccgcactacagacgtcacaggaagcatcgtgcttcctaagggtgtcgagatggttatgcctggggacaatgtgcaagtcgacgttactctgatagcaccagtggccatggaggaaggtctgcgcttcgctatccgagagggtggcaagacagttggcgcaggcgttgtcaccaagatcgtacggtaa

SEQ ID NO: 129875 - protein, 395 aa, Tremblaya princeps
MAKAKFQRKKVHINVGTIGHVDHGKTTLTAAMTSVLSSHGCSVKRYEDIDAAPEERARGITINTAHIEYETETRHYAHVDCPGHADYVKNMITGAAQMDGAILVCSATDGPMPQTREHILLARQVGVPYIVVYMNKCDMVEDKELLDLVEMEIRELLSKYNFPGDSAPVIRGSAKQALDCVDTELGTRSVLRLSEVLDSYIPEPSRPIDCPFLMPVEDVFSISGRGTVATGRIERGTVKIGDELEVVGLRPTAKTVCTGVEMFRKLLDNGQAGDNVGVLLRGLRREDVERGQILAKPGTITPHTSFVAEVYALTKDEGGRHTPFFANYKPQFYFRTTDVTGSIVLPKGVEMVMPGDNVQVDVTLIAPVAMEEGLRFAIREGGKTVGAGVVTKIVR

SEQ ID NO: 129876 - DNA, 1746 bp, Trichophyton rubrum
  CDS (104)..(1498)
ggcacgaggcaatttcggccgtagtatctgagcgttctgctgaattcttctagtatcttccaaagagctacaagacttcaaaccacacaaaaacaccgtcaccatgggtaaagatgagaagggccacattaacttggtcgttatcggccacgtcgattccggcaaatccaccactactggtcacttgatctacaagtgcggtggtatcgaccagcgtaccattgagaagttcgagaaggaagccgaagagttgggcaagaagtccttcaagtacgcctgggttcttgacaagctcaaggccgagcgtgagcgtggtatcaccatcgatatcgccctctggaagttcgagacccccaagtacaatgtcaccgtcattgacgcccccggtcaccgtgacttcatcaagaacatgatcactggtacctcccaggccgactgtgctattctcatcattgctgccggtactggtgagttcgaggctggtatctccaaggatggccagacccgtgagcaccgctctgctcgccttcacccttgggtgtcaaagcagctcatcgttgccatcaacaagatggacaccaccaactggtccgagacccgtttcaaggaaatcatcaagggaagtcaccaacttcatcaagaaaggttggctaccgaccccaaggggtgttccattttcgttccaatctctggtttcaacggtgacaacatgattgaaggcttcaccaactgcccatggtacaagggatggaacaaggagaccaaggccggtggtgccaagactggcaagaccctcctcgaggccatcgatgccatcgacatgccaacccgtcctaccgacaagcccctccgtctcccactccaggatgtctacaagatctctggtatcggaactgtaccagtcggtcgtgttgagaccggtatcatcaagcccggtatggtcgtcaccttcgcccctgccaacgtcaccactgaagtcaagtccgtcgaaatgcaccaccagcagcttcagcagggtgtccccggtgacaacgtcggcttcaacgtcaagaacgtttccgtcaaggaagtccgccgtggtaacgttgccggtgactccaagaacgacccaccatccggctgtgcctccttcaacgcccaggtcatcgtcctcaaccaccccggccagatcggtgctggttacgccccagtcctcgactgccacactgctcacattgcttgcaagttcgctgagctcctcgagaagattgaccgccgtaccggtaaatccgtcgaagccaaccccaagttcgtcaagtctggtgatgccgctatcgccaagatggttccatccaagcctatgtgcgttgaggctttcactgactaccccccacttggtcgtttcgccgtccgtgacatgagacagaccgttgccgtcggtgtcatcaaggctgttgagaaggccaccggtggtgctggcaaggtcaccaagtccgctgccaaggctggcaagaagtaaatcatcccacctacttcttgatgtaacgacaactatgatggtgatgaacaaaaaaagggtttttgatgtttgaaagtaaaaaagagatgctggttttttactcttactcttattttttcccaggtgtttttttcttgcgggcatttgagaactcacgaaaataccactctccccctcttcacatcacattagatacaaaaccggcttttaattgacatgaactttcaaatcaaaaaaaaaaaaaaaaa

SEQ ID NO: 129877 - protein, 464 aa, Trichophyton rubrum; identical to SEQ ID NO: 27442

SEQ ID NO: 129878 - DNA, 1344 bp, Elaeis oleifera; identical to SEQ ID NO: 27447
  CDS (1)..(1344)

SEQ ID NO: 129879 - protein, 447 aa, Elaeis oleifera; identical to SEQ ID NO: 27448

SEQ ID NO: 129880 - DNA, 1404 bp, Oryza sativa
  CDS (1)..(1404)
atggcctccctcgcctccgcctccgcatccacctccctggtcttctccacctcctcctccaagccgcgcctcggctcctccgtcggattctcctcgcccgcgcggttccggcgcacggcggcggcggcggcgtccaggggcacggggcggcgcgcggggctgctggtagtgcgcgcggcgagggggaagttcgagcggaccaagccgcacgtcaacatcggcaccatcggccacgtcgaccacgggaagaccacgctgacggcggcgctcaccatggtgctcgcctccgtgggcgggagcgcccccaagaagtacgacgagatcgacgcggcgcccgaggagcgcgcccgcggcatcaccatcaacaccgccaccgtcgagtacgagaccgagacccgccactacgcccacgtcgactgccccggccacgccgactacgttaagaacatgattaccggcgccgcgcagatggacggggccatcctcgtcgtctccggcgccgacgggcccatgccgcagaccaaagagcacattctgttggccaagcaagtcggtgtcccaaagattgttgtctttcttaacaagaaggaccaggtcgacgacgaggagctgcttcagctcgtcgagctcgaggtccgcgaattgctctcctcctacgagtacgatggcgacgaagtgcccatcgtcgctggctccgcgctcaaggcgctcgagaacctcatggccaaccctgccattaagcgcggcgatgatgagtgggtggacgggatcttctcgttgattgattccgtggataactacatccctgtcccacagcgccagaccgacctcccgttcttgcttgctgttgaggatgtgttctccatcaccggtcgtggtaccgttgccactggccgtattgagcgtggcaccgtcaaggttggggacacggtcgatatcgtcggtatccgggagactcgcaactgcacggtgactggtgttgagatgttccagaagaccatggatgatgcgatggctggggacaatgtcggcctgcttctccgtggtatgcagaaggatgatatcgagagaggcatggtgcttgcaaagcctgcttccatcacgccacacaccaagtttgatgcggttgtgtatgtcctgaagaaggacgagggtggacggcactcaccgtttttccctggttaccgccctcagttctacatgcggactaccgatgtgacggggaatgtcacaaagattatgaacgacaaggacgaagaggcgaagatgtgcatgcctggtgaccgtgtcaagatggttgtggagctcatccagcccgtcgcttgtgagcagggaatgaggtttgccatccgtgagggtggaaagaccgtcggtgccggcgtcatcaatacgatcttgaagtaa

SEQ ID NO: 129881 - protein, 467 aa, Oryza sativa; identical to SEQ ID NO: 27766

SEQ ID NO: 129882 - DNA, 1350 bp, Arabidopsis thaliana; identical to SEQ ID NO: 27453
  CDS (1)..(1350)

SEQ ID NO: 129883 - protein, 449 aa, Arabidopsis thaliana; identical to SEQ ID NO: 27454

SEQ ID NO: 129884 - DNA, 1350 bp, Arabidopsis thaliana; identical to SEQ ID NO: 27455
  CDS (1)..(1350)

SEQ ID NO: 129885 - protein, 449 aa, Arabidopsis thaliana; identical to SEQ ID NO: 27456

SEQ ID NO: 129886 - DNA, 1425 bp, Pelargonium graveolens; identical to SEQ ID NO: 27457
  CDS (1)..(1425)

SEQ ID NO: 129887 - protein, 474 aa, Pelargonium graveolens; identical to SEQ ID NO: 27458

SEQ ID NO: 129888 - DNA, 1359 bp, Zea mays; identical to SEQ ID NO: 27461
  CDS (1)..(1359)

SEQ ID NO: 129889 - protein, 452 aa, Zea mays; identical to SEQ ID NO: 27462

SEQ ID NO: 129890 - DNA, 1344 bp, Zea mays; identical to SEQ ID NO: 27469
  CDS (1)..(1344)

SEQ ID NO: 129891 - protein, 447 aa, Zea mays; identical to SEQ ID NO: 27470

SEQ ID NO: 129892 - DNA, 1600 bp, Zea mays
  CDS (72)..(1415)
cgcctcgccgtctgccttctgcgcctccatttcggcctctgtcccttgcaagttcaatctcacctccaaccatgggtaaagagaagtcccacatcaacattgtggttattggccatgtcgactctggcaagtcgaccaccacaggacaccttatctacaagcttggaggcattgacaagcgtgtgatcgagaggttcgagaaggaggctgctgaaatgaacaagcggtccttcaagtacgcgtgggtgctcgacaagctcaaggctgagcgtgagagaggtatcaccattgatatcgctctgtggaagtttgagaccaccaagtactactgcacggtcattgatgcccctggacaccgtgacttcatcaagaacatgatcactggtacctcccaggctgactgtgctgtccttatcattgactccaccactggtggttttgaggctggtatctccaaggatggccagacccgtgaacatgctctccttgcgttcacacttggagtgaagcagatgatttgctgctgcaacaagatggatgcaaccactcccaaatactccaaggcacgttatgaagagattgtgaaggaagtctcatcctacctcaagaaagttgggtacaaccctgataagattgcctttgttcccatttctggttttgagggcgacaacatgattgagaggtccaccaaccttgactggtacaaaggcccaaccctgcttgaggctcttgaccagatcaccgagcccaagaggccttcagacaagcccctgcgtctagccctccaggatgtgtacaagattggtggtattggaactgtaccggttggtcgtgtggagactggtgtcatcaagcctggtatggtagtcacctttggtccaactggcctgactaccgaggtgaagtctgttgagatgcaccacgaggcacttcaggaggctcttccgggtgacaatgttggcttcaacgtgaagaatgttgctgtcaaggatctcaagcgtgggtttgtggcctccaactccaaggatgaccctgccaaggaggctgccagcttcacctcccaggtcatcatcatgaaccaccctgggcagattggcaacggctatgcccctgtgctggactgccacacctcccacatcgctgtcaagtttgctgagctcattaccaagatcgacaggcgctctggcaaggagcttgagaaggagccaaagttcctgaagaacggtgatgctggtatggtgaagatgatacccaccaagcctatggtggtggagacattctccgcgtatcctcccctgggtaggtttgccgtccgcgacatgaggcagacggttgctgttggagtcatcaagagtgtggagaagaaggacccaaccggcgccaaggtgaccaaggcggccgccaagaagaaatgatgcgatccctgcgcctgctttagcaataccctagtttccatcattacaagtttgtttgtggtcgttgctgttattgtgtgaactgttgagctctgttagcctgtgcacttttatctatttatttggtaccttcttgctatttcaccttctgcaatacaagaatgctgtaagagctatatgttaac

SEQ ID NO: 129893 - protein, 447 aa, Zea mays; identical to SEQ ID NO: 27482

SEQ ID NO: 129894 - DNA, 1188 bp, Porphyromonas gingivalis; identical to SEQ ID NO: 27489
  CDS (1)..(1188): transl_table=11

SEQ ID NO: 129895 - protein, 395 aa, Porphyromonas gingivalis; identical to SEQ ID NO: 27490

SEQ ID NO: 129896 - DNA, 1404 bp, Oryza sativa; identical to SEQ ID NO: 27491
  CDS (1)..(1404)

SEQ ID NO: 129897 - protein, 467 aa, Oryza sativa; identical to SEQ ID NO: 27492

SEQ ID NO: 129898 - DNA, 1686 bp, Lilium longiflorum
  CDS (40)..(1383)
ccctcatcagcgaccgcaagagccgccgccaagttagccatgggaaaagagaaggttcacattaacattgttgtcattggtcatgttgactctggcaagtccaccaccactggccaccttatctacaagcttgggggtattgacaagcgtgtgattgagaggtttgagaaggaagctgctgagatgaacaagaggtcattcaagtatgcttgggtgcttgacaagctgaaggcggagcgtgagcgtggtatcaccatcgacattgccctctggaagtttgagaccaccaagtactactgcacagtcattgatgcccctggtcatcgggatttcatcaagaacatgatcactgggacctcacaggctgactgtgcgattcttatcattgactctaccaccggaggctttgaagctggaatttccaaggatggtcagacccgtgagcatgcccttcttgcctttactctgggagtgagacagatgatttgctgctgcaacaagatggatgctactacaccaaagtatgctaaggctaggtatgatgagattgtgaaggaggtttcttcctacctgaagaaggttgggtacaaccctgacaagatcccatttgtcccaatttctggatttgagggtgacaacatgattgagaggtcgaccaaccttgattggtacaagggcccgactcttcttgaagctcttgaccagatctccgagccgaagcgcccatctgacaagcccctccgcctcccccttcaggatgtgtacaagattggtggtattggaactgtgccagttggtcgtgttgagactggagtgatcaagcctggtatggttgtcacttttggcccaaccggtctgaccactgaagtcaagtctgtggagatgcaccatgaggctctcctggaagcgctgccaggtgacaatgttgggttcaatgttaagaatgttgctgtcaaggatctgaagcgtggctttgttgcatcaaactcgaaggatgatccagccaaggaggcagccaactttacctcccaagtcatcatcatgaaccatccggggcaaattgggaatggttatgctcctgtccttgattgccacacctcccacatagctgttaagtttgccgagatcctgaccaagattgacaggcgatctggtaaggagctggagaaggaaccgaagtttctgaagaatggtgatgctggtatggtgaagatgattccgactaagccgatggtggttgagaccttcgctgagtatcctccactggggaggtttgctgtgagggacatgaggcagactgttgctgtcggtgtcatcaagaatgttgagaagaaggatcccactggagccaaggttaccaagtctgctgtgaagaagaaatgaatcgaagggatttctgcactggttttcggtttgcttgttgttggtggtcttgagtttgtgtcgttttggtgttgtgagtctgctgctgctgtgtcgggtatctggttgcagaactgggtgcttgatcgtcggtggcgttggtttgtggtttgttttatttctgcatcttcatttcagtctgctgggtcttagtgttgtgtcctgctcttgtttgtgatgctggtactgctgaacttatgagtcatctatatgggtgtttggtattaataaatggagtttaagtaaaaaaaaaaaaaaaaaaaa

SEQ ID NO: 129899 - protein, 447 aa, Lilium longiflorum; identical to SEQ ID NO: 27494

SEQ ID NO: 129900 - DNA, 1761 bp, Lilium longiflorum
  CDS (63)..(1406)
ccgccgtccagatctcgcctttcttctcaattcgtcgtttttgactccacctaatatcagcaatgggcaaggagaaggttcacatcaacattgtcgtcatcggccatgttgactctgggaagtccacaaccacagggcatctgatctacaagcttggtggtattgacaagcgtgttattgagcgctttgagaaggaagcagctgagatgaataagaggtcatttaagtatgcttgggtgcttgacaagctcaaggcagagcgtgagcgtggtatcacaattgacattgcactgtggaaatttgaaaccactaagtactactgcactgttattgatgcccctggccatcgtgactttatcaagaacatgatcactggtacatctcaggctgattgcgcaattctcatcattgactccacgactggtggttttgaagcaggtatttctaaggatggacagacccgtgagcacgccctccttgccttcactcttggtgtcaagcagatgatttgctgttgtaacaagatggatgctactacaccaaagtattcgaaggctaggtatgatgaaattgttaaggaagtttcttcctacctcaagaaggttggctataaccctgacaagattccctttgtcccaatctctggttttgagggtgacaacatgattgagaggtcgatcaaccttgactggtacaagggcccaactctccttgaagctcttgatatgatcaatgagcccaagcgtccgtctgacaagcccctccgcctccccctgcaggatgtctacaagattggggggattggcactgtgccagttgggcgagtcgagactggtgttttgaagcctgcgatggttgttacctttggccccactggtctgaccactgaagtgaagtctgttgagatgcaccatgaggcacttgtggaggccctacctggtgacaatgttggcttcaatgtgaaaaatgttgctgttaaggatttgaagcgtgggtttgttgcgtccaactcgaaggatgatccagcgaaggaggctgccaacttcacttctcaggtcattatcatgaaccaccccggccagattggtaatggctatgctcctgttctcgactgtcacacctctcacattgctgttaagttcaatgagatcttgaccaagattgatcggcgctctggcaaggagttggagaaggagccgaagtttctgaagaatggagatgcgggtatgattaagatgattcctaccaagccaatggtggtggagactttttctgagtaccctccacttgggcggtttgctgttcgtgacatgaggcagactgttgctgtgggtgttatcaagaatgtggagaagaaggaaccgactggagccaaggtgactaagtcggctgtgaagaagaagtgaaccgaggaatcccctcgtttgttggtgcttgatggtcctaggagtctgaataaactggtctgctactttggtagtttggccttgttgagtatgtctgtgtgctatttctgtcagttttgcttcgttggttcggtgtctgggttctggatggagaactgggttctggaccggcggtggcgaagctggctgagctttatctttttattatgagtcaagtcagttgagtcacttattgaaccttattttgagatactggtattttattcaagtgttattgaaccttattctgtgatactggtttttattgaacctggttggattatatgttaaattttgggttattatggtacttatt

SEQ ID NO: 129901 - protein, 447 aa, Lilium longiflorum; identical to SEQ ID NO: 27496

SEQ ID NO: 129902 - DNA, 1380 bp, Dreissena polymorpha; identical to SEQ ID NO: 27497
  CDS (1)..(1380)

SEQ ID NO: 129903 - protein, 459 aa, Dreissena polymorpha; identical to SEQ ID NO: 27498

SEQ ID NO: 129904 - DNA, 1389 bp, Anthocidaris crassispina; identical to SEQ ID NO: 27499
  CDS (1)..(1389)

SEQ ID NO: 129905 - protein, 462 aa, Anthocidaris crassispina; identical to SEQ ID NO: 27500

SEQ ID NO: 129906 - DNA, 1700 bp, Lilium longiflorum
  CDS (76)..(1419)
gtttttcgagggggattagggttagccggcggcgctttcgctctgtttccaagtttttagttgagttctgtcaccatgggtaaagagaaggttcacatcaacattgttgtcattggtcatgtcgactccgggaagtcgaccaccactgggcatcttatttacaagcttggtggtattgacaagcgtgtgatcgagcggtttgagaaggaagctgctgagatgaacaaaaggtcattcaagtatgcgtgggtgcttgataagctgaaggccgagcgtgagcgtggtatcaccattgatattgctctctggaagtttgagaccaccagatactactgcactgtcattgatgcccctggccatcgtgacttcatcaaaaacatgattactggaacttctcaggccgattgtgctgtccttattattgactctaccactggtggttttgaggctggtatttccaaggatggtcagactcgtgagcatgccctgcttgctttcactcttggtgtgaagcagatgatctgttgttgcaacaagatggatgccacaaccccgaagtactccaaggcccggtacgatgaaattatcaaggaggtttcttcatacctcaagaaggttggttacaacccagacaaaattccctttgttccaatctctgggtttgagggtgataacatgattgagaggtccaacaacctcgactggtacaagggtcccaccctccttgaggcccttgacttaatcaatgagccaaagaggcccacagacaagcccctccgccttccccttcaggatgtgtacaagattggaggcattggaactgtgccagtcggccgtgtggagactggtattgtgaagcccggaatggtagtgacttttgggccaactggtctgaccactgaagttaagtctgttgagatgcaccatgaggctctccttgaagccctccctggtgacaatgtgggatttaatgtgaagaatgttgctgtcaaggatctcaagcgtgggtttgttgcgtcgaactccaaggatgaccctgccaaggaggcggccaacttcacttcccaggttatcatcatgaaccaccctggccagatcggtaatggttatgctcctgtcctggattgccacacctcccacattgctgtcaagtttgctgagatcctgaccaagatcgacaggcgctctggtaaggaaattgagaaggagcctaagtttttgaagaatggtgatgctggtttcgtgaagatgattccgaccaagcctatggtggtggagacattctctgagtatcctcctcttgggcgttttgctgttagggacatgcgccagactgttgctgttggggttattaagagtgttgagaagaaggatcccactggtgccaaggtgaccaaggctgctatcaagaagaagtgaggcgttcttctatttatgtccgagtttcttaagaactgcaagagtctagttggtaatgcttgtttttgtttatcgaactttcgtgttgttaggtcagtggttttgatcaaactatttgctttactgctctatttggtcttttgttatgactatttgatttgctacctgttaatttatctttggtactaaaaaaaaaaaaaaaaaaaaaaaaaaaaaaaaaaaaaaaaaaaaaaaaaaaaaaaaaaaaaaaaaaaaaaaaaaaaaaaaaaaaaaaaaaaaaa

SEQ ID NO: 129907 - protein, 447 aa, Lilium longiflorum; identical to SEQ ID NO: 27504

SEQ ID NO: 129908 - DNA, 1344 bp, Malus domestica; identical to SEQ ID NO: 27505
  CDS (1)..(1344)

SEQ ID NO: 129909 - protein, 447 aa, Malus domestica; identical to SEQ ID NO: 27506

SEQ ID NO: 129910 - DNA, 1344 bp, Nicotiana paniculata; identical to SEQ ID NO: 27507
  CDS (1)..(1344)

SEQ ID NO: 129911 - protein, 447 aa, Nicotiana paniculata; identical to SEQ ID NO: 27508

SEQ ID NO: 129912 - DNA, 1383 bp, Schizosaccharomyces pombe; identical to SEQ ID NO: 27517
  CDS (1)..(1383)

SEQ ID NO: 129913 - protein, 460 aa, Schizosaccharomyces pombe; identical to SEQ ID NO: 27518

SEQ ID NO: 129914 - DNA, 1344 bp, Hordeum vulgare; identical to SEQ ID NO: 27523
  CDS (1)..(1344)

SEQ ID NO: 129915 - protein, 447 aa, Hordeum vulgare; identical to SEQ ID NO: 27524

SEQ ID NO: 129916 - DNA, 1383 bp, Schizosaccharomyces pombe
  CDS (1)..(1383)
atgggcaaagaaaagggacatattaacgtcgttgttatcggtcacgtcgattctggtaagtctaccaccactggtcacttgatttacaagtgcggtggtattgacaagcgtaccattgaaaaattcgagaaggaagctaccgagttgggtaagggttccttcaagtacgcctgggttttggacaagctcaaggccgagcgtgaacgtggtatcaccatcgacattgccctttggaagttcgagactcccaagtacaatgttactgtcattgatgcccccggtcaccgtgatttcatcaagaacatgattaccggtacttctcaagctgactgtgctatccttattattggtggtggtactggtgaattcgaggctggtatctccaaggatggtcaaacccgtgagcacgctttgcttgcttacaccttgggtgtcaagcaacttattgttgccgtcaacaagatggacaccactggctggtcccaagctcgtttcgaggaaatcgttaaggagacctccaacttcatcaagaaggtcggtttcaaccccaagaccgttcctttcgtccctgtctccggtttccaaggtgataacatgattgagcccaccaccaacatgccctggtaccaaggctggcaaaaggagaccaaggctggtgtcgtcaagggtaagactcttttggaggctattgactccattgagccccctgcacgtcccactgacaagcctcttcgtcttccccttcaagatgtttacaagatcggtggtattggtacagttcccgtcggtcgtgtcgagactggtgttatcaagcccggtatgattgtcaccttcgctcccgctggtgtcactaccgaagtcaagtctgttgagatgcaccacgagtctctcgacgctggtcttcccggtgacaacgttggtttcaacgtcaagaacgtttccgtcaaggatattcgccgtggtaacgtctgtggtgactccaagaacgatcctcccatgggttgtgctagcttcaccgctcaagtcatcattcttaaccaccccggtcaaatctctgctggttactctcctgttttggattgccacactgctcacattgcttgcaagttcgctgagctcattgagaagattgaccgtcgttccggtaagaagattgaggagtcccccaagtttgtcaagtctggtgatgcttgcattgctaagatggttccttccaagcccatgtgtgttgaagctttcactgactacgctcctcttggtcgtttcgctgtccgtgacatgcgtcaaaccgtcgctgtcggtgtcatcaaggctgtcgagaaggttgctcctggtgccgccaaggtcaccaaggccgctgttaaggctggtgccaagaagtaa

SEQ ID NO: 129917 - protein, 460 aa, Schizosaccharomyces pombe; identical to SEQ ID NO: 27528

SEQ ID NO: 129918 - DNA, 1374 bp, Rhizomucor racemosus; identical to SEQ ID NO: 27529
  CDS (1)..(1374)

SEQ ID NO: 129919 - protein, 457 aa, Rhizomucor racemosus; identical to SEQ ID NO: 27530

SEQ ID NO: 129920 - DNA, 1377 bp, Absidia glauca; identical to SEQ ID NO: 27531
  CDS (1)..(1377)

SEQ ID NO: 129921 - protein, 458 aa, Absidia glauca; identical to SEQ ID NO: 27532

SEQ ID NO: 129922 - DNA, 1386 bp, Apis mellifera
  CDS (1)..(1386)
atgggtaaggagaagattcatataaacatcgtggtgatcggccacgttgattcgggcaagtcgacgactaccggtcatctgatttacaaatgcggcggcatcgacaagcgtaccatcgaaaagttcgagaaggaggctcaagaaatgggcaagggctcgttcaagtacgcctgggtgttggacaagctgaaggctgaacgcgagcgtggtatcacgatcgatatcgccctgtggaagttcgagactgcgaaatattacgtgacgatcatagacgcgcctgggcatcgcgatttcatcaaaaatatgatcaccgggacgagtcaggccgattgtgccgtgttaatagtcgcggctggtataggtgaattcgaagctggtatctcgaagaacggacagacgcgcgaacacgctttgctggcgttcacgcttggggtcaagcagttgatcgttggagtgaacaagatggacatgaccgatcccccgtattcggaggcccgtttcgaggagatcaagaaagaggtgtcatcgtacataaaaaagatcggttacaacacagcctcggtcgcgttcgtaccgatctccggatggcacggcgacaacatgttggaaccctcgccgaagacaccgtggtacaagggatggaaagtggagcgcaaagatggtaacgctgacggaaagaccctgatcgaagccctcgacgctatattaccgccgtccagacctaccgataaggctcttcgtttaccgcttcaggacgtttataagatcggtggtatcggtactgtaccggtcggtcgggtggagaccggtattttgaaaccaggtatgctggtaacattcgctccagcagcgctcaccaccgaagtgaaatcggtcgagatgcatcacgaggcattgacggaggcgttacccggggacaacgttggcttcaacgtgaagaacatttctgtgaaagagttgaggcgtggttacgtggcgggagattcgaaaaatcaaccgccacggggggcagccgatttcacagcgcaggtgatcgtcctcaatcatcctgggcagataagcaacggttatacaccggtgctcgattgtcacaccgctcatatcgcttgcaaatttgcggagatcaaggagaaatgcgaccgccgtaccggcaagaccaccgaggagaatccgaagagcatcaagagcggagacgccgcgatcgtgatgttgcaacctactaagccgatgtgcgtcgaagctttccaggaattccctccgcttggtcgcttcgcggttcgcgacatgcgtcagactgtcgctgtgggcgtcattaagagtgtcacctttaaagatacccagggcaaggtcacaaaggccgcggagaaagcccagaagaaaaagtaa

SEQ ID NO: 129923 - protein, 461 aa, Apis mellifera; identical to SEQ ID NO: 27536

SEQ ID NO: 129924 - DNA, 1389 bp, Artemia salina; identical to SEQ ID NO: 27539
  CDS (1)..(1389)

SEQ ID NO: 129925 - protein, 462 aa, Artemia salina; identical to SEQ ID NO: 27540

SEQ ID NO: 129926 - DNA, 1380 bp, Arxula adeninivorans; identical to SEQ ID NO: 27541
  CDS (1)..(1380)

SEQ ID NO: 129927 - protein, 459 aa, Arxula adeninivorans; identical to SEQ ID NO: 27542

SEQ ID NO: 129928 - DNA, 1377 bp, Ashbya gossypii; identical to SEQ ID NO: 27543
  CDS (1)..(1377)

SEQ ID NO: 129929 - protein, 458 aa, Ashbya gossypii; identical to SEQ ID NO: 27544

SEQ ID NO: 129930 - DNA, 1383 bp, Aspergillus oryzae; identical to SEQ ID NO: 27545
  CDS (1)..(1383)

SEQ ID NO: 129931 - protein, 460 aa, Aspergillus oryzae; identical to SEQ ID NO: 27546

SEQ ID NO: 129932 - DNA, 1392 bp, Bombyx mori; identical to SEQ ID NO: 27549
  CDS (1)..(1392)

SEQ ID NO: 129933 - protein, 463 aa, Bombyx mori; identical to SEQ ID NO: 27550

SEQ ID NO: 129934 - DNA, 1377 bp, Candida albicans
  CDS (1)..(1377): transl_table=12
atgggtaaagaaaaaactcacgttaacgttgttgttattggtcacgtcgattccggtaaatctactaccaccggtcacttaatttacaagtgtggtggtattgataaaagaaccattgaaaagttcgaaaaagaagctgctgaattgggtaaaggttctttcaaatacgcttgggtcttggacaaattgaaggctgaaagagaaagaggtatcaccattgatatcgctttgtggaaattcgaaactccaaaataccacgttaccgtcattgatgctccaggtcacagagatttcatcaagaatatgatcactggtacttctcaagctgattgtgctattttgattattgctggtggtactggtgaattcgaagccggtatttctaaggatggtcaaaccagagaacacgctttgttggcttacactttgggtgtcaaacaattgattgttgctgtcaacaagatggactctgtcaaatgggataaaaacagatttgaagaaatcatcaaggaaacctccaatttcgtcaagaaggttggttacaacccaaagactgttccattcgttccaatctctggttggaatggtgacaacatgattgaaccatccaccaactgtccatggtacaagggttgggaaaaggaaaccaaatccggtaaagttactggtaagaccttgttagaagctattgacgctattgaaccaccaaccagaccaaccgacaaaccattgagattgccattgcaagatgtttacaagattggtggtattggtactgtgccagtcggtagagttgaaactggtatcatcaaagccggtatggttgttactttcgccccagctggtgttaccactgaagtcaagtccgttgaaatgcatcacgaacaattggctgaaggtgttccaggtgacaatgttggtttcaacgttaagaacgtttccgttaaagaaattagaagaggtaacgtttgtggtgactccaagaacgatccaccaaagggttgtgactctttcaatgcccaagtcattgttttgaaccatccaggtcaaatctctgctggttactctccagtcttggattgtcacactgcccacattgcttgtaaattcgacactttggttgaaaagattgacagaagaactggtaagaaattggaagaaaatccaaaattcgtcaaatccggtgatgctgctatcgtcaagatggtcccaaccaaaccaatgtgtgttgaagctttcactgactacccaccattaggtagattcgctgtcagagatatgagacaaaccgttgctgttggtgtcatcaaatctgttgaaaaatccgacaaagctggtaaagttaccaaggctgctcaaaaagctgctaagaaataa

SEQ ID NO: 129935 - protein, 458 aa, Candida albicans; identical to SEQ ID NO: 27552

SEQ ID NO: 129936 - DNA, 1383 bp, Coccidioides immitis; identical to SEQ ID NO: 27553
  CDS (1)..(1383)

SEQ ID NO: 129937 - protein, 460 aa, Coccidioides immitis; identical to SEQ ID NO: 27554

SEQ ID NO: 129938 - DNA, 1380 bp, Cryptococcus neoformans; identical to SEQ ID NO: 27555
  CDS (1)..(1380)

SEQ ID NO: 129939 - protein, 459 aa, Cryptococcus neoformans; identical to SEQ ID NO: 27556

SEQ ID NO: 129940 - DNA, 1350 bp, Manihot esculenta; identical to SEQ ID NO: 27559
  CDS (1)..(1350)

SEQ ID NO: 129941 - protein, 449 aa, Manihot esculenta; identical to SEQ ID NO: 27560

SEQ ID NO: 129942 - DNA, 1383 bp, Neurospora crassa; identical to SEQ ID NO: 27561
  CDS (1)..(1383)

SEQ ID NO: 129943 - protein, 460 aa, Neurospora crassa; identical to SEQ ID NO: 27562

SEQ ID NO: 129944 - DNA, 1670 bp, Pisum sativum
  CDS (104)..(1447)
ctgaattcggcacgaggcggccgcagttgctcagtctctctctgcggctgaggattcgaacgagtgacatacttcaatttcgtttctgctaagttaagacatcatgggtaaggaaaaggttcacattaacattgttgtcattggacatgtcgactctggaaaatcaaccacgactgtccatgtcatctacaagcttggaggtattgacaagcgtgtgatcgagaggtttgagaaggaagctgatgaaatgaacaagcgttcattcaagtatgcctggttgcttgacaagcttaaggccgagcgtgaaagaggaattaccattgatattgccttgttgaaatttgaaaccaccaagtactactccactgtcatggatgcacctggacatcgtgactttatcaagaacatgattactggaacctcccaggctgattgtgctgtccttattattgattccaccactggtggttttgaagccggtatctctaaggatgggcagacccgtgaacatgcactacttgcctttactcttggagtgaagcagatgatttgttgttgtaacaagatggatgctaccacccctaagtactccaagggcaggtatgaggaaatcgtgaaggaagtttcttcctacttgaaagaggttggttacaacccagacaaaattcccttcgttcccatctctggttttgagggagacaacatgattgagaggtccaccaaccttgactggtacaagggaccaactctacttgatgctcttgacaacatcaatgagccaaagagaccctcagacaagcccctcaggcttccattgcaagatgtttacaagattggtggtattggaactgtgccagtgggacgtgttgaaactggtgttgtgaagcccggtatgcttgtaacttttgctcctactggtttgacaactgaggttaagtccgttgagatgcaccacgaggctctcaccgaggctcttccaggagacaatgttcgattcaatgttaagaatgttgcagtcaaggatctcaagcatggtttggttgcttccaactccaaggatgaccctgccaaggatgctgccaacttcacgtcccaggtcatcatcatgaaccaccctggacagattggaaatggttatgcaccagttcttgattgccacacctctcacattgctgtcaagtttgctgagcttatcaccaagattgacaggcgatctggtaaggagattgagaaggagcccaagtttttgaagaatggtgatgccggtatggttaagatgattccaaccaagcccatggtggtggaaacttttgctgagtatcctcctcttggtcgttttgctgtgagggacatgagacaaactgttgctgtcggagtcatcaagagtgtggagaagaaggacccaactggagccaaggtcaccaaagcagcagccaagaagaagtgattcactccatggtgctctgcagaagtgtcctttatagtagtttatctttccagtttaattttgaagtttttgcctgtttcattaaactaaacttacaaaactgggttcttgatcggcggtggtcaattttccattttgtgattttcctgttactgtttttatggtgttaatttatgtttgagtagtacattttgttgccgagggatgtttaaattgcattaat

SEQ ID NO: 129945 - protein, 447 aa, Pisum sativum; identical to SEQ ID NO: 27564

SEQ ID NO: 129946 - DNA, 1617 bp, Piriformospora indica
  CDS (54)..(1442)
ccttgccctccaccatcactgaagtccctcacacatctttttcatactaaaaaatgggtaaagaaaaggctcacgttaacgtcgtcgtcatcggccacgtcgattccggaaagtcgaccaccactggccatctgatctacaagtgcggtggcattgacaagcgaacgattgaaaagttcgagaaggaagctgccgagcttggaaagggctcgttcaagtatgcttgggtgctcgacaagctcaaggccgagcgtgagcgtggtatcaccatcgatatcgctctctggaagtccgagacccccaaatacatggtcactgtcattgatgcccccggccaccgtgactttatcaagaacatgattaccggtacctcgcaggctgattgcgctatcctcatcatcgccggtggtaccggtgagttcgaggctggtatctccaaggatggccagactcgtgagcatgctttgctcgcctttaccctcggtgtccgacagctcatcgtcgctgtcaacaagatggacaccaccaactggtctgaggcccgcttcaacgaaatcgtcaaggaaacctccaacttcatcaagaaggtcggatacaaccccaagacggtcgccttcgtccccatctctggctggcacggtgacaacatgctcgagccctccaccaacatgccctggtacaagggatggtcgaaggaggtcaagggctcgtcgagtcctgccaccggcaagaccctcgtcgacgccatcgacgccatcgaacccccagtccgcccgtccgacaagcccctccgtctcccactccaggatgtgtacaagattggtggtattggtacggtcccagtcggtcgtgtcgaaactggtatcatcaagcccggcatggtcgtctcctttgctccctcgaacgtcaccactgaagtcaagtccgtcgaaatgcaccacgagcagctcgctgagggcttgcccggagacaacgtcggcttcaacgtcaagaacgtgtcggtcaaggatatccgccgtggagacgtcgcttcggactcgaagaacgaccccgccaaggaggctgcatctttcaacgctcaagtcatcgtcttgaaccaccccggtcagattggcgctggttacgccccagtcttggactgccacaccgctcacattgcctgcaagttctccgagctcatcgagaagattgatcgccgaactggcaagaccatggaagccgcccccaagtttgtcaagtctggtgacgctgccattgtcaagctcgtcccgagcaagccaatgtgtgtggagagctacaacgagtacccaccacttggtcgtttcgccgtccgtgacatgaggcagactgttgccgtcggtgtcatcaagtcggttgagaagaccgagggcaagggtggcaaggttacgaagagcgcggaaaaggctgccaagaagaagtaaacgaatacgaaccgagacgcagtttctttcttctctctctctttccggcagcttcatttccatccccgactcgcgccatcttttctccttcctctccttgcgcgctcatgaccgcccacgatatgaaaagtcgtcgatgtagagtagttttcttgaaacgagtagacgaatctgc

SEQ ID NO: 129947 - protein, 462 aa, Piriformospora indica; identical to SEQ ID NO: 27566

SEQ ID NO: 129948 - DNA, 1383 bp, Podospora anserina; identical to SEQ ID NO: 27567
  CDS (1)..(1383)

SEQ ID NO: 129949 - protein, 460 aa, Podospora anserina; identical to SEQ ID NO: 27568

SEQ ID NO: 129950 - DNA, 1386 bp, Podospora curvicolla; identical to SEQ ID NO: 27569
  CDS (1)..(1386)

SEQ ID NO: 129951 - protein, 461 aa, Podospora curvicolla; identical to SEQ ID NO: 27570

SEQ ID NO: 129952 - DNA, 1392 bp, Puccinia graminis; identical to SEQ ID NO: 27571
  CDS (1)..(1392)

SEQ ID NO: 129953 - protein, 463 aa, Puccinia graminis; identical to SEQ ID NO: 27572

SEQ ID NO: 129954 - DNA, 1383 bp, Schizophyllum commune; identical to SEQ ID NO: 27573
  CDS (1)..(1383)

SEQ ID NO: 129955 - protein, 460 aa, Schizophyllum commune; identical to SEQ ID NO: 27574

SEQ ID NO: 129956 - DNA, 1347 bp, Solanum lycopersicum; identical to SEQ ID NO: 27575
  CDS (1)..(1347)

SEQ ID NO: 129957 - protein, 448 aa, Solanum lycopersicum; identical to SEQ ID NO: 27576

SEQ ID NO: 129958 - DNA, 1383 bp, Sordaria macrospora; identical to SEQ ID NO: 27577
  CDS (1)..(1383)

SEQ ID NO: 129959 - protein, 460 aa, Sordaria macrospora; identical to SEQ ID NO: 27578

SEQ ID NO: 129960 - DNA, 1344 bp, Glycine max; identical to SEQ ID NO: 27579
  CDS (1)..(1344)

SEQ ID NO: 129961 - protein, 447 aa, Glycine max; identical to SEQ ID NO: 27580

SEQ ID NO: 129962 - DNA, 1383 bp, Trichoderma reesei; identical to SEQ ID NO: 27583
  CDS (1)..(1383)

SEQ ID NO: 129963 - protein, 460 aa, Trichoderma reesei; identical to SEQ ID NO: 27584

SEQ ID NO: 129964 - DNA, 1344 bp, Vicia faba; identical to SEQ ID NO: 27585
  CDS (1)..(1344)

SEQ ID NO: 129965 - protein, 447 aa, Vicia faba; identical to SEQ ID NO: 27586

SEQ ID NO: 129966 - DNA, 2062 bp, Triticum aestivum
  CDS (482)..(1825)
ggaattcggcacgaggctaatactgttgccttgatccgtagtttgctagggtcatgttcctaatttgttagcgcaattgcaagctcgcaataccgaatcatctctgctccttgttcgtatatttatcggtccatggacgtatacttttagttcgtaggatgcacagattacagtcgtgtggaatatttatatgtcgctccatcgttttttttgtcgttccctggtggtgttgccgagatctagttatggcttctgcatgatatgctggaggtgtaataacatcttattagaccatctttttactgttaaccgtcatagcatcttattaaaccatctttttaccgtttaccgtcacgggttagctaagatatttgatctatcagtttatgtcacttgtccacatgatgattccctgtgtccgttagttttaataatcttttttctgtgtcgcagttgggtagtttacctctacccaccagccatgggtaaggagaagactcacatcaacatcgtggtcattggccatgtcgactctggcaagtcgacgaccactggccacctgatctacaagcttggaggcattgacaagcgtgtcatcgagaggttcgagaaggaagccgctgagatgaacaagaggtctttcaagtacgcgtgggtgcttgacaagctcaaggccgagcgtgagagaggtatcaccatcgatattgctctctggaagttcgagaccaccaagtactactgcaccgtcattgatgcccctggtcaccgtgacttcatcaagaacatgatcaccggtacctcccaggctgactgtgctgttctcatcatcgactccaccactggtggttttgaggctggtatctccaaggatggccagacacgtgagcacgccctccttgctttcactcttggagtgaagcagatgatctgctgctgcaacaagatggacgccaccactcccaagtactcaaaggcgcgttatgaagaaattgtcaaggaggtctcttcctacctgaagaaggtcggctacaaccctgacaaggttcccttcgtccccatctctgggtttgagggtgacaacatgattgagaggtccaccaaccttgactggtacaagggcccaacccttcttgaggcgcttgaccagatcaacgagcccaagaggccctcagacaagcccctccgtcttcccctccaggacgtttacaagattggtggcattggaactgtgcctgttggccgtgttgagactggtgtcatcaagcctggtatggttgtcacctttggtcccactggtctgacaactgaggtcaagtccgttgagatgcaccatgagtctctcctggaggcgcttcctggtgacaacgttggcttcaatgtcaagaatgttgccgtgaaggatctgaagcgtggttttgttgcatccaactccaaggatgaccctgccaaggaggcagccaacttcacctcccaggtcatcatcatgaaccaccctggtcagattggcaacggctacgccccagtgctggactgccacacctcgcacattgctgtcaagtttgctgagctggtgaccaagatcgacaggcgatctggtaaggagctggaggccctgcccaagttcctcaagaatggtgatgctggcatagtgaagatgattcccaccaagcccatggttgtggagacctttgctacttacccacctcttggtcgttttgctgtccgtgacatgaggcaaactgtggctgttggtgtcatcaagggtgtggagaagaaggacccaaccggcgccaaggtgaccaaggctgccatcaagaagaaatgaggggcttacctgaatccatctatgtctgcttttgagatctctagtagtttagtgcaagttttgctactgttagcgccgtgtgatatgcgccctgttgatgtgtcatttgagtactgtcgttaattttggcttttggcaaaacatggaagcttctgagactaaaaaaaaaaaaaaaaaaaaaaaaaaaaaaaaaaaaaaaaaaaaaaaaaaaaaaaaaaaaaaaaaaaaaaactcgag

SEQ ID NO: 129967 - protein, 447 aa, Triticum aestivum; identical to SEQ ID NO: 27588

SEQ ID NO: 129968 - DNA, 1383 bp, Yarrowia lipolytica; identical to SEQ ID NO: 27589
  CDS (1)..(1383)

SEQ ID NO: 129969 - protein, 460 aa, Yarrowia lipolytica; identical to SEQ ID NO: 27590

SEQ ID NO: 129970 - DNA, 1377 bp, Saccharomyces cerevisiae; identical to SEQ ID NO: 27591
  CDS (1)..(1377)

SEQ ID NO: 129971 - protein, 458 aa, Saccharomyces cerevisiae; identical to SEQ ID NO: 27592

SEQ ID NO: 129972 - DNA, 1365 bp, Arabidopsis thaliana; identical to SEQ ID NO: 27593
  CDS (1)..(1365)

SEQ ID NO: 129973 - protein, 454 aa, Arabidopsis thaliana; identical to SEQ ID NO: 27594

SEQ ID NO: 129974 - DNA, 1440 bp, Glycine max; identical to SEQ ID NO: 27599
  CDS (1)..(1440)

SEQ ID NO: 129975 - protein, 479 aa, Glycine max; identical to SEQ ID NO: 27600

SEQ ID NO: 129976 - DNA, 1203 bp, Thermoanaerobacter tengcongensis; identical to SEQ ID NO: 27605
  CDS (1)..(1203): transl_table=11

SEQ ID NO: 129977 - protein, 400 aa, Thermoanaerobacter tengcongensis; identical to SEQ ID NO: 27606

SEQ ID NO: 129978 - DNA, 1185 bp, Vibrio cholerae; identical to SEQ ID NO: 27607
  CDS (1)..(1185): transl_table=11

SEQ ID NO: 129979 - protein, 394 aa, Vibrio cholerae; identical to SEQ ID NO: 27608

SEQ ID NO: 129980 - DNA, 1440 bp, Glycine max; identical to SEQ ID NO: 27617
  CDS (1)..(1440)

SEQ ID NO: 129981 - protein, 479 aa, Glycine max; identical to SEQ ID NO: 27618

SEQ ID NO: 129982 - DNA, 1185 bp, Yersinia pestis; identical to SEQ ID NO: 27623
  CDS (1)..(1185): transl_table=11

SEQ ID NO: 129983 - protein, 394 aa, Yersinia pestis; identical to SEQ ID NO: 27624

SEQ ID NO: 129984 - DNA, 1179 bp, Streptomyces coelicolor; identical to SEQ ID NO: 27625
  CDS (1)..(1179): transl_table=11

SEQ ID NO: 129985 - protein, 392 aa, Streptomyces coelicolor; identical to SEQ ID NO: 27626

SEQ ID NO: 129986 - DNA, 1170 bp, Streptomyces ramocissimus; identical to SEQ ID NO: 27627
  CDS (1)..(1170): transl_table=11

SEQ ID NO: 129987 - protein, 389 aa, Streptomyces ramocissimus; identical to SEQ ID NO: 27628

SEQ ID NO: 129988 - DNA, 1458 bp, Nicotiana sylvestris; identical to SEQ ID NO: 27631
  CDS (1)..(1458)

SEQ ID NO: 129989 - protein, 485 aa, Nicotiana sylvestris; identical to SEQ ID NO: 27632

SEQ ID NO: 129990 - DNA, 1176 bp, Agrobacterium tumefaciens
  CDS (1)..(1176): transl_table=11
atggcaaagagcaagtttgagcgcaataagccgcacgtcaacattggcacgatcggtcacgtcgaccacggcaagacgtcgttgactgctgcgatcacgaagtatttcggcgagttcaaggcgtatgaccaaatcgacgccgctcctgaagaaaaggctcgtggtatcacgatttcgacggcgcacgttgagtatgagacgcctgcgcgtcactacgcccacgttgactgccccggccacgccgactatgtgaagaacatgatcaccggtgctgcccagatggacggcgcgatcctggtttgctcggctgccgacggcccgatgccacagacccgcgagcacatcctgcttgcccgtcaggttggcgttccggccatcgtcgtgttcctcaacaaggtcgaccaggttgacgacgccgagcttctcgagctcgtcgagcttgaagttcgcgaacttctgtcgtcctacgacttcccgggcgacgatatcccgatcatcaagggttcggcacttgctgctcttgaagattctgacaagaagatcggtgaagacgcgatccgcgagctgatggctgctgtcgacgcctacatcccgacgcccgagcgtccgatcgaccagccgttcctgatgccgatcgaagacgtgttctcgatctcgggtcgtggtacggttgtgacgggtcgcgttgagcgcggtatcgtcaaggttggtgaagaagtcgaaatcgtcggcatccgtccgacctcgaagacgactgttaccggcgttgaaatgttccgcaagctgctcgaccagggccaggccggcgacaacatcggtgcactcgttcgcggcgttacccgtgacggcgtcgagcgtggtcagatcctgtgcaagccgggttcggtcaagccgcacaagaagttcatggcagaagcctacatcctgacgaaggaagaaggcggtcgtcatacgccgttcttcacgaactaccgtccgcagttctacttccgtacgactgacgttaccggtatcgtttcgcttcctgaaggcacggaaatggttatgcctggcgacaacgtcactgttgaagtcgagctgatcgttccgatcgcgatggaagaaaagctgcgcttcgctatccgcgaaggcggccgtaccgtcggcgccggcatcgttgcttcgatcgtcgagtaa

SEQ ID NO: 129991 - protein, 391 aa, Agrobacterium tumefaciens; identical to SEQ ID NO: 27634

SEQ ID NO: 129992 - DNA, 1244 bp, Agrobacterium tumefaciens
  CDS (58)..(1233): transl_table=11
gcgacaccaaaccggttcgccgggaaatcgacttcacgttcacaggaagcaattcacatggcaaagagcaagtttgagcgcaataagccgcacgtcaacattggcacgatcggtcacgtcgaccacggcaagacgtcgttgactgctgcgatcacgaagtatttcggcgagttcaaggcgtatgaccaaatcgacgccgctcctgaagaaaaggctcgtggtatcacgatttcgacggcgcacgttgagtatgagacgcctgcgcgtcactacgcccacgttgactgccccggccacgccgactatgtgaagaacatgatcaccggtgctgccgagatggacggcgcgatcctggtttgctcggctgccgacggcccgatgccacagacccgcgagcacatcctgcttgcccgtcaggttggcgttccggccatcgtcgtgttcctcaacaaggtcgaccaggttgacgacgccgagcttctcgagctcgtcgagcttgaagttcgcgaacttctgtcgtcctacgacttcccgggcgacgatatcccgatcatcaagggttcggcacttgctgctcttgaagattctgacaagaagatcggtgaagacgcgatccgcgagctgatggctgctgtcgacgcctacatcccgacgcccgagcgtccgatcgaccagccgttcctgatgccgatcgaagacgtgttctcgatctcgggtcgtggtacggttgtgacgggtcgcgttgagcgcggtatcgtcaaggttggtgaagaagtcgaaatcgtcggcatccgtccgacctcgaagacgactgttaccggcgttgaaatgttccgcaagctgctcgaccagggccaggccggcgacaacatcggtgcactcgttcgcggcgttacccgtgacggcgtcgagcgtggtcagatcctgtgcaagccgggttcggtcaagccgcacaagaagttcatggcagaagcctacatcctgacgaaggaagaaggcggtcgtcatacgccgttcttcacgaactaccgtccgcagttctacttccgtacgactgacgttaccggtatcgtttcgcttcctgaaggcacggaaatggttatgcctggcgacaacgtcactgttgaagtcgagctgatcgttccgatcgcgatggaagaaaagctgcgcttcgctatccgcgaaggcggccgtaccgtcggcgccggcatcgttgcttcgatcgtcgagtaattttcaggcct

SEQ ID NO: 129993 - protein, 391 aa, Agrobacterium tumefaciens; identical to SEQ ID NO: 27636

SEQ ID NO: 129994 - DNA, 1218 bp, Aquifex pyrophilus; identical to SEQ ID NO: 27639
  CDS (1)..(1218): transl_table=11

SEQ ID NO: 129995 - protein, 405 aa, Aquifex pyrophilus; identical to SEQ ID NO: 27640

SEQ ID NO: 129996 - DNA, 1431 bp, Arabidopsis thaliana
  CDS (1)..(1431)
atggcgatttcggctccagccgcttgttcttcctcctctagaattctctgttcctactcctctccttctccttctctctgtcccgccatttccacctctggtaaactcaaaaccctaactctctcttcctccttcctcccttcttactcattaaccaccacctccgcttctcaatccactcgtcgctccttcaccgtccgcgccgctcgtggaaagttcgagaggaagaagcctcatgtcaacatcggaaccatcggtcatgttgaccatgggaaaactactttaaccgcagctctaaccatggctctcgcttccattggttccagcgtcgctaaaaagtacgacgagattgacgctgcgccggaggagagagctcgtggtatcacaatcaacactgctactgttgagtacgagactgagaatcgtcactacgctcacgttgattgtcctggtcacgctgattacgttaagaatatgattaccggagctgcacagatggacggagctatcctcgttgtttccggcgccgatggtcctatgcctcagactaaagagcatatccttttggctaagcaggttggtgttcctgatatggttgtgtttcttaacaaagaggatcaagtagatgatgcagagttgctagagctcgttgagcttgaggttcgtgagcttctctcgtcttatgaatttaacggtgatgatattccgattatctctggttctgctcttttagccgttgagactcttactgagaatcctaaggttaagagaggtgataacaaatgggtagataagatttatgaacttatggatgctgttgatgattacatccctatccctcagagacaaactgaattgccattcttgttagctgttgaggatgtgttctctatcactggacgtggtacggtggctacagggcgtgtcgagagaggtacggttaaggtaggagagactgtagatttagtgggtttgagggagactaggagttacactgtcactggggttgaaatgtttcagaagattcttgatgaggctttagctggtgacaatgtagggttgttgcttaggggtattcaaaaggctgatattcagagaggtatggttttagctaagccgggatcgattactccacataccaagtttgaagcaattatctatgtgttgaagaaagaggaaggtggaaggcattctccattctttgcagggtacaggcctcagttctacatgaggacgactgatgttacgggtaaagtgacgaagatcatgaacgacaaagatgaagagtcgaagatggttatgcccggtgatcgagtgaagattgttgttgagcttattgtgccggtggcttgtgaacaagggatgaggtttgctatcagagaaggaggaaagactgttggtgctggagttattgggacgatcctcgaatga

SEQ ID NO: 129997 - protein, 476 aa, Arabidopsis thaliana; identical to SEQ ID NO: 27642

SEQ ID NO: 129998 - DNA, 1188 bp, Bacillus anthracis; identical to SEQ ID NO: 27643
  CDS (1)..(1188): transl_table=11

SEQ ID NO: 129999 - protein, 395 aa, Bacillus anthracis; identical to SEQ ID NO: 27644

SEQ ID NO: 130000 - DNA, 1185 bp, Bacteroides fragilis
  CDS (1)..(1185): transl_table=11
atggctaaagagaaatttgaacgtaccaaaccgcacgtaaacattggtacaatcggtcacgttgaccacggtaaaaccactttgactgctgctatcactactgtgttggcaaagaaaggtctttctgaacttcgttctttcgattctatcgataatgctcctgaagaaaaagaaagaggtattactatcaatacttcacacgttgagtatgaaactgctaaccgtcactacgcacacgttgactgtccgggtcacgctgactacgtaaagaacatggttactggtgctgctcagatggacggtgctatcattgtagttgctgctactgatggtccgatgcctcagactcgtgagcacatccttttggctcgtcaggtaaacgttccgaagctggttgtattcatgaacaagtgcgatatggttgaagatgctgagatgttggaacttgttgaaatggaaatgagagaattgctttcattctatgatttcgacggtgacaatactccgatcattcagggttctgctcttggtgcattgaacggcgtagaaaaatgggaagacaaagtaatggaactgatggaagctgttgatacttggattccactgcctccgcgcgatgttgataaacctttcttgatgccggtagaagacgtgttctctatcacaggtcgtggtactgtagctacaggtcgtatcgaaactggtgttatccatgtaggtgatgaaatcgaaatcctcggtttgggtgaagataagaaatcagttgtaacaggtgttgaaatgttccgcaaacttctggatcagggtgaagctggtgacaacgtaggtctgttgcttcgtggtgttgacaagaacgaaatcaaacgtggtatggttctttgtaaaccgggtcagattaaacctcactctaaattcaaagcagaggtttatatcctgaagaaagaagaaggtggtcgtcacactccattccataacaaatatcgtcctcagttctatctgcgtactatggactgtacaggtgaaatcactcttccggaaggaactgaaatggtaatgccgggtgataacgtaactatcactgtagagttgatctatccggttgcactgaacatcggtcttcgtttcgctatccgcgaaggtggacgtacagtaggtgctggtcagattactgaaattatcgactaa

SEQ ID NO: 130001 - protein, 394 aa, Bacteroides fragilis; identical to SEQ ID NO: 27646

SEQ ID NO: 130002 - DNA, 1191 bp, Bacillus subtilis; identical to SEQ ID NO: 27649
  CDS (1)..(1191): transl_table=11

SEQ ID NO: 130003 - protein, 396 aa, Bacillus subtilis; identical to SEQ ID NO: 27650

SEQ ID NO: 130004 - DNA, 1176 bp, Brucella melitensis
  CDS (1)..(1176): transl_table=11
atggcaaagagtaagtttgaacgtacgaagccccacgttaacatcggcacgattggtcacgttgaccatggcaagacgtcgctgacggcggcgatcacgaagtttttcggcgaattcaaggcgtatgaccagatcgacgccgcgcctgaagaacgcgcccgcggcatcacgatctcgacggcccacgtcgagtacgagaccgcaaaccgtcactatgcacacgtcgattgccccggccacgccgactatgtgaagaacatgatcaccggcgctgcccagatggatggcgcgatcctggtggtttcggctgctgacggcccgatgccgcagacccgcgagcacatcctgcttgcccgtcaggttggcgttccggcgatcgtcgtgttcctcaacaagtgcgaccaggttgacgatgcagaactgctcgaactggttgaactggaagtgcgcgaacttctgtcgaagtacgaattccccggcgacgaaatcccgatcatcaagggctcggctcttgctgctctggaagattcttccaaggaactgggcgaagatgccatccgcaacctgatggacgcggttgacagctacattccgaccccggaacgcccgatcgaccagccgttcctgatgccgatcgaagacgtgttctcgatctccggccgtggtacggttgtgacgggtcgcgttgagcgcggtatcgttaaggtcggtgaagaagttgaaatcgtcggcatcaaggcgacgacgaagaccacggttaccggcgttgaaatgttccgcaagctgctcgaccagggccaggctggcgacaacattggcgcgctgatccgcggcgttggccgtgaagacgttgaacgcggccaggttctctgcaagccgggttctgtgaagccgcacaccaagtttaaggcagaagcctatattctgaccaaggacgaaggtggccgtcatacgccgttcttcaccaactaccgtccgcagttctacttccgtacgacggacgtgacgggtgttgtgacgcttccggctggcacggaaatggtcatgcctggcgataacgtcgccatggacgttaccctgatcgtgccgatcgccatggaagagaagcttcgcttcgctatccgtgaaggcggccgcaccgtcggtgccggcatcgtctcgtcgatcatcgagtaa

SEQ ID NO: 130005 - protein, 391 aa, Brucella melitensis
MAKSKFERTKPHVNIGTIGHVDHGKTSLTAAITKFFGEFKAYDQIDAAPEERARGITISTAHVEYETANRHYAHVDCPGHADYVKNMITGAAQMDGAILVVSAADGPMPQTREHILLARQVGVPAIVVFLNKCDQVDDAELLELVELEVRELLSKYEFPGDEIPIIKGSALAALEDSSKELGEDAIRNLMDAVDSYIPTPERPIDQPFLMPIEDVFSISGRGTVVTGRVERGIVKVGEEVEIVGIKATTKTTVTGVEMFRKLLDQGQAGDNIGALIRGVGREDVERGQVLCKPGSVKPHTKFKAEAYILTKDEGGRHTPFFTNYRPQFYFRTTDVTGVVTLPAGTEMVMPGDNVAMDVTLIVPIAMEEKLRFAIREGGRTVGAGIVSSIIE

SEQ ID NO: 130006 - DNA, 1191 bp, Caulobacter crescentus
  CDS (1)..(1191): transl_table=11
atggccaaggaaaagttcgaacgtactaagccgcactgcaacatcggcaccattggtcacgttgaccatggcaagacgacgctgaccgccgcgatcacgatgacgctggcgaagtcgggcggcgcgacggccaagaagtacgacgaaatcgacgcggcgccggaagaaaaggcccgcggcatcacgatcaacaccgcgcacgtggaatatgagacggccaaccgtcactacgcccacgtcgactgccccggccacgccgactacgtgaagaacatgatcacgggcgcggcgcagatggacggcgcgatcctggtggtttcggccgctgacggcccgatgccgcagacccgcgagcacatcctgctggcccgtcaggtcggcgtgccggctctggtcgtgttcatgaacaaggtcgacatggtcgacgacgaagagctgctggagctcgtcgaaatggaagtgcgcgagctgctgagcagctaccagttcccgggcgacgacattccgatcaccaagggttcggctctggccgccgttgaaggtcgtgacccgcaaatcggcgaagagaagatcctcgagctgatggcttcggtcgacgcctacatcccgcagccggaacgccccgtggacatgccgttcctgatgccggtcgaagacgtgttctcgatctcgggtcgcggtacggtcgtcaccggtcgcgtcgagcgcggcatcgtgaaggtcggtgaagaagtcgaaatcgtcggcatccgtccggttcagaagacgacctgcacgggcgttgaaatgttccgcaagctgctggaccaaggtcaagccggcgacaacgtgggcgtgctgctgcgcggcaccaagcgtgaagacgtcgagcgcggccaggtgctgtgcaagccgggttcgatcaccccgcacaccaagttcgtggccgaagcctacatcctgaccaaggaagaaggcggccgtcacaccccgttcttcaccaactaccgtccgcagttctacttccgcacgacggacgtgacgggcatcatcaagctgcgcgaaggcgtggaaatgatcatgccgggcgacaacgccgagctggacgtcgagctgatcaccccgatcgccatggaagagaagctgcgcttcgccatccgtgaaggcggccgcaccgtcggcgccggcgtggttgcgaagatcgttgaataa

SEQ ID NO: 130007 - protein, 396 aa, Caulobacter crescentus
MAKEKFERTKPHCNIGTIGHVDHGKTTLTAAITMTLAKSGGATAKKYDEIDAAPEEKARGITINTAHVEYETANRHYAHVDCPGHADYVKNMITGAAQMDGAILVVSAADGPMPQTREHILLARQVGVPALVVFMNKVDMVDDEELLELVEMEVRELLSSYQFPGDDIPITKGSALAAVEGRDPQIGEEKILELMASVDAYIPQPERPVDMPFLMPVEDVFSISGRGTVVTGRVERGIVKVGEEVEIVGIRPVQKTTCTGVEMFRKLLDQGQAGDNVGVLLRGTKREDVERGQVLCKPGSITPHTKFVAEAYILTKEEGGRHTPFFTNYRPQFYFRTTDVTGIIKLREGVEMIMPGDNAELDVELITPIAMEEKLRFAIREGGRTVGAGVVAKIVE

SEQ ID NO: 130008 - DNA, 1260 bp, Chara vulgaris; identical to SEQ ID NO: 27661
  CDS (1)..(1260)

SEQ ID NO: 130009 - protein, 419 aa, Chara vulgaris; identical to SEQ ID NO: 27662

SEQ ID NO: 130010 - DNA, 1257 bp, Chlamydomonas reinhardtii; identical to SEQ ID NO: 27663
  CDS (1)..(1257)

SEQ ID NO: 130011 - protein, 418 aa, Chlamydomonas reinhardtii; identical to SEQ ID NO: 27664

SEQ ID NO: 130012 - DNA, 1182 bp, Chlorobium tepidum; identical to SEQ ID NO: 27665
  CDS (1)..(1182): transl_table=11

SEQ ID NO: 130013 - protein, 393 aa, Chlorobium tepidum; identical to SEQ ID NO: 27666

SEQ ID NO: 130014 - DNA, 1182 bp, Chlorobium vibrioforme
  CDS (1)..(1182): transl_table=11
atggctaaagagtcatacaagagggataaacctcacgtaaatattggtactatcggtcacgttgaccacggcaaaaccacccttaccgcagcaatcacctcggtgcttgctaaatctggtaaagcagcagctcgtgagtttggtgacatcgataaggctccggaagagagggagcgcggtattaccatctcgaccgcacacgtcgagtaccagaccgacaagcgtcactatgcacacatcgactgccccggtcacgctgactacattaaaaacatgatcaccggtgctgcccagatggacggcgctatcctcgtcgttgccggtaccgacggcccgatgcctcagactcgtgagcacatcctgctcgcccgccaggtgaacgttcctgcgctggtcgtcttcctgaacaaggttgacatcgccgacccggaacttctcgagctggtcgaaatggaactccgtgagcttctcaccgagtacggtttcccgggcgacgatattccgatcatcaagggttccgctctgaacgccctgaacggcgatccggaaggcgagaaagccatcatggagctcatggacgctgttgacgactacattcctgagccggttcgtgacgttgacaagccgttcctgatgccggtcgaagacgtgttctcgatctctggtcgtggtactgtcggtaccggtcgtatcgagaggggcatcatcaaggttggtaacgaagtcgaaatcgtcggtatcaagccgaccaccaaatcggttgttaccggtatcgaaatgttccagaagaccctcgacgaaggtcaggcaggtgacaacgccggcttgctcctccgcggtgtggacaaagaggcgctcgagcgtggtatggttatcgccaagcctggttcgatcaccccgcacaccaagttcaaggctgaggtgtacatcctgaagaaggaagagggcggtcgtcatactccgttcttcaacggctatcgtccgcagttctatttcagaaccactgacgtgaccggttcggtaactctccctgagggtgtcgagatggtcatgcctggtgacaacctctccgtcgatgtcgagctgatcgctcctatcgctatggaagagagcctcaggttcgctatccgcgagggcggccgtacggttggtgccggttcggtaaccaagatcgtcgagtaa

SEQ ID NO: 130015 - protein, 393 aa, Chlorobium vibrioforme
MAKESYKRDKPHVNIGTIGHVDHGKTTLTAAITSVLAKSGKAAAREFGDIDKAPEERERGITISTAHVEYQTDKRHYAHIDCPGHADYIKNMITGAAQMDGAILVVAGTDGPMPQTREHILLARQVNVPALVVFLNKVDIADPELLELVEMELRELLTEYGFPGDDIPIIKGSALNALNGDPEGEKAIMELMDAVDDYIPEPVRDVDKPFLMPVEDVFSISGRGTVGTGRIERGIIKVGNEVEIVGIKPTTKSVVTGIEMFQKTLDEGQAGDNAGLLLRGVDKEALERGMVIAKPGSITPHTKFKAEVYILKKEEGGRHTPFFNGYRPQFYFRTTDVTGSVTLPEGVEMVMPGDNLSVDVELIAPIAMEESLRFAIREGGRTVGAGSVTKIVE

SEQ ID NO: 130016 - DNA, 1230 bp, Chlorella vulgaris; identical to SEQ ID NO: 27667
  CDS (1)..(1230)

SEQ ID NO: 130017 - protein, 409 aa, Chlorella vulgaris; identical to SEQ ID NO: 27668

SEQ ID NO: 130018 - DNA, 1233 bp, Codium fragile; identical to SEQ ID NO: 27671
  CDS (1)..(1233)

SEQ ID NO: 130019 - protein, 410 aa, Codium fragile; identical to SEQ ID NO: 27672

SEQ ID NO: 130020 - DNA, 1188 bp, Cytophaga lytica
  CDS (1)..(1188): transl_table=11
atggcaaaggaaacttttgatcgttccaaaccgcacttaaatataggtactattggacacgtagatcacggtaaaactactttaactgctgctattacaacagtattggcaaatgcaggtctttctgaattaagaagtttcgattctatcgataacgctccagaagaaaaagaaagaggtataacaattaatacttctcacgtagagtattcaactgcaaaccgtcactatgcacacgtagattgtccaggtcacgcggattacgttaagaacatggtaactggtgctgctcagatggatggtgctattttggtagttgctgcaactgatggtccaatgcctcaaacacgtgagcacatcttattaggtcgtcaggtaggtattccaagaatcgttgttttcttaaacaaggttgatatggttgatgatgaagagcttttagagcttgttgaaatggaagttagagaattactttctttttacgagtatgatggtgataatggtcctgttgtttctggttctgctttaggtgcacttaatggtgagcaaaaatgggtagatacagtaatggaattgatggaggctgttgataactggatcgaattaccaaagcgtgatgtagataaggatttcttaatgcctgtagaggatgtatttacaattacaggtcgtggaacagttgcaactggtcgtattgaaactggtgttgctaatacaggtgatgctgttgatatcattggtatgggtgctgataaattagcttctactattactggtgttgaaatgttccgtaagatattagatagaggtgaagctggtgataacgtaggtatcttattaagaggtattgaaaagtctcaaatcagtagaggtatggtaatctgtaagccaggttctgttaagccacactctaagtttgaagctgaggtttatatcttgaaaaaagaagaaggtggtcgtcacacaccattccataataactaccgtccacagttttacgtaagaacaacggatgtaacaggaactattagtcttccttcaggagttgaaatggttatgcctggtgataacttaactattacagtagaattattatctcctattgcacttagtgaaggtttacgttttgcaatccgtgagggtggtagaacagtaggtgctggtcaggtaactaagatcatagaatag

SEQ ID NO: 130021 - protein, 395 aa, Cytophaga lytica
MAKETFDRSKPHLNIGTIGHVDHGKTTLTAAITTVLANAGLSELRSFDSIDNAPEEKERGITINTSHVEYSTANRHYAHVDCPGHADYVKNMVTGAAQMDGAILVVAATDGPMPQTREHILLGRQVGIPRIVVFLNKVDMVDDEELLELVEMEVRELLSFYEYDGDNGPVVSGSALGALNGEQKWVDTVMELMEAVDNWIELPKRDVDKDFLMPVEDVFTITGRGTVATGRIETGVANTGDAVDIIGMGADKLASTITGVEMFRKILDRGEAGDNVGILLRGIEKSQISRGMVICKPGSVKPHSKFEAEVYILKKEEGGRHTPFHNNYRPQFYVRTTDVTGTISLPSGVEMVMPGDNLTITVELLSPIALSEGLRFAIREGGRTVGAGQVTKIIE

SEQ ID NO: 130022 - DNA, 1218 bp, Deinococcus radiodurans
  CDS (1)..(1218): transl_table=11
atggcaaaaggaacgttcgagcgcaccaagccccacgtgaacatcggcaccatcggtcacgtcgaccacggcaagaccaccctcaccgccgccatcaccttcaccgccgcttcggctgaccccaccatcgaaaccctggcctacgaccagatcgacaaggcccccgaagaaaaggcccgtggcatcaccatcaacaccgcccacgtcgagtaccagaccgaaacccggcactactcgcacgtcgactgccccggccacgccgactacgtcaagaacatgatcaccggcgcggcgcagatggacggcgccatcctcgtcgtcagctccgctgacggccccatgccccagacccgcgagcacatcctcctcgcccgtcaggtcggcgtgccctacatcgtcgtcttcatgaacaaggtcgacatggtagacgacgaagaactgctggaactggtcgaaatggaagtccgcgaactcctcagcaagtacgagttccccggcgacgacctccccgtcgtcaagggcagcgctctgcgcgccctcgaagccctgcagtccaaccccaagatggcccgcggcaccgacaagtgggtcgactacatctgggaactgctcgacgcggtcgattcctacatccccacccccgagcgcgacaccgacaagaccttcctgatgcctgtcgaagacgtgttcaccatcaccggtcgcggcaccgtcgccacgggccgcgtggaacgcggcaccgtcaaggtccaggacgaagtcgaaatcgtcggcctgaccgacacccgcaagaccaccgtgaccggcatcgaaatgcaccgcaagctgctcgactccgggatggctggtgacaacgtcggcgtgctgctgcgcggcgtcgcgcgcgacgacgtggaacgtggtcaggtgctcgccaagcccggcagcatcaagccccacaccaagttcgaagccagcgtgtacgtgctgagcaaggacgaagggggccgtcacagcgcgttcttcggtggctaccgcccccagttctacttccgcacgacggacgtgacgggcgtggtggaactgcaagaaggcgtggaaatggtgatgcccggtgacaacgtgaccttcacggtggaactgatcaagccgatcgccatggaagaaggcctgcgcttcgccatccgtgaagggggccgcaccgtcggcgccggcgtcgtttccaaagttctggagtaa

SEQ ID NO: 130023 - protein, 405 aa, Deinococcus radiodurans; identical to SEQ ID NO: 27678

SEQ ID NO: 130024 - DNA, 1188 bp, Flavobacterium ferrugineum; identical to SEQ ID NO: 27681
  CDS (1)..(1188): transl_table=11

SEQ ID NO: 130025 - protein, 395 aa, Flavobacterium ferrugineum; identical to SEQ ID NO: 27682

SEQ ID NO: 130026 - DNA, 1230 bp, Gloeobacter violaceus; identical to SEQ ID NO: 27683
  CDS (1)..(1230): transl_table=11

SEQ ID NO: 130027 - protein, 409 aa, Gloeobacter violaceus; identical to SEQ ID NO: 27684

SEQ ID NO: 130028 - DNA, 1185 bp, Haemophilus ducreyi; identical to SEQ ID NO: 27685
  CDS (1)..(1185): transl_table=11

SEQ ID NO: 130029 - protein, 394 aa, Haemophilus ducreyi; identical to SEQ ID NO: 27686

SEQ ID NO: 130030 - DNA, 1188 bp, Lactobacillus plantarum; identical to SEQ ID NO: 27691
  CDS (1)..(1188): transl_table=11

SEQ ID NO: 130031 - protein, 395 aa, Lactobacillus plantarum [sequence omitted]

SEQ ID NO: 130032 - DNA, 1233 bp, Mesostigma viride; identical to SEQ ID NO: 27695
  CDS (1)..(1233)

SEQ ID NO: 130033 - protein, 410 aa, Mesostigma viride; identical to SEQ ID NO: 27696

SEQ ID NO: 130034 - DNA, 1620 bp, Mycoplasma hominis
  CDS (321)..(1514): transl_table=4
aagcttatattgttcgatttttagcgagagtaatcttattttaaaaaatatttctttcaaaatagtaaacaaaaatgtttgctattttttaatatttttgtttaaaatatataagtacataaatatcactattttatggccaaaattaaatcatttacattaaaaaaatattttttttgttaaaattacattgctataaatgcgcgcttttggacaggacatagttgaaaggctatgctaaggtaggttaaacgcgtttaatcaaaagatttaataaatattaaaaaaattaaaatgtaatttattgaaaggaaattattatggcaaaattagattttgaccgttcaaaaccacacgttaatattggtactatcggtcacgttgaccacggtaaaactacattaactgctgctattgcaacagtattggctaaaaaaggtctagcagaagctagagactacgcttctattgacaatgcaccagaagaaaaagcacgtggtattacaattaacacatcacacattgaatatcaaacagaaaaacgtcactacgcacacgttgactgtccaggacacgccgactatgttaaaaacatgattaccggtgctgcccaaatggatggagcaattttagttgttgctgctactgatggtcctatgcctcaaactcgtgaacacattttacttgcaagacaagttggtgttccaaagatagttgtatttttaaacaaaattgatatgtttaaagatgatgaaagagaagaaatggttggactagtagaaatggacgtaagaagccttctatcagaatatggttttgatggtgacaatgctcctattattgctggttcagctcttaaagcattacaaggagatccagaatacgaaaaaggtattttggaattaatggatgctgttgatacatacatcgaagaaccaaaacgtgaaacagacaaaccattcttaatggctgtagaagacgtatttacaatcactggtcgtggaactgttgcaactggtagagttgaacgtggtgttttacaattaaacgaagaagttgaaattgttggattaaaaccaaccaagaaaacagttgttactggtattgaaatgttccgtaagaacttaaaagaagcacaagccggagataacgctggattattgctacgtggaattgacagaagcgaagttgaacgtggacaagttttagcaaagcctaagacaatcgttcctcacacacaattcgaagcaactgtttatgttcttaaaaaagaagaaggtggacgtcacacaccattcttccacaactataaaccacaattctacttccgtacaacagacgttactggtggaattgaattcaaacctggacgtgaaatggttgttcctggcgacaacgtagaattaactgttactttaattgctcctattgctattgaagaaggaaccaagttctctattcgtgaaggtggaagaactgttggtgccggatcagttacaaaaattcttaaataattatcaaaattattaaaagaaattttgaattacaaaattggatttgtataaagcaagtccaatttttttatattttatttagtatgtttaaattgtaaatattgcc

SEQ ID NO: 130035 - protein, 397 aa, Mycoplasma hominis
MAKLDFDRSKPHVNIGTIGHVDHGKTTLTAAIATVLAKKGLAEARDYASIDNAPEEKARGITINTSHIEYQTEKRHYAHVDCPGHADYVKNMITGAAQMDGAILVVAATDGPMPQTREHILLARQVGVPKIVVFLNKIDMFKDDEREEMVGLVEMDVRSLLSEYGFDGDNAPIIAGSALKALQGDPEYEKGILELMDAVDTYIEEPKRETDKPFLMAVEDVFTITGRGTVATGRVERGVLQLNEEVEIVGLKPTKKTVVTGIEMFRKNLKEAQAGDNAGLLLRGIDRSEVERGQVLAKPKTIVPHTQFEATVYVLKKEEGGRHTPFFHNYKPQFYFRTTDVTGGIEFKPGREMVVPGDNVELTVTLIAPIAIEEGTKFSIREGGRTVGAGSVTKILK

SEQ ID NO: 130036 - DNA, 1233 bp, Nephroselmis olivacea; identical to SEQ ID NO: 27703
  CDS (1)..(1233)

SEQ ID NO: 130037 - protein, 410 aa, Nephroselmis olivacea; identical to SEQ ID NO: 27704

SEQ ID NO: 130038 - DNA, 1233 bp, Oltmannsiellopsis viridis; identical to SEQ ID NO: 27705
  CDS (1)..(1233)

SEQ ID NO: 130039 - protein, 410 aa, Oltmannsiellopsis viridis; identical to SEQ ID NO: 27706

SEQ ID NO: 130040 - DNA, 1230 bp, Ostreococcus tauri; identical to SEQ ID NO: 27707
  CDS (1)..(1230)

SEQ ID NO: 130041 - protein, 409 aa, Ostreococcus tauri; identical to SEQ ID NO: 27708

SEQ ID NO: 130042 - DNA, 1467 bp, Pisum sativum; identical to SEQ ID NO: 27709
  CDS (1)..(1467)
  misc_feature (934)..(934): n is a, g, c or t
  misc_feature (935)..(935): n is a, g, c or t

SEQ ID NO: 130043 - protein, 488 aa, Pisum sativum; identical to SEQ ID NO: 27710
  misc_feature (312)..(312): The Xaa at location 312 stands for Ala, Arg, Asn, Asp, Cys, Gly, His, Ile, Leu, Phe, Pro, Ser, Thr, Tyr, or Val.

SEQ ID NO: 130044 - DNA, 1230 bp, Phaeodactylum tricornutum; identical to SEQ ID NO: 27711
  CDS (1)..(1230)

SEQ ID NO: 130045 - protein, 409 aa, Phaeodactylum tricornutum; identical to SEQ ID NO: 27712

SEQ ID NO: 130046 - DNA, 1230 bp, Prototheca wickerhamii; identical to SEQ ID NO: 27713
  CDS (1)..(1230)

SEQ ID NO: 130047 - protein, 409 aa, Prototheca wickerhamii; identical to SEQ ID NO: 27714

SEQ ID NO: 130048 - DNA, 1194 bp, Pseudomonas aeruginosa
  CDS (1)..(1194): transl_table=11
atggctaaagaaaaatttgaacggaacaagccgcacgtcaacgtcggcaccatcggtcacgttgaccatggcaagaccactctgaccgctgcactgaccaaggtctgctccgacacctggggtggttccgctcgtgctttcgatcagatcgacaacgcgccggaagaaaaggcccgcggtatcaccatcaatacttcgcacgttgaatacgattccgctgttcgtcactacgcccacgttgactgccccggtcacgccgactacgtgaagaacatgatcaccggtgctgcccagatggacggcgcgatcctggtttgctcggctgccgacggccccatgccgcagacccgcgagcacatcctgctgtcccgccaggtaggcgttccctacatcgtcgtgttcctgaacaaggccgacatggtcgacgatgccgagctgctggaactggtcgagatggaagttcgcgatctgctgaacacctacgacttcccgggcgacgacactccgatcatcatcggttccgcgctgatggcgctggaaggcaaggatgacaacggcatcggcgtaagcgccgtgcagaagctagtagagaccctggactcctacattccggagccggttcgtgccatcgaccagccgttcctgatgccgatcgaagacgtgttctcgatctccggccgcggtaccgtggtaactggtcgtgtagagcgcggcatcatcaaggtccaggaagaagtggaaatcgtcggcatcaaggcgaccaccaagaccacctgcaccggcgttgaaatgttccgcaagctgctcgacgaaggtcgtgctggtgagaacgttggtatcctgctgcgcggcaccaagcgtgaagatgtagagcgtggccaggttctggccaagccgggcaccatcaagccgcacaccaagttcgagtgcgaagtgtacgtgctgtccaaggaagaaggtggtcgtcacaccccgttcttcaagggctaccgtccgcagttctacttccgtaccaccgacgtgaccggtaactgcgaactgccggaaggcgtagagatggtaatgccgggcgacaacatcaagatggttgtcaccctgatcgctccgatcgccatggaagatggcctgcgcttcgcgatccgcgaaggcggccgtaccgttggcgccggcgtggttgccaagatcatcgaataa

SEQ ID NO: 130049 - protein, 397 aa, Pseudomonas aeruginosa; identical to SEQ ID NO: 27716

SEQ ID NO: 130050 - DNA, 1230 bp, Pseudendoclonium akinetum; identical to SEQ ID NO: 27717
  CDS (1)..(1230)

SEQ ID NO: 130051 - protein, 409 aa, Pseudendoclonium akinetum; identical to SEQ ID NO: 27718

SEQ ID NO: 130052 - DNA, 1191 bp, Ralstonia solanacearum
  CDS (1)..(1191): transl_table=11
atggcaaaggaaaagttcgagcggaccaagccgcacgtgaacgttgggacgatcggtcacgttgaccacggcaagacgacgctgacggcagcaatcgcgacggtgctgtcgagcaagttcggtggcgaagcgaagaagtacgacgaaatcgacgcagcaccggaagaaaaggcacgcggcatcacgatcaacaccgcgcacatcgagtacgaaacggccaaccgccactacgcacacgtcgactgcccgggccacgccgactacgtcaagaacatgatcaccggtgccgcccagatggacggcgccatcctggtgtgctcggccgctgacggcccgatgccgcaaacgcgtgagcacatcctgctggcccgccaggtcggcgtgccgtacatcatcgtcttcctgaacaagtgcgacatggtggacgacgctgagctgctggaactggtcgaaatggaagtgcgcgagctgctctccaagtacgacttcccgggcgacgacaccccgatcatcaagggttcggccaagctggcgctggaaggcgacaagggcgagctgggcgaagtggccatcatgaacctggccgacgcactggactcgtacatcccgacgccggagcgcgctgttgacggcacgttcctgatgccggtggaagacgtgttctcgatctcgggtcgcggcaccgtggtgaccggccgtatcgagcgcggcatcatcaaggtcggcgaagaaatcgaaatcgtcggcatcaaggccacgcagaagaccacctgcaccggcgtggaaatgttccgcaagctgctggaccaaggtcaggctggcgacaacgtcggtatcctgctgcgcggcaccaagcgcgaagacgtcgagcgcggccaagtgctgtgcaagccgggttcgatcaagccgcacacgcacttcaccggcgaggtctacatcctgtcgaaggacgaaggtggtcgtcacaccccgttcttcaacaactatcgcccgcagttctatttccgcacgaccgacgtgaccggctcgatcgagctgccgaaggacaaggaaatggtcatgcccggcgacaacgtgtcgatcaccgtcaagctgatcgccccgatcgccatggaagaaggcctgcgcttcgccatccgtgaaggcggtcgtaccgtcggcgccggcgtcgtcgccaagatcatcgagtaa

SEQ ID NO: 130053 - protein, 396 aa, Ralstonia solanacearum
MAKEKFERTKPHVNVGTIGHVDHGKTTLTAAIATVLSSKFGGEAKKYDEIDAAPEEKARGITINTAHIEYETANRHYAHVDCPGHADYVKNMITGAAQMDGAILVCSAADGPMPQTREHILLARQVGVPYIIVFLNKCDMVDDAELLELVEMEVRELLSKYDFPGDDTPIIKGSAKLALEGDKGELGEVAIMNLADALDSYIPTPERAVDGTFLMPVEDVFSISGRGTVVTGRIERGIIKVGEEIEIVGIKATQKTTCTGVEMFRKLLDQGQAGDNVGILLRGTKREDVERGQVLCKPGSIKPHTHFTGEVYILSKDEGGRHTPFFNNYRPQFYFRTTDVTGSIELPKDKEMVMPGDNVSITVKLIAPIAMEEGLRFAIREGGRTVGAGVVAKIIE

SEQ ID NO: 130054 - DNA, 1176 bp, Rhizobium meliloti; identical to SEQ ID NO: 27721
  CDS (1)..(1176): transl_table=11

SEQ ID NO: 130055 - protein, 391 aa, Rhizobium meliloti; identical to SEQ ID NO: 27722

SEQ ID NO: 130056 - DNA, 1185 bp, Rickettsia conorii
  CDS (1)..(1185): transl_table=11
atggcaaaagcaaaatttgaacgaactaaaccgcacgttaatataggtacgatcggtcacgtagatcacggtaaaacttccttaacggcagcaataactatagtacttgctaagacaggtggagcacaagctacagcgtatgatcaaattgatgctgctcctgaagaaaaagaaagaggtataactatttctactgcacacgtagaatatgagactcaaaatagacactatgcacacgtagattgtccgggacacgctgactatgtaaagaacatgataaccggtgccgctcagatggacggtgcaatattagtagtttctgctgctgatggtcctatgccgcaaactagagaacatatattactagcaaaacaggtaggtgtgcctgctatggtagtgttcttaaataaaatagatatggtggatgatcctgatctattagaactagtagagatggaagtaagagaattattatcaaaatatggtttcccgggtgatgaaatacctattattaaaggttctgcacttcaagctttagaaggaaagcctgaaggtgaaaaagctattaatgagctaatggatgcagtagatagctatataccgcagcctgtaagagctacggataaacctttcttaatgccaatagaagatgtattctctatttcaggaagaggcactgttgtaactggtagagtagagtcaggaataattaaggtaggtgaggaaattgaaatagttggtctaaaagatacgcaaaaaactacctgtaccggtgtagaaatgttcaggaaattacttgatgaaggacaagccggagataatgttggtatattactacgcggtacaaaaagagaagaagttgaaagaggacaagttctcgcaaaacctggtagcataaaaccgcatgataagtttgaagctgaagtatatgtgcttagtaaagaagaaggtggacgtcataccccatttactaatgactatcgtccgcagttctattttagaacaacagatgttaccggtacaataaaattgtctgctgataagcagatggttatgcctggagataatgctacttttacagtggaattaattaaaccgattgcgatgcaggaagggttgaaattctctatacgtgaaggtggtagaacagtgggtgccggcgtagtaactaaaataaataattaa

SEQ ID NO: 130057 - protein, 394 aa, Rickettsia conorii
MAKAKFERTKPHVNIGTIGHVDHGKTSLTAAITIVLAKTGGAQATAYDQIDAAPEEKERGITISTAHVEYETQNRHYAHVDCPGHADYVKNMITGAAQMDGAILVVSAADGPMPQTREHILLAKQVGVPAMVVFLNKIDMVDDPDLLELVEMEVRELLSKYGFPGDEIPIIKGSALQALEGKPEGEKAINELMDAVDSYIPQPVRATDKPFLMPIEDVFSISGRGTVVTGRVESGIIKVGEEIEIVGLKDTQKTTCTGVEMFRKLLDEGQAGDNVGILLRGTKREEVERGQVLAKPGSIKPHDKFEAEVYVLSKEEGGRHTPFTNDYRPQFYFRTTDVTGTIKLSADKQMVMPGDNATFTVELIKPIAMQEGLKFSIREGGRTVGAGVVTKINN

SEQ ID NO: 130058 - DNA, 1260 bp, Scenedesmus obliquus; identical to SEQ ID NO: 27725
  CDS (1)..(1260)

SEQ ID NO: 130059 - protein, 419 aa, Scenedesmus obliquus; identical to SEQ ID NO: 27726

SEQ ID NO: 130060 - DNA, 1320 bp, Schizosaccharomyces pombe; identical to SEQ ID NO: 27727
  CDS (1)..(1320)

SEQ ID NO: 130061 - protein, 439 aa, Schizosaccharomyces pombe; identical to SEQ ID NO: 27728

SEQ ID NO: 130062 - DNA, 1185 bp, Shigella flexneri
  CDS (1)..(1185): transl_table=11
atgtctaaagaaaagtttgaacgtacaaaaccgcacgttaacgtcggtactatcggccacgttgaccatggtaaaacaacgctgaccgctgcaatcactaccgtactggctaaaacctacggcggtgctgctcgcgcattcgaccagatcgataacgcgccggaagaaaaagctcgtggtatcaccatcaacacttctcacgttgaatacgacaccccgacccgtcactacgcacacgtagactgcccggggcacgccgactatgttaaaaacatgatcaccggtgctgctcagatggacggcgcgatcctggtagttgctgcgactgacggcccgatgccgcagactcgtgagcacatcctgctgggtcgtcaggtaggcgttccgtacatcatcgtgttcctgaacaaatgcgacatggttgatgacgaagagctgctggaactggttgaaatggaagttcgtgaacttctgtctcagtacgacttcccgggcgacgacactccgatcgttcgtggttctgctctgaaagcgctggaaggcgacgcagagtgggaagcgaaaatcctggaactggctggcttcctggattcttatattccggaaccagagcgtgcgattgacaagccgttcctgctgccgatcgaagacgtattctccatctccggtcgtggtaccgttgttaccggtcgtgtagaacgcggtatcatcaaagttggtgaagaagttgaaatcgttggtatcaaagagactcagaagtctacctgtactggcgttgaaatgttccgcaaactgctggacgaaggccgtgctggtgagaacgtaggtgttctgctgcgtggtatcaaacgtgaagaaatcgaacgtggtcaggtactggctaagccgggcaccatcaagccgcacaccaagttcgaatctgaagtgtacattctgtccaaagatgaaggcggccgtcatactccgttcttcaaaggctaccgtccgcagttctacttccgtactactgacgtgactggtaccatcgaactgccggaaggcgtagagatggtaatgccgggcgacaacatcaaaatggttgttaccctgatccacccgatcgcgatggacgacggtctgcgtttcgcaatccgtgaaggcggccgtaccgttggcgcgggcgttgttgctaaagttctgggctaa

SEQ ID NO: 130063 - protein, 394 aa, Shigella flexneri [sequence omitted]

SEQ ID NO: 130064 - DNA, 1185 bp, Staphylococcus epidermidis
  CDS (1)..(1185): transl_table=11
atggcaaaagaaaaatttgatcgctcaaaagaacatgccaatattggtactatcggtcacgttgaccatggtaaaacaactttaacagctgctatcgcaactgtattagctaaaaatggtgacactgttgcacaatcatacgatatgattgacaacgctccagaagaaaaagaacgtggtattacaatcaatactgcacatatcgaataccaaactgacaaacgtcactatgctcacgttgactgcccaggacacgctgactatgttaaaaacatgatcactggtgcagctcaaatggacggcggtatcttagttgtatctgctgctgacggtccaatgccacaaactcgtgaacacatcttattatcacgtaacgttggtgtaccagcattagttgtattcttaaacaaagttgacatggtagacgacgaagaattattagaattagttgaaatggaagttcgtgacttattaagcgaatatgacttcccaggtgacgatgtacctgtaatcgctggttctgcattaaaagcattagaaggcgatgctgaatacgaacaaaaaatcttagacttaatgcaagcagttgatgattacattccaactccagaacgtgattctgacaaaccattcatgatgccagttgaggacgtattctcaatcactggtcgtggtactgttgctacaggccgtgttgaacgtggtcaaatcaaagttggtgaagaagttgaaatcatcggtatgcacgaaacttctaaaacaactgttactggtgtagaaatgttccgtaaattattagactacgctgaagctggtgacaacatcggtgctttattacgtggtgttgcacgtgaagacgtacaacgtggtcaagtattagctgctcctggttctattacaccacacacaaaattcaaagctgaagtatacgtattatctaaagatgaaggtggacgtcacactccattcttcactaactatcgcccacaattctatttccgtactactgacgtaactggtgttgtaaacttaccagaaggtacagaaatggttatgcctggcgacaacgttgaaatgacagttgaattaatcgctccaatcgctatcgaagacggaactcgtttctcaattcgtgaaggtggacgtactgttggatcaggcgttgtaactgaaatctttgaataa

SEQ ID NO: 130065 - protein, 394 aa, Staphylococcus epidermidis
MAKEKFDRSKEHANIGTIGHVDHGKTTLTAAIATVLAKNGDTVAQSYDMIDNAPEEKERGITINTAHIEYQTDKRHYAHVDCPGHADYVKNMITGAAQMDGGILVVSAADGPMPQTREHILLSRNVGVPALVVFLNKVDMVDDEELLELVEMEVRDLLSEYDFPGDDVPVIAGSALKALEGDAEYEQKILDLMQAVDDYIPTPERDSDKPFMMPVEDVFSITGRGTVATGRVERGQIKVGEEVEIIGMHETSKTTVTGVEMFRKLLDYAEAGDNIGALLRGVAREDVQRGQVLAAPGSITPHTKFKAEVYVLSKDEGGRHTPFFTNYRPQFYFRTTDVTGVVNLPEGTEMVMPGDNVEMTVELIAPIAIEDGTRFSIREGGRTVGSGVVTEIFE

SEQ ID NO: 130066 - DNA, 1191 bp, Stigmatella aurantiaca; identical to SEQ ID NO: 27737
  CDS (1)..(1191): transl_table=11

SEQ ID NO: 130067 - protein, 396 aa, Stigmatella aurantiaca; identical to SEQ ID NO: 27738

SEQ ID NO: 130068 - DNA, 1260 bp, Stigeoclonium helveticum; identical to SEQ ID NO: 27739
  CDS (1)..(1260)

SEQ ID NO: 130069 - protein, 419 aa, Stigeoclonium helveticum; identical to SEQ ID NO: 27740

SEQ ID NO: 130070 - DNA, 1188 bp, Taxeobacter ocellatus; identical to SEQ ID NO: 27749
  CDS (1)..(1188): transl_table=11

SEQ ID NO: 130071 - protein, 395 aa, Taxeobacter ocellatus; identical to SEQ ID NO: 27750

SEQ ID NO: 130072 - DNA, 1347 bp, Thermus aquaticus
  CDS (115)..(1335): transl_table=11
cactaccaggaggtccccaggcagatccaggagaagctcatcaaggggcagtaggaaggctttgggggtgggtctcctgggcccaccccacgctttgcggaaaggagagcgaagatggcgaagggcgagtttatccggacgaagccccacgtgaacgtggggacgattgggcacgtggaccacgggaagacgacgttgacggcggccttgacctatgtggcggcggcggagaacccgaatgtggaggtgaaggactacggggacattgacaaggcgccggaggagcgggcgcgggggatcacgattaacacggcgcacgtggagtacgagacggcgaagcggcactattcccacgtggactgcccggggcacgccgactacatcaagaacatgatcaccggggcggcgcagatggacggggcgatcctggtggtttctgcggcggacggtcctatgccgcagacccgggagcacattcttttggcccgccaggtgggggtgccgtacatcgtggtgttcatgaacaaggtggacatggtggacgacccggagctcttggacctggtggagatggaggtgagggacctcctgaaccagtacgagtttcctggggacgaggtgccggtgatccggggtagcgccctgcttgcgttggaagagatgcacaagaacccgaagaccaagcggggcgagaacgagtgggtggacaagatctgggagcttttggacgccattgacgagtacattcccacgccggtgcgggacgtggacaagcctttcctgatgccggtggaggacgtgtttacgattaccgggcgtgggacggtggccaccgggcggattgagcggggcaaggtgaaggttggggacgaggtggagatcgtgggcctggctccggagacgcggaagacggtggtcacgggtgtggagatgcaccggaagacgttgcaggaggggatcgctggggacaacgtgggtcttcttctgcggggcgtgagccgggaggaggtggagcgggggcaggtattggccaagcctgggagcatcacgccgcacaccaagtttgaggcctcggtgtacatcctgaagaaggaggagggcgggcggcacacggggtttttcacggggtaccggccgcagttttacttccggacgacggacgtgacgggggtggtgcggttgccccagggggtggagatggtgatgcctggggacaacgtgaccttcacggtggagctcatcaagccggtggcgctggaggagggtttgcggtttgccatccgggagggtgggcggaccgtgggcgccggcgtggtcaccaagatcctggagtgaggtgaagcatgc

SEQ ID NO: 130073 - protein, 406 aa, Thermus aquaticus
MAKGEFIRTKPHVNVGTIGHVDHGKTTLTAALTYVAAAENPNVEVKDYGDIDKAPEERARGITINTAHVEYETAKRHYSHVDCPGHADYIKNMITGAAQMDGAILVVSAADGPMPQTREHILLARQVGVPYIVVFMNKVDMVDDPELLDLVEMEVRDLLNQYEFPGDEVPVIRGSALLALEEMHKNPKTKRGENEWVDKIWELLDAIDEYIPTPVRDVDKPFLMPVEDVFTITGRGTVATGRIERGKVKVGDEVEIVGLAPETRKTVVTGVEMHRKTLQEGIAGDNVGLLLRGVSREEVERGQVLAKPGSITPHTKFEASVYILKKEEGGRHTGFFTGYRPQFYFRTTDVTGVVRLPQGVEMVMPGDNVTFTVELIKPVALEEGLRFAIREGGRTVGAGVVTKILE

SEQ ID NO: 130074 - DNA, 1191 bp, Thiobacillus cuprinus; identical to SEQ ID NO: 27751
  CDS (1)..(1191): transl_table=11

SEQ ID NO: 130075 - protein, 396 aa, Thiobacillus cuprinus; identical to SEQ ID NO: 27752

SEQ ID NO: 130076 - DNA, 1185 bp, Wigglesworthia glossinidia brevipalpis; identical to SEQ ID NO: 27753
  CDS (1)..(1185): transl_table=11

SEQ ID NO: 130077 - protein, 394 aa, Wigglesworthia glossinidia brevipalpis; identical to SEQ ID NO: 27754

SEQ ID NO: 130078 - DNA, 1200 bp, Wolinella succinogenes; identical to SEQ ID NO: 27755
  CDS (1)..(1200): transl_table=11

SEQ ID NO: 130079 - protein, 399 aa, Wolinella succinogenes; identical to SEQ ID NO: 27756

SEQ ID NO: 130080 - DNA, 1191 bp, Xylella fastidiosa
  CDS (1)..(1191): transl_table=11
atggcccaggataagttcaaacgcactaagttgcacgtaaatgttggtacgattggtcacgttgaccatggcaagactacactgactgcggcgctgaccaaggtgggtgctgagcgttttggtggcgagtttaaggcatacgatgcgattgacgcggcacctgaagagaaggcgcgcgggattactatttctacggcgcacgttgagtatgaaactgaagtccgccactatgcccatgtggactgtcctggtcatgctgattatgtgaaaaacatgattacaggtgcggcgcagatggatggtgcgattttagtatgttctgctgctgatggtccgatgcctcagactcgtgaacacattttgttggctcgccaggtgggtgtgccttacattgttgtgttcttgaataaggctgacatggtggatgatgctgagttgcttgagcttgtggagatggaagttcgcgagttgttgagcaagtatgattttcctggtgatgacactcctattgtgagaggttcggcgttgaaggcgctggagggtgatcagtctgagattggtgtaccggcgattattcgactggcggaagcattggatacccacattccgaatccggagcgtgcgattgatcgtccgtttttgatgcctgtggaagatgtgttttcgatttctggtcgtggcactgtggtgacaggtcgtgttgaatgcggtgtgattaaggtcggcgatgaggtggaaattgttggcattcgtccgacgtcgaagacgattgtgacgggtgttgagatgttccgtaagttattggatcaaggtcaggctggtgacaacgcgggtctgttgttgcgcggtacgaagcgtgatgaagtggagcgtggtcaggtgttggcgaagcctggttcgatcaaggcgcataaagaatttgaggctgaggtgtatgtgctttcgaaagaggagggtggtcgtcacactccgtttttcaatggatacactccgcagttttatatgcgtacaacagacattaccggtaaggtgtgtttacctgagggtgtagagatggtgatgcctggtgataatgtgaaggtgacggtatcgctgattaatcctgtggcgatgggtgagggtcagcgctttgcgatccgtgaaggtgggcggacagtgggtgctggcgtggtttcgaaggttattggttaa

SEQ ID NO: 130081 - protein, 396 aa, Xylella fastidiosa
MAQDKFKRTKLHVNVGTIGHVDHGKTTLTAALTKVGAERFGGEFKAYDAIDAAPEEKARGITISTAHVEYETEVRHYAHVDCPGHADYVKNMITGAAQMDGAILVCSAADGPMPQTREHILLARQVGVPYIVVFLNKADMVDDAELLELVEMEVRELLSKYDFPGDDTPIVRGSALKALEGDQSEIGVPAIIRLAEALDTHIPNPERAIDRPFLMPVEDVFSISGRGTVVTGRVECGVIKVGDEVEIVGIRPTSKTIVTGVEMFRKLLDQGQAGDNAGLLLRGTKRDEVERGQVLAKPGSIKAHKEFEAEVYVLSKEEGGRHTPFFNGYTPQFYMRTTDITGKVCLPEGVEMVMPGDNVKVTVSLINPVAMGEGQRFAIREGGRTVGAGVVSKVIG

SEQ ID NO: 130082 - DNA, 1344 bp, Oryza sativa; identical to SEQ ID NO: 27767
  CDS (1)..(1344)

SEQ ID NO: 130083 - protein, 447 aa, Oryza sativa; identical to SEQ ID NO: 27768

SEQ ID NO: 130084 - DNA, 1350 bp, Oryza sativa
  CDS (1)..(1350)
atgggtaaggagaagacgcacatcaacattgtggtcattggccacgtcgactccggcaagtcgaccaccacgggccatctgatctacaagcttaagcttggaggtatcgacaagcgtgtgatcgagaggttcgagaaggaagccgctgagatgaacaagaggtccttcaagtacgcgtgggtgctcgacaagctcaaggccgagcgtgagagaggtatcaccattgatatcgccctgtggaagttcgagaccaccaagtactactgcacggtcatcgatgcccctggtcaccgtgacttcatcaagaacatgatcacgggtacctcccaggctgactgtgccgtgctcatcattgactccaccactggtggttttgaggctggtatctccaaggatggccagacccgtgagcacgctcttcttgctttcactcttggagtgaagcagatgatctgctgctgcaacaagatggatgccaccactcccaagtactccaaggcccgttatgatgaaatcgtgaaggaagtctcatcctacctgaagaaggtcggctacaaccctgacaagattccctttgttcccatctctgggtttgagggtgacaacatgattgagaggtccaccaaccttgactggtacaagggccccaccttgcttgaggctcttgaccagatcaacgagcccaagaggccatcagacaagcccctacgtcttccccttcaggacgtgtacaagatcggcggtattggtaccgtgcctgtgggtcgtgttgagactggtgtcctcaagcctggtatggtggtgacctttggtcccagcggtctgaccactgaggtcaagtcggttgagatgcaccacgaggctctccaggaggctcttcctggtgacaacgttgggttcaacgtgaagaacgttgccgtgaaggatctgaagcgtgggtacgtggcctctaactccaaggatgaccctgccaaggaggctgccagcttcacctcccaggtgatcatcatgaaccaccctgggcagatcggcaatggctacgccccagtgctggactgccacacctcacacattgccgtcaagtttgctgagctggtgaccaagatcgacagacgatccggcaaggagctggagaaggagcccaagttcctcaagaacggtgatgctggtatggttaagatgattcccaccaagcccatggttgtggagaccttctctgagtaccctcctcttggtcgttttgccgtgcgtgacatgaggcaaacggtggctgttggcgtcatcaagaacgtggagaagaaggacccaaccggtgccaaggtgaccaaggctgccgccaagaagaaatga

SEQ ID NO: 130085 - protein, 449 aa, Oryza sativa
MGKEKTHINIVVIGHVDSGKSTTTGHLIYKLKLGGIDKRVIERFEKEAAEMNKRSFKYAWVLDKLKAERERGITIDIALWKFETTKYYCTVIDAPGHRDFIKNMITGTSQADCAVLIIDSTTGGFEAGISKDGQTREHALLAFTLGVKQMICCCNKMDATTPKYSKARYDEIVKEVSSYLKKVGYNPDKIPFVPISGFEGDNMIERSTNLDWYKGPTLLEALDQINEPKRPSDKPLRLPLQDVYKIGGIGTVPVGRVETGVLKPGMVVTFGPSGLTTEVKSVEMHHEALQEALPGDNVGFNVKNVAVKDLKRGYVASNSKDDPAKEAASFTSQVIIMNHPGQIGNGYAPVLDCHTSHIAVKFAELVTKIDRRSGKELEKEPKFLKNGDAGMVKMIPTKPMVVETFSEYPPLGRFAVRDMRQTVAVGVIKNVEKKDPTGAKVTKAAAKKK

SEQ ID NO: 130086 - DNA, 1362 bp, Brassica napus
  CDS (1)..(1362)
atggcctccgtcgctcttcgaaacccaacctcgaagcgtctacttcccttctctactcagacctactcacgctgcggtggttccatctcttcgtctccctcgatctctcactcgatcggaggaggagatgatctctctccctcaagcttcggagcttccctgtggagatccatggccacctttacacgaaataaacctcatgttaatgtcggaacgatcgggcatgtggatcacgggaagaccactttgactgctgcaatcacaaaggttcttgctgaggagggcaaagctaaagctattgcctttgatgagattgataaagctcctgaggagaagaagagaggaattaccattgccacggctcatgtggagtatgagactgctaagcgtcactatgctcatgttgattgccctggacacgctgattatgttaagaatatgattactggagctgcacaaatggatggtgggattcttgtggtttcaggtccagatggacccatgcctcagaccaaggaacatatcctacttgcccgtcaggttggtgttccatcacttgtgtgtttcctgaacaaagtcgatgtggtggatgatccagagttattggagcttgtagagatggaactacgtgaactcctcagcttctacaagttccctggtgatgatatcccaatcatccggggatctgctctgtgtgcacttcagggcacaaacgatgaaattggaaggcaagctatattgaagcttatggatgctgtcgatgagtacatacctgaccctgttcgtgtgcttgacaaggctttcttgatgcctattgaagatgttttctcaatccaaggacgtggaactgttgcaaccggacgtattgagcaaggagtcatcaaagttggtgaagaagttgagatattgggtttaaaagacggacctccaatgaaatctactgtaactggggttgagatgttcaagaagattttggataatggacaggctggtgacaatgttggacttcttctgcgtgggctcaagagagaagacattcagcgtggaatggtgattgctaagcctggttcatgcaagacatacaagaagtttgaagcggagatctatgtgctcacaaaggacgaaggtggacgtcacactgcttttctctccaactacaggcctcagttctacttgaggactgcagatatcactgggagagtagagttaccagatgacgtgaagatggttatgcctggtgacaatgtcactgctgttttcgagcttatcatgcctgtcccactcgaaataggtcaaagatttgccctgagggaaggaggtagaacagttggagctggtgttgtatcaaaagtgatgacttga

SEQ ID NO: 130087 - protein, 453 aa, Brassica napus; identical to SEQ ID NO: 27796

SEQ ID NO: 130088 - DNA, 1350 bp, Brassica napus; identical to SEQ ID NO: 27775
  CDS (1)..(1350)

SEQ ID NO: 130089 - protein, 449 aa, Brassica napus; identical to SEQ ID NO: 27776

SEQ ID NO: 130090 - DNA, 1344 bp, Glycine max; identical to SEQ ID NO: 27779
  CDS (1)..(1344)

SEQ ID NO: 130091 - protein, 447 aa, Glycine max; identical to SEQ ID NO: 27780

SEQ ID NO: 130092 - DNA, 1365 bp, Glycine max; identical to SEQ ID NO: 27781
  CDS (1)..(1365)

SEQ ID NO: 130093 - protein, 454 aa, Glycine max; identical to SEQ ID NO: 27782

SEQ ID NO: 130094 - DNA, 1359 bp, Glycine max; identical to SEQ ID NO: 27783
  CDS (1)..(1359)

SEQ ID NO: 130095 - protein, 452 aa, Glycine max; identical to SEQ ID NO: 27784

SEQ ID NO: 130096 - DNA, 1350 bp, Linum usitatissimum; identical to SEQ ID NO: 27785
  CDS (1)..(1350)

SEQ ID NO: 130097 - protein, 449 aa, Linum usitatissimum; identical to SEQ ID NO: 27786

SEQ ID NO: 130098 - DNA, 1344 bp, Hordeum vulgare; identical to SEQ ID NO: 27787
  CDS (1)..(1344)

SEQ ID NO: 130099 - protein, 447 aa, Hordeum vulgare; identical to SEQ ID NO: 27788

SEQ ID NO: 130100 - DNA, 1350 bp, Brassica napus
  CDS (1)..(1350)
atgggtaaagagaagtttcacatcaacattgtggtcatcggccacgtcgactccgggaagtcaaccaccacggggcacttgatctacaagctcggcggtatcgacaagcgtgtgatcgagaggttcgagaaggaggctgctgagatgaacaagaggtctttcaagtacgcgtgggtgttggacaagcttaaggctgagcgtgagcgtggtatcaccattgatattgctctttggaagtttgagaccaccaagtactactgcacggttattgacgctcctggtcatcgtgatttcattaagaacatgatcactggtacctcccaggctgattgtgctgttttgattattgattccactactggtgggttcgaggctggtatctctaaggatgggcagactcgtgagcatgctcttcttgctttcacacttggtgtcaagcagatgatttgctgctgtaacaagatggatgctactacccccaagtactccaaggcgaggtacgatgagattatcaaggaggtgtcttcctacttgaagaaggttgggtacaaccctgacaaaatccccttcgttcccatctctggtttcgagggtgacaacatgattgagaggtccaccaaccttgactggtacaagggaccaactctccttgaggctcttgaccagatcaacgagccaaagaggccttcagacaagcccctccgtctaccactccaggatgtctacaagattggtgggattggaacggtgccggttggtcgtgttgagactggtatgctcaagcctggtatggttgtgacattcgctccttcgggtttgaccactgaggttaagtctgttgagatgcaccatgagtctcttgtggaggcgcttccgggtgacaacgttgggttcaatgttaagaacgttgctgtcaaggatcttaagcgtgggtacgttgcgtccaactccaaggatgatcctgctaaaggcgctgctaacttcacctcccaggtcatcatcatgaaccaccctggtcagattggtaatggttacgccccggttcttgattgccacacctcccacattgctgtcaagttctctgaaatcttgaccaagattgatagacgttctggtaaggagattgagaaggaacctaagtttttgaagaatggtgatgctggtatggtgaagatgactcccaccaagcctatggttgttgagactttctctgagtacccaccgcttggacgtttcgctgttagggacatgaggcagactgttgctgtcggtgtcatcaagagtgttgacaagaaggacccgaccggagctaaggtgaccaaggctgccgtcaagaagggtgccaagtaa

SEQ ID NO: 130101 - protein, 449 aa, Brassica napus; identical to SEQ ID NO: 27790

SEQ ID NO: 130102 - DNA, 1362 bp, Brassica napus; identical to SEQ ID NO: 27791
  CDS (1)..(1362)

SEQ ID NO: 130103 - protein, 453 aa, Brassica napus; identical to SEQ ID NO: 27792

SEQ ID NO: 130104 - DNA, 1344 bp, Glycine max; identical to SEQ ID NO: 27771
  CDS (1)..(1344)

SEQ ID NO: 130105 - protein, 447 aa, Glycine max; identical to SEQ ID NO: 27772

SEQ ID NO: 130106 - DNA, 1440 bp, Glycine max; identical to SEQ ID NO: 27801
  CDS (1)..(1440)

SEQ ID NO: 130107 - protein, 479 aa, Glycine max; identical to SEQ ID NO: 27802

SEQ ID NO: 130108 - DNA, 1365 bp, Glycine max; identical to SEQ ID NO: 27803
  CDS (1)..(1365)

SEQ ID NO: 130109 - protein, 454 aa, Glycine max; identical to SEQ ID NO: 27804

SEQ ID NO: 130110 - DNA, 1440 bp, Glycine max; identical to SEQ ID NO: 27805
  CDS (1)..(1440)

SEQ ID NO: 130111 - protein, 479 aa, Glycine max; identical to SEQ ID NO: 27806

SEQ ID NO: 130112 - DNA, 1347 bp, Glycine max; identical to SEQ ID NO: 27807
  CDS (1)..(1347)

SEQ ID NO: 130113 - protein, 448 aa, Glycine max; identical to SEQ ID NO: 27808

SEQ ID NO: 130114 - DNA, 1440 bp, Glycine max; identical to SEQ ID NO: 27809
  CDS (1)..(1440)

SEQ ID NO: 130115 - protein, 479 aa, Glycine max; identical to SEQ ID NO: 27810

SEQ ID NO: 130116 - DNA, 1344 bp, Glycine max; identical to SEQ ID NO: 27811
  CDS (1)..(1344)

SEQ ID NO: 130117 - protein, 447 aa, Glycine max; identical to SEQ ID NO: 27812

SEQ ID NO: 130118 - DNA, 1344 bp, Glycine max; identical to SEQ ID NO: 27813
  CDS (1)..(1344)

SEQ ID NO: 130119 - protein, 447 aa, Glycine max; identical to SEQ ID NO: 27814

SEQ ID NO: 130120 - DNA, 1443 bp, Glycine max; identical to SEQ ID NO: 27815
  CDS (1)..(1443)

SEQ ID NO: 130121 - protein, 480 aa, Glycine max; identical to SEQ ID NO: 27816

SEQ ID NO: 130122 - DNA, 1344 bp, Glycine max; identical to SEQ ID NO: 27817
  CDS (1)..(1344)

SEQ ID NO: 130123 - protein, 447 aa, Glycine max; identical to SEQ ID NO: 27818

SEQ ID NO: 130124 - DNA, 1344 bp, Glycine max; identical to SEQ ID NO: 27821
  CDS (1)..(1344)

SEQ ID NO: 130125 - protein, 447 aa, Glycine max; identical to SEQ ID NO: 27822

SEQ ID NO: 130126 - DNA, 1344 bp, Zea mays; identical to SEQ ID NO: 27829
  CDS (1)..(1344)

SEQ ID NO: 130127 - protein, 447 aa, Zea mays; identical to SEQ ID NO: 27830

SEQ ID NO: 130128 - DNA, 1344 bp, Zea mays
  CDS (1)..(1344)
atgggtaaagagaagtcccacatcaacattgtggttattggccacgttgactctggcaagtcgaccaccacaggacacctgatctacaagcttggaggcattgacaagcgtgtgatcgagaggtttgagaaggaggctgctgaaatgaacaagcggtccttcaagtacgcatgggtgctcgacaagctcaaggctgagcgtgagagaggtatcaccattgatatcgctctgtggaagtttgagaccaccaagtactactgcacggtcattgatgcccctggacaccgtgacttcatcaagaacatgatcactggtacctcccaggctgactgtgctgtccttatcattgactccaccactggtggttttgaggctggtatctccaaggatggccagacccgtgaacatgctctccttgcgttcacccttggagtgaagcagatgatttgctgctgcaacaagatggatgcaaccactccgaaatactccaaggcacgttatgatgagattgtgaaggaagtctcatcctacctcaagaaagttgggtacaaccctgataagattgccttcgttcccatttctggttttgagggcgacaacatgattgagaggtccaccaaccttgactggtacaaaggcccaaccctgcttgaggctcttgaccagatcaccgagcccaagaggccttcggacaagcccctgcgtctgcccctccaggatgtgtacaagattggtggtattggaactgtaccggttggtcgtgtggagactggtgtcatcaagcctggtatggtagtcacctttggtccaactggcctgactactgaggtgaagtctgttgagatgcaccatgaggcgcttcaggaggctcttccgggcgacaatgttggcttcaacgtgaagaacgttgctgtcaaggatctcaagcgtgggttcgtggcctccaactccaaggatgaccctgccaaggaggctgccagcttcacctcccaggtcatcatcatgaaccaccctgggcagattggcaacggctatgccccagtgctggactgccacacctcccacatcgccgtcaagtttgctgagctcattaccaagatcgacaggcgatctggcaaggagctcgagaaggagcccaagttcctgaagaacggtgatgctggtatggtgaagatgattcccaccaagcctatggtggtggagacattctccgcgtatcctcccctgggtaggtttgccgtccgcgacatgaggcagacggttgctgttggagtcatcaagagtgtggagaagaaggacccaaccggcgccaaggtgaccaaggcggccgccaagaagaaatga

SEQ ID NO: 130129 - protein, 447 aa, Zea mays; identical to SEQ ID NO: 27860

SEQ ID NO: 130130 - DNA, 1344 bp, Zea mays; identical to SEQ ID NO: 27831
  CDS (1)..(1344)

SEQ ID NO: 130131 - protein, 447 aa, Zea mays; identical to SEQ ID NO: 27832

SEQ ID NO: 130132 - DNA, 1353 bp, Zea mays
  CDS (1)..(1353)
atggcttccaccgttgtgctccggaacgcctgctcccgccgactcttctgctactccactctccgcgccgccgcaatattgggacccgccgcgccacctgatgcgcccgcggcggcgtcggcccagccgccaccgatggcaggaaccctctgggcgaggtccatggccactttcacgcgcacgaagccacatgtgaacgtcggcaccattgggcacgtcgatcacggcaaaaccacactcactgctgccattaccaaggttctggcagaggcagggaaggccaaagcagttgcttttgacgagatcgacaaggccccggaagagagagccagaggaatcaccattgcaacagctcatgtcgagtatgagactgctaaaaggcattatgctcatgttgattgtccaggtcacgcagattatgtcaagaacatgatcactggagctgctcaaatggatggtggtattcttgtcgtgtcagctcctgatggcccaatgccacaaacaaaggagcacattcttcttgcccgtcaggttggtgtaccttcccttgtgtgcttcttaaacaaagttgatgctgttgatgacccagagctactggaacttgtagagatggagcttcgggagctcctcagtttctacaagttccctggtgatgagattccgatcatccgtgggtctgcgttgtctgctttgcaagggaacaacgatgagataggaaagaatgccattttgaaactaatggatgcagttgatgagtacattcctgatcctgtaaggcagcttgataaggctttcttgatgccgatagaagatgtgttttctatccagggtcgtggaactgttgttactgggcgtgttgagcagggaacaattaaaactggcgaagatgttgagatcttgggtttgacacagagtggtcccttgaagactacagttactggtgttgagatgttcaaaaagatactggaccatggagaggctggtgacaacgttggtcttcttcttcgtggtctaaagcgtggtgatgtcgagcgtggccaggtggtgtgcaaacctggtagtctgaagacatacaaaaagtttgaggcagaaatatacgtcctgacaaaggatgaaggtggccggcacactgcctttgtcacaaattacacaccccaattctacttcaggactgctgatgtcactggaaaggttgagttgcttggtgagacgaagatggttttgcccggtgacaatgtaaccgcgaatttcgagttgatatcgcctgttcctcttgaaactgggcaaagatttgcgatgagggaaggagggaggacagttggtgccggggttgtctccaaagttattagctga

SEQ ID NO: 130133 - protein, 450 aa, Zea mays; identical to SEQ ID NO: 27866

SEQ ID NO: 130134 - DNA, 1344 bp, Zea mays; identical to SEQ ID NO: 27833
  CDS (1)..(1344)

SEQ ID NO: 130135 - protein, 447 aa, Zea mays; identical to SEQ ID NO: 27834

SEQ ID NO: 130136 - DNA, 1401 bp, Zea mays; identical to SEQ ID NO: 27835
  CDS (1)..(1401)

SEQ ID NO: 130137 - protein, 466 aa, Zea mays; identical to SEQ ID NO: 27836

SEQ ID NO: 130138 - DNA, 1344 bp, Zea mays; identical to SEQ ID NO: 27837
  CDS (1)..(1344)

SEQ ID NO: 130139 - protein, 447 aa, Zea mays; identical to SEQ ID NO: 27838

SEQ ID NO: 130140 - DNA, 1344 bp, Zea mays; identical to SEQ ID NO: 27839
  CDS (1)..(1344)

SEQ ID NO: 130141 - protein, 447 aa, Zea mays; identical to SEQ ID NO: 27840

SEQ ID NO: 130142 - DNA, 1344 bp, Zea mays; identical to SEQ ID NO: 27827
  CDS (1)..(1344)

SEQ ID NO: 130143 - protein, 447 aa, Zea mays; identical to SEQ ID NO: 27828

SEQ ID NO: 130144 - DNA, 1359 bp, Zea mays; identical to SEQ ID NO: 27861
  CDS (1)..(1359)

SEQ ID NO: 130145 - protein, 452 aa, Zea mays; identical to SEQ ID NO: 27862

SEQ ID NO: 130146 - DNA, 1344 bp, Zea mays; identical to SEQ ID NO: 27841
  CDS (1)..(1344)

SEQ ID NO: 130147 - protein, 447 aa, Zea mays; identical to SEQ ID NO: 27842

SEQ ID NO: 130148 - DNA, 1344 bp, Zea mays; identical to SEQ ID NO: 27843
  CDS (1)..(1344)

SEQ ID NO: 130149 - protein, 447 aa, Zea mays; identical to SEQ ID NO: 27844

SEQ ID NO: 130150 - DNA, 1344 bp, Zea mays; identical to SEQ ID NO: 27845
  CDS (1)..(1344)

SEQ ID NO: 130151 - protein, 447 aa, Zea mays; identical to SEQ ID NO: 27846

SEQ ID NO: 130152 - DNA, 1344 bp, Zea mays; identical to SEQ ID NO: 27847
  CDS (1)..(1344)

SEQ ID NO: 130153 - protein, 447 aa, Zea mays; identical to SEQ ID NO: 27848

SEQ ID NO: 130154 - DNA, 1344 bp, Zea mays; identical to SEQ ID NO: 27849
  CDS (1)..(1344)

SEQ ID NO: 130155 - protein, 447 aa, Zea mays; identical to SEQ ID NO: 27850

SEQ ID NO: 130156 - DNA, 1353 bp, Zea mays; identical to SEQ ID NO: 27851
  CDS (1)..(1353)

SEQ ID NO: 130157 - protein, 450 aa, Zea mays; identical to SEQ ID NO: 27852

SEQ ID NO: 130158 - DNA, 1344 bp, Zea mays; identical to SEQ ID NO: 27853
  CDS (1)..(1344)

SEQ ID NO: 130159 - protein, 447 aa, Zea mays; identical to SEQ ID NO: 27854

SEQ ID NO: 130160 - DNA, 1344 bp, Zea mays; identical to SEQ ID NO: 27857
  CDS (1)..(1344)

SEQ ID NO: 130161 - protein, 447 aa, Zea mays; identical to SEQ ID NO: 27858

SEQ ID NO: 130162 - DNA, 1344 bp, Zea mays; identical to SEQ ID NO: 27867
  CDS (1)..(1344)

SEQ ID NO: 130163 - protein, 447 aa, Zea mays; identical to SEQ ID NO: 27868

SEQ ID NO: 130164 - DNA, 1359 bp, Zea mays; identical to SEQ ID NO: 27825
  CDS (1)..(1359)

SEQ ID NO: 130165 - protein, 452 aa, Zea mays; identical to SEQ ID NO: 27826

SEQ ID NO: 130166 - DNA, 1344 bp, Zea mays; identical to SEQ ID NO: 27473
  CDS (1)..(1344)

SEQ ID NO: 130167 - protein, 447 aa, Zea mays; identical to SEQ ID NO: 27474

SEQ ID NO: 130168 - DNA, 1467 bp, Zea mays; identical to SEQ ID NO: 27869
  CDS (1)..(1467)

SEQ ID NO: 130169 - protein, 488 aa, Zea mays; identical to SEQ ID NO: 27870

SEQ ID NO: 130170 - DNA, 1344 bp, Zea mays
  CDS (1)..(1344)
atgggtaaggagaagactcacatcaacattgtggtcattggccatgtcgactctggcaagtcgaccaccactggccacctgatctacaagcttggaggtattgacaagcgagtgattgagaggttcgagaaagaggccgccgagatgaacaagcggtcattcaagtatgcgtgggtgcttgacaagctcaaggctgagcgtgagagaggtattacaattgatattgccctgtggaagttcgagaccaccaagtactactgcactgttattgatgccccgggacaccgtgacttcatcaagaatatgatcactggcacttcccaagctgactgtgctgttcttatcattgactcaaccactggtggttttgaggctggtatctccaaggatggccagacccgtgagcatgctctccttgctttcacacttggtgtgaagcagatgatttgctgctgcaacaagatggatgctactacacccaagtattcaaaggcccgttatgatgagattgtgaaggaagtctcttcctacctgaagaaggttggatacaaccctgataagatccacttcgttccaatctctggttttgaaggtgacaacatgattgagaggtccaccaaccttgactggtacaagggcccaaccctacttgaggctctggacttgatcaatgagccaaagaggccttcagacaagcccctgcgtctcccccttcaggatgtgtacaagattggtggtattggaactgtccctgttggacgtgttgagactggtgtcattaagcctggtatggttgttacttttgggcctactggtcttactactgaggttaagtccgttgagatgcaccatgaggctctccaggaggcccttcccggtgacaatgttggcttcaacgtgaagaatgttgctgtgaaggatctgaagcgtgggtatgtggcctccaactccaaggatgaccctgccaaggaggctgctagctttacctcccaggtcatcatcatgaaccaccctggccagattggcaatggctatgccccagttctggactgccacacctcacacattgctgtcaagtttgctgagctcgttaccaagattgataggcgatccggcaaggagctggagaaggagcccaaatttctcaagaacggtgatgctggtatggtgaagatggttcccactaagcccatggtggtggagaccttttctcagtatcctcctcttggtcgatttgctgtccgtgacatgaggcaaacggtggctgtcggagtcatcaagagtgtggagaagaaggacccaactggagccaaggtgacgaaggctgctgccaagaagaaatga

SEQ ID NO: 130171 - protein, 447 aa, Zea mays; identical to SEQ ID NO: 27350

SEQ ID NO: 130172 - DNA, 26 bp, Artificial sequence
  primer
atgtcagctttattaccaagattact

SEQ ID NO: 130173 - DNA, 26 bp, Artificial sequence
  primer
ctattcaataatacgtgtgattagac

SEQ ID NO: 130174 - protein, 482 aa, Artificial sequence
  consensus sequence
  Variant (2)..(2): Xaa in position 2 is any amino acid
  Variant (3)..(8): Xaa in position 3 to 8 is any or no amino acid
  Variant (10)..(10): Xaa in position 10 is any amino acid
  Variant (12)..(13): Xaa in position 12 to 13 is any amino acid
  Variant (14)..(14): Xaa in position 14 is any or no amino acid
  Variant (20)..(20): Xaa in position 20 is any amino acid
  Variant (23)..(23): Xaa in position 23 is any amino acid
  Variant (25)..(25): Xaa in position 25 is any amino acid
  Variant (27)..(42): Xaa in position 27 to 42 is any amino acid
  Variant (43)..(64): Xaa in position 43 to 64 is any or no amino acid
  Variant (66)..(69): Xaa in position 66 to 69 is any amino acid
  Variant (71)..(72): Xaa in position 71 to 72 is any amino acid
  Variant (78)..(79): Xaa in position 78 to 79 is any amino acid
  Variant (81)..(84): Xaa in position 81 to 84 is any amino acid
  Variant (87)..(94): Xaa in position 87 to 94 is any amino acid
  Variant (96)..(96): Xaa in position 96 is any amino acid
  Variant (100)..(100): Xaa in position 100 is any amino acid
  Variant (102)..(103): Xaa in position 102 to 103 is any amino acid
  Variant (110)..(111): Xaa in position 110 to 111 is any amino acid
  Variant (113)..(113): Xaa in position 113 is any amino acid
  Variant (115)..(115): Xaa in position 115 is any amino acid
  Variant (117)..(117): Xaa in position 117 is any amino acid
  Variant (119)..(124): Xaa in position 119 to 124 is any amino acid
  Variant (126)..(128): Xaa in position 126 to 128 is any amino acid
  Variant (129)..(135): Xaa in position 129 to 135 is any or no amino acid
  Variant (141)..(141): Xaa in position 141 is any amino acid
  Variant (145)..(147): Xaa in position 145 to 147 is any amino acid
  Variant (150)..(156): Xaa in position 150 to 156 is any amino acid
  Variant (157)..(157): Xaa in position 157 is any or no amino acid
  Variant (160)..(160): Xaa in position 160 is any amino acid
  Variant (162)..(168): Xaa in position 162 to 168 is any amino acid
  Variant (169)..(179): Xaa in position 169 to 179 is any or no amino acid
  Variant (181)..(181): Xaa in position 181 is any amino acid
  Variant (183)..(199): Xaa in position 183 to 199 is any amino acid
  Variant (200)..(207): Xaa in position 200 to 207 is any or no amino acid
  Variant (209)..(218): Xaa in position 209 to 218 is any amino acid
  Variant (220)..(237): Xaa in position 220 to 237 is any amino acid
  Variant (238)..(263): Xaa in position 238 to 263 is any or no amino acid
  Variant (265)..(266): Xaa in position 265 to 266 is any amino acid
  Variant (268)..(268): Xaa in position 268 is any amino acid
  Variant (270)..(271): Xaa in position 270 to 271 is any amino acid
  Variant (273)..(273): Xaa in position 273 is any amino acid
  Variant (275)..(277): Xaa in position 275 to 277 is any amino acid
  Variant (279)..(280): Xaa in position 279 to 280 is any amino acid
  Variant (283)..(284): Xaa in position 283 to 284 is any amino acid
  Variant (286)..(286): Xaa in position 286 is any amino acid
  Variant (288)..(288): Xaa in position 288 is any amino acid
  Variant (292)..(293): Xaa in position 292 to 293 is any amino acid
  Variant (296)..(296): Xaa in position 296 is any amino acid
  Variant (298)..(298): Xaa in position 298 is any amino acid
  Variant (300)..(301): Xaa in position 300 to 301 is any amino acid
  Variant (303)..(303): Xaa in position 303 is any amino acid
  Variant (305)..(315): Xaa in position 305 to 315 is any amino acid
  Variant (316)..(320): Xaa in position 316 to 320 is any or no amino acid
  Variant (322)..(325): Xaa in position 322 to 325 is any amino acid
  Variant (329)..(332): Xaa in position 329 to 332 is any amino acid
  Variant (333)..(333): Xaa in position 333 is any or no amino acid
  Variant (335)..(339): Xaa in position 335 to 339 is any amino acid
  Variant (340)..(340): Xaa in position 340 is any or no amino acid
  Variant (344)..(344): Xaa in position 344 is any amino acid
  Variant (346)..(357): Xaa in position 346 to 357 is any amino acid
  Variant (358)..(358): Xaa in position 358 is any or no amino acid
  Variant (361)..(361): Xaa in position 361 is any amino acid
  Variant (363)..(364): Xaa in position 363 to 364 is any amino acid
  Variant (365)..(366): Xaa in position 365 to 366 is any or no amino acid
  Variant (368)..(376): Xaa in position 368 to 376 is any amino acid
  Variant (378)..(388): Xaa in position 378 to 388 is any amino acid
  Variant (389)..(390): Xaa in position 389 to 390 is any or no amino acid
  Variant (392)..(395): Xaa in position 392 to 395 is any amino acid
  Variant (397)..(426): Xaa in position 397 to 426 is any amino acid
  Variant (427)..(441): Xaa in position 427 to 441 is any or no amino acid
  Variant (444)..(453): Xaa in position 444 to 453 is any amino acid
  Variant (455)..(461): Xaa in position 455 to 461 is any amino acid
  Variant (462)..(467): Xaa in position 462 to 467 is any or no amino acid
  Variant (471)..(471): Xaa in position 471 is any amino acid
  Variant (473)..(476): Xaa in position 473 to 476 is any amino acid
  Variant (479)..(480): Xaa in position 479 to 480 is any amino acid
KXXXXXXXHXNXXXIGHVDXGKXTXTXXXXXXXXXXXXXXXXXXXXXXXXXXXXXXXXXXXXXXDXXXXEXXRGITIXXAXXXXETXXXXXXXXDXPGHXDXXKNMITGXXQXDXAXLXXXXXXGXXXXXXXXXXQTREHXLLAXXXGVXXXXXXXXNKXDXXXXXXXXXXXXXXXXXXEXVXXXXXXXXXXXXXXXXXXXXXXXXXPXXXXXXXXXXEXXXXXXXXXXXXXXXXXXXXXXXXXXXXXXXXXXXXXXXXXXXXIXXPXRXXDXPXXXPXXDVXXIXGXGTVXXGRXEXGXXKXGXXXXXXXXXXXXXXXXTXXXXVEMXXXXXLXXXXXXGDNXGXXXXXXXXXXXXXRGXVXXXXKXXXXXXXXXFXXXXXXXXXXXXXGXXXXPXXXXXXXXXXXXXXXXXXXXXXXXXXXXXXXXXXXXXXXXXXXXXGDXXXXXXXXXXPXXXXXXXXXXXXXRFAXRXXXXTVXXGV

SEQ ID NO: 130175 - protein, 29 aa, Artificial sequence
  protein pattern
  Variant (2)..(3): Xaa in position 2 to 3 is any amino acid
  Variant (4)..(4): Xaa in position 4 is any or no amino acid
  Variant (6)..(6): Xaa in position 6 is any or no amino acid
  Variant (8)..(8): Xaa in position 8 is Ala or Cys
  Variant (12)..(12): Xaa in position 12 is any amino acid
  Variant (14)..(14): Xaa in position 14 is Phe or Tyr
  Variant (15)..(15): Xaa in position 15 is Ile or Val
  Variant (22)..(22): Xaa in position 22 is Ala or Thr
  Variant (23)..(23): Xaa in position 23 is Ala or Ser
  Variant (25)..(25): Xaa in position 25 is any amino acid
  Variant (27)..(27): Xaa in position 27 is Ala, Cys or Gly
  Variant (28)..(28): Xaa in position 28 is Ala or Gly
  Variant (29)..(29): Xaa in position 29 is Ile or Val
YXXXVXDXPGHXDXXKNMITGXXQXDXXX

SEQ ID NO: 130176 - protein, 21 aa, Artificial sequence
  protein pattern
  Variant (2)..(2): Xaa in position 2 is any amino acid
  Variant (4)..(4): Xaa in position 4 is Ile or Val
  Variant (5)..(5): Xaa in position 5 is Gly or Val
  Variant (6)..(6): Xaa in position 6 is Thr or Val
  Variant (12)..(12): Xaa in position 12 is any amino acid
  Variant (15)..(15): Xaa in position 15 is any or no amino acid
  Variant (18)..(18): Xaa in position 18 is any amino acid
  Variant (19)..(19): Xaa in position 19 is Gly or Thr
  Variant (20)..(20): Xaa in position 20 is any amino acid
  Variant (21)..(21): Xaa in position 21 is Ala or Leu
HXNXXXIGHVDXGKXTTXXXX

SEQ ID NO: 130177 - protein, 19 aa, Artificial sequence
  protein pattern
  Variant (3)..(5): Xaa in position 3 to 5 is any or no amino acid
  Variant (8)..(8): Xaa in position 8 is Lys or Arg
  Variant (11)..(11): Xaa in position 11 is Ala, Ile or Leu
  Variant (14)..(14): Xaa in position 14 is Ala, Gly or Ser
  Variant (15)..(15): Xaa in position 15 is any amino acid
  Variant (16)..(16): Xaa in position 16 is Gln or Thr
  Variant (17)..(17): Xaa in position 17 is Ile, Leu or Val
DGXXXQTXEHXLLXXXXGV

SEQ ID NO: 130178 - protein, 20 aa, Artificial sequence
  protein pattern
  Variant (2)..(2): Xaa in position 2 is any amino acid
  Variant (3)..(3): Xaa in position 3 is Ala or Leu
  Variant (4)..(4): Xaa in position 4 is any amino acid
  Variant (5)..(5): Xaa in position 5 is Ala or Glu
  Variant (7)..(7): Xaa in position 7 is Lys or Arg
  Variant (8)..(8): Xaa in position 8 is Ala or Glu
  Variant (14)..(14): Xaa in position 14 is Asp, Asn or Ser
  Variant (15)..(15): Xaa in position 15 is any amino acid
  Variant (16)..(16): Xaa in position 16 is Ala or Ser
  Variant (17)..(18): Xaa in position 17 to 18 is any amino acid
  Variant (19)..(19): Xaa in position 19 is Glu or Lys
  Variant (20)..(20): Xaa in position 20 is Phe or Tyr
DXXXXEXXRGITIXXXXXXX

SEQ ID NO: 130179 - protein, 17 aa, Artificial sequence
  protein pattern
  Variant (3)..(3): Xaa in position 3 is Phe or His
  Variant (4)..(4): Xaa in position 4 is any amino acid
  Variant (5)..(5): Xaa in position 5 is Glu or Lys
  Variant (6)..(6): Xaa in position 6 is any amino acid
  Variant (8)..(9): Xaa in position 8 to 9 is any amino acid
  Variant (10)..(10): Xaa in position 10 is Ala, Gly, Ser, Thr or Val
  Variant (11)..(11): Xaa in position 11 is any amino acid
  Variant (12)..(12): Xaa in position 12 is Ala or Pro
  Variant (16)..(16): Xaa in position 16 is any amino acid
EMXXXXLXXXXXGDNXG

SEQ ID NO: 130180 - protein, 14 aa, Artificial sequence
  protein pattern
  Variant (2)..(2): Xaa in position 2 is any amino acid
  Variant (3)..(3): Xaa in position 3 is Glu or Arg
  Variant (4)..(4): Xaa in position 4 is any amino acid
  Variant (5)..(5): Xaa in position 5 is Ile or Leu
  Variant (7)..(7): Xaa in position 7 is any amino acid
  Variant (8)..(8): Xaa in position 8 is Phe or Val
  Variant (10)..(10): Xaa in position 10 is any amino acid
  Variant (12)..(13): Xaa in position 12 to 13 is any amino acid
  Variant (14)..(14): Xaa in position 14 is Asp or Glu
DXXXXEXXEXEXXX

SEQ ID NO: 130181 - DNA, 786 bp, Saccharomyces cerevisiae; identical to SEQ ID NO: 12328
  CDS (1)..(786)

SEQ ID NO: 130182 - protein, 261 aa, Saccharomyces cerevisiae; identical to SEQ ID NO: 12329

SEQ ID NO: 130183 - DNA, 798 bp, Eremothecium gossypii
  CDS (1)..(798)
atgctgcgtaataacaagtatgaactcaacgatggtctagttgtgacagactcacagctagactgctggaacatgactgccgcaaaattgacctctcccgctgaagtcttacattgggctgttacaacgtttccgcatctctatcaaatgaccgcatttggtttaaccgggctggcaacaatcgacatgttgtcaaaactaccagctctagaggagcaaatggttccgttaatatttatcgatacactccatctatttccgcaaacgttgtccttgttgcaccaagttgaggacaggtactataagcccctttcgcagtcaatccatatcttccgccccgcaggtgtcagcaccgaaaaggagttcgctgaaaagtacggcagctgcctgtgggaaactgacgaggacaagtacgacttcatagccaaggtggagcccgctcaccgggcttttcgttcgttgggcgtaggtgccgtgctcaccggacgcaggcgctcgcagggtggaagccgcgaacagctcaacttcgttgaagtcgatgaggtcaacgctgtacttaaaatcaatccctttgttacatggagttttgatcaagtctggtcttatatcttggataaccggattccttataacgagctgttaaactatggctacaagtcaattggtgactatcactccacgctgcccgtggtcgatggcgccggagaaagatccggacgatggaaaggcaaggcaaaaacagaatgtggtttacacacggccagcaaatatgcccggtatcttctggaacagaagtaa

SEQ ID NO: 130184 - protein, 265 aa, Eremothecium gossypii
MLRNNKYELNDGLVVTDSQLDCWNMTAAKLTSPAEVLHWAVTTFPHLYQMTAFGLTGLATIDMLSKLPALEEQMVPLIFIDTLHLFPQTLSLLHQVEDRYYKPLSQSIHIFRPAGVSTEKEFAEKYGSCLWETDEDKYDFIAKVEPAHRAFRSLGVGAVLTGRRRSQGGSREQLNFVEVDEVNAVLKINPFVTWSFDQVWSYILDNRIPYNELLNYGYKSIGDYHSTLPVVDGAGERSGRWKGKAKTECGLHTASKYARYLLEQK

SEQ ID NO: 130185 - DNA, 786 bp, Saccharomyces pastorianus; strain Weihenstephan 34/70
  CDS (1)..(786)
atgaaaagttaccatttgaacaatgacattattgtcacacaggaacagttagatcattggaacgaacaattagccaagttggaaacggcacaagagattatcgaatggtcgctagtggctttcccacaccttttccaaaccactgcgtttggactgacaggtttggtcaccatcgacatgctgtcgaaactatccgggaaatactatatgccggaattattatttatagacactttgcaccatttcccacagactttaacactgaaggatacaatcgagcaaaagtattatcagccccagaagcaaactatccatgtttataagccagatggatgcgtctcagaggcggaatttgcctcgaagtacggtgatttcctatgggagaaagacgacgataagtacgactatttggctaaagtagaacctgcgcaccgtgcttacaaagaactgcgcgtaagtgccgtcttcacaggcagaagaaagtcgcagggttctgctcgctctcagttgtcgcttattgaaattgacgagcttaacgggatcttgaagataaatccattgattaattggacattcgagcaagttaaacaatatatagatgcaaacaatgtaccatacaatgagcttttggatctcgggtatagatccgttggtgattaccattccacacaacctgtaaaggaaggtgaagatgaaagagcaggaaggtggaagggcaagacaaagactgagtgtggaattcacgaagccagtagattcgcccaatttctaaaacaagacgcctag

SEQ ID NO: 130186 - protein, 261 aa, Saccharomyces pastorianus; strain Weihenstephan 34/70
MKSYHLNNDIIVTQEQLDHWNEQLAKLETAQEIIEWSLVAFPHLFQTTAFGLTGLVTIDMLSKLSGKYYMPELLFIDTLHHFPQTLTLKDTIEQKYYQPQKQTIHVYKPDGCVSEAEFASKYGDFLWEKDDDKYDYLAKVEPAHRAYKELRVSAVFTGRRKSQGSARSQLSLIEIDELNGILKINPLINWTFEQVKQYIDANNVPYNELLDLGYRSVGDYHSTQPVKEGEDERAGRWKGKTKTECGIHEASRFAQFLKQDA

SEQ ID NO: 130187 - DNA, 720 bp, Sulfolobus solfataricus P2
  CDS (1)..(720): transl_table=11
atgcttagcaaagatgagttagactccctaaataaattgttcgaagataaggaacccctagaagtgctgaaatggggaatagagaaattttaccctaaaatcgccttagcttgtagtcttcaggctgaagatttggtaatactagatatgttaagtaaggttactgaaaaaccaagagtctttataatagatactggtagactccaccaagaaagttatgacttaatagaggaaatagtgaaaaagtataacatagacttaaggatatattttccagactataaagaggtagaagatctagttaataagtatggaatcaacttattttacaaaagtgttgaacttagaaaggcgtgctgtgaagtgaggaaagttagacccctaaagagagcgttggatggaatggaagcttggataactgggctaaggagagaacaaaatttcactagagggaggataaggaaaatagaaatagacgaagtcaatggagggattattaagttaaatccgttggctgactggacatgggaacaggtatgggaatatataaataaaaataatgttccttataataagctctacgataaagggtataagagtataggatgtgtaccatgtactagaccagttaaaccttgggagcatccaagagctggtagatggtggtgggagcagaatagtgacaaggaatgtgggcttcattatagagaggtgaagtga

SEQ ID NO: 130188 - protein, 239 aa, Sulfolobus solfataricus P2
MLSKDELDSLNKLFEDKEPLEVLKWGIEKFYPKIALACSLQAEDLVILDMLSKVTEKPRVFIIDTGRLHQESYDLIEEIVKKYNIDLRIYFPDYKEVEDLVNKYGINLFYKSVELRKACCEVRKVRPLKRALDGMEAWITGLRREQNFTRGRIRKIEIDEVNGGIIKLNPLADWTWEQVWEYINKNNVPYNKLYDKGYKSIGCVPCTRPVKPWEHPRAGRWWWEQNSDKECGLHYREVK

SEQ ID NO: 130189 - DNA, 720 bp, Sulfolobus tokodaii str. 7; identical to SEQ ID NO: 12144
  CDS (1)..(720): transl_table=11

SEQ ID NO: 130190 - protein, 239 aa, Sulfolobus tokodaii str. 7; identical to SEQ ID NO: 12145

SEQ ID NO: 130191 - DNA, 735 bp, Caulobacter crescentus CB15; identical to SEQ ID NO: 12146
  CDS (1)..(735): transl_table=11

SEQ ID NO: 130192 - protein, 244 aa, Caulobacter crescentus CB15; identical to SEQ ID NO: 12147

SEQ ID NO: 130193 - DNA, 726 bp, Nostoc sp. PCC 7120; identical to SEQ ID NO: 12148
  CDS (1)..(726): transl_table=11

SEQ ID NO: 130194 - protein, 241 aa, Nostoc sp. PCC 7120; identical to SEQ ID NO: 12149

SEQ ID NO: 130195 - DNA, 759 bp, Brucella melitensis 16M
  CDS (1)..(759): transl_table=11
gtgctgcctgacgccgacattgccgatgcggatgagcgcggtgccgcgcaagcccggcttctcgaagcaagccacggcgcatccgcgccgcacgaaataatcgcgcttgtcacgcatgagcttttcgaggggcgggttgcggttgtttcgtccttcggggcggaatcggcggtgctcctgcatatgatctcgcagatcgaccgggcaacgccggtgctgtttctcgatacgggcaagcattttcgcgccacactcgattatcgccatcaactggtgggtcgcctgggccttgccgatgtgcgggatatcctgcctgttgcggacagcctggcaaaggaagacccgttcggcgccttgtcgatgaccgacaaggaccgttgctgctttatccgcaaggtggagccgatggcgcgcgccgttgcgccttaccgggcatggatgacgggacgtaagcagtttcaggcatccacccgcaatgggctgccggtgtttgaatcggttggcccgcgtatccgtatcaacccgctggcgcgctggcgggccgaagacctcagggcctatgccgaaaagtacagcctgccgccgcacccgctgaccgcgcagggctatcgctccatcggctgcatgccttgcacacgccccgtctcggagggcgaggatcagcgtgccggacgctgggcggggtcggaaaagaccgaatgcggcattcatctttccggccttgccgatagcctgaagggcatcccgaaagctgtgtaa

SEQ ID NO: 130196 - protein, 252 aa, Brucella melitensis 16M
MLPDADIADADERGAAQARLLEASHGASAPHEIIALVTHELFEGRVAVVSSFGAESAVLLHMISQIDRATPVLFLDTGKHFRATLDYRHQLVGRLGLADVRDILPVADSLAKEDPFGALSMTDKDRCCFIRKVEPMARAVAPYRAWMTGRKQFQASTRNGLPVFESVGPRIRINPLARWRAEDLRAYAEKYSLPPHPLTAQGYRSIGCMPCTRPVSEGEDQRAGRWAGSEKTECGIHLSGLADSLKGIPKAV

SEQ ID NO: 130197 - DNA, 804 bp, Pyrobaculum aerophilum str. IM2; identical to SEQ ID NO: 12150
  CDS (1)..(804): transl_table=11

SEQ ID NO: 130198 - protein, 267 aa, Pyrobaculum aerophilum str. IM2; identical to SEQ ID NO: 12151

SEQ ID NO: 130199 - DNA, 696 bp, Corynebacterium glutamicum ATCC 13032; identical to SEQ ID NO: 12152
  CDS (1)..(696): transl_table=11

SEQ ID NO: 130200 - protein, 231 aa, Corynebacterium glutamicum ATCC 13032; identical to SEQ ID NO: 12153

SEQ ID NO: 130201 - DNA, 711 bp, Streptomyces coelicolor A3(2); identical to SEQ ID NO: 12154
  CDS (1)..(711): transl_table=11

SEQ ID NO: 130202 - protein, 236 aa, Streptomyces coelicolor A3(2); identical to SEQ ID NO: 12155

SEQ ID NO: 130203 - DNA, 741 bp, Thermosynechococcus elongatus BP-1; identical to SEQ ID NO: 12156
  CDS (1)..(741): transl_table=11

SEQ ID NO: 130204 - protein, 246 aa, Thermosynechococcus elongatus BP-1; identical to SEQ ID NO: 12157

SEQ ID NO: 130205 - DNA, 723 bp, Oceanobacillus iheyensis HTE831
  CDS (1)..(723): transl_table=11
atgggtggctattcagttacctatagtaattttgttaaggatccatataaagactggtttcctgacgatgagacgaatggtgcttcaaaaatattgcaatgggcttatgaagtatatggaacggatatcgtatatgcttgcagctttggagcggaaggaatggtgctgatcgatctcatttcgaagacacaaaagaatgctgatattgtctttcttgatactgatcttcattttcaggaaacatatgacctgatagaagatataaaagtgaaatacccaacactcaacattcatatcaagaagcctgatttaacgttggaagagcaggcagccgaacatggttcagctttatggaagcgtcagccagaccaatgctgttatattcgtaaaattaagccattagaggatgcattaagtggtgcaccagcatggatatctggtctacggagagaacagtccgtatcaagaagcaaaacagattttataaacaaagatgaacggtttaaatctatcaaagtttgtcccttaattcattggacgtgggacgatgtatgggagtatatcaaagacaataacttaccgtacaatgaattacatgataatggatatccgagtattgggtgtattccttgtacttcccaagtgagtgattcctctgattcacgtgcaggaagatgggcgggtacccaaaagacggaatgtggtctccatacttccgattaa

SEQ ID NO: 130206 - protein, 240 aa, Oceanobacillus iheyensis HTE831
MGGYSVTYSNFVKDPYKDWFPDDETNGASKILQWAYEVYGTDIVYACSFGAEGMVLIDLISKTQKNADIVFLDTDLHFQETYDLIEDIKVKYPTLNIHIKKPDLTLEEQAAEHGSALWKRQPDQCCYIRKIKPLEDALSGAPAWISGLRREQSVSRSKTDFINKDERFKSIKVCPLIHWTWDDVWEYIKDNNLPYNELHDNGYPSIGCIPCTSQVSDSSDSRAGRWAGTQKTECGLHTSD

SEQ ID NO: 130207 - DNA, 786 bp, Corynebacterium efficiens YS-314
  CDS (1)..(786): transl_table=11
atgagcttcgttaccgtcaacgcactgaagaacgccggtcccacccaggacccagaggtctccccggagggcccccgcaccaccgcacccctccccgaagaggtcgcacaccgcaaccgggagctcgtcgacaagcatgccgacgagctgtaccacgccgatgccgccaccatcctggagtgggcggcggagcacgtgccgggccgtgtcgcagtcacgctgagcatggagaacaccgtgctggccgaactggccgcccgtcacctgccgcaggcggatttcctcttcctggacaccgggtatcacttcgaggagaccctcgaggtggcccggaaagtggacgagcgttacagccagaccctggtcaccgcgctgccgatcctcacccgcgccgagcaggattcgctctatggaaagaatctgtaccgcagcaacccgacggcgtgctgccggatgcgtaaggtggagcccctcgcggccagcctctcgccatatgcggggtggatcaccggcctgcgacgctccgatgggcccacccgtgcccaggctccggcgctgtcgctggatgccaccggccggttgaagatctccccgatcatcacctggtcgctggaggagaccaaccggttcatcaccgacaacaacctcatcgatcaccccctcacgcaccagggatacccatccatcggttgcgccacctgcaccctgcctgtcgcagagggacaggacccccgtgccggccgctgggccggaaacgccaagacagaatgcggacttcactcatga

SEQ ID NO: 130208 - protein, 261 aa, Corynebacterium efficiens YS-314
MSFVTVNALKNAGPTQDPEVSPEGPRTTAPLPEEVAHRNRELVDKHADELYHADAATILEWAAEHVPGRVAVTLSMENTVLAELAARHLPQADFLFLDTGYHFEETLEVARKVDERYSQTLVTALPILTRAEQDSLYGKNLYRSNPTACCRMRKVEPLAASLSPYAGWITGLRRSDGPTRAQAPALSLDATGRLKISPIITWSLEETNRFITDNNLIDHPLTHQGYPSIGCATCTLPVAEGQDPRAGRWAGNAKTECGLHS

SEQ ID NO: 130209 - DNA, 735 bp, Pseudomonas putida KT2440; identical to SEQ ID NO: 12158
  CDS (1)..(735): transl_table=11

SEQ ID NO: 130210 - protein, 244 aa, Pseudomonas putida KT2440; identical to SEQ ID NO: 12159

SEQ ID NO: 130211 - DNA, 732 bp, Bradyrhizobium japonicum USDA 110
  CDS (1)..(732): transl_table=11
gtgaacgcaattgcgcctcaggtatctcctgtgtccgtttccgcgctgccctctgccgcggaactcgatcgcgccttgcgcgatgcctcgcccgcggaggtcatcgccgcggccctgaaggcggtcggccgcgacaagcttgcgctggtgtcgtccttcggcacggaatcggcgacgcttctgaaggtgatggcggacgtcgatccgtcgatccccgtgatcttcctcgacaccggctggctgttcgaggagacgctcgcctatcgcgacatgctgatcgcgacgctggggctcaaggacgtccgctcgatcaggccggcggaggagacgctgtcgcgcgaggatcccgaccgcgacctctggttctccgatcccgacgcctgctgccgcatccgcaaggtggagccgctggcgcgcgcgctgaagccgttcgacgcctggatcaacggccgcaagcgcttccagggcaatgcgcgcgccgacattccggtggtcgaggacgacggcgcgcggttgaagttcaaccccttcgccaacgtttcgcgcgaggaactcgaggcgattttcgtccgcgccaaattgccgcgtcatccactggccgcctccggtttcctgtcggttgggtgtatgccttgcaccagcagaacggccgaaggcgaggatgcacgcgccggtcgctggcgcggccgggccaagacagaatgcggcatccacacgatgaagacttcgtag

SEQ ID NO: 130212 - protein, 243 aa, Bradyrhizobium japonicum USDA 110
MNAIAPQVSPVSVSALPSAAELDRALRDASPAEVIAAALKAVGRDKLALVSSFGTESATLLKVMADVDPSIPVIFLDTGWLFEETLAYRDMLIATLGLKDVRSIRPAEETLSREDPDRDLWFSDPDACCRIRKVEPLARALKPFDAWINGRKRFQGNARADIPVVEDDGARLKFNPFANVSREELEAIFVRAKLPRHPLAASGFLSVGCMPCTSRTAEGEDARAGRWRGRAKTECGIHTMKTS

SEQ ID NO: 130213 - DNA, 738 bp, Streptomyces avermitilis MA-4680; identical to SEQ ID NO: 12160
  CDS (1)..(738): transl_table=11

SEQ ID NO: 130214 - protein, 245 aa, Streptomyces avermitilis MA-4680; identical to SEQ ID NO: 12161

SEQ ID NO: 130215 - DNA, 918 bp, Rhodopirellula baltica SH 1
  CDS (1)..(918): transl_table=11
atgcccattcgcctgaacgagacagccgtggtgaaccccacttatgtcccctctgaatccgaatccacacctgtctcggctgagccagcatccagaccgtcgttgcgtgttctcacgccggctgagatcgctcacaacgcggctgctgcgggccctgacgtcgatgcgcaggggattccaaccaaacgtggtgccctggcggcggatcctcccctggctcccacagacgaatttctggccgaactgaagcgagacagcgattcattggaatccgcgactccacaagaagtgctgaaatgggcggtggatcgatttgccccgaaattcaccatggcgaccgccttcggccccgaaggcatgacgatcattcacatgctcgccgaaattgctcccgaaacgccaattttcaacttagaaaccggctaccaatttcgagaaactctcgatcttcgcgagaaggtcaaggaacgctacgggatcgaagtccagtacaaatacccgtcgacgacggtcgaggaattcgaaacgctccatggcggaccgctctacaagaccgaccccaatcgctgctgcttcgaacgcaaactacgcgtgctacatcgtgcggccagtggttggcatgcatgggccagcgctatccgtcgcgaccagagcgaagatcgtgcgaaggctccgatcgttggctgggacaagaaattccagctggtaaagatcagtcctctggcaaactggaccaaaaaagatgtttggtcgctgatctcgaaagagagcatcccatacaacccattgcacgaccaaggctatccgagcatcggatgccaagcttgcacgcgtcctgtccaacttggcgaagacgaacgagcaggtcgttggagtggattccaaaagaccgaatgcggattgcacacctcggaatga

SEQ ID NO: 130216 - protein, 305 aa, Rhodopirellula baltica SH 1
MPIRLNETAVVNPTYVPSESESTPVSAEPASRPSLRVLTPAEIAHNAAAAGPDVDAQGIPTKRGALAADPPLAPTDEFLAELKRDSDSLESATPQEVLKWAVDRFAPKFTMATAFGPEGMTIIHMLAEIAPETPIFNLETGYQFRETLDLREKVKERYGIEVQYKYPSTTVEEFETLHGGPLYKTDPNRCCFERKLRVLHRAASGWHAWASAIRRDQSEDRAKAPIVGWDKKFQLVKISPLANWTKKDVWSLISKESIPYNPLHDQGYPSIGCQACTRPVQLGEDERAGRWSGFQKTECGLHTSE

SEQ ID NO: 130217 - DNA, 765 bp, Prochlorococcus marinus subsp. marinus str. CCMP1375
  CDS (1)..(765): transl_table=11
atggatgataaacacatgacttctagaaaattggaaaaaattccattcttaaagattcccttaaaagaagctcgtaagcatcttgaaccactatctccacaaaaacgcttgacatgggcttatgaacaatttggtcctcatcttgctattacgacaagtttcgggattcaatcatcggttttacttcacatgctttaccagctcaatagtggcaatactataaaagtaatatgggttgatacagggtatttaccaaaagagacttatcaatatgcagctgcacttacagacagacttaagctagatgtcactgttgcacaaagcataataactccagcaagaatggaagccttatacggtgaactttggaatactaactctctaaaagatatgggaaaatatcaccgcattcgaaaagtcgaacctttagaaaaagctttagaagatttagatatctattgctgggcaagtggcgtcagaagcagtcaaactgacaataggagctcaatgagcatattagatcgtattagaaaccgtctatctcttagaccaatattggaatggtcgcaaaaagacattttttattacatgcaaaccaatgatttacctcaacaccctctttttgaaaaagggtattcaacaataggtgattggcattcaagttccccagatactactgatgcagctggaagaaaaacacgatttggaggcttacaacaagaatgtggaattcatattgaggacagtaataaagaacacaagtaa

SEQ ID NO: 130218 - protein, 254 aa, Prochlorococcus marinus subsp. marinus str. CCMP1375
MDDKHMTSRKLEKIPFLKIPLKEARKHLEPLSPQKRLTWAYEQFGPHLAITTSFGIQSSVLLHMLYQLNSGNTIKVIWVDTGYLPKETYQYAAALTDRLKLDVTVAQSIITPARMEALYGELWNTNSLKDMGKYHRIRKVEPLEKALEDLDIYCWASGVRSSQTDNRSSMSILDRIRNRLSLRPILEWSQKDIFYYMQTNDLPQHPLFEKGYSTIGDWHSSSPDTTDAAGRKTRFGGLQQECGIHIEDSNKEHK

SEQ ID NO: 130219 - DNA, 741 bp, Candidatus Blochmannia floridanus; identical to SEQ ID NO: 12162
  CDS (1)..(741): transl_table=11

SEQ ID NO: 130220 - protein, 246 aa, Candidatus Blochmannia floridanus; identical to SEQ ID NO: 12163

SEQ ID NO: 130221 - DNA, 723 bp, Prochlorococcus marinus subsp. pastoris str. CCMP1986
  CDS (1)..(723): transl_table=11
atgattaagaaaacgctagaaagtattcaacttaatttagaagggcataataaaaaattaaaagatatgacccccaaagaaataatattatggggttataaaaactttggtaatcaattcgctattacaacaagctttggtatacaatcatcagttattttacatatggtgcatcagcactcactacaaaaaaaaattaagattttctggatagatacaggttacttaccctcagagacttataaatatgcagagagactaattaatgatttatctttagaaattgaggttttacaaagtgaactatctccagcaagaatggaatccctttatggaaaactttgggaaactaataaatctagtgatttagataaataccatgacataagaaaaatcaaacctttagaaaatgctttagataaacacgacatattctgctgggctagcggtgttagatcggagcaaacgaaaaataggaataaaatgaattttgttgacgtaattcgcaaacgactttctttaaggcccttactcaactggaaaaacaaagatattttttattacatgaaagaaaatcaattaccgtcacacccacttttctcaaaaggttattcaactgttggagattggcattccagttctcctgaaagtgttgataaagaaggcaggacaacaagatttggcggaatgaagcaagaatgtggaattcatactgaaaattaa

SEQ ID NO: 130222 - protein, 240 aa, Prochlorococcus marinus subsp. pastoris str. CCMP1986
MIKKTLESIQLNLEGHNKKLKDMTPKEIILWGYKNFGNQFAITTSFGIQSSVILHMVHQHSLQKKIKIFWIDTGYLPSETYKYAERLINDLSLEIEVLQSELSPARMESLYGKLWETNKSSDLDKYHDIRKIKPLENALDKHDIFCWASGVRSEQTKNRNKMNFVDVIRKRLSLRPLLNWKNKDIFYYMKENQLPSHPLFSKGYSTVGDWHSSSPESVDKEGRTTRFGGMKQECGIHTEN

SEQ ID NO: 130223 - DNA, 765 bp, Synechococcus sp. WH 8102; identical to SEQ ID NO: 12166
  CDS (1)..(765): transl_table=11

SEQ ID NO: 130224 - protein, 254 aa, Synechococcus sp. WH 8102; identical to SEQ ID NO: 12167

SEQ ID NO: 130225 - DNA, 705 bp, Chromobacterium violaceum ATCC 12472
  CDS (1)..(705): transl_table=11
atgagcctggagtccaaactcgccgccaccacggccctgctgcaaaccatcgccgccgaacatcccgacgcggtgctggccaacagctacggcgccgaagacatggtgctgaccgacctgatcgcccgtctcggcctgccgctggaaagcttcagcctggacaccggccgcctgccggccgaaacctatgagttgatgcagcaagtcgccgagcgttatccaggccatccggtcaggatgtacttccccgacaccgccgccaccgagcagtacgtcaacttccacggcatcaacggcttctatcggagcgtcgagttgcgcaagtcctgttgcgcggttcgcaagctggagccgctgaagcgcgcgctggccggccgatcggcctggatcaccggcctgcgccgccagcagtcgccgacgcgccaggacctggccgacagggagtacgacgccgacaacgggctcgtgaaattcagcccgctgctggaatggacggaagccgaagtgtggcagtacctgaaggaaaaccaggtgccgtacaacgcgctgcacgatcggcactatccgtcgataggctgcgcgccctgtacccgcgccatcagcgtgggcgaagacgtgcgcgccggccgctggtggtgggaaaacccggaaaccaaggagtgcgggctgcacgcgaagtccagtccgctgcagcgccccgtctga

SEQ ID NO: 130226 - protein, 234 aa, Chromobacterium violaceum ATCC 12472
MSLESKLAATTALLQTIAAEHPDAVLANSYGAEDMVLTDLIARLGLPLESFSLDTGRLPAETYELMQQVAERYPGHPVRMYFPDTAATEQYVNFHGINGFYRSVELRKSCCAVRKLEPLKRALAGRSAWITGLRRQQSPTRQDLADREYDADNGLVKFSPLLEWTEAEVWQYLKENQVPYNALHDRHYPSIGCAPCTRAISVGEDVRAGRWWWENPETKECGLHAKSSPLQRPV

SEQ ID NO: 130227 - DNA, 726 bp, Gloeobacter violaceus PCC 7421
  CDS (1)..(726): transl_table=11
gtgaatttactgcaggaccaaccggcgatgggcatcgaccagacgactctggagcatctggcccggcagtgggaggatctggctcctgaggccatcctggcggaagcggtgcgctgttttggcgacaagttggtgctggcgagcgccttcggtcccgagtcgatcattttgctcgacatgctggtgaaggtgtggccccggccgcaggcattcttcctcgagacgggctttcattttcccgagacgctggcgctcaaagaccgggtgctcgcgcgctttccgcagttgcagcttgaggtggtggggccgctgatgtccgtcgctcagcaaaatgccatctacggcgagcgcctgcacgatcgcaacccggatcattgctgcgccattcgcaaagtcgagccgctcaaccgcgccctcgccccttacaaagcctggattgccggcatgcgccgcgaacagtcgccgacccgcggccagattggcgtcgtgcagtgggattcgcgccgcggcatggtcaagttcaatccgctggccacctggacgcacaagcaagtctgggcctacattgtcgagcgcgatttgccctataaccccctgcacgacgaggggtttccgtcgatcggctgctcgcctcttaactgcaccgccccggtggccgacggggcggacccgcgctcggggcgctggcggggcaaggccaagaccgagtgcggcctgcatgcgtga

SEQ ID NO: 130228 - protein, 241 aa, Gloeobacter violaceus PCC 7421
MNLLQDQPAMGIDQTTLEHLARQWEDLAPEAILAEAVRCFGDKLVLASAFGPESIILLDMLVKVWPRPQAFFLETGFHFPETLALKDRVLARFPQLQLEVVGPLMSVAQQNAIYGERLHDRNPDHCCAIRKVEPLNRALAPYKAWIAGMRREQSPTRGQIGVVQWDSRRGMVKFNPLATWTHKQVWAYIVERDLPYNPLHDEGFPSIGCSPLNCTAPVADGADPRSGRWRGKAKTECGLHA

SEQ ID NO: 130229 - DNA, 840 bp, Vibrio vulnificus YJ016; identical to SEQ ID NO: 12168
  CDS (1)..(840): transl_table=11

SEQ ID NO: 130230 - protein, 279 aa, Vibrio vulnificus YJ016; identical to SEQ ID NO: 12169

SEQ ID NO: 130231 - DNA, 741 bp, Rhodopseudomonas palustris CGA009
  CDS (1)..(741): transl_table=11
atgaccgagctggcgcaatctctccccccctccacttccgcttccacgggtgtggagacgcgtgcgcaggcactcgacgcagcgcttcggaccgcatcgccggccgaagttgttgccgcggcgctgcgcgaggtcggtcgcgaccagctggcgctggtgtcctcattcggcaccgagtcggcggcgctgttgaaagtgatggcggatgtcgatccggcaattccggtagtgtttctcgataccggttggctgttcgaagaaaccctcgcctatcgcgatacgcttaccaacgtgctcggccttcgtgacgtacgttcgatcaagccgctcgacgccgatctcgatcgcgacgatgcggcgcgcgagttgtggttttccgatccggacaaatgctgcctgatccgcaaggtcgagccgctgaagcgggcactggcgccgttcgacggctggatcaacggtcgcaagcgcttccagggcggtgcgcgcgccgacatcccggtggtcgaagccgacggcaagcgactgaagttcaatccgttcgcgaatatcacgccgaccgacatcgcggcgatctacgccaccgcaaagctgccgcagcatccgttactcgcgtcgggttttctctccgtcggctgcatgccgtgtaccagccgcgccgaaaccggtgaggatgcacgcgccggccgctggcgtggacgcggcaagacggaatgcggcattcacacgatcaagacttcatag

SEQ ID NO: 130232 - protein, 246 aa, Rhodopseudomonas palustris CGA009
MTELAQSLPPSTSASTGVETRAQALDAALRTASPAEVVAAALREVGRDQLALVSSFGTESAALLKVMADVDPAIPVVFLDTGWLFEETLAYRDTLTNVLGLRDVRSIKPLDADLDRDDAARELWFSDPDKCCLIRKVEPLKRALAPFDGWINGRKRFQGGARADIPVVEADGKRLKFNPFANITPTDIAAIYATAKLPQHPLLASGFLSVGCMPCTSRAETGEDARAGRWRGRGKTECGIHTIKTS

SEQ ID NO: 130233 - DNA, 1029 bp, Magnaporthe grisea 70-15; identical to SEQ ID NO: 12176
  CDS (1)..(1029)

SEQ ID NO: 130234 - protein, 342 aa, Magnaporthe grisea 70-15; identical to SEQ ID NO: 12177

SEQ ID NO: 130235 - DNA, 951 bp, Gibberella zeae PH-1; identical to SEQ ID NO: 12178
  CDS (1)..(951)

SEQ ID NO: 130236 - protein, 316 aa, Gibberella zeae PH-1; identical to SEQ ID NO: 12179

SEQ ID NO: 130237 - DNA, 780 bp, Candida glabrata CBS 138; identical to SEQ ID NO: 12180
  CDS (1)..(780)

SEQ ID NO: 130238 - protein, 259 aa, Candida glabrata CBS 138; identical to SEQ ID NO: 12181

SEQ ID NO: 130239 - DNA, 795 bp, Kluyveromyces lactis NRRL Y-1140; identical to SEQ ID NO: 12182
  CDS (1)..(795)

SEQ ID NO: 130240 - protein, 264 aa, Kluyveromyces lactis NRRL Y-1140; identical to SEQ ID NO: 12183

SEQ ID NO: 130241 - DNA, 783 bp, Debaryomyces hansenii CBS767; identical to SEQ ID NO: 12184
  CDS (1)..(783)

SEQ ID NO: 130242 - protein, 260 aa, Debaryomyces hansenii CBS767; identical to SEQ ID NO: 12185

SEQ ID NO: 130243 - DNA, 768 bp, Yarrowia lipolytica CLIB122; identical to SEQ ID NO: 12186
  CDS (1)..(768)

SEQ ID NO: 130244 - protein, 255 aa, Yarrowia lipolytica CLIB122; identical to SEQ ID NO: 12187

SEQ ID NO: 130245 - DNA, 909 bp, Aspergillus nidulans FGSC A4; identical to SEQ ID NO: 12188
  CDS (1)..(909)

SEQ ID NO: 130246 - protein, 302 aa, Aspergillus nidulans FGSC A4; identical to SEQ ID NO: 12189

SEQ ID NO: 130247 - DNA, 759 bp, Candida albicans SC5314; identical to SEQ ID NO: 12190
  CDS (1)..(759): transl_table=12

SEQ ID NO: 130248 - protein, 252 aa, Candida albicans SC5314; identical to SEQ ID NO: 12191

SEQ ID NO: 130249 - DNA, 918 bp, Ustilago maydis 521
  CDS (1)..(918)
atgactgcccccaaccagatcgcccagtcttcaaaacaggccgaagaggaggctcagatccgccacgtcatccgaaatctcgaagccatcaaccgtaagctcggtgaagctgacccaaccgaaatcatcgaatgggccatcgacaaccttcccagtctctaccagaccaccgctttcggtatcaccggctgcatcaccgtcgacatgatttcgcgcatcagcgagcagcgtgccgccaaggctggccttcccgccaaacacctcgtcccactcatctttgtcgacacgctctatcactttccccagacgctcgacctggcccacaaggcagccaagcactacaacgctcctatgcacatctactacccaccgggcaccaacacggtgcgcgagtttgaggaaaagtggggcccacaattgtgggagaaggacgaggatacgtacgactacttggtcaaggtggaacctgcacgacgatcatacgaagagcttggcgttcgcgccgtattcaccggtcgacgtcgatcgcaaggtgccgatcgcgcctcgttgaaagcggtcgaagtggacgagaccgggttggtcaaggtgaatgcgctgatgaactggtcctttggtcaggttgatgcgtacgccaaagccaatgctgttccgtacaacgagcttctcgatttgggttacaagtcgatcggcgactggcactcgactgcacttcccggtaccggagatgcgggcgagcgtgccggcaggtggaaggacaaggctggcaagaccgagtgcggtttgcacaaggactacttcaagatgaagaacctcgccgagaagaagctgcgtgaagcagagctggcgcgcaaggatgaggcaaaagacaaggatgcttctcaagcgctctcgtctccaccagcagcgaccgcatag

SEQ ID NO: 130250 - protein, 305 aa, Ustilago maydis 521
MTAPNQIAQSSKQAEEEAQIRHVIRNLEAINRKLGEADPTEIIEWAIDNLPSLYQTTAFGITGCITVDMISRISEQRAAKAGLPAKHLVPLIFVDTLYHFPQTLDLAHKAAKHYNAPMHIYYPPGTNTVREFEEKWGPQLWEKDEDTYDYLVKVEPARRSYEELGVRAVFTGRRRSQGADRASLKAVEVDETGLVKVNALMNWSFGQVDAYAKANAVPYNELLDLGYKSIGDWHSTALPGTGDAGERAGRWKDKAGKTECGLHKDYFKMKNLAEKKLREAELARKDEAKDKDASQALSSPPAATA

SEQ ID NO: 130251 - DNA, 819 bp, Cryptococcus neoformans var. neoformans B-3501A; identical to SEQ ID NO: 12192
  CDS (1)..(819)

SEQ ID NO: 130252 - protein, 272 aa, Cryptococcus neoformans var. neoformans B-3501A; identical to SEQ ID NO: 12193

SEQ ID NO: 130253 - DNA, 723 bp, Prochlorococcus marinus str. AS9601
  CDS (1)..(723): transl_table=11
atgattgaaaaaattcacaaagatattcaaactaacttgaggaaatataatcaagatcttgtagatatgaagcctcaagcaatgcttacatggggttataaaaaatttgataaacaatttgctattacaacaagttttggtatacagtcatcagtccttttagatatggtcagcaaattatccctacaaaaaaaaatcaaaatattttggatagatacaggttaccttcctccagaaacataccattacgctgaaaagcttattgataatttatccttagaagttgaagttctgcaaagtgaattatctccagcaagaatggaagccaaatatggaaaactttgggaaacaaaaaaagagagtgatttagataagtatcatgaattgagaaagataaaacctttagaaaatggtctagaaaaatatgatatttcctgctgggcaaacggcgttagatcaagtcaaacagaaaatagaaacaaaatgaaattcatagacgtaattcgtcaaaggctctctttaagacctttattaaattggacaaataaagatattttttattatatggaagagaataatttgcctgcccatccactttttatcaaaggttattcttctgtaggagattggcattcaagcagtcccgatggtcttgaaacaaagggcagagatacaagatttggaggaattaaacaagaatgtgggattcacactaataattaa

SEQ ID NO: 130254 - protein, 240 aa, Prochlorococcus marinus str. AS9601
MIEKIHKDIQTNLRKYNQDLVDMKPQAMLTWGYKKFDKQFAITTSFGIQSSVLLDMVSKLSLQKKIKIFWIDTGYLPPETYHYAEKLIDNLSLEVEVLQSELSPARMEAKYGKLWETKKESDLDKYHELRKIKPLENGLEKYDISCWANGVRSSQTENRNKMKFIDVIRQRLSLRPLLNWTNKDIFYYMEENNLPAHPLFIKGYSSVGDWHSSSPDGLETKGRDTRFGGIKQECGIHTNN

SEQ ID NO: 130255 - DNA, 726 bp, Prochlorococcus marinus str. MIT 9515
  CDS (1)..(726): transl_table=11
atgatgattgagaaaactctagaaagtataaaacttaatttagaagagcaaaataaaaaattaaaagatatgacctcaaaagaaataatgttatggggttatagaaactttgataatcactttgctattactacaagctttgggatacagtcatcagtgatattgcatatggtgaatgaatgctcattacaaaagaaaattaaaatcttttggatagatacaggttacttaccctcagagacatataaatatgcagagagacttattaatgatttatctttagagattgaggttttacaaagtgaaatatcgccggcaagaatggaatcgctatatggcaaactttgggaaactaataaatctagtgacttagataaataccatgacataagaaaagtcaaacctttagaaaaggctttagatagtcataacattaattgctgggctagtggtgtgagatcagaacaaacgaataatagaaataaaatgaaatttgttgatgtaatacgaaaccgactttctttaaggccattactgaactggaaaaacaaagatatttattattacatgaaagaaaatcaattaccttctcacccacttttttcaaaaggttattcaactgtaggtgattggcattctagctctcctgatagtatagagaatgaaggcaggtcaacaagatttagggggatgaagcaagagtgtggaattcatactgaaaattaa

SEQ ID NO: 130256 - protein, 241 aa, Prochlorococcus marinus str. MIT 9515
MMIEKTLESIKLNLEEQNKKLKDMTSKEIMLWGYRNFDNHFAITTSFGIQSSVILHMVNECSLQKKIKIFWIDTGYLPSETYKYAERLINDLSLEIEVLQSEISPARMESLYGKLWETNKSSDLDKYHDIRKVKPLEKALDSHNINCWASGVRSEQTNNRNKMKFVDVIRNRLSLRPLLNWKNKDIYYYMKENQLPSHPLFSKGYSTVGDWHSSSPDSIENEGRSTRFRGMKQECGIHTEN

SEQ ID NO: 130257 - DNA, 771 bp, Prochlorococcus marinus str. NATL1A
  CDS (1)..(771): transl_table=11
atgaagaaagaatctaacgacaattacatcaatgatttgagaaacgccgctcaattacctcaacctgctctgatgaaatcaattcatgagacaagcgaagatctagagaaactctcccctcaggatcaacttcaatgggcttttgaggaatttgatgagaactttgttgttaccacaagttttgggatccaatccgctgtcttgcttcacatgacgaaggaattgaaatccagtcaaaagccaaaagttatttgggttgatactggctatttgccaaaagaaacatacaattatgcagaaaaattaacaacacttttcgaattaaatttagtagttgcccaaagttccgtatctccagcgagaatggaggccttaaatggtcgtctatgggaaacaggagtacaaaaagatcttgaaaaatatcatcagattcggaaagttgcacctcttgaaaaagctttctcagacctaaacgttctctgctgggcaagtggcgtgagaaaaggccaaaccaagaacagacaatcaatgtctaatatcgattgcattagagaacgtttaacgctccgaccacttttaaactggtctaaaaaagatattttctattacatggagaaaaataaattacctcaacatccactatttgaaaaaggttattccactgtaggagattggcattcaagcggagcagaaaatactaataccaaaggaaggtcaacgagatttggaggcctcagtgaagaatgtgggatccatttaaatacgcaataa

SEQ ID NO: 130258 - protein, 256 aa, Prochlorococcus marinus str. NATL1A
MKKESNDNYINDLRNAAQLPQPALMKSIHETSEDLEKLSPQDQLQWAFEEFDENFVVTTSFGIQSAVLLHMTKELKSSQKPKVIWVDTGYLPKETYNYAEKLTTLFELNLVVAQSSVSPARMEALNGRLWETGVQKDLEKYHQIRKVAPLEKAFSDLNVLCWASGVRKGQTKNRQSMSNIDCIRERLTLRPLLNWSKKDIFYYMEKNKLPQHPLFEKGYSTVGDWHSSGAENTNTKGRSTRFGGLSEECGIHLNTQ

SEQ ID NO: 130259 - DNA, 801 bp, Prochlorococcus marinus str. MIT 9303; identical to SEQ ID NO: 81477
  CDS (1)..(801): transl_table=11

SEQ ID NO: 130260 - protein, 266 aa, Prochlorococcus marinus str. MIT 9303; identical to SEQ ID NO: 81478

SEQ ID NO: 130261 - DNA, 720 bp, Clostridium thermocellum ATCC 27405
  CDS (1)..(720): transl_table=11
atggtgcagttggatttggagaaattaaacaaagaatattctgataaaagtcctgaagatattgtgaggtttgttgttgaaaacataggtattgagaaagttgcattggcttcaagtctttcaattgaagatcaagtgctgacggatatattgcttaaaatcaatccaaaagtaagggtgtttttccttgatactggaagacattttcagcaaacctatgaccttatggaagaaaccatgcacagatacggtttccactacgaagtttatgctccggaaagcaaagaactggagcaggccgtttcgaagtacggtcccaatttcttttacgaaagcgttgaacttaggaaaaagtgctgtgaaataagaaaggtaaatccgctaaaaagggtcctgagcactgtggatgcctggatttgcggcttaaggagagaacaatcgttgacgcgccaggaattgaatatttttgaatgggacggccttcattcaatttataaaataaatcccattgttttctggtctgaagatagggtgtgggaatacattaaaaaatataatattccgtacaattccctgtacagcaagggttttcggagcattggatgccaaccatgcaccagggcggtaagacccggcgaggatgttcgcagcggcagatggtggtgggaagaccctgacaaaaaagagtgcgggctgcacgcaagagtgggacaggtgtaa

SEQ ID NO: 130262 - protein, 239 aa, Clostridium thermocellum ATCC 27405
MVQLDLEKLNKEYSDKSPEDIVRFVVENIGIEKVALASSLSIEDQVLTDILLKINPKVRVFFLDTGRHFQQTYDLMEETMHRYGFHYEVYAPESKELEQAVSKYGPNFFYESVELRKKCCEIRKVNPLKRVLSTVDAWICGLRREQSLTRQELNIFEWDGLHSIYKINPIVFWSEDRVWEYIKKYNIPYNSLYSKGFRSIGCQPCTRAVRPGEDVRSGRWWWEDPDKKECGLHARVGQV

SEQ ID NO: 130263 - DNA, 723 bp, Prochlorococcus marinus str. MIT 9301; identical to SEQ ID NO: 12194
  CDS (1)..(723): transl_table=11

SEQ ID NO: 130264 - protein, 240 aa, Prochlorococcus marinus str. MIT 9301; identical to SEQ ID NO: 12195

SEQ ID NO: 130265 - DNA, 729 bp, Herminiimonas arsenicoxydans
  CDS (1)..(729): transl_table=11
atgaacgaaactgatttcgccacgctggttgcgaccacgcaaaaaacgctgcagcacgtggcggatcagtttgcgcccgccgttttcgcttccagcctggcagcagaagaccaggtgctgaccgacatgatactgcgcagcaaactgccgatcacgattttcacgctggaaaccggccgcctgcatgcagaaacactgggcgtgctcgatcgcatcaaggaaacctacggtgtcgagatcgccttgtatcgtccgcagccggaagcggttgacgcctacgtcaggcaaaacggcttgaatgccttttatgaaagcgtggacatgcgcaaggagtgctgccgcatccgcaaggtcgaacccttgaatcgcgccttgcaaggcaatcgttcatggattaccggccagcgccgcgcgcaatcaagtacgcgcgccgaactccatgtgcaggaacaggatgacgcgcacgacatggtgaagttcaatccgctggcggactggtcggaagcagatgtctggcattacatccgcagcaacaacgtgccgtacaacccgctgcacgacaaaggctacccatccataggctgcgaaccctgcacccgcgccatacagcccggcgaagatgtacgcgcaggtcgctggtggtgggaaaacccggaatccaaggaatgcggtttgcacgtcgttgacggcaagctgatcagaatcaaacccgtatctactacagcgtga

SEQ ID NO: 130266 - protein, 242 aa, Herminiimonas arsenicoxydans
MNETDFATLVATTQKTLQHVADQFAPAVFASSLAAEDQVLTDMILRSKLPITIFTLETGRLHAETLGVLDRIKETYGVEIALYRPQPEAVDAYVRQNGLNAFYESVDMRKECCRIRKVEPLNRALQGNRSWITGQRRAQSSTRAELHVQEQDDAHDMVKFNPLADWSEADVWHYIRSNNVPYNPLHDKGYPSIGCEPCTRAIQPGEDVRAGRWWWENPESKECGLHVVDGKLIRIKPVSTTA

SEQ ID NO: 130267 - DNA, 684 bp, Bradyrhizobium sp. ORS278
  CDS (1)..(684): transl_table=11
gtggcggcgcttgatgcggcgctgcgcaacgcaacgccgcccgaggtcatcgaagcggcgcttcaggtgatcggccgcgatcggctcgcggtggtgtcgtcgttcggctcggagtcggcggcgctgctgaaagtcaccgccgatgtcgatccggcgattcccgtggtctttctcgacaccgggcacatgtttgcggagacgctcggctatcgcgaccagctcatcgacatcctcggtctgcgcgacgtgcgctcgatcgagccggatgccgcggcgctggcgcgcgaggatgccgataacgatctatggttctccgatcccgacacctgctgccgcatccgcaaggtggagccgctggcccgcgcgctggcgccattcaccggatggatcaacggccgcaagcgcttccagggtggcctgcgcgcggcgattgccgtggtcgagcaggacggcgcgcggatgaagttcaacccgttcgccaatgtcagtcgcgaggttatcgcggagatctatcgctcggccaatctgccgcagcatccgctggtggcctccggcttccgttcgatcggctgcatgccctgcaccagccgctcggacgcgggtgaggacgagcgcgccggccgctggcgcggtcgcggcaagacagagtgcggcatccacacgattgcgacaccggcggtgtag

SEQ ID NO: 130268 - protein, 227 aa, Bradyrhizobium sp. ORS278
MAALDAALRNATPPEVIEAALQVIGRDRLAVVSSFGSESAALLKVTADVDPAIPVVFLDTGHMFAETLGYRDQLIDILGLRDVRSIEPDAAALAREDADNDLWFSDPDTCCRIRKVEPLARALAPFTGWINGRKRFQGGLRAAIAVVEQDGARMKFNPFANVSREVIAEIYRSANLPQHPLVASGFRSIGCMPCTSRSDAGEDERAGRWRGRGKTECGIHTIATPAV

SEQ ID NO: 130269 - DNA, 774 bp, Synechococcus sp. WH 7803
  CDS (1)..(774): transl_table=11
atgaggaacggcatcattgcgatgacaggcgctgccgcggacttggattgcggcggtgatcccgcccagctgacgcgtctgagggaggaccttgagtccttagagcctgcgcagcggctgcagtgggcgcgggatcagttcgggtcgggattcgcgatgaccacgagctttgggatccaatcgtccgtgctccttcacatgctttctggtctgccggattttgaatcggtgccggtgatttgggtggataccggttatttgccccaagagacctatcgctacgccaaaacgctctgcgaccgtcttggtcttcaacccgatgtcgtccaatcgtctgtgtccccagcacggatggaagccctgcatgggcgactttgggaaacgggcagcgacagcgaccttgatcaataccttcaactgcgcaaagttgagcctctcgagagtgcgctcgatcgccttgctgtgcgctgttgggcgagtggggtgcgcagccgacagaccagtcacagaagcacgatgacggtgctggatccgatccgcggccgactctccctcaggccgcttctgcattggaccaatagagacatcttctattacatgcaggatcacgacctaccgcagcatcctctgtttgatcagggatattccacagttggcgattggcattccagtgctccagacggtgtggatggcgagggacgcagcacacgttttggtggacaacgacaggagtgtgggattcatgtgcctggggtgatgggtgacggcatttga

SEQ ID NO: 130270 - protein, 257 aa, Synechococcus sp. WH 7803
MRNGIIAMTGAAADLDCGGDPAQLTRLREDLESLEPAQRLQWARDQFGSGFAMTTSFGIQSSVLLHMLSGLPDFESVPVIWVDTGYLPQETYRYAKTLCDRLGLQPDVVQSSVSPARMEALHGRLWETGSDSDLDQYLQLRKVEPLESALDRLAVRCWASGVRSRQTSHRSTMTVLDPIRGRLSLRPLLHWTNRDIFYYMQDHDLPQHPLFDQGYSTVGDWHSSAPDGVDGEGRSTRFGGQRQECGIHVPGVMGDGI

SEQ ID NO: 130271 - DNA, 735 bp, Erwinia carotovora subsp. atroseptica SCRI1043; identical to SEQ ID NO: 12196
  CDS (1)..(735): transl_table=11

SEQ ID NO: 130272 - protein, 244 aa, Erwinia carotovora subsp. atroseptica SCRI1043; identical to SEQ ID NO: 12197

SEQ ID NO: 130273 - DNA, 735 bp, Yersinia pseudotuberculosis IP 32953; identical to SEQ ID NO: 12198
  CDS (1)..(735): transl_table=11

SEQ ID NO: 130274 - protein, 244 aa, Yersinia pseudotuberculosis IP 32953; identical to SEQ ID NO: 12199

SEQ ID NO: 130275 - DNA, 702 bp, Symbiobacterium thermophilum IAM 14863; identical to SEQ ID NO: 12200
  CDS (1)..(702): transl_table=11

SEQ ID NO: 130276 - protein, 233 aa, Symbiobacterium thermophilum IAM 14863; identical to SEQ ID NO: 12201

SEQ ID NO: 130277 - DNA, 705 bp, Bacillus cereus E33L
  CDS (1)..(705): transl_table=11
atgttgacgtatgaaacgtgggaagaaaataatgtttcattttcagaagaagatgaaacgaaaggcgcgctatctgttttaagttgggcttataaagaatatgaaggtgaaattgtatatgcatgtagcttcggagtggaagggatggtactactgcatcttataaaccaagtaaatccatctgctaaagttgtatttttagatacaaatgttcattttcaagaaacgtatgaattaattcaaaaagtacgagaacgatttccttcattaaatattatagaaaaacagccaaaacttacacttgatgaacaagccaaattgcatggtaacaagctatgggaaagcaatcctaatctttgttgtaagattagaaaaattttaccgttagaagaatcattagcgaatgaaaaagcgtggatatcggggttgaggagggaacaatcagaaacccgtaagcatacaaagtttataaatcaagatcatcgctttcaatctattaaagtttgtccgctcattcattggacgtggaaagaggtatggcgatatgtatacaagcatagcttgccgtataacccattacatgatattggatatccaagtattgggtgtgagaagtgtacgttgcctgtaggagagggtggcgattcaagagatggtagatgggctgggaaagtgaaaactgaatgtggtcttcattatcaataa

SEQ ID NO: 130278 - protein, 234 aa, Bacillus cereus E33L
MLTYETWEENNVSFSEEDETKGALSVLSWAYKEYEGEIVYACSFGVEGMVLLHLINQVNPSAKVVFLDTNVHFQETYELIQKVRERFPSLNIIEKQPKLTLDEQAKLHGNKLWESNPNLCCKIRKILPLEESLANEKAWISGLRREQSETRKHTKFINQDHRFQSIKVCPLIHWTWKEVWRYVYKHSLPYNPLHDIGYPSIGCEKCTLPVGEGGDSRDGRWAGKVKTECGLHYQ

SEQ ID NO: 130279 - DNA, 711 bp, Bacillus licheniformis ATCC 14580
  CDS (1)..(711): transl_table=11
atgaacgatgttttaacgtatagcacatgggatgaaaaagcttctgaagaggtgatggatactttcagcggcgagatggacgttttgaaatgggcgtacagcacgtatcaaaaaatcgtttacgcctgcagcttcggcgcggaaggaatcgttttgatcgacttgatttcaaaggttgtgaaagaagcggacatcgtgtttttagatacaggactgcattttccggaaacatatgagctgatcaatgaagtgaaagatcgctatcccggtctgtcgatccactttttaaaacccggcctctcacttgaagagcaggaaaaacgctatggcagcgaactttggaagcgccagccggaccagtgctgccgccttcgcaaaatcgagccgctcagggagcatctgtcaggcatggaagcctggattaccgggctgaggcgggagcagtcggaaacacggaaacatgtccgatatatcaacaaggacgacaattttaaactgattaaaatctgcccccttattcactggacatgggaggatgtctggacttacattaagctgaatcagctgacgtatcacaagcttcatgatcaagattatccgagcatcggctgtgaggtgtgtacgcttcccgtgacagacagcggcaatttaagagcgggaaggtgggcccaccaggaaaaaacagaatgcgggctgcatcaattccggtag

SEQ ID NO: 130280 - protein, 236 aa, Bacillus licheniformis ATCC 14580
MNDVLTYSTWDEKASEEVMDTFSGEMDVLKWAYSTYQKIVYACSFGAEGIVLIDLISKVVKEADIVFLDTGLHFPETYELINEVKDRYPGLSIHFLKPGLSLEEQEKRYGSELWKRQPDQCCRLRKIEPLREHLSGMEAWITGLRREQSETRKHVRYINKDDNFKLIKICPLIHWTWEDVWTYIKLNQLTYHKLHDQDYPSIGCEVCTLPVTDSGNLRAGRWAHQEKTECGLHQFR

SEQ ID NO: 130281 - DNA, 723 bp, Methylococcus capsulatus str. Bath; identical to SEQ ID NO: 12202
  CDS (1)..(723): transl_table=11

SEQ ID NO: 130282 - protein, 240 aa, Methylococcus capsulatus str. Bath; identical to SEQ ID NO: 12203

SEQ ID NO: 130283 - DNA, 762 bp, Silicibacter pomeroyi DSS-3
  CDS (1)..(762): transl_table=11
atgccgcttgacgagatccagacggaactgggccgcgaccggagcgttttgacgcagaaggtcgcggcgctcaacgcccgctacaagcatcacagcgccaccgatgtcatgcacggggcgctacgcgaggcgggcgatatcgcactggtgtcaagctttggcgcggaatcggtggtgttgttgcacatggcggcggtgatcgaccgccaggtgccggtgttgttcatcgacacccagatgctgtttgccgaaacgctggtctatcagcaggaggtgagcgagcgtctgggcctgaagaacgtgcaggtgatccgcgccgccgaggatgacgttgcccgcgacgacccctatggcgccctgcgcctgcgcgataccgatgcctgctgcaccctgcgcaagacgatcccactgcaacgagcgctgtcgggctatgacggctggatcaccgggcgcaagcggtttcaggccggcacccgcgccgcgctcgacttcttcgaggtcgaggacggcaccggccggatcaaggtcaacccgctggcccattgggcccccgaggacgtgcgcgcctatatggaggaaaaccgcctgccccggcatccgctggtggcacagggatacccctcgatcggctgcgcaccctgcacgtcgccggtggcgcccggagaggacccgcgcgccggacgctggcgcaaccagaacaaggaagaatgcggcatccatttcgtcgatggcaagatggtgcgcaacggagacaagacatga

SEQ ID NO: 130284 - protein, 253 aa, Silicibacter pomeroyi DSS-3
MPLDEIQTELGRDRSVLTQKVAALNARYKHHSATDVMHGALREAGDIALVSSFGAESVVLLHMAAVIDRQVPVLFIDTQMLFAETLVYQQEVSERLGLKNVQVIRAAEDDVARDDPYGALRLRDTDACCTLRKTIPLQRALSGYDGWITGRKRFQAGTRAALDFFEVEDGTGRIKVNPLAHWAPEDVRAYMEENRLPRHPLVAQGYPSIGCAPCTSPVAPGEDPRAGRWRNQNKEECGIHFVDGKMVRNGDKT

SEQ ID NO: 130285 - DNA, 726 bp, Bacillus clausii KSM-K16; identical to SEQ ID NO: 12204
  CDS (1)..(726): transl_table=11

SEQ ID NO: 130286 - protein, 241 aa, Bacillus clausii KSM-K16; identical to SEQ ID NO: 12205

SEQ ID NO: 130287 - DNA, 786 bp, Corynebacterium glutamicum ATCC 13032; identical to SEQ ID NO: 12206
  CDS (1)..(786): transl_table=11

SEQ ID NO: 130288 - protein, 261 aa, Corynebacterium glutamicum ATCC 13032; identical to SEQ ID NO: 12207

SEQ ID NO: 130289 - DNA, 735 bp, Pseudomonas syringae pv. syringae B728a
  CDS (1)..(735): transl_table=11
atgagccaacctttcgacgtcgctgaactggcgacgacctatgcgaccaaatctgcacaagacattctgaaactggccttcgagcacttcggcgacgacctgtggatctctttcagcggtgccgaggacgtggttctggtcgacatggcctggaagctgaacaagaacgtcaaggtcttcagcctggatacagggcgcctgcatgcgcaaacctatcgcttcatcgagcaggtccgcgagcactacaagatcgagatcgagatcgtttcgcccgatcacagcaagcttgaacctttcgtcaaggaaaagggcctgttcagcttttaccgggacggccatggcgaatgctgcggcatccgcaagatcgagccgctgcgtcgcaaactgtctggcgtcagcgcctgggcaaccggccagcgccgtgatcagagccccggcacccgcagcgccgttgctgcagtggaaatcgacagcgctttttcgacagccgagcgcacgctgtacaaattcaacccgttggcacaaatgagcagcgaggaaatctggggctacatccgcatgctggagctgccctacaacagcctgcacgagcgcggcttcatcagcatcggctgcgaaccctgcacccgcccggtattgccgaaccagcacgagcgcgaaggtcgctggtggtgggaagaagccacgcagaaggaatgcgggctgcatgcgggcaatctgatagtgcgcgactaa

SEQ ID NO: 130290 - protein, 244 aa, Pseudomonas syringae pv. syringae B728a
MSQPFDVAELATTYATKSAQDILKLAFEHFGDDLWISFSGAEDVVLVDMAWKLNKNVKVFSLDTGRLHAQTYRFIEQVREHYKIEIEIVSPDHSKLEPFVKEKGLFSFYRDGHGECCGIRKIEPLRRKLSGVSAWATGQRRDQSPGTRSAVAAVEIDSAFSTAERTLYKFNPLAQMSSEEIWGYIRMLELPYNSLHERGFISIGCEPCTRPVLPNQHEREGRWWWEEATQKECGLHAGNLIVRD

SEQ ID NO: 130291 - DNA, 735 bp, Pseudomonas fluorescens Pf-5
  CDS (1)..(735): transl_table=11
atgaccccatcgttcgacgtcgctgaactcgccgcgacctatgccaacaagtctgcccaggacattctcaaactggcctttgcccagttcggcgatgacctgtggatttccttcagcggtgccgaggatgtggtgctggtggacatggcctggaagctgaacaagaacgtcaaggtgttcagcctggataccggccgcctgcacccggaaacctaccgtttcatcgatcaggtgcgtgagcactacaagatccagatcgagctgatctcgccggaccacagcaagctcgaacccttcgtcaaggaaaagggcctgttcagcttctataaggacggccatggcgagtgctgcggtatccgcaagatcgaaccgctgcggcgcaagctgtccaccgtcagcgcctgggccaccggccagcgccgtgatcagagcccgggtacccgcagccaggtggcagtgctggaagtcgacacagccttctccacgccggagcgcaccctgtacaagttcaacccactggcacaaatgagcagcgaggagatctggggttacatccgcatgctcgaactgccctacaacagcctgcatgaacgcggcttcatcagcatcggctgcgagccctgcacccgcccggtactgcccaaccagcacgagcgcgaaggccgctggtggtgggaggaagccacccagaaagaatgcggcttgcacgccggcaacatcatcagcaaagcctga

SEQ ID NO: 130292 - protein, 244 aa, Pseudomonas fluorescens Pf-5
MTPSFDVAELAATYANKSAQDILKLAFAQFGDDLWISFSGAEDVVLVDMAWKLNKNVKVFSLDTGRLHPETYRFIDQVREHYKIQIELISPDHSKLEPFVKEKGLFSFYKDGHGECCGIRKIEPLRRKLSTVSAWATGQRRDQSPGTRSQVAVLEVDTAFSTPERTLYKFNPLAQMSSEEIWGYIRMLELPYNSLHERGFISIGCEPCTRPVLPNQHEREGRWWWEEATQKECGLHAGNIISKA

SEQ ID NO: 130293 - DNA, 762 bp, Colwellia psychrerythraea 34H; identical to SEQ ID NO: 12208
  CDS (1)..(762): transl_table=11

SEQ ID NO: 130294 - protein, 253 aa, Colwellia psychrerythraea 34H; identical to SEQ ID NO: 12209

SEQ ID NO: 130295 - DNA, 735 bp, Pseudomonas syringae pv. phaseolicola 1448A
  CDS (1)..(735): transl_table=11
atgagccaacctttcgacgtcgctgaactggcgacgacctatgcgaacaagtctgcacaagacattctgaaactggccttcgaacacttcggtgatgaactatggatctccttcagcggcgccgaagacgtcgtgctggtagacatggcctggaaactgaacaaaaacgtcaaggtcttcagtctcgacaccgggcgcctgcacccggaaacctatcgcttcattgaacaggtccgtgaccactacaagatcgagatcgaaatcatctcgccggaccagagcaagctcgaacccttcgtcaaggaaaaaggcctgttcagcttttaccgggatggtcatggtgaatgctgcggcgtacgcaagattgagccgctgcgccgcaaactgtctggcgtcacagcctgggccaccggccagcgccgcgaccagagccctggcacacgcagcgccgttgccgcactggaaatcgacagcgcgttctcgaccgccgagcgcaccctgtacaaattcaacccgttggcgcagatgagcagcgaagaaatctggggctacatccgcatgctggaactgccctacaacagcctgcacgagcgcggtttcatcagcatcggctgcgaaccctgcacccgcccggtagtgccgaaccagcacgagcgcgaaggtcgctggtggtgggaagaagccacacagaaggaatgcgggctgcatgcaggcaacctgatagcgcgcaactga

SEQ ID NO: 130296 - protein, 244 aa, Pseudomonas syringae pv. phaseolicola 1448A
MSQPFDVAELATTYANKSAQDILKLAFEHFGDELWISFSGAEDVVLVDMAWKLNKNVKVFSLDTGRLHPETYRFIEQVRDHYKIEIEIISPDQSKLEPFVKEKGLFSFYRDGHGECCGVRKIEPLRRKLSGVTAWATGQRRDQSPGTRSAVAALEIDSAFSTAERTLYKFNPLAQMSSEEIWGYIRMLELPYNSLHERGFISIGCEPCTRPVVPNQHEREGRWWWEEATQKECGLHAGNLIARN

SEQ ID NO: 130297 - DNA, 720 bp, Dechloromonas aromatica RCB; identical to SEQ ID NO: 12210
  CDS (1)..(720): transl_table=11

SEQ ID NO: 130298 - protein, 239 aa, Dechloromonas aromatica RCB; identical to SEQ ID NO: 12211

SEQ ID NO: 130299 - DNA, 783 bp, Thermobifida fusca YX; identical to SEQ ID NO: 12212
  CDS (1)..(783): transl_table=11

SEQ ID NO: 130300 - protein, 260 aa, Thermobifida fusca YX; identical to SEQ ID NO: 12213

SEQ ID NO: 130301 - DNA, 768 bp, Prochlorococcus marinus str. NATL2A; identical to SEQ ID NO: 12214
  CDS (1)..(768): transl_table=11

SEQ ID NO: 130302 - protein, 255 aa, Prochlorococcus marinus str. NATL2A; identical to SEQ ID NO: 12215

SEQ ID NO: 130303 - DNA, 726 bp, Anabaena variabilis ATCC 29413; identical to SEQ ID NO: 12216
  CDS (1)..(726): transl_table=11

SEQ ID NO: 130304 - protein, 241 aa, Anabaena variabilis ATCC 29413; identical to SEQ ID NO: 12217

SEQ ID NO: 130305 - DNA, 735 bp, Pseudomonas fluorescens PfO-1
  CDS (1)..(735): transl_table=11
atgagcccaacgttcgacgtcgtggaactcgccacgacctatgccaacaaatccgcgcaggacatcctcaaactcgcgttcgccgagttcggcgatgacctgtggatatctttcagcggcgccgaggatgtggtgctggtggacatggcctggaagctgaacaagaacgtcaaggtgttcagtctcgacaccggccgcctgcatccggaaacctaccgtttcatcgatcaggtgcgcgagcactacaagatcgacatcgaactggtctcgccggactacacgaaacttgaaccgttcgtgaaggaaaaaggcctgttcagtttctacaaggacggtcacggcgaatgctgcgggatccgcaagatcgagccgctgcgccgcaagctgtccggcgtcaaagcctgggccaccggccagcgccgcgatcaaagccctggcacccgcagcgctgtggcggtgatggaaatcgatacagcgttctccaccccggagcgcaccctgtacaagttcaacccgctggcacagatgaccagcgaggaaatctggggctacatccgcatgctggagctgccgtacaacagcctgcacgagcgcggctttatcagcatcggctgcgaaccgtgcactcgtcctgtcctgccgaaccagcacgaacgtgaaggtcgctggtggtgggaagaagcgacccaaaaagaatgcgggttgcatgccgggaacatcatcagcaaggcataa

SEQ ID NO: 130306 - protein, 244 aa, Pseudomonas fluorescens PfO-1
MSPTFDVVELATTYANKSAQDILKLAFAEFGDDLWISFSGAEDVVLVDMAWKLNKNVKVFSLDTGRLHPETYRFIDQVREHYKIDIELVSPDYTKLEPFVKEKGLFSFYKDGHGECCGIRKIEPLRRKLSGVKAWATGQRRDQSPGTRSAVAVMEIDTAFSTPERTLYKFNPLAQMTSEEIWGYIRMLELPYNSLHERGFISIGCEPCTRPVLPNQHEREGRWWWEEATQKECGLHAGNIISKA

SEQ ID NO: 130307 - DNA, 717 bp, Rhodobacter sphaeroides 2.4.1
  CDS (1)..(717): transl_table=11
gtggcggcgctcaacggtcgctacaagcaccacggcgcgacggccgtgctcgaacatgcgctgaaggatgcggatctgggccgggtggcgcttgtctcctccttcggggccgagtcggtcgtgcttttgcatctcgtctcggtcatcgcgcccgagacgccggtgatcttcatcgacacgcggatgctgtttcaggagacgctcgactatcagcgcgagctggccgacacgctgcacctctgcgacatccgcacgatccgggcgacccagccgcggatcgccttcgaggatccggacgggacgctgaaccgctacaacaccgacgcctgctgcgcggtgcgcaaggtcgagccgctcgaacgggcgctcaagcatttcgatggctggatcaccggccgcaagcgctaccagagcggcacgcgggcggcggtcgagttcttcgaggccgaggacgaccggcgcatcaaggtcaatccgctcgcccactgggggcgcgaggatctggaagactatatcgtcaacaacaacctgccgcgtcatccgctggtcgccaggggctatccctcgatcggctgcgagccctgcacctcgccggtggccgagggagaggatccccgcgcgggccgctggcgcggcagcgccaagaccgaatgcggcatccatttcatcaacggccgcgcggtgcgcggacccgtgaacaaggaggacgcggcatga

SEQ ID NO: 130308 - protein, 238 aa, Rhodobacter sphaeroides 2.4.1
MAALNGRYKHHGATAVLEHALKDADLGRVALVSSFGAESVVLLHLVSVIAPETPVIFIDTRMLFQETLDYQRELADTLHLCDIRTIRATQPRIAFEDPDGTLNRYNTDACCAVRKVEPLERALKHFDGWITGRKRYQSGTRAAVEFFEAEDDRRIKVNPLAHWGREDLEDYIVNNNLPRHPLVARGYPSIGCEPCTSPVAEGEDPRAGRWRGSAKTECGIHFINGRAVRGPVNKEDAA

SEQ ID NO: 130309 - DNA, 747 bp, Synechococcus sp. CC9605; identical to SEQ ID NO: 12218
  CDS (1)..(747): transl_table=11

SEQ ID NO: 130310 - protein, 248 aa, Synechococcus sp. CC9605; identical to SEQ ID NO: 12219

SEQ ID NO: 130311 - DNA, 708 bp, Geobacter metallireducens GS-15
  CDS (1)..(708): transl_table=11
atgactgcaaccattcagaaaacaatcccccaacttccccaggacgccactccacaggacatcctcagggccggagtgtcggcgaccgagggttctgtcaagctcgcctgctccttctctgtggaggacgtcatcatcatcgacatggcaaaggaactggggtgcccgattgggatattcgccctcgacacggggcgcctccacgaggagacctacgaggtggcagacgccatcacggagcgctaccggatcccgatagactggtatttcccgcggcacgagacggtggaaaagctcgaacgcgacaaggggcttttctctttccgtgaatccctggataaccgccatgagtgctgccacatccgcaaggtggagccacttggccgggcgctcaaggggcttgccggctggatcaccgggctccgccgcgaacagagcgtcacgcggaccggcctcgctcccatcgagagcgacgaagcaaacggcggcatcctgaaaatcaacccgctcctggagtggagtgaggaacaggtctgggagtacgccgaaaagcgccgggtaccggtgaaccgtctccataaacagggatacccttcgatcggctgcgctccctgcacccgccccgtggccccgggcgagcatccccgagccggacgatggtggtgggagaatccggagcataaagagtgcgggttgcaccggcactga

SEQ ID NO: 130312 - protein, 235 aa, Geobacter metallireducens GS-15
MTATIQKTIPQLPQDATPQDILRAGVSATEGSVKLACSFSVEDVIIIDMAKELGCPIGIFALDTGRLHEETYEVADAITERYRIPIDWYFPRHETVEKLERDKGLFSFRESLDNRHECCHIRKVEPLGRALKGLAGWITGLRREQSVTRTGLAPIESDEANGGILKINPLLEWSEEQVWEYAEKRRVPVNRLHKQGYPSIGCAPCTRPVAPGEHPRAGRWWWENPEHKECGLHRH

SEQ ID NO: 130313 - DNA, 726 bp, Prochlorococcus marinus str. MIT 9312
  CDS (1)..(726): transl_table=11
atgattgaaaacatccaaaaagatattcaacctgaattaataaataaatataatcaagagctaagagatatgactgctcaagaaatgcttacatggggttataaagagtttgataatcaattcgcaattacaacaagttttggtatacagtcatcagtccttttaaatatggtcagtaaattatgtctacaaaaaaaaatcaaaatattttggatagatacaggttatttacctccagaaacataccattatgctgaaaaacttattgtcgatttatctttagaaatagaagttctgcaaagtgaattatccccagcaagaatggagactatacacggaaaactttgggaaacaaataaagcgagtgatttagataagtatcatgatttgagaaagataaaacctttggaaaatggtctagaaaaatataaaattaactgttgggcaagcggtgttagatcaagccaaacagaaaatagaaaagaaatgaaattcttggacctaattcgtcaaagactttctctaaggcctttattaaattggacaaataaagatattttttattatatgaaagagaataatttacctgcccatccacttttcagcaaaggttattctactgtaggtgattggcactcaagcactcctgatggtaataaaacaaaaggaagagcaacaagatttggggggattaaacaagagtgtggaatacacactaataattaa

SEQ ID NO: 130314 - protein, 241 aa, Prochlorococcus marinus str. MIT 9312
MIENIQKDIQPELINKYNQELRDMTAQEMLTWGYKEFDNQFAITTSFGIQSSVLLNMVSKLCLQKKIKIFWIDTGYLPPETYHYAEKLIVDLSLEIEVLQSELSPARMETIHGKLWETNKASDLDKYHDLRKIKPLENGLEKYKINCWASGVRSSQTENRKEMKFLDLIRQRLSLRPLLNWTNKDIFYYMKENNLPAHPLFSKGYSTVGDWHSSTPDGNKTKGRATRFGGIKQECGIHTNN

SEQ ID NO: 130315 - DNA, 672 bp, Frankia sp. CcI3
  CDS (1)..(672): transl_table=11
atggatgccgcgttgcaggcccgggcgctgcgggccggggacgacctcgagggcgcgccggcggaggagatcctgcgctgggcggtcggggaattcgggacgaagctggcgatcgccgcctcgatggctgaggcgatcctcgtggacatgctcgcccggattcggtccgacgtccccgtggttttcatcgacaccggttatcacttccccgagaccgtcggtacccgggacgcggtggccggaacctacgacctgccgatcatcagcgcccgtccgcagctcaccgtcgtcggccaggacgccgtctacggccaggacctctaccggaccgacccggacctgtgctgccggatgcgcaaggtcgttccgctggatcgggccctggcgccctaccgtgcctgggccgcggggtcgcggcgggcggagtcgcccagccgggcgaagctccgggtcgtcgactgggacgcccgacggggcaaggtgaagatccacccgctcgcggcttggaccgacgaggacgtcgaacgctacgtggccgagcacggcgtcatcgtcaacccgctcctctccgatggttacgactcggtcggctgctggccgtgcacccggcggggcgccggccgggagggccggtgggtcggttcgatcaagacggagtgcggcatccactga

SEQ ID NO: 130316 - protein, 223 aa, Frankia sp. CcI3
MDAALQARALRAGDDLEGAPAEEILRWAVGEFGTKLAIAASMAEAILVDMLARIRSDVPVVFIDTGYHFPETVGTRDAVAGTYDLPIISARPQLTVVGQDAVYGQDLYRTDPDLCCRMRKVVPLDRALAPYRAWAAGSRRAESPSRAKLRVVDWDARRGKVKIHPLAAWTDEDVERYVAEHGVIVNPLLSDGYDSVGCWPCTRRGAGREGRWVGSIKTECGIH

SEQ ID NO: 130317 - DNA, 813 bp, Novosphingobium aromaticivorans DSM 12444
  CDS (1)..(813): transl_table=11
atggacagcaccgtgacccgcaagatcgacctgctcgacaccgcgccgcgctttaccgagacggacgcgatccgcctcaacaacctgttccggggcaccgacacgcacgacatgctgcgttcggtgatccgcgacgggctggcgggcgacctcgcggtcgtgtcgagcttcggcgcggaaagcgcggtgctgctccacctgatcgccgaagtcgacccttcggtgccggtcctgtttctcgaaacgggcaagcatttccgcgagaccgttgcctatcgcgacgagttgatcggcttcctgggcatgaccaacctgcagatcatcgaacccgacgcggcggtcatcgccaagaaggacgagaacgggctgcgctggtcctgggacccggatggctgctgcgagatccgcaaggtcgagccgctggccagggccctgctccacttcgatgcatcgatcaccggccgcaagggcttccagtcgaagacccgcgcagggcttccacggttcgagatcgaccgttcggacgcgcaaggacggttgaagatcaacccgctcgcgtcatgggacaagaccatgctcgaggcctatttcgcagagcatggcttgccgccgcatccgctggtcgcgcagggctatccctcgatcggctgcgcgccctgcaccagcaaggttgcccccggtgaagacccgcgctcgggccgctggaagggctgggacaagaccgaatgcggcatccattcgcccaccgacgacgaagccgcaggcaagaagcctggcgacgaactgcccccaggatacgaaccggtcttctga

SEQ ID NO: 130318 - protein, 270 aa, Novosphingobium aromaticivorans DSM 12444
MDSTVTRKIDLLDTAPRFTETDAIRLNNLFRGTDTHDMLRSVIRDGLAGDLAVVSSFGAESAVLLHLIAEVDPSVPVLFLETGKHFRETVAYRDELIGFLGMTNLQIIEPDAAVIAKKDENGLRWSWDPDGCCEIRKVEPLARALLHFDASITGRKGFQSKTRAGLPRFEIDRSDAQGRLKINPLASWDKTMLEAYFAEHGLPPHPLVAQGYPSIGCAPCTSKVAPGEDPRSGRWKGWDKTECGIHSPTDDEAAGKKPGDELPPGYEPVF

SEQ ID NO: 130319 - DNA, 753 bp, Desulfitobacterium hafniense Y51
  CDS (1)..(753): transl_table=11
atgaacagatcggagctcgatttggagcttgatgaaataaaccaagcctttgccggggaagatccccgcaagcttttggcctatgtggtggaaaaaatcggtccggcgcggattgctctggcttccagcctttccatcgaagatcaggtgctgacccagatgttattgaaggtcgatgcccgggcccggatcttctttatcgatacgggacggaattttcagcagacttatgatctgatggaggagaccatgggccgctataagttccactatgaggtatatgcgccggagaattcggagctggagccgtttctggcggaatatggccccaacgctttttatgacaaggttgaactgcgtcaaaaatgttgtgagctgagaaaagtcaggcccttgcagcgggtcttatctgccgtggacggctggatttgcggactgcgcagggagcagagccccacccgccaggaaatcggtttgctggaatgggattctcaccacgctatctataaagtgaatcctctggcggcctggagcgaagagcaggtttgggcttatatccgccgggaaaacattccctacagttccctatacaacaaaggtttccgcagcattggctgtcagccctgcacccgggcggtggcccccggggcggatgtacgcagcggcaggtggtggtgggaagatccctctaaaaaagaatgcgggctgcatccatccctgaacccgcctgcaaaggaggaagaaaagcgatga

SEQ ID NO: 130320 - protein, 250 aa, Desulfitobacterium hafniense Y51
MNRSELDLELDEINQAFAGEDPRKLLAYVVEKIGPARIALASSLSIEDQVLTQMLLKVDARARIFFIDTGRNFQQTYDLMEETMGRYKFHYEVYAPENSELEPFLAEYGPNAFYDKVELRQKCCELRKVRPLQRVLSAVDGWICGLRREQSPTRQEIGLLEWDSHHAIYKVNPLAAWSEEQVWAYIRRENIPYSSLYNKGFRSIGCQPCTRAVAPGADVRSGRWWWEDPSKKECGLHPSLNPPAKEEEKR

SEQ ID NO: 130321 - DNA, 726 bp, Saccharophagus degradans 2-40
  CDS (1)..(726): transl_table=11
atgagcaacaccatcgacttcaccgatattgatgcgaagctgcaacaagcttcaccgcaagaaatactcgcttacgcgcttgccgaaaacgacaacctcgcaatatcgtttagcggtgcagaagatgttgtactagttgatatggcttctaaaataaaacccggcgttcaggtgttttgtttagatactggcagattacatgcagagacctaccaatttattgagcaagtacgcaaacactacgatattaagctcgacgtgttgtttccagattctgccgcagtacagaagcttgtggcggaaaaaggcctttttagctttttcgaagacaatcaccaagaatgctgtggcatacgcaaagtaggccctctgcgcaaaaaactattggaagtagacgcttgggttacgggccagcgcaaagatcagagccctggcacacgcgcctctattccggtaatccaaaacgatcgtgtttttgcacgcccaggagacaccctaaccaaatttaaccccttggttaattggacatcacaacaggtttgggattacattcgctctgaaggcgtaccatacaacagcctgcacgatcgaggctttgtctctataggctgcgaaccctgcacacgcccaacgggccctggccagcatgagcgtgaaggccgctggtggtgggaagaagccaccaagaaagaatgcggtttacacgccactaacgttaaaaaatag

SEQ ID NO: 130322 - protein, 241 aa, Saccharophagus degradans 2-40
MSNTIDFTDIDAKLQQASPQEILAYALAENDNLAISFSGAEDVVLVDMASKIKPGVQVFCLDTGRLHAETYQFIEQVRKHYDIKLDVLFPDSAAVQKLVAEKGLFSFFEDNHQECCGIRKVGPLRKKLLEVDAWVTGQRKDQSPGTRASIPVIQNDRVFARPGDTLTKFNPLVNWTSQQVWDYIRSEGVPYNSLHDRGFVSIGCEPCTRPTGPGQHEREGRWWWEEATKKECGLHATNVKK

SEQ ID NO: 130323 - DNA, 705 bp, Acidobacteria bacterium Ellin345
  CDS (1)..(705): transl_table=11
atgagtagcacaacattcgatctcggattccaggccaaaattgccgctgcgcaagctctcgtgcaggaatccatcgaacacgcgaagcgaccgtgcttgacgtgcagcttccaggcagaagacgtcgtggtgcttgacctgcttcggcaagtggtgcctgacatccccgtactgttcctcgataccggatatcacttcgcggaggtctatcagtaccgggacgagatcgcctcgaaatggcggctgaacctaatcaatctgctgcccaagcaatccgtggccgagcaggagagtgcgtttggcattctttaccaaactgcgccggaccgctgttgcggtgctcgaaaagtagaaccgctgttccgcgccctggagaattattcgacatggttcacggggctgcgccgtgagcagtccaagagtcgatcggcgctgcagtcgatcgatctctttacgctgccaaccggaacggagattcagaaggtcagcccacttgccgagtggagcacccgggatgtgtggacgtacgcctcggcacatggcatcccgttgcttcccctttatgagaagggctactccagcattggatgtgagccctgcacgagcctgccctccgagggcgatcctcgatctggccgatggggcggccacaagcttgagtgcggtattcacatccaaccgtcggcaacttccgagaaaccctaa

SEQ ID NO: 130324 - protein, 234 aa, Acidobacteria bacterium Ellin345
MSSTTFDLGFQAKIAAAQALVQESIEHAKRPCLTCSFQAEDVVVLDLLRQVVPDIPVLFLDTGYHFAEVYQYRDEIASKWRLNLINLLPKQSVAEQESAFGILYQTAPDRCCGARKVEPLFRALENYSTWFTGLRREQSKSRSALQSIDLFTLPTGTEIQKVSPLAEWSTRDVWTYASAHGIPLLPLYEKGYSSIGCEPCTSLPSEGDPRSGRWGGHKLECGIHIQPSATSEKP

SEQ ID NO: 130325 - DNA, 762 bp, Silicibacter sp. TM1040
  CDS (1)..(762): transl_table=11
atgacccgtatagatcaggagatcaggggccatcccgccgctgctggcagcgctgaggccctggccgagcaggttgcggcgctcaatgcccgcttcaaacaccactcggccacctccgtgatggaaggggcgctgcgggatgctggcaatatcgcgctggtgtcgtcctttggggcggaatcggtggtgctgttgcatatggccgccgtgatcgacccctcggtgccggtgctctttgtggacacggaactcttgttcacagagacgctggtctaccagcaagaagtgagcgagcgcctaggcctcaggaatgtgcatgtcatcaaggcggatgacatcgccgaaaaagacccctatggcgcgatgcggttttccgacaccgacgcctgctgcaccctgcgcaagaccattccgctgcaaaaggcgctcgccggctatgacggctggatcaccgggcgcaaacggtttcagtccggcacccgcgccgcgctcgacttctttgaggtcgaggatggcaccggacgaatgaagatcaacccactggcccattgggcgcccgaagacgtgcgcgcctatatggatgaaaaccgcctgccccgtcacccgctggtggccaagggctatccatcgatcggctgcgaaccctgcaccagcccggtcgcagaaggcgaagacccccgcgccggtcgctggcgcaaccagaacaaggaagaatgcggcatccacgttgtggatggcaaattcgtccgtacaggagcttga

SEQ ID NO: 130326 - protein, 253 aa, Silicibacter sp. TM1040
MTRIDQEIRGHPAAAGSAEALAEQVAALNARFKHHSATSVMEGALRDAGNIALVSSFGAESVVLLHMAAVIDPSVPVLFVDTELLFTETLVYQQEVSERLGLRNVHVIKADDIAEKDPYGAMRFSDTDACCTLRKTIPLQKALAGYDGWITGRKRFQSGTRAALDFFEVEDGTGRMKINPLAHWAPEDVRAYMDENRLPRHPLVAKGYPSIGCEPCTSPVAEGEDPRAGRWRNQNKEECGIHVVDGKFVRTGA

SEQ ID NO: 130327 - DNA, 723 bp, Myxococcus xanthus DK 1622; identical to SEQ ID NO: 12220
  CDS (1)..(723): transl_table=11

SEQ ID NO: 130328 - protein, 240 aa, Myxococcus xanthus DK 1622; identical to SEQ ID NO: 12221

SEQ ID NO: 130329 - DNA, 756 bp, Rubrobacter xylanophilus DSM 9941; identical to SEQ ID NO: 12222
  CDS (1)..(756): transl_table=11

SEQ ID NO: 130330 - protein, 251 aa, Rubrobacter xylanophilus DSM 9941; identical to SEQ ID NO: 12223

SEQ ID NO: 130331 - DNA, 738 bp, Mesorhizobium sp. BNC1; identical to SEQ ID NO: 12224
  CDS (1)..(738): transl_table=11

SEQ ID NO: 130332 - protein, 245 aa, Mesorhizobium sp. BNC1; identical to SEQ ID NO: 12225

SEQ ID NO: 130333 - DNA, 663 bp, Cytophaga hutchinsonii ATCC 33406
  CDS (1)..(663): transl_table=11
atgaataaggaagaaatacatctgaaacttacagaatatcaggaaaaaggcttgaagctttttacaacttcatcttttcaaacacatagtattgtattgttacatatactgagtgaatttgatccgtctattccggtatattttattaatacaggctaccatttccccgaaacggttctttacagagatcagattgcagatctgttcaatcttaaaaatattaaagttgtatcttctgctactccaagaaacatgcagaaagatgctgaaggcagattgctttttacatctgatccggattattgctgctatttaaataaagtacagccgctggatgctgttctaccggattatgatatctggattaatggtgtacgtgccgatcagagtgccgtgcgaaaaagtttctccgttgagcagcctgctccacatgatacgattcgtttccaccccatgctggattgggatgtgcgtatgatcgaaaagtatattaaagagcataaaattccccgtcatccgctggaagaaaaaggttatttaagtatcggctgcgaaccatgtacgcgtaagtttgatcttgaaacatacaacagacaaggccgttggtttggattgaataaaacggaatgtgggttaaatacagaattggttagtaaaaaataa

SEQ ID NO: 130334 - protein, 220 aa, Cytophaga hutchinsonii ATCC 33406
MNKEEIHLKLTEYQEKGLKLFTTSSFQTHSIVLLHILSEFDPSIPVYFINTGYHFPETVLYRDQIADLFNLKNIKVVSSATPRNMQKDAEGRLLFTSDPDYCCYLNKVQPLDAVLPDYDIWINGVRADQSAVRKSFSVEQPAPHDTIRFHPMLDWDVRMIEKYIKEHKIPRHPLEEKGYLSIGCEPCTRKFDLETYNRQGRWFGLNKTECGLNTELVSKK

SEQ ID NO: 130335 - DNA, 804 bp, Trichodesmium erythraeum IMS101; identical to SEQ ID NO: 12228
  CDS (1)..(804): transl_table=11

SEQ ID NO: 130336 - protein, 267 aa, Trichodesmium erythraeum IMS101; identical to SEQ ID NO: 12229

SEQ ID NO: 130337 - DNA, 774 bp, Synechococcus sp. CC9311; identical to SEQ ID NO: 81491
  CDS (1)..(774): transl_table=11

SEQ ID NO: 130338 - protein, 257 aa, Synechococcus sp. CC9311; identical to SEQ ID NO: 81492

SEQ ID NO: 130339 - DNA, 798 bp, Shewanella sp. MR-4
  CDS (1)..(798): transl_table=11
atggctgatcttgattctggggtgacgggttccggcttgccgaacgcgttgcagagcgtggtaagtcacagcgaacttaaagcgctgctgacggcgcctaaggatgtgcagcgagcggaactggaacgcattaatcgcttcttggccggattgacggctcaagaacgagtgctctggggcttagcctatttgccgggtaatcacgcgctgtcatccagttttgggatccaggcggcggtgatgctgcatatggtgagtcaggtgcaatcggatattccggtgatcttaacggatactgggtatctctttcctgagacataccagtttattgaccagcttaccgagcgcttatccttaaacctcaaggtttaccaagcgccgatgacctcggcatggcaggaagcgcgttttggcaagctgtgggagcagggcttagatgggctcgagcgttacaatcgactgaataaagtggagccgatgcaacgtgctttggcagaacttgaagtcggcacttggtttgcgggacttcgtcgcagtcagtcgagcactcgcgaagagttaccgatattggctatccacggaactcgctttaagctgcttccgattatcgagtggtcgaacaaagatgtgcatttgtatctgacgcaatttgacttgccttaccatccgctatgggatcaagggtatgtttctgttggggatacccattcgagtaaacccttagaattagggatgactgaagaagaaacccgctttaatggcttaaaacgcgaatgcggtttgcattacgaaatatag

SEQ ID NO: 130340 - protein, 265 aa, Shewanella sp. MR-4
MADLDSGVTGSGLPNALQSVVSHSELKALLTAPKDVQRAELERINRFLAGLTAQERVLWGLAYLPGNHALSSSFGIQAAVMLHMVSQVQSDIPVILTDTGYLFPETYQFIDQLTERLSLNLKVYQAPMTSAWQEARFGKLWEQGLDGLERYNRLNKVEPMQRALAELEVGTWFAGLRRSQSSTREELPILAIHGTRFKLLPIIEWSNKDVHLYLTQFDLPYHPLWDQGYVSVGDTHSSKPLELGMTEEETRFNGLKRECGLHYEI

SEQ ID NO: 130341 - DNA, 798 bp, Shewanella sp. MR-7; identical to SEQ ID NO: 12230
  CDS (1)..(798): transl_table=11

SEQ ID NO: 130342 - protein, 265 aa, Shewanella sp. MR-7; identical to SEQ ID NO: 12231

SEQ ID NO: 130343 - DNA, 738 bp, Alkalilimnicola ehrlichei MLHE-1; identical to SEQ ID NO: 12232
  CDS (1)..(738): transl_table=11

SEQ ID NO: 130344 - protein, 245 aa, Alkalilimnicola ehrlichei MLHE-1; identical to SEQ ID NO: 12233

SEQ ID NO: 130345 - DNA, 735 bp, Hyphomonas neptunium ATCC 15444; identical to SEQ ID NO: 12234
  CDS (1)..(735): transl_table=11

SEQ ID NO: 130346 - protein, 244 aa, Hyphomonas neptunium ATCC 15444; identical to SEQ ID NO: 12235

SEQ ID NO: 130347 - DNA, 804 bp, Pseudomonas aeruginosa UCBPP-PA14; identical to SEQ ID NO: 12236
  CDS (1)..(804): transl_table=11

SEQ ID NO: 130348 - protein, 267 aa, Pseudomonas aeruginosa UCBPP-PA14; identical to SEQ ID NO: 12237

SEQ ID NO: 130349 - DNA, 1281 bp, Solibacter usitatus Ellin6076
  CDS (1)..(1281): transl_table=11
ttggataatctccccgaattcgaggcggcaaccgcctccgaagtcctttcctgggctatcgatacttttggcgagtccttcgcgattgcaaccagctttcaaaaggaaggcatggcaatcgtggatctggcctcgcgtatctcctccgaaattcgggttttcacattagacacgggccgtctgccggatgagacctaccagatgatggaaatggtccggcggcgctatggaattcaggtggaagtgatcttccccgaccgggcggaggtggaatctctggtcacgatccacggccccaacctattctatgcgagcgttcccggacgggaacgctgctgcgaagtgcgcaaggtccgtccgctggagcgcaagctgcaaagcctgaaggcttgggcgaccgggctgcgccgcgatcaatccgcgacacgctccgccgttcccaaggttgcgcgggtggacggccggctcaagctcaatccactggccgattggacggccgcgcaggttgaagaataccttgcgcggcacaacgttccgctccaccctctctatgagcgcggttataccagcatcggctgcgccccgtgcacgcgcccggttgagcctggcgaaagcgagcgcgccggacgctggtggtgggaagaagacgccaagaaagaatgtggaattcactttgccgccgatggcagtatgcgccgcggccaggcaggcgaggcacaagaggacgagatgcataaaggattcacgctgtggtttaccggcatgagcggcgccggcaagagtaccatctcccgccaactcgagttgaaactgcgtgagcgcggcgcacgtgtggaggtgctagacggcgatgtggtgcgcacccatctttccaaggggctcggcttcagcaaggaagatcgcgacgaaaacatccgccgcatcggcttcgtctgcgagctgctctcgcgcaatggcgtgatcgcgatcgcggcggcgatctctccgtaccgcgcggtccgcgacgaagtgcgcgcgcgcatccccaatttcgtggaggtctacgtggagtgtcccgtggaggtgctggcggagcgtgacgtcaaaggactctacaaacgtgcgcttgccggagagatcgcgcacttcaccggcatctccgacccgtacgaagccccgctggctccgcaggtcaccgtgaactcctcgcaggaaacacccgaacagagcgtagagaaaatctgggctacactggaacgtttgggtctggtttcctttgatcgatctccactcgcacactaa

SEQ ID NO: 130350 - protein, 426 aa, Solibacter usitatus Ellin6076
MDNLPEFEAATASEVLSWAIDTFGESFAIATSFQKEGMAIVDLASRISSEIRVFTLDTGRLPDETYQMMEMVRRRYGIQVEVIFPDRAEVESLVTIHGPNLFYASVPGRERCCEVRKVRPLERKLQSLKAWATGLRRDQSATRSAVPKVARVDGRLKLNPLADWTAAQVEEYLARHNVPLHPLYERGYTSIGCAPCTRPVEPGESERAGRWWWEEDAKKECGIHFAADGSMRRGQAGEAQEDEMHKGFTLWFTGMSGAGKSTISRQLELKLRERGARVEVLDGDVVRTHLSKGLGFSKEDRDENIRRIGFVCELLSRNGVIAIAAAISPYRAVRDEVRARIPNFVEVYVECPVEVLAERDVKGLYKRALAGEIAHFTGISDPYEAPLAPQVTVNSSQETPEQSVEKIWATLERLGLVSFDRSPLAH

SEQ ID NO: 130351 - DNA, 744 bp, Mycobacterium avium 104; identical to SEQ ID NO: 12238
  CDS (1)..(744): transl_table=11

SEQ ID NO: 130352 - protein, 247 aa, Mycobacterium avium 104; identical to SEQ ID NO: 12239

SEQ ID NO: 130353 - DNA, 711 bp, Mycobacterium smegmatis str. MC2 155
  CDS (1)..(711): transl_table=11
gtgaccgacgtgacgacgtcaacggagaacgaactgcgcgaactcgccgagcgcggcgcggccgagctcgcggacgcgagcgccgaggagctgctgcgctggaccgacgagcacttcggcggcaactacgtggtggcatcgaacatgcaggacgcggtgctcgtcgagatggccgccaaggtgcgtcccggcgtggacgtgctgttcctcgacaccggataccacttcgccgagaccatcggcacgcgtgatgccgtcgaggcggtctacgacgtgcacgtggtcaacgtgacccccgagcgcaccgtcgccgagcaggacgaactgctgggtaagaatctgttcgcgcgcgaccccggtgagtgctgccggctgcgcaaggtggtgccgctgaccaacgcgctcaagggctactcggcgtgggtcaccggcatccgccgggtcgaggcgcccacccgcgccaacgccccgctgatcagctgggacaacgcgttcggcctggtgaagatcaacccgatcgcggcgtggaccgacgaggacatgcagaactacatcgacgccaacggcatcctggtcaatccccttgtctacgaaggttatccgtcgatcggctgcgcgccctgcaccagcaagccgattcccggggccgatccgcgcagtggccgctgggccgggctgtccaagaccgaatgcgggctgcacgtctcgtga

SEQ ID NO: 130354 - protein, 236 aa, Mycobacterium smegmatis str. MC2 155
MTDVTTSTENELRELAERGAAELADASAEELLRWTDEHFGGNYVVASNMQDAVLVEMAAKVRPGVDVLFLDTGYHFAETIGTRDAVEAVYDVHVVNVTPERTVAEQDELLGKNLFARDPGECCRLRKVVPLTNALKGYSAWVTGIRRVEAPTRANAPLISWDNAFGLVKINPIAAWTDEDMQNYIDANGILVNPLVYEGYPSIGCAPCTSKPIPGADPRSGRWAGLSKTECGLHVS

SEQ ID NO: 130355 - DNA, 702 bp, Nocardioides sp. JS614; identical to SEQ ID NO: 12240
  CDS (1)..(702): transl_table=11

SEQ ID NO: 130356 - protein, 233 aa, Nocardioides sp. JS614; identical to SEQ ID NO: 12241

SEQ ID NO: 130357 - DNA, 747 bp, Nocardioides sp. JS614; identical to SEQ ID NO: 12242
  CDS (1)..(747): transl_table=11

SEQ ID NO: 130358 - protein, 248 aa, Nocardioides sp. JS614; identical to SEQ ID NO: 12243

SEQ ID NO: 130359 - DNA, 849 bp, Nocardioides sp. JS614; identical to SEQ ID NO: 12244
  CDS (1)..(849): transl_table=11

SEQ ID NO: 130360 - protein, 282 aa, Nocardioides sp. JS614; identical to SEQ ID NO: 12245

SEQ ID NO: 130361 - DNA, 771 bp, Azoarcus sp. BH72
  CDS (1)..(771): transl_table=11
gtgagcggcgcggtgtcgatgctgcgtccggcagccacgaatccggccacccgccccgagctgaccgaggcgctgcgcgccagcgtcagcgccaaggccgcggccgcgcgcgagttgctggccgccgcggtggccgaactcggtgccaatggcgagatcaccttcgccaacagcttcggcgccgaggacatggtgctgaccgacctgatcctgggcggcaagctgccgatcgagatcttctcgctcgacaccggccgcctgccggccgaaacctatacgctgatgggcgcagtcgagcagcgttacggcacgaagctgaaggtgttcttcccggacgcgaccgcggtcgagcagttcgtccgcagcgagggcatcaatgcgttctacgattcggtggagctgcgcaaggcctgttgcggcatccgcaagatggagccgttgcgccgcgcgctggccggcaagaaggcgtgggtgaccgggctgcgcgccgcgcagtcggtgacgcgtacgggccttgcgctgcgcgaattcgacaccgccaacgggctggagaaattcaacccgctgtccgactggacggaggccgaggtatgggcgtatatccggatcaacgaggtgccctacaacgcgctgcacgaccagttctatccgagcatcggctgcgcaccctgtacgcgcgcgatcgcgctgggcgaggacatccgcgccggccgctggtggtgggaagatcccgcttccaaggaatgcggtctgcacgtcaagaagacttga

SEQ ID NO: 130362 - protein, 256 aa, Azoarcus sp. BH72
MSGAVSMLRPAATNPATRPELTEALRASVSAKAAAARELLAAAVAELGANGEITFANSFGAEDMVLTDLILGGKLPIEIFSLDTGRLPAETYTLMGAVEQRYGTKLKVFFPDATAVEQFVRSEGINAFYDSVELRKACCGIRKMEPLRRALAGKKAWVTGLRAAQSVTRTGLALREFDTANGLEKFNPLSDWTEAEVWAYIRINEVPYNALHDQFYPSIGCAPCTRAIALGEDIRAGRWWWEDPASKECGLHVKKT

SEQ ID NO: 130363 - DNA, 696 bp, Mycobacterium sp. KMS
  CDS (1)..(696): transl_table=11
atgtcggatatcgacctgcagcaactggcggagcgcggcgcggccgaactcggcccgaacgcgtcggcgatcgacctgctgcgctggaccgacgagaacttctccggcaactacgtggtggcgtcgaacatgcaggacgcggtgctggtcgacatggcggcgaaggtccggcccggtgtggacgtgctgttcctcgacaccggctaccacttcgcggagaccatcggcacccgcgatgcggtgcaggcggtgtacgacgtgaacgtcgtcaacgtcacccccgagcggaccgtcgccgaacaggaggcgctgctcggcaaggacctgttcgcccgcgagccgaacgagtgctgccgcctgcgcaaggtcgaaccgctgaccaaggcgctgagcggctattcggcctgggtcaccggcatccgccgcgtcgaggcccccacccgggccaacgcaccgctgatcagctgggacagggcgttcggcctggtcaagatcaacccgatcgcggcatggtcggacgacgacatgcaggcctacatcgccgccaacggcgtgctggtcaacccgctggtcgacgagggttacccgtcgatcggctgcgcaccgtgcacggccaagccgatcgagggcgccgatccgcgcagcgggcgctggcagggcctgaacaagatcgaatgcgggctgcaccagtcttga

SEQ ID NO: 130364 - protein, 231 aa, Mycobacterium sp. KMS
MSDIDLQQLAERGAAELGPNASAIDLLRWTDENFSGNYVVASNMQDAVLVDMAAKVRPGVDVLFLDTGYHFAETIGTRDAVQAVYDVNVVNVTPERTVAEQEALLGKDLFAREPNECCRLRKVEPLTKALSGYSAWVTGIRRVEAPTRANAPLISWDRAFGLVKINPIAAWSDDDMQAYIAANGVLVNPLVDEGYPSIGCAPCTAKPIEGADPRSGRWQGLNKIECGLHQS

SEQ ID NO: 130365 - DNA, 642 bp, Acidovorax sp. JS42
  CDS (1)..(642): transl_table=11
atgagcaccgccacggcagtcagcgccgccgaactcgcccgcgtcaacgccgagcacggccacgatgccgccgcgctggtggcctgggcgctgggcctgggccagacgcccatcgtcaccaccaatttccgcccgttcgaggccgtgatcctgcacctggtcacccgcgtgcagccgggcgtgcctgtggtctggatggacaacggctacaacaccgaggccacctaccgctttgccgacgcggtgacgaagcagctggggctcaacctgaagatctacctgccgcgccgctcgcgcgcccaccgcgaggccgtggaaggcccgacgcccgccctggacgacccgcgccacgccgcgttcaccgaagaggtgaagctcgaacccttcgcccgcgccctgcgcgaaacggcaccccgggtgtggttcaccgcgctgcgcgccaccgacaccgccgtgcgcgcgcagatggaccccgtgagcatcaaccccgacggcctgatcaaggtcgcgccgctattgcactggtcgtccaaacagctgcacgagtactgtcaacagcacggcctgcccaacaactttgactacgtggaccccaccaagggcgaagacaaccgcgaatgcggcctgcacctggcccactaa

SEQ ID NO: 130366 - protein, 213 aa, Acidovorax sp. JS42
MSTATAVSAAELARVNAEHGHDAAALVAWALGLGQTPIVTTNFRPFEAVILHLVTRVQPGVPVVWMDNGYNTEATYRFADAVTKQLGLNLKIYLPRRSRAHREAVEGPTPALDDPRHAAFTEEVKLEPFARALRETAPRVWFTALRATDTAVRAQMDPVSINPDGLIKVAPLLHWSSKQLHEYCQQHGLPNNFDYVDPTKGEDNRECGLHLAH

SEQ ID NO: 130367 - DNA, 699 bp, Magnetospirillum magnetotacticum MS-1
  CDS (1)..(699): transl_table=11
atgtccctggacgtcgagcatctgatccgccaatacggccatctggaaggaagggaactccttgccgccctggtggccggtgatctggccgggcgtatcgccgtgacctcttccttcggggcggaatcggcggtgctgctcgatctggtggcccaggtcgatcccggtctgccggtgatctttctcgacaccaacgaattgtttgatgaaaccatcgcctatcgcagccaattggaagcaatcctgggcttgaccaatgtgctggcggtccatccctccgaggcggagttgaaggaagccgacgagttgtggcgtgaagatcatgaccgatgttgcgaattgcgcaaggtccgccccctggcccgtgccgtgaagggattcgacgccctggtggacgggcgcaagcgggcccatggcgccgagcgggaaaaccttgccaccctgtccgatggcggcggcgtgttgaaggtcagcccgttggccaagtggagcgccgaggagatcgaggcctatttcgtcaagcgtagcctgccgcgccaccctttggtggcgcaaaactaccgctccatcggctgctggccctgcacccgcccggtggatccgggccagcccctccgggccgggcgctgggcaggcaagggcaagagcgagtgcggcattcataccatgtccctgggcctcgatggcgccgggatctga

SEQ ID NO: 130368 - protein, 232 aa, Magnetospirillum magnetotacticum MS-1
MSLDVEHLIRQYGHLEGRELLAALVAGDLAGRIAVTSSFGAESAVLLDLVAQVDPGLPVIFLDTNELFDETIAYRSQLEAILGLTNVLAVHPSEAELKEADELWREDHDRCCELRKVRPLARAVKGFDALVDGRKRAHGAERENLATLSDGGGVLKVSPLAKWSAEEIEAYFVKRSLPRHPLVAQNYRSIGCWPCTRPVDPGQPLRAGRWAGKGKSECGIHTMSLGLDGAGI

SEQ ID NO: 130369 - DNA, 726 bp, Nostoc punctiforme PCC 73102
  CDS (1)..(726): transl_table=11
atgacagtctccacggcatctagaaatcaagcgatcgcttttgacttagaaaaattaaatgagcaatttgaaactgccactcctaaagagatactggcatggtctatagagaatatcccaacgggattggtgcaaaccagcgcctttaacgtggatgacatgataattacccatattctttacagtgaactgaagcatcccgttcctgtgatctttctcgacactttacatcacttccctgagagcctagaattagtagccaaagccaaagaaatctacaatctggacttgcaaactttcaaaactccagacgtagaaacccgtgaagcctttgaagccaaatacggcgacaaactttgggatacggatattgccaaattccaccacattacaaaaattgaaccactgttacggggtctagacgaactcaacagcgtggcttggattaccggtcgccgccgtgaccaagcagtaacccgtgcgaatatgcccatatttgaatttgatggtaaaggtcggttgaaagtaaatcccattgctacctggacacgtcaagatacctgggtttacgtagctgaacacggagtcatctacaacccactccatgacaaaggctatcccagcataggcgaccaacccatcaccaccaaagtaggcgaaggtgaagacgaacgcgccggacgttggcggggaagtgataaaacagaatgcggaattcatatttag

SEQ ID NO: 130370 - protein, 241 aa, Nostoc punctiforme PCC 73102
MTVSTASRNQAIAFDLEKLNEQFETATPKEILAWSIENIPTGLVQTSAFNVDDMIITHILYSELKHPVPVIFLDTLHHFPESLELVAKAKEIYNLDLQTFKTPDVETREAFEAKYGDKLWDTDIAKFHHITKIEPLLRGLDELNSVAWITGRRRDQAVTRANMPIFEFDGKGRLKVNPIATWTRQDTWVYVAEHGVIYNPLHDKGYPSIGDQPITTKVGEGEDERAGRWRGSDKTECGIHI

SEQ ID NO: 130371 - DNA, 705 bp, Bacillus cereus G9241
  CDS (1)..(705): transl_table=11
atgttgacgtatgaaacgtgggaagaaaatgatgtttcattttcagaagaagatgaaacgaaaggcgcgttatctgtattaagttgggcttataaagaatataaaagtgaaattgtatacgcatgtagcttcggagtggaagggatggtactgctgcatcttattaaccaagtaaattcatctgctaaagttgtatttttggatacaaacgtacattttcaagaaacgtatgaattaattcaaaaagtgcgggaacgatttcctttattgaatattatagaaaaacagccagaacttacacttgatgaacaagccaaagcgcatggtgacaagctatgggaaagcaatcccaatctctgttgtaagattagaaaaattttacctttagaagaatcattagcgaatgaaaaagcgtggatatcgggattgagaagggaacaatcagaaacccgtaagcatacaaagtttataaatctagatcatcgctttcaatctattaaagtttgtccgctcattcattggacgtggaaagaagtatggagatatgtatacaaacatagcttgccttataacccattacatgacattggatatccaagcattgggtgtgagaagtgtacgttgcctgtaggagagggtggcgattcgagagatggtagatgggctgggaaagtgaaaactgaatgtggtcttcattaccaataa

SEQ ID NO: 130372 - protein, 234 aa, Bacillus cereus G9241
MLTYETWEENDVSFSEEDETKGALSVLSWAYKEYKSEIVYACSFGVEGMVLLHLINQVNSSAKVVFLDTNVHFQETYELIQKVRERFPLLNIIEKQPELTLDEQAKAHGDKLWESNPNLCCKIRKILPLEESLANEKAWISGLRREQSETRKHTKFINLDHRFQSIKVCPLIHWTWKEVWRYVYKHSLPYNPLHDIGYPSIGCEKCTLPVGEGGDSRDGRWAGKVKTECGLHYQ

SEQ ID NO: 130373 - DNA, 831 bp, Crocosphaera watsonii WH 8501; identical to SEQ ID NO: 12246
  CDS (1)..(831): transl_table=11

SEQ ID NO: 130374 - protein, 276 aa, Crocosphaera watsonii WH 8501; identical to SEQ ID NO: 12247

SEQ ID NO: 130375 - DNA, 714 bp, Xylella fastidiosa Dixon; identical to SEQ ID NO: 12248
  CDS (1)..(714): transl_table=11

SEQ ID NO: 130376 - protein, 237 aa, Xylella fastidiosa Dixon; identical to SEQ ID NO: 12249

SEQ ID NO: 130377 - DNA, 714 bp, Xylella fastidiosa Ann-1; identical to SEQ ID NO: 12250
  CDS (1)..(714): transl_table=11

SEQ ID NO: 130378 - protein, 237 aa, Xylella fastidiosa Ann-1; identical to SEQ ID NO: 12251

SEQ ID NO: 130379 - DNA, 741 bp, Roseovarius nubinhibens ISM
  CDS (1)..(741): transl_table=11
atgcagccgaatgaggatcttggcacacgggtctccgggctcaacgactggtaccggctgaactcggccaccagcgtgctgcgccacgcgctcacggatcccgccgcgggtcagctggcgctggtgtcgagcttcggggcggaatcggtcgtgctcttgcacatggtgtcggtgatcgaccggaccaccccggtgatctttctcgacaccgagctgctctttgccgaaacgctggtctaccagcaggagctgagcgagcggctcggcctcaaggatctgcgcatcattcgcgcggacccggacgaggttcaggccaccgacccggaacagtcgctacaccgacgcgataccgacgcctgctgtacgctgcgcaagacccggcccttggcccgtgctcttgacgggttcgacggctggatcaccgggcgcaaacgctatcagggcggtgcccgcgccacgctcgatttcttcgagaccgaagagggcaccggccggatgaaggtcaacccgctggcccattggcgccccgaagacgtgcgcacctatatggaagaaaatcgcctgccaaaacatccgcttgtggcacgcggctacccgtcgatcggctgtatgccctgcaccagcccggtcaccgatggcgacacagacccccgcgccggacgctggcgcggccaagacaaaaccgaatgtggcatccatttcgtggatggaaaaatgatcagaaccggagaaaacgcatga

SEQ ID NO: 130380 - protein, 246 aa, Roseovarius nubinhibens ISM
MQPNEDLGTRVSGLNDWYRLNSATSVLRHALTDPAAGQLALVSSFGAESVVLLHMVSVIDRTTPVIFLDTELLFAETLVYQQELSERLGLKDLRIIRADPDEVQATDPEQSLHRRDTDACCTLRKTRPLARALDGFDGWITGRKRYQGGARATLDFFETEEGTGRMKVNPLAHWRPEDVRTYMEENRLPKHPLVARGYPSIGCMPCTSPVTDGDTDPRAGRWRGQDKTECGIHFVDGKMIRTGENA

SEQ ID NO: 130381 - DNA, 762 bp, Oceanicola batsensis HTCC2597
  CDS (1)..(762): transl_table=11
atgccgcctgaagccgcgatggatttcagcgcgcccgtcctgcccgagcaggaggagcgggtgcgcgtgctcaacgaccgctaccggcaccacggtgcgaccgccgtgctcgagggggccctgcgcgaccccgaggccgggaaaatcgcgctcgtgtcgtccttcggcgccgaatccgtggccctgctgcacctcgtctcgatggtcgatccctccacgccggtgctgttcatcgacacgcagatgctgttccgcgagacgctggactatcaggcggatctggcggaacggctgcacctcaaggacctgcggatcgtccgggccaatccgctggatctgcagaaggaagaccccgacgaccttctgcatacggtcgatacggacgcctgctgcgacctgcgcaagacacggccgctgcagcgtgcgctcagggagttcgacggctggatcaccgggcgcaagcggttccagggggcgacgcgctcggatctggaattcttcgaggccgacggcccgcaccggatcaaggtcaacccgctggcccactgggcgcccgaggatgtgcggacctatatggaagacaaccgcctgcccaggcacccgctcgtggcgaggggctatccctcgatcggctgcgcgccctgcacctcgcccgtggcgccgggagaagacccccgggccggacgctggcggggcgaggacaagaacgaatgtggcatccacttcgtggacggcaagatggtcagaggaggcgcggcatga

SEQ ID NO: 130382 - protein, 253 aa, Oceanicola batsensis HTCC2597
MPPEAAMDFSAPVLPEQEERVRVLNDRYRHHGATAVLEGALRDPEAGKIALVSSFGAESVALLHLVSMVDPSTPVLFIDTQMLFRETLDYQADLAERLHLKDLRIVRANPLDLQKEDPDDLLHTVDTDACCDLRKTRPLQRALREFDGWITGRKRFQGATRSDLEFFEADGPHRIKVNPLAHWAPEDVRTYMEDNRLPRHPLVARGYPSIGCAPCTSPVAPGEDPRAGRWRGEDKNECGIHFVDGKMVRGGAA

SEQ ID NO: 130383 - DNA, 804 bp, Erythrobacter sp. NAP1; identical to SEQ ID NO: 12252
  CDS (1)..(804): transl_table=11

SEQ ID NO: 130384 - protein, 267 aa, Erythrobacter sp. NAP1; identical to SEQ ID NO: 12253

SEQ ID NO: 130385 - DNA, 735 bp, Synechococcus sp. RS9917
  CDS (1)..(735): transl_table=11
atggcgttggtgatgacaggcgagcaggagctgctgcaggaccgtgccctgctggaaccgcttacgccgcgcgaccgtctgctttgggcggccgagcgctttggcgctggctttgccgttaccaccagtttcgggatccagtcggcggtgctgttgcacatgctcagcaccctgccgatgggacaggacatcccggtgatctgggtggatacgggctatctcccgcccgagacctaccgctatgccgacgcgctgacccagcgttttggcttgcgattgcatgtgacgcagagcccgctgtctccagcacggatggaggcccttcatggacagctctgggccacggggcggatggaggatctggatctttatctgcggctgcgcaaggtggaacccctggagcaggcgatggagaccctggaggtgcggtgctggtcgagtggggtgcgccgcggccagaccgaccatcgcggcaccatgtcgctgctggatccgatacggggtcggctctccctgcgaccgctgctggagtggactccgcgcgatgtgtactactacatgcaggagcatgctctgccccagcaccccctgttcgagcagggctattccacggtgggtgactggcactccagtgcacccgatggtgcggagcaatccgggcgccagacccgcttcggcggcatgaagcaggaatgcggcatccatctcccgggggtgatgggggacggcatctag

SEQ ID NO: 130386 - protein, 244 aa, Synechococcus sp. RS9917
MALVMTGEQELLQDRALLEPLTPRDRLLWAAERFGAGFAVTTSFGIQSAVLLHMLSTLPMGQDIPVIWVDTGYLPPETYRYADALTQRFGLRLHVTQSPLSPARMEALHGQLWATGRMEDLDLYLRLRKVEPLEQAMETLEVRCWSSGVRRGQTDHRGTMSLLDPIRGRLSLRPLLEWTPRDVYYYMQEHALPQHPLFEQGYSTVGDWHSSAPDGAEQSGRQTRFGGMKQECGIHLPGVMGDGI

SEQ ID NO: 130387 - DNA, 762 bp, Synechococcus sp. WH 5701; identical to SEQ ID NO: 12254
  CDS (1)..(762): transl_table=11

SEQ ID NO: 130388 - protein, 253 aa, Synechococcus sp. WH 5701; identical to SEQ ID NO: 12255

SEQ ID NO: 130389 - DNA, 753 bp, Synechococcus sp. WH 7805; identical to SEQ ID NO: 12256
  CDS (1)..(753): transl_table=11

SEQ ID NO: 130390 - protein, 250 aa, Synechococcus sp. WH 7805; identical to SEQ ID NO: 12257

SEQ ID NO: 130391 - DNA, 741 bp, Pseudoalteromonas tunicata D2; identical to SEQ ID NO: 12258
  CDS (1)..(741): transl_table=11

SEQ ID NO: 130392 - protein, 246 aa, Pseudoalteromonas tunicata D2; identical to SEQ ID NO: 12259

SEQ ID NO: 130393 - DNA, 765 bp, Photobacterium sp. SKA34; identical to SEQ ID NO: 12260
  CDS (1)..(765): transl_table=11

SEQ ID NO: 130394 - protein, 254 aa, Photobacterium sp. SKA34; identical to SEQ ID NO: 12261

SEQ ID NO: 130395 - DNA, 723 bp, Oceanospirillum sp. MED92; identical to SEQ ID NO: 12262
  CDS (1)..(723): transl_table=11

SEQ ID NO: 130396 - protein, 240 aa, Oceanospirillum sp. MED92; identical to SEQ ID NO: 12263

SEQ ID NO: 130397 - DNA, 726 bp, gamma proteobacterium HTCC2207
  CDS (1)..(726): transl_table=11
atgagctcgatcaccaacatcgtcgatatagacagtgaactggcaacccagtcaccacaggaaattcttcgttacgctcttgagaactttgacaatattgcgatctcattcagcggtgctgaagatgtagtgttgatcgatatggcctataaaatccgcaaagacattcaagtcttttcgctggatacaggccggctccatgctcagacttatcgttttattgaagccgtgcgcaaccactacgacattaaaattgacctagtgatgccagaggcagccaaagtggaaaagctggtcaaagaaaaaggtctttttagcttttaccaagatgatcacaaagaatgctgtggcgtgcgcaagattgcaccactgcgtaagcagttattaacggtggacgcatggatcactggccagcggcgcgaccagagccccggcactcgcgctgaagtcccagtaatgcaagacgataaagccttttcccgcccagatgacagcctgaccaagttcaatccactggccaactggacatcaaagcaggtgtgggattatatccgcgcaaacaatgttccctacaatgagttgcatgatcagggatttgtcagcattggttgtgagccctgcacccgtcctactggacctggtcaacacgagcgcgaaggccgctggtggtgggaagaagcgacgttgaaagaatgtggtcttcacgcggttaatatcagtaaataa

SEQ ID NO: 130398 - protein, 241 aa, gamma proteobacterium HTCC2207
MSSITNIVDIDSELATQSPQEILRYALENFDNIAISFSGAEDVVLIDMAYKIRKDIQVFSLDTGRLHAQTYRFIEAVRNHYDIKIDLVMPEAAKVEKLVKEKGLFSFYQDDHKECCGVRKIAPLRKQLLTVDAWITGQRRDQSPGTRAEVPVMQDDKAFSRPDDSLTKFNPLANWTSKQVWDYIRANNVPYNELHDQGFVSIGCEPCTRPTGPGQHEREGRWWWEEATLKECGLHAVNISK

SEQ ID NO: 130399 - DNA, 738 bp, Oceanobacter sp. RED65
  CDS (1)..(738): transl_table=11
atgacatatacacaagaagaggttagcgaactaaataacggctttgcgagcgaacagccgaagtcgattattcgtcacggcttagaaaactttgagaacatcgccgtttcctttagtggtgctgaagatgttgtgcttgtagatatggctgtgaagattaatcctgacgcccacatattttgtttggatactggacggctacatccagagacatatgagttcttagaggatgtgcgaaagcattacaatattaagctggacataattagcccaaatgcagaggtgctggattctttcgtaaaagacaaggggttgtttagcttctatgaagatggccaccaggaatgctgtggcattcgaaagatagcccctttaaagcgcaaattaagtacactggatgcttggataacgggtcaaagaaaagaccaaagcccaggaactcgttctgatatcccagtctttcaacacgacactagtttcgcaaaagacggtattgaactttataagtacaatcccctagcaaactggtcctctgaagatgtatggaattacattaaaatgtttgacgtgccctacaacaagctacatgaacgaggctttataagtattggttgtcagccctgcaccagagcagtactgccaaatcaacacgagcgtgagggtcgctggtggtgggagaatgagggtcacaaggaatgcgggctccactcgagcaacattatcagtaaagagggttaa

SEQ ID NO: 130400 - protein, 245 aa, Oceanobacter sp. RED65
MTYTQEEVSELNNGFASEQPKSIIRHGLENFENIAVSFSGAEDVVLVDMAVKINPDAHIFCLDTGRLHPETYEFLEDVRKHYNIKLDIISPNAEVLDSFVKDKGLFSFYEDGHQECCGIRKIAPLKRKLSTLDAWITGQRKDQSPGTRSDIPVFQHDTSFAKDGIELYKYNPLANWSSEDVWNYIKMFDVPYNKLHERGFISIGCQPCTRAVLPNQHEREGRWWWENEGHKECGLHSSNIISKEG

SEQ ID NO: 130401 - DNA, 819 bp, Desulfitobacterium hafniense DCB-2
  CDS (1)..(819): transl_table=11
ttgggtgaagaaccggacagctttatgactgagtggggaatacagaaagggagaaggagaaatgaaatggacagatcggatttcaatttggatcttgatgagataaaccgagcctttgccggggaagacccccgcaagcttttggcccatgtggtggaaaaaatcggtccggcgcggattgctctggcttccagcctttccattgaggatcaagtactgacccagatgctattaaagatcgatgcccgggcccggatcttctttatcgatacaggccggaattttcagcagacttatgatctgatggaagagaccatgagtcgctatgagtttcattatgaggtatacgcgccggagaattcggagctggagccatttctggcggaatatggccccaacgctttttatgacaaggttgaactgcgccaaaaatgttgtgagctgagaaaagtcaggtccttgcagcgggtcttatctaccgtagatggctggatttgcggactgcgcaaggagcagagccccacccgccaggaaatcggtttgctggaatgggattcccgccacgctatctataaagtgaatcctctggcggcctggagcgaagagcaggtttgggcttatatccgccgggaaaacattccctacagttccctatacaacaaaggtttccgcagcattggctgtcagccctgcacccgggcggtggcccccggggcggatgtacgcagcggcaggtggtggtgggaagatccctctaaaaaagaatgcgggctgcatccatccctgaacccgcctgcaaaggaggaagaaaagcgatga

SEQ ID NO: 130402 - protein, 272 aa, Desulfitobacterium hafniense DCB-2
MGEEPDSFMTEWGIQKGRRRNEMDRSDFNLDLDEINRAFAGEDPRKLLAHVVEKIGPARIALASSLSIEDQVLTQMLLKIDARARIFFIDTGRNFQQTYDLMEETMSRYEFHYEVYAPENSELEPFLAEYGPNAFYDKVELRQKCCELRKVRSLQRVLSTVDGWICGLRKEQSPTRQEIGLLEWDSRHAIYKVNPLAAWSEEQVWAYIRRENIPYSSLYNKGFRSIGCQPCTRAVAPGADVRSGRWWWEDPSKKECGLHPSLNPPAKEEEKR

SEQ ID NO: 130403 - DNA, 789 bp, Synechococcus sp. RS9916; identical to SEQ ID NO: 12264
  CDS (1)..(789): transl_table=11

SEQ ID NO: 130404 - protein, 262 aa, Synechococcus sp. RS9916; identical to SEQ ID NO: 12265

SEQ ID NO: 130405 - DNA, 780 bp, Vibrio sp. Ex25; identical to SEQ ID NO: 12266
  CDS (1)..(780): transl_table=11

SEQ ID NO: 130406 - protein, 259 aa, Vibrio sp. Ex25; identical to SEQ ID NO: 12267

SEQ ID NO: 130407 - DNA, 741 bp, Alteromonadales bacterium TW-7; identical to SEQ ID NO: 12268
  CDS (1)..(741): transl_table=11

SEQ ID NO: 130408 - protein, 246 aa, Alteromonadales bacterium TW-7; identical to SEQ ID NO: 12269

SEQ ID NO: 130409 - DNA, 693 bp, Magnetospirillum gryphiswaldense
  CDS (1)..(693): transl_table=11
atgagccacgtggattacagtgctgcttacggtcacctgtccggtaaggatctgatcgaggtcatcgctcatcaggtgtttccgggcaaggtggcggtgacctcgtcgttcggggccgaatccgccgtgctgttggatctggtggcccaggtggatccgtccattccggtggttttcctcgataccggtgagttgttcgacgaaaccctggaataccgctatcggctcgagcgccagttggggttgaccaatgtggtggtggtgcgtccggcatcggaagacctgaccgaggccgaggatctatggcgcaccgatcatgatcgttgctgttatttgcgcaaggtgttgccgctggcccgtgcggtcgaggggtatgccggcctgatcgacggacgcaagcaagcccacggcttcgatcgccaagccttgtccaccgtccaggtgtcgggcgaggtggtcaaaatcagcccgctggccaattggagcgaggacgacgtacaaaaggcctttgtcagccgtggcctgcccacccatccgttggtcgagcagggctatcgctccatcggttgctggccgtgtacacgcccgaccaagccgggcgaatcggcccgcgccgggcgctgggccggcagcgccaagaccgaatgtggaattcatacccttgttcttggcagcgacggcgccgggatctga

SEQ ID NO: 130410 - protein, 230 aa, Magnetospirillum gryphiswaldense
MSHVDYSAAYGHLSGKDLIEVIAHQVFPGKVAVTSSFGAESAVLLDLVAQVDPSIPVVFLDTGELFDETLEYRYRLERQLGLTNVVVVRPASEDLTEAEDLWRTDHDRCCYLRKVLPLARAVEGYAGLIDGRKQAHGFDRQALSTVQVSGEVVKISPLANWSEDDVQKAFVSRGLPTHPLVEQGYRSIGCWPCTRPTKPGESARAGRWAGSAKTECGIHTLVLGSDGAGI

SEQ ID NO: 130411 - DNA, 1525 bp, Enteromorpha intestinalis
  CDS (67)..(1338)
tggacctctgcgcacagctctgctttgctgtcgctcctccagccgccgcgaacgccgaccgccaccatggcgctttcaattcgcgcgaaccgcctacgcgcgggcgcgatgccgctcaagcccgttcgcagtagcactcgtggctcagtgacgctttgcgagcgtgtgcgtgcgcccgtgcgcgcggctgcggccgcggtggccgcgccagagggcgcgaaggcgacggactgggctgcggagacgaaggagctcaacaacaagtcgccgctcgaaatcatggaccacgcactcgcgacgttcggcgacgaggtcgcgatcgcgttctcgggcgcggaggacgtggcgctcatcgaatacgctcacctgaccggccgcaagtaccgcgtcttctcgctggacacgggccgactcaaccccgagacgtaccagctcttcgacgccgtcgagaagcactacaagatcaggatcgagtacacgttcccggacgcgcaggagacgatggacctcgtgcgcgagaagggcctgttctctttctacgaggacggccatcaagagtgctgccgcgtccgcaaggtccggccgctgcgccgccagctcaagacgctgcaggcgtggatcacgggccagcgcaaggaccagtcccccggcacccgcatggaggtccccgccgtgcaagtggaccccgtcttcgagggccagtccggcggcgacggctccctcgtcaagtacaacccgctcaccaacatgacgtccgcggaggtctggaacttcctgcgcatcatgaacgtgcccagcaacaagctccacgagtgcggctacgtctccatcggctgcgaaccctgcacgcggcccgtgctgcccaaccagcaggagcgcgagggccgctggtggtgggaggactccgccgccaaggagtgcggcctgcactctggcaacgtcgtcgactctgctgaggcagaggccaaggcggaggcacccgacctgtggaccggcggggcggtcgaggcgctggacaaggcgacgctcgagaagctcgcaggcggcgaccgcgacaaggacaccatggtggtgttatacgcgccttggtgccctttctgccaggccttcgaacccgattacgagcccgtcgcgcaagagcccggcggagcgggcttcggcgtggccaagtacaacgcggacgctgaccgcgagtactcggagtcgctcggcctgaaaacgttcccgacaatcatcttcctgcccaagggttctgacaaggtggtcaagtttgagtcggatcggcggaccgtcgagtcgatgacgatgtgggcggcagcgctgggcgcacgcgagtgagtgtgccacgggggcggcgcgtggctgtgctgctgcgtacgtgcgcgcttgacgacatgcgggcgcctttcgagccgcagtgctgcacacgaggagcgaggttggcagcaagctgtagagcgatattgtgcggggaggctgcgagagagatttcggccggcaagtgcatggaaaacattttctctcc

SEQ ID NO: 130412 - protein, 423 aa, Enteromorpha intestinalis
MALSIRANRLRAGAMPLKPVRSSTRGSVTLCERVRAPVRAAAAAVAAPEGAKATDWAAETKELNNKSPLEIMDHALATFGDEVAIAFSGAEDVALIEYAHLTGRKYRVFSLDTGRLNPETYQLFDAVEKHYKIRIEYTFPDAQETMDLVREKGLFSFYEDGHQECCRVRKVRPLRRQLKTLQAWITGQRKDQSPGTRMEVPAVQVDPVFEGQSGGDGSLVKYNPLTNMTSAEVWNFLRIMNVPSNKLHECGYVSIGCEPCTRPVLPNQQEREGRWWWEDSAAKECGLHSGNVVDSAEAEAKAEAPDLWTGGAVEALDKATLEKLAGGDRDKDTMVVLYAPWCPFCQAFEPDYEPVAQEPGGAGFGVAKYNADADREYSESLGLKTFPTIIFLPKGSDKVVKFESDRRTVESMTMWAAALGARE

SEQ ID NO: 130413 - DNA, 735 bp, Klebsiella pneumoniae; identical to SEQ ID NO: 12270
  CDS (1)..(735): transl_table=11

SEQ ID NO: 130414 - protein, 244 aa, Klebsiella pneumoniae; identical to SEQ ID NO: 12271

SEQ ID NO: 130415 - DNA, 1395 bp, Catharanthus roseus; identical to SEQ ID NO: 12274
  CDS (1)..(1395)

SEQ ID NO: 130416 - protein, 464 aa, Catharanthus roseus; identical to SEQ ID NO: 12275

SEQ ID NO: 130417 - DNA, 1075 bp, Selaginella lepidophylla; identical to SEQ ID NO: 12284
  CDS (10)..(933)

SEQ ID NO: 130418 - protein, 307 aa, Selaginella lepidophylla; identical to SEQ ID NO: 12285

SEQ ID NO: 130419 - DNA, 2111 bp, Ceratopteris richardii
  CDS (369)..(1739)
caataacagccacttgagggatgagctaagaagaagcacagcgagagcgaagctcagccagattcatattttctctgccagaatggagttagaggcttagagcaggagacctactaatccacggctttttgatccgtcggcttgtgggtggcgcgtgcatgtgctcttgtgctgcacgcacggagtaatattcttcattcacagtccttatcattcgaggcagctttgggaatccctctccttcggcagagggcctctgcactgaagctttcgctggtgtacgcgcgcttatcgctgtgttctactctgtcaaccaaatcttactttgcccgaatcagcccgtgcgtttgccatcctctgaagacgaaatggcatcagcgatagggagcgtatccatgaaacttcttcagggctctgtgctcgagcccttctcttcttcagtttcttctccccgtatggctctctcccccccttcttgcgtcgttagggcaggcttgtttggacaacggagttccgaaaacgtttttcaacgcagctgttccgtaccgcagtctgataagcaccgtggctgtcttaatgcagctatcgctactccagaagttgtgcaggaggacataaattatgaagatcttgctttacagctcgtagatgcttcacctcttgagattatggatagggctcttgccatgttccagtctgacatcgccattgctttcagtggtgcagaggatgttgcattgatcgagtatgccaaactgaccggcagaccattccgagtcttcagtctggacacggggcggcttaatcctgagacctataggttctttgatgaagttgagaaacactatggaatcaggattgagtacatgtttcctgatgcatcagaagtggaagcacttgttagaagcaagggaatgttttctttttatgaggatgggcaccaagaatgctgccgtatcagaaaagtgagacccctgagacgagctcttaaaggtttgaaggcgtggattacgggacaaagacgtgaccagtcacctggaacacggtcgaatattccaattgtgcagattgatccgtcctttgaaggcatggatggggggcctggcagtctcataaaatggaatcctgttgccaatgtcacaggcacagacatctggagcttcttgaggactatgaatgtccctgtcaatgtgttacactcgcaaggatatatttcaataggttgtgagccatgtactcgagcagtgcttcctggcatgcatgaaagggaagggcgatggtggtgggaggatgcaaaagcaaaggagtgtggcttgcacaagggaaacattgagactgctgaaactagtaataatggggcacagaatacagcttctgtatcagaactatttctaagcaaagacatcaaagccttttctcgagctgagattgaagaatttgcaaacttggagaaaagagagaattcctggattgtagtcctttatgcgccatggtgcccttattgtcaggcaatggaggcatcattcaatgagctggctgagaagcttggtggtacaaatgtaaaggttgggaagttcaatgctgacaaagaaaacaagccatatgctatggcagagctccagatgaagagtttccctactatcctctttttttcaaagaatttacggaatccaatcaagtatccttccgaacagagggatgtggactcttttcttgctttcataagagcactgcaatgaggttgagaaagctgtagctgttctttggagggtttcgcgcaaaatatcaataaatattttgtgcaggtccttgttttaaaatcagttctgatgctcatgactccatttattttcctgtcttgaaatccacccatatttttggtttttatgctagggtgtttgagtatggagctaatctgtgtgcacacagatcatagccatatcgagtcactggaatggagtaccatgctttttaggagtgtaattgatgtggcagaggtctgtcattgttatattacaatggctgttttcctgctacacagttaaagtttgtggattaaagatcactgagctagcatttcggagtataatgcttcagaagattttgagtgt

SEQ ID NO: 130420 - protein, 456 aa, Ceratopteris richardii
MASAIGSVSMKLLQGSVLEPFSSSVSSPRMALSPPSCVVRAGLFGQRSSENVFQRSCSVPQSDKHRGCLNAAIATPEVVQEDINYEDLALQLVDASPLEIMDRALAMFQSDIAIAFSGAEDVALIEYAKLTGRPFRVFSLDTGRLNPETYRFFDEVEKHYGIRIEYMFPDASEVEALVRSKGMFSFYEDGHQECCRIRKVRPLRRALKGLKAWITGQRRDQSPGTRSNIPIVQIDPSFEGMDGGPGSLIKWNPVANVTGTDIWSFLRTMNVPVNVLHSQGYISIGCEPCTRAVLPGMHEREGRWWWEDAKAKECGLHKGNIETAETSNNGAQNTASVSELFLSKDIKAFSRAEIEEFANLEKRENSWIVVLYAPWCPYCQAMEASFNELAEKLGGTNVKVGKFNADKENKPYAMAELQMKSFPTILFFSKNLRNPIKYPSEQRDVDSFLAFIRALQ

SEQ ID NO: 130421 - DNA, 735 bp, symbiont bacterium of Paederus fuscipes
  CDS (1)..(735): transl_table=11
atgagccagcctttcgatacctccgccctcgcctctagctactccgacaaatcgccacaagacatcctgaaactcgccttcgaacacttcgtcgatgatctatggatctctttcagcggtgccgaagacgtcgttctggtagatatggcctgtaaactcagtaaaagcatcaaagttttcagcctcgacactggtcgtctgcacccagaaacctatcgcttcatcgatcaggttcgcgagcactatggcatcaccatcgaaatcctttctcccgactcacgcttgctcgaaccattagtgaaggaaaagggcctgttcagcttttataaggacggccatggcgaatgttgcagtatccgcaagatcgaaccactcaagcgcaagcttgccgacgtgcgcgcttgggctaccggccagcgccgtgaccaaagtcccagcacccgcacccatgtggcggtgatcgaactggatagtacgttctccacgccggaaaaaccgttgtacaagttcaacccactatcggccatgaccagcgaggaagtctggacctacatccgcatgctggagctaccctacaatagcctgcacgaacgcggctacatcagcatcggttgcgagccctgcacacgcccggttctacccaaccagcacgagcgcgaaggccgctggtggtgggaagaagctacctacaaggaatgtggcctgcacgccggaaatctgatcagcaaagcctga

SEQ ID NO: 130422 - protein, 244 aa, symbiont bacterium of Paederus fuscipes
MSQPFDTSALASSYSDKSPQDILKLAFEHFVDDLWISFSGAEDVVLVDMACKLSKSIKVFSLDTGRLHPETYRFIDQVREHYGITIEILSPDSRLLEPLVKEKGLFSFYKDGHGECCSIRKIEPLKRKLADVRAWATGQRRDQSPSTRTHVAVIELDSTFSTPEKPLYKFNPLSAMTSEEVWTYIRMLELPYNSLHERGYISIGCEPCTRPVLPNQHEREGRWWWEEATYKECGLHAGNLISKA

SEQ ID NO: 130423 - DNA, 981 bp, Physcomitrella patens
  CDS (1)..(981)
atggcgatggctatggcggatgctcaccttcgctcctccacgtcctgtgtaccttcgcactgccccgcgctggtgcctgccctggccaccctcacttcgctcaggaaatgtgcttttcataaaccctcgtttccctcccttgtctttcaaagctactgcttgggttgggctagtggaagaggaaagactgcagcatctgcagtgcctgttaccacctcgggttcaagtattgacattaagaagtgtaacgaacaagctcgggatgcccgacttcagcatctagaggcacaggcgttagaaaccttgcagaagactgtggaaaatttcgagaagccagcgtttccatgtgctttgatcgcaggtgatgtggtcatactagatcttcttcacaggataggagcgttttcagataataaagtaaaaataatcttcatcgacacttttcacctcttccctgaaacatataagtttctcagcgaagtggaggagcggtatggattcaaggcacatgtgtttcatgctgcagatgtaaacaacaaagaagcctatgacgccaaatttggttcagatttgttcataactgacatagaagagtacgaccgcatctgtaaagttgagccgttcagccgtgctctgaagacattggaggtagatgctatgatcaatgggcgtagacgtgatcatggcgcagaaagagcccatcttgaggtgttcgaggagggaaaaatggtgaaagtgcaacctcttgcgtattgggaattcagggattgctgggattacttgacgaaatattcgttaccttaccatcctctccacgaccaaggctttccgagcattggagacgtgcagtccacgataccagttcctcgtgagaagtggttcgagtatgccggagaacgatcaggccgctttcagggtttgacgaatccagatgggagtgcaaaaacagagtgtggaattcacgttggtggtagaacataa

SEQ ID NO: 130424 - protein, 326 aa, Physcomitrella patens
MAMAMADAHLRSSTSCVPSHCPALVPALATLTSLRKCAFHKPSFPSLVFQSYCLGWASGRGKTAASAVPVTTSGSSIDIKKCNEQARDARLQHLEAQALETLQKTVENFEKPAFPCALIAGDVVILDLLHRIGAFSDNKVKIIFIDTFHLFPETYKFLSEVEERYGFKAHVFHAADVNNKEAYDAKFGSDLFITDIEEYDRICKVEPFSRALKTLEVDAMINGRRRDHGAERAHLEVFEEGKMVKVQPLAYWEFRDCWDYLTKYSLPYHPLHDQGFPSIGDVQSTIPVPREKWFEYAGERSGRFQGLTNPDGSAKTECGIHVGGRT

SEQ ID NO: 130425 - DNA, 1377 bp, Arabidopsis thaliana; identical to SEQ ID NO: 12292
  CDS (1)..(1377)

SEQ ID NO: 130426 - protein, 458 aa, Arabidopsis thaliana; identical to SEQ ID NO: 12293

SEQ ID NO: 130427 - DNA, 930 bp, Penicillium chrysogenum; identical to SEQ ID NO: 12296
  CDS (1)..(930)

SEQ ID NO: 130428 - protein, 309 aa, Penicillium chrysogenum; identical to SEQ ID NO: 12297

SEQ ID NO: 130429 - DNA, 771 bp, Chromatium vinosum
  CDS (1)..(771): transl_table=11
atgactgaacgacgtcagccttccctatcgaccgacaccctgccgacccgtgaagccgccgcgatcgaactcctgtcccaggtctgccgcgagctggattccatcgtgttcgccaccagcctcggcgccgaagacatggtgctgaccgagatcatccggcgcgaacgcctgccgatccgcatcttcactctcgacaccggacggctgccgaccgagaccctggaactcatcgaggtggtcgaacgccactacgggacgcggatcgagcgctacgcgccgcacccggacgccatcgccgattatgtgagccgctacggtctcgacggtttctacgactcggtgcccgcgcgtcaggcctgctgccgggtgcgcaagctcgaacccctgaagcgtgccctggccggtcagtcggcctgggtcacgggtctgcgcgccgagcagtccgtcacccgcgccgagctgccggcgcgcgaatgggatgccgccaacggtctggagaagatcaacccgctcgccgactggagcgagcacgaggtctgggccttcatccggcaccatcgggtgccctacaacccgctgcacaaccagggttatcccagcatcggctgcgccccctgcacccgcgccatcacggtcggcgaggacgtgcgcgccgggcgctggtggtgggaaaaccccgagaccaaggaatgcggactacaccggcgtgagttcgcgccgcgccagccgtccgcccatccagcgatcgaacgcgacaggagcgccgcatga

SEQ ID NO: 130430 - protein, 256 aa, Chromatium vinosum
MTERRQPSLSTDTLPTREAAAIELLSQVCRELDSIVFATSLGAEDMVLTEIIRRERLPIRIFTLDTGRLPTETLELIEVVERHYGTRIERYAPHPDAIADYVSRYGLDGFYDSVPARQACCRVRKLEPLKRALAGQSAWVTGLRAEQSVTRAELPAREWDAANGLEKINPLADWSEHEVWAFIRHHRVPYNPLHNQGYPSIGCAPCTRAITVGEDVRAGRWWWENPETKECGLHRREFAPRQPSAHPAIERDRSAA

SEQ ID NO: 130431 - DNA, 1395 bp, Brassica juncea; identical to SEQ ID NO: 81531
  CDS (1)..(1395)

SEQ ID NO: 130432 - protein, 464 aa, Brassica juncea; identical to SEQ ID NO: 81532

SEQ ID NO: 130433 - DNA, 1700 bp, Brassica juncea
  CDS (40)..(1404)
ctccttcattccttttgaacattttcgaatcggagagttatggccttagctgtcacttcttcttcaactgccatctctggatcaagtttctcacgctctggaccttgttctgatcgtaaagctcttcaaatctgttcgtttaggttatctgatctatcccatgtctctcaaagacgttactctctaaaggctgagtcaccacctacacgcaacgactctttggttacccgtgcttcgaccctaatcactcctggagtggaagagaaggaagaagacgttgaggatttcgagcaactcgcgaagaagctcgaagaggcttctccacttgaaatcatggacaaagctctccagagattcggaagcaacatcgcaattgctttcagtggtgcggaagatgttgcactgatcgaatacgctcggttaaccggaaggcccttcagggttttcagcttagacacagggaggttaaaccccgaaacctacaggctcttcgatgccgtggagaagcagtacgggatccgaatcgagtacacgttccctgatgcggtcgaggttcaagctttggtgaggaacaagggtttgttctctttctacgaggacggtcaccaggagtgttgccgtgtgaggaaagtaagacccttgcgccgcgctctcaagggtctcaaagcttggatcactggacagaggaaagatcagtctccagggacgagatcagagatcccgatcgttcaggtcgatccggtgtttgaagggttggatggtggtgttgggagtcttgtcaagtggaatcctttggctaatgtcgaaggtggtgatgtttggaacttcttgaggacgatggacgttccggtgaatgcattgcacgcgcaagggtatgtttctattgggtgtgagccgtgcactaggcccgtgcttccgggtcagcacgagagagaaggaaggtggtggtgggaagatgctaaagctaaagaatgtggtctgcacaaagggaacatcaagaaggaagatgactccaccaccgcggatttagcacctgctattgtgcatgatatcttcgaaagcagcaatgtggttgcattgagcagaggagggattgagaatctgttgaagcttggtaaccgcaaagagccgtggttggttgtgctttacgctccttggtgcccgttttgccaggccatggaagcttcctacgtcgaattggctgagaaactggcggtcaaagggattaaggtggccaagtttcgggctgatggtgaccagaaggagtttgccaagcaagagcttcaattaggaagcttcccgacgatacttctcttcccgaaaagcgctccgcgggcaattaagtacccgtcagagcatagagatgtggattcgcttatgtcatttgtcaatcttctccggtgagttgtgagattggaaagttaaacagtgtgatgaggaatgaagaaaactgagatgaaggatgatttcatcttcagattgtggatctaaaagaataagcaaaagctatgtgttctatatggtattgtagggtttatagactctttttctgtcttcttgtcgttaaatgtgtttttgttctttcttttttgagttttacttgagaaggaaaaggatccatgtaatgggattttgttgattatgtttttctagatatgtgatttttctacaaaaaaaaaaaaaaaaaaaaaaaaaaaaaa

SEQ ID NO: 130434 - protein, 454 aa, Brassica juncea; identical to SEQ ID NO: 12301

SEQ ID NO: 130435 - DNA, 1365 bp, Arabidopsis thaliana
  CDS (1)..(1365)
atggctttagctgttacttcttcttcaactgcaatctctggatcgagtttctctcgttctggagcttcttctgaatctaaagctcttcaaatatgttcgattaggttatctgatcgaacccatttgtctcagagacgttactctatgaaacctttaaacgctgagtcacattcacgaagcgaatcttgggttactcgtgcttcaactctaattgctcctgaagttgaagagaaaggaggagaagttgaagactttgagcaacttgctaaaaagcttgaagatgcttctccacttgaaatcatggataaagctcttgagagattcggagaccaaatcgcaattgcttttagtggagctgaagatgttgcattgattgaatatgcacgtttaactggaaagccatttagggtttttagtttagatacagggagattaaaccctgaaacgtacaggctctttgacgcagtcgagaagcagtacgggattcgaattgagtacatgtttcctgatgcagttgaggttcaagctttagtgaggaacaagggtttgttctcattctatgaagatggtcatcaagagtgttgccgtgtgaggaaagttagacctttgcgtcgtgctcttaagggtcttaaagcttggattacaggacagaggaaagaccaatctccgggtacgagatctgagatccctattgttcaggttgatccagtgtttgaagggttagatggcggtgttggaagtcttgtgaagtggaatcctttggctaatgttgaaggagctgatgtgtggaactttctgagaactatggatgttccggtgaatgcattgcacgcacaagggtatgtgtcaatcgggtgtgagccgtgtactaggccggtgcttccaggccaacatgagagagaaggaaggtggtggtgggaagatgctaaagctaaagaatgtggtctacacaaagggaacatcaaggaggaagatggtgctgcagactcaaagcctgctgctgtgcaagagatatttgaaagcaacaatgtggttgcattgagcaaaggaggggttgagaatcttttgaagctagagaaccgtaaagaggcgtggttggtcgtactttacgctccttggtgccctttctgccaggcgatggaagcatcgtacatcgaattggctgagaaacttgcgggaaaaggagttaaagtggcgaaattccgagctgacggtgagcagaaggagtttgctaagcaagagcttcagttagggagcttcccgacgatacttctctttccgaaaagagctccacgggctattaagtacccttcagagcatagagatgttgattcactcatgtcgtttgtgaatcttcttcggtag

SEQ ID NO: 130436 - protein, 454 aa, Arabidopsis thaliana; identical to SEQ ID NO: 12303

SEQ ID NO: 130437 - DNA, 1377 bp, Arabidopsis thaliana
  CDS (1)..(1377)
atggcactagcaatcaacgtttcttcatcttcttcttctgcgatctcaagctctagcttcccttcttcagatctcaaagtaacaaaaatcggatcattgaggttattgaatcgtaccaatgtctctgcggcttctctgagtttgtccgggaagagatcctccgtgaaagctcttaatgtgcaatcaattacaaaggaatccattgttgcttctgaggttacagagaagctagatgtggtggaagttgaagactttgaggaactagcaaagagattagagaatgcttctcctcttgagatcatggataaagctcttgagaagtttgggaatgacattgctattgcctttagtggagctgaagatgttgctctgattgagtatgctcatttaactggaagaccttatagggtattcagtttggatacagggagattgaatccagaaacatatagactcttcgataccgtggagaaacattacggtattcggattgagtatatgtttcctgatgctgttgaggttcaagctttagttaggaacaagggtttgttctctttctatgaagatggtcaccaggagtgttgccgtattagaaaggtgagacctttgaggcgtgcgttgaagggtttacgtgcttggatcactggtcagaggaaagatcaatcacccgggacaagatcggagattcctgttgttcaggttgatccagtgtttgaaggattagatggtggagttggtagtttggtgaagtggaatccggttgctaatgttgaagggaatgatgtttggaatttcttgaggacgatggatgttcctgtcaacacgcttcacgctgcgggttatgtttcaatcggatgtgagccatgcacgagagcggttttgccgggtcagcatgagagagaagggagatggtggtgggaagatgctaaggctaaagagtgtggccttcacaaagggaatatcaaggagaataccaatggaaacgcaaccgctaatgtcaacgggacagcctcagtcgcggatatcttcaatagcgagaatgttgtgaacttgagcaggcaagggattgagaatttgatgaagttagagaaccggaaagaggcttggatcgttgtgctttatgcaccgtggtgcccgttttgtcaggcaatggaagcttcattcgatgaattggcggataagctgggaggaagtggtgtgaaggttgctaagtttagagctgatggtgaccagaaggactttgccaaaaaggagttgcagcttggaagctttccaacaatacttgtgttcccaaagaactcttcaagaccaatcaagtatccatcagagaagagagatgttgattctttgacatctttcttgaatcttgttcggtaa

SEQ ID NO: 130438 - protein, 458 aa, Arabidopsis thaliana
MALAINVSSSSSSAISSSSFPSSDLKVTKIGSLRLLNRTNVSAASLSLSGKRSSVKALNVQSITKESIVASEVTEKLDVVEVEDFEELAKRLENASPLEIMDKALEKFGNDIAIAFSGAEDVALIEYAHLTGRPYRVFSLDTGRLNPETYRLFDTVEKHYGIRIEYMFPDAVEVQALVRNKGLFSFYEDGHQECCRIRKVRPLRRALKGLRAWITGQRKDQSPGTRSEIPVVQVDPVFEGLDGGVGSLVKWNPVANVEGNDVWNFLRTMDVPVNTLHAAGYVSIGCEPCTRAVLPGQHEREGRWWWEDAKAKECGLHKGNIKENTNGNATANVNGTASVADIFNSENVVNLSRQGIENLMKLENRKEAWIVVLYAPWCPFCQAMEASFDELADKLGGSGVKVAKFRADGDQKDFAKKELQLGSFPTILVFPKNSSRPIKYPSEKRDVDSLTSFLNLVR

SEQ ID NO: 130439 - DNA, 702 bp, Bacillus subtilis; identical to SEQ ID NO: 12304
  CDS (1)..(702): transl_table=11

SEQ ID NO: 130440 - protein, 233 aa, Bacillus subtilis; identical to SEQ ID NO: 12305

SEQ ID NO: 130441 - DNA, 681 bp, Bacillus anthracis; identical to SEQ ID NO: 12306
  CDS (1)..(681): transl_table=11

SEQ ID NO: 130442 - protein, 226 aa, Bacillus anthracis; identical to SEQ ID NO: 12307

SEQ ID NO: 130443 - DNA, 705 bp, Bacillus cereus; identical to SEQ ID NO: 12308
  CDS (1)..(705): transl_table=11

SEQ ID NO: 130444 - protein, 234 aa, Bacillus cereus; identical to SEQ ID NO: 12309

SEQ ID NO: 130445 - DNA, 735 bp, Buchnera aphidicola subsp
  CDS (1)..(735): transl_table=11
atgtctaaattctatattgaaaatattaatctgttaaattctgaaaaaaaaaataatatactttctgaattaaatttacttctatccaattattctgcagaagaacgtatttcttgggcattaagccatttaccccatacacaaatcatgtcatcaagcttcggtattcagtcaacagtattattacatcttataatcaaaaaaaaaccggatattcctgttatattaattgatacaggttatttgtttcctgaaacatataattttattgattttttaactaataaatttcatttgaatttgaaagtttttagatcaacaatatcttctgcgtggcaggaagcgcgatatgggaagttatgggaaaaaggtattgaaggaattgatttttataataatattaataaagtacagcccatgaattttgctttgaatgaactatcagtacaaacatggtttgctggattgcgtcatgatcaatcaaaaagtcgaaatttattaccatatctttctattaaaaaaggaatatttaaaattttaccaatactagattggtctaaggataaaataaaagactatttaaaagaaaataatttagatacccatcctttatataataatggatattcgtctgtaggagatacacacactactaaaaaacacatgcctggtatgttagaggaagaaactcgtttttttggattaaaacgcgaatgtggtttacatgaaaattaa

SEQ ID NO: 130446 - protein, 244 aa, Buchnera aphidicola subsp
MSKFYIENINLLNSEKKNNILSELNLLLSNYSAEERISWALSHLPHTQIMSSSFGIQSTVLLHLIIKKKPDIPVILIDTGYLFPETYNFIDFLTNKFHLNLKVFRSTISSAWQEARYGKLWEKGIEGIDFYNNINKVQPMNFALNELSVQTWFAGLRHDQSKSRNLLPYLSIKKGIFKILPILDWSKDKIKDYLKENNLDTHPLYNNGYSSVGDTHTTKKHMPGMLEEETRFFGLKRECGLHEN

SEQ ID NO: 130447 - DNA, 735 bp, Escherichia coli O6
  CDS (1)..(735): transl_table=11
atgtccaaactcgatctaaacgccctgaacgaactgccaaaggtagaccggattctggcgctggcggaaactaacgcccaactggaaaaactggacgctgaaggccgcgtagcctgggcgctggataatctgcccggtgaatatgtactttcttccagctttggcattcaggcggcggtgagtctgcatctggtgaatcagattcgcccggatattccagtgatcctcaccgataccggctatctgttcccggaaacctaccgctttattgacgagttaacggacaaactcaagctcaacctgaaagtgtaccgtgctaccgaaagcgccgcctggcaggaagcacgctacggcaaactgtgggagcagggcgttgaaggcattgaaaagtacaatgacatcaacaaagtcgaaccgatgaaccgggcgctgaaagaactgaatgcgcaaacctggtttgctggcctgcgccgtgaacaatccggcagtcgcgccaatttaccggtgctggcaattcagcgtggcgtatttaaagtgctgccgattatcgactgggataaccgaactatttatcagtacctgcaaaaacatggcctgaaatatcacccattatgggatgaaggatatttatcggtgggcgatacccatacaacccgtaaatgggaacccggcatggcggaagaagaaacgcgtttctttggcttaaaaagggaatgtggattacacgaagggtaa

SEQ ID NO: 130448 - protein, 244 aa, Escherichia coli O6
MSKLDLNALNELPKVDRILALAETNAQLEKLDAEGRVAWALDNLPGEYVLSSSFGIQAAVSLHLVNQIRPDIPVILTDTGYLFPETYRFIDELTDKLKLNLKVYRATESAAWQEARYGKLWEQGVEGIEKYNDINKVEPMNRALKELNAQTWFAGLRREQSGSRANLPVLAIQRGVFKVLPIIDWDNRTIYQYLQKHGLKYHPLWDEGYLSVGDTHTTRKWEPGMAEEETRFFGLKRECGLHEG

SEQ ID NO: 130449 - DNA, 735 bp, Escherichia coli; identical to SEQ ID NO: 12312
  CDS (1)..(735): transl_table=11

SEQ ID NO: 130450 - protein, 244 aa, Escherichia coli; identical to SEQ ID NO: 12313

SEQ ID NO: 130451 - DNA, 765 bp, Mycobacterium bovis
  CDS (1)..(765): transl_table=11
atgagcggcgagacaaccaggctgaccgaaccgcaactacgtgagctggccgcgcgcggagctgccgaactcgacggcgccaccgccaccgacatgttgcgctggaccgacgaaaccttcggcgacatcggcggcgccggcggcggcgtgagcggacatcgcgggtggacaacgtgcaactacgtagttgcttccaacatggctgatgcggtgctggtggatctggccgccaaggtgcgaccgggcgtaccggtcatctttcttgataccggctaccacttcgtcgaaacaatcggcaccagagatgcgatcgagtccgtctatgacgtccgggtgctcaatgtcactccggagcacacagtggccgagcaggacgaactgctgggcaaggacttgttcgcccgcaacccccatgaatgctgccggttgcgcaaggtcgttcccctgggcaagacgctgcgtggctactccgcgtgggtgaccgggctacggcgggtcgatgcaccgacccgggccaatgccccgctggtcagcttcgatgagacgttcaaactagtgaaggtcaacccgctggcggcgtggaccgaccaagatgtgcaggaatacattgccgacaacgacgtgctggttaatccgcttgtgcgggaaggctatccgtcgatcggttgcgctccgtgcacagccaaacccgccgaaggcgccgacccgcgcagcggacgctggcaggggctggccaagaccgaatgcgggttgcacgcctcgtga

SEQ ID NO: 130452 - protein, 254 aa, Mycobacterium bovis
MSGETTRLTEPQLRELAARGAAELDGATATDMLRWTDETFGDIGGAGGGVSGHRGWTTCNYVVASNMADAVLVDLAAKVRPGVPVIFLDTGYHFVETIGTRDAIESVYDVRVLNVTPEHTVAEQDELLGKDLFARNPHECCRLRKVVPLGKTLRGYSAWVTGLRRVDAPTRANAPLVSFDETFKLVKVNPLAAWTDQDVQEYIADNDVLVNPLVREGYPSIGCAPCTAKPAEGADPRSGRWQGLAKTECGLHAS

SEQ ID NO: 130453 - DNA, 735 bp, Photorhabdus luminescens subsp
  CDS (1)..(735): transl_table=11
atgagccaattcagcttatctcaatgtgttagtatgactgctgaacaacaagagcaatcactggctgagattaatcttcggcttgaaatgatggatgctcaccagagagtaaactgggcattggaaaatttgccaggggagtttgttctttcctccagttttggtattcaggcggcggtatgtcttcatttagtgacacaagaatatcctgatattccggtcatacttactgataccggttatctattccctgaaacttatcaattcatagataaactcacaacgcaactgaaactgaatttgcaagtattcagtgctgagcattccccggcctggcaggaagctcgctatgggaaattgtgggagcaaggcgtagagggaatagagcgttacaatcagattaataaggttgaaccaatgaatcgggctttgaaaaatctgagagcacaaagttggtttgctggtttacgccgtcagcaatctgaaagtcgatcaaaattaccggttttagctgtacagcggggagtatttaagattttgccgattatcgactgggataaccggcgtgtgcatcaatatctgacaaaacatggcttggaatatcatccattatgggaacagggttatctctctgttggtgacatccatacaactcaaaaatgggaaccgggcatgagtgaagaacaaacccgtttttttggcttgaagcgagaatgtgggttacatgagaattaa

SEQ ID NO: 130454 - protein, 244 aa, Photorhabdus luminescens subsp
MSQFSLSQCVSMTAEQQEQSLAEINLRLEMMDAHQRVNWALENLPGEFVLSSSFGIQAAVCLHLVTQEYPDIPVILTDTGYLFPETYQFIDKLTTQLKLNLQVFSAEHSPAWQEARYGKLWEQGVEGIERYNQINKVEPMNRALKNLRAQSWFAGLRRQQSESRSKLPVLAVQRGVFKILPIIDWDNRRVHQYLTKHGLEYHPLWEQGYLSVGDIHTTQKWEPGMSEEQTRFFGLKRECGLHEN

SEQ ID NO: 130455 - DNA, 765 bp, Rhizobium loti
  CDS (1)..(765): transl_table=11
atgctggcgaaaccaaggccgcttgaccatatcggcgatgcagatgacggcgtcgccgccaaggcggcggggctcgatgcgctgtacggccatctgaagccgctcgagatcatcgaacgctcggcccgcgaactgtttcacgacgagatcgctgccgtgtcgtccttcggggcggattcggcggtgctgctgcacatgattgccgagatcgaccgcacgctgccggtcatcttcctcgacaccggcaagcatttcgaggagacgctcggctatcgcgacgcgcttgtcgctgatttcgggctgaccaacatccaggtcatcaagcccgaggaagccgcgctcgcgcggatcgacccgacgggcaatctgcaccagagcaacaccgatgcctgctgcgacgtgcgcaaggtcgagccgctggcacggggcgtggcgccgttccgtgcctggttcaccggccgcaagcgttttcaggcctcgacgcgggcagcgctgccggtgttcgaggcggtcggcgcgcgcatccgcatcaatccgctggcgcactggacgacatcggaccaggccgactacatgcgggcgcatgcgctgcgcgagaatccgctggtcgcctatggctatctgtcgatcggctgtttcccgtgcacgcaaccggtgcagccgggcgaggatgcgcgcagcggacgctgggccggtcatgccaagaccgaatgcggcattcacctgtcggggctggaagtgtcgctgaccgacgcatcactatag

SEQ ID NO: 130456 - protein, 254 aa, Rhizobium loti
MLAKPRPLDHIGDADDGVAAKAAGLDALYGHLKPLEIIERSARELFHDEIAAVSSFGADSAVLLHMIAEIDRTLPVIFLDTGKHFEETLGYRDALVADFGLTNIQVIKPEEAALARIDPTGNLHQSNTDACCDVRKVEPLARGVAPFRAWFTGRKRFQASTRAALPVFEAVGARIRINPLAHWTTSDQADYMRAHALRENPLVAYGYLSIGCFPCTQPVQPGEDARSGRWAGHAKTECGIHLSGLEVSLTDASL

SEQ ID NO: 130457 - DNA, 798 bp, Rhizobium meliloti; identical to SEQ ID NO: 12314
  CDS (1)..(798): transl_table=11

SEQ ID NO: 130458 - protein, 265 aa, Rhizobium meliloti; identical to SEQ ID NO: 12315

SEQ ID NO: 130459 - DNA, 735 bp, Salmonella typhimurium; identical to SEQ ID NO: 12316
  CDS (1)..(735): transl_table=11

SEQ ID NO: 130460 - protein, 244 aa, Salmonella typhimurium; identical to SEQ ID NO: 12317

SEQ ID NO: 130461 - DNA, 738 bp, Shewanella oneidensis
  CDS (1)..(738): transl_table=11
gtgagcagtagcgaacttaaggcgctgctaacggcgcctaagagcgttcagcaagcagaacttgaacgcattaatcgtttcttagccggattaacggctcaagagcgagtgctctggggcttggcctatttgcccggtaatcacgcgctgtcatccagttttgggatccaagcggcggtgatgctgcatatggtgagtcaggtgcaatcggatattccggtgatcttaacggatactggctatttatttcccgagacgtatcagtttattgaccagttgaccgagcgattatccttaaatcttaaggtttaccaagcacctattacctcggcatggcaggaggcgcgctttggccaattgtgggaacaaggggtagagggtcttgaacgttataatcggctgaataaggtggagccaatgcagcgcgccttggccgagcttgaagtcggaacttggtttgctggactacgccgcagccagtcgagcactcgcgaagagttaccgatattggctatccatggttctcgcttcaagttgctgccgattatcgaatggtcgaacaaagatgtgcatctgtatctgacgcaatttgacttgccttatcatcctttatgggagcaaggttatgtttctgttggggatactcattcgagcaaacccttagaattaggtatgacagaggaagaaacgcgctttaatggcttaaaacgtgagtgcggtttgcattacgaaatatag

SEQ ID NO: 130462 - protein, 245 aa, Shewanella oneidensis
MSSSELKALLTAPKSVQQAELERINRFLAGLTAQERVLWGLAYLPGNHALSSSFGIQAAVMLHMVSQVQSDIPVILTDTGYLFPETYQFIDQLTERLSLNLKVYQAPITSAWQEARFGQLWEQGVEGLERYNRLNKVEPMQRALAELEVGTWFAGLRRSQSSTREELPILAIHGSRFKLLPIIEWSNKDVHLYLTQFDLPYHPLWEQGYVSVGDTHSSKPLELGMTEEETRFNGLKRECGLHYEI

SEQ ID NO: 130463 - DNA, 735 bp, Shigella flexneri; identical to SEQ ID NO: 12318
  CDS (1)..(735): transl_table=11

SEQ ID NO: 130464 - protein, 244 aa, Shigella flexneri; identical to SEQ ID NO: 12319

SEQ ID NO: 130465 - DNA, 732 bp, Staphylococcus epidermidis
  CDS (1)..(732): transl_table=11
atgtctatagaaagaattacttatgacaattttcaaaacgatccatttataaatgaattagatattaatgatgagacaaaaggcgcttatgagattttaaaatgggcatatcaaacttatgaaaatgatattgtttattcttgcagttttggtgctgagagtatggttttgattgacttgatttctcaaattaaacccgacgcacaaattgtatttttagacactgatttacattttcaagaaacatatgacttaatagatagggtgaaagataaatatccgcaattacgcattaaaatgaaaaaaccggaacttacgttagaggaacaaggtgagaaatataatcctgctttatggaagaatgatcctaaccaatgttgctacatacgcaagattaaaccactagaagacgtattatctggtgctgtagcttggatatcaggtcttagacgagcacaatcaccaacacgagcacatacaaatttcattaacaaagatgaaagatttaagtcaattaaagtgtgtcccttaatctattggacagaagaagaagtatggtcttatatacgtgataaggacttaccttataatgaattacatgatcaaaattatccaagtattggttgcattccatgtacatcacccgtatttgattctaatgattcacgtgctggtcgttggtcaaattctagtaagactgaatgcgggttacatgtaactgataaaccataa

SEQ ID NO: 130466 - protein, 243 aa, Staphylococcus epidermidis
MSIERITYDNFQNDPFINELDINDETKGAYEILKWAYQTYENDIVYSCSFGAESMVLIDLISQIKPDAQIVFLDTDLHFQETYDLIDRVKDKYPQLRIKMKKPELTLEEQGEKYNPALWKNDPNQCCYIRKIKPLEDVLSGAVAWISGLRRAQSPTRAHTNFINKDERFKSIKVCPLIYWTEEEVWSYIRDKDLPYNELHDQNYPSIGCIPCTSPVFDSNDSRAGRWSNSSKTECGLHVTDKP

SEQ ID NO: 130467 - DNA, 732 bp, Staphylococcus epidermidis
  CDS (1)..(732): transl_table=11
atgtctatagaaagaattacttatgacaattttcaaaacgatccatttataaatgaattagatattaatgatgagacaaaaggtgcttatgagattttaaaatgggcatatcaaacttatgaaaatgatattgtttattcttgcagttttggtgctgagagtatggttttgattgacttgatttctcaaattaaacccgacgcacaaattgtatttttagacactgatttacattttcaagaaacatatgacttaatagatagggtgaaagataaatatccgcaattacgcattaaaatgaaaaaaccggaacttacgttagaggaacaaggtgagaaatataatcctgctttatggaagaatgatcctaaccaatgttgctacatacgcaagattaaaccactagaagacgtattatctggtgctgtagcttggatatcaggtcttagacgagcacaatcaccaacacgagcacatacaaatttcattaacaaagatgaaagatttaagtcaattaaagtgtgtcccttaatctattggacagaagaagaagtatggtcttatatacgtgataaggatttaccatataatgaattacatgatcaaaattatccaagtattggttgtattccatgtacatcacccgtatttgattctaatgattcacgtgctggtcgttggtccaattctagtaagactgaatgtggattacatgtagctgataaaccataa

SEQ ID NO: 130468 - protein, 243 aa, Staphylococcus epidermidis
MSIERITYDNFQNDPFINELDINDETKGAYEILKWAYQTYENDIVYSCSFGAESMVLIDLISQIKPDAQIVFLDTDLHFQETYDLIDRVKDKYPQLRIKMKKPELTLEEQGEKYNPALWKNDPNQCCYIRKIKPLEDVLSGAVAWISGLRRAQSPTRAHTNFINKDERFKSIKVCPLIYWTEEEVWSYIRDKDLPYNELHDQNYPSIGCIPCTSPVFDSNDSRAGRWSNSSKTECGLHVADKP

SEQ ID NO: 130469 - DNA, 720 bp, Thiocapsa roseopersicina; identical to SEQ ID NO: 12320
  CDS (1)..(720): transl_table=11

SEQ ID NO: 130470 - protein, 239 aa, Thiocapsa roseopersicina; identical to SEQ ID NO: 12321

SEQ ID NO: 130471 - DNA, 762 bp, Vibrio cholerae; identical to SEQ ID NO: 81551
  CDS (1)..(762): transl_table=11

SEQ ID NO: 130472 - protein, 253 aa, Vibrio cholerae; identical to SEQ ID NO: 81552

SEQ ID NO: 130473 - DNA, 780 bp, Vibrio parahaemolyticus; identical to SEQ ID NO: 81553
  CDS (1)..(780): transl_table=11

SEQ ID NO: 130474 - protein, 259 aa, Vibrio parahaemolyticus; identical to SEQ ID NO: 81554

SEQ ID NO: 130475 - DNA, 777 bp, Vibrio vulnificus; identical to SEQ ID NO: 12322
  CDS (1)..(777): transl_table=11

SEQ ID NO: 130476 - protein, 258 aa, Vibrio vulnificus; identical to SEQ ID NO: 12323

SEQ ID NO: 130477 - DNA, 840 bp, Vibrio vulnificus; identical to SEQ ID NO: 12168
  CDS (64)..(840): transl_table=11

SEQ ID NO: 130478 - protein, 258 aa, Vibrio vulnificus; identical to SEQ ID NO: 81558

SEQ ID NO: 130479 - DNA, 714 bp, Xylella fastidiosa; identical to SEQ ID NO: 81559
  CDS (1)..(714): transl_table=11

SEQ ID NO: 130480 - protein, 237 aa, Xylella fastidiosa; identical to SEQ ID NO: 81560

SEQ ID NO: 130481 - DNA, 714 bp, Xylella fastidiosa
  CDS (1)..(714): transl_table=11
atgaccgtacttcccgccttacctcctctggacgatctggaaacgctcaacgtccacctagaaacgctgagtgctgaaaatcgcgtgtgctgggcactggagcacggtcctgaccaccctgcactgtcttccagcttcggcgcgcaatcggccgtcatgctgcatctactcacccggtttgcaccggatattacggtgatcctggtcgacaccggctatcttttcccagaaacctaccgtttcgccgacacgctgaccgaacgactcaagctcaatctgaaggtataccagccgctgcgtagcggcgcttggacggaagcccgtcatggtcgactatgggaacaagggatcgacggaattaatcaatacaacaccctgcacaaggtcgaaccgatgcgcagggcattagaggaattgcaagtcggcacctggtttaccggcctacgtcgcggacaatccagtacccgtacccaaacatcaatcgtgcaacgacgtgacgagcggtacaaaatcagtccaattgccgactggaccgaccgtgatatctgggaatacatgaaacaccatgatctgccctatcacccgctttgggaacagggctacgtttcaatcggtgacattcacacgacacgccccttggaaccagacatgcgcgaggaggacacacgcttcttcggattcaaacgtgagtgcgggattcacgagaacatctaa

SEQ ID NO: 130482 - protein, 237 aa, Xylella fastidiosa
MTVLPALPPLDDLETLNVHLETLSAENRVCWALEHGPDHPALSSSFGAQSAVMLHLLTRFAPDITVILVDTGYLFPETYRFADTLTERLKLNLKVYQPLRSGAWTEARHGRLWEQGIDGINQYNTLHKVEPMRRALEELQVGTWFTGLRRGQSSTRTQTSIVQRRDERYKISPIADWTDRDIWEYMKHHDLPYHPLWEQGYVSIGDIHTTRPLEPDMREEDTRFFGFKRECGIHENI

SEQ ID NO: 130483 - DNA, 801 bp, Schizosaccharomyces pombe; identical to SEQ ID NO: 12326
  CDS (1)..(801)

SEQ ID NO: 130484 - protein, 266 aa, Schizosaccharomyces pombe; identical to SEQ ID NO: 12327

SEQ ID NO: 130485 - DNA, 1395 bp, Brassica napus; identical to SEQ ID NO: 12330
  CDS (1)..(1395)

SEQ ID NO: 130486 - protein, 464 aa, Brassica napus; identical to SEQ ID NO: 12331

SEQ ID NO: 130487 - DNA, 27 bp, Artificial sequence
  primer
atgaagacctatcatttgaataatgat

SEQ ID NO: 130488 - DNA, 25 bp, Artificial sequence
  primer
ctaggcatcttgctttaaaaattgc

SEQ ID NO: 130489 - protein, 233 aa, Artificial sequence
  consensus sequence
  Variant (2)..(4): Xaa in position 2 to 4 is any amino acid
  Variant (5)..(7): Xaa in position 5 to 7 is any or no amino acid
  Variant (9)..(25): Xaa in position 9 to 25 is any amino acid
  Variant (26)..(37): Xaa in position 26 to 37 is any or no amino acid
  Variant (40)..(44): Xaa in position 40 to 44 is any amino acid
  Variant (47)..(75): Xaa in position 47 to 75 is any amino acid
  Variant (76)..(83): Xaa in position 76 to 83 is any or no amino acid
  Variant (85)..(98): Xaa in position 85 to 98 is any amino acid
  Variant (99)..(102): Xaa in position 99 to 102 is any or no amino acid
  Variant (104)..(105): Xaa in position 104 to 105 is any amino acid
  Variant (107)..(110): Xaa in position 107 to 110 is any amino acid
  Variant (112)..(116): Xaa in position 112 to 116 is any amino acid
  Variant (117)..(118): Xaa in position 117 to 118 is any or no amino acid
  Variant (120)..(121): Xaa in position 120 to 121 is any amino acid
  Variant (123)..(123): Xaa in position 123 is any amino acid
  Variant (125)..(126): Xaa in position 125 to 126 is any amino acid
  Variant (128)..(130): Xaa in position 128 to 130 is any amino acid
  Variant (131)..(131): Xaa in position 131 is any or no amino acid
  Variant (133)..(144): Xaa in position 133 to 144 is any amino acid
  Variant (145)..(155): Xaa in position 145 to 155 is any or no amino acid
  Variant (157)..(158): Xaa in position 157 to 158 is any amino acid
  Variant (160)..(162): Xaa in position 160 to 162 is any amino acid
  Variant (164)..(170): Xaa in position 164 to 170 is any amino acid
  Variant (172)..(180): Xaa in position 172 to 180 is any amino acid
  Variant (181)..(181): Xaa in position 181 is any or no amino acid
  Variant (183)..(185): Xaa in position 183 to 185 is any amino acid
  Variant (188)..(188): Xaa in position 188 is any amino acid
  Variant (190)..(190): Xaa in position 190 is any amino acid
  Variant (192)..(194): Xaa in position 192 to 194 is any amino acid
  Variant (195)..(211): Xaa in position 195 to 211 is any or no amino acid
  Variant (213)..(214): Xaa in position 213 to 214 is any amino acid
  Variant (216)..(216): Xaa in position 216 is any amino acid
  Variant (217)..(228): Xaa in position 217 to 228 is any or no amino acid
  Variant (232)..(232): Xaa in position 232 is any amino acid
FXXXXXXVXXXXXXXXXXXXXXXXXXXXXXXXXXXXXDTXXXXXETXXXXXXXXXXXXXXXXXXXXXXXXXXXXXXXXXXXXXGXXXXXXXXXXXXXXXXXXKXXPXXXXLXXXXXXXWXXGXRXXQXXXXRXXXXXXXXXXXXXXXXXXXXXXXKXXPXXXWXXXXXXXYXXXXXXXXXXLXXXGYXSXGXXXXXXXXXXXXXXXXXXXXRXXRXXXXXXXXXXXXXECGXH

SEQ ID NO: 130490 - protein, 19 aa, Artificial sequence
  protein pattern
  Variant (2)..(4): Xaa in position 2 to 4 is any or no amino acid
  Variant (6)..(8): Xaa in position 6 to 8 is any amino acid
  Variant (10)..(10): Xaa in position 10 is Phe or Tyr
  Variant (11)..(11): Xaa in position 11 is any amino acid
  Variant (13)..(13): Xaa in position 13 is Ile or Val
  Variant (15)..(15): Xaa in position 15 is Cys or Asp
  Variant (16)..(18): Xaa in position 16 to 18 is any amino acid
  Variant (19)..(19): Xaa in position 19 is Asn, Ser or Thr
PXXXLXXXGXXSXGXXXXX

SEQ ID NO: 130491 - DNA, 582 bp, Arabidopsis thaliana
  CDS (1)..(582)
atggcgtcgttactcgattccgtcaccgtgacccgcgtgttttctctgccgattgcggcttcggtctcgtcttcttcagctgctccgtcggtttcacgacgccggatttctcccgccaggtttctggaattcagaggtttgaagtcttcgcggagtttggtgactcagtcggccagtctgggtgcgaatcgtagaaccagaatcgctcgcggtggacgaatcgcctgtgaggctcaggacaccactgccgccgccgtcgaagtaccaaatctgtctgattcagaatggcaaacaaaggttctggaatcagatgtcccagttctggtcgagttctgggcaccatggtgtggaccttgccgtatgattcaccccatagttgaccagctagccaaagatttcgcagggaagttcaaattctacaaaatcaacactgacgagagcccaaatacagcaaaccgttacgggatacgaagcgttccaacagtaatcatcttcaaaggcggtgagaagaaagatagcatcattggagctgtgcctagagagacgttggagaaaactatagaaagattcttggtcgagtaa

SEQ ID NO: 130492 - protein, 193 aa, Arabidopsis thaliana
MASLLDSVTVTRVFSLPIAASVSSSSAAPSVSRRRISPARFLEFRGLKSSRSLVTQSASLGANRRTRIARGGRIACEAQDTTAAAVEVPNLSDSEWQTKVLESDVPVLVEFWAPWCGPCRMIHPIVDQLAKDFAGKFKFYKINTDESPNTANRYGIRSVPTVIIFKGGEKKDSIIGAVPRETLEKTIERFLVE

SEQ ID NO: 130493 - DNA, 783 bp, Glycine max
  CDS (61)..(639)
atatcaaacagccaaccaaaaccaaacatctctctctctctctctctctagctgctttcaatggcttccttgctcgattccgtcaccgttacccgcgtgttttctcttccgatcacttcctcgatttcacctgcttcaaaggttccgtcaatctctgcccggaggatttctcccgttccggaattcagaggtttgaaagcttcctggaggagttcggtgactcagtcagcgagtcttggtacgaatctcggatcccgattcgctcgtggtggtagaatcgtctgcgaggctcaggacaccactgccgccgccgtcgaagtaccaaacatctctgactcagaatggcaaacacaggttctcgagtcagatgtaccagtattggtcgagttttgggcaccgtggtgtggaccttgccgtatgattcaccccattgttgaccaactggccagggatttcgcaggcaagttcaaattctacaaaatcaacaccgacgagagcccaaacacagccaaccgttacgggatacgcagcgttcctaccgtgatcatattcaaagacggtgagaagaaagacagtatcatcggagctgtccctaaagagacgttggagaaaactatagaaagattcgtggtcgagtaactaaacaaaaacaaaatttcactctttattatcactcatgtcttctgcgttgtataattcttcttaaggtctcttttgactatttatgtttccatgcgtccactatgtattgtttagtattataaaaaaaaatgaataacgaac

SEQ ID NO: 130494 - protein, 192 aa, Glycine max; identical to SEQ ID NO: 69877

SEQ ID NO: 130495 - DNA, 1008 bp, Mesorhizobium loti MAFF303099; identical to SEQ ID NO: 45763
  CDS (1)..(1008): transl_table=11

SEQ ID NO: 130496 - protein, 335 aa, Mesorhizobium loti MAFF303099; identical to SEQ ID NO: 45764

SEQ ID NO: 130497 - DNA, 420 bp, Aquifex aeolicus VF5
  CDS (1)..(420): transl_table=11
atggcaggtagagtaattgaacttaacgaacaaaattgggaacaagaagttctccagtccgataaacctgttctcgttgacttttgggcaccatggtgcggaccatgcaggataatagctcccataattgaagaaattgcggaagaactgggagacaaagtaaaggtaggaaagctcaacaccgacgaaaatcccaacatagcaatgaggtacggcatcagggctatacccacgataatcctcttcaaaaatggggaggtggtggatacaagaataggtgtccaaccaaaagaacgattaaacaaatggttcttgagcacgtttaataatttatggaggctcaggccggttttgatacctttattgaagccacacgttacctctttcgggggccctccccccaggaaatccttctcttaa

SEQ ID NO: 130498 - protein, 139 aa, Aquifex aeolicus VF5
MAGRVIELNEQNWEQEVLQSDKPVLVDFWAPWCGPCRIIAPIIEEIAEELGDKVKVGKLNTDENPNIAMRYGIRAIPTIILFKNGEVVDTRIGVQPKERLNKWFLSTFNNLWRLRPVLIPLLKPHVTSFGGPPPRKSFS

SEQ ID NO: 130499 - DNA, 324 bp, Thermosynechococcus elongatus BP-1; identical to SEQ ID NO: 91087
  CDS (1)..(324): transl_table=11

SEQ ID NO: 130500 - protein, 107 aa, Thermosynechococcus elongatus BP-1; identical to SEQ ID NO: 91088

SEQ ID NO: 130501 - DNA, 324 bp, Prochlorococcus marinus subsp. pastoris str. CCMP1986
  CDS (1)..(324): transl_table=11
atgtcatcagcccccgccgtaactgattcttcattcgacaaagaagttttgcaaagtaatctgccagttttagttgatttttgggctccatggtgcggaccttgcaggatggtcgcaccagtagtagaggagatttcgaaagactttgaaggtaaaatcaaagtatttaaattaaatacagatgagaatccaaatgttgcaagtcaatatggaatcagaagtatcccgactttaatgatcttcaaaggtggtcaaaaagttgatactgttgttggagcagtaccaaaagcgactctttcaagtaccttatcaaaacacttataa

SEQ ID NO: 130502 - protein, 107 aa, Prochlorococcus marinus subsp. pastoris str. CCMP1986
MSSAPAVTDSSFDKEVLQSNLPVLVDFWAPWCGPCRMVAPVVEEISKDFEGKIKVFKLNTDENPNVASQYGIRSIPTLMIFKGGQKVDTVVGAVPKATLSSTLSKHL

SEQ ID NO: 130503 - DNA, 324 bp, Synechococcus sp. WH 8102
  CDS (1)..(324): transl_table=11
atgtccagcgccgctgcggttactgacgcctctttcgagcaggacgtcctgcagagcgacgtcccggttctggtcgacttctgggcaccctggtgtggcccctgccgcatggtggctcccatcgtcgaagaaatcgccaaggaattcgatggtcagatcaaggtcttcaagctgaataccgatgaaaaccctaatgtcgccagtcagtacggcatccgcagcatcccaacgttgatggtgttcaaaggcggccagaaggtcgacaccgttgtgggtgctgttcccaaggcaaccctctccggcacgatctcgaagtatctctga

SEQ ID NO: 130504 - protein, 107 aa, Synechococcus sp. WH 8102
MSSAAAVTDASFEQDVLQSDVPVLVDFWAPWCGPCRMVAPIVEEIAKEFDGQIKVFKLNTDENPNVASQYGIRSIPTLMVFKGGQKVDTVVGAVPKATLSGTISKYL

SEQ ID NO: 130505 - DNA, 333 bp, Gloeobacter violaceus PCC 7421; identical to SEQ ID NO: 91113
  CDS (1)..(333): transl_table=11

SEQ ID NO: 130506 - protein, 110 aa, Gloeobacter violaceus PCC 7421; identical to SEQ ID NO: 91114

SEQ ID NO: 130507 - DNA, 654 bp, Aspergillus nidulans FGSC A4; identical to SEQ ID NO: 91165
  CDS (1)..(654)

SEQ ID NO: 130508 - protein, 217 aa, Aspergillus nidulans FGSC A4; identical to SEQ ID NO: 91166

SEQ ID NO: 130509 - DNA, 324 bp, Prochlorococcus marinus str. MIT 9515
  CDS (1)..(324): transl_table=11
atgtcatcagctcccgccgtaactgattcttcatttgacaaagaagttttgcaaagtgatctgccagtcctagttgatttttgggctccatggtgtggtccttgcaggatggtcgcccctgttgttgaggaaatttcaaaagactttgaaggtaaaatcaaggtatttaagttgaatacagatgagaatccaaatgttgcaagtcaatatggaataagaagtattccgaccttaatgatatttaaaggtggtcaaaaggttgatactgtcgttggagctgttccaaaagcgactctttcaagtaccttgtctaagcacttataa

SEQ ID NO: 130510 - protein, 107 aa, Prochlorococcus marinus str. MIT 9515
MSSAPAVTDSSFDKEVLQSDLPVLVDFWAPWCGPCRMVAPVVEEISKDFEGKIKVFKLNTDENPNVASQYGIRSIPTLMIFKGGQKVDTVVGAVPKATLSSTLSKHL

SEQ ID NO: 130511 - DNA, 324 bp, Prochlorococcus marinus str. NATL1A
  CDS (1)..(324): transl_table=11
atgtccacagcttctgcagtaactgattcttctttcgaacaagaagtcctccagagcgatgttcctgttttggttgatttttgggcaccttggtgcggaccatgcagaatggttgctccaattgtcgaagagatctcaaaagattttgaaggcaaaataaaagtttacaaattgaataccgatgagaatcctaatgttgctagccagtatgggatcagaagcatcccaacgctgatgatattcaaaggaggtcagaaagtagataccgttgtgggagcagtccctaaagccaccctctcaggaacaatttccaaacatctctaa

SEQ ID NO: 130512 - protein, 107 aa, Prochlorococcus marinus str. NATL1A; identical to SEQ ID NO: 91202

SEQ ID NO: 130513 - DNA, 324 bp, Prochlorococcus marinus str. MIT 9303
  CDS (1)..(324): transl_table=11
atgtccaatgccgccgcagttaccgacgcctccttcgagcaggacgtccttcaaagcgacgtgcctgtgctagttgatttctgggcgccttggtgtggcccatgtcgcatggttgctccgatcgtcgatgagattgccaaggaattcgagagcaagatcaaagtcttcaagctcaacactgacgaaaaccccaacgtcgccagccaatacggtattcgcagtatccccaccctgatggtgttcaagggaggtcaaaaagtcgacacagttgttggtgcagtgcccaaagccacgctttctggaaccatttcaaagtacctctga

SEQ ID NO: 130514 - protein, 107 aa, Prochlorococcus marinus str. MIT 9303
MSNAAAVTDASFEQDVLQSDVPVLVDFWAPWCGPCRMVAPIVDEIAKEFESKIKVFKLNTDENPNVASQYGIRSIPTLMVFKGGQKVDTVVGAVPKATLSGTISKYL

SEQ ID NO: 130515 - DNA, 324 bp, Dehalococcoides sp. BAV1
  CDS (1)..(324): transl_table=11
atggtaatggaattaaccgaccagagctttgctgctgaggtattgaaatcagataaacccgtactggtagatttttgggctccgtggtgcggtccctgccgtatggtagcccccataattgacaaactatctactaaatacgcgggtaaatttaagttctgtaaactgaatgtagatgaaaataaaaccactgctacccaataccgggtcatgtccatacccaccctgctgtttttcaaaggcggtcaggtagctgatatggtggtgggtgcggtacctgaatctgccctgagccagaagattgaccagctaatccagaagtag

SEQ ID NO: 130516 - protein, 107 aa, Dehalococcoides sp. BAV1
MVMELTDQSFAAEVLKSDKPVLVDFWAPWCGPCRMVAPIIDKLSTKYAGKFKFCKLNVDENKTTATQYRVMSIPTLLFFKGGQVADMVVGAVPESALSQKIDQLIQK

SEQ ID NO: 130517 - DNA, 339 bp, Symbiobacterium thermophilum IAM 14863; identical to SEQ ID NO: 69634
  CDS (1)..(339): transl_table=11

SEQ ID NO: 130518 - protein, 112 aa, Symbiobacterium thermophilum IAM 14863; identical to SEQ ID NO: 69635

SEQ ID NO: 130519 - DNA, 324 bp, Dehalococcoides sp. CBDB1
  CDS (1)..(324): transl_table=11
atggtaatggaaataaccgaccagagctttgctgctgaggtattgaaatcagataaacccgtactggtagatttttgggctccgtggtgcggtccctgccgtatggtagcccccataattgacaaactatctactaaatacgcgggtaaatttaagttctgcaaactgaatgtagatgaaaataaaaccaccgctacccaataccgggtcatgtccatacccaccctgctgtttttcaaaggcggtcaggtagctgatatggtggtgggtgcggtacctgaatctgccctgagccagaagattgaccagctaatccagaagtag

SEQ ID NO: 130520 - protein, 107 aa, Dehalococcoides sp. CBDB1
MVMEITDQSFAAEVLKSDKPVLVDFWAPWCGPCRMVAPIIDKLSTKYAGKFKFCKLNVDENKTTATQYRVMSIPTLLFFKGGQVADMVVGAVPESALSQKIDQLIQK

SEQ ID NO: 130521 - DNA, 375 bp, Synechococcus sp. CC9605
  CDS (1)..(375): transl_table=11
gtgttttcgcttgaaaccgttgctaaattctcactaaattcccctgcttatatgtccagcgctgctgctgtcaccgacgcatccttcgagcaggacgtgctccaaagcgatgtgccggttctcgtggacttctgggcaccctggtgcggaccctgccgcatggtcgctccgattgtggaagagattgccaaggaatttgacggtcagatcaaggtgttcaagctcaacaccgacgagaacccgaacgtggccagccagtacggcatccgcagcatcccgacgctgatggtgttcaagggtgggcagaaggtggacaccgtggtgggcgctgttcccaaggcaaccctgtcaggcaccatttccaagtacctctga

SEQ ID NO: 130522 - protein, 124 aa, Synechococcus sp. CC9605
MFSLETVAKFSLNSPAYMSSAAAVTDASFEQDVLQSDVPVLVDFWAPWCGPCRMVAPIVEEIAKEFDGQIKVFKLNTDENPNVASQYGIRSIPTLMVFKGGQKVDTVVGAVPKATLSGTISKYL

SEQ ID NO: 130523 - DNA, 330 bp, Moorella thermoacetica ATCC 39073
  CDS (1)..(330): transl_table=11
atggcagcgtcaaatattataaccctgacggacgccaattttgaagaagaagtgctctcggcaacaaccccggtcctggttgatttctgggccgcttggtgcggtccctgccggatgattgctcccattgtggacgagctggcgcaggagtacgccggcaaagtcaaggtggccaagctgaacgtagacgagtaccccaagatccccgccgactacgggatcatgagcatccctaccctgatcctgtttaaaaacggtgaggttatcgcccggacagtcggttatcagagcaaggaaaaactggcccaggttttggagaataatttatag

SEQ ID NO: 130524 - protein, 109 aa, Moorella thermoacetica ATCC 39073
MAASNIITLTDANFEEEVLSATTPVLVDFWAAWCGPCRMIAPIVDELAQEYAGKVKVAKLNVDEYPKIPADYGIMSIPTLILFKNGEVIARTVGYQSKEKLAQVLENNL

SEQ ID NO: 130525 - DNA, 378 bp, Trichodesmium erythraeum IMS101
  CDS (1)..(378): transl_table=11
atggaaaaatcaacagaaaaagaaacaaaacaagatgtgccacaagtaactgatagtagtttcgataaagatgtgcttcatagtgacattccagtgttagtagatttctgggcaccttggtgtgggccatgcaagatggttgctcctgtagttagtgagatagcacagcaatttaaagacaaagtcaaagtagtgaaattaaatactgacgagaatcctaatacagcaagcaagtatgggattcgtagtattcctaccttgatgatatttaagggaggccaaagagttgatatggttgtgggtgccgttcctaagactacattagctagcactttagaaaagcacctttcaaacgaagaaaagcagacttcaaaataa

SEQ ID NO: 130526 - protein, 125 aa, Trichodesmium erythraeum IMS101
MEKSTEKETKQDVPQVTDSSFDKDVLHSDIPVLVDFWAPWCGPCKMVAPVVSEIAQQFKDKVKVVKLNTDENPNTASKYGIRSIPTLMIFKGGQRVDMVVGAVPKTTLASTLEKHLSNEEKQTSK

SEQ ID NO: 130527 - DNA, 330 bp, Trichodesmium erythraeum IMS101; identical to SEQ ID NO: 91223
  CDS (1)..(330): transl_table=11

SEQ ID NO: 130528 - protein, 109 aa, Trichodesmium erythraeum IMS101; identical to SEQ ID NO: 91224

SEQ ID NO: 130529 - DNA, 324 bp, Synechococcus sp. CC9311
  CDS (1)..(324): transl_table=11
atgtccagcgctaccgctgtaaccgacgcatcctttgaacaggatgtccttcaaagtgacgttcctgtcttagttgacttctgggctccctggtgtggcccatgccgcatggtggctccgattgttgacgagatctctaaggaattcgaaggcaagatcaaagtcttcaagctcaataccgacgagaaccccaacgtcgccagccagtacgggattcgcagcatccccactttgatggtgttcaaggggggccagaaagttgacaccgtcgttggcgcagttcccaaagccacgctctccggcacgatttccaagcatctctaa

SEQ ID NO: 130530 - protein, 107 aa, Synechococcus sp. CC9311
MSSATAVTDASFEQDVLQSDVPVLVDFWAPWCGPCRMVAPIVDEISKEFEGKIKVFKLNTDENPNVASQYGIRSIPTLMVFKGGQKVDTVVGAVPKATLSGTISKHL

SEQ ID NO: 130531 - DNA, 498 bp, Magnetococcus sp. MC-1
  CDS (1)..(498): transl_table=11
gtgccgagatcgttattttttgagctctcagtcggaaatctagagatgagcgagtcacttatagctacctgtgccggttgcggtaccggcaaccgtattcccaccaacaaggcgggctttaatgcccgttgcggcaagtgtggcgagccccttaaccgggtcggccccgattttcccgtaacggtgggcgagcttcagtttcatgacgaggtattacactcgcctatgccggtactggtggatttttgggcgccatggtgtggtccgtgtcggcagatgtcgcccttactggcggattttgcccgtgagatggccggacgcatcaaagtcgttaaggtcaataccgacgataaccgcatcctcgccaaccaatttaacattcgttccatccccaccctcatgctgttcgatcatggtcagttgaaggatcaggtctctggctccatgacgctgcctgcgttgcgggattggattaaccgcattttggagatctcttga

SEQ ID NO: 130532 - protein, 165 aa, Magnetococcus sp. MC-1
MPRSLFFELSVGNLEMSESLIATCAGCGTGNRIPTNKAGFNARCGKCGEPLNRVGPDFPVTVGELQFHDEVLHSPMPVLVDFWAPWCGPCRQMSPLLADFAREMAGRIKVVKVNTDDNRILANQFNIRSIPTLMLFDHGQLKDQVSGSMTLPALRDWINRILEIS

SEQ ID NO: 130533 - DNA, 324 bp, Nostoc punctiforme PCC 73102; identical to SEQ ID NO: 91233
  CDS (1)..(324): transl_table=11

SEQ ID NO: 130534 - protein, 107 aa, Nostoc punctiforme PCC 73102; identical to SEQ ID NO: 91234

SEQ ID NO: 130535 - DNA, 324 bp, Crocosphaera watsonii WH 8501; identical to SEQ ID NO: 91239
  CDS (1)..(324): transl_table=11

SEQ ID NO: 130536 - protein, 107 aa, Crocosphaera watsonii WH 8501; identical to SEQ ID NO: 91240

SEQ ID NO: 130537 - DNA, 324 bp, Prochlorococcus marinus str. MIT 9211
  CDS (1)..(324): transl_table=11
atgtcaagcgcagcagctgtaactgattcatcatttgaacaggaagtcctacaaagtgacgtacctgtgctcgttgacttttgggctccttggtgcgggccctgccgaatggtcgctccaatagtcgatgaaatatctaaagattttgaagggaaaataaaagtctgcaaattaaatacagatgaaaatccaaacgtggccagtcaatatggcatacgcagcattccgactttaatgatttttaaaggagggcaaaaagttgataccgttgttggcgcagtaccaaaagccacactttcaggaacaatttctaagcatatatag

SEQ ID NO: 130538 - protein, 107 aa, Prochlorococcus marinus str. MIT 9211
MSSAAAVTDSSFEQEVLQSDVPVLVDFWAPWCGPCRMVAPIVDEISKDFEGKIKVCKLNTDENPNVASQYGIRSIPTLMIFKGGQKVDTVVGAVPKATLSGTISKHI

SEQ ID NO: 130539 - DNA, 324 bp, Synechococcus sp. RS9917
  CDS (1)..(324): transl_table=11
atgtccagcgctgctgccgtcaccgacgcatccttcgaacaggacgtcctccagagcgacgtgcctgtgctggtggatttctgggctccctggtgtggcccctgccgcatggtggccccgatcgtggatgagatctccaaggaatttgaaggcaagatcaaggtcttcaagctcaacaccgacgaaaatcccaacgttgccagtcagtacggcatccgcagcattccgaccctgatggttttcaaaggcggccagaaggtggacaccgtggtgggtgctgttcccaaagccaccctctcaggcaccatctccaaatacatctga

SEQ ID NO: 130540 - protein, 107 aa, Synechococcus sp. RS9917
MSSAAAVTDASFEQDVLQSDVPVLVDFWAPWCGPCRMVAPIVDEISKEFEGKIKVFKLNTDENPNVASQYGIRSIPTLMVFKGGQKVDTVVGAVPKATLSGTISKYI

SEQ ID NO: 130541 - DNA, 324 bp, Synechococcus sp. WH 5701
  CDS (1)..(324): transl_table=11
atgtccagcgccactgccgtcaccgatgcctcctttgagctggatgtgctcaagagtgacgtgcccgtgctggttgatttctgggccccctggtgcggcccgtgccgcatggtggctccgatcgtcgacgagatcgccaaggaattcgagggcaagctgaaggtctacaagctcaacaccgacgagaaccccaacgtcgccagccagtacggcatccgcagcatccccaccctgatgatcttcaagggagggcagaaagtggacaccgtggtgggcgccgttcccaagaacacactctccggcacgatcgccaaatacctctga

SEQ ID NO: 130542 - protein, 107 aa, Synechococcus sp. WH 5701
MSSATAVTDASFELDVLKSDVPVLVDFWAPWCGPCRMVAPIVDEIAKEFEGKLKVYKLNTDENPNVASQYGIRSIPTLMIFKGGQKVDTVVGAVPKNTLSGTIAKYL

SEQ ID NO: 130543 - DNA, 324 bp, Synechococcus sp. RS9916
  CDS (1)..(324): transl_table=11
atgtccagcgctgctgccgtgaccgacgcctccttcgaacaggacgtgctccagagcgacgtgcctgtgctggtggacttctgggcaccctggtgtggcccttgccgcatggtggcgccgatcgtggatgagatctccaaggaattcgagggcaaaatcaaggtgttcaagctgaacaccgacgagaatcccaacgtcgccagccaatacggcatccgcagcatccctaccttgatggtgttcaaaggcggccagaaggttgacaccgtcgttggcgccgttcccaaggccaccctctctggcacgatctccaagtacctctga

SEQ ID NO: 130544 - protein, 107 aa, Synechococcus sp. RS9916
MSSAAAVTDASFEQDVLQSDVPVLVDFWAPWCGPCRMVAPIVDEISKEFEGKIKVFKLNTDENPNVASQYGIRSIPTLMVFKGGQKVDTVVGAVPKATLSGTISKYL

SEQ ID NO: 130545 - DNA, 453 bp, Candidatus Desulfococcus oleovorans Hxd3
  CDS (1)..(453): transl_table=11
atgaccgatcaggctgtaattgtgccgtgcagccgctgcggcgcgaaaaaccgggtgagaacggaccctgcggggaaaatgccggtgtgcgggaaatgcagggccccgctggttgccggcaaagccctctctgtcccgattaccgtctttgaccggacctttcaggacgaggttctgtccagcgccgtaccggtgctggtggacttctgggccccctggtgcgggccgtgcaaaatggtcggccccatgcttgagcggctggccgcaaagtatgccggccgtgtcaagatcgcaaagctcaacgtggatgaaaacccggccaccgcctcccgttacgcggtgtccagcattcccaccctgctctttttcaaacagggccgggtggcccagacccttgtgggggccgtgcctgaaagccggatcgaggaccagatccgggcactgctggcataa

SEQ ID NO: 130546 - protein, 150 aa, Candidatus Desulfococcus oleovorans Hxd3
MTDQAVIVPCSRCGAKNRVRTDPAGKMPVCGKCRAPLVAGKALSVPITVFDRTFQDEVLSSAVPVLVDFWAPWCGPCKMVGPMLERLAAKYAGRVKIAKLNVDENPATASRYAVSSIPTLLFFKQGRVAQTLVGAVPESRIEDQIRALLA

SEQ ID NO: 130547 - DNA, 738 bp, Oryza sativa subsp
  CDS (1)..(738)
atggcctcctccgccctcgccgtctccgtcgccaagccagccgcgtctcctcccgtcgccgtcgccgcggtaaccccgcagcgtcgcctcctcccgcagtgccggggcgtccgcgctgccccggtcgtccggctccgctcgggacgcgcccgcggcgtgtcggtggtgtgcgccgcccagggccaggagacctccttccaagggcactcagatctttcccagcaacaaatgaatttcttccctctaatatccctggttgcagctaataaaccatcaattgcatggaattgctcctttaaggaacagacaccgatcatgaaagttcctgacgtgactaagtcaacatggcagtcacttgtggtggagagtgaacttcctgttctcgttgagttctgggcttcgtggtgcgggccatgcaaaatgatagatcctgtcattggcaaactttcaaaagaatatgaagggaagctgaactgctacaagctcaacactgatgaaaaccccgacatagcaacccagtttgggataagaagcattcccacaatgatgatattcaagaacggtgagaagaaagatgcggtgattggagctgtgcccgagagcaccctggtcagcagcatcgacaaatacatcgggagtgctactaaatgccgatatgataaccatattcggccgaattgtcattatcagattttaacggatgaaatgtttgccgggagtgtgggcatgaatgcttga

SEQ ID NO: 130548 - protein, 245 aa, Oryza sativa subsp
MASSALAVSVAKPAASPPVAVAAVTPQRRLLPQCRGVRAAPVVRLRSGRARGVSVVCAAQGQETSFQGHSDLSQQQMNFFPLISLVAANKPSIAWNCSFKEQTPIMKVPDVTKSTWQSLVVESELPVLVEFWASWCGPCKMIDPVIGKLSKEYEGKLNCYKLNTDENPDIATQFGIRSIPTMMIFKNGEKKDAVIGAVPESTLVSSIDKYIGSATKCRYDNHIRPNCHYQILTDEMFAGSVGMNA

SEQ ID NO: 130549 - DNA, 570 bp, Oryza sativa subsp
  CDS (1)..(570)
atggccatggccgcggccgcctccctcctgccggcgtgcgccgccccaaccctccccggacgcgccttccgcccgcgccgcaactccaccccgacggcctccctctcctgcgatggtggctctcgcggccgcggcgtcggcctcggcgtcatcctcggtgggggtcgcgcgcaaggcgttcgacggaatgccgcagccgagacctacgtcccaggctccggcaagtacatcgccccggactacctcgtgaagaaggtgacggccaaggaactggaggagctggtgaggggggagaggaaggtgcccctcatcgtggatttctatgcgacgtggtgcggaccctgcgtcctcatggcccaggacatcgagatgcttgcagttgaatatgaaaacaatgctctatttgtgaaggtggataccgatgatgaatatgaacttgcaagagatatgcaggtaagaggacttccaacactgtatttcttcagtccagatcaaagcaaagacgccctaaggactgagggactgattcctattgatatgatcagaaatatcattgataatgaattgtga

SEQ ID NO: 130550 - protein, 189 aa, Oryza sativa subsp
MAMAAAASLLPACAAPTLPGRAFRPRRNSTPTASLSCDGGSRGRGVGLGVILGGGRAQGVRRNAAAETYVPGSGKYIAPDYLVKKVTAKELEELVRGERKVPLIVDFYATWCGPCVLMAQDIEMLAVEYENNALFVKVDTDDEYELARDMQVRGLPTLYFFSPDQSKDALRTEGLIPIDMIRNIIDNEL

SEQ ID NO: 130551 - DNA, 642 bp, Vitis vinifera
  CDS (1)..(642)
atggcttcttgctccaatcctcctcctctctcttcaccgctctccccttctctccaaacccgaaaactcttcgctcctctctcctatcctcgctccggcggaccctcctatgctcttcatttccaagccaaaaggggcattaggttttcaaacccacctctccgtctcaaggttctttgctccgctgattacgacaaagctgcagtggtcactggagactcatgggaaaaatcaattctgaacagcgaaatccctgtcctggttgaattttatgctagttggtgtgggccctgcaggatggttcaccgggtgatagatgagattgcagaagattatgcagggagacttaaatgctttgtgctgaacacagaccatgacttgcatattgctgagaactatgaaattaaggctgtgccagtggttttgctgtttaaaaatggagagaaacgtgaatctgtagtaggaaccatgcctaaggagttctatgtggctgccattgagagggagcctgggaagctgtgtaaatttgagaatcgcaacgccaggttactgtgtgcgataaccctcttcaagggggatggatcctttgtcaggaagatgagaaagaaagcatggaaggctgcccctttgtccatattttga

SEQ ID NO: 130552 - protein, 213 aa, Vitis vinifera
MASCSNPPPLSSPLSPSLQTRKLFAPLSYPRSGGPSYALHFQAKRGIRFSNPPLRLKVLCSADYDKAAVVTGDSWEKSILNSEIPVLVEFYASWCGPCRMVHRVIDEIAEDYAGRLKCFVLNTDHDLHIAENYEIKAVPVVLLFKNGEKRESVVGTMPKEFYVAAIEREPGKLCKFENRNARLLCAITLFKGDGSFVRKMRKKAWKAAPLSIF

SEQ ID NO: 130553 - DNA, 651 bp, Ostreococcus tauri
  CDS (1)..(651)
atgctcgcgcgtgcgtcgacgccgtgcgcgtcctcgacgcgcgtcgccccgcgcgggcgatgcggtaaaaagtctcgcgcgcgcacgcgcgtgcgcgccgaggagacgtccacgagcggtgcgttcgcgttgaatgattgcacgagggtcgtgcgttgcggtcgttcggacgcgacgtggacgtgtgtggcgtccgtggtcgtggggtatattgatgggatgatttacgcgcgaatcgcggcggattgtgcgcgtttcatcgatgcgcgcgggcgcgagagcgcaagatcactgacgttttccccttcgctcgtttcgcgatacgcaggctctctcgccaccgtcgtcacggacgccacgttcgagcaggatgtgctcaagtccgatacgctcgtgatggttgatttctgggcgccgtggtgcggtccgtgccgcatgatcgcgccgctcatcgatcaactcgcggaggagtaccaagggaagctcaaagcggtgaagctcaacacggacgagtctcctagcattgccaccgagtacgggattcgctcgatcccgacggtgatgttcttcaagggggggcaaaaggtagacactgtgatcggcgccgtgccgaagtccacgctcacgggtaccattgagaagtacttgtga

SEQ ID NO: 130554 - protein, 216 aa, Ostreococcus tauri
MLARASTPCASSTRVAPRGRCGKKSRARTRVRAEETSTSGAFALNDCTRVVRCGRSDATWTCVASVVVGYIDGMIYARIAADCARFIDARGRESARSLTFSPSLVSRYAGSLATVVTDATFEQDVLKSDTLVMVDFWAPWCGPCRMIAPLIDQLAEEYQGKLKAVKLNTDESPSIATEYGIRSIPTVMFFKGGQKVDTVIGAVPKSTLTGTIEKYL

SEQ ID NO: 130555 - DNA, 528 bp, Oryza sativa
  CDS (1)..(528)
atggccgccaccgccaccgcttgccccgcgccgccgccgccgcggagcctctaccgcggcgtggcgctcgcggcgcccggccgacggagggccgggtacggcgcctcctcctccgccgcacgccggtggccgggctgccggcgccgctgggcggcgcaccggatccgcacggtgagctgcgcgtattctcctcgcggagccaaaacaattacggcatgttcttggaatgaatatgtgatctgcagtgatatacctgtgcttattgagttttgggcctcatggtgtggaccctgcagaatggtccaccgaattgttgatgagattgcacaagaatatgctggaaggataaaatgctataagcttgacactgatgattacccacaagtcgcaacatcttacagcatcgagaggattccaactgttttactctttaaggatggagagaaaacgcatagcattactgggactcttccgaaggctgtttatgtgagagccattgagaaatctatctcagactcagagcaatga

SEQ ID NO: 130556 - protein, 175 aa, Oryza sativa
MAATATACPAPPPPRSLYRGVALAAPGRRRAGYGASSSAARRWPGCRRRWAAHRIRTVSCAYSPRGAKTITACSWNEYVICSDIPVLIEFWASWCGPCRMVHRIVDEIAQEYAGRIKCYKLDTDDYPQVATSYSIERIPTVLLFKDGEKTHSITGTLPKAVYVRAIEKSISDSEQ

SEQ ID NO: 130557 - DNA, 546 bp, Medicago truncatula; identical to SEQ ID NO: 45771
  CDS (1)..(546)

SEQ ID NO: 130558 - protein, 181 aa, Medicago truncatula; identical to SEQ ID NO: 45772

SEQ ID NO: 130559 - DNA, 684 bp, uncultured archaeon GZfos10C7
  CDS (1)..(684): transl_table=11
ttgcaaacgaagggctacaaaacacgccgtattgcacggtccctgcggtacgcctccttcaaaggatgcaatgaccgtttagaggcaaccacaatacggtacatatatatacacacaccaaaaaaagtcaaattcaatatttttaaattaaaaactaacttaactaatactgtggagaagatatttaaaatggaagaacgagaagaaaatcgtgtaagttatgccgatacgggagaggagagaggtacagatacagacataaatgtagatatagagatagagaggataaaggagcgaaagatgcgggagatggaagaggagataaaagtaatgagagagagtggaaaagagggattgggggcaatagaccagcccttgacgttggatgacaatagctttgtagaaacagtaggaaaatatcctgtggtcgtcgtggattgctgggctccctggtgcggtccttgcaaaatgattgctccggtaatagaggagttggcgagggaatatgccggtaaagtcgtatttgggaaattgaatgtggatgacaatccgagaacagccactgaatttgcgataatggctatacccacgctgttcatctttaaacatggcgaacctgtggacgttatacagggggcagtgccgaaacagtatttagaagcgaaagtaaaagaatggctgtag

SEQ ID NO: 130560 - protein, 227 aa, uncultured archaeon GZfos10C7
MQTKGYKTRRIARSLRYASFKGCNDRLEATTIRYIYIHTPKKVKFNIFKLKTNLTNTVEKIFKMEEREENRVSYADTGEERGTDTDINVDIEIERIKERKMREMEEEIKVMRESGKEGLGAIDQPLTLDDNSFVETVGKYPVVVVDCWAPWCGPCKMIAPVIEELAREYAGKVVFGKLNVDDNPRTATEFAIMAIPTLFIFKHGEPVDVIQGAVPKQYLEAKVKEWL

SEQ ID NO: 130561 - DNA, 522 bp, Arabidopsis thaliana
  CDS (1)..(522)
atggcgatttcttcttcttcctcctctatatgtttcaaccccactcgatttcacacagctcgacatatttcatctccgtcgcgtctcttcccagtcaccagcttctcccctcgctctctccgtttctccgacagacgatctctcctatcttcctccgcctctcgcctccgtctttctcctctatgcgttcgtgattctcgagcagctgaagttacacaacgatcatgggaagactcagttctaaaaagcgaaaccccggtgttagtagaattctacacgagttggtgcggtccatgtcggatggtccacaggataatagacgaaatagcaggggactatgctggaaaactaaactgctatctccttaatgcagacaatgacttgccggtggctgaagagtacgaggtaaaggctgtgccggtagttctgctcttcaagaacggggagaaacgagagtcaatcatgggtacaatgcctaaagagttctatatttccgccattgaaagagtcttgaactcatga

SEQ ID NO: 130562 - protein, 173 aa, Arabidopsis thaliana
MAISSSSSSICFNPTRFHTARHISSPSRLFPVTSFSPRSLRFSDRRSLLSSSASRLRLSPLCVRDSRAAEVTQRSWEDSVLKSETPVLVEFYTSWCGPCRMVHRIIDEIAGDYAGKLNCYLLNADNDLPVAEEYEVKAVPVVLLFKNGEKRESIMGTMPKEFYISAIERVLNS

SEQ ID NO: 130563 - DNA, 522 bp, Arabidopsis thaliana
  CDS (1)..(522)
atggcgatttcttcttcttcctcctctatatgtttcaaccccactcgatttcacacagctcgacatatttcatctccgtcgcgtctcttcccagtcaccagcttctcccctcgctctctccgtttctccgacagacgatctctcctatcttcctccgcctctcgcctccgtctttctcctctatgcgttcgtgattctcgagcagctgaagttacacaacgatcatgggaagactcagttctaaaaagcgaaaccccggtgttagtagaattctacacgagttggtgcggtccatgtcggatggtccacaggataatagacgaaataacaggggactatgctggaaaactaaactgctatctccttaatgcagacaatgacttgccggtggctgaagagtacgagataaaggctgtgccggtagttctgctcttcaagaacggggagaaacgagagtcaatcatgggtacaatgcctaaagagttctatatttccgccattgaaagagtcttgaactcatga

SEQ ID NO: 130564 - protein, 173 aa, Arabidopsis thaliana
MAISSSSSSICFNPTRFHTARHISSPSRLFPVTSFSPRSLRFSDRRSLLSSSASRLRLSPLCVRDSRAAEVTQRSWEDSVLKSETPVLVEFYTSWCGPCRMVHRIIDEITGDYAGKLNCYLLNADNDLPVAEEYEIKAVPVVLLFKNGEKRESIMGTMPKEFYISAIERVLNS

SEQ ID NO: 130565 - DNA, 561 bp, Arabidopsis thaliana
  CDS (1)..(561)
  misc_feature (424)..(424): y is t or c
atggctgctttcacttgtacctctcgtcctccgatttctctccgctccgagaccagaatcgtatcctcatcaccatcggcttcttctctctcttctcggcggatgttcgccgtcttaccggaatcatcaggtttgagaatccgtctttctctctctccggcttcgttgacctcgattcatcaacctagggtttctcgattacgaagagccgtcgtctgtgaagctcaggaaactactaccgatattcaagtggtcaatgactcgacatgggactctctagttcttaaagcaactgggcctgtagttgtcgacttttgggcaccatggtgtggaccttgcaagatgattgatccgcttgtaaacgatctagcacagcattacactgggaagatcaagttctacaaattaaacactgatgaatctyctaatactcccggccagtacggagttagaagcatcccaacgatcatgatctttgtcggtggcgagaagaaggatacaatcataggtgcagtgcccaaaaccacactcacatctagcctcgacaagttcttgccatga

SEQ ID NO: 130566 - protein, 186 aa, Arabidopsis thaliana
  misc_feature (142)..(142): The Xaa at location 142 stands for Pro, or Ser.
MAAFTCTSRPPISLRSETRIVSSSPSASSLSSRRMFAVLPESSGLRIRLSLSPASLTSIHQPRVSRLRRAVVCEAQETTTDIQVVNDSTWDSLVLKATGPVVVDFWAPWCGPCKMIDPLVNDLAQHYTGKIKFYKLNTDESXNTPGQYGVRSIPTIMIFVGGEKKDTIIGAVPKTTLTSSLDKFLP

SEQ ID NO: 130567 - DNA, 543 bp, Pisum sativum
  CDS (1)..(543): transl_table=11
atggctaccgtacaactcgaatccttctcccttattccctcttcccaacacccacgtacagtcgcttcctccctctcctgccgcccgatcgctgctaggtttcctccctacaccggtctcaagctacgaccactcgccgctactagtttgcggagtcgattcgctgcttctagagtcgttcctcgcggaggaagagtcctgtgcgaggctcgagatactgctgttgaagtggcttctattactgatggaaattggcaatcccttgtaatcgaatccgacactccagtgttggtcgaattctgggctccatggtgcggtccctgccgaatgatgcatcccataattgacgagctggcaaaggaatatgtaggtaagttcaagtgttacaaactcaatactgatgagagtccttcaactgctactcgctatgggattcgaagtattccaactgtcatcttcttcaaggatggtgaaaagaaagatgcaattatcggttctgtacccaaggcatcattgatcacaactatagaaaaatttctgtga

SEQ ID NO: 130568 - protein, 180 aa, Pisum sativum
MATVQLESFSLIPSSQHPRTVASSLSCRPIAARFPPYTGLKLRPLAATSLRSRFAASRVVPRGGRVLCEARDTAVEVASITDGNWQSLVIESDTPVLVEFWAPWCGPCRMMHPIIDELAKEYVGKFKCYKLNTDESPSTATRYGIRSIPTVIFFKDGEKKDAIIGSVPKASLITTIEKFL

SEQ ID NO: 130569 - DNA, 324 bp, Anabaena sp
  CDS (1)..(324): transl_table=11
atgtcagcagccgcacaagttacagattctacttttaagcaagaagtactcgacagcgatgtaccagttttggtcgatttttgggccccttggtgtggtccttgcagaatggtcgctcctgttgtcgatgaaatagctcaacagtacgaaggtaaaataaaagtggtgaaagtcaacactgatgagaatccgcaagttgcaagtcagtacggcatccgcagcatccccacacttatgatttttaaaggtgggcaaaaagtcgatatggtagtcggtgcggtgcctaaaaccacattatctcaaaccctagaaaagcatctgtga

SEQ ID NO: 130570 - protein, 107 aa, Anabaena sp
MSAAAQVTDSTFKQEVLDSDVPVLVDFWAPWCGPCRMVAPVVDEIAQQYEGKIKVVKVNTDENPQVASQYGIRSIPTLMIFKGGQKVDMVVGAVPKTTLSQTLEKHL

SEQ ID NO: 130571 - DNA, 324 bp, Synechococcus sp
  CDS (1)..(324): transl_table=11
atgtcagtagctgccgctgtgacagacgccactttcaagcaagaagtgctcgaaagtagtattccggtactggttgatttttgggcgccttggtgtggaccttgtcggatggttgctcctgttgtcgatgagattgctcagcaatattccgatcaagtcaaagttgtcaaagtcaacacggacgaaaaccccagcgttgcgagtcagtatgggattcgtagcatcccaacgctgatgatctttaaagatggtcagcgggtagatacggttgttggtgctgttcccaaaaccaccttggcgaacacgctagataaacatctctag

SEQ ID NO: 130572 - protein, 107 aa, Synechococcus sp
MSVAAAVTDATFKQEVLESSIPVLVDFWAPWCGPCRMVAPVVDEIAQQYSDQVKVVKVNTDENPSVASQYGIRSIPTLMIFKDGQRVDTVVGAVPKTTLANTLDKHL

SEQ ID NO: 130573 - DNA, 324 bp, Synechocystis sp
  CDS (1)..(324): transl_table=11
atgagtgctacccctcaagtttccgacgcaagttttaaagaggatgtattagacagcgagttacccgtgctcgtagacttttgggctccctggtgtggcccttgtcgcatggtagcccccgtcgttgatgaaatctcacaacagtacgaaggtaaggtcaaagtcgttaagttaaacaccgacgagaaccccaataccgctagtcagtatggcatccgcagtattcccaccctaatgattttcaaggggggccagagagtggatatggtggtgggagccgtgcccaaaaccaccctggccagcaccctagaaaaatatctttaa

SEQ ID NO: 130574 - protein, 107 aa, Synechocystis sp
MSATPQVSDASFKEDVLDSELPVLVDFWAPWCGPCRMVAPVVDEISQQYEGKVKVVKLNTDENPNTASQYGIRSIPTLMIFKGGQRVDMVVGAVPKTTLASTLEKYL

SEQ ID NO: 130575 - DNA, 666 bp, Arabidopsis thaliana
  CDS (1)..(666)
atgtctccgacgacgacatcgttacgatccctaagcttctcgctttacgcttcttctaattctactccgatttctacaccaattgaggcccgacagttactgagttcatgcaatagattctacggtctgtcctcttcgagctcttcttcctcccttactacttcatctttgatcggaaatcttgttttctcatcaaggaatcagtctctctccgtaaaggtccaagcgttagctgctgaaaccgaacagccaaaatggtgggagaggaaagcagggccaaacatgattgacattacctcagctgagcagtttctcaacgcgttaaaagatgcgggagatagattagttatcgtagatttttacggaacttggtgtggttcttgccgtgcaatgttcccaaagctctgcaaaacggcgaaagaacaccctaacatcttgttccttaaagtaaactttgacgagaacaagtctctctgcaaaagcttaaacgtcaaggtgttaccgtatttccacttctaccgcggtgctgatggccaagtcgaatccttctcatgctctcttgccaagttccagaaactgagagaggcgatagagagacacaatgtaggaagtatcagtaacatctcttcttcagcttctgagaaagttgaagattcaagtgaataa

SEQ ID NO: 130576 - protein, 221 aa, Arabidopsis thaliana
MSPTTTSLRSLSFSLYASSNSTPISTPIEARQLLSSCNRFYGLSSSSSSSSLTTSSLIGNLVFSSRNQSLSVKVQALAAETEQPKWWERKAGPNMIDITSAEQFLNALKDAGDRLVIVDFYGTWCGSCRAMFPKLCKTAKEHPNILFLKVNFDENKSLCKSLNVKVLPYFHFYRGADGQVESFSCSLAKFQKLREAIERHNVGSISNISSSASEKVEDSSE

SEQ ID NO: 130577 - DNA, 540 bp, Arabidopsis thaliana
  CDS (1)..(540)
atggctgcttacacgtgtacttcccgtccgccgatttctatccggtcagagatgagaatcgcttcctcgccgacgggttccttctctactcgacagatgttctctgtgttgccggaatcgagcggattgaggactcgcgtttctctatcttcactctcgaagaattctagggtttcccgattacgacgaggcgttatctgtgaagctcaggacactgctacaggaattccagtggtcaacgattcaacatgggactctctagttctcaaggctgatgagcctgtgtttgtcgacttttgggcaccatggtgtggaccctgcaaaatgattgatcccattgtcaacgaactcgcgcaaaagtacgccggccagttcaagttctacaaacttaacactgatgagtctcctgcaacccctggccagtatggtgttagaagcatcccaactatcatgatctttgtcaatggtgagaagaaggatacaatcatcggtgctgtctctaaagacactttagcaaccagcatcaacaaattcttgtaa

SEQ ID NO: 130578 - protein, 179 aa, Arabidopsis thaliana
MAAYTCTSRPPISIRSEMRIASSPTGSFSTRQMFSVLPESSGLRTRVSLSSLSKNSRVSRLRRGVICEAQDTATGIPVVNDSTWDSLVLKADEPVFVDFWAPWCGPCKMIDPIVNELAQKYAGQFKFYKLNTDESPATPGQYGVRSIPTIMIFVNGEKKDTIIGAVSKDTLATSINKFL

SEQ ID NO: 130579 - DNA, 561 bp, Arabidopsis thaliana
  CDS (1)..(561)
atggctgctttcacttgtacctctcgtcctccgatttctctccgctccgagaccagaatcgtatcctcatcaccatcggcttcttctctctcttctcggcggatgttcgccgtcttaccggaatcatcaggtttgagaatccgtctttctctctctccggcttcgttgacctcgattcatcaacctagggtttctcgattacgaagagccgtcgtctgtgaagctcaggaaactactaccgatattcaagtggtcaatgactcgacatgggactctctagttcttaaagcaactgggcctgtagttgtcgacttttgggcaccatggtgtggaccttgcaagatgattgatccgcttgtaaacgatctagcacagcattacactgggaagatcaagttctacaaattaaacactgatgaatctcctaatactcccggccagtacggagttagaagcatcccaacgatcatgatctttgtcggtggcgagaagaaggatacaatcataggtgcagtgcccaaaaccacactcacatctagcctcgacaagttcttgccatga

SEQ ID NO: 130580 - protein, 186 aa, Arabidopsis thaliana
MAAFTCTSRPPISLRSETRIVSSSPSASSLSSRRMFAVLPESSGLRIRLSLSPASLTSIHQPRVSRLRRAVVCEAQETTTDIQVVNDSTWDSLVLKATGPVVVDFWAPWCGPCKMIDPLVNDLAQHYTGKIKFYKLNTDESPNTPGQYGVRSIPTIMIFVGGEKKDTIIGAVPKTTLTSSLDKFLP

SEQ ID NO: 130581 - DNA, 522 bp, Arabidopsis thaliana
  CDS (1)..(522)
atggcgatttcttcttcttcctcctctatatgtttcaaccccactcgatttcacacagctcgacatatttcatctccgtcgcgtctcttcccagtcaccagcttctcccctcgctctctccgtttctccgacagacgatctctcctatcttcctccgcctctcgcctccgtctttctcctctatgcgttcgtgattctcgagcagctgaagttacacaacgatcatgggaagactcagttctaaaaagcgaaaccccggtgttagtagaattctacacgagttggtgcggtccatgtcggatggtccacaggataatagacgaaatagcaggggactatgctggaaaactaaactgctatctccttaatgcagacaatgacttgccggtggctgaagagtacgagataaaggctgtgccggtagttctgctcttcaagaacggggagaaacgagagtcaatcatgggtacaatgcctaaagagttctatatttccgccattgaaagagtcttgaactcatga

SEQ ID NO: 130582 - protein, 173 aa, Arabidopsis thaliana
MAISSSSSSICFNPTRFHTARHISSPSRLFPVTSFSPRSLRFSDRRSLLSSSASRLRLSPLCVRDSRAAEVTQRSWEDSVLKSETPVLVEFYTSWCGPCRMVHRIIDEIAGDYAGKLNCYLLNADNDLPVAEEYEIKAVPVVLLFKNGEKRESIMGTMPKEFYISAIERVLNS

SEQ ID NO: 130583 - DNA, 534 bp, Brassica napus
  CDS (1)..(534)
atggctgctttcacctgtacttcttctccgccgatttctctccgttcagagatgatgatcgcatcctcgaagacggtttcactgtctactcgacaaatgttctccgtgggaggattgaggactcgcgtctctctatcatcggtctcgaagaattctagggcttctcgattacgacgaggagggatcatctgtgaagctcaggacactgctacagggattccaatggtgaacgattcaacatgggagtctctagtactcaaggctgatgagcctgttgttgtggacttttgggcaccatggtgtggaccctgcaaaatgattgatcccattgtcaacgaactagcacagcagtacactgggaagatcaagttcttcaaactaaacactgacgattctccggcgaccccgggaaagtacggtgtgagaagcataccaaccatcatgatcttcgttaagggagagaagaaggatacaatcatcggtgcagtgcctaaaaccacattagcaacaagcattgataaattcttgcagtga

SEQ ID NO: 130584 - protein, 177 aa, Brassica napus
MAAFTCTSSPPISLRSEMMIASSKTVSLSTRQMFSVGGLRTRVSLSSVSKNSRASRLRRGGIICEAQDTATGIPMVNDSTWESLVLKADEPVVVDFWAPWCGPCKMIDPIVNELAQQYTGKIKFFKLNTDDSPATPGKYGVRSIPTIMIFVKGEKKDTIIGAVPKTTLATSIDKFLQ

SEQ ID NO: 130585 - DNA, 504 bp, Zea mays
  CDS (1)..(504)
atggccatggagacgtgcttcagagcgtgggcgctgcacgcccccgctggcagcaaggacaggctcctcgtcggcaacctggtgctgccgtcgaagcgggcgctcgcgccgctgtccgtgggccgcgtcgccacgcgccggccgcggcacgtctgccagtccaagaacgcagtggacgaagttgtggtggcggacgagaagaactgggacgggttggtgatggcgtgcgagacgccggtgctggtggagttctgggcgccgtggtgcgggccgtgccggatgatcgcgccggtgatcgacgagctggccaaggactacgccggcaagatcacgtgctgcaaggtgaacacggacgacagccccaacgtggcgtctacctacggcatccgcagcatccccaccgtgctcatcttcaagggcggcgagaagaaggagagcgtcatcggcgccgtcccgaagtccacgctcaccaccctcatcgacaagtacatcggtagttcatga

SEQ ID NO: 130586 - protein, 167 aa, Zea mays
MAMETCFRAWALHAPAGSKDRLLVGNLVLPSKRALAPLSVGRVATRRPRHVCQSKNAVDEVVVADEKNWDGLVMACETPVLVEFWAPWCGPCRMIAPVIDELAKDYAGKITCCKVNTDDSPNVASTYGIRSIPTVLIFKGGEKKESVIGAVPKSTLTTLIDKYIGSS

SEQ ID NO: 130587 - DNA, 546 bp, Spinacia oleracea
  CDS (1)..(546)
atggctatagaaaactgtttacagttgagcacatcagcaagtgtaggaactgttgctgttaaatctcatgttcatcatcttcaaccttcctccaaggttaatgtgccgacttttcgaggtctaaaaagatcgtttccggctttatcttcctcggtttcttcatcgtctcctcgacagtttcgatactctagtgttgtttgcaaggctagtgaagctgtcaaggaagtccaagatgtgaatgactcaagttggaaggagtttgtcctagagagcgaagtcccagtgatggtagacttctgggccccatggtgtggaccctgcaagctcatcgccccggtgatcgacgagctggcaaaagaatattccggaaagatagcagtatacaagctgaacacagatgaagcaccaggtattgctactcagtacaacataaggagtattccaacagtgttgtttttcaagaatggtgaaaggaaagagagtatcataggtgctgtgcctaagagtactttgactgattccattgagaaatacttatctccttaa

SEQ ID NO: 130588 - protein, 181 aa, Spinacia oleracea
MAIENCLQLSTSASVGTVAVKSHVHHLQPSSKVNVPTFRGLKRSFPALSSSVSSSSPRQFRYSSVVCKASEAVKEVQDVNDSSWKEFVLESEVPVMVDFWAPWCGPCKLIAPVIDELAKEYSGKIAVYKLNTDEAPGIATQYNIRSIPTVLFFKNGERKESIIGAVPKSTLTDSIEKYLSP

SEQ ID NO: 130589 - DNA, 528 bp, Triticum aestivum
  CDS (1)..(528)
atggccttggagacatgcctcaggggctgggccctgtacgcgccccaggctggcatcagggaacggcttagcagtggcagctacgcgccatcccggccaaggaccgccgcccccgccgtcgtctcgccgtccccatacaagtccgctctggttgcggcacggcggccgtctcgcttcgtctgcaagtgcaagaacgtcgtcgacgaagtgattgtggctgacgagaagaattgggataacatggtgatcgcgtgcgagtcgccggtgctggtggagttctgggcgccgtggtgcgggccgtgccggatgattgccccggtgatcgacgaactggcaaaggactacgtggggaagatcaagtgctgcaaggtgaacacggacgactgcccaaacatcgcatccacctacggcatccggagcatccccaccgtgctcatgttcaaggacggcgagaagaaggagagcgtcatcggcgccgtcccgaagacaaccctctgcaccataatcgacaagtacatcggcagctaa

SEQ ID NO: 130590 - protein, 175 aa, Triticum aestivum
MALETCLRGWALYAPQAGIRERLSSGSYAPSRPRTAAPAVVSPSPYKSALVAARRPSRFVCKCKNVVDEVIVADEKNWDNMVIACESPVLVEFWAPWCGPCRMIAPVIDELAKDYVGKIKCCKVNTDDCPNIASTYGIRSIPTVLMFKDGEKKESVIGAVPKTTLCTIIDKYIGS

SEQ ID NO: 130591 - DNA, 549 bp, Arabidopsis thaliana; identical to SEQ ID NO: 45775
  CDS (1)..(549)

SEQ ID NO: 130592 - protein, 182 aa, Arabidopsis thaliana; identical to SEQ ID NO: 45776

SEQ ID NO: 130593 - DNA, 522 bp, Oryza sativa; identical to SEQ ID NO: 69586
  CDS (1)..(522)

SEQ ID NO: 130594 - protein, 173 aa, Oryza sativa; identical to SEQ ID NO: 69587

SEQ ID NO: 130595 - DNA, 543 bp, Oryza sativa; identical to SEQ ID NO: 69832
  CDS (1)..(543)

SEQ ID NO: 130596 - protein, 180 aa, Oryza sativa; identical to SEQ ID NO: 69833

SEQ ID NO: 130597 - DNA, 543 bp, Oryza sativa; identical to SEQ ID NO: 45777
  CDS (1)..(543)

SEQ ID NO: 130598 - protein, 180 aa, Oryza sativa; identical to SEQ ID NO: 45778

SEQ ID NO: 130599 - DNA, 570 bp, Oryza sativa; identical to SEQ ID NO: 91415
  CDS (1)..(570)

SEQ ID NO: 130600 - protein, 189 aa, Oryza sativa; identical to SEQ ID NO: 91416

SEQ ID NO: 130601 - DNA, 519 bp, Oryza sativa
  CDS (1)..(519)
atggcgttggagacgtgcttcagagcctgggcgactctgcacgccccacagccaccgtcctccggcggcagtagggacagactcctcctctccggcgccggcagcagccagtccaagccaaggttgtccgtcgcctcgccgtcaccgctccgacctgcctcccgcttcgcctgccagtgcagcaacgtcgtcgacgaagtggtggtggcggacgagaagaactgggacagcatggtgctggggagcgaggcgccggtgctggtggagttctgggcaccgtggtgcggaccgtgcaggatgatcgcgccggtgatcgacgagctggccaaggagtacgtcggcaagatcaagtgctgcaaggtgaacacggacgactcaccaaacatcgccaccaactacggcatccggagcatccccaccgtcctcatgttcaagaacggcgagaagaaggagagcgtcatcggcgccgtccccaagaccaccctcgccaccatcatcgacaagtacgtcagcagctga

SEQ ID NO: 130602 - protein, 172 aa, Oryza sativa
MALETCFRAWATLHAPQPPSSGGSRDRLLLSGAGSSQSKPRLSVASPSPLRPASRFACQCSNVVDEVVVADEKNWDSMVLGSEAPVLVEFWAPWCGPCRMIAPVIDELAKEYVGKIKCCKVNTDDSPNIATNYGIRSIPTVLMFKNGEKKESVIGAVPKTTLATIIDKYVSS

SEQ ID NO: 130603 - DNA, 546 bp, Oryza sativa; identical to SEQ ID NO: 69830
  CDS (1)..(546)

SEQ ID NO: 130604 - protein, 181 aa, Oryza sativa; identical to SEQ ID NO: 69831

SEQ ID NO: 130605 - DNA, 546 bp, Brassica napus; identical to SEQ ID NO: 45779
  CDS (1)..(546)

SEQ ID NO: 130606 - protein, 181 aa, Brassica napus; identical to SEQ ID NO: 45780

SEQ ID NO: 130607 - DNA, 495 bp, Brassica napus
  CDS (1)..(495)
atggcgatttctctccccaccgctcatgtctctccccctaagtcgtgtttctccttttcatcctcgtcgaagctatcttctcattcatccctgcgcttcggaatccgccacgaaagagttaactcgcggtcgtcgtctcgctgcgcctgcgccccactcactgttagagcaaagaagcaaaccttcaactcttttgatgatttattgctcaactctgacaaacctttactagtagacttctatgccacatggtgtggtccatgccagcttatggtacctatacttaatgaagtaagtgaaactctgagagataagattgcagtggtgaaaattgatactgaaaagtacccaagtcttgctaacaaataccaggttgaggctttacctacattcatcttattcaaagacgggaaactctgggaccgttttgagggagccttgcaagctaaccaactcgttgaacggatcgagacttctttacaagcgaagcaatag

SEQ ID NO: 130608 - protein, 164 aa, Brassica napus
MAISLPTAHVSPPKSCFSFSSSSKLSSHSSLRFGIRHERVNSRSSSRCACAPLTVRAKKQTFNSFDDLLLNSDKPLLVDFYATWCGPCQLMVPILNEVSETLRDKIAVVKIDTEKYPSLANKYQVEALPTFILFKDGKLWDRFEGALQANQLVERIETSLQAKQ

SEQ ID NO: 130609 - DNA, 549 bp, Glycine max; identical to SEQ ID NO: 69842
  CDS (1)..(549)

SEQ ID NO: 130610 - protein, 182 aa, Glycine max; identical to SEQ ID NO: 69843

SEQ ID NO: 130611 - DNA, 549 bp, Brassica napus
  CDS (1)..(549)
atggattgtatcgtctccagctcgacggttcttatccgatcacatctcactccaattcgctcagcttcctccgtatccgccaaacctctaagctcagcaaaagtcgcatccttcgcgtctaaccgccacatactctcgtccaagtccggtggtaaaagaaacagaacactctccaccaacgcttcgagttctacgataaggtgcggtggaattaaagagatcggagagagcgagtttaccagcacggttcttgaatcggaccggccggttctggttaatttcgtcgccacgtggtgcggtccctgcaagttggtctatccagccacggaagctttatctcaggagtatggtgacaggttgacgattgtgaagattgaccacgacgcgaatcctaatttgatagcagagtacaaggtttatggtttaccgcattttatactctttaaggatggtaaggaagttgctggtagcagaagggaaggtgcgattactaaagctaagcttaaggagtacattgatggtctcttgacctctatatccgttgcttaa

SEQ ID NO: 130612 - protein, 182 aa, Brassica napus
MDCIVSSSTVLIRSHLTPIRSASSVSAKPLSSAKVASFASNRHILSSKSGGKRNRTLSTNASSSTIRCGGIKEIGESEFTSTVLESDRPVLVNFVATWCGPCKLVYPATEALSQEYGDRLTIVKIDHDANPNLIAEYKVYGLPHFILFKDGKEVAGSRREGAITKAKLKEYIDGLLTSISVA

SEQ ID NO: 130613 - DNA, 504 bp, Zea mays; identical to SEQ ID NO: 69846
  CDS (1)..(504)

SEQ ID NO: 130614 - protein, 167 aa, Zea mays; identical to SEQ ID NO: 69847

SEQ ID NO: 130615 - DNA, 549 bp, Glycine max; identical to SEQ ID NO: 69848
  CDS (1)..(549)

SEQ ID NO: 130616 - protein, 182 aa, Glycine max; identical to SEQ ID NO: 69849

SEQ ID NO: 130617 - DNA, 549 bp, Zea mays; identical to SEQ ID NO: 45781
  CDS (1)..(549)

SEQ ID NO: 130618 - protein, 182 aa, Zea mays; identical to SEQ ID NO: 45782

SEQ ID NO: 130619 - DNA, 546 bp, Brassica napus; identical to SEQ ID NO: 91431
  CDS (1)..(546)

SEQ ID NO: 130620 - protein, 181 aa, Brassica napus; identical to SEQ ID NO: 91432

SEQ ID NO: 130621 - DNA, 543 bp, Brassica napus; identical to SEQ ID NO: 91437
  CDS (1)..(543)

SEQ ID NO: 130622 - protein, 180 aa, Brassica napus; identical to SEQ ID NO: 91438

SEQ ID NO: 130623 - DNA, 546 bp, Brassica napus; identical to SEQ ID NO: 45783
  CDS (1)..(546)

SEQ ID NO: 130624 - protein, 181 aa, Brassica napus; identical to SEQ ID NO: 45784

SEQ ID NO: 130625 - DNA, 579 bp, Brassica napus; identical to SEQ ID NO: 69860
  CDS (1)..(579)

SEQ ID NO: 130626 - protein, 192 aa, Brassica napus; identical to SEQ ID NO: 69861

SEQ ID NO: 130627 - DNA, 558 bp, Brassica napus; identical to SEQ ID NO: 91449
  CDS (1)..(558)

SEQ ID NO: 130628 - protein, 185 aa, Brassica napus; identical to SEQ ID NO: 91450

SEQ ID NO: 130629 - DNA, 540 bp, Brassica napus; identical to SEQ ID NO: 91459
  CDS (1)..(540)

SEQ ID NO: 130630 - protein, 179 aa, Brassica napus; identical to SEQ ID NO: 91460

SEQ ID NO: 130631 - DNA, 549 bp, Brassica napus; identical to SEQ ID NO: 91461
  CDS (1)..(549)

SEQ ID NO: 130632 - protein, 182 aa, Brassica napus; identical to SEQ ID NO: 91462

SEQ ID NO: 130633 - DNA, 540 bp, Brassica napus; identical to SEQ ID NO: 91469
  CDS (1)..(540)

SEQ ID NO: 130634 - protein, 179 aa, Brassica napus; identical to SEQ ID NO: 91470

SEQ ID NO: 130635 - DNA, 543 bp, Brassica napus; identical to SEQ ID NO: 91477
  CDS (1)..(543)

SEQ ID NO: 130636 - protein, 180 aa, Brassica napus; identical to SEQ ID NO: 91478

SEQ ID NO: 130637 - DNA, 522 bp, Zea mays; identical to SEQ ID NO: 91491
  CDS (1)..(522)

SEQ ID NO: 130638 - protein, 173 aa, Zea mays; identical to SEQ ID NO: 91492

SEQ ID NO: 130639 - DNA, 528 bp, Glycine max; identical to SEQ ID NO: 91505
  CDS (1)..(528)

SEQ ID NO: 130640 - protein, 175 aa, Glycine max; identical to SEQ ID NO: 91506

SEQ ID NO: 130641 - DNA, 528 bp, Glycine max; identical to SEQ ID NO: 91517
  CDS (1)..(528)

SEQ ID NO: 130642 - protein, 175 aa, Glycine max; identical to SEQ ID NO: 91518

SEQ ID NO: 130643 - DNA, 549 bp, Glycine max; identical to SEQ ID NO: 69894
  CDS (1)..(549)

SEQ ID NO: 130644 - protein, 182 aa, Glycine max; identical to SEQ ID NO: 69895

SEQ ID NO: 130645 - DNA, 510 bp, Glycine max; identical to SEQ ID NO: 69900
  CDS (1)..(510)

SEQ ID NO: 130646 - protein, 169 aa, Glycine max; identical to SEQ ID NO: 69901

SEQ ID NO: 130647 - DNA, 528 bp, Glycine max; identical to SEQ ID NO: 69916
  CDS (1)..(528)

SEQ ID NO: 130648 - protein, 175 aa, Glycine max; identical to SEQ ID NO: 69917

SEQ ID NO: 130649 - DNA, 546 bp, Glycine max; identical to SEQ ID NO: 91541
  CDS (1)..(546)

SEQ ID NO: 130650 - protein, 181 aa, Glycine max; identical to SEQ ID NO: 91542

SEQ ID NO: 130651 - DNA, 534 bp, Zea mays; identical to SEQ ID NO: 69940
  CDS (1)..(534)

SEQ ID NO: 130652 - protein, 177 aa, Zea mays; identical to SEQ ID NO: 69941

SEQ ID NO: 130653 - DNA, 528 bp, Glycine max; identical to SEQ ID NO: 69960
  CDS (1)..(528)

SEQ ID NO: 130654 - protein, 175 aa, Glycine max; identical to SEQ ID NO: 69961

SEQ ID NO: 130655 - DNA, 549 bp, Zea mays; identical to SEQ ID NO: 45787
  CDS (1)..(549)

SEQ ID NO: 130656 - protein, 182 aa, Zea mays; identical to SEQ ID NO: 45788

SEQ ID NO: 130657 - DNA, 534 bp, Zea mays; identical to SEQ ID NO: 69962
  CDS (1)..(534)

SEQ ID NO: 130658 - protein, 177 aa, Zea mays; identical to SEQ ID NO: 69963

SEQ ID NO: 130659 - DNA, 522 bp, Zea mays; identical to SEQ ID NO: 91605
  CDS (1)..(522)

SEQ ID NO: 130660 - protein, 173 aa, Zea mays; identical to SEQ ID NO: 91606

SEQ ID NO: 130661 - DNA, 567 bp, Zea mays; identical to SEQ ID NO: 91611
  CDS (1)..(567)

SEQ ID NO: 130662 - protein, 188 aa, Zea mays; identical to SEQ ID NO: 91612

SEQ ID NO: 130663 - DNA, 522 bp, Zea mays; identical to SEQ ID NO: 91619
  CDS (1)..(522)

SEQ ID NO: 130664 - protein, 173 aa, Zea mays; identical to SEQ ID NO: 91620

SEQ ID NO: 130665 - DNA, 567 bp, Zea mays; identical to SEQ ID NO: 91629
  CDS (1)..(567)

SEQ ID NO: 130666 - protein, 188 aa, Zea mays; identical to SEQ ID NO: 91630

SEQ ID NO: 130667 - DNA, 567 bp, Zea mays; identical to SEQ ID NO: 91633
  CDS (1)..(567)

SEQ ID NO: 130668 - protein, 188 aa, Zea mays; identical to SEQ ID NO: 91634

SEQ ID NO: 130669 - DNA, 20 bp, Artificial sequence
  primer
atggcgtcgttactcgattc

SEQ ID NO: 130670 - DNA, 21 bp, Artificial sequence
  primer
ttactcgaccaagaatctttc

SEQ ID NO: 130671 - protein, 84 aa, Artificial sequence
  consensus sequence
  Variant (2)..(5): Xaa in position 2 to 5 is any amino acid
  Variant (6)..(10): Xaa in position 6 to 10 is any or no amino acid
  Variant (15)..(15): Xaa in position 15 is any amino acid
  Variant (17)..(17): Xaa in position 17 is any amino acid
  Variant (19)..(19): Xaa in position 19 is any amino acid
  Variant (25)..(28): Xaa in position 25 to 28 is any amino acid
  Variant (30)..(44): Xaa in position 30 to 44 is any amino acid
  Variant (45)..(45): Xaa in position 45 is any or no amino acid
  Variant (47)..(49): Xaa in position 47 to 49 is any amino acid
  Variant (51)..(52): Xaa in position 51 to 52 is any amino acid
  Variant (54)..(58): Xaa in position 54 to 58 is any amino acid
  Variant (60)..(64): Xaa in position 60 to 64 is any amino acid
  Variant (67)..(69): Xaa in position 67 to 69 is any amino acid
  Variant (72)..(72): Xaa in position 72 is any amino acid
  Variant (74)..(75): Xaa in position 74 to 75 is any amino acid
  Variant (76)..(82): Xaa in position 76 to 82 is any or no amino acid
VXXXXXXXXXPVLVXFXAXWCGPCXXXXPXXXXXXXXXXXXXXXXKXXXDXXPXXXXXYXXXXXPTXXXFKXGXXXXXXXXXGA

SEQ ID NO: 130672 - protein, 30 aa, Artificial sequence
  protein pattern
  Variant (3)..(3): Xaa in position 3 is Leu or Val
  Variant (5)..(5): Xaa in position 5 is Asp, Glu, Asn or Gln
  Variant (7)..(9): Xaa in position 7 to 9 is any or no amino acid
  Variant (15)..(16): Xaa in position 15 to 16 is any amino acid
  Variant (17)..(17): Xaa in position 17 is Ile, Leu, Met or Val
  Variant (18)..(21): Xaa in position 18 to 21 is any amino acid
  Variant (22)..(22): Xaa in position 22 is Ala, Asp, Glu, Gly, Asn or Ser
  Variant (23)..(24): Xaa in position 23 to 24 is any amino acid
  Variant (25)..(25): Xaa in position 25 is Ala, Ser, Thr or Val
  Variant (26)..(29): Xaa in position 26 to 29 is any amino acid
  Variant (30)..(30): Xaa in position 30 is Asp, Gly or Ser
PVXVXFXXXWCGPCXXXXXXXXXXXXXXXX

SEQ ID NO: 130673 - DNA, 1410 bp, Escherichia coli
  CDS (1)..(1410): transl_table=11
atgactacaaaactcagttatggatttggagcgttcgggaaggattttgcgatcggcattgtgtatatgtacctcatgtattactacaccgatgtcgtcgggctgtctgtgggtttggtcggtactttgtttctggtggcgaggatctgggatgctattaacgatccgattatgggatggattgtaaatgctacgcgatcgcgatggggtaagttcaaaccctggatcctgatcggtacgttggcaaactctgtaatcttatttctcctctttagtgcgcatctgtttgaaggtactactcagattgtctttgtttgcgtgacctacatcctctggggcatgacttacaccattatggatattcccttctggtcgctggttccaaccatcacgctcgataaacgtgagcgcgaacaactggttccttatccgcgtttttttgccagtctggcaggctttgttacggcaggtgtgacgctaccatttgttaattatgtcggcggtggcgatcggggatttggctttcagatgttcactctggtactgatcgccttttttattgtttcaaccatcatcactctgcgcaatgtgcatgaagtcttttcgtcagacaatcaaccgtctgctgaaggaagccatctgacacttaaagccatcgttgcgctaatttataaaaacgatcagctttcatgcctcttgggtatggctcttgcttataatgtagccagcaacattattaccggctttgctatctattatttctcatatgttatcggtgatgcggatttgttcccctattatctgtcgtatgcgggagctgctaacctggtgacgttagtattcttcccacgcttagttaaatcattatcccgacgcattttatgggccggagcatctattcttccggtgttaagctgtggtgttctcctgttaatggcattaatgagctatcacaacgtcgtcctcattgtgattgcgggtattttgctgaatgtgggaacggcgcttttctgggtattacaggtcatcatggtggcagatatcgttgattacggtgaatataaactgcacgtacgctgtgaaagtatcgcttactccgtgcagactatggtggtgaagggcggttcagcctttgcggcttttttcattgcggttgtgttagggatgattggctatgtaccgaatgttgaacagtctacgcaagccctattaggtatgcagtttattatgattgctctaccaactctgtttttcatggtaacgctgattctctacttccgtttctatcgcctcaatggtgacacgctgcgcaggatccagatccatctgctggataaatatcgcaaagtaccgcccgagcctgttcatgctgatattccggtcggtgcagtgagtgatgtgaaagcctaa

SEQ ID NO: 130674 - protein, 469 aa, Escherichia coli
MTTKLSYGFGAFGKDFAIGIVYMYLMYYYTDVVGLSVGLVGTLFLVARIWDAINDPIMGWIVNATRSRWGKFKPWILIGTLANSVILFLLFSAHLFEGTTQIVFVCVTYILWGMTYTIMDIPFWSLVPTITLDKREREQLVPYPRFFASLAGFVTAGVTLPFVNYVGGGDRGFGFQMFTLVLIAFFIVSTIITLRNVHEVFSSDNQPSAEGSHLTLKAIVALIYKNDQLSCLLGMALAYNVASNIITGFAIYYFSYVIGDADLFPYYLSYAGAANLVTLVFFPRLVKSLSRRILWAGASILPVLSCGVLLLMALMSYHNVVLIVIAGILLNVGTALFWVLQVIMVADIVDYGEYKLHVRCESIAYSVQTMVVKGGSAFAAFFIAVVLGMIGYVPNVEQSTQALLGMQFIMIALPTLFFMVTLILYFRFYRLNGDTLRRIQIHLLDKYRKVPPEPVHADIPVGAVSDVKA

SEQ ID NO: 130675 - DNA, 1434 bp, Yersinia pestis KIM
  CDS (1)..(1434): transl_table=11
gtgactgggatgagcctggacagccagcacctctgtagcttgaaggacgaaggggataaaaggctaaaaataaatatgaacaattcaggcatgaaaatcccaatgaaagagctggcgtcttattttgggtatgggatggggcagtgtttcagttttgggttggttgggacttttattctctttttctatactgacattatggggatctcgccggtagcagccagtatgatctttttaattgccagggtatgggatgctatacatgacccattaattgccggtgtaatggatactattaatatgcggcgcgggaaattccgcccatatttgctgtttactcccttcttgattttccttgttacggtcgctgcgttttataatatcgaagccagcttgatgactaaaacgatctacgcaggtgtgacttatatcctgtgggggacgctctacgctctctctgatatcccgttttggtcaatgagcaccgtgatgacggatgaaccgcaagagcgagctaaaacagcgacctgcgcgatgttgggcgtgaatgcgggtatcggcgctacgatgattttattcccttatatcagcgggttatttgctgagaacagtgctgatcgtggttattttgcgggtgttgttatcctcatggttttgggggtgatactcatgttgaatgggttctttaatacaaaagaacgcgtcaacgtcacggtgacggaaaaggtcacgctaaagcagacatttattgtggtctggcaaaataagccgctattttttattcttagcgcctttttcatgaatgtgttttctaacatcgtgaatactttttatattttctttttcacttataacatgggggatgctgagctggtttctgttatcggcttaattacattcacctgtgctttagcttgtctgggaacgccattcttaacccgccattttaagaaacgagatttgttcattacattatgtgtgttggagatcatcgctcgcgttggtttctggttcaccggttataataatgtcgtgtcagtcatggtatggctaaccgtgatcactgccatcttcatgatgacgaatccacttatttccgcgatgattgccgatactgtggaatattcctactatcacaccggtaagcgctgcgcggccatcacgttctccggacagacttttgtcggtaaattgtcggtcgctgttgctggcggtgtctctggcctgatcctgtcaatattgggatatatgcctaatgtggcccaatcgacatggacattgaatggcctatttttctgtatttctctgttgcccgccgtgggtgccgtggtgcgtatcctcattatgcgtaaatataaatttaccgaagatgaacatgcaattcttcgtgaagaactgaaacaagggagattccactcttcagtaggcaaataa

SEQ ID NO: 130676 - protein, 477 aa, Yersinia pestis KIM
MTGMSLDSQHLCSLKDEGDKRLKINMNNSGMKIPMKELASYFGYGMGQCFSFGLVGTFILFFYTDIMGISPVAASMIFLIARVWDAIHDPLIAGVMDTINMRRGKFRPYLLFTPFLIFLVTVAAFYNIEASLMTKTIYAGVTYILWGTLYALSDIPFWSMSTVMTDEPQERAKTATCAMLGVNAGIGATMILFPYISGLFAENSADRGYFAGVVILMVLGVILMLNGFFNTKERVNVTVTEKVTLKQTFIVVWQNKPLFFILSAFFMNVFSNIVNTFYIFFFTYNMGDAELVSVIGLITFTCALACLGTPFLTRHFKKRDLFITLCVLEIIARVGFWFTGYNNVVSVMVWLTVITAIFMMTNPLISAMIADTVEYSYYHTGKRCAAITFSGQTFVGKLSVAVAGGVSGLILSILGYMPNVAQSTWTLNGLFFCISLLPAVGAVVRILIMRKYKFTEDEHAILREELKQGRFHSSVGK

SEQ ID NO: 130677 - DNA, 1374 bp, Vibrio vulnificus CMCP6
  CDS (1)..(1374): transl_table=11
atgtctgaaaaaattacgctacaaaccaaactgtcctacggtcttggtgcactcggtaaagactttgcttgtgcacctatctacatcttcttaatgttctactttacggacgtggccggcttgtctgctgctttcgtgggtaccatcttcttagccgctcgtattatcgatgcgattactgacccaatgatgggggtgatcgtcgacaatacacgttctaagttcggtaagttccgtccttggattgtgattggcacgctgttaaatgcgattgtcttagttggcctttttagtacgcacatgtttgaagggacaacgctttacatctacgcggccgcggcttacatcctttggggtttaacttacaccattatggatattccttattggtcaatgattcctgcgctatcaagttctcgccaagagcgcgagaagctggtggtatggccacgtttgttcgcgagccttgcatggttcattacggggacttacggtctgcacattgtcggcgagctgggtaacggcaaccaaggcgacggtttctttaatgttgctatgttgattgccgttctgtttgtgatgagcgcattcttgattgcgcgtaacgtcaaagagaaagcggcgccggcaaacgcgaaacccgcagagaaattcagcttcaaagatgtactgactatcatcggtaaaaacgaccagcttaaagcgctaatcggcacggttctctctttccaaattgcgaacctattggtgggtggttttgcgatttactacttctcttacgcgctgggtaacgcagagctattcccagtttacatggcggtggcaggcgcggcagaagtagcgggggtgttcttgttccctcgcatcgcttctctactaccacgtaaactgctgtggcctatcgcttgtggtttcccaattctatcttgtgtgcttctgctactgatgggctttgttgcgccagctaacgctctgatgattggtatggcgggtgcggcaattaagttcggtgtaggtatcgcgaacgcactgcaaacggtcatgctggcggacgttgtggattacggtgagcacaaaaccggtcgtcgtagcgagagtgttatcttctcagtacaaaccatgcttgtgaaattcgcaggcgcagcaggtggcttcattgtcggtgtgggcttgtcggttgtcggttacgtccctaacgtagagcaatcgtcaagcaccatcatggggcttgaatttatgatgattggtctaccagccatcatgatgaccatcagtggtgtgatttaccaacgctactaccatctgcatgaagggtttgataagtctgcggttgaatctgaggtaaaaggaacgggttctttggctcaagcctaa

SEQ ID NO: 130678 - protein, 457 aa, Vibrio vulnificus CMCP6
MSEKITLQTKLSYGLGALGKDFACAPIYIFLMFYFTDVAGLSAAFVGTIFLAARIIDAITDPMMGVIVDNTRSKFGKFRPWIVIGTLLNAIVLVGLFSTHMFEGTTLYIYAAAAYILWGLTYTIMDIPYWSMIPALSSSRQEREKLVVWPRLFASLAWFITGTYGLHIVGELGNGNQGDGFFNVAMLIAVLFVMSAFLIARNVKEKAAPANAKPAEKFSFKDVLTIIGKNDQLKALIGTVLSFQIANLLVGGFAIYYFSYALGNAELFPVYMAVAGAAEVAGVFLFPRIASLLPRKLLWPIACGFPILSCVLLLLMGFVAPANALMIGMAGAAIKFGVGIANALQTVMLADVVDYGEHKTGRRSESVIFSVQTMLVKFAGAAGGFIVGVGLSVVGYVPNVEQSSSTIMGLEFMMIGLPAIMMTISGVIYQRYYHLHEGFDKSAVESEVKGTGSLAQA

SEQ ID NO: 130679 - DNA, 1431 bp, Salmonella enterica subsp. enterica serovar Typhi Ty2
  CDS (1)..(1431): transl_table=11
atgagcatctctctgacaacaaagctgagttacgggttcggtgcgtttggtaaggatttcgccatcggcattgtgtatatgtacctgatgtattactacaccgatgtggtgggactctcggtcggcctcgtcggcaccctctttctggtcgcgcgaatttgggatgcgataaacgatcccatcatgggctggattgtcaacgccacgcgttcgcggtgggggaaatttaagccgtggatattgatcggcaccttaaccaattcgctggtgcttttcctgctgttcagcgcccatctttttgagggaaccgcgcaggttgtatttgtctgcgtaacctacatcctgtggggcatgacgtataccattatggatatcccattttggtcgctggtgccgaccattacgcttgataagcgagaacgcgaacaactggtgccgttcccgcgtttcttcgccagtctggctggcttcgtcactgccggtataacgctgccgtttgtgaactatgttggcggggcggatcgtgggttcggctttcagatgtttacgctggtactgattgcgttctttatcgcctcgactatcgtgacattacgcaacgtacatgaggtgtactcctccgacaacggtgtaacggcgggccgcccacatctgacgttaaaaacgatcgttggattgatatacaaaaacgatcagctctcttgcctgttgggaatggcgctggcgtataacatcgcctccaatattatcaatagctttgcgatctactacttcacctatgtgattggcgatgccgatctttttccctattacctttcttacgccggcgcggcgaatctgctgacgctgattgtcttcccccggctggtgaaaatgttatcgcggcggatattgtgggcgggcgcctccgtgatgcccgttctgagttgcgcagggctcttcgcgatggcgttggcggatgtccataatgccgctttaatcgtggcggcgggtattttcctgaatatcgggaccgcgctcttttgggtgcttcaggtaatcatggtggcggatacggtcgattatggggaatttaagctcaatattcgctgcgagagtatcgcttattccgtacagacgatggttgtgaagggcggctcggcgtttgcggcgttctttatcgctctggtgctggggctgattggctacacgccgaacgtggcgcagtctgcgcaaaccctgcaggggatgcagtttattatgattgtcctgccggtactgtttttcatgatgacgttggttctctacttccgctactaccgtttgaacggcgatatgctgcgcaagattcagatccacctgctggataaataccggaaaacgccgccattcgtcgaacagccggatagcccggcgatttctgtggtagcgaccagcgatgtaaaagcgtga

SEQ ID NO: 130680 - protein, 476 aa, Salmonella enterica subsp. enterica serovar Typhi Ty2
MSISLTTKLSYGFGAFGKDFAIGIVYMYLMYYYTDVVGLSVGLVGTLFLVARIWDAINDPIMGWIVNATRSRWGKFKPWILIGTLTNSLVLFLLFSAHLFEGTAQVVFVCVTYILWGMTYTIMDIPFWSLVPTITLDKREREQLVPFPRFFASLAGFVTAGITLPFVNYVGGADRGFGFQMFTLVLIAFFIASTIVTLRNVHEVYSSDNGVTAGRPHLTLKTIVGLIYKNDQLSCLLGMALAYNIASNIINSFAIYYFTYVIGDADLFPYYLSYAGAANLLTLIVFPRLVKMLSRRILWAGASVMPVLSCAGLFAMALADVHNAALIVAAGIFLNIGTALFWVLQVIMVADTVDYGEFKLNIRCESIAYSVQTMVVKGGSAFAAFFIALVLGLIGYTPNVAQSAQTLQGMQFIMIVLPVLFFMMTLVLYFRYYRLNGDMLRKIQIHLLDKYRKTPPFVEQPDSPAISVVATSDVKA

SEQ ID NO: 130681 - DNA, 1380 bp, Vibrio vulnificus YJ016
  CDS (1)..(1380): transl_table=11
atgattatgtctgaaaaaattacgctacaaaccaagctgtcctacggtcttggtgcactcggtaaagactttgcctgcgcacctatctacatcttcttaatgttctactttacggacgtagcaggcttgtctgctgctttcgttggtaccatcttcttagccgctcgtattatcgatgcgattactgacccaatgatgggggtgatcgtcgacaatacgcgttctaagttcggtaagttccgcccttggattgtgattggtacgctgttaaatgcgatcgtcttagttggcctttttagtacgcacatgtttgaagggacgacgctttacatctacgcggccgcggcttacatcctttggggtctaacctacaccattatggatatcccttactggtcaatgattcctgcgctatcaagttctcgccaagagcgtgaaaagctggtggtatggccgcgcctgtttgcaagccttgcatggttcattacggggacatacggtttgcacattgtcggcgagctgggtaacggcaaccaaggtgacggtttctttaatgttgcgatgttgattgcagttctgtttgtgatgagcgcattcttgattgctcgcaacgtcaaagagaaagcggcgccagcaaacgcgaaacccgcagagaaattcagcttcaaagacgtattgaccatcattggcaaaaacgaccagcttaaagcgctgattggcacggttctctctttccaaattgcgaacctattggtgggtggctttgcgatttactacttctcttacgcgctgggtaacgcagagctattcccagtttacatggcggtggctggcgcagcagaagtggcgggggtgttcttgttccctcgcatcgcttctctattaccacgtaagctcctatggcctatcgcttgtggcttcccaattctgtcttgtgtgcttctgctactgatgggctttgttgcaccagccaacgccctgatgattggtatggcgggtgcggcaattaaattcggtgtaggtatcgcgaacgcactgcaaacggtcatgctggcggacgttgtggattacggcgagcacaaaaccggtcgtcgtagcgagagtgttatcttctcagtgcaaaccatgcttgtgaaattcgcaggcgcagcaggtggcttcattgtcggtgtgggcttgtcggttgtcggttacgtccctaacgtagagcaatcggccagtaccatcatggggcttgaatttatgatgattggtctaccagccatcatgatgaccatcagtggtgtgatttaccaacgttactaccatctgcatgaagggtttgataagtctgcagttgaatctgaggtaaaaggaaaggcttctctggctcaagcctaa

SEQ ID NO: 130682 - protein, 459 aa, Vibrio vulnificus YJ016
MIMSEKITLQTKLSYGLGALGKDFACAPIYIFLMFYFTDVAGLSAAFVGTIFLAARIIDAITDPMMGVIVDNTRSKFGKFRPWIVIGTLLNAIVLVGLFSTHMFEGTTLYIYAAAAYILWGLTYTIMDIPYWSMIPALSSSRQEREKLVVWPRLFASLAWFITGTYGLHIVGELGNGNQGDGFFNVAMLIAVLFVMSAFLIARNVKEKAAPANAKPAEKFSFKDVLTIIGKNDQLKALIGTVLSFQIANLLVGGFAIYYFSYALGNAELFPVYMAVAGAAEVAGVFLFPRIASLLPRKLLWPIACGFPILSCVLLLLMGFVAPANALMIGMAGAAIKFGVGIANALQTVMLADVVDYGEHKTGRRSESVIFSVQTMLVKFAGAAGGFIVGVGLSVVGYVPNVEQSASTIMGLEFMMIGLPAIMMTISGVIYQRYYHLHEGFDKSAVESEVKGKASLAQA

SEQ ID NO: 130683 - DNA, 1365 bp, Treponema denticola ATCC 35405
  CDS (1)..(1365): transl_table=11
atgaaacaaaacagatggactttcggccttggaactataggccgagatatggtgtactctttgataagcatgtaccttattttttacatgaccgatgtaatttatgttcctacaaatgtattgtggagtattactgttattgttcttgcagcccgcatctttgatgcctgtaacgatccgattatgggtttgattgtagataataccaaaaccaagtacggaaaatttaagccttggatagccttcggagccttgacctcagggatttttacaatccttctttttacggattttgggattaagggaggagcctatgcagccttcttcggcattatctatcttttatggggtattgcttttaccacaaacgatataagctattggtcaatgcttccttcattaagtgtggatcaaaaagaaagagaaaaaataggatctattgcccgtatttgcgcaaatgtgggacttttctttgttgttgcaggcatagttcccattacaaccgcatggggtaataagatgggaagccttgcaaagggatattttttctttgcaattatggttaccctaattatgtggctcggtcaaattataaccttaataggagtaaaagaacctaaaataacaaagcctcaaaaacatacatcccttaaagagctcttgagcgttatagtaaaaaatgaccagctccttttaactgctatagccatgactctctttatgataggctacatgaccacaaccggtttcggactttacttttttaagtatgcctacggcgatgaaggtatgtattccgtctttgcaattatcctaggcctttcccaaatttcggccctgattatttttccgattttaagtaaattttttgtaaggcaaaaaatttatacggcttcgataataatggttttggcaggttacatcctcttcttttttgctcctacaaataccatgttttttatcggtatttcgggagttcttctctttgtgggtcaggcctttattcagcttatgatgctcatgttcctcgcagattgtgttgactacggccattggaaattgggcaaacggaatgacagcatttcgttttcgattcagccctttatcaataaactttcaggagctatcggaaacggcatcgtaagcgcagtcgtcatcatttcaggaatcaaagaagcctcatccgctgccgaggttacaaaggaaggccttttaatgatgaagacagccatgctcgtctttcctcttttttgtatagtcggcagctacatcctataccgcctccgctataaaatcgacgaaaaaacctatgctaacattttaactgaacttgaagagcggggcgagctggttaaaaaggagtaa

SEQ ID NO: 130684 - protein, 454 aa, Treponema denticola ATCC 35405
MKQNRWTFGLGTIGRDMVYSLISMYLIFYMTDVIYVPTNVLWSITVIVLAARIFDACNDPIMGLIVDNTKTKYGKFKPWIAFGALTSGIFTILLFTDFGIKGGAYAAFFGIIYLLWGIAFTTNDISYWSMLPSLSVDQKEREKIGSIARICANVGLFFVVAGIVPITTAWGNKMGSLAKGYFFFAIMVTLIMWLGQIITLIGVKEPKITKPQKHTSLKELLSVIVKNDQLLLTAIAMTLFMIGYMTTTGFGLYFFKYAYGDEGMYSVFAIILGLSQISALIIFPILSKFFVRQKIYTASIIMVLAGYILFFFAPTNTMFFIGISGVLLFVGQAFIQLMMLMFLADCVDYGHWKLGKRNDSISFSIQPFINKLSGAIGNGIVSAVVIISGIKEASSAAEVTKEGLLMMKTAMLVFPLFCIVGSYILYRLRYKIDEKTYANILTELEERGELVKKE

SEQ ID NO: 130685 - DNA, 1425 bp, Yersinia pseudotuberculosis IP 32953
  CDS (1)..(1425): transl_table=11
atgagcctggacagccagcacctctgtagcttgaaggacgaaggggataaaaggctaaaaataaatatgaacaattcaggcatgaaaatcccaatgaaagagctggcgtcttattttgggtatgggatggggcagtgtttcagttttgggttggttgggacttttattctctttttctatactgacattatggggatctcgccggtagcagccagtatgatctttttaattgccagggtatgggatgctatacatgacccattaattgccggtgtaatggatactattaatatgcggcgcgggaaattccgcccatatttgctgtttactcccttcttgattttccttgttacggtcgctgcgttttataatatcgaagccagcttgatgactaaaacgatctacgcaggtgtgacttatatcctgtgggggacgctctacgctctctctgatatcccgttttggtcaatgagcaccgtgatgacggatgaaccgcaagagcgagctaaaacagcgacctgcgcgatgttgggtgtgaatgcgggtatcggcgctacgatgattttattcccttatatcagcgggttatttgctgagaacagtgctgatcgtggttattttgcgggtgttgttatcctcatggttttgggggtgatactcatgttgaatgggttctttaatacaaaagaacgcgtcaacgtcacggtgacggaaaaggtcacgctaaagcagacatttattgtggtctggcaaaataagccgctattttttattcttagcgcctttttcatgaatgtgttttctaacatcgtgaatactttttatattttctttttcacttataacatgggggatgctgagctggtttctgttatcggcttaattacattcacctgtgctttagcttgtctgggaacgccattcttaacccgccattttaagaagcgagatttgttcattacattatgtgtgttggagatcatcgctcgcgttggtttctggttcaccggttataataatgtcgtgtcagtcatggtatggctaaccgtgatcactgccatcttcatgatgacgaatccacttatttccgcgatgattgccgatactgtggaatattcctactatcacaccggtaagcgctgcgcggccatcacgttctccggacagacttttgtcggtaaattgtcggtcgctgttgctggcggtgtctctggcctgatcctgtcaatattgggatatatgcctaatgtggcccaatcgacatggacattgaatggcctatttttctgtatttctctgttgcccgccgtgggtgccgtggtgcgtatcctcattatgcgtaaatataaatttaccgaagatgaacatgcaattcttcgtgaagaactgaaacaagggagattccactcttcagtaggcaaataa

SEQ ID NO: 130686 - protein, 474 aa, Yersinia pseudotuberculosis IP 32953
MSLDSQHLCSLKDEGDKRLKINMNNSGMKIPMKELASYFGYGMGQCFSFGLVGTFILFFYTDIMGISPVAASMIFLIARVWDAIHDPLIAGVMDTINMRRGKFRPYLLFTPFLIFLVTVAAFYNIEASLMTKTIYAGVTYILWGTLYALSDIPFWSMSTVMTDEPQERAKTATCAMLGVNAGIGATMILFPYISGLFAENSADRGYFAGVVILMVLGVILMLNGFFNTKERVNVTVTEKVTLKQTFIVVWQNKPLFFILSAFFMNVFSNIVNTFYIFFFTYNMGDAELVSVIGLITFTCALACLGTPFLTRHFKKRDLFITLCVLEIIARVGFWFTGYNNVVSVMVWLTVITAIFMMTNPLISAMIADTVEYSYYHTGKRCAAITFSGQTFVGKLSVAVAGGVSGLILSILGYMPNVAQSTWTLNGLFFCISLLPAVGAVVRILIMRKYKFTEDEHAILREELKQGRFHSSVGK

SEQ ID NO: 130687 - DNA, 1377 bp, Mannheimia succiniciproducens MBEL55E
  CDS (1)..(1377): transl_table=11
atgagtttatcaatgaaaacaaaattaagcttcggtttaggggcttatggtaaagactttgctattcatattgtgtatatgtacttgatgtattattacaccgatgtgttgggcgtatccggtgcgatcgtgggaactatttttatgatcgcgcgggtttgggatgcggtgaacgacccgataatgggctggattgtaaataacacgcgttcgcgctggggtaaatttaaaccttggattttaatcggtacggttttgaattcaattgttctcttttcattattttgcgccgattatttcagcggcacggcattaattatttatatcgccgttacctatattttatggggtatgacttatactctgatggatattccgttctggtctctcacaccgactttaactctcgatcagcgagaacgtgaagaattagtgccatatcctcgtttcttttcaagccttgccaactttattaccgcaggaacttgtattgcttttgtggattatgtaggcggcgatgataaaggattcggtttccggatgtttacccttgtcatcattgtttgcttccttatttcaaccgttattactttgatgaatttaaaagaaaaatattcatcggataatttggaaacaggcgaagcgcaacaacgtattccgcttaagactctggtttcgttgattcctcgcaatgatcagctttccagccttttggtgatggcgttatcttataacatcgccagcaatattatttccggctttgcgatttattacttcacttacgtagtgggtgataaagaaatgttcccttattacatgtcttatgcgggtattgcgaaccttatcattattatcttctttgcccgtttggtacgtttgttttcacgtcgtacgctatggatcacaatttccgtcagctctattttaagctgtttgattcttgcctatacgggaatggcggaaacgccgagcgtatttttaattattttagcggggattttcatgcaaatcggtagcgccctgttctggacgttgcaggtcattatggtggcggacaccgtagattacggcgaatacaaattaggcattcgttcggaaagtatcgcttattccgtgcaaactatggtggtaaaagcgggttcggcaatttcagccttcctaatcggtgtgttattaaccgccattaattacgtgccgaacgaagtacaaaacgaaaataccattttctggatgaaagtcatcatgattggtttgccgattttattctatagcattaaattattcgtttacttccgttattacaaacttcacggcgatttattggcgaaagtgaatatcgctttattagataaataccgtaacgtgaaagaggactaa

SEQ ID NO: 130688 - protein, 458 aa, Mannheimia succiniciproducens MBEL55E
MSLSMKTKLSFGLGAYGKDFAIHIVYMYLMYYYTDVLGVSGAIVGTIFMIARVWDAVNDPIMGWIVNNTRSRWGKFKPWILIGTVLNSIVLFSLFCADYFSGTALIIYIAVTYILWGMTYTLMDIPFWSLTPTLTLDQREREELVPYPRFFSSLANFITAGTCIAFVDYVGGDDKGFGFRMFTLVIIVCFLISTVITLMNLKEKYSSDNLETGEAQQRIPLKTLVSLIPRNDQLSSLLVMALSYNIASNIISGFAIYYFTYVVGDKEMFPYYMSYAGIANLIIIIFFARLVRLFSRRTLWITISVSSILSCLILAYTGMAETPSVFLIILAGIFMQIGSALFWTLQVIMVADTVDYGEYKLGIRSESIAYSVQTMVVKAGSAISAFLIGVLLTAINYVPNEVQNENTIFWMKVIMIGLPILFYSIKLFVYFRYYKLHGDLLAKVNIALLDKYRNVKED

SEQ ID NO: 130689 - DNA, 1329 bp, Colwellia psychrerythraea 34H
  CDS (1)..(1329): transl_table=11
atgattagtgtaagagaaaaaattgcttatggtttaggtgatactgccagtaatataatctttcaaacggtaatgatgttcttattactgttttacactgacgttgttggtttatctcctgctgtggttggtactatgtttttattcgtacgactaatcgatgcggttaccgatccaatcatgggcaacttagccgataaaacccgcactaagtggggacagttccgtccttatctgctgtggttagcgctaccttttgctttgatcagtatattagctttcaccacacccgacttaaccggtaataataaagttatctatgcttttgtcacttatacccttcttatgattgcttatacggcaatcaatattccttattgtggtttaggtggtgttattactgctgatgcaaaagagcgagtcacggtacaatcatatcgttttgtatttggtatgttaggcggcgtcattgttgcaggcgcaactatgccaatggtggaatggtttggccaaggcgatactgcaaaaggctaccaatatacaatggtcgcaatgagcagcttaggcgtcgtcttgtttttgttatgtttcttaggaacaaaagaacgagtaaaaccaccagaaaaccaagactcatcgatgaaagaaaatctgcaatcattatggaagaatgaccaatggcgcatattatgtattgcttctttttatttactcacggggcaagttttacgccttacccttgctgtttattatgttaagtactttctcgggcgcgaagatttaatcacgtcatttttaacactaggcgtagtggcaagtatgataggttgcgcggtagcacagccgctcgctaaacgtgtatgtaaaataaaagcctatatagcactgcaaagtttatccgcagttatatgcctagcgagttttcttatttcccccaaccaaattattcttgcgtttgtcgcctttatttcttggaagttttttcttgatatggcttcaccactactgtgggcaaaaatggcagataccattgactatggtcataaaaaaacaggtattagggtaacaggccttgtttattctggcgtaatattttttatcaaaatgggtattgctattggtggtgcacttgctggatggttattaactttttacggttaccaagctgatttagaacagagtgaggctaccaagcaaggtttattattatcatttaccgttttacctgcattaggttcatttgctgtagcttgggtaatgcgaaaatataccttaaccgaacaaagagtcgttcaaatacaggtagaattaagcacggagactaagtaa

SEQ ID NO: 130690 - protein, 442 aa, Colwellia psychrerythraea 34H
MISVREKIAYGLGDTASNIIFQTVMMFLLLFYTDVVGLSPAVVGTMFLFVRLIDAVTDPIMGNLADKTRTKWGQFRPYLLWLALPFALISILAFTTPDLTGNNKVIYAFVTYTLLMIAYTAINIPYCGLGGVITADAKERVTVQSYRFVFGMLGGVIVAGATMPMVEWFGQGDTAKGYQYTMVAMSSLGVVLFLLCFLGTKERVKPPENQDSSMKENLQSLWKNDQWRILCIASFYLLTGQVLRLTLAVYYVKYFLGREDLITSFLTLGVVASMIGCAVAQPLAKRVCKIKAYIALQSLSAVICLASFLISPNQIILAFVAFISWKFFLDMASPLLWAKMADTIDYGHKKTGIRVTGLVYSGVIFFIKMGIAIGGALAGWLLTFYGYQADLEQSEATKQGLLLSFTVLPALGSFAVAWVMRKYTLTEQRVVQIQVELSTETK

SEQ ID NO: 130691 - DNA, 1371 bp, Photobacterium sp. SKA34
  CDS (1)..(1371): transl_table=11
atgtctgataaaattacgctacaaaccaagctatcttatggcttgggtgcactaggtaaagactttgcttgtgcgccaatatatacttttcttatgttctattttactgacgtagcaggaatatctgccgcttttgttggtactatttttcttgctgcacgtatagtagatgctgttacagatctattaatgggcgtaattgttgataacacgcgctctagatttggtaagttccgaccatggatagtaataggtacaattttaaactctgtagtattaattgctcttttctgtactcatatgttcgagggtacttccctttatatttacgctgcagctgcatatattctatggggattaacttacaccattatggatattccatattggtcattgatcccggctttgtctagttctcgccctgaacgagaaaaattggttgtttggcctcgtatctttgcaagttttgcatggtttattacaggtacttatggactccatattgtaggcaaattaggcaatggtgaccaaggggctggcttcttagatgcggcaatgttaattgttgttttgtttattcttagtgctttccttgtttttcgtaatgtaaaagaaacagcgaaagtcgatactacaactaaagcagaacgatttagttttaaagatgttcttttagtaattggtaaaaacgatcagttaaaagcccttattggctctattctcttcttccaaatggcaattctattaattggcggggcagcaatatactacttcacttatgtacttggaaataaagatctgtttcctgcatatatgatggtggcaggtattgctgaaattgtgggtatattcttattccctcgtattgcgaatatgttaccgcgtcaatatttatggccaattgctgtaggcttccctgtggtttcatgcctaatattatatttcatgggcttatttgttcctgggaatatcgtgatgattggcgtagcgggggcaacaattaaatttggtaatggtattgctaatggattatcaacagtcatgttagcggatgttgttgattatggagaatataagacaggtcgtcgcagtgaaagtattatattttcggtgcaaacaatgttggtgaaatttgcaggtgcaggcggcggttttattgttggtattggactatcacttgtgggttacgtaccgaatgttgaacagtctgcgcatactatgatgggaatcgagtttatgatgattggtcttcctgcaatgatgatgttgatcagtggcattatataccgtcgatactaccgtttacatgacggctttaataaagaagatttcgaaaaagaagagcaagaaggaaaaactgtttcagcataa

SEQ ID NO: 130692 - protein, 456 aa, Photobacterium sp. SKA34
MSDKITLQTKLSYGLGALGKDFACAPIYTFLMFYFTDVAGISAAFVGTIFLAARIVDAVTDLLMGVIVDNTRSRFGKFRPWIVIGTILNSVVLIALFCTHMFEGTSLYIYAAAAYILWGLTYTIMDIPYWSLIPALSSSRPEREKLVVWPRIFASFAWFITGTYGLHIVGKLGNGDQGAGFLDAAMLIVVLFILSAFLVFRNVKETAKVDTTTKAERFSFKDVLLVIGKNDQLKALIGSILFFQMAILLIGGAAIYYFTYVLGNKDLFPAYMMVAGIAEIVGIFLFPRIANMLPRQYLWPIAVGFPVVSCLILYFMGLFVPGNIVMIGVAGATIKFGNGIANGLSTVMLADVVDYGEYKTGRRSESIIFSVQTMLVKFAGAGGGFIVGIGLSLVGYVPNVEQSAHTMMGIEFMMIGLPAMMMLISGIIYRRYYRLHDGFNKEDFEKEEQEGKTVSA

SEQ ID NO: 130693 - DNA, 1428 bp, Citrobacter freundii
  CDS (1)..(1428): transl_table=11
atgagcatctctctgacaacaaaactcagttacggatttggagcgttcggtaaggatttcgctatcggtattgtgtacatgtatctgatgtattactacaccgacgtggtgggattatcggtgggcgtcgtcggaaccttgttcctggtggcaaaaatatggaacgcgtttaacgatccggtgatggggtggatagtgaatgccacccgatcgcgctggggaaaatttaaaccctggattttactcggtacgctgaactcattggtgctgtttttgctttttagcgcacatctttttgagggtactgcgcaggtcgtatttgtttgcgtgacgtatattttatggggaatgacctacaccattatggatattccattctggtcactggtgccaaccattacgctggataaacgcgagcgtgaacaactggtgccgtatccccgtttcttcgccagccttgccgggtttgtcaccgcgggcgtgacgctaccctttgtaaactatgttggcggcgcggatcgcgggttcggttttcagatgtttacgctggtgctgatcgcattttttattgtttctaccctcgtaaccttgcgcaatgtgcatgaagtgtattcctctgacagcgaagctaccgcagacagcacccggctgacgctgaaatcaatccttgcgcttatctacaaaaacgatcagctttcctgcctgctggggatggcgctggcttacaacgtggcgtccaatatcattacaggttttgcgatttactacttcacctacgtggtgggtgatgctgaccttttcccatactacctctcctatgccggagcagctaacttgctgacattgattctctttccccgtctgtcaaaggcgctttctcgccgggtactgtgggctggcgcttcggttatgccagttctcagcgcaggcgtattgctgattatggctctgggggcattccacaatactttcctgattgttaccgcagggatccttctgaacattggtacggcgctgttctgggtactgcaggtgattatggtggcggacaccgtagattacggtgaatacaagtttaacgtccgctgcgagagtattgcctatgccgtgcagacaatggtggtcaaaggtggctcggcgttttccgctttctttattgcggtggtgctgggattgattggttatgttccgaatgcgacgcaatctgctgagaccatcctcggcatgcagttcatcatgatcgcgctgcccacgctttttttcgttgtgacactggtgctctatttccgttactaccggttgaatggcgatatgctgcgtaagattcagatccacctgctggataagtaccgaaaagtgccgtcgcccgtcaaacagtcgaatactccggagattccggtggtagtggccagcgatgtgaaggcctag

SEQ ID NO: 130694 - protein, 475 aa, Citrobacter freundii
MSISLTTKLSYGFGAFGKDFAIGIVYMYLMYYYTDVVGLSVGVVGTLFLVAKIWNAFNDPVMGWIVNATRSRWGKFKPWILLGTLNSLVLFLLFSAHLFEGTAQVVFVCVTYILWGMTYTIMDIPFWSLVPTITLDKREREQLVPYPRFFASLAGFVTAGVTLPFVNYVGGADRGFGFQMFTLVLIAFFIVSTLVTLRNVHEVYSSDSEATADSTRLTLKSILALIYKNDQLSCLLGMALAYNVASNIITGFAIYYFTYVVGDADLFPYYLSYAGAANLLTLILFPRLSKALSRRVLWAGASVMPVLSAGVLLIMALGAFHNTFLIVTAGILLNIGTALFWVLQVIMVADTVDYGEYKFNVRCESIAYAVQTMVVKGGSAFSAFFIAVVLGLIGYVPNATQSAETILGMQFIMIALPTLFFVVTLVLYFRYYRLNGDMLRKIQIHLLDKYRKVPSPVKQSNTPEIPVVVASDVKA

SEQ ID NO: 130695 - DNA, 1392 bp, Bacillus subtilis
  CDS (1)..(1392): transl_table=11
atgattggaacagaaaaagtaacggcattgaaggcgaagcatcagtcaaaatccagcaccggcctgtcctggtttgaacgaatcggttatggattcggcgatatgtcgtataatattatctttcagtttgtaaacgcatacttattattttattatacagacgtcggcggcattcagcctgcggtaatcgcaactttgtttcttgttgtgcgtgtgctggatgctatttttgacccgatcatgggattgattttagataaaacgaatacaaggtggggaaaagcaaggccatatttgctgtgggtggcatttccttttgcgctattcacattcttatgtttcacgacgcctcatttcggtgagaccggaaatatggtatatgcgtatgtcacttatattctgcttgggatgtcctttagtatgcaaacgatcccggtgaacagcttaacggggcggatgacgaattcggtggaggaacgaacggttctgaccacaacccggatgattttggtgtatatcggcattcttttatccatttcctgtgcgacaccgcttgcaactgctatcggaggagaggatcaggcgtttggatttcagatgacggcgctcatctatgcggctgtcagcatcgttttgaatctatttagtttctttactgtacgggagcggattcagcctaaaaagagaaaaaaacaagggatcaaaaagacgttatccgttttattcaaaaacaaacccttgctcatgttaatttcatcatttttggcttttgcgatcgggtttaatattaagctcagcacgatggtgtattattttacgtataacgtaaaccataaagagttcgtgtttatgggcaccgttttatttttcggggcagcgctgatcagcaatttgtttattcctttcttttctgagaagtggggcagaaaacaagtcatgattatcacggcagctctatcgcttatttcttatgccggcctgcattttacgccgtattcttcaattccactcattttcatttggcttttcgcttcgggatttttcacaacgcctttaaatacgcttgcttggggaatggttgcggattgcgtcgattatgcggaatggaaaaccggaattcgcgcggatggtgttgtgatttcgagcatgagctttattaataagctgggtgttgcgttagccgggtcattttcggccatttatttaggaatcgccgggtatgtggcgaatacagaccagacagttgcgtcgttgaatgcgattaaaaatatgaatgctttgattccgggatttttcattttgctttctattattcttatcgccttctatcctttaacggaaaaaagatataaacacatcatctctgagctggagcaaaggtctgcgagataa

SEQ ID NO: 130696 - protein, 463 aa, Bacillus subtilis
MIGTEKVTALKAKHQSKSSTGLSWFERIGYGFGDMSYNIIFQFVNAYLLFYYTDVGGIQPAVIATLFLVVRVLDAIFDPIMGLILDKTNTRWGKARPYLLWVAFPFALFTFLCFTTPHFGETGNMVYAYVTYILLGMSFSMQTIPVNSLTGRMTNSVEERTVLTTTRMILVYIGILLSISCATPLATAIGGEDQAFGFQMTALIYAAVSIVLNLFSFFTVRERIQPKKRKKQGIKKTLSVLFKNKPLLMLISSFLAFAIGFNIKLSTMVYYFTYNVNHKEFVFMGTVLFFGAALISNLFIPFFSEKWGRKQVMIITAALSLISYAGLHFTPYSSIPLIFIWLFASGFFTTPLNTLAWGMVADCVDYAEWKTGIRADGVVISSMSFINKLGVALAGSFSAIYLGIAGYVANTDQTVASLNAIKNMNALIPGFFILLSIILIAFYPLTEKRYKHIISELEQRSAR

SEQ ID NO: 130697 - DNA, 1389 bp, Staphylococcus xylosus
  CDS (1)..(1389): transl_table=11
atgaatagacatttaacaggaaaacaaaaatttgcatttggattcggtgccatcggtaaggatgccatatttaatatcgtcagtgtatttctaatgttttatattacagacatagtagggctatctcctgcatttgttggagttatgttatttgttgcacgtatatgggatgcaattaacgatccaattatgggaatgattgttgataatacaagaaataactttggtaaatttaagacatggcttgttataggtacattaattaacgctgtagtaacagtattattgtttactaattttgatttatcacaaacagcaatgtacatttacatatcgattatttatatttcctggggaatgacatatacgatgatggatataccatattggtcatggcttcctaacttaacccatgacccaagagaacgtgaagaattatcagttatcccaagatttttcgctagtttggctgcatttactgtcggcacatttggtttattctttatacataaacttggtgatattttcggcggaggtagtgattctactggtatttttgtattcgcaataatttgtagtttgatttttatatttaccattggtgtaacggtctttaaagtaccggaggaccaagaaatggaaaaactaataggtattaaagttaaatttaaagatatcggtcgtattttatttaaaaacaaagaattattagcaattatgggagtacttctaacttttaacttatgtttacaaacattgaatggctctattatttattactttaaatatgtagttaacgcagaacatttatttgcaatttttaattctatgattttatgcgaaatggttggtttactattattaccacgctttattaaatgggtaggtagaaccgctgcatttaatacttctataatatgcattatctctggattgttaattattttgatatctgggtatattgcgccacaaagtatgactttaattattataggagcggggatattacgaattggttcaggctttatggtcggcatcacaactgtttcattagcagatgttattgattacggagaagttaaattcggtcagcgtaatgaaagtattattacatcaacaaataccttcttaacaaagacttctcaagcagtagcagcattaatcgtcggcttaggtttatctattttaggttatacgccaaatgaagcacaatcagttgtgacaattaatggtttaagaataatgatcttagtttcaccacttgtattcatttgtttagccgcatttttatatcacaaagcctttaatttaaaaggtgactttttgacggatattgaaaagacattacagtataaacgccaaagagaatttagagaaagaattaaataa

SEQ ID NO: 130698 - protein, 462 aa, Staphylococcus xylosus
MNRHLTGKQKFAFGFGAIGKDAIFNIVSVFLMFYITDIVGLSPAFVGVMLFVARIWDAINDPIMGMIVDNTRNNFGKFKTWLVIGTLINAVVTVLLFTNFDLSQTAMYIYISIIYISWGMTYTMMDIPYWSWLPNLTHDPREREELSVIPRFFASLAAFTVGTFGLFFIHKLGDIFGGGSDSTGIFVFAIICSLIFIFTIGVTVFKVPEDQEMEKLIGIKVKFKDIGRILFKNKELLAIMGVLLTFNLCLQTLNGSIIYYFKYVVNAEHLFAIFNSMILCEMVGLLLLPRFIKWVGRTAAFNTSIICIISGLLIILISGYIAPQSMTLIIIGAGILRIGSGFMVGITTVSLADVIDYGEVKFGQRNESIITSTNTFLTKTSQAVAALIVGLGLSILGYTPNEAQSVVTINGLRIMILVSPLVFICLAAFLYHKAFNLKGDFLTDIEKTLQYKRQREFRERIK

SEQ ID NO: 130699 - DNA, 2010 bp, Enterobacter aerogenes
  CDS (161)..(1576): transl_table=11
tctacgcgctggtggacgatcttatcgccagccacggcgactggctgccggcctggctgcaccgctaatcttctcatgccgccgagggatctggcccggcggcgcctgccatgctctatcaaacgctaaaggaggcgctggcgacagcgacctgtaccctatgagtatttcaatgacaacaaagctcagctacggatttggtgcttttggtaaagatttcgctatcggtatcgtttacatgtatctgatgtattactacaccgatattgttggcttatcggttggggtggttggcaccttgttcctggtggcgaggatccttgatgcgatagccgatccgatcatgggatggatcgtcaactgcacgcgatcgcgatgggggaaattcaagccgtggatcctgatcggaactatcaccaactcggtggtgttgtatatgctgttcagcgcccatcacttcagcggcggagcgctactggcgtgggtgtggctgacctacctgctgtggggcttcacctataccatcatggatgtgccgttctggtcgctggtgccgaccattacccttgataaacgcgaacgtgaacagctggtgccttacccgcgctttttcgccagccttgccgggtttgtgacggccggcgtcacgctgccgtttgtcagcgccgtcggcggcgccgatcgcggcttcggtttccagatgtttaccctggtgctgattgcctttttcgtaatttccaccctcgttaccttgcgcaacgtccatgaggtttactcgtcggatagcggcgtgagcgaggattccagccatctttcactgggtcagatggtggcgctcatctataaaaacgatcagttggcctgcctgttgggcatggcgctggcctataacacggcggcgaatatcatcgccggcttcgcgatttattactttacctacgtcattggcagcgcggagatgttcccgtattacatgtcctacgcgggggcggcgaatttactgacgctgatcttgttccctcgactggtaaaagggctgtcgcggcgcattctgtgggcgggggcatcgatcatgccggtgctgggctgtggcgtgctgttgctgatggcgctgagcggcgtttacaacatcgcgctgatttcgctggccggggtgctgttgaatatcggcaccgcactgttctgggtgctgcaggtcattatggtggccgataccgtcgactacggcgaatatacgatgaatatccgctgcgaaagcatcgcctactcagttcagacgctggtggtaaaagccggttcggcgtttgcggcatggtttatcgccatcgtgctgggtatcattggctacgtgccgaatacggcacaatcgcctcacacgctgctggggatgcaggcgattatgattgcgctgccgacgctcttttttgccctgacgctgtttctctatttccgttattacaaactgaatggcgatatgttgcgacgtattcagattcacctgctggataaatatcgccgggtaccggaaaatgtcgtcgagccggaacggccgattgtggtacccaatcaggtataaaaagcgtgcgcaaaacgctggcgaaagaggggagggatgctctctttttgcgcaaaaatagcgtttaaaacagacagaaatgaagatttttaattctctgaattttctctgataattctcattttaagctcaatgggttagttaaaatctcaaactgctctcaaataaaactcggaattgtctctttttcgtgctcttgcgctgctttttaactcttgctactctttttgggtcttacattttctcttatttgtctcagtgatggagcaatgcgatgcgcatttttatcgatgatggttcaaccaatatcaaaatgctgtgggagcaagatggcgaaactttcacccatatcagccccaatagttttaaacgaggctggtctgccaccttcggtgccgggaagccatttaactacaccgtggatgatgaaaagt

SEQ ID NO: 130700 - protein, 471 aa, Enterobacter aerogenes [sequence omitted]

SEQ ID NO: 130701 - DNA, 1624 bp, Klebsiella pneumoniae
  CDS (200)..(1615): transl_table=11
ggatccgcacaccgccgcggtgttggggatcgaagagatctacgcgctggtggacgatctgatcgccagccacggcgactggctgccggcctggctgcaccgttaatcctcttatgccgccgggggcaacgaacccggcggtgcctgtcacgctctatcaaacgctgaaggaggcgctggcgacagcgacctggaccctatgagtatttcaatgacaacaaagctcagctacggatttggtgcctttggtaaagatttcgctatcggtatcgtctacatgtacctgatgtattactacaccgatattgttggcttatcggtcggggtggttggcaccttgttcctggtggcaaggatcctcgatgcgatagccgatccgattatgggatggatcgttaactgtacgcggtcgcgatggggaaagttcaaaccgtggatcctgatcggcacgataaccaactcggtggtgctgtatatgctgttcagcgcccaccatttcagcggcggggcgctgctggcgtgggtgtggctaacctacctgctgtggggcttcacttacaccatcatggatgtgccgttctggtcgttggtgccgaccattaccctcgataaacgcgaacgcgagcagctggtgccttacccgcgctttttcgccagtctggcgggatttgtcacggccggcgtcacgctgccgttcgtcaacgccgtcggcggcgccgatcgcggtttcggttttcagatgttcactctggtgctgatcgccttcttcgtcgtttccaccctcgtcaccctgcgcaacgtgcatgaggtttactcctccgacagtggtgtgagcgaagactccagccacctctcactgcgccagatggtggcgctgatctataaaaacgatcagctggcctgcctgttaggcatggcgctggcctataacacggcggcgaacattatcgctggctttgcgatttactactttacctacgtgattggcagcgcggagatgttcccgtattacatgtcctacgccggggcggcgaatttgctgacgctgatcctgttcccacgactggtaaaagggctatcgcggcgcattctgtgggcgggtgcttcgatcatgccggtgctgggctgcggcgtgctgttgctgatggcgctgggcggcgtttacaacatcgcgctgatttcgctggccggggtgctgttgaatatcggcaccgcgctgttctgggtgctgcaggttattatggtggccgataccgtcgactatggcgaatatacgatgaatatccgctgcgaaagcatcgcctattccgttcaaacgctggtagtcaaagccggttcggcgtttgcggcctggtttatcgccatcgtgctgggtatcatcggttacgtgccgaatgttgtgcagtcgtcccacacgctgctggggatgcaggcgattatgattgcgctgccgacgctcttttttgctctgacgctgtttctctatttccgttattacaaactgaatggcgatatgctgcgacggattcagattcacctgctggataaatatcgccgggtaccggaaaatgacgtcgagccggaacggccgattgtggtacccaatcaggtgtaaaaagcgtgc

SEQ ID NO: 130702 - protein, 471 aa, Klebsiella pneumoniae
MSISMTTKLSYGFGAFGKDFAIGIVYMYLMYYYTDIVGLSVGVVGTLFLVARILDAIADPIMGWIVNCTRSRWGKFKPWILIGTITNSVVLYMLFSAHHFSGGALLAWVWLTYLLWGFTYTIMDVPFWSLVPTITLDKREREQLVPYPRFFASLAGFVTAGVTLPFVNAVGGADRGFGFQMFTLVLIAFFVVSTLVTLRNVHEVYSSDSGVSEDSSHLSLRQMVALIYKNDQLACLLGMALAYNTAANIIAGFAIYYFTYVIGSAEMFPYYMSYAGAANLLTLILFPRLVKGLSRRILWAGASIMPVLGCGVLLLMALGGVYNIALISLAGVLLNIGTALFWVLQVIMVADTVDYGEYTMNIRCESIAYSVQTLVVKAGSAFAAWFIAIVLGIIGYVPNVVQSSHTLLGMQAIMIALPTLFFALTLFLYFRYYKLNGDMLRRIQIHLLDKYRRVPENDVEPERPIVVPNQV

SEQ ID NO: 130703 - DNA, 1431 bp, Salmonella typhimurium
  CDS (1)..(1431): transl_table=11
atgagcatctctctgacaacaaagctgagttacgggttcggtgcgtttggtaaggatttcgccatcggcattgtgtatatgtacctgatgtattactacaccgatgtggtgggactttcggtcggcctcgtcggcaccctctttctggtcgcgcgaatctgggatgcgataaacgatcccatcatgggctggattgtcaacgccacgcgttcgcggtgggggaaatttaagccgtggatattgatcggcaccttaaccaattcgctggtgcttttcctgctgttcagcgcccatctttttgagggaaccgcgcaggttgtatttgtctgcgtaacctacatcctgtggggcatgacgtataccattatggatatcccattttggtcgctggtaccgactattacgcttgataagcgagaacgcgaacaactggtgccgttcccgcgtttcttcgccagtctggctggcttcgtcactgccggtataacgctgccgtttgtgagctatgttggcggggcggatcgtgggttcggctttcagatgtttacgctggtactgattgcgttctttatcgcctcgactatcgtgacattacgcaacgtacatgaggtgtactcctccgacaacggtgtaacggcaggccgcccacatctgacgttaaaaacgatcgttggattgatatacaaaaacgatcagctctcttgcctgttgggaatggcgctggcgtataacattgcctccaatattatcaatggctttgcgatctactacttcacctatgtgattggcgatgccgatctttttccctattacctttcttacgccggcgcggcgaatctgctgacgctgattgtcttcccccggctggtgaaaatgttatcgcggcggatattgtgggcgggcgcctccgtgatgcccgttctgagttgcgcagggctcttcgcgatggcgttggcggatatccataatgccgctttaatcgtggcggcgggtattttcctgaatatcgggaccgcgctcttttgggtgcttcaggtgatcatggtggcggatacggtcgattatggggaatttaagctcaatattcgctgcgagagtatcgcttattccgtacagacgatggttgtgaagggcggctcggcgtttgcggcgttctttatcgctctggtgctggggctgattggctacacgccgaacgtggcgcagtctgcgcaaaccctgcaggggatgcagtttattatgattgtcctgccggtactgtttttcatgatgacgttggttctctacttccgctactaccgtttgaacggcgatatgctgcgcaagattcagatccacctgctggataaataccggaaaacgccgccattcgtcgaacagccggatagcccggcgatttctgtggtagcgaccagcgatgtaaaagcgtga

SEQ ID NO: 130704 - protein, 476 aa, Salmonella typhimurium
MSISLTTKLSYGFGAFGKDFAIGIVYMYLMYYYTDVVGLSVGLVGTLFLVARIWDAINDPIMGWIVNATRSRWGKFKPWILIGTLTNSLVLFLLFSAHLFEGTAQVVFVCVTYILWGMTYTIMDIPFWSLVPTITLDKREREQLVPFPRFFASLAGFVTAGITLPFVSYVGGADRGFGFQMFTLVLIAFFIASTIVTLRNVHEVYSSDNGVTAGRPHLTLKTIVGLIYKNDQLSCLLGMALAYNIASNIINGFAIYYFTYVIGDADLFPYYLSYAGAANLLTLIVFPRLVKMLSRRILWAGASVMPVLSCAGLFAMALADIHNAALIVAAGIFLNIGTALFWVLQVIMVADTVDYGEFKLNIRCESIAYSVQTMVVKGGSAFAAFFIALVLGLIGYTPNVAQSAQTLQGMQFIMIVLPVLFFMMTLVLYFRYYRLNGDMLRKIQIHLLDKYRKTPPFVEQPDSPAISVVATSDVKA

SEQ ID NO: 130705 - DNA, 26 bp, Artificial sequence
  primer
atgactacaaaactcagttatggatt

SEQ ID NO: 130706 - DNA, 25 bp, Artificial sequence
  primer
ttaggctttcacatcactcactgca

SEQ ID NO: 130707 - protein, 448 aa, Artificial sequence
  consensus sequence
  Variant (3)..(3): Xaa in position 3 is any amino acid
  Variant (5)..(6): Xaa in position 5 to 6 is any amino acid
  Variant (8)..(18): Xaa in position 8 to 18 is any amino acid
  Variant (20)..(21): Xaa in position 20 to 21 is any amino acid
  Variant (23)..(23): Xaa in position 23 is any amino acid
  Variant (26)..(27): Xaa in position 26 to 27 is any amino acid
  Variant (29)..(29): Xaa in position 29 is any amino acid
  Variant (31)..(37): Xaa in position 31 to 37 is any amino acid
  Variant (38)..(40): Xaa in position 38 to 40 is any or no amino acid
  Variant (43)..(43): Xaa in position 43 is any amino acid
  Variant (46)..(47): Xaa in position 46 to 47 is any amino acid
  Variant (50)..(51): Xaa in position 50 to 51 is any amino acid
  Variant (54)..(54): Xaa in position 54 is any amino acid
  Variant (57)..(57): Xaa in position 57 is any amino acid
  Variant (59)..(61): Xaa in position 59 to 61 is any amino acid
  Variant (63)..(66): Xaa in position 63 to 66 is any amino acid
  Variant (70)..(70): Xaa in position 70 is any amino acid
  Variant (72)..(86): Xaa in position 72 to 86 is any amino acid
  Variant (87)..(87): Xaa in position 87 is any or no amino acid
  Variant (89)..(105): Xaa in position 89 to 105 is any amino acid
  Variant (107)..(107): Xaa in position 107 is any amino acid
  Variant (111)..(112): Xaa in position 111 to 112 is any amino acid
  Variant (115)..(116): Xaa in position 115 to 116 is any amino acid
  Variant (120)..(120): Xaa in position 120 is any amino acid
  Variant (123)..(132): Xaa in position 123 to 132 is any amino acid
  Variant (135)..(163): Xaa in position 135 to 163 is any amino acid
  Variant (165)..(170): Xaa in position 165 to 170 is any amino acid
  Variant (171)..(174): Xaa in position 171 to 174 is any or no amino acid
  Variant (176)..(199): Xaa in position 176 to 199 is any amino acid
  Variant (201)..(212): Xaa in position 201 to 212 is any amino acid
  Variant (213)..(218): Xaa in position 213 to 218 is any or no amino acid
  Variant (220)..(226): Xaa in position 220 to 226 is any amino acid
  Variant (229)..(230): Xaa in position 229 to 230 is any amino acid
  Variant (232)..(251): Xaa in position 232 to 251 is any amino acid
  Variant (252)..(252): Xaa in position 252 is any or no amino acid
  Variant (257)..(257): Xaa in position 257 is any amino acid
  Variant (259)..(260): Xaa in position 259 to 260 is any amino acid
  Variant (262)..(283): Xaa in position 262 to 283 is any amino acid
  Variant (284)..(284): Xaa in position 284 is any or no amino acid
  Variant (286)..(292): Xaa in position 286 to 292 is any amino acid
  Variant (294)..(321): Xaa in position 294 to 321 is any amino acid
  Variant (322)..(324): Xaa in position 322 to 324 is any or no amino acid
  Variant (326)..(341): Xaa in position 326 to 341 is any amino acid
  Variant (343)..(345): Xaa in position 343 to 345 is any amino acid
  Variant (347)..(347): Xaa in position 347 is any amino acid
  Variant (350)..(350): Xaa in position 350 is any amino acid
  Variant (355)..(360): Xaa in position 355 to 360 is any amino acid
  Variant (362)..(367): Xaa in position 362 to 367 is any amino acid
  Variant (369)..(369): Xaa in position 369 is any amino acid
  Variant (372)..(374): Xaa in position 372 to 374 is any amino acid
  Variant (376)..(378): Xaa in position 376 to 378 is any amino acid
  Variant (380)..(388): Xaa in position 380 to 388 is any amino acid
  Variant (390)..(392): Xaa in position 390 to 392 is any amino acid
  Variant (395)..(395): Xaa in position 395 is any amino acid
  Variant (398)..(399): Xaa in position 398 to 399 is any amino acid
  Variant (400)..(402): Xaa in position 400 to 402 is any or no amino acid
  Variant (405)..(406): Xaa in position 405 to 406 is any amino acid
  Variant (408)..(409): Xaa in position 408 to 409 is any amino acid
  Variant (411)..(417): Xaa in position 411 to 417 is any amino acid
  Variant (420)..(432): Xaa in position 420 to 432 is any amino acid
  Variant (433)..(433): Xaa in position 433 is any or no amino acid
  Variant (435)..(435): Xaa in position 435 is any amino acid
  Variant (437)..(447): Xaa in position 437 to 447 is any amino acid
YGXGXXGXXXXXXXXXXXLXXYXTDXXGXSXXXXXXXXXXFLXARXXDAXXDPXMGXIXXXTXXXXGKFXPXXXXXXXXXXXXXXXXFXXXXXXXXXXXXXXXXXYXLWGXXYTXXDIPXWSXXXXXXXXXXERXXXXXXXXXXXXXXXXXXXXXXXXXXXXXGXXXXXXXXXXGXXXXXXXXXXXXXXXXXXXXXXXXEXXXXXXXXXXXXXXXXXXKXXXXXXXKNXXLXXXXXXXXXXXXXXXXXXXXXIYYFXYXXGXXXXXXXXXXXXXXXXXXXXXXXPXXXXXXXRXXXXXXXXXXXXXXXXXXXXXXXXXXXXXXXIXXXXXXXXXXXXXXXXLXXXMXADXVDYGXXXXXXRXXXXXXSXQTXXXKXXXAXXXXXXXXXLXXXGYXPNXXXXXQSXXTXXGXXXXXXXLPXXXXXXXXXXXXXXYXLXXXXXXXXXXXL

SEQ ID NO: 130708 - protein, 41 aa, Artificial sequence
  protein pattern
  Variant (2)..(10): Xaa in position 2 to 10 is any amino acid
  Variant (11)..(12): Xaa in position 11 to 12 is any or no amino acid
  Variant (14)..(14): Xaa in position 14 is any amino acid
  Variant (15)..(15): Xaa in position 15 is Ala, Asn or Thr
  Variant (17)..(17): Xaa in position 17 is Leu or Pro
  Variant (18)..(18): Xaa in position 18 is Ile, Leu, Met or Val
  Variant (21)..(21): Xaa in position 21 is any amino acid
  Variant (22)..(22): Xaa in position 22 is Ile or Leu
  Variant (23)..(23): Xaa in position 23 is Ala or Val
  Variant (24)..(24): Xaa in position 24 is Asp or Asn
  Variant (25)..(25): Xaa in position 25 is any amino acid
  Variant (27)..(27): Xaa in position 27 is Lys or Arg
  Variant (28)..(28): Xaa in position 28 is Asn, Ser or Thr
  Variant (29)..(29): Xaa in position 29 is any amino acid
  Variant (30)..(30): Xaa in position 30 is Phe, Trp or Tyr
  Variant (32)..(32): Xaa in position 32 is any amino acid
  Variant (34)..(34): Xaa in position 34 is Lys or Arg
  Variant (35)..(35): Xaa in position 35 is Pro or Thr
  Variant (36)..(36): Xaa in position 36 is Trp or Tyr
  Variant (37)..(37): Xaa in position 37 is Ile or Leu
  Variant (38)..(38): Xaa in position 38 is Ala, Leu or Val
  Variant (39)..(39): Xaa in position 39 is any amino acid
  Variant (40)..(40): Xaa in position 40 is Gly or Leu
  Variant (41)..(41): Xaa in position 41 is Ala or Thr
VXXXXXXXXXXXAXXDXXMGXXXXXTXXXXGXFXXXXXXXX

SEQ ID NO: 130709 - protein, 42 aa, Artificial sequence
  protein pattern
  Variant (2)..(2): Xaa in position 2 is Ile or Leu
  Variant (3)..(3): Xaa in position 3 is any amino acid
  Variant (6)..(6): Xaa in position 6 is any or no amino acid
  Variant (8)..(8): Xaa in position 8 is any or no amino acid
  Variant (10)..(10): Xaa in position 10 is Ala or Thr
  Variant (11)..(11): Xaa in position 11 is Ile, Leu or Met
  Variant (12)..(12): Xaa in position 12 is any amino acid
  Variant (14)..(14): Xaa in position 14 is Ile or Val
  Variant (16)..(16): Xaa in position 16 is Phe or Tyr
  Variant (19)..(20): Xaa in position 19 to 20 is any amino acid
  Variant (21)..(21): Xaa in position 21 is Pro or Thr
  Variant (22)..(22): Xaa in position 22 is Ala, Asn, Thr or Val
  Variant (23)..(23): Xaa in position 23 is Ile, Leu or Met
  Variant (24)..(24): Xaa in position 24 is Ser or Thr
  Variant (25)..(25): Xaa in position 25 is any amino acid
  Variant (26)..(26): Xaa in position 26 is Asp, Glu or Ser
  Variant (27)..(28): Xaa in position 27 to 28 is any amino acid
  Variant (31)..(31): Xaa in position 31 is Ala or Glu
  Variant (32)..(33): Xaa in position 32 to 33 is any amino acid
  Variant (34)..(34): Xaa in position 34 is Ala, Ser or Val
  Variant (35)..(35): Xaa in position 35 is Pro, Thr or Val
  Variant (36)..(36): Xaa in position 36 is any amino acid
  Variant (37)..(37): Xaa in position 37 is Ala or Pro
  Variant (38)..(38): Xaa in position 38 is any amino acid
  Variant (39)..(39): Xaa in position 39 is Phe, Ile or Leu
  Variant (40)..(40): Xaa in position 40 is any amino acid
  Variant (41)..(41): Xaa in position 41 is Ala, Ser or Val
  Variant (42)..(42): Xaa in position 42 is Asn or Ser
YXXWGXTXYXXXDXPXWSXXXXXXXXXXERXXXXXXXXXXXX

SEQ ID NO: 130710 - protein, 59 aa, Artificial sequence
  protein pattern
  Variant (2)..(2): Xaa in position 2 is any amino acid
  Variant (3)..(6): Xaa in position 3 to 6 is any or no amino acid
  Variant (8)..(8): Xaa in position 8 is Ala, Gly or Ser
  Variant (9)..(14): Xaa in position 9 to 14 is any amino acid
  Variant (16)..(16): Xaa in position 16 is Ala, Cys, Asn or Ser
  Variant (17)..(17): Xaa in position 17 is Ala, Asp or Glu
  Variant (18)..(18): Xaa in position 18 is Ala, Gly or Ser
  Variant (19)..(19): Xaa in position 19 is Ile or Val
  Variant (20)..(21): Xaa in position 20 to 21 is any amino acid
  Variant (23)..(23): Xaa in position 23 is Gly, Ser, Thr or Val
  Variant (24)..(24): Xaa in position 24 is any amino acid
  Variant (25)..(25): Xaa in position 25 is Ser or Thr
  Variant (26)..(26): Xaa in position 26 is Phe, Leu or Met
  Variant (27)..(27): Xaa in position 27 is Ile, Leu or Val
  Variant (28)..(28): Xaa in position 28 is Gly, Asn, Thr or Val
  Variant (30)..(30): Xaa in position 30 is any amino acid
  Variant (31)..(31): Xaa in position 31 is Ala, Gly or Ser
  Variant (32)..(32): Xaa in position 32 is any amino acid
  Variant (34)..(34): Xaa in position 34 is any amino acid
  Variant (35)..(35): Xaa in position 35 is Ala, Gly or Ser
  Variant (36)..(36): Xaa in position 36 is Ala or Gly
  Variant (37)..(37): Xaa in position 37 is any amino acid
  Variant (38)..(38): Xaa in position 38 is Phe, Ile, Leu or Val
  Variant (39)..(39): Xaa in position 39 is any amino acid
  Variant (40)..(40): Xaa in position 40 is Ala or Gly
  Variant (41)..(41): Xaa in position 41 is Ile, Leu or Val
  Variant (42)..(42): Xaa in position 42 is any amino acid
  Variant (44)..(44): Xaa in position 44 is Gly, Ser or Thr
  Variant (45)..(45): Xaa in position 45 is any amino acid
  Variant (46)..(46): Xaa in position 46 is Ala, Ile, Leu or Val
  Variant (47)..(47): Xaa in position 47 is Gly or Asn
  Variant (49)..(49): Xaa in position 49 is any amino acid
  Variant (50)..(50): Xaa in position 50 is Ala or Pro
  Variant (52)..(53): Xaa in position 52 to 53 is any amino acid
  Variant (55)..(55): Xaa in position 55 is Asn, Ser or Thr
  Variant (56)..(57): Xaa in position 56 to 57 is any amino acid
  Variant (58)..(58): Xaa in position 58 is Ala, Ser or Thr
  Variant (59)..(59): Xaa in position 59 is Ile, Leu or Met
VXXXXXYXXXXXXXRXXXXXXSXXXXXXKXXXAXXXXXXXXXLXXXXYXXNXXQXXXXX

SEQ ID NO: 130711 - protein, 10 aa, Artificial sequence
  protein pattern
  Variant (2)..(2): Xaa in position 2 is Ile, Leu or Met
  Variant (3)..(3): Xaa in position 3 is Phe or Tyr
  Variant (5)..(5): Xaa in position 5 is any amino acid
  Variant (8)..(8): Xaa in position 8 is any or no amino acid
  Variant (10)..(10): Xaa in position 10 is Ala, Gly, Ile, Leu or Val
LXXYXTDXVX

SEQ ID NO: 130712 - protein, 15 aa, Artificial sequence
  protein pattern
  Variant (2)..(3): Xaa in position 2 to 3 is Phe or Tyr
  Variant (5)..(5): Xaa in position 5 is any amino acid
  Variant (7)..(7): Xaa in position 7 is Ala, Asn or Val
  Variant (8)..(8): Xaa in position 8 is Ile, Leu, Met or Val
  Variant (9)..(9): Xaa in position 9 is Gly or Asn
  Variant (10)..(10): Xaa in position 10 is Ala, Asp, Asn or Ser
  Variant (11)..(11): Xaa in position 11 is any amino acid
  Variant (12)..(12): Xaa in position 12 is Asp, Glu or His
  Variant (13)..(13): Xaa in position 13 is Leu or Met
  Variant (14)..(14): Xaa in position 14 is Phe or Val
  Variant (15)..(15): Xaa in position 15 is Ala, Pro or Ser
IXXFXYXXXXXXXXX

SEQ ID NO: 130713 - DNA, 2385 bp, Saccharomyces cerevisiae
  CDS (1)..(2385)
atggcagcaaaaagaggattagccaaacaaaaatctagggtaaccaaggcctgtgatagatgccataggaaaaagattaagtgcaacagtaagaagccatgttttgggtgtattgggtctcaatcaaaatgtacgtatagaaatcaatttcgtgaaccgattgaggcttttttcaattatactggtagtctcagtaatgatttggataatgctaagtgcagcatagcaaaattgaaggcacagttacctccaagcgcaccggcctctttacagaaaggcctagcaaacatttgcactgagcttgaaaaaatacaacctcagctttacctcaatctggacagtaaggaaattagctcgtatggtggcctgaaatcgatagaaacagaaattatcgggaaacagtcaaaatctttgaataggttctccaacgcttttgaaagcaatactgcacaaaatgtcagtatgtactttggggtctattcaccgttgctatattttgcctctacgggtattagctggataactaaaaaattgatttcatgttcgaatgatagggagacgagagaaactatctatttatttttgaagtttcttgacgctagctctgctagccatgctggtcctaaagtaacttcgatatctcctttagagtattattcaaagctaaacggactttcatgtgggaacgacgtacttattcaacacattatgtcaaatatatcgaatgaaatcaaaggaaatacaaacattaaccaaacaatcaaattcaataaaccaacagactggtttatgtacggagtacaattgatggaacagcaccacaaggcgttggatcgtaaaagttccaaaaaattacttcctttgaaatattttcttgagcaagatgagttgattttttgtctctgtcttgaatattttgaaagatccctattttcgacaatgtacgacttgactattttaaagggcttagtctcgttgatgaaacacagatattggatagacgatccttttgtgctgggaagaattatttccacgatgtccaggcgaagtttggatgctggtttgaatcgttgggaatattatattggtcaggatgaggacactgccgaagaatatcgtaagttatggtgggactgctactggtgggatagatggtattcattggtcaccggtaagcagccattgataccacatgaaatgacttcgtgtctctttcccaaggatgtggttggattaggggtagatgattcgatggactgttttactttaataaacttggtggagctcgacccaagtaagtttgatatttgtatctctttcggctatattctattaacgaaaattattacagcggtattctctggtttgctttataatcgacactttacagactacagattatttgcaactcctaacgctaaagacctaaatggaaccgcacgacagcttatggtagagttttcaaaaatatgtaaaatttttcagtgcatacaagacaaactaatccctttcctcaaacaatattctgaaaatagtaatgtatttgaactatacacccatttcggatttgcaaaggtttgttgttttcagggaatggagagtttaattttaaggatacaaaatcttctacaagaaagagagagaattgaacttgattcctgcgtaaaggacatcaggcttcaaacctttgaagcatctgtagatattttgacggatgttctcaagcacgaagatacgttctatattttccgttgttcgtggttcatatatgccatcttgatgaatattaccttgaattttatcgagacccctagaaggaactcgatatgttatttatccttgatgtgccgcatgatagcctcatataatgacttatttgtgagctctggcaatgttaatttcaagggcaacaacgccttctctaaaaagttggaaaatggaacagcggtttctttcatcctaacacgcatctgctgtcagatgtacacacgttcacagaaaatggctaaggaatcgctgttttgtgaattgaaaaaatatggccaggcttgctcagatgctggtcaagctgcgttggacattgaatgtatctggtacaggaatattataggcgaacacaaagaatcaagcttccgtaaagaaattctcagcattcttgatagggaaatgggtgatttggtgaataatagagttattggcgtacagggaaaaaatcaagaaggtgcttgttatgagaagttgtcacccagcagcaccagtgtttcagttggcatggacttttgtagcctcgaaaattttgtgactgcagaatctctaccagaccttctcaatctattttgggaggacactgaatttggtattactaaagaaaacctcggagagtaa

SEQ ID NO: 130714 - protein, 794 aa, Saccharomyces cerevisiae
MAAKRGLAKQKSRVTKACDRCHRKKIKCNSKKPCFGCIGSQSKCTYRNQFREPIEAFFNYTGSLSNDLDNAKCSIAKLKAQLPPSAPASLQKGLANICTELEKIQPQLYLNLDSKEISSYGGLKSIETEIIGKQSKSLNRFSNAFESNTAQNVSMYFGVYSPLLYFASTGISWITKKLISCSNDRETRETIYLFLKFLDASSASHAGPKVTSISPLEYYSKLNGLSCGNDVLIQHIMSNISNEIKGNTNINQTIKFNKPTDWFMYGVQLMEQHHKALDRKSSKKLLPLKYFLEQDELIFCLCLEYFERSLFSTMYDLTILKGLVSLMKHRYWIDDPFVLGRIISTMSRRSLDAGLNRWEYYIGQDEDTAEEYRKLWWDCYWWDRWYSLVTGKQPLIPHEMTSCLFPKDVVGLGVDDSMDCFTLINLVELDPSKFDICISFGYILLTKIITAVFSGLLYNRHFTDYRLFATPNAKDLNGTARQLMVEFSKICKIFQCIQDKLIPFLKQYSENSNVFELYTHFGFAKVCCFQGMESLILRIQNLLQERERIELDSCVKDIRLQTFEASVDILTDVLKHEDTFYIFRCSWFIYAILMNITLNFIETPRRNSICYLSLMCRMIASYNDLFVSSGNVNFKGNNAFSKKLENGTAVSFILTRICCQMYTRSQKMAKESLFCELKKYGQACSDAGQAALDIECIWYRNIIGEHKESSFRKEILSILDREMGDLVNNRVIGVQGKNQEGACYEKLSPSSTSVSVGMDFCSLENFVTAESLPDLLNLFWEDTEFGITKENLGE

SEQ ID NO: 130715 - DNA, 2175 bp, Zygosaccharomyces rouxii CBS 732
  CDS (1)..(2175)
atggagaccaagcacaaagctaaagtgaaaagggcatgtcagatatgtcgaagaaggaaaataagatgtgatggatatttaccatgttctagctgtgtatctctaaagaaagaatgtaattaccatgactctgcaggaattaagaagccacctctgaattccaagaaaatccaaatgtatcgggaattggatagtattttggatgcattttctaaactcaaatcttcacacccattaaatacggaaattatgtcgtcaggtttattacaaatggagggaatactgaatggctacagaaagcaactggatctattgcctgatctacaaaccttaagttcctacggtgaaaatgaatcttttgaacgacatctatttgattcggaaaatttgaaattaggaaaaaccgacaagcgtgaagtcagtccgtatttcggtttatacaacccagcatgcttagaatcagttgattgttttgcttggatactcaagaagctcgatttgaagaggaacgattcaaaatatgtgatattcttctttctaaaatacttagatctcgcagtcaagtcttatgaaaaacttctggtgttgagttcatctccctctgaatggctttcttctagattgaaaatctcggaaaatccacctaagcaagtctatttggtcatcgagggattactcaaagaattgccttttgaattggatctctccgcaagacctttcgaactagtttgcaactttctcacaaaaatgcggcgattcaactctgatgcacccaaagaactggtaagtttaaaaaagcgtctcatacaagaggagcttattctcacaactggctacctttccttcatgccaactattttttccgaaatgcacgacatcggtatggtgtccaacattctttcatttttggaagcaacacattggcagatgctaccccaatccattggtcgattcgttgctgaagttgtcagaagatgccttgatttgggattgagtcgatgggagtactattgtactttgaatgagcatcaagctgaacatcgtcgaaaaatctggtggaaatgtttttggtgggatagatggtattcactaattagtggaaaaccgttcttaattgatgaaaactgcgtattgtgtctgtttcccagatgtatagcagaattaggcgctcggaattcaatgtctcctagagaactgttggatctttttcagcctgatgaggaaaacctgttcttctacattattttgtcaaagatcattaccaaagtttttggtggtatcgcatacaatcaaaaatatacaggaagtttacaacattctgaaacccttttgcatgacttgttggaagactgcgggacaataatcactctttttgatatccttggggaaaaatttcatcttttctccaagaaaacgacagactatgaacatctttctttgaaatttgcttacaattacacacaggttgcttgtatatcgacaatagagaatgtatttcggagattggaaaaagggccatatcttcccattgtccaaagaaatagcactatttgtcaacaaatgttacttcatgttgtccaaattgatgctcctaatttgatgtacctctttgctggtcctattaccaattttctggtgatactgaaatttaatctttcggagcaaaaagccgaattgtacgacctgacgatcctttgtagagttgcaaaactcttcgaggagcttgatgagggaactgacgaagcctatttttatgtgaattcttttaaagtaatgtcttttagggcgtatattacagtgaggatctgtctcgattatcacatgtgtgattcaaaagtttccaaatcggaattaatcggtgcaatatcgacatttgatttggaggcgtcacaaatgtgcataagactgttagataaaaattcagggttatttgaccctctgctaaaaaattctgacatgagcaatttccatttctctttacttggacactttaaaaaagagataggcccaaatttttctgagaacattcaaaatatactcgaggaagattccagaattttcttcgatcaatttaaccttttccaaagcatccaagaaatgcccatgactgggtctgacgaattagacgcccttttaaactgcgacctatccctagacaatttaaaagatatatga

SEQ ID NO: 130716 - protein, 724 aa, Zygosaccharomyces rouxii CBS 732
METKHKAKVKRACQICRRRKIRCDGYLPCSSCVSLKKECNYHDSAGIKKPPLNSKKIQMYRELDSILDAFSKLKSSHPLNTEIMSSGLLQMEGILNGYRKQLDLLPDLQTLSSYGENESFERHLFDSENLKLGKTDKREVSPYFGLYNPACLESVDCFAWILKKLDLKRNDSKYVIFFFLKYLDLAVKSYEKLLVLSSSPSEWLSSRLKISENPPKQVYLVIEGLLKELPFELDLSARPFELVCNFLTKMRRFNSDAPKELVSLKKRLIQEELILTTGYLSFMPTIFSEMHDIGMVSNILSFLEATHWQMLPQSIGRFVAEVVRRCLDLGLSRWEYYCTLNEHQAEHRRKIWWKCFWWDRWYSLISGKPFLIDENCVLCLFPRCIAELGARNSMSPRELLDLFQPDEENLFFYIILSKIITKVFGGIAYNQKYTGSLQHSETLLHDLLEDCGTIITLFDILGEKFHLFSKKTTDYEHLSLKFAYNYTQVACISTIENVFRRLEKGPYLPIVQRNSTICQQMLLHVVQIDAPNLMYLFAGPITNFLVILKFNLSEQKAELYDLTILCRVAKLFEELDEGTDEAYFYVNSFKVMSFRAYITVRICLDYHMCDSKVSKSELIGAISTFDLEASQMCIRLLDKNSGLFDPLLKNSDMSNFHFSLLGHFKKEIGPNFSENIQNILEEDSRIFFDQFNLFQSIQEMPMTGSDELDALLNCDLSLDNLKDI

SEQ ID NO: 130717 - DNA, 2454 bp, Lachancea thermotolerans CBS 6340
  CDS (1)..(2454)
atgcgttatgtggagagtagaagcggataccttcttttggatcatgcatataaagccaaatgtatggctcaggactcaaggccccctcaggtcatggctacaccaagggtaacaaagagggcatatactatacgtaagactccccaagcatgcataagttgccgaagaagaaaagtcaaatgtaacggctgcagaccgtgttctagttgtaaaactaatgggcttgagtgcgcgtacgacacgccatctctagagcaggttaatatcaaaggcaagcctcacatagatacaagcgaggctctcaggttgatcagcaacctacattcgactctcaggaacttgtcctccctcgcacaagatgatcctggtagtatgtctagtactgtcactgacatatcgatgagggtccacgatctggaaagcaggctccatatgcagcttaatccatataaagctgcaaactgccgaggagagaaaagcttggaatataagctggcttcgttcgggcccgcgaaggtgggttatgaagaaaacccaaactctccggtcgagcccgctttgtctctaggccgtttccacggcctttactcgcctctatcaatgctgtcccttgataatctcgaaaagatatttgaaaaagttcatgaagaactaagtcctgcgaaagtgcaggaagcttttttcttgctcggaagatactttgatttggctactgttggttaccagcaaactttggcacttcatagatcaccgataagaacgtgtgcccagcatttcgggttgaaaggctcctcatcttctgaagctatctacgacaaacttcttgaacttatcccgcttgaattacgccaagcccacttacaaagcgagaaacaaaaagacgctggctcaagatggcgctttgttgctctttctgaattattccaagatcattgtcgcaacggaaagagtcttgatgtgtcgtctgcaactactgccgagctatggcgctttttcgaagtgtacagcgtgatctcaattctgagtaccgaacagcttcaaaaagattggttctcagagttttttagcatggagcattttgaatgtttgttgaactacatagaatgccgtgtttcgtttgatcaaaccttgattctagggagagttgtttgcttcttggttcgatttgccatagataatggccttaatcggtgggaattctaccataatcttaaagaatcagaggcagaccatcatagaaagctctggtggaaatgttattggtgggataagttttatgccgttagtcatggtaaattgcctttgctaagagacgaggaatctgtttgtttgtttcctcgttgcgttatggcactgggcgtcgaggattctatgagttgcgaaacactcattgaaagagtctctctgaaaggggcaagttccgacgcagcatcactttttggatatatttttatggggaaaatgatagaaagagcctccagaaatctactttttgcgcgaaagtatacaacctaccaaatgtcaggttcaaagtttggaagtagcgcaacagaagtcgttaattctttgaaatctgattaccaagacactattgcattaattaccagctttagacgtcttttttccgattctgagccctctgatgtaccgaaaccttcatcaaaatggaccgttatcattgaatactgttatttgtgcttgctccttgcatttgagaagcttatccttagattaagcaaaacaacaaacagtgctagagatctcgcatcatctattgaggactgtcaaacgcgatatatcgaatgtgccagggctaacctgctacgcggcacgcgagtgggttcggcgccagtattttgcgcacttatgataccaaattacacttcatttcttgtcgtttcagattgctatatcaatcatcgcggggagaattctgactttgacatatctgtcttgtgtttctttgcatcacttttgatgaggattggcggtggcgagggtcttgatcaacagcatctgcgccaatttcttcaaccgcgcattcaggctggtcaagcaatatctctcgttatttgcagaatctgcctacaactctatttaaaaaggtcgcaacatctgtttggtaatgagcttccgactgaagtgaaggaacttgatcaaaagctgaatgaattttgctctaagacgcttgatagcaattctgacctttggcgcttgtttgaaaccaagtccaagaagaaatcgttgtaccacgaaacattcactacgtttatgaagaaaaagggttggtcaattgataagcatgatattccggctgaaagtaaagatacaccagagcacagtagtgcgactgaatttactacagtactgtcaagtatgtttaatgaagacatatggggatttcagtttgatgagcaagacttgatgccatttttgtatcacgacacaaactag

SEQ ID NO: 130718 - protein, 817 aa, Lachancea thermotolerans CBS 6340
MRYVESRSGYLLLDHAYKAKCMAQDSRPPQVMATPRVTKRAYTIRKTPQACISCRRRKVKCNGCRPCSSCKTNGLECAYDTPSLEQVNIKGKPHIDTSEALRLISNLHSTLRNLSSLAQDDPGSMSSTVTDISMRVHDLESRLHMQLNPYKAANCRGEKSLEYKLASFGPAKVGYEENPNSPVEPALSLGRFHGLYSPLSMLSLDNLEKIFEKVHEELSPAKVQEAFFLLGRYFDLATVGYQQTLALHRSPIRTCAQHFGLKGSSSSEAIYDKLLELIPLELRQAHLQSEKQKDAGSRWRFVALSELFQDHCRNGKSLDVSSATTAELWRFFEVYSVISILSTEQLQKDWFSEFFSMEHFECLLNYIECRVSFDQTLILGRVVCFLVRFAIDNGLNRWEFYHNLKESEADHHRKLWWKCYWWDKFYAVSHGKLPLLRDEESVCLFPRCVMALGVEDSMSCETLIERVSLKGASSDAASLFGYIFMGKMIERASRNLLFARKYTTYQMSGSKFGSSATEVVNSLKSDYQDTIALITSFRRLFSDSEPSDVPKPSSKWTVIIEYCYLCLLLAFEKLILRLSKTTNSARDLASSIEDCQTRYIECARANLLRGTRVGSAPVFCALMIPNYTSFLVVSDCYINHRGENSDFDISVLCFFASLLMRIGGGEGLDQQHLRQFLQPRIQAGQAISLVICRICLQLYLKRSQHLFGNELPTEVKELDQKLNEFCSKTLDSNSDLWRLFETKSKKKSLYHETFTTFMKKKGWSIDKHDIPAESKDTPEHSSATEFTTVLSSMFNEDIWGFQFDEQDLMPFLYHDTN

SEQ ID NO: 130719 - DNA, 2508 bp, Candida glabrata CBS 138
  CDS (1)..(2508)
atggcaccaccactcgcgaagaaagccaaactggctgggaaggatagagtaataagagcatgtgatgtttgcaggaagcggaaagtaaaatgtgatggagatcaaccatgttcttcatgcatgacagcaagcactgtctgtatttacaacggggtcgctttcccccatgtcaagtcattctatcacagggataacgacttatatagggagttaaggctgctgtacaaaagtgcaaaagcactatcaagaaatgagaagattaaggcgtctggtcagctttgtaaaaccttaacagagatcgaaaacagtatatcaaacttgcaatcacaggtagatttggatattaacgatgaaactatagcagattatgatggggagggatcgttagaaaggcaatttattgaaaccagtaccgtacgtttgaacaggtttagcaatgtagacatgacaaaaaataatgtacctaacattaccccatacttcggtatatattctacattggcgatattttctaaatatggtttcagttggatgtttaaaaagctcatgtcatactcgaataacacttctacaagagagaccatgtatatatatatgaagtttttggatatggctcaattgcattatgaagaggatatcaatcaaaagactacacctattgagtggtgtttcgataagtacgctgttaattgtgattgtaaaactttggatggattgtttgctatattaaacatccaagttaaccccaccaaaaatgatgatattctgaccaaagatgtttatgaagagttagccaggagacccatagaatttttttcaaaacttattgagtatgcatgggaaacttgttatctatattatactggagtcggacaatcatttcaaatgtcttcaaaaatatttgaattggaggatataatgacatgtttagcattggaattctccagtaaaattctctatgcggacatgcaccatgagatcattatacccgcaacactacgttgggtaaggatatgtcactggcatgaagaactttacacagtaggaaaattccttgcgtgtgcaataaggagggcattggatttgggcttgaattcatgggaatattatatatcacttcctgaagtagctgccgagaagaatagattaatatggtgggaatgttattggtgggataaatggttttcattatctgctggtaagtcgcctcttatcgatgatgcaaaaattacatgcctgttgccccgaaggttgatggaatctggtttggatgaatctatgacatgcctggaaatgatggaaaggtgtaatttcagacatatgagtgaatcggagattagaatttttgggtatattatgcttggaaaatatattgagtatattaactcagagatattatttaagaaggagtatactgattatcggctttttgcatctgttaagaaacctattgatgttacaattaataaattttatgatgaatatagatctgcgattgatttattgaataaaatggaaaattttttcgtatcgttaacgggagttgatgtagacactgacgaattaactgaatttatgacctattttattgagacaaaaatgaaatgtttaatagccatgggaagtttgatatatcgattgaaaggtgttgaggttagtggctcagaactattagataagtgtttgaaaatttctctcacaaatatctaccaatgctccttaactggactgagaagagtctctaactttaattcatttctaattgaaaggtatcttttgcatattaatttaatgatactcaatctaatgctaagcattattgagtcgccagaaaatgagcctgtggaaaatattctgctgatgtgcaatgttgtacatttgttaggtaatgctaatgctttgaaaaattgttctaacagcaagaatatgcccttatccgaactgatatgtaggcaaagtctttccctatcttatatttgctgtagggtttacgttcaattggctgtgaaaagaaactcatctatttctgaagaagaaattttacgagttcttcaacgtagtaatccacattttgctacaatctataatcaattaaacgacatcagttcagatatttttaagtcactgttagagttaaacgttgctggatcttatcaagcccatttgatagatcatttccgagaaatgatgggtgataaaatactacaaaagatgaaacagttagaatccgaagtacagagttcggctacaccttctagtattgaggctacatccactgtgtcttcgactgtacatcaagaccacatagacacgaattataaaatgaatggggggccagcacaagaattacaagatgtcacattcgaggcattgcttaattcagattcatttgcctcggtttatacggactttcttgaaagtttggatttaaggaagccttctggtaatgatacgatgccaagtttaagtcttgatcatcatgcagatatgaacaacccgtctttatga

SEQ ID NO: 130720 - protein, 835 aa, Candida glabrata CBS 138
MAPPLAKKAKLAGKDRVIRACDVCRKRKVKCDGDQPCSSCMTASTVCIYNGVAFPHVKSFYHRDNDLYRELRLLYKSAKALSRNEKIKASGQLCKTLTEIENSISNLQSQVDLDINDETIADYDGEGSLERQFIETSTVRLNRFSNVDMTKNNVPNITPYFGIYSTLAIFSKYGFSWMFKKLMSYSNNTSTRETMYIYMKFLDMAQLHYEEDINQKTTPIEWCFDKYAVNCDCKTLDGLFAILNIQVNPTKNDDILTKDVYEELARRPIEFFSKLIEYAWETCYLYYTGVGQSFQMSSKIFELEDIMTCLALEFSSKILYADMHHEIIIPATLRWVRICHWHEELYTVGKFLACAIRRALDLGLNSWEYYISLPEVAAEKNRLIWWECYWWDKWFSLSAGKSPLIDDAKITCLLPRRLMESGLDESMTCLEMMERCNFRHMSESEIRIFGYIMLGKYIEYINSEILFKKEYTDYRLFASVKKPIDVTINKFYDEYRSAIDLLNKMENFFVSLTGVDVDTDELTEFMTYFIETKMKCLIAMGSLIYRLKGVEVSGSELLDKCLKISLTNIYQCSLTGLRRVSNFNSFLIERYLLHINLMILNLMLSIIESPENEPVENILLMCNVVHLLGNANALKNCSNSKNMPLSELICRQSLSLSYICCRVYVQLAVKRNSSISEEEILRVLQRSNPHFATIYNQLNDISSDIFKSLLELNVAGSYQAHLIDHFREMMGDKILQKMKQLESEVQSSATPSSIEATSTVSSTVHQDHIDTNYKMNGGPAQELQDVTFEALLNSDSFASVYTDFLESLDLRKPSGNDTMPSLSLDHHADMNNPSL

SEQ ID NO: 130721 - DNA, 2385 bp, Saccharomyces cerevisiae (strain YJM789)
  CDS (1)..(2385)
atggcagcaaaaagaggattagccaaacaaaaatctagggtaaccaaagcctgtgatagatgccataggaaaaagattaagtgcaacagtaagaagccatgttttgggtgtattgggtctcaatcaaaatgtacgtatagaaatcaatttcgtgaaccgattgaggtttttttcaattatactggtagtctcagtaatgatttggataatgctaagtgcagcatagcaaaattgaaggctcagttacctccaagcgcaccggcctctttacagaaaggcctagcaaacatttgcactgagcttgaaaaaataaatcctcagctttacctcaatctggacagtaaggaaattagctcatatggtggcctgaaatcgatagaaacagaaattatcgggaaacagtcaaaatctttgaataggttctccaacgcttttgaaagcaatactgcacagaatgtcagtatgtactttggggtctattcaccgttgctatattttgcctctacgggtattagctggataactaaaaaattgatttcatgttcgaatgatagggagacgagagaaactatctatttatttttgaagtttcttgacgctagctctgctagccatgctggtcctaaagtaacttcgatatctcctttagagtattattcaaagctaaacggactttcatgtgggaacgacgtacttattcaacacattatgtcaaatatatcgaatgaaatcaaaggaaatacaaacattaaccaaacaatcaaattcaataaaccaacagactggtttatgtacggagtacagttgatggaacagcaccacaaggcgttggatcgtaaaagttccaaaaaattacttcctttgaaatattttcttgagcaagatgagttgattttttgtctctgtcttgaatattttgaaagatccctattttcgacaatgtacgacttgactattttaaagggcttagtctcgttgatgaaacacagatattggatagacgatccttttctgctgggaagaattatttccacgatgtccaggcgaagtttggatgctggtttaaatcgttgggaatattatattggtcaggatgaggacactgccgaagaatatcgtaagttatggtgggactgctactggtgggatagatggtattcattggtcaccggtaagcagccattgatacctcatgaaatgacttcgtgtctctttcccaaggatgtggttggattaggggtagatgattcgatggactgttttactttaataaacttggtggagctcgacccaagtaagtttgatatttgtatctctttcggctatattctattaacgaaaattattacagcggtattctctggtttgctttataatcgacactttacagactacagattatttgcaactcctaatgctaaagacctaaatggaaccgcacgacagcttatggtagagttttcaaaaatatgtaaaatttttcagtgcatacaagacaaactaatccctttcctcaaacaatattctgaaaacagtaatgtatttgaactatacacccatttcggatttgcaaaggtttgttgttttcagggaatggagagtttgattttaaggatacaaaatcttttacaagaaagagagaggattgaatttgattcctgcgtaaaggacatcaggcttcaaacctttgaagcatctgtagatattttgacggatgttctcaagcacgaagatacgttctatattttccgttgttcgtggttcatatatgccatcttgatgaatattaccttgaattttatcgagacccctagaaggaactcgatatgttatttatccttgatgtgccgcatgatagcctcatacaatgacttatttgtgagctctggtaatgttaatttcaagggcaacaacgccttctctaaaaagttggaaaatggaacagcagtttctttcatcctaacacgcatctgctgtcagatgtacacacgttcacagaaaatggctaaggaatcgctattttgtgaattgaaaaaatatggccaggcttgctcagatgctggtcaagctgcgttggacattgaatgtatctggtacaggaatattataggcgaacacaaagaatcaagcttccgtaaagaaattctcagcattcttgatagggaaatgggtgatttggtgaataatagagttattggcgtacagggaaaaaatcaagaaggtgcttgttatgagaaattgtcacccagcagcaccagtgtttcagttggcatggacttttgtagcctcgaaaattttgtgactgcagaatctctaccagaccttctcaatctattttgggaggacactgaatttggtattactaaagaaaacctcggagagtaa

SEQ ID NO: 130722 - protein, 794 aa, Saccharomyces cerevisiae (strain YJM789)
MAAKRGLAKQKSRVTKACDRCHRKKIKCNSKKPCFGCIGSQSKCTYRNQFREPIEVFFNYTGSLSNDLDNAKCSIAKLKAQLPPSAPASLQKGLANICTELEKINPQLYLNLDSKEISSYGGLKSIETEIIGKQSKSLNRFSNAFESNTAQNVSMYFGVYSPLLYFASTGISWITKKLISCSNDRETRETIYLFLKFLDASSASHAGPKVTSISPLEYYSKLNGLSCGNDVLIQHIMSNISNEIKGNTNINQTIKFNKPTDWFMYGVQLMEQHHKALDRKSSKKLLPLKYFLEQDELIFCLCLEYFERSLFSTMYDLTILKGLVSLMKHRYWIDDPFLLGRIISTMSRRSLDAGLNRWEYYIGQDEDTAEEYRKLWWDCYWWDRWYSLVTGKQPLIPHEMTSCLFPKDVVGLGVDDSMDCFTLINLVELDPSKFDICISFGYILLTKIITAVFSGLLYNRHFTDYRLFATPNAKDLNGTARQLMVEFSKICKIFQCIQDKLIPFLKQYSENSNVFELYTHFGFAKVCCFQGMESLILRIQNLLQERERIEFDSCVKDIRLQTFEASVDILTDVLKHEDTFYIFRCSWFIYAILMNITLNFIETPRRNSICYLSLMCRMIASYNDLFVSSGNVNFKGNNAFSKKLENGTAVSFILTRICCQMYTRSQKMAKESLFCELKKYGQACSDAGQAALDIECIWYRNIIGEHKESSFRKEILSILDREMGDLVNNRVIGVQGKNQEGACYEKLSPSSTSVSVGMDFCSLENFVTAESLPDLLNLFWEDTEFGITKENLGE

SEQ ID NO: 130723 - DNA, 2385 bp, Saccharomyces cerevisiae (strain RM11-1a)
  CDS (1)..(2385)
atggcagcaaaaagaggattagccaaacaaaaatctagggtaaccaaagcctgtgatagatgccataggaaaaagattaagtgcaacagtaagaagccatgttttgggtgtattgggtctcaatcaaaatgtacgtatagaaatcaatttcgtgaaccgattgaggtttttttcaattatactggtagtctcagtaatgatttggataatgctaagtgcagcatagcaaaattgaaggctcagttacctccaagcgcaccggcctctttacagaaaggcctagcaaacatttgcactgagcttgaaaaaataaatcctcagctttacctcaatctggacagtaaggaaattagctcatatggtggcctgaaatcgatagaaacagaaattatcgggaaacagtcaaaatctttgaataggttctccaacgcttttgaaagcaatactgcacagaatgtcagtatgtactttggggtctattcaccgttgctatattttgcctctacgggtattagctggataactaaaaaattgatttcatgttcgaatgatagggagacgagagaaactatctatttatttttgaagtttcttgacgctagctctgctagccatgctggtcctaaagtaacttcgatatctcctttagagtattattcaaagctaaacggactttcatgtgggaacgacgtacttattcaacacattatgtcaaatatatcgaatgaaatcaaaggaaatacaaacattaaccaaacaatcaaattcaataaaccaacagactggtttatgtacggagtacagttgatggaacagcaccacaaggcgttggatcgtaaaagttccaaaaaattacttcctttgaaatattttcttgagcaagatgagttgattttttgtctctgtcttgaatattttgaaagatccctattttcgacaatgtacgacttgactattttaaagggcttagtctcgttgatgaaacacagatattggatagacgatccttttgtgctgggaagaattatttccacgatgtccaggcgaagtttggatgctggtttaaatcgttgggaatattatattggtcaggatgaggacactgccgaagaatatcgtaagttatggtgggactgctactggtgggatagatggtattcattggtcaccggtaagcagccattgataccacatgaaatgacttcgtgtctctttcccaaggatgtggttggattaggggtagatgattcgatggactgttttactttaataaagttggtggagctcgacccaagtaagtttgatatttgtatctctttcggctatattctattaacgaaaattattacagcggtattctctggtttgctttataatcgacactttacagactacagattatttgcaactcctaatgctaaagacctaaatggaaccgcacgacagcttatggtagagttttcaaaaatatgtaaaatttttcagtgcatacaagacaaactaatccctttcctcaaacaatattctgaaaacagtaatgtatttgaactatacacccatttcggatttgcaaaggtttgttgttttcagggaatggagagtttgattttaaggatacaaaatcttttacaagaaagagagaggattgaatttgattcctgcgtaaaggacatcaggcttcaaacctttgaagcatctgtagatattttgacggatgttctcaagcacgaagatacgttctatattttccgttgttcgtggttcatatatgccatcttgatgaatattaccttgaattttatcgagacccctagaaggaactcgatatgttatttatccttgatgtgccgcatgatagcctcatacaatgacttatttgtgagctctggtaatgttaatttcaagggcaacaacgccttctctaaaaagttggaaaatggaacagcagtttctttcatcctaacacgcatctgctgtcagatgtacacacgttcacagaaaatggctaaggaatcgctattttgtgaattgaaaaaatatggccaggcttgctcagatgctggtcaagctgcgttggacattgaatgtatctggtacaggaatattataggcgaacacaaagaatcaagcttccgtaaagaaattctcagcattcttgatagggaaatgggtgatttggtgaataatagagttattggcgtacagggaaaaaatcaagaaggtgcttgttatgagaaattgtcacccagcagcaccagtgtttcagttggcatggacttttgtagcctcgaaaattttgtgactgcagaatctctaccagaccttctcaatctattttgggaggacactgaatttggtattactaaagaaaacctcggagagtaa

SEQ ID NO: 130724 - protein, 794 aa, Saccharomyces cerevisiae (strain RM11-1a)
MAAKRGLAKQKSRVTKACDRCHRKKIKCNSKKPCFGCIGSQSKCTYRNQFREPIEVFFNYTGSLSNDLDNAKCSIAKLKAQLPPSAPASLQKGLANICTELEKINPQLYLNLDSKEISSYGGLKSIETEIIGKQSKSLNRFSNAFESNTAQNVSMYFGVYSPLLYFASTGISWITKKLISCSNDRETRETIYLFLKFLDASSASHAGPKVTSISPLEYYSKLNGLSCGNDVLIQHIMSNISNEIKGNTNINQTIKFNKPTDWFMYGVQLMEQHHKALDRKSSKKLLPLKYFLEQDELIFCLCLEYFERSLFSTMYDLTILKGLVSLMKHRYWIDDPFVLGRIISTMSRRSLDAGLNRWEYYIGQDEDTAEEYRKLWWDCYWWDRWYSLVTGKQPLIPHEMTSCLFPKDVVGLGVDDSMDCFTLIKLVELDPSKFDICISFGYILLTKIITAVFSGLLYNRHFTDYRLFATPNAKDLNGTARQLMVEFSKICKIFQCIQDKLIPFLKQYSENSNVFELYTHFGFAKVCCFQGMESLILRIQNLLQERERIEFDSCVKDIRLQTFEASVDILTDVLKHEDTFYIFRCSWFIYAILMNITLNFIETPRRNSICYLSLMCRMIASYNDLFVSSGNVNFKGNNAFSKKLENGTAVSFILTRICCQMYTRSQKMAKESLFCELKKYGQACSDAGQAALDIECIWYRNIIGEHKESSFRKEILSILDREMGDLVNNRVIGVQGKNQEGACYEKLSPSSTSVSVGMDFCSLENFVTAESLPDLLNLFWEDTEFGITKENLGE

SEQ ID NO: 130725 - DNA, 2385 bp, Saccharomyces cerevisiae (strain AWRI1631)
  CDS (1)..(2385)
atggcagcaaaaagaggattagccaaacaaaaatctagggtaaccaaagcctgtgatagatgccataggaaaaagattaagtgcaacagtaagaagccatgttttgggtgtattgggtctcaatcaaaatgtacgtatagaaatcaatttcgtgaaccgattgaggcttttttcaattatactggtagtctcagtaatgatttggataatgctaagtgcagcatagcaaaattgaaggctcagttacctccaagcgcaccggcctctttacagaaaggcctagcaaacatttgcactgagcttgaaaaaataaatcctcagctttacctcaatctggacagtaaggaaattagctcatatggtggcctgaaatcgatagaaacagaaattatcgggaaacagtcaaaatctttgaataggttctccaacgcttttgaaagcaatactgcacagaatgtcagtatgtactttggggtctattcaccgttgctatattttgcctctacgggtattagctggataactaaaaaattgatttcatgttcgaatgatagggagacgagagaaactatctatttatttttgaagtttcttgacgctagctctgctagccatgctggtcctaaagtaacttcgatatctcctttagagtattattcaaagctaaacggactttcatgtgggaacgacgtacttattcaacacattatgtcaaatatatcgaatgaaatcaaaggaaatacaaacattaaccaaacaatcaaattcaataaaccaacagactggtttatgtacggagtacagttgatggaacagcaccacaaggcgttggatcgtaaaagttccaaaaaattacttcctttgaaatattttcttgagcaagatgagttgattttttgtctctgtcttgaatattttgaaagatccctattttcgacaatgtacgacttgactattttaaagggcttagtctcgttgatgaaacacagatattggatagacgatccttttgtgctgggaagaattatttccacgatgtccaggcgaagtttggatgctggtttaaatcgttgggaatattatattggtcaggatgaggacactgccgaagaatatcgtaagttatggtgggactgctactggtgggatagatggtattcattggtcaccggtaagcagccattgataccacatgaaatgacttcgtgtctctttcccaaggatgtggttggattaggggtagatgattcgatggactgttttactttaataaacttggtggagctcgacccaagtaagtttgatatttgtatctctttcggctatattctattaacgaaaattattacagcggtattctctggtttgctttataatcgacactttacagactacagattatttgcaactcctaatgctaaagacctaaatggaaccgcacgacagcttatggtagagttttcaaaaatatgtaaaatttttcagtgcatacaagacaaactaatccctttcctcaaacaatattctgaaaacagtaatgtatttgaactatacacccatttcggatttgcaaaggtttgttgttttcagggaatggagagtttgattttaaggatacaaaatcttttacaagaaagagagaggattgaatttgattcctgcgtaaaggacatcaggcttcaaacctttgaagcatctgtagatattttgacggatgttctcaagcacgaagatacgttctatattttccgttgttcgtggttcatatatgccatcttgatgaatattaccttgaattttatcgagacccctagaaggaactcgatatgttatttatccttgatgtgccgcatgatagcctcatacaatgacttatttgtgagctctggtaatgttaatttcaagggcaacaacgccttctctaaaaagttggaaaatggaacagcagtttctttcatcctaacacgcatctgctgtcagatgtacacacgttcacagaaaatggctaaggaatcgctattttgtgaattgaaaaaatatggccaggcttgctcagatgctggtcaagctgcgttggacattgaatgtatctggtacaggaatattataggcgaacacaaagaatcaagcttccgtaaagaaattctcagcattcttgatagggaaatgggtgatttggtgaataatagagttattggcgtacagggaaaaaatcaagaaggtgcttgttatgagaaattgtcacccagcagcaccagtgtttcagttggcatggacttttgtagcctcgaaaattttgtgactgcagaatctctaccagaccttctcaatctattttgggaggacactgaatttggtattactaaagaaaacctcggagagtaa

SEQ ID NO: 130726 - protein, 794 aa, Saccharomyces cerevisiae (strain AWRI1631)
MAAKRGLAKQKSRVTKACDRCHRKKIKCNSKKPCFGCIGSQSKCTYRNQFREPIEAFFNYTGSLSNDLDNAKCSIAKLKAQLPPSAPASLQKGLANICTELEKINPQLYLNLDSKEISSYGGLKSIETEIIGKQSKSLNRFSNAFESNTAQNVSMYFGVYSPLLYFASTGISWITKKLISCSNDRETRETIYLFLKFLDASSASHAGPKVTSISPLEYYSKLNGLSCGNDVLIQHIMSNISNEIKGNTNINQTIKFNKPTDWFMYGVQLMEQHHKALDRKSSKKLLPLKYFLEQDELIFCLCLEYFERSLFSTMYDLTILKGLVSLMKHRYWIDDPFVLGRIISTMSRRSLDAGLNRWEYYIGQDEDTAEEYRKLWWDCYWWDRWYSLVTGKQPLIPHEMTSCLFPKDVVGLGVDDSMDCFTLINLVELDPSKFDICISFGYILLTKIITAVFSGLLYNRHFTDYRLFATPNAKDLNGTARQLMVEFSKICKIFQCIQDKLIPFLKQYSENSNVFELYTHFGFAKVCCFQGMESLILRIQNLLQERERIEFDSCVKDIRLQTFEASVDILTDVLKHEDTFYIFRCSWFIYAILMNITLNFIETPRRNSICYLSLMCRMIASYNDLFVSSGNVNFKGNNAFSKKLENGTAVSFILTRICCQMYTRSQKMAKESLFCELKKYGQACSDAGQAALDIECIWYRNIIGEHKESSFRKEILSILDREMGDLVNNRVIGVQGKNQEGACYEKLSPSSTSVSVGMDFCSLENFVTAESLPDLLNLFWEDTEFGITKENLGE

SEQ ID NO: 130727 - DNA, 2385 bp, Saccharomyces cerevisiae (strain JAY291)
  CDS (1)..(2385)
atggcagcaaaaagaggattagccaaacaaaaatctagggtaaccaaagcctgtgatatatgccataggaaaaagattaagtgcaacagtaagaagccatgttttgggtgtattgggtctcaatcaaaatgtacgtatagaaatcaatttcgtgaaccgattgaggcttttttcaattatactggtagtctcagtaatgatttggataatgctaagtgcagcatagcaaaattgaaggctcagttacctccaagcgcaccggcctctttacagaaaggcctagcaaacatttgcactgagcttgaaaaaatacaacctcagctttacctcaatctggacagtaaggaaattagctcgtatggtggcctgaaatcgatagaaacagaaattatcgggaaacagtcaaaatctttgaataggttctccaacgcttttgaaagcaatactgcacagaatgtcagtatgtactttggggtctattcaccgttgctatattttgcctctacgggtattagctggataactaaaaaattgatttcatgttcgaatgatagggagacgagagaaactatctatttatttttgaagtttcttgacgctagctctgctagccatgctggtcctaaagtaacttcgatatctcctttagagtattattcaaagctaaacggactttcatgtgggaacgacgtacttattcaacacattatgtcaaatatatcgaatgaaatcaaaggaaatacaaacattaaccaaacaatcaaattcaataaaccaacagactggtttatgtacggagtacagttgatggaacagcaccacaaggcgttggatcgtaaaagttccaaaaaattacttcctttgaaatattttcttgagcaagatgagttgattttttgtctctgtcttgaatattttgaaagatccctattttcgacaatgtacgacttgactattttaaagggcttagtctcgttgatgaaacacagatattggatagacgatccttttgtgctgggaagaattatttccacgatgtccaggcgaagtttggatgctggtttaaatcgttgggaatattatattggtcaggatgaggacactgccgaagaatatcgtaagttatggtgggactgctactggtgggatagatggtattcattggtcaccggtaagcagccattgatacctcatgaaatgacttcgtgtctctttcccaaggatgtggttggattaggggtagatgattcgatggactgttttactttaataaacttggtggagctcgacccaagtaagtttgatatttgtatctctttcggctatattctattaacgaaaattattacagcggtattctctggtttgctttataatcgacactttacagactacagattatttgcaactcctaatgctaaagacctaaatggaaccgcacgacagcttatggtagagttttcaaaaatatgtaaaatttttcagtgcatacaagacaaactaatccctttcctcaaacaatattctgaaaacagtaatgtatttgaactatacacccatttcggatttgcaaaggtttgttgttttcagggaatggagagtttgattttaaggatacaaaatcttttacaagaaagagagaggattgaacttgattcctgcgtaaaggacatcaggcttcaaacctttgaagcatctgtagatattttgacggatgttctcaagcacgaagatacgttctatattttccgttgttcgtggttcatatatgccatcttgatgaatattaccttgaattttatcgagacccctagaaggaactcgatatgttatttatccttgatgtgccgcatgatagcctcatacaatgacttatttgtgagctctggtaatgttaatttcaagggcaacaacgccttctctaaaaagttggaaaatggaacagcagtttctttcatcctaacacgcatctgctgtcagatgtacacacgttcacagaaaatggctaaggaatcgctattttgtgaattgaaaaaatatggccaggcttgctcagatgctggtcaagctgcgttggacattgaatgtatctggtacaggaatattataggcgaacacaaagaatcaagcttccgtaaagaaattctcagcattcttgatagggaaatgggtgatttggtgaataatagagttattggcgtacagggaaaaaatcaagaaggtgcttgttatgagaaattgtcacccagcagcaccagtgtttcagttggcatggacttttgtagcctcgaaaattttgtgactgcagaatctctaccagaccttctcaatctattttgggaggacactgaatttggtattactaaagaaaacctcggagagtaa

SEQ ID NO: 130728 - protein, 794 aa, Saccharomyces cerevisiae (strain JAY291)
MAAKRGLAKQKSRVTKACDICHRKKIKCNSKKPCFGCIGSQSKCTYRNQFREPIEAFFNYTGSLSNDLDNAKCSIAKLKAQLPPSAPASLQKGLANICTELEKIQPQLYLNLDSKEISSYGGLKSIETEIIGKQSKSLNRFSNAFESNTAQNVSMYFGVYSPLLYFASTGISWITKKLISCSNDRETRETIYLFLKFLDASSASHAGPKVTSISPLEYYSKLNGLSCGNDVLIQHIMSNISNEIKGNTNINQTIKFNKPTDWFMYGVQLMEQHHKALDRKSSKKLLPLKYFLEQDELIFCLCLEYFERSLFSTMYDLTILKGLVSLMKHRYWIDDPFVLGRIISTMSRRSLDAGLNRWEYYIGQDEDTAEEYRKLWWDCYWWDRWYSLVTGKQPLIPHEMTSCLFPKDVVGLGVDDSMDCFTLINLVELDPSKFDICISFGYILLTKIITAVFSGLLYNRHFTDYRLFATPNAKDLNGTARQLMVEFSKICKIFQCIQDKLIPFLKQYSENSNVFELYTHFGFAKVCCFQGMESLILRIQNLLQERERIELDSCVKDIRLQTFEASVDILTDVLKHEDTFYIFRCSWFIYAILMNITLNFIETPRRNSICYLSLMCRMIASYNDLFVSSGNVNFKGNNAFSKKLENGTAVSFILTRICCQMYTRSQKMAKESLFCELKKYGQACSDAGQAALDIECIWYRNIIGEHKESSFRKEILSILDREMGDLVNNRVIGVQGKNQEGACYEKLSPSSTSVSVGMDFCSLENFVTAESLPDLLNLFWEDTEFGITKENLGE

SEQ ID NO: 130729 - DNA, 2385 bp, Saccharomyces cerevisiae (strain Lalvin EC1118 / Prise de mousse)
  CDS (1)..(2385)
atggcagcaaaaagaggattagccaaacaaaaatctagggtaaccaaagcctgtgatagatgccataggaaaaagattaagtgcaacagtaagaagccatgttttgggtgtattgggtctcaatcaaaatgtacgtatagaaatcaatttcgtgaaccgattgaggcttttttcaattatactggtagtctcagtaatgatttggataatgctaagtgcagcatagcaaaattgaaggctcagttacctccaagcgcaccggcctctttacagaaaggcctagcaaacatttgcactgagcttgaaaaaataaatcctcagctttacctcaatctggacagtaaggaaattagctcatatggtggcctgaaatcgatagaaacagaaattatcgggaaacagtcaaaatctttgaataggttctccaacgcttttgaaagcaatactgcacagaatgtcagtatgtactttggggtctattcaccgttgctatattttgcctctacgggtattagctggataactaaaaaattgatttcatgttcgaatgatagggagacgagagaaactatctatttatttttgaagtttcttgacgctagctctgctagccatgctggtcctaaagtaacttcgatatctcctttagagtattattcaaagctaaacggactttcatgtgggaacgacgtacttattcaacacattatgtcaaatatatcgaatgaaagcaaaggaaatacaaacattaaccaaacaatcaaattcaataaaccaacagactggtttatgtacggagtacagttgatggaacagcaccacaaggcgttggatcgtaaaagttccaaaaaattacttcctttgaaatattttcttgagcaagatgagttgattttttgtctctgtcttgaatattttgaaagatccctattttcgacaatgtacgacttgactattttaaagggcttagtctcgttgatgaaacacagatattggatagacgatccttttgtgctgggaagaattatttccacgatgtccaggcgaagtttggatgctggtttaaatcgttgggaatattatattggtcaggatgaggacactgccgaagaatatcgtaagttatggtgggactgctactggtgggatagatggtattcattggtcaccggtaagcagccattgataccacatgaaatgacttcgtgtctctttcccaaggatgtggttggattaggggtagatgattcgatggactgttttactttaataaacttggtggagctcgacccaagtaagtttgatatttgtatctctttcggctatattctattaacgaaaattattacagcggtattctctggtttgctttataatcgacactttacagactacagattatttgcaactcctaatgctaaagacctaaatggaaccgcacgacagcttatggtagagttttcaaaaatatgtaaaatttttcagtgcatacaagacaaactaatccctttcctcaaacaatattctgaaaacagtaatgtatttgaactatacacccatttcggatttgcaaaggtttgttgttttcagggaatggagagtttgattttaaggatacaaaatcttttacaagaaagagagaggattgaatttgattcctgcgtaaaggacatcaggcttcaaacctttgaagcatctgtagatattttgacggatgttctcaagcacgaagatacgttctatattttccgttgttcgtggttcatatatgccatcttgatgaatattaccttgaattttatcgagacccctagaaggaactcgatatgttatttatccttgatgtgccgcatgatagcctcatacaatgacttatttgtgagctctggtaatgttaatttcaagggcaacaacgccttctctaaaaagttggaaaatggaacagcagtttctttcatcctaacacgcatctgctgtcagatgtacacacgttcacagaaaatggctaaggaatcgctattttgtgaattgaaaaaatatggccaggcttgctcagatgctggtcaagctgcgttggacattgaatgtatctggtacaggaatattataggcgaacacaaagaatcaagcttccgtaaagaaattctcagcattcttgatagggaaatgggtgatttggtgaataatagagttattggcgtacagggaaaaaatcaagaaggtgcttgttatgagaaattgtcacccagcagcaccagtgtttcagttggcatggacttttgtagcctcgaaaattttgtgactgcagaatctctaccagaccttctcaatctattttgggaggacactgaatttggtattactaaagaaaacctcggagagtaa

SEQ ID NO: 130730 - protein, 794 aa, Saccharomyces cerevisiae (strain Lalvin EC1118 / Prise de mousse)
MAAKRGLAKQKSRVTKACDRCHRKKIKCNSKKPCFGCIGSQSKCTYRNQFREPIEAFFNYTGSLSNDLDNAKCSIAKLKAQLPPSAPASLQKGLANICTELEKINPQLYLNLDSKEISSYGGLKSIETEIIGKQSKSLNRFSNAFESNTAQNVSMYFGVYSPLLYFASTGISWITKKLISCSNDRETRETIYLFLKFLDASSASHAGPKVTSISPLEYYSKLNGLSCGNDVLIQHIMSNISNESKGNTNINQTIKFNKPTDWFMYGVQLMEQHHKALDRKSSKKLLPLKYFLEQDELIFCLCLEYFERSLFSTMYDLTILKGLVSLMKHRYWIDDPFVLGRIISTMSRRSLDAGLNRWEYYIGQDEDTAEEYRKLWWDCYWWDRWYSLVTGKQPLIPHEMTSCLFPKDVVGLGVDDSMDCFTLINLVELDPSKFDICISFGYILLTKIITAVFSGLLYNRHFTDYRLFATPNAKDLNGTARQLMVEFSKICKIFQCIQDKLIPFLKQYSENSNVFELYTHFGFAKVCCFQGMESLILRIQNLLQERERIEFDSCVKDIRLQTFEASVDILTDVLKHEDTFYIFRCSWFIYAILMNITLNFIETPRRNSICYLSLMCRMIASYNDLFVSSGNVNFKGNNAFSKKLENGTAVSFILTRICCQMYTRSQKMAKESLFCELKKYGQACSDAGQAALDIECIWYRNIIGEHKESSFRKEILSILDREMGDLVNNRVIGVQGKNQEGACYEKLSPSSTSVSVGMDFCSLENFVTAESLPDLLNLFWEDTEFGITKENLGE

SEQ ID NO: 130731 - DNA, 24 bp, Artificial sequence
  primer
atggcagcaaaaagaggattagcc

SEQ ID NO: 130732 - DNA, 25 bp, Artificial sequence
  primer
ttactctccgaggttttctttagta

SEQ ID NO: 130733 - protein, 754 aa, Artificial sequence
  consensus sequence
  Variant (2)..(3): Xaa in position 2 to 3 is any amino acid
  Variant (5)..(6): Xaa in position 5 to 6 is any amino acid
  Variant (9)..(10): Xaa in position 9 to 10 is any amino acid
  Variant (12)..(12): Xaa in position 12 is any amino acid
  Variant (14)..(14): Xaa in position 14 is any amino acid
  Variant (16)..(16): Xaa in position 16 is any amino acid
  Variant (19)..(22): Xaa in position 19 to 22 is any amino acid
  Variant (25)..(26): Xaa in position 25 to 26 is any amino acid
  Variant (28)..(33): Xaa in position 28 to 33 is any amino acid
  Variant (35)..(35): Xaa in position 35 is any amino acid
  Variant (37)..(57): Xaa in position 37 to 57 is any amino acid
  Variant (59)..(67): Xaa in position 59 to 67 is any amino acid
  Variant (69)..(82): Xaa in position 69 to 82 is any amino acid
  Variant (83)..(85): Xaa in position 83 to 85 is any or no amino acid
  Variant (87)..(88): Xaa in position 87 to 88 is any amino acid
  Variant (90)..(98): Xaa in position 90 to 98 is any amino acid
  Variant (101)..(101): Xaa in position 101 is any amino acid
  Variant (103)..(111): Xaa in position 103 to 111 is any amino acid
  Variant (113)..(113): Xaa in position 113 is any amino acid
  Variant (115)..(116): Xaa in position 115 to 116 is any amino acid
  Variant (118)..(118): Xaa in position 118 is any amino acid
  Variant (120)..(129): Xaa in position 120 to 129 is any amino acid
  Variant (131)..(134): Xaa in position 131 to 134 is any amino acid
  Variant (136)..(141): Xaa in position 136 to 141 is any amino acid
  Variant (142)..(148): Xaa in position 142 to 148 is any or no amino acid
  Variant (152)..(152): Xaa in position 152 is any amino acid
  Variant (157)..(165): Xaa in position 157 to 165 is any amino acid
  Variant (168)..(168): Xaa in position 168 is any amino acid
  Variant (172)..(175): Xaa in position 172 to 175 is any amino acid
  Variant (177)..(179): Xaa in position 177 to 179 is any amino acid
  Variant (180)..(181): Xaa in position 180 to 181 is any or no amino acid
  Variant (183)..(188): Xaa in position 183 to 188 is any amino acid
  Variant (190)..(190): Xaa in position 190 is any amino acid
  Variant (193)..(206): Xaa in position 193 to 206 is any amino acid
  Variant (209)..(209): Xaa in position 209 is any amino acid
  Variant (211)..(246): Xaa in position 211 to 246 is any amino acid
  Variant (247)..(256): Xaa in position 247 to 256 is any or no amino acid
  Variant (258)..(281): Xaa in position 258 to 281 is any amino acid
  Variant (282)..(285): Xaa in position 282 to 285 is any or no amino acid
  Variant (287)..(290): Xaa in position 287 to 290 is any amino acid
  Variant (292)..(295): Xaa in position 292 to 295 is any amino acid
  Variant (297)..(298): Xaa in position 297 to 298 is any amino acid
  Variant (300)..(301): Xaa in position 300 to 301 is any amino acid
  Variant (303)..(308): Xaa in position 303 to 308 is any amino acid
  Variant (311)..(311): Xaa in position 311 is any amino acid
  Variant (313)..(329): Xaa in position 313 to 329 is any amino acid
  Variant (331)..(337): Xaa in position 331 to 337 is any amino acid
  Variant (340)..(345): Xaa in position 340 to 345 is any amino acid
  Variant (348)..(348): Xaa in position 348 is any amino acid
  Variant (351)..(351): Xaa in position 351 is any amino acid
  Variant (360)..(363): Xaa in position 360 to 363 is any amino acid
  Variant (365)..(366): Xaa in position 365 to 366 is any amino acid
  Variant (369)..(370): Xaa in position 369 to 370 is any amino acid
  Variant (373)..(373): Xaa in position 373 is any amino acid
  Variant (376)..(376): Xaa in position 376 is any amino acid
  Variant (382)..(382): Xaa in position 382 is any amino acid
  Variant (387)..(388): Xaa in position 387 to 388 is any amino acid
  Variant (391)..(391): Xaa in position 391 is any amino acid
  Variant (395)..(400): Xaa in position 395 to 400 is any amino acid
  Variant (405)..(409): Xaa in position 405 to 409 is any amino acid
  Variant (412)..(414): Xaa in position 412 to 414 is any amino acid
  Variant (417)..(417): Xaa in position 417 is any amino acid
  Variant (419)..(420): Xaa in position 419 to 420 is any amino acid
  Variant (422)..(432): Xaa in position 422 to 432 is any amino acid
  Variant (433)..(437): Xaa in position 433 to 437 is any or no amino acid
  Variant (442)..(442): Xaa in position 442 is any amino acid
  Variant (444)..(444): Xaa in position 444 is any amino acid
  Variant (446)..(446): Xaa in position 446 is any amino acid
  Variant (448)..(454): Xaa in position 448 to 454 is any amino acid
  Variant (456)..(460): Xaa in position 456 to 460 is any amino acid
  Variant (462)..(462): Xaa in position 462 is any amino acid
  Variant (464)..(474): Xaa in position 464 to 474 is any amino acid
  Variant (475)..(480): Xaa in position 475 to 480 is any or no amino acid
  Variant (482)..(524): Xaa in position 482 to 524 is any amino acid
  Variant (525)..(525): Xaa in position 525 is any or no amino acid
  Variant (527)..(530): Xaa in position 527 to 530 is any amino acid
  Variant (532)..(532): Xaa in position 532 is any amino acid
  Variant (535)..(535): Xaa in position 535 is any amino acid
  Variant (537)..(556): Xaa in position 537 to 556 is any amino acid
  Variant (557)..(567): Xaa in position 557 to 567 is any or no amino acid
  Variant (569)..(570): Xaa in position 569 to 570 is any amino acid
  Variant (572)..(585): Xaa in position 572 to 585 is any amino acid
  Variant (586)..(586): Xaa in position 586 is any or no amino acid
  Variant (588)..(598): Xaa in position 588 to 598 is any amino acid
  Variant (601)..(611): Xaa in position 601 to 611 is any amino acid
  Variant (612)..(613): Xaa in position 612 to 613 is any or no amino acid
  Variant (615)..(643): Xaa in position 615 to 643 is any amino acid
  Variant (644)..(648): Xaa in position 644 to 648 is any or no amino acid
  Variant (650)..(650): Xaa in position 650 is any amino acid
  Variant (652)..(653): Xaa in position 652 to 653 is any amino acid
  Variant (657)..(657): Xaa in position 657 is any amino acid
  Variant (659)..(670): Xaa in position 659 to 670 is any amino acid
  Variant (671)..(671): Xaa in position 671 is any or no amino acid
  Variant (673)..(690): Xaa in position 673 to 690 is any amino acid
  Variant (693)..(708): Xaa in position 693 to 708 is any amino acid
  Variant (710)..(722): Xaa in position 710 to 722 is any amino acid
  Variant (724)..(748): Xaa in position 724 to 748 is any amino acid
  Variant (749)..(750): Xaa in position 749 to 750 is any or no amino acid
  Variant (752)..(753): Xaa in position 752 to 753 is any amino acid
KXXVXXACXXCXRXKXKCXXXXPCXXCXXXXXXCXYXXXXXXXXXXXXXXXXXXXXXLXXXXXXXXXLXXXXXXXXXXXXXXXXXLXXIXXXXXXXXXQLXLXXXXXXXXXYXGXXSXEXXXXXXXXXXLXXXXNXXXXXXXXXXXXXYFGXYSPLXXXXXXXXXWIXKKLXXXXNXXXXXEXXXXXXKXLDXXXXXXXXXXXXXXSPXEXXXXXXXXXXXXXXXXXXXXXXXXXXXXXXXXXXXXXXXXXXXXXXPXXXXXXXXXXXXXXXXXXXXXXXXXXXXLXXXXEXXXXIXXLXXEXXXXXXFSXMXXXXXXXXXXXXXXXXXWXXXXXXXGRXXXXXXRRXLDXGLNRWEYYXXXXEXXAEXXRKXWWXCYWWDXWYSLXXGKXPLIXXXXXXCLFPXXXXXLGXXXSMXCXXLXXXXXXXXXXXXXXXXFGYIXLXKXIXXXXXXXLXXXXXTXYXXXXXXXXXXXXXXXXXLXXXXXXXXXXXXXXXXXXXXXXXXXXXXXXXXXXXXXXXXXXXXCXXXXEXLIXRXXXXXXXXXXXXXXXXXXXXXXXXXXXXXXXLXXVXXXXXXXXXXXXXXXIXXXXXXXXXXXIEXXXXXXXXXXXXXCXXXXXXXXXXXXXXXXXXXXXXXXXXXXXXXXXXSXIXXRICXQXXXXXXXXXXXXXLXXXXXXXXXXXXXXXXXXLDXXXXXXXXXXXXXXXXSXXXXXXXXXXXXXGXXXXXXXXXXXXXXXXXXXXXXXXXXXTXXS

SEQ ID NO: 130734 - protein, 61 aa, Artificial sequence
  protein pattern
  Variant (3)..(3): Xaa in position 3 is Ala, Cys or Ser
  Variant (6)..(6): Xaa in position 6 is Ala or Leu
  Variant (9)..(9): Xaa in position 9 is Asn or Ser
  Variant (10)..(10): Xaa in position 10 is Arg or Ser
  Variant (15)..(15): Xaa in position 15 is any amino acid
  Variant (16)..(16): Xaa in position 16 is Gly, Ser or Thr
  Variant (17)..(17): Xaa in position 17 is any amino acid
  Variant (18)..(18): Xaa in position 18 is Asp, Asn or Pro
  Variant (20)..(20): Xaa in position 20 is any amino acid
  Variant (21)..(21): Xaa in position 21 is Ala, Gln or Thr
  Variant (24)..(24): Xaa in position 24 is Glu, His or Lys
  Variant (25)..(25): Xaa in position 25 is any amino acid
  Variant (27)..(27): Xaa in position 27 is any amino acid
  Variant (28)..(28): Xaa in position 28 is Ile or Leu
  Variant (31)..(31): Xaa in position 31 is Asp, Glu or Lys
  Variant (33)..(33): Xaa in position 33 is Phe or Tyr
  Variant (37)..(37): Xaa in position 37 is Lys or Arg
  Variant (39)..(39): Xaa in position 39 is Phe or Tyr
  Variant (42)..(42): Xaa in position 42 is any amino acid
  Variant (43)..(43): Xaa in position 43 is Ala, Ser or Thr
  Variant (46)..(46): Xaa in position 46 is any or no amino acid
  Variant (48)..(48): Xaa in position 48 is any or no amino acid
  Variant (51)..(51): Xaa in position 51 is Asp or Pro
  Variant (52)..(52): Xaa in position 52 is Asp, Glu or His
  Variant (53)..(53): Xaa in position 53 is Ala, Glu or Asn
  Variant (54)..(56): Xaa in position 54 to 56 is any amino acid
  Variant (59)..(59): Xaa in position 59 is Phe or Leu
  Variant (61)..(61): Xaa in position 61 is Lys or Arg
RRXLDXGLXXWEYYXXXXEXXAEXXRXXWWXCXWWDXWXSLXXGKXPXLIXXXXXXCLXPX

SEQ ID NO: 130735 - protein, 37 aa, Artificial sequence
  protein pattern
  Variant (2)..(4): Xaa in position 2 to 4 is any or no amino acid
  Variant (7)..(8): Xaa in position 7 to 8 is any amino acid
  Variant (10)..(10): Xaa in position 10 is His or Arg
  Variant (12)..(12): Xaa in position 12 is Lys or Arg
  Variant (14)..(14): Xaa in position 14 is Ile or Val
  Variant (15)..(15): Xaa in position 15 is Lys or Arg
  Variant (17)..(17): Xaa in position 17 is Asp or Asn
  Variant (18)..(18): Xaa in position 18 is Gly or Ser
  Variant (19)..(20): Xaa in position 19 to 20 is any amino acid
  Variant (23)..(23): Xaa in position 23 is any amino acid
  Variant (24)..(24): Xaa in position 24 is Gly or Ser
  Variant (26)..(26): Xaa in position 26 is any amino acid
  Variant (27)..(27): Xaa in position 27 is Gly, Ser or Thr
  Variant (28)..(30): Xaa in position 28 to 30 is any amino acid
  Variant (31)..(31): Xaa in position 31 is Glu or Lys
  Variant (33)..(33): Xaa in position 33 is Ala, Asn or Thr
  Variant (35)..(35): Xaa in position 35 is Asp, His or Arg
  Variant (36)..(36): Xaa in position 36 is Asp, Asn or Thr
  Variant (37)..(37): Xaa in position 37 is Pro, Gln or Ser
KXXXACXXCXRXKXXCXXXXPCXXCXXXXXXCXYXXX

SEQ ID NO: 130736 - protein, 31 aa, Artificial sequence
  protein pattern
  Variant (5)..(5): Xaa in position 5 is Phe, Leu or Met
  Variant (6)..(6): Xaa in position 6 is Leu or Met
  Variant (7)..(7): Xaa in position 7 is Gly or Thr
  Variant (9)..(9): Xaa in position 9 is any or no amino acid
  Variant (11)..(12): Xaa in position 11 to 12 is any amino acid
  Variant (13)..(13): Xaa in position 13 is Ala, Ile or Val
  Variant (14)..(14): Xaa in position 14 is any amino acid
  Variant (15)..(15): Xaa in position 15 is Arg or Ser
  Variant (16)..(16): Xaa in position 16 is Glu, Gly or Asn
  Variant (17)..(17): Xaa in position 17 is Ile or Leu
  Variant (19)..(23): Xaa in position 19 to 23 is any amino acid
  Variant (25)..(25): Xaa in position 25 is Asp or Thr
  Variant (27)..(27): Xaa in position 27 is Gln or Arg
  Variant (28)..(28): Xaa in position 28 is Leu or Met
  Variant (29)..(29): Xaa in position 29 is any amino acid
  Variant (30)..(30): Xaa in position 30 is Ala or Gly
  Variant (31)..(31): Xaa in position 31 is Ser or Thr
FGYIXXXKXIXXXXXXXLXXXXXTXYXXXXX

SEQ ID NO: 130737 - protein, 19 aa, Artificial sequence
  protein pattern
  Variant (2)..(4): Xaa in position 2 to 4 is any amino acid
  Variant (5)..(5): Xaa in position 5 is any or no amino acid
  Variant (7)..(8): Xaa in position 7 to 8 is any amino acid
  Variant (9)..(11): Xaa in position 9 to 11 is any or no amino acid
  Variant (15)..(15): Xaa in position 15 is Ile, Leu or Val
  Variant (17)..(17): Xaa in position 17 is Asn or Ser
  Variant (18)..(18): Xaa in position 18 is Pro or Thr
  Variant (19)..(19): Xaa in position 19 is Ala or Leu
TXXXXVXXXXXYFGXYXXX

SEQ ID NO: 130738 - protein, 17 aa, Artificial sequence
  protein pattern
  Variant (3)..(3): Xaa in position 3 is Ala or Val
  Variant (4)..(4): Xaa in position 4 is Asp, Glu or Arg
  Variant (5)..(5): Xaa in position 5 is Asp or Asn
  Variant (8)..(8): Xaa in position 8 is Asp or Ser
  Variant (9)..(9): Xaa in position 9 is Cys or Pro
  Variant (10)..(10): Xaa in position 10 is any amino acid
  Variant (11)..(11): Xaa in position 11 is Glu or Thr
  Variant (13)..(13): Xaa in position 13 is Ile or Leu
  Variant (14)..(15): Xaa in position 14 to 15 is any amino acid
  Variant (16)..(16): Xaa in position 16 is Phe or Val
  Variant (17)..(17): Xaa in position 17 is Glu, Gln or Ser
LGXXXSMXXXXLXXXXX

SEQ ID NO: 130739 - protein, 12 aa, Artificial sequence
  protein pattern
  Variant (2)..(2): Xaa in position 2 is Phe or Leu
  Variant (3)..(3): Xaa in position 3 is any amino acid
  Variant (4)..(4): Xaa in position 4 is Ile or Leu
  Variant (5)..(5): Xaa in position 5 is Cys, Ser or Thr
  Variant (6)..(6): Xaa in position 6 is any amino acid
  Variant (9)..(9): Xaa in position 9 is any amino acid
  Variant (10)..(10): Xaa in position 10 is Gln or Arg
  Variant (11)..(11): Xaa in position 11 is Leu, Met or Val
SXXXXXICXXXY

SEQ ID NO: 130740 - protein, 20 aa, Artificial sequence
  protein pattern
  Variant (2)..(7): Xaa in position 2 to 7 is any amino acid
  Variant (8)..(9): Xaa in position 8 to 9 is any or no amino acid
  Variant (11)..(11): Xaa in position 11 is Phe, Ile or Leu
  Variant (12)..(12): Xaa in position 12 is any amino acid
  Variant (13)..(13): Xaa in position 13 is Ala, Gly or Thr
  Variant (14)..(14): Xaa in position 14 is Ile or Met
  Variant (15)..(15): Xaa in position 15 is Glu or Gly
  Variant (16)..(16): Xaa in position 16 is Asn or Ser
  Variant (17)..(17): Xaa in position 17 is Leu or Val
  Variant (18)..(18): Xaa in position 18 is Phe or Ile
  Variant (19)..(19): Xaa in position 19 is any amino acid
FXXXXXXXXCXXXXXXXXXR

SEQ ID NO: 130741 - protein, 17 aa, Artificial sequence
  protein pattern
  Variant (2)..(2): Xaa in position 2 is Gln, Ser or Thr
  Variant (3)..(4): Xaa in position 3 to 4 is any amino acid
  Variant (5)..(5): Xaa in position 5 is Gly or Ser
  Variant (6)..(6): Xaa in position 6 is Ile, Leu or Pro
  Variant (7)..(7): Xaa in position 7 is Glu or Lys
  Variant (8)..(8): Xaa in position 8 is Ala, Gly or Val
  Variant (9)..(9): Xaa in position 9 is Ser or Thr
  Variant (11)..(11): Xaa in position 11 is any amino acid
  Variant (12)..(12): Xaa in position 12 is any or no amino acid
  Variant (14)..(14): Xaa in position 14 is Glu, Pro or Ser
  Variant (15)..(16): Xaa in position 15 to 16 is any amino acid
  Variant (17)..(17): Xaa in position 17 is His or Tyr
AXXXXXXXXSXXSXXXX

SEQ ID NO: 130742 - DNA, 1398 bp, Saccharomyces cerevisiae
  CDS (1)..(1398)
atgcttgggatcacgtatgccgttaactctacaaagcaattgatattttgctgcctcaaatatctcacactactaggatatattcttttatcaaacaggaaaaaagggcagcgtaccaacatgtataaaagggttattagcatttctggtttattaaagactggagtcaaacgtttttcttctgtctattgcaaaacaaccatcaacaacaagtttacatttgcaacaactaatagtcaaataagaaaaatgtcttccgttactgggttttacattccaccaatctctttctttggtgaaggtgctttagaagaaaccgctgattacatcaaaaacaaggattacaaaaaggctttgatcgttactgatcctggtattgcagctattggtctctccggtagagtccaaaagatgttggaagaacgtgacttaaacgttgctatctatgacaaaactcaaccaaacccaaatattgccaatgtcacagctggtttgaaggttttgaaggaacaaaactctgaaattgttgtttccattggtggtggttctgctcacgacaatgctaaggccattgctttattggctactaacggtggggaaatcggagactatgaaggtgtcaatcaatctaagaaggctgctttaccactatttgccatcaacactactgctggtactgcttccgaaatgaccagattcactattatctctaatgaagaaaagaaaatcaagatggctatcattgacaacaacgtcactccagctgttgctgtcaacgatccatctaccatgtttggtttgccacctgctttgactgctgctactggtctagatgctttgactcactgtatcgaagcttatgtttccaccgcctctaacccaatcaccgatgcctgtgctttgaagggtattgatttgatcaatgaaagcttagtcgctgcatacaaagacggtaaagacaagaaggccagaactgacatgtgttacgctgaatacttggcaggtatggctttcaacaatgcttctctaggttatgttcatgcccttgctcatcaacttggtggtttctaccacttgcctcatggtgtttgtaacgctgtcttgttgcctcatgttcaagaggccaacatgcaatgtccaaaggccaagaagagattaggtgaaattgctttgcatttcggtgcttctcaagaagatccagaagaaaccatcaaggctttgcacgttttaaacagaaccatgaacattccaagaaacttgaaagaattaggtgttaaaaccgaagattttgaaattttggctgaacacgccatgcatgatgcctgccatttgactaacccagttcaattcaccaaagaacaagtggttgccattatcaagaaagcctatgaatattaa

SEQ ID NO: 130743 - protein, 465 aa, Saccharomyces cerevisiae
MLGITYAVNSTKQLIFCCLKYLTLLGYILLSNRKKGQRTNMYKRVISISGLLKTGVKRFSSVYCKTTINNKFTFATTNSQIRKMSSVTGFYIPPISFFGEGALEETADYIKNKDYKKALIVTDPGIAAIGLSGRVQKMLEERDLNVAIYDKTQPNPNIANVTAGLKVLKEQNSEIVVSIGGGSAHDNAKAIALLATNGGEIGDYEGVNQSKKAALPLFAINTTAGTASEMTRFTIISNEEKKIKMAIIDNNVTPAVAVNDPSTMFGLPPALTAATGLDALTHCIEAYVSTASNPITDACALKGIDLINESLVAAYKDGKDKKARTDMCYAEYLAGMAFNNASLGYVHALAHQLGGFYHLPHGVCNAVLLPHVQEANMQCPKAKKRLGEIALHFGASQEDPEETIKALHVLNRTMNIPRNLKELGVKTEDFEILAEHAMHDACHLTNPVQFTKEQVVAIIKKAYEY

SEQ ID NO: 130744 - DNA, 1146 bp, Clostridium difficile 630
  CDS (1)..(1146): transl_table=11
atgagcatttattatgtaccaccaataaatttacttgggaaaggatgtcttaatgaagctaaagattcaattaaatcattaggaactaaaaaagcatttattgttagtgataaatttctagtttcaaatggtactgtaaaaaaagtaacagatattttatctcagatagatatagactttgttgtttatgatgaagttaaacaaaatccaactgtaactaatgtgaataaaggacttaaaatattaaaatcagaaaattgcgacttcgttataactataggaggtggttctccacaagactgtggtaaagctatctctatattagccactaatggaggagatattagagactatgaaggtatcaacaaaacttctaaaaaatgtcttcctatcatagctataactactactgctggtacatctgctgaagttacaataaactatgttataactgatgaagacagacatgtaaagatgataatggttgataccaattcactagccacaatgacagtaaatgacccagaattaatgattagcaaaccatctaatttaacagcagcaactggtatggatgcactaactcatgctatagaagctgtagtagctaatggtgcttatgatgttacagattcaactgccttatatgctataaagcagatatttaaataccttccaagagctgttaaaaatggtaatgacatagaagctagagaacaaatgtgttatgcttgttttttaaatggaattgcctttagtaatgcaggtcttggaaatgtacatgctatggctcatcaattaggaggtttatatgatttacctcatggagtatgtaatgccatgctacttccaatagttgaggaggaaaatgctaaatcagcccctgccaaattccgaccaatagctgaagttattggaatggatgtaaataataaatcagataaagagtgtgttgactttgtaatagataagataaaagctctttctgaagaggttggaatcccaaaatctttaaaagatgtaggtgttgataatcctaattttgaattgcttgcagaaaactctatgaaagatgcttgtgctggtgctaatcctgttttctttgataaagataagattatagaattgtttatgaaaatatcttaa

SEQ ID NO: 130745 - protein, 381 aa, Clostridium difficile 630
MSIYYVPPINLLGKGCLNEAKDSIKSLGTKKAFIVSDKFLVSNGTVKKVTDILSQIDIDFVVYDEVKQNPTVTNVNKGLKILKSENCDFVITIGGGSPQDCGKAISILATNGGDIRDYEGINKTSKKCLPIIAITTTAGTSAEVTINYVITDEDRHVKMIMVDTNSLATMTVNDPELMISKPSNLTAATGMDALTHAIEAVVANGAYDVTDSTALYAIKQIFKYLPRAVKNGNDIEAREQMCYACFLNGIAFSNAGLGNVHAMAHQLGGLYDLPHGVCNAMLLPIVEEENAKSAPAKFRPIAEVIGMDVNNKSDKECVDFVIDKIKALSEEVGIPKSLKDVGVDNPNFELLAENSMKDACAGANPVFFDKDKIIELFMKIS

SEQ ID NO: 130746 - DNA, 1152 bp, Escherichia coli O157:H7 EDL933
  CDS (1)..(1152): transl_table=11
atggcatcttcaactttctttattccttctgtgaatgtcatcggcgctgattcattgactgatgcaatgaatatgatggcagattatggatttacccgtaccttaattgtcactgacagtatgttaacgaaattaggtatggcgggcgatgtgcaaaaagcactggaagaacgcaatatttttagcgttatttatgatggcacccaacctaaccccaccacggaaaacgtcgccgcaggtttgaaattacttaaagagaataattgcgatagcgtgatctccttaggcggtggttctccacacgactgcgcaaaaggtattgcgctggtggcagccaatggcggcgatattcgcgattacgaaggcgttgaccgctctgcaaaaccgcagctgccgatgatcgccatcaataccacggcgggtacggcctctgaaatgacccgtttctgcatcatcactgacgaagcgcgtcatatcaaaatggcgattgttgataaacatgtcactccgctgctttctgtcaatgactcctctctgatgattggtatgccgaagtcactgaccgccgcaacgggtatggatgccttaacgcacgctatcgaagcgtatgtttctattgccgccacgccgatcactgacgcttgtgcactgaaagccgtgaccatgattgccgaaaacctgccgttagccgttgaagatggcagtaatgcgaaagcgcgtgaagcaatggcttatgcccagttcctcgccggtatggcgttcaataatgcttctctgggttatgttcatgcgatggcgcaccagctgggcggtttctacaacctgccacacggtgtatgtaacgccgttctgctgccgcatgttcaggtattcaacagcaaagtcgccgctgcacgtctgcgtgactgtgccgctgcaatgggcgtgaacgtgacaggtaaaaacgacgcggaaggtgctgaagcctgcattaacgccatccgtgaactggcgaagaaagtggatatcccggcaggcctacgcgacctgaacgtgaaagaagaagatttcgcggttctggcggctaatgccctgaaagatgcctgtggctttactaacccgatccaggcaactcacgaagaaattgtggcgatttatcgcgcagcgatgtaa

SEQ ID NO: 130747 - protein, 383 aa, Escherichia coli O157:H7 EDL933
MASSTFFIPSVNVIGADSLTDAMNMMADYGFTRTLIVTDSMLTKLGMAGDVQKALEERNIFSVIYDGTQPNPTTENVAAGLKLLKENNCDSVISLGGGSPHDCAKGIALVAANGGDIRDYEGVDRSAKPQLPMIAINTTAGTASEMTRFCIITDEARHIKMAIVDKHVTPLLSVNDSSLMIGMPKSLTAATGMDALTHAIEAYVSIAATPITDACALKAVTMIAENLPLAVEDGSNAKAREAMAYAQFLAGMAFNNASLGYVHAMAHQLGGFYNLPHGVCNAVLLPHVQVFNSKVAAARLRDCAAAMGVNVTGKNDAEGAEACINAIRELAKKVDIPAGLRDLNVKEEDFAVLAANALKDACGFTNPIQATHEEIVAIYRAAM

SEQ ID NO: 130748 - DNA, 1152 bp, Streptococcus pneumoniae TIGR4
  CDS (1)..(1152): transl_table=11
atggctatattttatgttccggcagtcaaccttattggaaaaggtgttgtaaatgaagtgggtccttatatcaaggaacttggctataaaaaggcacttttggtgacagataagtacatcgaaggcagtgatattttacctaagactttaaaaccactggatacagaaggaatcgaatatgtcatctttagcgatgtagagccaaaccctacttgtaaaaatgtcacagatggggtagctgctttgcaagaacatggctgtgactttatcatcagtcttggcgggggttctccacaggatgcagctagttgtatttctatcatggctacaaatggtggaaaaccacaggattatgaagggcttcataagtctgctaaaaaaggcttgccagttgtggctatcaatacaacggcaggtacatcagcagaaattaccattaactatgtgattactgatgaagaacgcaaggttaagatggtaatggttgacaagaatagccttgctcttatctctgttaatgaccctgaactcatgctttccaaacctaaaggcctgactgctgctactggtatggatgctctgactcatgctgttgaagctttggtaacacctggtgcttatgatgtaaccaagaaactgtctattggtgctattgagcttatcaaggaatatcttcctcgtgctgtagaaaatggacatgatattgaagcgcgtgaaggtatggtcaatgccatcttccttggtggtatgagctttaataatgctggtcttggctatgttcactcaatggctcaccaactcggtgcagtatataatttgccacatggcgtgtgctgtgccatgttgctaccagttatagaacgtgaaaatgctaaacgtgtaccagaagctttccgcaatgttgccaaagccttgggacttcatgtagaaggtaaatcagatcaagaatgtgccgattatgcgattgctgagattgagaagctttctgagacagtaggtattcctaagaaactgactgaacttggtattgaagaaaaagatttcgactttgaatacctttctaagaatgccttgattgatgcctgcgcaccaggaaatccatttatgccaaccttagaagaaacgattgccttttataaagagttattttag

SEQ ID NO: 130749 - protein, 383 aa, Streptococcus pneumoniae TIGR4
MAIFYVPAVNLIGKGVVNEVGPYIKELGYKKALLVTDKYIEGSDILPKTLKPLDTEGIEYVIFSDVEPNPTCKNVTDGVAALQEHGCDFIISLGGGSPQDAASCISIMATNGGKPQDYEGLHKSAKKGLPVVAINTTAGTSAEITINYVITDEERKVKMVMVDKNSLALISVNDPELMLSKPKGLTAATGMDALTHAVEALVTPGAYDVTKKLSIGAIELIKEYLPRAVENGHDIEAREGMVNAIFLGGMSFNNAGLGYVHSMAHQLGAVYNLPHGVCCAMLLPVIERENAKRVPEAFRNVAKALGLHVEGKSDQECADYAIAEIEKLSETVGIPKKLTELGIEEKDFDFEYLSKNALIDACAPGNPFMPTLEETIAFYKELF

SEQ ID NO: 130750 - DNA, 1140 bp, Listeria monocytogenes EGD-e
  CDS (1)..(1140): transl_table=11
atgcaaaaagttagttttaaaacagatctttacattggccaaggagcaacagatcgtttacttgattttaaagacaaacaaatctttatcgtaacggatccatttatggttagttccggaatgattaacgcgattacagacaaaattgatcaatcgaatacatatacgatttttagcgaaattattccagacccaccgattgaaaacgtggtagcaggaatcgaagttctaaatgaatgtgatgcaaacttgatgattgcaattggtggtggctcagcgattgatgcagcgaaagcgatgaaattcttcggtcaaaaacttggtacggtgcgcgcaatgcctttcatcgttatcccgacaactagtggaactggttcagaagtaactagtttttctgttattacaaacaaagaaaaagcaatcaaatacccactaattacagatgctattttaccagatgaagcaattttagacgctgacttagtaaaatctgttccaccagcaatcacagcagatacaggtatggatgtattaacgcatgcgcttgaagcctatgtatctacaaaagcaaatgattactcggatgcaatggcagaaaaagttatccaattagttttcacatacttagaacgtgcttacaaagatggcaatgatttagaagctcgcgaaaaaatgcataatgcgtcttgtcttgcaggaatggcttttaacattacttcgcttggcttaaatcacggtattgcgcatacagctggtgcgaaatttaaaatcccgcatggccgtatgaacacattacttttaccacacgtaattagttataacgctggaattacaagtgattttggtaacaatccagataaccgagcagcagaacgttatacagcaatcgctaaattactgaaaatgccagcatcgaatacacgtcttggcgttcgcagcttaattaatgccattaaacaacttcaaaagaaactcaatatgccaactacattaacagaatgtggtattagccgcactgatttaaatgaaaatattgctcaaatcgctgaaggtgcgctaaatgacggatgcactgcaacaaatccaagaacaccgactgaaacagatgttagcgcgattcttgagaagatgttggcataa

SEQ ID NO: 130751 - protein, 379 aa, Listeria monocytogenes EGD-e
MQKVSFKTDLYIGQGATDRLLDFKDKQIFIVTDPFMVSSGMINAITDKIDQSNTYTIFSEIIPDPPIENVVAGIEVLNECDANLMIAIGGGSAIDAAKAMKFFGQKLGTVRAMPFIVIPTTSGTGSEVTSFSVITNKEKAIKYPLITDAILPDEAILDADLVKSVPPAITADTGMDVLTHALEAYVSTKANDYSDAMAEKVIQLVFTYLERAYKDGNDLEAREKMHNASCLAGMAFNITSLGLNHGIAHTAGAKFKIPHGRMNTLLLPHVISYNAGITSDFGNNPDNRAAERYTAIAKLLKMPASNTRLGVRSLINAIKQLQKKLNMPTTLTECGISRTDLNENIAQIAEGALNDGCTATNPRTPTETDVSAILEKMLA

SEQ ID NO: 130752 - DNA, 1140 bp, Listeria innocua Clip11262
  CDS (1)..(1140): transl_table=11
atgcaaaaagttagttttaaaacagatctttacattggccaaggagcaacagatcgtttactggattttaaagacaaacaaattttcatcgtaacagatccatttatggtgagctcaggaatgattaatgctattacggaaaaaattgataagtcgaatacatatactatttttagcgatattattcctgacccgccaattgaaaacgttgtagctggaattgaagttttaaacgaatgtgatgccaacttgatgatcgctatcggtggtggttccgcgattgatgcggcgaaagcgatgaaattctttggtcaaaaacttggtacggtgcgcgcaatgccattcatcgtaatcccaactacaagtggaactggttctgaagttactagtttttctgtcattacgaataaagaaaaagcaattaaatatccacttattactgatgctattttgccggatgaagcgattttagatgcggatttagtgaaatctgtcccacctgcaatcacagcagacactggtatggatgtactcacacatgcgctagaagcatacgtttccacaaaagcaaatgattattcggacgcaatggctgaaaaagtaatccaattagtattcacatacttggagcgcgcttataaagacggaaatgatttagaagcacgcgaaaaaatgcataatgcttcttgtttagcaggtatggcatttaatattacctcacttggtttaaaccatggtatcgctcacacagccggtgctaagtttaaaattccacatggtcgtatgaatactttacttttgccacatgttattagttataatgctggattaacaagtgattttggtaacaatccagataaccgtgctgcagaacgttatacagcaattgccaaattactaaaaatgccagcttccaatacaagacttggcgttcgtagcttaattaacgcaattaaacaacttcaaaagaaactcaatatgccaacaacattatctgaatgtggcgttagtcgtaccgatttaaacgagcatattgcgcaaatcgcggaaggtgcgctgaatgatggttgtactgcaactaatccaagaacaccgacagaaacagatgttagtgcgattctcgaaaaaatgttggcttaa

SEQ ID NO: 130753 - protein, 379 aa, Listeria innocua Clip11262
MQKVSFKTDLYIGQGATDRLLDFKDKQIFIVTDPFMVSSGMINAITEKIDKSNTYTIFSDIIPDPPIENVVAGIEVLNECDANLMIAIGGGSAIDAAKAMKFFGQKLGTVRAMPFIVIPTTSGTGSEVTSFSVITNKEKAIKYPLITDAILPDEAILDADLVKSVPPAITADTGMDVLTHALEAYVSTKANDYSDAMAEKVIQLVFTYLERAYKDGNDLEAREKMHNASCLAGMAFNITSLGLNHGIAHTAGAKFKIPHGRMNTLLLPHVISYNAGLTSDFGNNPDNRAAERYTAIAKLLKMPASNTRLGVRSLINAIKQLQKKLNMPTTLSECGVSRTDLNEHIAQIAEGALNDGCTATNPRTPTETDVSAILEKMLA

SEQ ID NO: 130754 - DNA, 1149 bp, Clostridium perfringens str. 13
  CDS (1)..(1149): transl_table=11
atgagttataaattttttatgccagctataagtttaatgggagcagattgcttaaaagacgctggtgatcaagttggagaattaggatttaaaaaagctttaatagtaacagataaagttttaggacaaataggaatagttaaaaaagtaacagatgttttagataataagaatatagaatatgcaatatatgatgaaactaaaccaaacccaacagttaaaaatgttaatgatggtttagcattattaaaagaaaaagaatgtgattttgttatttcattaggaggaggctcagctcatgactgtgctaaaggaatagctttattagctactaatggtggagaaataaaagactatgagggagtagataaatctaaaaaacctcaattaccaatggtaggtataaatacaactgctggtactggtagtgagatgactttattcgctattataactgatgaagaaagacatataaaaatggctttagtagacaagcatttaacaccaataatagcggttaatgaccctatgttaatgcttgctatgccaaaatcattaacagcggctactggtatggatgccttaacacacgctatagaggcttatgtttcaacttctgccacaccaataacagatgcttgtgcagagaaagctatcgaacttataagcaattatttagtgaatgctgttgaaaatggagaaaatgtggaagctagagatatgatggcttatgctgaatatttagcaggaatggcatttaacaatgctagcttaggatatgttcacgctatggctcaccaattaggtggattctacaacttacctcatggagtatgtaatgcaatattattacctcatgttcaagaatataacaaagatacaagtgcttcaagattagctaaaattgctaaaataatgggtggaaacatagaaggattaactgatgagcaaggagcagatctttgcatagatatgataaaatcattatcacaaactataggaattccagagggacttggagtattaggagtaaaagaaagtgattttgaaactttagctactaatgctttaaatgatgcttgttcattaacaaatccaagaaaaggaaacttagaagaagtaatagctatattcagaaaagcaatgtag

SEQ ID NO: 130755 - protein, 382 aa, Clostridium perfringens str. 13
MSYKFFMPAISLMGADCLKDAGDQVGELGFKKALIVTDKVLGQIGIVKKVTDVLDNKNIEYAIYDETKPNPTVKNVNDGLALLKEKECDFVISLGGGSAHDCAKGIALLATNGGEIKDYEGVDKSKKPQLPMVGINTTAGTGSEMTLFAIITDEERHIKMALVDKHLTPIIAVNDPMLMLAMPKSLTAATGMDALTHAIEAYVSTSATPITDACAEKAIELISNYLVNAVENGENVEARDMMAYAEYLAGMAFNNASLGYVHAMAHQLGGFYNLPHGVCNAILLPHVQEYNKDTSASRLAKIAKIMGGNIEGLTDEQGADLCIDMIKSLSQTIGIPEGLGVLGVKESDFETLATNALNDACSLTNPRKGNLEEVIAIFRKAM

SEQ ID NO: 130756 - DNA, 1158 bp, Clostridium perfringens str. 13
  CDS (1)..(1158): transl_table=11
atgagaatgtacgattatttagtaccaagtgtaaactttatgggagctaactcaatatcagtagttggtgaaagatgtaaaatattaggtggaaagaaagctttaatagttacagataaattcttaagaggattaaaaggtggagcagttgaattaactgaaaaatacctaaaagaagcaggaatcgaagttgcttattatgatggagttgaaccaaacccaaaagatacaaacgttaaagatggtttaaaaatattccaagacgaaaactgtgatatgatcgttacagttggtggaggaagctcacatgactgtggtaaaggaataggtatagctgcaactcacgaaggagatctttatgactatgctggaatagaaactttaacaaatccacttcctccaatagtagcagtaaacactacagctggaactgcaagtgaagtaactagacactgtgttataacaaacactaaaactaaagttaaattcgttatagtaagctggagaaacttacctttagtttcaatcaatgacccaatgttaatggttggaaaaccagcaggattaacagctgcaacaggaatggacgctttaactcatgctgtagaagcatacgtatcaaaagatgctaaccctgtaacagatgctgctgcaatacaagctataaaattaatatcaagcaatttaagacaagctgttgctttaggagaaaacttagtagctagagaaaacatggcttacggttcattattagctggtatggcattcaacaatgctaacttaggatatgtacatgctatggctcaccaattaggcggattatatgatatgcctcatggagtagctaacgctatgttattaccacacgtatgtaaatataacttaatatctaacccacaaaaattcgctgatatagctgaatttatgggagaaaacatagaaggattatcagtaatggacgctgctcaaaaagctatagatgcaatgttcagattatcaactgatatcggaataccagcaaaattaagagacatgggagtaaaagaagaagacttcggatacatggctgaaatggctcttaaagatggtaatgcattcagtaacccaagaaaaggtaacgaaagagacatcgttgaaatattcaaagctgcattctaa

SEQ ID NO: 130757 - protein, 385 aa, Clostridium perfringens str. 13
MRMYDYLVPSVNFMGANSISVVGERCKILGGKKALIVTDKFLRGLKGGAVELTEKYLKEAGIEVAYYDGVEPNPKDTNVKDGLKIFQDENCDMIVTVGGGSSHDCGKGIGIAATHEGDLYDYAGIETLTNPLPPIVAVNTTAGTASEVTRHCVITNTKTKVKFVIVSWRNLPLVSINDPMLMVGKPAGLTAATGMDALTHAVEAYVSKDANPVTDAAAIQAIKLISSNLRQAVALGENLVARENMAYGSLLAGMAFNNANLGYVHAMAHQLGGLYDMPHGVANAMLLPHVCKYNLISNPQKFADIAEFMGENIEGLSVMDAAQKAIDAMFRLSTDIGIPAKLRDMGVKEEDFGYMAEMALKDGNAFSNPRKGNERDIVEIFKAAF

SEQ ID NO: 130758 - DNA, 1203 bp, Methanosarcina acetivorans C2A
  CDS (1)..(1203): transl_table=11
ttgttaaacgaagctgttgttaaacaaagctgttgccaaaaggagttgagaagcatgacatatacctatctgaacccgaaagtagctcttatgggggctggttgtgtaaaagaaatcggcaagcatgcaaaagagcttgggggtactaaagccctgatcgtttcaggaaggagcaggcatggagaagaacttgcaggagatatccggaaaatccttgaaaccgccgggctgaaaatagcaatctttccaggagcggatccgaacccgacagacagttcggttatggaaggggcaataatatacgaaaaagagaactgtgacctgatcgttgctgtcggaggtggaagcccgatggattgtgcaaaagccatcggcatcgtagctaaaaacggaggggagattaacgactacgaaggcatcggaaaggtcacgaagggtgtccctccgcttatcacggtaaatacaaccgccggcaccgcaagtgagatgacgagttttacaattattacggacacgaaaagacacatcaaaatggcaatcgttgatccccgcatcacacccgacgtagcagttaacgaccccgaactgatggtaagtatgccaccggcgcttacggctgcaaccggaatggatgctcttacccatgcagttgaagcttatgtttccactattgctactccgaccaccgatgcggcggctatcaaggcaatcgagctaatctcaaaatatctgcccgaagctgttgcccacgggggagatgtgaggacaagagacatgatggctcatgccgaatatcttgcaggcattgctttcaataacgctagccttggctatgtgcactccatggcccaccagctcggcggattatatgacctcccgcacggcatctgcaatgcaattctccttccctatgtggaaatgtacaacaaggaagtctgtcccgaacggtttgccgatattgcaaaggcaatgggagaaaaagttgagggtctgagcccggaagaagctgcagacaaagccatagctgccattaaaaagcttgcagctgacattggaattccctcgggtctgaaagagctcggagccagggaggaagacctcgaactgctggcggaaaatgccatgcaggacgtctgccaccttacaaatccaagagagctctcaaaagaagaggtgattgaaatttacaggaaagcaatgtga

SEQ ID NO: 130759 - protein, 400 aa, Methanosarcina acetivorans C2A
MLNEAVVKQSCCQKELRSMTYTYLNPKVALMGAGCVKEIGKHAKELGGTKALIVSGRSRHGEELAGDIRKILETAGLKIAIFPGADPNPTDSSVMEGAIIYEKENCDLIVAVGGGSPMDCAKAIGIVAKNGGEINDYEGIGKVTKGVPPLITVNTTAGTASEMTSFTIITDTKRHIKMAIVDPRITPDVAVNDPELMVSMPPALTAATGMDALTHAVEAYVSTIATPTTDAAAIKAIELISKYLPEAVAHGGDVRTRDMMAHAEYLAGIAFNNASLGYVHSMAHQLGGLYDLPHGICNAILLPYVEMYNKEVCPERFADIAKAMGEKVEGLSPEEAADKAIAAIKKLAADIGIPSGLKELGAREEDLELLAENAMQDVCHLTNPRELSKEEVIEIYRKAM

SEQ ID NO: 130760 - DNA, 1275 bp, Methanosarcina mazei Go1
  CDS (1)..(1275): transl_table=11
ttgcagagcaaaactttattacttgcagggaaaaaatcagttctattaatattttgtatttttataatagcaccgggaagatttgaacagaacttatcgaggggagtagaaggcatgatagaaaagatgacatacacttacctgaacccaaagatagccctgatgggacctggatgtgtaaacgggatcggcacgcatgcaaaagacctggggggtacgaaagccctgatagtttcaggcaagagcaggcatgggaaagagcttgcagcggatattcgcagaattcttgaacgtgcggggatagaagcagcaatctttccgggagcagacccgaaccctaccgatacttcagttatggaaggggcagacatttacaggaaagaaaactgtaacatgatagttgctgtcggaggcgggagccctatggactgtgcaaaggcaatcggcattgtggtatataatggaggaaggataaatgattacgaaggagtgggtaaagttaccagaggaattcctcctcttatcacggtaaacacgacagcgggcactgcgagcgagatgaccagttttacaattattactgatactgaaaggcacatcaaaatggctatcgtcgacccccggatcacacctgatgtggcggttaacgaccccgaactgatggtcagcatgccgccagcacttacggctgcaacagggatggatgctctgacccatgctgtggaagcttatgtttctaccatggctaccccgactaccgatgcggctgccataaaagcaatagagcttatatcaaaatacctgcccgaagccgtcctccacggggaagatatacgggccagggacatgatggcacacgcagaatatcttgcaggcattgctttcaacaatgcaagtcttgggtatgttcattccatggctcatcagctcggaggcttttatgacctcccgcatggggtctgcaatgccatcctcctgccttatgtggagatgtataacaagcaggtttgccctgaacgttttgcagacatcgcaaaggcaatgggagaaaaagttgagggattgagcccggacgaggcagcggataaagcaatagatgcaatcaaaaagcttgcagcagaaatcggaattccttcaggcctgaaagagctcggggcaagagaagaagaccttgaacttctggctgaaaatgccatgcaggacgtctgccgccttacaaatccaagagaactctcaaaagaagatatcatcgagatttacagaaaagccctgtga

SEQ ID NO: 130761 - protein, 424 aa, Methanosarcina mazei Go1
MQSKTLLLAGKKSVLLIFCIFIIAPGRFEQNLSRGVEGMIEKMTYTYLNPKIALMGPGCVNGIGTHAKDLGGTKALIVSGKSRHGKELAADIRRILERAGIEAAIFPGADPNPTDTSVMEGADIYRKENCNMIVAVGGGSPMDCAKAIGIVVYNGGRINDYEGVGKVTRGIPPLITVNTTAGTASEMTSFTIITDTERHIKMAIVDPRITPDVAVNDPELMVSMPPALTAATGMDALTHAVEAYVSTMATPTTDAAAIKAIELISKYLPEAVLHGEDIRARDMMAHAEYLAGIAFNNASLGYVHSMAHQLGGFYDLPHGVCNAILLPYVEMYNKQVCPERFADIAKAMGEKVEGLSPDEAADKAIDAIKKLAAEIGIPSGLKELGAREEDLELLAENAMQDVCRLTNPRELSKEDIIEIYRKAL

SEQ ID NO: 130762 - DNA, 1149 bp, Shigella flexneri 2a str. 301
  CDS (1)..(1149): transl_table=11
atggctaacagaatgattctgaacgaaacggcatggtttggtcggggtgctgttggggctttaaccgatgaggtgaaacgccgtggttatcagaaggcgctgatcgtcaccgataaaacgctggtgcaatgcggcgtggtggcgaaagtgaccgataagatggatgctgcagggctggcatgggcgatttacgacggcgtagtgcccaacccaacaattactgtcgtcaaagaagggctcggtgtattccagaatagcggcgcggattacctgatcgctattggtggtggttctccacaggatacttgtaaagcaattggcattatcagcaacaacccggagtttgccgatgtgcgtagcctggaagggctttccccgaccaataaacccagtgtaccgattctggcaatccccaccacagcaggtactgcggcagaagtgaccattaactacgtgatcactgacgaagaaaaacggcgcaagtttgtttgcgttgatccgcatgatatcccgcaggtggcgtttattgatgctgacatgatggatggtatgcctccggcgctgaaagccgcgacgggtgttgatgcgctcactcatgctattgaggggtatattacccgtggcgcgtgggcactaaccgatgcactgcacattaaagcgattgaaatcattgctggggcgctgcgaggatcggttgctggtgataaggatgccggagaagaaatggcgctcgggcagtatgttgcgggtatgggcttctcgaatgttgggttagggttggtgcatggtatggcgcatccactgggcgcgttttataacactccacacggtgttgcgaacgccatcctgttaccgcatgtcatgcgctataacgctgactttaccggtgagaagtaccgcgatatcgcgcgcgttatgggcgtgaaagtggaaggtatgagcctggaaggggcgcgtaatgccgctgttgaagcggtgtttgccctcaaccgtgatgtcggtattccgccacatttgcgtgatgttggtgtacgcaaggaagacatttcggcactggctcaggcggcactggatgatgtttgtaccggtggcaacccgcgtgaagcaacgcttgaggatattgtagagctttaccataccgcctggtaa

SEQ ID NO: 130763 - protein, 382 aa, Shigella flexneri 2a str. 301
MANRMILNETAWFGRGAVGALTDEVKRRGYQKALIVTDKTLVQCGVVAKVTDKMDAAGLAWAIYDGVVPNPTITVVKEGLGVFQNSGADYLIAIGGGSPQDTCKAIGIISNNPEFADVRSLEGLSPTNKPSVPILAIPTTAGTAAEVTINYVITDEEKRRKFVCVDPHDIPQVAFIDADMMDGMPPALKAATGVDALTHAIEGYITRGAWALTDALHIKAIEIIAGALRGSVAGDKDAGEEMALGQYVAGMGFSNVGLGLVHGMAHPLGAFYNTPHGVANAILLPHVMRYNADFTGEKYRDIARVMGVKVEGMSLEGARNAAVEAVFALNRDVGIPPHLRDVGVRKEDISALAQAALDDVCTGGNPREATLEDIVELYHTAW

SEQ ID NO: 130764 - DNA, 1152 bp, Shigella flexneri 2a str. 301
  CDS (1)..(1152): transl_table=11
atggcatcttcaactttctttattccttctgtgaatgtcatcggcgctgattcattgactgatgcaatgaatatgatggcagattatggatttacccgtaccttaattgtcactgacaatatgttaacgaaattaggtatggcgggtgatgtgcaaaaagcactggaagaacgcaatatttttagcgttatttatgatggcacccaacctaaccccaccacggaaaacgtcgccgcaggtttgaaattacttaaagaaaataattgcgatagcgtgatctccttaggcggtggttctccacacgactgcgcaaaaggtattgcgctggtggcagccaatggcggcgatattcgcgattacgaaggcgttgaccgctctgcaaaaccgcagctgccgatgatcgccatcaataccacggcgggtacggcctctgaaatgacccgtttctgcatcatcactgacgaagcgcgtcataacaaaatggcgattgttgataagcacgtgactccgctgctttctgtcaatgactcctctctgatgattggtatgccgaagtcactgaccgccgcaacgggtatggatgccttaacgcacgctatcgaagcgtatgtttctattgccgccacgccgatcactgacgcttgtgcactgaaagccgtgaccatgattgccgaaaacctgccgttagccgttgaagatggcagtaatgcgaaagcgcgtgaagcaatggcttatgcccagttccttgccggtatggcgttcaataatgcttctctgggttatgttcatgcgatggcgcaccagctgggcggtttctacaacctgccacacggtgtatgtaacgccgttctgctgccgcatgttcaggtattcaacagcaaagtcgccgctgcacgtctgcgtgactgtgccgctgcaatgggcgtgaacgtgacaggtaaaaacgacgcggaaggtgctgaagcctgcattaacgccatccgtgaactggcgaagaaagtggatatcccggcaggcctacgcgacctgaacgtgaaagaagaagatttcgcggttctggcgactaatgccctgaaagatgcctgtggctttactaacccgatccaggcaactcacgaagaaattgtggtgatttatcgcgccgcaatgtaa

SEQ ID NO: 130765 - protein, 383 aa, Shigella flexneri 2a str. 301
MASSTFFIPSVNVIGADSLTDAMNMMADYGFTRTLIVTDNMLTKLGMAGDVQKALEERNIFSVIYDGTQPNPTTENVAAGLKLLKENNCDSVISLGGGSPHDCAKGIALVAANGGDIRDYEGVDRSAKPQLPMIAINTTAGTASEMTRFCIITDEARHNKMAIVDKHVTPLLSVNDSSLMIGMPKSLTAATGMDALTHAIEAYVSIAATPITDACALKAVTMIAENLPLAVEDGSNAKAREAMAYAQFLAGMAFNNASLGYVHAMAHQLGGFYNLPHGVCNAVLLPHVQVFNSKVAAARLRDCAAAMGVNVTGKNDAEGAEACINAIRELAKKVDIPAGLRDLNVKEEDFAVLATNALKDACGFTNPIQATHEEIVVIYRAAM

SEQ ID NO: 130766 - DNA, 1149 bp, Shewanella oneidensis MR-1
  CDS (1)..(1149): transl_table=11
atggctgctaaattttttattccttccgtcaacgtactaggcaaaggcgctgtagatgatgctattggtgatatcaaaaccttaggctttaagcgcgcgcttatcgtaacggataaacctttagtcaatattggtctggtcggtgaagtggccgaaaaactcggccagaatggcattacatcaaccgtatttgatggcgtacaacctaacccaacggttggtaacgttgaagcaggtcttgcgctgttaaaagccaatcaatgtgatttcgtgatttcattaggtggtggctcgccccacgattgcgctaaaggtatcgccctggtggcaactaacggcggtagcattaaagactacgaaggcttagacaaatccactaagccacaactgccgttagtggcaatcaacacgaccgctggtactgccagtgagatgacacgtttctgtatcatcaccgacgaagctcgccatatcaaaatggcaattgtcgataaacacaccacgccaatactttcagtaaatgatccagagttgatgctgaaaaagcctgcaagtctcacagcagcaacgggcatggatgcgctcacccatgcggttgaagcctatgtgtctattgccgcgaatcccattactgatgcctgtgcaattaaggcgattgaactcattcaaggcaacttagtgaatgcggtaaaacaaggccaagatattgaagcccgtgagcaaatggcttatgcgcaattcttagcgggtatggcctttaacaacgccagcttaggttatgtgcacgccatggcgcaccaattaggcggtttctacgatctaccccatggtgtgtgtaacgccctattattaccccatgttcaagaatacaacgctaaagtggtgccacatcgcctaaaagatattgccaaagcgatgggtgtagatgtggcgaagatgaccgatgagcaaggtgcagctgcagctatcaccgccattaaaaccttatccgttgcggtgaatatccctgaaaatctgacattactcggcgtgaaagcagaagatattccaacgttggctgacaacgcattgaaggatgcctgtggtttcacaaaccctaaacaggcaacccatgcagagatctgtcagatctttactaacgcgttataa

SEQ ID NO: 130767 - protein, 382 aa, Shewanella oneidensis MR-1
MAAKFFIPSVNVLGKGAVDDAIGDIKTLGFKRALIVTDKPLVNIGLVGEVAEKLGQNGITSTVFDGVQPNPTVGNVEAGLALLKANQCDFVISLGGGSPHDCAKGIALVATNGGSIKDYEGLDKSTKPQLPLVAINTTAGTASEMTRFCIITDEARHIKMAIVDKHTTPILSVNDPELMLKKPASLTAATGMDALTHAVEAYVSIAANPITDACAIKAIELIQGNLVNAVKQGQDIEAREQMAYAQFLAGMAFNNASLGYVHAMAHQLGGFYDLPHGVCNALLLPHVQEYNAKVVPHRLKDIAKAMGVDVAKMTDEQGAAAAITAIKTLSVAVNIPENLTLLGVKAEDIPTLADNALKDACGFTNPKQATHAEICQIFTNAL

SEQ ID NO: 130768 - DNA, 1152 bp, Shewanella oneidensis MR-1
  CDS (1)..(1152): transl_table=11
atgagtactacattttatatgcctccaatgtctctgatgggacaacatgctatcaaattgttaggcacagaactgcaggcaagaaacttcaacaaggcactgattgttacagataaggcattagtagatatcaagttggtggataagctgacagatgagttatctgcccacgatatcgcattcgcaatttttgatggcgttaagccgaacccaacagaaaaaaatattgttcagggtttagctctgctcgaagcgcaaaaatgtgatttcgttatttcattcggcggaggttcttcacatgactgtgctaaaggcatcgcattggtcgcagccaacggcggtcacattcgtgattactctaaaggggttcatctgtcggctaagccacaacttcctctggtgacggtgaatactacagctggcactgcagcggagatgacgatatttgccatcgtgaccaatgaggaagatgaaactaaatacccgattgtagataaaaacctgaccccaataattgcagtaaacgactcagagctgatggttgcaatgcctaagttcctcacggcagcgactggtatggatgcattgactcatgcggtagaagcttatgtgtcgacggcagcaacgccaataaccgatgcgtcagcaattaaagctattgaacttattgcccaaaacctgaaagcggcagtcgacaatggtgaagatcgtgaagctcgtgaggctatgcaatacggtgagtaccttgccggtatggcattctctaatgcttcattaggttatgtacactcgatggctcaccaactcggtggtgtctatgacctggtgcacggtctctgtaacgccatcttgttaccggtagtgtcacgttttaactcggctgaaaaagtggagcgttttgccgaggtggcgaaagcaatgggtgtagatactgtaggcatgacgttaatcgatgctgctgaatctggcatccttgctatcgagaagctatccgcttcggttggtacagatcagaaactgtctgaccttggtgttaaggaggacaagcttgagtttatggcaatcaacgccctgaatgatgcctgctccttaacaaatccaagaaaggcaaccactgaagatattattaatattttcaagaaagctatgtaa

SEQ ID NO: 130769 - protein, 383 aa, Shewanella oneidensis MR-1
MSTTFYMPPMSLMGQHAIKLLGTELQARNFNKALIVTDKALVDIKLVDKLTDELSAHDIAFAIFDGVKPNPTEKNIVQGLALLEAQKCDFVISFGGGSSHDCAKGIALVAANGGHIRDYSKGVHLSAKPQLPLVTVNTTAGTAAEMTIFAIVTNEEDETKYPIVDKNLTPIIAVNDSELMVAMPKFLTAATGMDALTHAVEAYVSTAATPITDASAIKAIELIAQNLKAAVDNGEDREAREAMQYGEYLAGMAFSNASLGYVHSMAHQLGGVYDLVHGLCNAILLPVVSRFNSAEKVERFAEVAKAMGVDTVGMTLIDAAESGILAIEKLSASVGTDQKLSDLGVKEDKLEFMAINALNDACSLTNPRKATTEDIINIFKKAM

SEQ ID NO: 130770 - DNA, 1152 bp, Escherichia coli CFT073
  CDS (1)..(1152): transl_table=11
atgatggctaacagaatgattctgaacgaaacggcatggtttggtcggggggctgttgggtctttaaccgatgaggtgaaacgccgtggttatcagaaggcgctgatcgtcaccgataaaacgctggtgcaatgcggcgtggtggcgaaagtgatcgataagatggatgcggcaggactggcatgggcgatttacgacggcgtagtacctaacccaacaattactgtcgtcaaagaagggctcgatgtattccagaatagcggcgcggattacctgatcgctattggtggtggttctccacaggatacgtgtaaagcgattggcattatcagcaacaacccggagtttgccgatgtgcgtagcctggaagggctttccccgaccaataaacccagtgtaccgattctggcaatccccaccacagcaggcactgcggcagaagtgaccattaactacgtgatcactgacgaagagaaacggcgcaagtttgtttgcgttgatccgcatgatatcccgcaggtggcgtttattgacgctgacatgatggatggtatgcctccagcgctgaaagccgcgacgggtgtcgatgcgctcactcatgctattgaggggtatattacccgtggcgcgtgggcgctaaccgatgcgctgcacattaaagcgattgaaatcattgctggggcgctgcgaggatcggttgctggtgataaggatgccggagaagaaatggcgctcgggcagtatgttgcgggtatgggattctcgaatgttgggttagggttggtgcatggtatggcgcatccactgggcgcgttttacaacacgccacacggtgttgcaaatgccatcctgttaccgcatgtcatgcgctataacgctgactttaccggtgagaagtaccgcgatatcgcgcgcgttatgggcgtgaaagtggaaggtatgagcctggaagaggcgcgtaatgccgctgttgaagcggtgtttgctctcaaccgtgatgtcggtattccgccacatttacgtgatgttggtgtacgcaaggaagacattccggcactggcgcaggcggcactggatgatgtttgtaccggtggcaacccgcgtgaagcaacgcttgaggatattgtagagctttaccataccgcctggtaa

SEQ ID NO: 130771 - protein, 383 aa, Escherichia coli CFT073
MMANRMILNETAWFGRGAVGSLTDEVKRRGYQKALIVTDKTLVQCGVVAKVIDKMDAAGLAWAIYDGVVPNPTITVVKEGLDVFQNSGADYLIAIGGGSPQDTCKAIGIISNNPEFADVRSLEGLSPTNKPSVPILAIPTTAGTAAEVTINYVITDEEKRRKFVCVDPHDIPQVAFIDADMMDGMPPALKAATGVDALTHAIEGYITRGAWALTDALHIKAIEIIAGALRGSVAGDKDAGEEMALGQYVAGMGFSNVGLGLVHGMAHPLGAFYNTPHGVANAILLPHVMRYNADFTGEKYRDIARVMGVKVEGMSLEEARNAAVEAVFALNRDVGIPPHLRDVGVRKEDIPALAQAALDDVCTGGNPREATLEDIVELYHTAW

SEQ ID NO: 130772 - DNA, 1152 bp, Escherichia coli CFT073
  CDS (1)..(1152): transl_table=11
atggcagcttcaaccttttttattccttccgtgaatgttattggtgctgattcattgaatgatgcaatgaatatgatggcagattatggatttacccgtaccttaattgtcaccgacaacatattaacgaaattgggtatggcgggtgatgtgcaaaaagcactggaagaacgcaatatttttagcgttatttatgatggcacccaacctaaccccaccacggaaaacgtcgccgcaggtttgaaattacttaaagaaaataattgcgatagcgtgatttccttaggcggtggttctccacacgactgcgcaaaaggtattgcgctggttgcagccaacggcggtgacatccgcgattatgaaggcgttgaccgctctgcaaaaccgcagctgccgatgatcgccatcaacaccacggcgggtacggcctctgaaatgacccgtttctgcatcatcactgacgaagcgcgtcacatcaaaatggcgattgtggataaacatgtaactccgctgctttctgtcaatgactcctctctgatgatcggtatgccgaagtcactgaccgctgcaacgggtatggatgccttaacgcacgctatcgaagcgtatgtttctattgccgccacgccgatcactgacgcttgtgcactgaaagccgtgaccatgattgccgaaaacctgccgttagccgttgaagatggcagcaatgctaaagcgcgtgaagcaatggcttatgcccagttcctcgccggtatggcgttcaataatgcttctctgggttatgttcatgcgatggcgcaccagctgggcggtttctacaacctgccacatggtgtatgtaatgccgttctgctgccacacgttcaggtgttcaacagcaaagtcgctgctgcgcgtctgcgtgactgtgctgctgccatgggcgttaacgtgacaggcaaaaatgacgcggaaggcgcagaagcgtgcatcaatgccatccgtgaactggcgaagaaagtgaatatcccggcaggcctgcgtgacctgaacgtgaaagaagaagatattccagtgctggcaaccaatgccctgaaagatgcgtgtgggtttactaacccgattcaggcaactcacgaagaaattatggcgatttatcgcgcagcgatgtaa

SEQ ID NO: 130773 - protein, 383 aa, Escherichia coli CFT073
MAASTFFIPSVNVIGADSLNDAMNMMADYGFTRTLIVTDNILTKLGMAGDVQKALEERNIFSVIYDGTQPNPTTENVAAGLKLLKENNCDSVISLGGGSPHDCAKGIALVAANGGDIRDYEGVDRSAKPQLPMIAINTTAGTASEMTRFCIITDEARHIKMAIVDKHVTPLLSVNDSSLMIGMPKSLTAATGMDALTHAIEAYVSIAATPITDACALKAVTMIAENLPLAVEDGSNAKAREAMAYAQFLAGMAFNNASLGYVHAMAHQLGGFYNLPHGVCNAVLLPHVQVFNSKVAAARLRDCAAAMGVNVTGKNDAEGAEACINAIRELAKKVNIPAGLRDLNVKEEDIPVLATNALKDACGFTNPIQATHEEIMAIYRAAM

SEQ ID NO: 130774 - DNA, 1113 bp, Vibrio vulnificus CMCP6
  CDS (1)..(1113): transl_table=11
atgggcgcaggctgtcttaaagacgcagcagacagcattaaagctcaaggctttaccaaagggcttattgttaccgacaaaattcttaatcaaatcggcgttgtaaaacaagttcaagacctactaagcgagcgtcatgtagaaacggttgtcttcgatggtactcagcccaacccaaccatcggcaacgtcaatgcaggtttggcactactgaagcaaaatgagtgtgattttgtgatttcactcggtggtggttctccgcacgactgtgcaaaaggcattgcgcttgtcgcagcaaacggcggcgagattgcggattacgaaggcgtggacaaatcagcgaaaccaatgctaccgctgatcgcaattaacaccaccgcaggcaccgcatctgaaatgacccgtttctgcatcattaccgatgaagaacgtcatattaaaatggcgatcgtcgataaacacaccacgccactaatctctgtgaacgatccggaactgatgctggcaaaacctgcatcactaactgcggcaacaggaatggacgccttgactcacgcggtagaagcgtacgtttctattgctgcgacgccgattaccgatgcagttgcaatcaaagcgattgagcttatccaagcccatcttcgtactgccgtcgcacacggcgatgatattgaagcgcgtgagcaaatggcgtacgcacagtttatggcaggtatggcgttcaacaatgcctcactaggttacgtacacgcaatggcgcaccaattgggtggcttctacgatctaccacacggtgtttgtaacgcgatcttgttaccacacgtacaacgctacaatgcgcaggtttgtccagagcgtctacgtgatgtggcaaaagcaatgggtgtcaatgtcgaaggcatgagtgcagagcaaggcgcagaagccgccattgatgcgattgtggcactggcgaaagacgtgggtattccagcaggtattcgcgagcttggtgcaaaatctgaagatatcccaaccttggctgacaatgcactcaaagacgcttgtggtttcactaacccgaaacaagccacgcacgaagaaatctctgcgattttcgaagcggcaatgtaa

SEQ ID NO: 130775 - protein, 370 aa, Vibrio vulnificus CMCP6
MGAGCLKDAADSIKAQGFTKGLIVTDKILNQIGVVKQVQDLLSERHVETVVFDGTQPNPTIGNVNAGLALLKQNECDFVISLGGGSPHDCAKGIALVAANGGEIADYEGVDKSAKPMLPLIAINTTAGTASEMTRFCIITDEERHIKMAIVDKHTTPLISVNDPELMLAKPASLTAATGMDALTHAVEAYVSIAATPITDAVAIKAIELIQAHLRTAVAHGDDIEAREQMAYAQFMAGMAFNNASLGYVHAMAHQLGGFYDLPHGVCNAILLPHVQRYNAQVCPERLRDVAKAMGVNVEGMSAEQGAEAAIDAIVALAKDVGIPAGIRELGAKSEDIPTLADNALKDACGFTNPKQATHEEISAIFEAAM

SEQ ID NO: 130776 - DNA, 1173 bp, Lactobacillus plantarum WCFS1
  CDS (1)..(1173): transl_table=11
atgactgaacgtaattttgatttcttaatgcctagcgttaactttttcggtcctggtgtcattagtaaaatcggcgagcgtgccaaaactcttggtatgcacaagccagtcatcgtcaccgacaaatttcttgaaagtctgccagacggcgccgttgctcaggtgcggcggtcactggatgctgccgggattgactacgtaatttataatcaagttgagcccaaccctaaaattcataacattcaagctgttaaagccttatatcaagccaatcaagcggactccctgattactattggcggtggttctgcccacgataccggaaaaggtgccggcatcatcatgactaacggcgacgatatcactaagttagcggggatcgaaacactcaagaatgccctaccaccactgattgcggtcaacactaccgctgggactggttctgaattgacccgtcactgtgtcattacgaatgaagaaacgcattataagttcgtcgttgcttcatggcgtaacatgccactcgtgtcctttaacgatcccactctcatgctagatgttcctaagggactcacggccgcaactggcatggatgcttttgtccaggctatcgaaccctttgtttctgtcgatcacaatccgattaccgattcacagtgcatccaggccatcaaattaatcgaaacatcattacgcgaagccgtcgccaatgggcataacctagaagcccggacacacatggtcgaagctgaaatgttagccggcatggcctttaacaacgccaatctaggttacgtgcacgccatggcccaccagctcggcggccaatatgacgcaccccacggtgtctgctgcgcgctgctcttaccctacgttgaagaatataatctaatcgcgtgccccgaacgtttcgccgagctcgccaaaattatgggcgaaaacactgatggcttatcgactcgtgatgctgccgaattagctatcaaagcgatgaaacaactcagcgaagacgttggcattccgcattccatcaaggaaattggcgccaagatcgaggacttcgaacacatggcgactaatgcgcttaaagacggtaacgccttctctaacccacgcaaaggtactaaagaagacatcatcaagattttccaagccgcatatgatgccaagtaa

SEQ ID NO: 130777 - protein, 390 aa, Lactobacillus plantarum WCFS1
MTERNFDFLMPSVNFFGPGVISKIGERAKTLGMHKPVIVTDKFLESLPDGAVAQVRRSLDAAGIDYVIYNQVEPNPKIHNIQAVKALYQANQADSLITIGGGSAHDTGKGAGIIMTNGDDITKLAGIETLKNALPPLIAVNTTAGTGSELTRHCVITNEETHYKFVVASWRNMPLVSFNDPTLMLDVPKGLTAATGMDAFVQAIEPFVSVDHNPITDSQCIQAIKLIETSLREAVANGHNLEARTHMVEAEMLAGMAFNNANLGYVHAMAHQLGGQYDAPHGVCCALLLPYVEEYNLIACPERFAELAKIMGENTDGLSTRDAAELAIKAMKQLSEDVGIPHSIKEIGAKIEDFEHMATNALKDGNAFSNPRKGTKEDIIKIFQAAYDAK

SEQ ID NO: 130778 - DNA, 1149 bp, Pseudomonas syringae pv. tomato str. DC3000
  CDS (1)..(1149): transl_table=11
atgagcagcacttttttcattcccgcagtgaacatcattggcgctggctgcatcgatgaagccatgctcgccatacgcaaatacggatttctcaaggcgctgatcgtcaccgatgcagggctggccaaggccggtgtggccagccaggtcgccggactgctggtggagcagggcatcgactcggtggtgtatgacggtgccagacccaacccgaccatcgccaacgtcgaaaacggcctggctttgctgcggaaacgtcagtgcgatttcgtgatttctctgggtggtggctcaccccacgactgcgccaagggcattgccctgtgcgccagcaacggcgggcacatcagcgactatgaaggcgtcgaccgttcggcaaagccgcagttgccgctgatcgcgatcaacaccacagccggaaccgccagcgagatgacccgcttctgcatcatcaccgatgaagcgcgtcacgtaaaaatggccatcatcgaccgcaacgtaacacccctgttatccgtaaacgacccgaacatgatggtcgccatgcccaaatcactgaccgccgccaccggtatggatgccttgacccacgccatcgaagcgtatgtgtcgaccgccgccacgccgatcaccgacgcctgcgcattgcaggccatgtcactgatcgccaacaatctgcgcgaggcagtcagcaacgggacaaacatcactgcgcgcgagaacatggcctatgcccagtttctcgccggcatggctttcaacaatgcctcgctgggttacgtgcacgcgatggcgcatcaactgggcggcttctatgatttgccgcatggcgtgtgcaatgccgtgctgctgcctcatgtgcagcgtttcaacgcgagcgtcagtgctgcacgtctgaccgatgttgcccatgcaatgggggccagcgttcgtggtctgtcgccggaagaaggtgcgcacgcggcaatcgaggctattcgggccttgtctgctgcggtagagatcccggcgggcctgactgcactgggcgtcaaggaagaggatttccctgttcttgccgccaatgcattgaaagacgcttgcggtttcaccaacccacgcccggcggatcttgagcagattcaggaactgttccgccaggcactttga

SEQ ID NO: 130779 - protein, 382 aa, Pseudomonas syringae pv. tomato str. DC3000
MSSTFFIPAVNIIGAGCIDEAMLAIRKYGFLKALIVTDAGLAKAGVASQVAGLLVEQGIDSVVYDGARPNPTIANVENGLALLRKRQCDFVISLGGGSPHDCAKGIALCASNGGHISDYEGVDRSAKPQLPLIAINTTAGTASEMTRFCIITDEARHVKMAIIDRNVTPLLSVNDPNMMVAMPKSLTAATGMDALTHAIEAYVSTAATPITDACALQAMSLIANNLREAVSNGTNITARENMAYAQFLAGMAFNNASLGYVHAMAHQLGGFYDLPHGVCNAVLLPHVQRFNASVSAARLTDVAHAMGASVRGLSPEEGAHAAIEAIRALSAAVEIPAGLTALGVKEEDFPVLAANALKDACGFTNPRPADLEQIQELFRQAL

SEQ ID NO: 130780 - DNA, 1149 bp, Vibrio parahaemolyticus RIMD 2210633
  CDS (1)..(1149): transl_table=11
atgacaagtacattttttatccctacggtaaacctaatgggcgctggctgcctaaaagacgcagcaaacagcatccaatctcaaggctttaagaaaggtttgatcgttacggataagatccttaaccaaatcggcgtagtaaaacaggttcaagatcttcttactgaacgcggcgtagcaaccgttgtgttcgatggcactcaaccaaaccctacaatcaccaacgttaatgacggcttagctcttctaaaagagaacgaatgtgacttcgtaatttcacttggtggtggctcaccacacgattgtgcaaaaggcatcgcactggttgcatctaacggcggaaaaatcggcgattacgaaggcgtggatcaatcagcaaaaccaatgctgccactaatcgcaatcaacaccacagcaggtactgcatctgaaatgacccgtttctgcatcatcactgatgaagagcgtcatattaagatggcaatcgttgataaacacacaacgcctcttatctctgtaaacgatccagaattaatgcttgctaagccagcgtctttgacggcagcaacaggtatggacgcgctaactcacgcgattgaagcgtacgtatctatcgcggcaacaccaatcactgacgctgttgcaatcaaagcgatcgagttaattcaagcacacctacgcaccgcagtgaaaaacggcgaaaacctagaagctcgtgagcaaatggcatacgcgcagttcatggctggcatggcgtttaacaacgcatctctaggttacgttcacgctatggcgcaccagctaggtggtttctacgacctaccacacggtgtatgtaacgcaatcttgcttcctcacgtacaacgctacaacgcgcaagtatgtccagagcgtctgcgtgatgtcgcgaaagcaatgggtgtggatgtagaaggtatgtcggcagaacatggtgctgcggcagcgatcgacgctatcgttgcgctagcaaaagacgttggtattccagctggtattaaagagcttggtgcgaagctagaagatatcccaacactagcagacaacgcattaaaagacgcgtgtggtttcactaacccgaaacaagcaactcacgaagagatttctgcaatcttcgaagcggcaatgtaa

SEQ ID NO: 130781 - protein, 382 aa, Vibrio parahaemolyticus RIMD 2210633
MTSTFFIPTVNLMGAGCLKDAANSIQSQGFKKGLIVTDKILNQIGVVKQVQDLLTERGVATVVFDGTQPNPTITNVNDGLALLKENECDFVISLGGGSPHDCAKGIALVASNGGKIGDYEGVDQSAKPMLPLIAINTTAGTASEMTRFCIITDEERHIKMAIVDKHTTPLISVNDPELMLAKPASLTAATGMDALTHAIEAYVSIAATPITDAVAIKAIELIQAHLRTAVKNGENLEAREQMAYAQFMAGMAFNNASLGYVHAMAHQLGGFYDLPHGVCNAILLPHVQRYNAQVCPERLRDVAKAMGVDVEGMSAEHGAAAAIDAIVALAKDVGIPAGIKELGAKLEDIPTLADNALKDACGFTNPKQATHEEISAIFEAAM

SEQ ID NO: 130782 - DNA, 1149 bp, Salmonella enterica subsp. enterica serovar Typhi Ty2
  CDS (1)..(1149): transl_table=11
atgagctttatgttggcactgccaaaaattagcctgcatggcgctggagcgattgccgatatggtgaacctcgtggcgaataagcaatggggcaaagcgctgatcgttaccgatggtcaactggtaaagctgggcctgctggatagcctgtttagcgcactggatgaacatcaaatgtcttaccacctgtttgatgaggtgttcccaaacccgacagaagagctggtgcagaaaggttttgcggcgtatcagagcgcagaatgtgactacattatcgccttcggcggcggcagcccgatcgataccgcaaaagcggtgaaaattctgaccgccaacccaggtccatctaccgcctactccggcgtcggcaaagtgaaaaacgccggcgtaccgctggtagcgattaacactacggcaggtaccgcggcagagatgaccagcaacgcggtgattatcgactctgcccgtaaggtcaaagaggtgatcatcgacccgaatatcatcccggatattgccgtggatgacgccagcgtcatgctggaaatcccggcgtctgtgaccgccgcaaccggcatggatgccctgacccatgcggtggaagcctatgtctccgttggcgcgcatccgctcaccgacgctaacgcgctggaagcgattcgcttaatcaatgtgtggctaccgaaagcggttgacgatggtcataacctcgaagcccgtgagcaaatggcattcggccagtacctggcgggtatggcgttcaacagcgccggtttggggctggttcacgcgctggcgcaccagccgggcgcaacccacaacctgccgcacggcgtctgcaacgctatcctgctgccaattgtcgagaactttaaccgtccgaacgccgtcgcgcgttttgcccgcatcgcacaggcgatgggcgtggagacgcgcggtatgtctgacgaagtcgcaagtcaggaagcgattaacgctatccgtacgctgagcaaacgcgtcggcattccagaaggtttcagcaagctgggcgtcacaaaagaagatatcgaaggctggctggataaagccctcgccgacccgtgcgcgccgtgtaacccgcgcaccgccagccgcgatgaagttcgcgagctgtacctggaggcgttatga

SEQ ID NO: 130783 - protein, 382 aa, Salmonella enterica subsp. enterica serovar Typhi Ty2
MSFMLALPKISLHGAGAIADMVNLVANKQWGKALIVTDGQLVKLGLLDSLFSALDEHQMSYHLFDEVFPNPTEELVQKGFAAYQSAECDYIIAFGGGSPIDTAKAVKILTANPGPSTAYSGVGKVKNAGVPLVAINTTAGTAAEMTSNAVIIDSARKVKEVIIDPNIIPDIAVDDASVMLEIPASVTAATGMDALTHAVEAYVSVGAHPLTDANALEAIRLINVWLPKAVDDGHNLEAREQMAFGQYLAGMAFNSAGLGLVHALAHQPGATHNLPHGVCNAILLPIVENFNRPNAVARFARIAQAMGVETRGMSDEVASQEAINAIRTLSKRVGIPEGFSKLGVTKEDIEGWLDKALADPCAPCNPRTASRDEVRELYLEAL

SEQ ID NO: 130784 - DNA, 2604 bp, Bacillus cereus ATCC 14579
  CDS (1)..(2604): transl_table=11
atggtagtcaaagagaaagttgtaaatgaaatgcaggaagtaaaaaagatgattgatacactagtaaataatggtcaacaagctttacaagcattagaaagttttacacaagaggaaattgacaacattgttcatgaaatggcattagcaggtgttgatcaacatatgccgctagcaaaattggcagttgaagaaactggccgtggtgtatatgaagacaaatgcattaaaaatatttttgccactgaatatatttggcatagtataaaacaagataaaacggtaggaattattcacgaagattctcatgaagaaataatagaaatcgcggaacctgtcggtgtagtagctggggtaacaccagtaacgaatccaacgtcgacaacaatgtttaaagcgttaattgcgataaaaacaagaaatccaattattttcgcgtttcatccttccgcacaaaaatgttctgtggcagcggcgaaaacagtatatgatgcagcgatgaaagctggtgcaccaaaacactgtattcaatggattgaaagaccgtctgttgaagcgacgaaacaattaatgaaccatgatggtgtagcactcgttctagcaactggaggcgctggtatggtgaaatcagcttactctactggaaaaccagcgttaggcgttgggcctggtaatgtaccgtgttatatagaaaaatcagcacatgtaaaacgagctgttaatgatttaattttatcgaaaacatttgataacggtatgatttgtgcatcggaacaagcaatcattgtcgataaagaaatctatgatgatgttaaaacagaaatgattgaaaacaattgttactttgtaacagaagaagaaagaaaaaaattagaaaagcttgttataaatgaaaatacatgtgcagtaaatagtgatattgtagggaaatcagcacagtatattgccgatttagttgggattactgttcctgaacatacaaaaatgcttgtagctgaaattcaaggtatcggagcagcatatccgttatctcgtgagaaactgagtccagtattagcttgtgtgaaggcgaattcattagaagaaggatttacatattgcgaagaaatgttgaacctaggtggtttaggacattcagcagttatccattctacaaataaagatgtgcaaaagcaatttgggttacgtatgaaagcttgccgtctcattgtaaatgcaccttcatcacaaggtggaataggggatatatataatggatttattccatcacttacacttggttgtggttcatacggaaagaattcagtttcccaaaatgtaacagccactcatttattaaatataaaaaggctggcaaatagaaaaaagaatatgcagtggttcaaattgccaccaaaaatttattttgaaaaacatgctacagcttatttagcaaatatgcctaacatttcacgtgcatttattgtaacggaccctggaatggttgaacatggctatgtcgatacagtcgcgcactatttaaacaagcatgcaaatgatgtgaaagttgaagttttctttgaggtcgaaccagatccatcagatgaaactgtttttaaaggtgcggaaatgatgagaagctttaagccagatgtaattatcgcacttggtggtggttcagctatggatgcagcaaaaggaatgtggttattctatgagcatccagaaacgacattctatggcattaaacagaagtttttagatataagaaaacgtacatgtaaatatccggaattaggaaataaggcgcagtttgttgcgattccaacgacatcaggaacgggatcagaagtgacaccatttgcggttattacagataagaaaaataatataaagtatccgcttgcagattatgaattaacaccagatgtagcaattgttgatccgcaatttgtaatgacagtaccaccacatgtaacagcagatactggtatggatgttttaacacatgcaattgaggcgtatgtgtctgttatggcaaatgactatacagatggattagcattaaaagctattgatctcgtattcaaatatttaccgagagcatataaagatggaaatgatgaagaagcaagagaaaaaatgcataacgcttctgcaattgcaggtatggcatttgcaaatgctttcctcggtattaatcacagcttagcacataaaattggaccagaattccatattccgcacggacgcgcaaatgccattctaatgccgcatgtagtccgctataatgctattaagccaagaaaacacgcattgttcccaaaatatgagcactttgtggcagatgaaagatatgcacatatagcgagaatgctcgggcttccagcaagctcggcagcagaaggggtggaatcactcgtcaaagcaattattgagcttggaaaaagcttaaatattaatatgagtattgcaggacaaggagtagataaagagcaatttgaagaggttgttggagtattagcagaaagagcttttgaagatcaatgtacaactgctaatccaaagttgccgcttatttcagaactgaaagaaatttatatgaaagcatataaaggtgaataa

SEQ ID NO: 130785 - protein, 867 aa, Bacillus cereus ATCC 14579
MVVKEKVVNEMQEVKKMIDTLVNNGQQALQALESFTQEEIDNIVHEMALAGVDQHMPLAKLAVEETGRGVYEDKCIKNIFATEYIWHSIKQDKTVGIIHEDSHEEIIEIAEPVGVVAGVTPVTNPTSTTMFKALIAIKTRNPIIFAFHPSAQKCSVAAAKTVYDAAMKAGAPKHCIQWIERPSVEATKQLMNHDGVALVLATGGAGMVKSAYSTGKPALGVGPGNVPCYIEKSAHVKRAVNDLILSKTFDNGMICASEQAIIVDKEIYDDVKTEMIENNCYFVTEEERKKLEKLVINENTCAVNSDIVGKSAQYIADLVGITVPEHTKMLVAEIQGIGAAYPLSREKLSPVLACVKANSLEEGFTYCEEMLNLGGLGHSAVIHSTNKDVQKQFGLRMKACRLIVNAPSSQGGIGDIYNGFIPSLTLGCGSYGKNSVSQNVTATHLLNIKRLANRKKNMQWFKLPPKIYFEKHATAYLANMPNISRAFIVTDPGMVEHGYVDTVAHYLNKHANDVKVEVFFEVEPDPSDETVFKGAEMMRSFKPDVIIALGGGSAMDAAKGMWLFYEHPETTFYGIKQKFLDIRKRTCKYPELGNKAQFVAIPTTSGTGSEVTPFAVITDKKNNIKYPLADYELTPDVAIVDPQFVMTVPPHVTADTGMDVLTHAIEAYVSVMANDYTDGLALKAIDLVFKYLPRAYKDGNDEEAREKMHNASAIAGMAFANAFLGINHSLAHKIGPEFHIPHGRANAILMPHVVRYNAIKPRKHALFPKYEHFVADERYAHIARMLGLPASSAAEGVESLVKAIIELGKSLNINMSIAGQGVDKEQFEEVVGVLAERAFEDQCTTANPKLPLISELKEIYMKAYKGE

SEQ ID NO: 130786 - DNA, 2604 bp, Bacillus anthracis str. Ames
  CDS (1)..(2604): transl_table=11
atggtagtcaaagagaaagttgtaaatgaaatgcaggaagtaaaagagatgattgatacgttagtgaataacggtcggaaggctttacaagcattagaaagttttacacaagagcaaattgacaacattgttcatgaaatggcattagcaggtgttgatcaacatatgcctcttgcgaagttggctgttgaagaaacaggtcgtggtgtatacgaagataaatgcattaaaaatatttttgctactgaatatatttggcatagcataaagaaagataaaacagtagggattattcacgaagaccctcatgaagaaataatagaaattgcggagcccgtcggtgtagtagctggggtaacaccagtaacgaatccaacatcgacaacaatgtttaaagcattaatagcgataaaaacgagaaatccaattattttcgcatttcatccttcagcacaaaactgttctgttgcagccgcgaaaacagtatacgatgcagcggtgaaggcgggggcaccaaaacattgtattcagtggattgaaaagccttctgtcgaagcaacgaaacaattaatgaaccatgaaggtgttgcgcttgttttagcaactggaggggctggtatggtgaaatcagcttattctactggaaaaccagcgctaggtgtaggtcctggtaatgtaccatgttatatagagaaatcagcgcatataaaacgagcggttaatgatttgattttatcaaaaacgtttgataacgggatgatttgtgcatcagaacaagcaatcattgtagacaaggaaatttatgatgatgtgaaaacagaaatgattacaaatgattgttactttgtaacagaggaagagagaagaaaattagaaaagcttgttattaatgaaaatacatgtgcagtaaatagtgatattgtagggaaatctgcacagtatattgccgaattagttggaattactgtacctaaaaatacaaaaatgcttgtagctgaaatacaaggcatcggagccgcatatccactatctcgtgagaagttaagtccagtattagcttgtgtaaaagcaaattcattagaagaaggatttacatattgtgaagaaatgttaaacctcggtggcttagggcattcagcagttatccattctgtaaataaagaagtgcaaaagcaatttggattacgtatgaaagcttgccgccttattgtaaatgctccttcatcacaaggtggaatcggtgacatatataatggatttattccatcacttacgcttggctgcggttcctacgggaaaaactcggtttctcaaaacgtaacagcgacgcacttattaaatataaaaaggttggcaaatagaaaaaagaatatgcagtggttcaaattaccaccaaaaatttattttgaaaaacatgcgacagcatatttagcaaatatgcctaacatttcacgtgcgtttattgtaacggatccaggaatggttgagcatggatatgtagatacggtcgcgcattatttacgtaaacatgcaaatgatgtgaaagtagaagttttctttgaggttgagccagatccatcagatgaaactgtttttaaaggtgcggaaatgatgagaagttttcagcctgatgtcatcatcgcacttggtggtggttcagcgatggatgcagcgaaagggatgtggcttttctatgagtacccagaaacaacattctatggaattaaacagaagtttttagatataagaaaacgtacatgtaaatatccggaattaggaagtaaggcgcagtttgttgccattccaacaacatctggaacaggatcagaagtgacaccatttgcggttattacagataagaaaaataatataaagtatccacttgccgattatgaattaacgccagatgtagcaattgttgatccgcaatttgtaatgacagtaccaccacatgtaacagcagatactgggatggacgtattaacgcatgcaatcgaggcatatgtgtctgttttagcaaatgattatacagatggattagcattaaaggccattgatctcgtatttaaatatttaccaagagcatttaaagatggacatgatgaagaagcacgagaaaaaatgcataatgcttctgcaattgcagggatggcatttgcaaatgcattcctaggtattaatcacagtttagcgcataaaattggaccagaattccatattccgcatggacgtgcgaatgcaattcttatgccgcacgtaattcgttataatgctattaagccaagaaaacatgcattgttcccaaaatatgagcactttgtggctgatgaacgctatgcacatattgcgagaatgctcgggctaccagcaagttcggtggcagaaggtgtagaatcactcgacaaagcaattattgatctcggaaaaagtttaaatataaatatgagtattgcgggacaaggagttgctaaagaccaatttgaagaggttgttggattattagcagaaagagcttttgaagatcaatgtacaacagctaatccgaaattacctctcatttcagagctgaaagaaatttatatgaaagcatataaaggtgagtaa

SEQ ID NO: 130787 - protein, 867 aa, Bacillus anthracis str. Ames
MVVKEKVVNEMQEVKEMIDTLVNNGRKALQALESFTQEQIDNIVHEMALAGVDQHMPLAKLAVEETGRGVYEDKCIKNIFATEYIWHSIKKDKTVGIIHEDPHEEIIEIAEPVGVVAGVTPVTNPTSTTMFKALIAIKTRNPIIFAFHPSAQNCSVAAAKTVYDAAVKAGAPKHCIQWIEKPSVEATKQLMNHEGVALVLATGGAGMVKSAYSTGKPALGVGPGNVPCYIEKSAHIKRAVNDLILSKTFDNGMICASEQAIIVDKEIYDDVKTEMITNDCYFVTEEERRKLEKLVINENTCAVNSDIVGKSAQYIAELVGITVPKNTKMLVAEIQGIGAAYPLSREKLSPVLACVKANSLEEGFTYCEEMLNLGGLGHSAVIHSVNKEVQKQFGLRMKACRLIVNAPSSQGGIGDIYNGFIPSLTLGCGSYGKNSVSQNVTATHLLNIKRLANRKKNMQWFKLPPKIYFEKHATAYLANMPNISRAFIVTDPGMVEHGYVDTVAHYLRKHANDVKVEVFFEVEPDPSDETVFKGAEMMRSFQPDVIIALGGGSAMDAAKGMWLFYEYPETTFYGIKQKFLDIRKRTCKYPELGSKAQFVAIPTTSGTGSEVTPFAVITDKKNNIKYPLADYELTPDVAIVDPQFVMTVPPHVTADTGMDVLTHAIEAYVSVLANDYTDGLALKAIDLVFKYLPRAFKDGHDEEAREKMHNASAIAGMAFANAFLGINHSLAHKIGPEFHIPHGRANAILMPHVIRYNAIKPRKHALFPKYEHFVADERYAHIARMLGLPASSVAEGVESLDKAIIDLGKSLNINMSIAGQGVAKDQFEEVVGLLAERAFEDQCTTANPKLPLISELKEIYMKAYKGE

SEQ ID NO: 130788 - DNA, 1134 bp, Chromobacterium violaceum ATCC 12472
  CDS (1)..(1134): transl_table=11
atgagcacaagcgctttcttcatcccctcgctgaacctgatgggcgcgggctgtctgcaacaggccgtcgacgcgatgcgcggccacggtttccgccgcgcgctgatcgtcaccgaccagggcctggtcaaggccggcctggccgccaaggtggccgacatgctgggcaaggccgacatcgaaccggtgatcttcgacggcgtccatcccaatcccagctgcgccaatgtcaacgccggtctggcgctgctcaaggaaaagcagtgcgacgtggtggtgtcgctgggcggcggctcgccgcacgactgcgccaaaggcatcgcgctggtggcggtgaacggcggcaagatccaggactacgagggcgtggacaagtcggccaagccgcagctgccgctggtggcgatcaacaccaccgcaggcaccgcgtccgaaatgacccgcttctgcatcatcaccgacgagtcgcgccatatcaagatggccatcgtcgacaagcacaccacgcccatcctgtcggtcaacgatccggaaaccatggccggcatgccggcctcgctgaccgccgccaccggcatggacgcgctgacccacgcggtggaagcctatgtgtccactatcgccacccccatcaccgacgcctgcgccttgaaggcggtggaactgatcgccggcttcctgcgccgcgcggtgaaggacggcaaggacatggaagcgcgcgagcaaatggcttacgcccagttcctggccggcatggccttcaacaacgcctcgctgggctatgtgcacgcgatggcgcaccagctgggcggcttctacgacctgccgcacggcgtgtgcaacgcggtgctgctgccgcatgtgcaggccttcaacgcagcctcggccggagagcggctgggcgacgtggccatcgcgctgggcgagaagacacgcagcgcccaggcggccatcgcggcgatcaagcgcctggcggcggatgtcggcattccggcaggcttgagggagctgggcgtcaaggaggcggatatcccgacgctggcggacaacgcgctgaaggatgcctgcggtttcaccaatccgcgcaagggcagccatgaggatgtctgcgcgatcttccgcgccgcgatgtag

SEQ ID NO: 130789 - protein, 377 aa, Chromobacterium violaceum ATCC 12472
MSTSAFFIPSLNLMGAGCLQQAVDAMRGHGFRRALIVTDQGLVKAGLAAKVADMLGKADIEPVIFDGVHPNPSCANVNAGLALLKEKQCDVVVSLGGGSPHDCAKGIALVAVNGGKIQDYEGVDKSAKPQLPLVAINTTAGTASEMTRFCIITDESRHIKMAIVDKHTTPILSVNDPETMAGMPASLTAATGMDALTHAVEAYVSTIATPITDACALKAVELIAGFLRRAVKDGKDMEAREQMAYAQFLAGMAFNNASLGYVHAMAHQLGGFYDLPHGVCNAVLLPHVQAFNAASAGERLGDVAIALGEKTRSAQAAIAAIKRLAADVGIPAGLRELGVKEADIPTLADNALKDACGFTNPRKGSHEDVCAIFRAAM

SEQ ID NO: 130790 - DNA, 1152 bp, Photorhabdus luminescens subsp. laumondii TTO1
  CDS (1)..(1152): transl_table=11
atgatgactacgactttttttatgacatcggtaaatatgtttggtgcgggttgtttggttgaagcggtaaatacgatgaaaggtgatggttataagcgagcattgattgtgaccgatcgtgttttaaatgaaattggggtggcagcaaaagttcaagctttattatctgatgttgatattgagagtacggtttatgatggtactaatccgaatccgacgacaattaacgttgaggaaggtttggatattctgcgtcagcataatagcgattgcgttatttctttagggggtggttcgccacatgattgtgcaaaagctattgtgttggtcgctgctaatggaggcgatatccgggattatgtcggtattggccgttcatctaaaccgcatttgccattaatctcagtcaatactaccgcgggtactgcgtcagaaatgtcacgtttctgtgttattaccgatactgaaagccatattaaaatggccattgctgacaagaaaataacacctgttttgtctgtgaacgatccggaattaatggtaggaatgccgaaagggttaaccgccgcaactggaatggatgcaatgactcatgcggttgaagcctatgtttctcctgcggctagcccaataacggatgcttgtgcattgaaagcaatctcaatgattagtcactctttacgccaagcagttgcagatgggagcaatatagaagcacgtgaaaacatggcctatgcacaattcttggcggggatggcgtttaatagtgcattactggggtatgtacacgccatgtctcaccaattgggcggtacttatgatttaccacacggcatatgcaatgctgttttattaccacacgttcaagagttcaacgctaaagcggttgcgggtcgtttgaaagatattgccgctgcgatgggggtagatgtaagcgctatgaatgatcagcaaggggctgcggcatgtattgctgaaattcgtaagttgtcaaaagatattggtattccgtcgggtctagcggaactgaatgtcaaattagaagatttaccagagttagcaactaatgccttgaaagatatatgttgtttgactaatcccactcaagctacccatgaagaaattgtttcgatctttaaagcggccatgtga

SEQ ID NO: 130791 - protein, 383 aa, Photorhabdus luminescens subsp. laumondii TTO1
MMTTTFFMTSVNMFGAGCLVEAVNTMKGDGYKRALIVTDRVLNEIGVAAKVQALLSDVDIESTVYDGTNPNPTTINVEEGLDILRQHNSDCVISLGGGSPHDCAKAIVLVAANGGDIRDYVGIGRSSKPHLPLISVNTTAGTASEMSRFCVITDTESHIKMAIADKKITPVLSVNDPELMVGMPKGLTAATGMDAMTHAVEAYVSPAASPITDACALKAISMISHSLRQAVADGSNIEARENMAYAQFLAGMAFNSALLGYVHAMSHQLGGTYDLPHGICNAVLLPHVQEFNAKAVAGRLKDIAAAMGVDVSAMNDQQGAAACIAEIRKLSKDIGIPSGLAELNVKLEDLPELATNALKDICCLTNPTQATHEEIVSIFKAAM

SEQ ID NO: 130792 - DNA, 1149 bp, Vibrio vulnificus YJ016
  CDS (1)..(1149): transl_table=11
atggcatttgcactaaatcttcctaaattgagttactcaggtgtcggagcggtcgatgatgcgatcgcaacgctaagccaacagccaatcaaacgcgcgttagtggtaacggaccataatctggtcgaactgggcatcttggatcatttgtttgagttgcttgatgagttctctattgactacgagttgtttgacaaagtgacgccaaatccaactgcaacgttagtgcgagaaggattagcggtttacaacgatactggctgcgattgtttcatcgcagtcgggggcggtagcccagtcgattgtgccaaagcgatccgtattgtggcgtctaacccaggtgatatcgttgattttgatggggttggcaaagtgaagagtgctggtgatttcttcattgccatcaataccaccgcagggaccgcggccgagatgacctcgaactcggtgatcactgatgagtcgcgccaagtaaaaatggtcattattgacgccaaacagatccctgatgtcgcggttaatgacccgacgttgatggtcaatttgccaccgcacgtaaccgccgcgacggggatggatgcgctcactcacgcggtggaagcctatgtcacaccaggcgcacataccttaactaaaccgactgcgcttgaggcaatcaaactgattgcccagtggttacctatcgcggttgaagatggtaaaaatcttgaagcgcgcgagcaattggctaacgctcagttcttagcgggcatggcgtttaacagtgcgggtttggggttagtgcacgccatggctcatcaacctggcgcgactcataatttacctcatggggtgtgcaatgcgattttgctgccgcaagtgtgtgaatttaacgccgagaaatatcctcaacgttttcgcgatatcgcttcggtgatgggtgggaaaacggaggggctgagcgatagagaagctgccgatttagccgttaatctgatgcggaatttgtcaaaacgagtcaacattcctagcggtttttctttgcttggaataagtcgagcagattgcgagctgtggatagagaaagccctggctgacccgtgtctggggggaaaccctcgccagccaacagccagtgaagtagagtcactctaccttgcgtgtatgtaa

SEQ ID NO: 130793 - protein, 382 aa, Vibrio vulnificus YJ016
MAFALNLPKLSYSGVGAVDDAIATLSQQPIKRALVVTDHNLVELGILDHLFELLDEFSIDYELFDKVTPNPTATLVREGLAVYNDTGCDCFIAVGGGSPVDCAKAIRIVASNPGDIVDFDGVGKVKSAGDFFIAINTTAGTAAEMTSNSVITDESRQVKMVIIDAKQIPDVAVNDPTLMVNLPPHVTAATGMDALTHAVEAYVTPGAHTLTKPTALEAIKLIAQWLPIAVEDGKNLEAREQLANAQFLAGMAFNSAGLGLVHAMAHQPGATHNLPHGVCNAILLPQVCEFNAEKYPQRFRDIASVMGGKTEGLSDREAADLAVNLMRNLSKRVNIPSGFSLLGISRADCELWIEKALADPCLGGNPRQPTASEVESLYLACM

SEQ ID NO: 130794 - DNA, 1149 bp, Vibrio vulnificus YJ016
  CDS (1)..(1149): transl_table=11
atggcaagtgcattttttatcccaactgtgaacctaatgggcgcaggctgtcttaaagacgcagcagacagcattaaagctcaaggctttaccaaagggcttattgttaccgacaaaattcttaatcaaatcggcgttgtaaaacaagttcaagacctactaagcgagcgtcatgtagaagcggttgtcttcgatggtactcagcccaacccaaccatcggcaacgtcaatgcaggtttggcactactgaagcaaaatgagtgtgattttgtgatttcactaggtggtggttctccgcacgactgtgcaaaaggcattgcgcttgtcgcagcaaacggcggcgagattgcggattacgaaggcgtggacaaatcagcgaaaccaatgctaccgctgattgcgattaacactaccgcaggcaccgcatctgaaatgacccgtttctgcatcattaccgatgaagaacgtcatattaaaatggcgattgtcgataaacacaccacgccactaatctctgtgaacgatcctgaactgatgctggcaaaacctgcatcactcactgcggcaacaggaatggacgccttgactcacgcggtagaagcgtacgtttctattgctgcgacaccaattactgacgcagtcgcaatcaaagcgattgagcttatccaagcccatcttcgtactgcggttgcacacggtgacgatattgaagcgcgtgagcaaatggcgtacgcacagttcatggcaggtatggcgttcaacaatgcctcactaggttacgtacacgcaatggcgcaccaattgggtggcttctacgatctaccacacggtgtttgtaacgcgatcttgttgccacacgtacaacgctacaatgcgcaggtttgtccagagcgtctacgtgatgtggcaaaagcaatgggtgtcaatgtcgaaggcatgagtgcagagcaaggcgcagaagccgccattgatgcgattgtggcactggcgaaagacgtgggtattccagcaggtattcgcgagcttggtgcaaaatctgaagatatcccaaccttggctgacaatgcactcaaagacgcttgtggtttcactaacccgaaacaagccacgcacgaagaaatctctgcgattttcgaagcggcaatgtaa

SEQ ID NO: 130795 - protein, 382 aa, Vibrio vulnificus YJ016
MASAFFIPTVNLMGAGCLKDAADSIKAQGFTKGLIVTDKILNQIGVVKQVQDLLSERHVEAVVFDGTQPNPTIGNVNAGLALLKQNECDFVISLGGGSPHDCAKGIALVAANGGEIADYEGVDKSAKPMLPLIAINTTAGTASEMTRFCIITDEERHIKMAIVDKHTTPLISVNDPELMLAKPASLTAATGMDALTHAVEAYVSIAATPITDAVAIKAIELIQAHLRTAVAHGDDIEAREQMAYAQFMAGMAFNNASLGYVHAMAHQLGGFYDLPHGVCNAILLPHVQRYNAQVCPERLRDVAKAMGVNVEGMSAEQGAEAAIDAIVALAKDVGIPAGIRELGAKSEDIPTLADNALKDACGFTNPKQATHEEISAIFEAAM

SEQ ID NO: 130796 - DNA, 1152 bp, Rhodopseudomonas palustris CGA009
  CDS (1)..(1152): transl_table=11
atgaccgcaacgaccttcttcattccctctctcaatctgttcggcgccggctgcgtatcgagcgcagcggaccacgccaaggcacgcggcttcaagcgcgcgctgatcgtcaccgacagcgggctgcacaagctcggcgtcgccgatcagatcgcctcgatgctgatcgagcgcaacgtgaccagcgtcgtcttccccggcgcgaagccaaacccgacgatcaagaacgtcgaagacgggcttgcactgctgaagcaggagaactgcgactgcgtgatctcgctcggcggcggttcagcgcacgattgcgcgaagggcatcgcgctgaccgccaccaatggcggcagcatcaaggactatgaaggcgtcgatcggtcggcgcacgctcagcttccgctgatcgccatcaacaccacggcgggcacggcgagtgagatgacgcggttctgcatcatcaccgacgaggaacgccaggtgaagatggcgatcgtcgaccgccacaccacgccgctgctgtcggtcaacgatccggtactgatgctcggcaagccgccggccctgaccgccgcgaccggcatggacgcgctgacgcacgcgatcgaagcctatgtgtcgatcgccgcaacgccgatcaccgacgcctgcgcgctaaaggcgatgtcgatcatctccaacagtctgcgcaccgtggtcgccgagggccagaacctcgtcgcccgcgaggcgatgtcgtatgcgggcttcctcgccggcatggcgttcaacaacgcctcgctcggctatgtacatgcgatggcgcaccagctcggcggcttctacgacctgccgcacggcgtctgcaacgcggtgctgctgccgcacgtgcaggcctacaacgcgcaagtcgcggcgggacggctgaaggacgtcgcccacgcgctcggcgtcgacaccaccggcatgaccgatgcccaaggcgccgatgccgccattcatgccatccaacggctatcggccgatgtcggcattccgcccggtctcggcggtctcggcatgaaggaaaccgacgtgccgatcctcgccgccaacgcgctgaaggatgcgtgcggcttcaccaatccgaagcaggcgacgcagaccgagatcgaaaccatcttccgggcggccgcctga

SEQ ID NO: 130797 - protein, 383 aa, Rhodopseudomonas palustris CGA009
MTATTFFIPSLNLFGAGCVSSAADHAKARGFKRALIVTDSGLHKLGVADQIASMLIERNVTSVVFPGAKPNPTIKNVEDGLALLKQENCDCVISLGGGSAHDCAKGIALTATNGGSIKDYEGVDRSAHAQLPLIAINTTAGTASEMTRFCIITDEERQVKMAIVDRHTTPLLSVNDPVLMLGKPPALTAATGMDALTHAIEAYVSIAATPITDACALKAMSIISNSLRTVVAEGQNLVAREAMSYAGFLAGMAFNNASLGYVHAMAHQLGGFYDLPHGVCNAVLLPHVQAYNAQVAAGRLKDVAHALGVDTTGMTDAQGADAAIHAIQRLSADVGIPPGLGGLGMKETDVPILAANALKDACGFTNPKQATQTEIETIFRAAA

SEQ ID NO: 130798 - DNA, 1149 bp, Bacillus methanolicus
  CDS (1)..(1149): transl_table=11
atgacaacaaactttttcattccaccagccagcgtaattggacgcggtgcagtaaaggaagtaggaacaagacttaagcaaattggagctaagaaagcgcttatcgttacagatgcattccttcacagcacaggtttatctgaagaagttgctaaaaacattcgtgaagctggcgttgatgttgcgattttcccaaaagctcaaccagatccagcagatacacaagttcatgaaggtgtagatgtattcaaacaagaaaactgtgattcacttgtttctatcggtggaggtagctctcacgatacagctaaagcaatcggtttagttgcagcaaacggcggaagaatcaatgactatcaaggtgtaaacagcgtagaaaaaccagtcgttccagtagttgcaatcactacaacagctggtactggtagtgaaacaacatctcttgcggttattacagactctgcacgtaaagtaaaaatgcctgttattgatgagaaaattactccaactgtagcaattgttgacccagaattaatggtgaaaaaaccagctggattaacaatcgcaactggtatggatgcattgtcccatgcaattgaagcatatgttgcaaaaggtgctacaccagttactgatgcatttgctattcaagcaatgaaacttatcaatgaatacttaccaaaagcggttgcgaacggagaagacatcgaagcacgtgaaaaaatggcttatgcacaatacatggcaggagtggcatttaacaacggtggtttaggactagttcactctatttctcaccaagtaggtggagtttacaaattacaacacggaatctgtaactcagttaatatgccacacgtttgcgcattcaacctaattgctaaaactgagcgcttcgcacacattgctgagcttttaggtgagaatgttgctggcttaagcactgcagcagctgctgagagagcaattgtagctcttgaaagaatcaacaaatccttcggtatcccatctggctatgcagaaatgggcgtgaaagaagaggatatcgaattattagcgaaaaacgcatacgaagacgtatgtactcaaagcaacccacgcgttcctactgttcaagacattgcacaaatcatcaaaaacgctatgtaa

SEQ ID NO: 130799 - protein, 382 aa, Bacillus methanolicus
MTTNFFIPPASVIGRGAVKEVGTRLKQIGAKKALIVTDAFLHSTGLSEEVAKNIREAGVDVAIFPKAQPDPADTQVHEGVDVFKQENCDSLVSIGGGSSHDTAKAIGLVAANGGRINDYQGVNSVEKPVVPVVAITTTAGTGSETTSLAVITDSARKVKMPVIDEKITPTVAIVDPELMVKKPAGLTIATGMDALSHAIEAYVAKGATPVTDAFAIQAMKLINEYLPKAVANGEDIEAREKMAYAQYMAGVAFNNGGLGLVHSISHQVGGVYKLQHGICNSVNMPHVCAFNLIAKTERFAHIAELLGENVAGLSTAAAAERAIVALERINKSFGIPSGYAEMGVKEEDIELLAKNAYEDVCTQSNPRVPTVQDIAQIIKNAM

SEQ ID NO: 130800 - DNA, 2604 bp, Bacillus cereus ATCC 10987
  CDS (1)..(2604): transl_table=11
atggtagtcaaagagaaaattgtaaatgaaatgcaggaagtaaaagagatgattgatacgttagtgaataacggtcgaaaggctttacaagcattagaaagttttacacaagagcaaattgacaacattgttcatgaaatggcattagcaggtgttgatcaacatatgccacttgcgaagttggctgttgaagaaacaggtcgtggtgtatacgaagataaatgtattaaaaatatttttgctactgaatatatttggcatagcataaagaaagataaaacagtagggattattcacgaagatcctcatgaagaaataatagaaattgcggagcccgtcggtgtagtagctggggtaacaccagtaacgaatccaacatcgacaacaatgtttaaagcattaatcgcgataaaaacgagaaatccaattattttcgcatttcatccttccgcacaaaactgttctattgcagctgcgaaaacagtatacgatgcagcggtgaaggcgggggcaccaaaatattgtattcagtggattgaaaagccttctgtcgaagcaacgaaacaattaatgaaccatgaaggtgttgcgcttgttttggcaactggaggggctggtatggtgaaatcagcttattctactggaaaaccagcgctaggtgtaggtcctggtaatgtaccatgttatatagagaaatcagcgcatataaaacgagcggttaatgatttgattttatctaaaacatttgataatggtatgatttgtgcatcagaacaagcaattattgtagacaaggaaatttatgatgatgtgaaaacagaaatgattgcaaatgattgttattttgtaaccgaggaagagagaagtaaattagaaaagcttgttattaatgaaaatacatgtgcagtaaatagtgatattgtagggaaatccgcacagtatattgccaaattagttggaattactgtacctaaaaatacaaaaatgcttgtagctgaaatacaaggcatcggagccgcatatccactatctcgtgagaagttaagtccagtattagcttgtgtaaaagcaaattcattagaagaaggatttacatattgtgaagaaatgttaaacctcggtggtttaggacattcagcagttatccattctgtaaataaagaagtgcaaaagcaatttggattacgtatgaaagcttgccgccttattgtaaatgccccttcatcacaaggtggaatcggtgacatatataatggatttattccatcacttacgcttggctgcggttcctacgggaaaaactcgatttctcaaaacgtaacagcgacgcatttattaaatataaaaaggttggcaaatagaaaaaagaatatgcaatggttcaaattaccaccaaaaatttattttgaaaaacatgcgacagcatatttagcaaatatgcctaacatttcacgtgcatttattgtaacggatccaggaatggttgagcacggatatgtagatacggtcacgcattatttacgtaaacatgtaaatgatgtgaaagttgaagttttctttgaggttgagccggatccatcagatgaaactgtgtttaaaggtgcagaaatgatgagaagttttcagccagatgtaattatcgcacttggtggtggttcagcgatggatgccgcgaaagggatgtggcttttctatgagcatccagaaacaacattctatggaattaaacagaagtttttagatataagaaaacgaacatgtaaatatccggaattaggaagtaaggcgcagtttattgccattccaacaacatctggaacaggatcagaagtgacaccatttgcggttattacagataagaaaaataatataaagtatccactcgcggattatgaattaacgccagatgtagcaattgttgatccacaatttgtaatgacagtaccaccacatgtaacagcagacaccggcatggacgtattaacgcatgcaatcgaggcgtatgtgtctgttttagcgaatgactatacagatggattagcattaaaggccattgatctcgtatttaaatatttaccaagagcatttaaagatggaaatgatgaagaagcacgagaaaaaatgcacaatgcttctgcaatcgcaggaatggcatttgcaaatgcttttctaggtattaatcacagcttagcacataaaattggaccagaatttcatattccacatgggcgtgcgaatgcaattcttatgccgcacgtagttcgctataatgctattaagccaagaaaacacgcattgttcccaaaatatgagcactttgtagccgatgaacgctatgcacatattgcgagaatgctcgggcttccagcaagttcgactgcagaaggtgtggaatcacttgtcaaagcaattattgagctcggaaaaagtttaaatataaatatgagtattgcaggacaaggagttgctaaagaccaatttgaagaggttgttggattattagcagaaagagcttttgaagatcaatgtacaacagctaatccaaaattacctctcatttcagagctgaaagaaatttatatgaaagcatataaaggtgagtaa

SEQ ID NO: 130801 - protein, 867 aa, Bacillus cereus ATCC 10987
MVVKEKIVNEMQEVKEMIDTLVNNGRKALQALESFTQEQIDNIVHEMALAGVDQHMPLAKLAVEETGRGVYEDKCIKNIFATEYIWHSIKKDKTVGIIHEDPHEEIIEIAEPVGVVAGVTPVTNPTSTTMFKALIAIKTRNPIIFAFHPSAQNCSIAAAKTVYDAAVKAGAPKYCIQWIEKPSVEATKQLMNHEGVALVLATGGAGMVKSAYSTGKPALGVGPGNVPCYIEKSAHIKRAVNDLILSKTFDNGMICASEQAIIVDKEIYDDVKTEMIANDCYFVTEEERSKLEKLVINENTCAVNSDIVGKSAQYIAKLVGITVPKNTKMLVAEIQGIGAAYPLSREKLSPVLACVKANSLEEGFTYCEEMLNLGGLGHSAVIHSVNKEVQKQFGLRMKACRLIVNAPSSQGGIGDIYNGFIPSLTLGCGSYGKNSISQNVTATHLLNIKRLANRKKNMQWFKLPPKIYFEKHATAYLANMPNISRAFIVTDPGMVEHGYVDTVTHYLRKHVNDVKVEVFFEVEPDPSDETVFKGAEMMRSFQPDVIIALGGGSAMDAAKGMWLFYEHPETTFYGIKQKFLDIRKRTCKYPELGSKAQFIAIPTTSGTGSEVTPFAVITDKKNNIKYPLADYELTPDVAIVDPQFVMTVPPHVTADTGMDVLTHAIEAYVSVLANDYTDGLALKAIDLVFKYLPRAFKDGNDEEAREKMHNASAIAGMAFANAFLGINHSLAHKIGPEFHIPHGRANAILMPHVVRYNAIKPRKHALFPKYEHFVADERYAHIARMLGLPASSTAEGVESLVKAIIELGKSLNINMSIAGQGVAKDQFEEVVGLLAERAFEDQCTTANPKLPLISELKEIYMKAYKGE

SEQ ID NO: 130802 - DNA, 1257 bp, Kluyveromyces lactis NRRL Y-1140
  CDS (1)..(1257)
atgttgcacatacgagcattaaaaatcgcagaacatacgaagttcaatcctcttcagtgttctaggaaactcgcattcaaacacaaccaaatcatactaaagaaagaaatgtcgtccgtcgttggcttctatatgccaactgtctcatactttggtgaaggtgctcttgatgaagttgctgactatatcaagagccaaaatttcaagagacccgttatcatcactgacccaggtatttccaagatcggtcttacagatagagtagccagtcttttggaaaaacgtggtagtgcagtaggcatttatgaccaaactcagccaaaccccacaactagcaacgtcaatgctggtctcgtggtcttgaaggagcacaatggtgacattatcatttccattggtgggggttccgcacatgataatgccaaggctattgctctattggccactaatggtggtgaaattggtgactacgaaggtgtgaataaatccaaaaataaggctttaccaatggttgctgtcaatactaccgctggtactgcttctgaaatgaccaaatttaccattatcaccaatgaagaaaagaaggttaagatggccatcattgacaaccacatcactccaagtgtcgccgtaaatgaccctagtataatgtatggtcttccaccatcattgactgctgcaacaggtttagatgctttgacacactgtgtagaatcatatgtctcaactgctgctaatcctatcactgacacatgtgcgttgaagggtgtcgagttgattcaagaacacttacttaacgctttcgaaaatggtaaagacactaccgcaagaactggtatgtgttacgctcaataccttgcaggtatggctttcaacaacgcctctttgggttatgttcactccattgctcatcagcttggtggtttctatcacttgcctcacggtgtttgtaatgccgtgctattgcctcatgttcagtcttttaataaaaaggatcctagggccaacgagcgactaagccagattgctcctcatttgggtgcaaaagacgctactgctgatgccttggttgagcgtcttcttgagttcacgaagagcttgggaattccaagaaatttgaaggaacttggtgtcaaggaagaagatttcgagattcttgctgaacacgctttgaaagatgtttgcggcttaactaacccaatccagttcacgaaggatgaggtcattgcaataattagacaggcttatgaatactga

SEQ ID NO: 130803 - protein, 418 aa, Kluyveromyces lactis NRRL Y-1140
MLHIRALKIAEHTKFNPLQCSRKLAFKHNQIILKKEMSSVVGFYMPTVSYFGEGALDEVADYIKSQNFKRPVIITDPGISKIGLTDRVASLLEKRGSAVGIYDQTQPNPTTSNVNAGLVVLKEHNGDIIISIGGGSAHDNAKAIALLATNGGEIGDYEGVNKSKNKALPMVAVNTTAGTASEMTKFTIITNEEKKVKMAIIDNHITPSVAVNDPSIMYGLPPSLTAATGLDALTHCVESYVSTAANPITDTCALKGVELIQEHLLNAFENGKDTTARTGMCYAQYLAGMAFNNASLGYVHSIAHQLGGFYHLPHGVCNAVLLPHVQSFNKKDPRANERLSQIAPHLGAKDATADALVERLLEFTKSLGIPRNLKELGVKEEDFEILAEHALKDVCGLTNPIQFTKDEVIAIIRQAYEY

SEQ ID NO: 130804 - DNA, 1182 bp, Desulfovibrio vulgaris subsp. vulgaris str. Hildenborough
  CDS (1)..(1182): transl_table=11
atggcagtacaggaacaggtctacggtttcttcattccccgggtgaccctcatcggcatcggtgcctccaaggccattcctgaaaagatcaaggcgcttggcgggtcgaagccgctcatcgtcaccgacatgggcatcgtcaaggctggcatcctgaagcagataaccgaccttctcgacgccgcgaagatggcctacagcgtgtatgacgagaccatccccaaccccacggacgacaacgtccacaagggtgtcgacgtctacaagaagaacaagtgcgacagcctcatcaccctcggtggcggcagctcgcacgactgtggcaagggcatcggcctcgtcgtcgccaacggcggcaagattcacgacttcgaaggcgtggacaagtcgacccagcgcatgcccccctaccttgcggtcaacaccacggcaggcaccgcttcggagatgacccgcttctgcatcatcaccgacaccagccgcaaggtgaagatggccatcgtcgactggcgcgtgaccccgaacatcgccctcgacgaccccctgctgatgctcggaatgccccccgcactcaccgcggccaccggcatggacgccctgacccacgccgtggaagcctacgtctccaccatcgccacccccatgaccgacgcctgcgcagaacaggccatcacgctcatcgccaccttcctgcgccgtgccgttgccaacggtcaggacctcgaggcccgcgaacgcatgtgcttcgcgcagtaccttgccggcatggccttcaacaatgccagcctcggccatgtccatgccatggcgcaccagcttggcggtttctacgacctgccgcacggcgagtgcaacgccatcctgctgccccacgtctccaagttcaacctcatcgccaagcttgaccgctacgcccgcatcgcacagctgatgggcgagaacatcgccggtctgtccacgcgtgaagccgccgaaagggccatcagcgccatcaagtgcctgtccaccgatgtgggcatccccgccggtctggtggcgcttggcaagcgttacggcaaggacgtcaaggccgccgacatcgccatcatgaccaagaacgcgcagaaggacgcctgcggcctgaccaatccgcgttgtccgacggatgctgacgtcgcagccatttacgaagcggccctgtaa

SEQ ID NO: 130805 - protein, 393 aa, Desulfovibrio vulgaris subsp. vulgaris str. Hildenborough
MAVQEQVYGFFIPRVTLIGIGASKAIPEKIKALGGSKPLIVTDMGIVKAGILKQITDLLDAAKMAYSVYDETIPNPTDDNVHKGVDVYKKNKCDSLITLGGGSSHDCGKGIGLVVANGGKIHDFEGVDKSTQRMPPYLAVNTTAGTASEMTRFCIITDTSRKVKMAIVDWRVTPNIALDDPLLMLGMPPALTAATGMDALTHAVEAYVSTIATPMTDACAEQAITLIATFLRRAVANGQDLEARERMCFAQYLAGMAFNNASLGHVHAMAHQLGGFYDLPHGECNAILLPHVSKFNLIAKLDRYARIAQLMGENIAGLSTREAAERAISAIKCLSTDVGIPAGLVALGKRYGKDVKAADIAIMTKNAQKDACGLTNPRCPTDADVAAIYEAAL

SEQ ID NO: 130806 - DNA, 2604 bp, Bacillus thuringiensis serovar konkukian str. 97-27
  CDS (1)..(2604): transl_table=11
atggtagtcaaagagaaagttgtaaatgaaatgcaggaagtaaaagagatgattgatacgttagtgaataacggtcggaaggctttacaagcattagaaagttttacacaagagcaaattgacaacattgttcatgaaatggcattagcaggtgttgatcaacatatgccacttgcgaaattggctgttgaagaaacaggtcgtggtgtatacgaagataaatgcattaaaaatatttttgctactgaatatatttggcatagcataaagaaagataaaacagtagggattattcacgaagatcctcatgaagaaataatagaaattgcggagcccgtcggtgtagtagctggggtaacaccagtaacaaatccaacatcgacaacaatgtttaaagcattaatcgcgataaaaacgagaaatccaattattttcgcatttcatccttcagcacaaaactgttctattgcagccgcgaaaacagtatacgatgcagcggtgaaggcgggggcaccaaaacattgtgtgcagtggattgaaaagccttctgtcgaagcaacgaaacaattaatgaaccatgaaggtgttgcgcttgttttggcaactggaggggctggtatggtgaaatcagcttattctactggaaaaccagcgctaggtgtaggtcctggtaatgtaccatgttatatagagaaatcagcgcatataaaacgagcggttaatgatttgattttatcaaaaacatttgataacgggatgatttgtgcatcagaacaagcaattattgtagataaggaaatttatgatgatgtgaaaacagaaatgattgcaaatgattgttactttgtaacagaggaagagagaagaaaattagaaaagcttgttattaatgaaaatacatgtgcagtaaatagtgatattgtagggaaatccgcacagtatattgccgaattagttggaattactgtacctaaaaatacaaaaatgcttgtagctgaaatacaaggcatcggagccgcatatccactatcacgtgagaagttaagtccagtattagcttgtgtaaaagcaaattcattagaagaaggatttacatattgtgaagaaatgttaaacctcggtggtttagggcattcagcagttatccattctgtaaataaagaagtgcaaaagcaatttggattacgtatgaaagcttgtcgccttattgtaaatgctccttcatcacaaggtggaatcggtgacatatataatggatttattccatcacttacgcttggctgcggttcctacgggaaaaactcggtttctcaaaacgtaacagcgacgcatttattaaatataaaaaggttggcaaatagaaaaaagaatatgcagtggttcaaattaccaccaaaaatttattttgaaaaacatgcgacagcatatttagcaaatatgcctaacatttcacgtgcgtttattgtaacggatccaggaatggttgagcacggatatgtagatacggtcgctcattatttacgtaaacatgcaaatgatgtgaaagtagaagttttctttgaggttgagccagatccatcagatgaaactgtgtttaaaggtgcggaaatgatgagaagttttcagcctgacgtcattatcgcacttggtggtggttcagcgatggatgcagcgaaagggatgtggcttttctatgagcatccagaaacaacattctatggaattaaacagaagtttttagatataagaaaacgcacatgtaaatatccggaattaggaagtaaggcgcagtttgttgccattccaacaacatctggaacaggatcagaagtgacaccatttgcggttattacagataagaaaaataatataaagtacccactcgcggattatgaattaacgccagatgtagcaattgtagatccgcaatttgtaataacagtaccgccacatgtaacagcagacactgggatggacgtattaacgcatgcaatcgaggcgtatgtgtctgttttagcaaatgactatacagatggactagcattaaaggctattgatctcgtatttaaatatttaccaagagcatttaaagatggacatgatgaagaagcacgagaaaaaatgcataatgcttctgcaattgcagggatggcatttgcaaatgcattcctaggtattaatcacagtttagcgcataaaattggaccagaattccatattccgcatggacgtgcgaatgccattcttatgccgcacgtaattcgttataatgctattaagccaagaaaacatgcattgttcccaaaatatgagcactttgtggctgatgaacgctatgcacatattgcgagaatgctcgggcttccagcaagttcggcggcagaaggtgtggaatcactcgtcaaagcaattattgatctcggaaaaagtttaaatataaatatgagtattgcgggacaaggagttgctaaagaccaatttgaagaggttgttggattattagcagaaagagcttttgaagatcaatgtacaacagctaatccgaaattacctctcatttcagagctgaaagaaatttatatgaaagcatataaaggtgagtaa

SEQ ID NO: 130807 - protein, 867 aa, Bacillus thuringiensis serovar konkukian str. 97-27
MVVKEKVVNEMQEVKEMIDTLVNNGRKALQALESFTQEQIDNIVHEMALAGVDQHMPLAKLAVEETGRGVYEDKCIKNIFATEYIWHSIKKDKTVGIIHEDPHEEIIEIAEPVGVVAGVTPVTNPTSTTMFKALIAIKTRNPIIFAFHPSAQNCSIAAAKTVYDAAVKAGAPKHCVQWIEKPSVEATKQLMNHEGVALVLATGGAGMVKSAYSTGKPALGVGPGNVPCYIEKSAHIKRAVNDLILSKTFDNGMICASEQAIIVDKEIYDDVKTEMIANDCYFVTEEERRKLEKLVINENTCAVNSDIVGKSAQYIAELVGITVPKNTKMLVAEIQGIGAAYPLSREKLSPVLACVKANSLEEGFTYCEEMLNLGGLGHSAVIHSVNKEVQKQFGLRMKACRLIVNAPSSQGGIGDIYNGFIPSLTLGCGSYGKNSVSQNVTATHLLNIKRLANRKKNMQWFKLPPKIYFEKHATAYLANMPNISRAFIVTDPGMVEHGYVDTVAHYLRKHANDVKVEVFFEVEPDPSDETVFKGAEMMRSFQPDVIIALGGGSAMDAAKGMWLFYEHPETTFYGIKQKFLDIRKRTCKYPELGSKAQFVAIPTTSGTGSEVTPFAVITDKKNNIKYPLADYELTPDVAIVDPQFVITVPPHVTADTGMDVLTHAIEAYVSVLANDYTDGLALKAIDLVFKYLPRAFKDGHDEEAREKMHNASAIAGMAFANAFLGINHSLAHKIGPEFHIPHGRANAILMPHVIRYNAIKPRKHALFPKYEHFVADERYAHIARMLGLPASSAAEGVESLVKAIIDLGKSLNINMSIAGQGVAKDQFEEVVGLLAERAFEDQCTTANPKLPLISELKEIYMKAYKGE

SEQ ID NO: 130808 - DNA, 1173 bp, Acinetobacter sp. ADP1
  CDS (1)..(1173): transl_table=11
atggcttttaaaaatattgctgaccaaacaaacggtttttatatcccttgtgtctccctttttggccctggttgtgccaaagaaattggtaccaaagcacaaaatttaggtgcaaaaaaagcactcatcgtgactgatgctggtttatttaaatttggtgtagctgacactatcgcagcataccttaaagaagctggcgtagacagtcatattttcccaggcgctgaacccaatccgacagataaaaacgtacataatggcgttgatgcatataataccaatggatgtgactttattgtatcgctcggtggtggatcatctcacgactgtgcaaaaggtattggattagttaccgcaggcggtggtcacattcgtgattacgaaggaattgataaaagtactgttccaatgacgccgttaattgcagtcaataccactgcaggcacagcatctgaaatgacacgtttctgtattattaccaatacagatacacatgtaaaaatggcgattgtagattggcgttgtaccccactgattgccattgatgaccctaagctcatgattgctaagcctgcaagcctgactgctgcgactggtatggatgcgctgacacatgctgtcgaagcttatgtatctactgctgcgaacccaatcacagacgcctgtgccgaaaaagcaatcagcatgatcagtgaatggctcagcccagctgttgccaatggtgaaaaccttgaagcacgtgatgcaatgagctatgcccaatatcttgcaggtatggcatttaacaatgcgtcattaggttatgttcatgccatggcgcaccaacttggcggtttctacaatctgccacacggcgtatgtaatgcggtattgttgccacacgtttgtgagttcaacctgattgcttgcccagagcgttatgcacgtatcgcagaattaatgggcgtaaatacacacggccttacggtgactgaagctgcatatgctgcaatcgatgcaattcgtacattatcaaaatcaattggtatcccatctggcttgaccgagcttggtgtaaaaactgaagatcttgcagtaatggccgaaaatgcacaaaaagacgcgtgtatgttgactaatccacgcaaagcaaatcacgctcaagttgtagatattttcacagcagcattgtaa

SEQ ID NO: 130809 - protein, 390 aa, Acinetobacter sp. ADP1
MAFKNIADQTNGFYIPCVSLFGPGCAKEIGTKAQNLGAKKALIVTDAGLFKFGVADTIAAYLKEAGVDSHIFPGAEPNPTDKNVHNGVDAYNTNGCDFIVSLGGGSSHDCAKGIGLVTAGGGHIRDYEGIDKSTVPMTPLIAVNTTAGTASEMTRFCIITNTDTHVKMAIVDWRCTPLIAIDDPKLMIAKPASLTAATGMDALTHAVEAYVSTAANPITDACAEKAISMISEWLSPAVANGENLEARDAMSYAQYLAGMAFNNASLGYVHAMAHQLGGFYNLPHGVCNAVLLPHVCEFNLIACPERYARIAELMGVNTHGLTVTEAAYAAIDAIRTLSKSIGIPSGLTELGVKTEDLAVMAENAQKDACMLTNPRKANHAQVVDIFTAAL

SEQ ID NO: 130810 - DNA, 1155 bp, Erwinia carotovora subsp. atroseptica SCRI1043
  CDS (1)..(1155): transl_table=11
atgatggttaacagaatgatccttaacgaaacatcctattttggcacaggcgctatcgctcagattgccgatgaagtaaaacggcgcgggttcaagaaagccctgctggtgacggacaaagatttggttaaattcggtgtcgccgccaaggttacggcgaagctggatgcggcagggttgccctacgatatctacgatgaggtgattcccaaccctaccatcggcgtggtggaaagaggcatcgagcacttcaaggcatcgcaggccgattacctgatcgcgattggcggcggctcaccgcaggatacctgcaaagccatcggaattattatcaataatcctgagttcgccgatgtccgcagcctcgaaggcgttgcgcccacccgacgcccctcggtgccgattatcgctatcccgaccacttcaggcacagccgcagaggttacgatcaattacgtgatcaccgacgaagaaaaacgccgcaaattcgtgtgcgtcgatccacatgacattccaattgtcgccatcgtcgatcctgacatgatgatgagcatgcctgcctcgctgaaagcggcaacggggattgacgctctgacgcacgccattgagggtttcaccaccaaagccgcctgggaactgactgatacgctgcacctgaaggccattgaaattatcagccgttcactgcgtgattccgttgccgggaagccgaaaggcgtggaagagatggcgctgggacaatacatcgccggtatggggttctcgaacgttgggcttgggctggtacacggcatggcgcacccactcggcgcgttctacaacaccccgcacggcgtcgctaatgcgatcctactgccgcatatcatggcctacaacgcagattacaccggtgaaaaattccgggatatcgccgttgcgatgggggtaaacggcgcgacagatatgtcgattgctcaggcgagggaagcagctattcatgcggtgcgacagctttctcacgatgtagatatcccaccgagattgcgcgatgtcggcgtgagagaagaggatattccagcgctggcgcaggccgcctttgacgatgtctgcaccggcggtaacccgcgcgataccaacatcgacgacataaaagcgctgtatcaatctatttattaa

SEQ ID NO: 130811 - protein, 384 aa, Erwinia carotovora subsp. atroseptica SCRI1043
MMVNRMILNETSYFGTGAIAQIADEVKRRGFKKALLVTDKDLVKFGVAAKVTAKLDAAGLPYDIYDEVIPNPTIGVVERGIEHFKASQADYLIAIGGGSPQDTCKAIGIIINNPEFADVRSLEGVAPTRRPSVPIIAIPTTSGTAAEVTINYVITDEEKRRKFVCVDPHDIPIVAIVDPDMMMSMPASLKAATGIDALTHAIEGFTTKAAWELTDTLHLKAIEIISRSLRDSVAGKPKGVEEMALGQYIAGMGFSNVGLGLVHGMAHPLGAFYNTPHGVANAILLPHIMAYNADYTGEKFRDIAVAMGVNGATDMSIAQAREAAIHAVRQLSHDVDIPPRLRDVGVREEDIPALAQAAFDDVCTGGNPRDTNIDDIKALYQSIY

SEQ ID NO: 130812 - DNA, 1182 bp, Desulfotalea psychrophila LSv54
  CDS (1)..(1182): transl_table=11
atggctattcaagagcaagtatacggttttttcattccaagtgtgactcttatcggcattggtgctgcccgggaaatccctgcacgcatacagtcacttggtggcagaaagcccctcatcgtcaccgataagggcatcacaggcgctggcatcaccaaacagatcactgatctctgtgacggagcaggaatggaatatgcgatatatgataagactgttcccaatccaacagacattaatgtccatgaaggcatagatgtatacaagagaaatggttgtgatagtcttatcacccttgggggtggttcatcccacgattgtggtaagggaattggccttgttgttgccaacggcggtagaattaatgattatgagggagtggataaagccaccaagccaatgccaccctatattgccgtaaacaccacggcaggcacagcatctgagatgactagatttgctgttatcaccgatacccgccgtagggtaaagatggccatcgccgattggcgagtaaccccgggtatcgcccttgatgatccaatgctgatgatgggaatgccaccagcacttaccgcagccaccggcatggatgcccttactcactcagttgaagcctatgtatcaactgcggcaaccccactgaccgactccgctgcagagaaatctatccaactcatttctcaacacctccgcccagccgtcgccaatggcagcgacatcaatgcgcgggagggtatgtgctacgcccaataccttggcggcatggccttcaacaatgcaagccttggccacgtacacgccatggcccatcagcttggcggtttctacgatctaccccatggtgaatgtaacgccatcctcctcccccatgtaagtcgctttaacctgattgccaaggtcgcgcgttatgcaaaaattgcagaactgctgggcgaagatatcaaaggactctctcagcgtgatgcggcagaacttgccattgagtccatagaacagctctctcaggatgttggcataccagcagggcttgttgagctgggcagacgttatggtaaagatgttgaggaaaaagacatcgatatcatgacggtaaatgcccagaaagatatctgtggcctgaccaatccacgctgtctcagagacagcgacgtaaaagaaatttacagggccgctctctag

SEQ ID NO: 130813 - protein, 393 aa, Desulfotalea psychrophila LSv54
MAIQEQVYGFFIPSVTLIGIGAAREIPARIQSLGGRKPLIVTDKGITGAGITKQITDLCDGAGMEYAIYDKTVPNPTDINVHEGIDVYKRNGCDSLITLGGGSSHDCGKGIGLVVANGGRINDYEGVDKATKPMPPYIAVNTTAGTASEMTRFAVITDTRRRVKMAIADWRVTPGIALDDPMLMMGMPPALTAATGMDALTHSVEAYVSTAATPLTDSAAEKSIQLISQHLRPAVANGSDINAREGMCYAQYLGGMAFNNASLGHVHAMAHQLGGFYDLPHGECNAILLPHVSRFNLIAKVARYAKIAELLGEDIKGLSQRDAAELAIESIEQLSQDVGIPAGLVELGRRYGKDVEEKDIDIMTVNAQKDICGLTNPRCLRDSDVKEIYRAAL

SEQ ID NO: 130814 - DNA, 1182 bp, Desulfotalea psychrophila LSv54
  CDS (1)..(1182): transl_table=11
atggctattcgtgaacaagtaaacggtttttttatcccaagcgtaactcttatcggtattggcgctgctaaagaaatccctgcacgcctccagtcacttggtggaaaaaagcctctcattgttactgataaaggaattactggcgctggaatcaccaagcagatcaccgatctctgtgatgcggcaggaatgacatacgtaatatatgacaagactatccccaatccaaccgatctcaatgttgctgaaggtgaacaggcatataaagatggtgagtgtgatagtcttatcacccttggcggtggttcatcccacgattgcggcaaaggcattggccttgttattgccaacggtggcaccattcatgattacgaaggagtagatcagtctacccaggcaatgcctccttatattgcagtaaacaccacagcaggtacagcctctgagatgactcgtttctgtatcatcaccgataccagccgtaaggtaaaaatggccatcgttgattggcgagtaactccaggtatcgccctcgatgatccaatgttaatgatgggaatgccacctgcacttaccgcagccactggtatggacgcactcactcactcaattgaagcctatgtttctactgcagctaccccacttaccgactctgctgcagaaaaatctattcaactcatctcccaacatcttcgtcctgccgttgctaatggcagtgacattgatgcacgagagggcatgtgctacgcccagtaccttggcggcatggcattcaacaatgcaagtcttggtcacgttcatgctatggctcatcagcttggcggtttctacgacctgccccatggcgagtgtaatgccatcctccttccccatgtgagtcgctttaaccttattgccaaggttggacgttatgcaaaaattgcagaattactgggtgaagatgtcgctggactttcagaacgtgatgcggcagagcttgccattcaatccatagagcaactttctaaagatgttggtattccatctggccttaaagagctaggcagacgttatggcaaagatgtagaagcagaagacatcgacaccatgacagctaatgcccaaaaagatgcctgtggccttaccaatccacgtatccttagagatatcgatgtaaaaaatatatataaagctgctctctag

SEQ ID NO: 130815 - protein, 393 aa, Desulfotalea psychrophila LSv54
MAIREQVNGFFIPSVTLIGIGAAKEIPARLQSLGGKKPLIVTDKGITGAGITKQITDLCDAAGMTYVIYDKTIPNPTDLNVAEGEQAYKDGECDSLITLGGGSSHDCGKGIGLVIANGGTIHDYEGVDQSTQAMPPYIAVNTTAGTASEMTRFCIITDTSRKVKMAIVDWRVTPGIALDDPMLMMGMPPALTAATGMDALTHSIEAYVSTAATPLTDSAAEKSIQLISQHLRPAVANGSDIDAREGMCYAQYLGGMAFNNASLGHVHAMAHQLGGFYDLPHGECNAILLPHVSRFNLIAKVGRYAKIAELLGEDVAGLSERDAAELAIQSIEQLSKDVGIPSGLKELGRRYGKDVEAEDIDTMTANAQKDACGLTNPRILRDIDVKNIYKAAL

SEQ ID NO: 130816 - DNA, 1218 bp, Desulfotalea psychrophila LSv54
  CDS (1)..(1218): transl_table=11
atgcacagacaacccatacaaatgaggaaaaaattcatggctattcgagagcaagtatacggttatttcattcccagtgtaactcttatcggcattggcgctgctaaagaaatccctgcccgcctccaatcacttggtggcaaaaagcctctgattgtaacagacaaaggcattacaggcgctggaatcaccaaacagatcaccgatctctgtgatgcggcaaaaatggaatatgctgtatacgatgagactattccaaatccaaccgatattaatgttgctcacggtgtagaggcctatagcaaaaatggttgtgatagtcttattaccctcggtggcggttcatcccatgattgtggtaaaggcgtcggccttgttattgccaacggtggcaagattcatgactacgagggggtagatcaatccaccaagccaatgcctccatatattgccgtaaacaccactgcaggcacagcctctgaaatgacccgtttctgtatcatcaccgataccagccgtaaggtaaaaatggccatcgttgactggcgagtaaccccgggtatcgccctcgatgatccaatgttaatgatgggaatgccaccagcacttaccgcagccacaggtatggacgctcttactcactcaattgaagcctatgtttcaactgcggccaccccacttaccgactccgctgcagaaaaatcaattcagctcattgcccaacatcttcgccctgccgttgccaatggcagtgacatcaacgcccgagagggtatgtgctacgcccagtaccttggcggtatggcattcaacaatgcaagtcttggtcacgtccatgctatggctcatcagcttggcggtttctacgacctgccccatggcgaatgtaatgcaatcctccttccccacgtaagtcgctttaaccttattgccaaggttggacgttatgcaaaaattgcagaactgttgggcgaagatatcaccggactttcacagcgtgatgcggcagagcttgccatccaatccatagaacagctcgcccaggatgttggtattccagcaggccttaaggaattaggcagacgttatggcaaggatgtagaagagaaagacatcgatatcatgacagcgaatgcccaaaaagatgcctgtggccttaccaatccacgtggcctcagagatgctgatgtaaaagcaatttacaaggctgctctctag

SEQ ID NO: 130817 - protein, 405 aa, Desulfotalea psychrophila LSv54
MHRQPIQMRKKFMAIREQVYGYFIPSVTLIGIGAAKEIPARLQSLGGKKPLIVTDKGITGAGITKQITDLCDAAKMEYAVYDETIPNPTDINVAHGVEAYSKNGCDSLITLGGGSSHDCGKGVGLVIANGGKIHDYEGVDQSTKPMPPYIAVNTTAGTASEMTRFCIITDTSRKVKMAIVDWRVTPGIALDDPMLMMGMPPALTAATGMDALTHSIEAYVSTAATPLTDSAAEKSIQLIAQHLRPAVANGSDINAREGMCYAQYLGGMAFNNASLGHVHAMAHQLGGFYDLPHGECNAILLPHVSRFNLIAKVGRYAKIAELLGEDITGLSQRDAAELAIQSIEQLAQDVGIPAGLKELGRRYGKDVEEKDIDIMTANAQKDACGLTNPRGLRDADVKAIYKAAL

SEQ ID NO: 130818 - DNA, 1185 bp, Desulfotalea psychrophila LSv54
  CDS (1)..(1185): transl_table=11
atgtgtaatcagacgacaaagcctgttgagtttattatgccaccgataacggttataggttcaggagcaatcagagagttaccggaacgacttgttgcaattcagggaacaaagcccctggttgttactgataaggggatgactgctcttggcgttactgcaaccatcgtaggtatattagaaaaggctggcatggcctgtgctgtttatgatgagactgtgcccaacccaaccgataaaaatgttgaagctggtcttgccgcatatgtggcccatggttgtgactctattattacccttggtggtggtagtgcccatgattgtggtaagggtattggcctggtggcaaccaacggtggcagaattcatgactatgaaggtgtcaataaatctcatgctcgtatgccgagttttattgcgattaacaccacagcaggaactgcctcggagatgactcgtttctgtatcatcaccgacagtgtgcgtaaggtgaagatgacaattgtcgatcgtcgtgtaactcctcgccttgccatggatgatcctgatctgatgttgggccttcctcccggtcttaccgctgcaaccggtcttgacgccctgactcacgctattgaagcatttgtctccaccgatgctacccatatgaccgatgccaatgctgaaaaggcaattaagttgattgccaagtatctgcgtcgtgccgtggggaatggtcgcaatgttgaggctcgtgaggcgatgtgttatgcccagtatcaggcggggatggcctttaataacgcagggcttggctatgtgcatgccatggcccatcagcttggcggttatctcaatttaccccatggtgagtgtaacgcaatccttctgccctatgtctgtgagttcaatatgattgcctgtatggatcgttttgccgagatggcagacctccttggggtcaaagagggggcccgcactcagagggagatggctcttaatgtaattaaggcgatcagggatctgatggatgatgtggctattccaccaagccttaccgctctggcagctaagtatggtaagacagtcaatccggaagattttgttatgatggccgaaaatgccatgaaggatgcctgtgctgccaccaatccgcggcggatgagcatggaaaatattattgccatctaccaggccgttctctag

SEQ ID NO: 130819 - protein, 394 aa, Desulfotalea psychrophila LSv54
MCNQTTKPVEFIMPPITVIGSGAIRELPERLVAIQGTKPLVVTDKGMTALGVTATIVGILEKAGMACAVYDETVPNPTDKNVEAGLAAYVAHGCDSIITLGGGSAHDCGKGIGLVATNGGRIHDYEGVNKSHARMPSFIAINTTAGTASEMTRFCIITDSVRKVKMTIVDRRVTPRLAMDDPDLMLGLPPGLTAATGLDALTHAIEAFVSTDATHMTDANAEKAIKLIAKYLRRAVGNGRNVEAREAMCYAQYQAGMAFNNAGLGYVHAMAHQLGGYLNLPHGECNAILLPYVCEFNMIACMDRFAEMADLLGVKEGARTQREMALNVIKAIRDLMDDVAIPPSLTALAAKYGKTVNPEDFVMMAENAMKDACAATNPRRMSMENIIAIYQAVL

SEQ ID NO: 130820 - DNA, 1149 bp, Yersinia pseudotuberculosis IP 32953
  CDS (1)..(1149): transl_table=11
atgagtttcatgttggcactaccgaaaatcagcttgcacggcacgggtgcaatcggcgatatggttaaattactcagtgacaaacagtgggggaaagcactgattgttactgacgggcaactggttgaactcggcttattggacagtttattcgcggcgctggcgcagtatcagttaccttacgggctgtttggggaggtattccctaatccaacagaagagttggtccaggccggttttgccgcctttacccagcatcaatgtgactatttgattgccttcggtggtggcagccccattgataccgccaaagccatcaaaatactgactgccaatccggggccatccaccgcttattccggtgtaggtaaagtcaaacaaacgggtgttccgttgatagccatcaataccacggcaggaacggcggcggaattgaccagtaatgcggtgattattgatagccagcggcaagtgaaggaggtgattatcgataccaatctcatccctgatattgcggttgacgatccctcagtaatgctcaatattcccgccagtgtcacggcggcgacggggatggatgcccttacccacgctatcgaagcgtatgtctcgttaggtgcacatacgttaacggaccattcagcgctcgaatcaatccgtcttatcagccaatggttgccattagcggtcgctgacggcaaaaacctacaagcgcgcgaaatgatggcatgtgggcaatatttggcgggtatggcgtttaacagtgctgggctaggtttggttcacgcactggcccaccaaccgggtgccacacataatcttcctcatggcgtctgcaatgctatcttgctgccggtaattgaagaatataatcgcccgcaggctacccgccgttttgcccgaattgcacaggcaatgggggtagacactcaggacatgagtgatgagcaagcaagtcatcaggcgatagcggccattcgtcagttatcgctgcaagttggtattcctgccgggttctccgccttaggtattgaggaaagtgatattgaaggttggttagataaagcgctggctgacccttgtgctccttgtaacccacgttctgcagatcgggaacaaattcgcacactgtacttacaggcactttaa

SEQ ID NO: 130821 - protein, 382 aa, Yersinia pseudotuberculosis IP 32953
MSFMLALPKISLHGTGAIGDMVKLLSDKQWGKALIVTDGQLVELGLLDSLFAALAQYQLPYGLFGEVFPNPTEELVQAGFAAFTQHQCDYLIAFGGGSPIDTAKAIKILTANPGPSTAYSGVGKVKQTGVPLIAINTTAGTAAELTSNAVIIDSQRQVKEVIIDTNLIPDIAVDDPSVMLNIPASVTAATGMDALTHAIEAYVSLGAHTLTDHSALESIRLISQWLPLAVADGKNLQAREMMACGQYLAGMAFNSAGLGLVHALAHQPGATHNLPHGVCNAILLPVIEEYNRPQATRRFARIAQAMGVDTQDMSDEQASHQAIAAIRQLSLQVGIPAGFSALGIEESDIEGWLDKALADPCAPCNPRSADREQIRTLYLQAL

SEQ ID NO: 130822 - DNA, 2604 bp, Bacillus cereus E33L
  CDS (1)..(2604): transl_table=11
atggtagtcaaagagaaagttgtaaatgaaatgcaggaagtaaaagagatgattgatacgttagtgaataacggtcggaaggctttacaagcattagaaagttttacacaagagcaaattgacaacattgttcatgaaatggcattagcaggtgttgatcaacatatgccacttgcgaaattggctgttgaagaaacaggtcgtggggtatacgaagataaatgcattaaaaatatttttgctactgaatatatttggcatagcataaagaaagataaaacagtagggattattcacgaagatcctcatgaagaaataatagaaattgcggagcccgtcggtgtagtagctggggtaacaccagtaacgaatccaacatcgacaacaatgtttaaagcattaatcgcgataaaaacgagaaatccaattattttcgcatttcatccttcagcacaaaactgttctgttgcagccgcgaaaacagtatatgatgcagcggtgaaggcgggggcatcaaaacattgtattcagtggattgaaaagccttctgtcgaagcaacgaaacaattaatgaaccatgaaggtgttgcgcttgttttggcaactggaggggctggtatggtgaaatcagcttattctactggaaaaccagcgctaggtgtaggtcctggtaatgtaccatgttatatagagaaatcagcgcacataaaacgagcggttaatgatttgattttatcaaaaacatttgataacgggatgatttgtgcatcagaacaagcaatcattgtagacaaggaaatttatgatgatgtgaaaacagaaatgattacaaatgattgttactttgtaacagaggaagagagaagaaaattagaaaagcttgttattaatgaaaatacatgtgcagtaaatagtgatattgtagggaaatctgcacagtatattgccgaattagttggaattactgtacctaaaaatacaaaaatacttgtagctgaaatacaaggcatcggagccgcatatccactatctcgtgagaagttaagtccagtattagcttgtgtaaaagcaaattcattagaagaaggatttacatattgtgaagaaatgttaaacctcggtggtttagggcattcagcagttatccattctgtaaataaagaagtgcaaaagcaatttggattacgtatgaaagcttgtcgccttattgtaaatgctccttcatcacaaggtgggatcggtgacatatataatggatttattccatcacttacgcttggctgcggttcctatgggaaaaactcggtttctcaaaacgtaacagcgacgcatttattaaatataaaaaggttggcaaatagaaaaaagaatatgcagtggttcaaattaccaccaaaaatttattttgaaaaacatgcgacagcatatttagcaaatatgcctaacatttcacgtgcgtttattgtaacggatccaggaatggttgagcacggatatgtagatacggttacgcattatttacgtaaacatgcaaatgatgtgaaagttgaagttttctttgaggtcgagccagatccgtcagatgaaactgtgtttaaaggtgcggaaatgatgagaagttttcagcctgatgtcattatcgcacttggtggtggttcagcgatggatgcagcgaaagggatgtggcttttctatgagcacccagaaacaacattctatggaattaaacagaagtttttagatataagaaaacgtacatgtaaatatccggaattaggaagtaaggcgcagtttgttgctattccaacaacatctggaacaggatcagaagtgacaccatttgcggttattacagataagaaaaataatataaagtatccacttgcagattatgaattaacgccagatgtagcaattgttgatccacaatttgtaatgacagtaccaccacatgtaacagcagacactgggatggacgtattaacgcatgcaatcgaggcgtatgtgtctgttttagcaaatgactatacagatggattagcactaaaggctattgatctcgtatttaaatatttaccaagagcatttaaagatggacatgatgaagaagcacgagaaaaaatgcataatgcttctgcaattgcagggatggcatttgcaaatgctttcctaggtattaatcacagtttagcacataaaattggaccagaatttcatattccgcatgggcgtgcgaatgcaattcttatgccgcacgtagttcgctataatgctattaagccaagaaaacacgcattgttcccaaaatatgagcattttgtagctgatgaacgctatgcacatattgcgagaatgctcgggctaccagcaagttcggtggcagaaggtgtagaatcactcgtcaaagcaattattgatctcggaaaaagtttaaatataaatatgagtattgcgggacaaggagttgctaaagaccaatttgaacaggttgttggattattagcagaaagagcttttgaagatcaatgtacaacagctaatccgaaattacctctcatttcagagctgaaagaaatttatatgaaagcatataaaggtgagtaa

SEQ ID NO: 130823 - protein, 867 aa, Bacillus cereus E33L
MVVKEKVVNEMQEVKEMIDTLVNNGRKALQALESFTQEQIDNIVHEMALAGVDQHMPLAKLAVEETGRGVYEDKCIKNIFATEYIWHSIKKDKTVGIIHEDPHEEIIEIAEPVGVVAGVTPVTNPTSTTMFKALIAIKTRNPIIFAFHPSAQNCSVAAAKTVYDAAVKAGASKHCIQWIEKPSVEATKQLMNHEGVALVLATGGAGMVKSAYSTGKPALGVGPGNVPCYIEKSAHIKRAVNDLILSKTFDNGMICASEQAIIVDKEIYDDVKTEMITNDCYFVTEEERRKLEKLVINENTCAVNSDIVGKSAQYIAELVGITVPKNTKILVAEIQGIGAAYPLSREKLSPVLACVKANSLEEGFTYCEEMLNLGGLGHSAVIHSVNKEVQKQFGLRMKACRLIVNAPSSQGGIGDIYNGFIPSLTLGCGSYGKNSVSQNVTATHLLNIKRLANRKKNMQWFKLPPKIYFEKHATAYLANMPNISRAFIVTDPGMVEHGYVDTVTHYLRKHANDVKVEVFFEVEPDPSDETVFKGAEMMRSFQPDVIIALGGGSAMDAAKGMWLFYEHPETTFYGIKQKFLDIRKRTCKYPELGSKAQFVAIPTTSGTGSEVTPFAVITDKKNNIKYPLADYELTPDVAIVDPQFVMTVPPHVTADTGMDVLTHAIEAYVSVLANDYTDGLALKAIDLVFKYLPRAFKDGHDEEAREKMHNASAIAGMAFANAFLGINHSLAHKIGPEFHIPHGRANAILMPHVVRYNAIKPRKHALFPKYEHFVADERYAHIARMLGLPASSVAEGVESLVKAIIDLGKSLNINMSIAGQGVAKDQFEQVVGLLAERAFEDQCTTANPKLPLISELKEIYMKAYKGE

SEQ ID NO: 130824 - DNA, 1173 bp, Mannheimia succiniciproducens MBEL55E
  CDS (1)..(1173): transl_table=11
atgggggtagtgcttatgtcaacatattactttttaccaaccagaaacgtattcggagagaacgctgttgaagaagtcggcgagttaatgagaagcttgggcggcaaccgaccgctcatcgtgaccgacggctttcttgctcaaagcggcatggcggaacaactcgccaccatcctaagaggtgccggcttagagcctattatcttcggcggtgcggaacctaacccgacggataaaaacgtggaaagcggtatcgccttctatcacgaccataactgcgattgtattatttctttaggcggcggctcatctcacgactgcgcgaaaggtatcggtttaattgccagtaacggcggtcgcattcaggattatgaaggcgtggatcgttcaaccaacccgatggtgccgttaatggcggtaaacaccactgccggtaccgcttccgaaatcacccgcttttgtatcatcacagatacggcccgcaaagtaaaaatggcgattgtggactggcgcgttactccgcaaattgcggtaaacgatccgctgctgatgaaaggcatgccggcgggtttaacagccgcaaccggtatggatgctctcactcatgccattgaagcctatgtttctaccgcagccaatccgcttacggatgccgcagccttaatggcgatttccatgatccagcaatatttgccgaaagccgtggcaaacggggattacatgaaagcccgcgataaaatggcctacgcccaatacttagcgggtatcgcattcaacaacgcttccttaggttacgtacacgcaatggcgcaccagttaggcggtttctataacctgccgcacggtgtttgtaacgcaattttactgccttatgtggaagaatttaatctaatcggcaacctcaaccgcttccgcgatattgccaacgcaatgggcgaaaacatccagggcttgagtaccgatgacgcagcgctcaaagccatcgccgcgatccgtcgactaagcaaacaggtaggcattcctgccaacttaaaagaactcggcgttaaaccggaagactttgacgtcatggctgaaaatgcaatgaaagacgtttgcatgctcaccaacccgcgcaaagctaccaaacaacaggttatcgaaatcttccaacgcgcctatgacggcaattaa

SEQ ID NO: 130825 - protein, 390 aa, Mannheimia succiniciproducens MBEL55E
MGVVLMSTYYFLPTRNVFGENAVEEVGELMRSLGGNRPLIVTDGFLAQSGMAEQLATILRGAGLEPIIFGGAEPNPTDKNVESGIAFYHDHNCDCIISLGGGSSHDCAKGIGLIASNGGRIQDYEGVDRSTNPMVPLMAVNTTAGTASEITRFCIITDTARKVKMAIVDWRVTPQIAVNDPLLMKGMPAGLTAATGMDALTHAIEAYVSTAANPLTDAAALMAISMIQQYLPKAVANGDYMKARDKMAYAQYLAGIAFNNASLGYVHAMAHQLGGFYNLPHGVCNAILLPYVEEFNLIGNLNRFRDIANAMGENIQGLSTDDAALKAIAAIRRLSKQVGIPANLKELGVKPEDFDVMAENAMKDVCMLTNPRKATKQQVIEIFQRAYDGN

SEQ ID NO: 130826 - DNA, 1152 bp, Azoarcus sp. EbN1
  CDS (1)..(1152): transl_table=11
atgagcacgacgactttcttcatccccccggtcaacctgatgggcgccggctgcctcgccgacgcgatggccgcgatccgcagttacggctttcgccacgcgctgatcgtcaccgacgccggcctcgcccgtgccggggtcgccgacaaggtcgcggccctcctcgccgagcaggacatccaggcgacggtgttcgacggcgcgaagccgaatccgaccgtcggcaacgtcgaggccggcctcgcgctgctgcgcgacaagcagtgcgactgcgtgatctcgctcggcggcggctcgccgcacgactgcgcgaaaggcatcgcgctcgtcgccaccaacggcgggcggatcggcgactacgaaggggtcgaccgctcggccaagccgcagctgccgctcgtcgcgatcaacacgaccgccggcaccgcgagcgagatgacgcgcttttgcatcatcaccgacgaagcgcgccacatcaaaatggcgatcgtcgaccgcaacgtcacgccgatcctgtcggtcaacgacccgacgctgatggtcgcgaagcccgccgcgctgactgccgcgaccggtatggacgcgctgacgcacgcggtcgaagcctacgtgtcgaccgcggcgacgccaatcaccgacgcgtgcgcactgaaggcggtaacgctgatcgcggcgaacctgcgccgcgcggtcgccgacggcaacgacctcgacgcgcgcgagcagatggcctatgcgcagttcctcgccggcatggcgttcaacaacgcatcgctcggctatgtgcacgcgatggcacatcagctcggcgggttctatgacctgccgcacggcgtgtgcaacgcggtgctgctgccgcacgtcgaggcgttcaacgcgagcttttcggccacgcgccttgcagacgtcgcgcgcgcgatgggcgccgacgtcgatgcgctcgacgacgccgcggcggcagaaggttgtcttgccgcgatccgccgactcgctgccgatgtcggcatcccggccgggctgacgcagctcggcgtcaaagcggaagacatcccgacgctcgccgcaaacgcgctgaatgatgcctgcggcctgacgaacccgcgcccggccacgcaggccgacatcgaggcgatcttccgcggcgcgctgtaa

SEQ ID NO: 130827 - protein, 383 aa, Azoarcus sp. EbN1
MSTTTFFIPPVNLMGAGCLADAMAAIRSYGFRHALIVTDAGLARAGVADKVAALLAEQDIQATVFDGAKPNPTVGNVEAGLALLRDKQCDCVISLGGGSPHDCAKGIALVATNGGRIGDYEGVDRSAKPQLPLVAINTTAGTASEMTRFCIITDEARHIKMAIVDRNVTPILSVNDPTLMVAKPAALTAATGMDALTHAVEAYVSTAATPITDACALKAVTLIAANLRRAVADGNDLDAREQMAYAQFLAGMAFNNASLGYVHAMAHQLGGFYDLPHGVCNAVLLPHVEAFNASFSATRLADVARAMGADVDALDDAAAAEGCLAAIRRLAADVGIPAGLTQLGVKAEDIPTLAANALNDACGLTNPRPATQADIEAIFRGAL

SEQ ID NO: 130828 - DNA, 1149 bp, Pseudomonas syringae pv. syringae B728a
  CDS (1)..(1149): transl_table=11
atgatcagcacttttttcatccccgctgtgaacatcatcggcactggctgcattgacgaagccatgctcgccatacgcaaatacggatttcgcaaggccctgatcgtcacggatgctggccttgccagggccggagtagccagtcaggtcgccgggctgttggtggagcagggcattgactcggttgtgtacgacggtgcccggcccaacccgaccatcgccaacgtcgagaacggcctggccctgttgcaggagcgccagtgcgatttcgtcatatcgctgggcggtggctcgcctcacgactgtgcaaaaggtattgccctgtgcgccagcaacggggggcatatcagcgattatgagggcgtcgaccgttcggcaaaaccgcagttgccattgattgccatcaataccaccgccggaaccgcgagtgaaatgacccgcttctgcatcattaccgacgaagcccggcacgtaaaaatggcgatcatcgaccgcaacgtcacgccgctgctgtccgtgaatgatcccgacatgatggtcgccatgcccaggtcgctgactgccgccactggcatggatgccttgactcacgcaatcgaagcctatgtctccacggctgccaacccgatcactgacgcctgtgcgttacaggctatggcgctgatcgccaacaatttgcgcgacgcattcaacaacggggccaatatcactgcccgcgagaacatggcgtatgcccagtttctggctggcatggcgttcaataacgcgtcactgggctacgtgcacgccatggcgcaccagttgggcggcttttatgatttgccccacggtgtgtgcaacgccgtattgctgccccatgtgcagcgcttcaacgccagcgtcagcgctgcacgcctgaccgacgttgcacacgccatgggcagcaatatccgtgggctctctccggaagaaggcgctcaggcagccatcgacgcgattcgtgcattgtcggctgccgtggaaatcccggcaggtcttgctacgctgggcgtcaaggaggaagacttcccgatgctggccagcaatgccctgaaagatgcctgcggcctgaccaacccgcgtcctgccgatcttgagcagattcaggatatatttcgccaggcgctttaa

SEQ ID NO: 130829 - protein, 382 aa, Pseudomonas syringae pv. syringae B728a
MISTFFIPAVNIIGTGCIDEAMLAIRKYGFRKALIVTDAGLARAGVASQVAGLLVEQGIDSVVYDGARPNPTIANVENGLALLQERQCDFVISLGGGSPHDCAKGIALCASNGGHISDYEGVDRSAKPQLPLIAINTTAGTASEMTRFCIITDEARHVKMAIIDRNVTPLLSVNDPDMMVAMPRSLTAATGMDALTHAIEAYVSTAANPITDACALQAMALIANNLRDAFNNGANITARENMAYAQFLAGMAFNNASLGYVHAMAHQLGGFYDLPHGVCNAVLLPHVQRFNASVSAARLTDVAHAMGSNIRGLSPEEGAQAAIDAIRALSAAVEIPAGLATLGVKEEDFPMLASNALKDACGLTNPRPADLEQIQDIFRQAL

SEQ ID NO: 130830 - DNA, 1149 bp, Pseudomonas fluorescens Pf-5
  CDS (1)..(1149): transl_table=11
atgagcagcacctttttcattccagccgtgaacatcatgggcatcggctgtctcgacgaggccatgagcgccatccgcaactatggatttcgcaaggcgctgatcgtcactgacacgggcctggccaaggctggcgtggccagcatggtggccgagaagctggccatgcaggacatcgattcggtgatcttcgacggtgccaagcccaaccccagcattgccaacgtcgagcagggcctggcgcaattgcagcaggcacagtgcgatttcgtcatctccctgggcggcggatcgccccatgactgcgccaagggcattgccctgtgtgccaccaatggcgggcagatccgcgattacgaaggcgtcgaccagtcggccaagccgcaactgcccttgatcgccatcaacaccaccgccggcactgccagcgaaatgacccgtttctgcatcatcaccgacgaatcgcgccatgtgaaaatggccatcgtcgaccgcaacgtcacgccgttgctgtcggtgaacgatccggcactgatggtggcgatgcccaagggcctgaccgccgccaccggcatggatgccctgacccacgcggtggaagcctatgtgtccaccgccgccaaccccatcaccgatgcctgcgccctgaaggccgtggaaatgatcagcgccaacctgcgccaggcggtgcacgacggcaacgatctgctggcacgggagaacatggcctatgcgcagttcctcgccggcatggcattcaacaatgcgtccctgggtttcgtgcacgccatggcccaccagctgggcggcttctacgacctgccccatggcgtgtgcaacgcggtgctgttgccccatgtgcagagcttcaacgccacggtatgcgcccagcgcctgaccgatgtggcccacgcgctgggagcggacattcgcggtttcagcccggaagagggcgcccaggcggccatcgcggcgatccgcaccctggcccgtgatgtggagattcccgccggtttgcgcgagttgggcgccaagttgcaggacattccgctattggcggccaatgctctcaaggatgcctgcggcctgaccaacccgcgtccggcggatcagcggcagatcgaggagattttccgcaacgcgttctga

SEQ ID NO: 130831 - protein, 382 aa, Pseudomonas fluorescens Pf-5
MSSTFFIPAVNIMGIGCLDEAMSAIRNYGFRKALIVTDTGLAKAGVASMVAEKLAMQDIDSVIFDGAKPNPSIANVEQGLAQLQQAQCDFVISLGGGSPHDCAKGIALCATNGGQIRDYEGVDQSAKPQLPLIAINTTAGTASEMTRFCIITDESRHVKMAIVDRNVTPLLSVNDPALMVAMPKGLTAATGMDALTHAVEAYVSTAANPITDACALKAVEMISANLRQAVHDGNDLLARENMAYAQFLAGMAFNNASLGFVHAMAHQLGGFYDLPHGVCNAVLLPHVQSFNATVCAQRLTDVAHALGADIRGFSPEEGAQAAIAAIRTLARDVEIPAGLRELGAKLQDIPLLAANALKDACGLTNPRPADQRQIEEIFRNAF

SEQ ID NO: 130832 - DNA, 1149 bp, Pseudomonas syringae pv. phaseolicola 1448A
  CDS (1)..(1149): transl_table=11
atgatcagcacctttttcatccccgcagtgaacatcatcggcactggctgcattgatgaagccatgctcgccattcgcaaatacggatttctcaaggcgctgatcgtgaccgacgcagggctggccaaggccggtgtggccagtcaggtcgcggggctgttggtggagcagggcatcgactcggtggtgtatgacggtgccaaacccaacccgaccatcgccaacgtcgagaacggtctggccttgctgcgggaacgccagtgtgatttcgtgatttctctgggcggcggttcacctcacgactgcgccaagggcattgccctgtgcgccagtaacggtgggcatatcagcgactatgaaggcgtcgaccgttcggcaaaaccgcagttgccgctgatcgcgatcaacaccaccgccggaaccgccagcgaaatgacccgcttctgcatcattaccgacgaagcgcgccacgtaaaaatggccatcattgaccgtaacgtgacgccactgttatccgtaaacgacccgaacatgatgattgccatgcccaagtcactgaccgctgccaccggtatggatgccttgactcacgcgatagaggcctatgtctcgacggctgccaatccgatcacggatgcctgcgcgttgcaggccatggcactgattgccaacaatctgcgcgacgccttcaccaatggagcgaacattactgcacgcgagaacatggcctacgcacagtttctggccggcatggcgttcaacaacgcatcattgggctatgtacacgccatggcgcatcaactgggcggcttctatgatttgccgcacggtgtgtgcaacgccgtattgctgcctcatgttcagcgtttcaacgccagcgtcagcgctgcgcgcctgactgatgttgcgcatgcgatgggctgcaatattcgtggtctttctccgcaagaaggtgctcaggcggcaatcgaggccattcgcgcactgtcggctgccgtggaaatcccggcggggctggcggtgcttggcgtcaaggaagaggatttcccgatcctggccaccaatgccctgaaagatgcgtgcggtctgaccaatccgcgtcgtgccgatcttgagcagattcaggagatatttcgtcaggcaatgtga

SEQ ID NO: 130833 - protein, 382 aa, Pseudomonas syringae pv. phaseolicola 1448A
MISTFFIPAVNIIGTGCIDEAMLAIRKYGFLKALIVTDAGLAKAGVASQVAGLLVEQGIDSVVYDGAKPNPTIANVENGLALLRERQCDFVISLGGGSPHDCAKGIALCASNGGHISDYEGVDRSAKPQLPLIAINTTAGTASEMTRFCIITDEARHVKMAIIDRNVTPLLSVNDPNMMIAMPKSLTAATGMDALTHAIEAYVSTAANPITDACALQAMALIANNLRDAFTNGANITARENMAYAQFLAGMAFNNASLGYVHAMAHQLGGFYDLPHGVCNAVLLPHVQRFNASVSAARLTDVAHAMGCNIRGLSPQEGAQAAIEAIRALSAAVEIPAGLAVLGVKEEDFPILATNALKDACGLTNPRRADLEQIQEIFRQAM

SEQ ID NO: 130834 - DNA, 1149 bp, Pseudomonas fluorescens PfO-1
  CDS (1)..(1149): transl_table=11
atgagcagcacctttttcattcccgcggtaaacatcatgggcagcggctgcctcgatgaagccatgaatgcgatccgcaactacggttttcgcaaggcgctgatcgtcaccgatgccgggctggccaaggccggcgtggcgacgatgattgccgagaaactggcgatgcaggacatcgattcggtggtcttcgatggcgccaaacccaatccgagcatcgccaacgttgaggcggggctggcgctgctcaaggagagtcgctgcgacttcgtggtgtcgttgggcggcggttcgccccacgactgcgccaagggcattgcgttgtgtgccaccaacggcgggcagatccgcgactacgaaggcgtcgatcaatcgaccaagccacaactgccgctgatcgccatcaacaccaccgccggcaccgccagcgagatgacccggttctgcatcatcaccgacgaaacccgtcacgtgaaaatggccatcgtcgaccgcaacgtcacgccgctgctgtcggtcaacgacccggcgctgatggtcgccatgccgaaaagcctgaccgccgccactggcatggacgcgctgacccatgcaatcgaagcctatgtgtccaccgccgccaacccgatcaccgacgcctgcgcgctcaaggccatgaccctgatcagcaacaacctgcgcctggtcgtgcgcgacggcagcgacctggcggcgcgggaaaacatggcgtatgcgcagttcctcgccggcatggcgttcaacaatgcctccctcggttacgtgcatgcgatggcgcaccagttgggcggtttctatgacttgccccacggtgtttgcaacgcggtgctgctgccccatgtgcagacgttcaacgcacaggtctgtgccggtcgcctgaccgatgtggcccacgccatgggcgccgacattcgtggcttcagcccggaggagggcgcgcaggccgcgattgccgcgatccgttgcctggccagggacgtggagattcccggtggcctgcgtgatctcggcgccaagtgcaccgacatcccggtgctcgccgccaacgccctgaaagacgcctgcggcttcaccaatccgcgagtggcggatcagcggcagatcgaggagattttccgcagcgcgttttaa

SEQ ID NO: 130835 - protein, 382 aa, Pseudomonas fluorescens PfO-1
MSSTFFIPAVNIMGSGCLDEAMNAIRNYGFRKALIVTDAGLAKAGVATMIAEKLAMQDIDSVVFDGAKPNPSIANVEAGLALLKESRCDFVVSLGGGSPHDCAKGIALCATNGGQIRDYEGVDQSTKPQLPLIAINTTAGTASEMTRFCIITDETRHVKMAIVDRNVTPLLSVNDPALMVAMPKSLTAATGMDALTHAIEAYVSTAANPITDACALKAMTLISNNLRLVVRDGSDLAARENMAYAQFLAGMAFNNASLGYVHAMAHQLGGFYDLPHGVCNAVLLPHVQTFNAQVCAGRLTDVAHAMGADIRGFSPEEGAQAAIAAIRCLARDVEIPGGLRDLGAKCTDIPVLAANALKDACGFTNPRVADQRQIEEIFRSAF

SEQ ID NO: 130836 - DNA, 1152 bp, Carboxydothermus hydrogenoformans Z-2901
  CDS (1)..(1152): transl_table=11
atgaagacgtaccgtttttacatgccgccggttagcctaatgggtattggctgcctgaaagaggccggcgaggaaattaaaaagctcggttttaaaaaagctcttattgtaaccgataaggtactggttaagattggtcttgttaataagttaaccgaaatcctggacaacgaaggaatcgagtacgttatttttgatgaaactaaaccaaatcctacggttaaaaatgttgaagatggtcttaaaatgttaaaagagaacaactgtgattttttaatttcctttggtggaggttcgcctcatgactgtgccaaaggcattgggctggtggcaactaatggtggctccatcaaggattatgaaggggtaaataagtcggctaaacccatgttacctctggtggcggtaaacactactgctggtaccgcaagtgaaatgacgagattttcaataataaccgacgaggatagacacgtaaagatggccattgtcgactggcatgtaactccgataatggctgttaacgatcccgaattaatggtagagatgccaaaagctttaactgccgcaacgggtatggatgccttaacccatgctattgaagcttacgtatctattgatgcaactccggttaccgacgcggcagctttaaaggcaatcgagcttatttttaaatacctgaaacgggcagtagaaaatggaaaggatattgaggcaagggataaaatggcttatgcggagtatttagccggggtagcctttaacaatgcaggcttaggatatgtacacgcgatggcccaccagctgggagggttttacgatcttcctcatggtgtgtgtaatgctgtattgctacctcatgtgcaggcctataatctgcaggttgtacccgaaaggtttattgatatagctaaggcaatgggaataaatgtagaaaacttaacggcaaaagaagctggagaaaaggtacttgaagcaattaaaaatctttcgcgggaaattggcataccatcgggtcttaaggaattaggagttaaggaagaggatcttaagactttagccgaaaatgccctgaaagatgcttgcggatttaccaatccaaagcaggcgagcttagatgatattatacggatatttaaagaagcaatgtaa

SEQ ID NO: 130837 - protein, 383 aa, Carboxydothermus hydrogenoformans Z-2901
MKTYRFYMPPVSLMGIGCLKEAGEEIKKLGFKKALIVTDKVLVKIGLVNKLTEILDNEGIEYVIFDETKPNPTVKNVEDGLKMLKENNCDFLISFGGGSPHDCAKGIGLVATNGGSIKDYEGVNKSAKPMLPLVAVNTTAGTASEMTRFSIITDEDRHVKMAIVDWHVTPIMAVNDPELMVEMPKALTAATGMDALTHAIEAYVSIDATPVTDAAALKAIELIFKYLKRAVENGKDIEARDKMAYAEYLAGVAFNNAGLGYVHAMAHQLGGFYDLPHGVCNAVLLPHVQAYNLQVVPERFIDIAKAMGINVENLTAKEAGEKVLEAIKNLSREIGIPSGLKELGVKEEDLKTLAENALKDACGFTNPKQASLDDIIRIFKEAM

SEQ ID NO: 130838 - DNA, 1164 bp, Geobacter metallireducens GS-15
  CDS (1)..(1164): transl_table=11
atggcactggcagatcagactttcggattcttcattcccaccgttacgctcatgggggtcggctcctccaaggagaccggcgcgcaggtaaaggcgctgggcgcccggaaggcgctcctggtgaccgacaaggggatctcggccatggggatggccgaccagatcaaacagcaggttgaggctgccggcgtcgcggtcgtcatcttcgacggcgccgagccgaaccccaccgacaccaacgtccacgacggcgtcaaggtctatcaggagaacggctgcgactccatcatctccctcggcggcggcagctcccacgactgcgccaagggggtgggcctcgtgatcggcaacggcggccacatccgcgatttcgaaggggttaacaaatccacgaagccgatgccccccttcgtcgccatcaacaccactgccggcaccgcctcggagatgacccgcttctgcatcatcaccaacactgacacccacgtgaagatggccattgtcgactggcgctgcaccccgaacatcgccatcaacgacccggtcctcatgctcggcaagcccgcgcccctcaccgccgccaccggcatggacgccctcacccacgcggtcgaggcctacgtctccaccatcgccacccccatcaccgacgcctgcgccctccaggccatcaagctgatcgccgagtacctgagcccggccgtggctaacggcgacaacctggaagcccgggaccggatggcctacgccgagtacctggccggcatggcattcaacaacgcgagcctcggctacgtccactccatggcccaccagttggggggcttctacaacctcccccacggggtctgcaacgccatcctgctgccggcggtttccgaattcaacgccatcgcctgcccgaagcggtacgccgacattgccgtggccctgggcgaagacatcaccggccttgcccccctggatgccgccgccaaggccattgccgccatccgcaagctctcggcggccatcggcatcccggccggcctcaaggagctgaacgtgaaagaagaggacctgaaggtcatggccgagaacgccaagaaagacgcctgccagctgaccaacccgcgcaaggcgaccttggagcaagtgatcggcatcttcaaagcggcgatgtag

SEQ ID NO: 130839 - protein, 387 aa, Geobacter metallireducens GS-15
MALADQTFGFFIPTVTLMGVGSSKETGAQVKALGARKALLVTDKGISAMGMADQIKQQVEAAGVAVVIFDGAEPNPTDTNVHDGVKVYQENGCDSIISLGGGSSHDCAKGVGLVIGNGGHIRDFEGVNKSTKPMPPFVAINTTAGTASEMTRFCIITNTDTHVKMAIVDWRCTPNIAINDPVLMLGKPAPLTAATGMDALTHAVEAYVSTIATPITDACALQAIKLIAEYLSPAVANGDNLEARDRMAYAEYLAGMAFNNASLGYVHSMAHQLGGFYNLPHGVCNAILLPAVSEFNAIACPKRYADIAVALGEDITGLAPLDAAAKAIAAIRKLSAAIGIPAGLKELNVKEEDLKVMAENAKKDACQLTNPRKATLEQVIGIFKAAM

SEQ ID NO: 130840 - DNA, 1167 bp, Desulfovibrio desulfuricans G20
  CDS (1)..(1167): transl_table=11
atggtggatgattctttgtatgctttgcgcaagctgattgtgcccgaagtggtcttcggtgccggagcgctccgtctggtgggtcagtatgccgtcaacttcaacctgacgcactgccttgtggttaccgatgccggtgtggcgtcggcgggatggagcggcagcgtagtggatgctttgcaggctcacggagtcagctccactgtattcagcgatatttccgccaatccccgcgataccgaggtgcgccaaggggttgccgtgtaccgcgcggcagggtgtgacggcattgtggctgtgggcggcggcagccccatggactgcgccaaagggataggactgatggtttccggcggcagagacgtgctggaatacgaaggcgtggataaagttgaggtgcccgcgccgccgctcatctgtattcccaccacggcgggcaccagtgccgatgtatctcagttcgccattatcaatgacgcacgacgcaggttgaaaatagccattgtcagcaaatccgctgtgcctgatctggcgcttgtcgatccttccaccactctttccatgccgccgcggctcaccgcatccaccggccttgatgccttgtgccatgcggtggaggcctattgttccacggtaagctcgcccatgactgatctttttgcattgcgcgccatgcggcttatcggtgccaatctgcagaaggtgctcgacaacccgcaggacatggccgcgcgggaaaatatgatgctggcatccatgtatgcggggtttgcattttccaatgccatacttggggcggttcacgccatggcgcacggtctgggggggctgctggacatgccgcacggagagtgcaatgccattctgatgccccatgtggtgcgggcaaactgtcaggttgttcccgcccgctgcgccgatattgcgcaggaactggggtttgccggtgcgccgtccggtgcggatgcactgggtgattttttacatgacaggctgctcgatatgcggcgcagggccggagtgacggcaacgctgggcaccatgggcatgaagcgtgaagatatccccccgctggcacgtaatgccatgcacgatgcctgcatgctgaccaacccccgcaggtttacgctgcaggaagtggaagcattgtatctggaagcgttttga

SEQ ID NO: 130841 - protein, 388 aa, Desulfovibrio desulfuricans G20
MVDDSLYALRKLIVPEVVFGAGALRLVGQYAVNFNLTHCLVVTDAGVASAGWSGSVVDALQAHGVSSTVFSDISANPRDTEVRQGVAVYRAAGCDGIVAVGGGSPMDCAKGIGLMVSGGRDVLEYEGVDKVEVPAPPLICIPTTAGTSADVSQFAIINDARRRLKIAIVSKSAVPDLALVDPSTTLSMPPRLTASTGLDALCHAVEAYCSTVSSPMTDLFALRAMRLIGANLQKVLDNPQDMAARENMMLASMYAGFAFSNAILGAVHAMAHGLGGLLDMPHGECNAILMPHVVRANCQVVPARCADIAQELGFAGAPSGADALGDFLHDRLLDMRRRAGVTATLGTMGMKREDIPPLARNAMHDACMLTNPRRFTLQEVEALYLEAF

SEQ ID NO: 130842 - DNA, 1182 bp, Desulfovibrio desulfuricans G20
  CDS (1)..(1182): transl_table=11
atggcagtacgtgaagaagtttacggcttttttattcccagcgtcaccctgatgggcatcggtagccacaaggaaatcccggccaagatcaaggctctgggcggcaagaagcctctgctcgtaactgacaaaggtatcaccaaggtcggcctgaccgaaaaaatcgtcaagctgctgaaagacaacaaaatggactgcgttgtctacgatgaaaccattcccaaccccaccgatgaaaacgtgcatgccggcgtggacgtgtacaagaaaaacaagtgcgactcgctgatcactctgggcggcggcagctcccacgactgcggcaagggtatcggccttgtggtcgccaacggcggcaaaattcatgatttcgaaggcgtggacaagtccaccaagcccatgcccccctacgttgccgtgaacaccacggcgggcaccgcctctgaaatgacccgcttctgcatcatcaccgacacctcccgcaaggtcaaaatggccatcgtcgactggcgtgttactcccaccatcgcccttgacgacccgctgctgatgatgggcatgccccccgcactgaccgcagccaccggcatggacgccctgacccacgccgtggaagcctatgtttccaccattgccacccccatgaccgacgcctgcgccgaaaaagccatcaagcttatcttccagcacctgcgtgccgcagtggccaacggacaggacgtggtagcccgcgaaggcatgtgctacgcccagtaccttgccggtatggcgttcaacaacgcaagcgtggggcatgtgcacgccatggcgcaccagctgggcggtttctacgacctgccgcacggcgaatgcaacgccatcctgctgccccacgtggaaaaattcaacctgatagccaaggttgagcgctttgccgaaatggcccgctggatgggcgaaaacaccgaaggcctgagcccccgcgccgcagccgaaaagtgcctcgacgccatccgccagctttccgccgacgtgggtatcccctccggccttatcgagctgggcaagcgctacggcaaggatgtgaaggaatctgatattccgaccatgaccgccaacgcccagaaggacgcctgcggtcttaccaacccccgctgccccaccgatgccgacgtgatggccatctacaaggctgctctgtaa

SEQ ID NO: 130843 - protein, 393 aa, Desulfovibrio desulfuricans G20
MAVREEVYGFFIPSVTLMGIGSHKEIPAKIKALGGKKPLLVTDKGITKVGLTEKIVKLLKDNKMDCVVYDETIPNPTDENVHAGVDVYKKNKCDSLITLGGGSSHDCGKGIGLVVANGGKIHDFEGVDKSTKPMPPYVAVNTTAGTASEMTRFCIITDTSRKVKMAIVDWRVTPTIALDDPLLMMGMPPALTAATGMDALTHAVEAYVSTIATPMTDACAEKAIKLIFQHLRAAVANGQDVVAREGMCYAQYLAGMAFNNASVGHVHAMAHQLGGFYDLPHGECNAILLPHVEKFNLIAKVERFAEMARWMGENTEGLSPRAAAEKCLDAIRQLSADVGIPSGLIELGKRYGKDVKESDIPTMTANAQKDACGLTNPRCPTDADVMAIYKAAL

SEQ ID NO: 130844 - DNA, 1152 bp, Rhodospirillum rubrum ATCC 11170
  CDS (1)..(1152): transl_table=11
atgactcagaccgcttttttcatcccctcgatcaacctcatgggggcgggctgcttggccaccgccgtcaacaccatcaatgagcgcggcttcaagcgcgccctgatcgtcaccgacgcggtgcttgaaaagctgggcgtcgccggcaaggtgaccgagctgcttgatgaccatggcgtggaaagcatcgttttcggcggcgcccagcccaatccgacggtgtcgaatgtcgaggcgggtctggcgatcttgcgcgaggccgaatgcgattgcgtgatctcgctgggcggcggctcgccccatgactgcgccaagggcatcgcgctgtgcgccaccaacggcggggtcatcggtgattacgagggcgtcgataaatcggcccatccgcaattgccgctgatcgccatcaacaccacggccggcaccgccagcgaaatgacgcggttttgtatcatcaccgacgaaagccgtctggtgaagatggcgatcgtcgaccgccacgtcacgccgatcatgtcggtcaatgaccccgaactgatgatcggcaagcccgccgccctgaccgccgccaccggcatggacgccctgacccacgccatcgaagcctatgtctcgatcgccgccacgccgatcaccgacgcctgcgccctgaaggcggtgtcgatcatcgcccgcaccctgcgccgggcggtggccgatggcgccgatatcaaggcccgcgaggccatgtcctatgcccagttcctggccggcatggccttcaacaacgcctccctcggcttcgttcacgccatggcccaccagttgggcggcttttatgacctgccccatggcgtgtgcaacgccgtgctgttgccccatgtcgccgccttcaacgccagcgttgccggggcccgcctcaaggatgtcgccgaggcgatgggcgtcgacatcgccaatctgtccgacgatcagggggcggaggcctgcatcgccgccatccgcaccctagccgccgatatcggcattcccgccggccttacggaacttggcgtcaaggacggcgacgtgccgaccctggcgatcaacgccctgaaagacgcctgcggcctgaccaacccgcgcccggcgacccaggccgaaatcgaggcgatcttccgcgccgccgcctga

SEQ ID NO: 130845 - protein, 383 aa, Rhodospirillum rubrum ATCC 11170
MTQTAFFIPSINLMGAGCLATAVNTINERGFKRALIVTDAVLEKLGVAGKVTELLDDHGVESIVFGGAQPNPTVSNVEAGLAILREAECDCVISLGGGSPHDCAKGIALCATNGGVIGDYEGVDKSAHPQLPLIAINTTAGTASEMTRFCIITDESRLVKMAIVDRHVTPIMSVNDPELMIGKPAALTAATGMDALTHAIEAYVSIAATPITDACALKAVSIIARTLRRAVADGADIKAREAMSYAQFLAGMAFNNASLGFVHAMAHQLGGFYDLPHGVCNAVLLPHVAAFNASVAGARLKDVAEAMGVDIANLSDDQGAEACIAAIRTLAADIGIPAGLTELGVKDGDVPTLAINALKDACGLTNPRPATQAEIEAIFRAAA

SEQ ID NO: 130846 - DNA, 1914 bp, Burkholderia thailandensis E264
  CDS (1)..(1914): transl_table=11
ttgatttttacggtaataatgcaatttggcgtgattgcggtaaacggtcggattgagaattttgctcggcgaacttctcggccaggtaacgctggagcgcgcgtcggccgcgcgagcgggcgaaagcgatgcggctcgccggctccaccggctccaccggctccaccggctccaccgggttcggcgccgtcgcgttcggcaccaggcaggcgagcggcccgttcggcatccgtgatgctcgtgctgttcctgcgcagcgtcatgcgccacaacgcgctgaacctgtactgcgccgtgctcgcggcgatcacgtcggcgcggaggttcgcgtaccggcgggctccgaccgcgaaggcgcgggccgtggtgtccgtcgcgatcctccccgtgtgccgccatgcggcgatcagtagcgcgcgggcgttcgcgtcggcggcgggccggcgcggggattcggcgcgcctgtccggccggggcgaggaccggcaaaatcggacgccgcacggcgcagcgcggcccgcgtcggcggcgctcggcgatgcgcggcgacgcaagcgacgccgcgctcgatcgctccgaaacggagcagcgtgtgccgaattcgaacaggcgatgcgcgctatccaatcggccgttcatgaaagcacggcgttttcgcgggatggtacggttcgtgcgttttcgtttcccggacagacaggcgatttcacacgagacgcactgacacaaccaggagacgacatgagctatctgaacatcgcgcagcgcaccgacagtttcttcattccctgcgtgaccttgatcggcccgggctgcgcgcgagagacgggcgtgcgcgccaaatcgctgggcgcgaaaaaggcgctgatcgtgaccgacgcggggctgcacaagatggggctgtccgagatcgtcgcgggccatatccgcgacgcggggcttcaggccgtgatcttcgcgggcgcggagcccaacccgaccgacgtcaacgtgcacgacggcgtcgagcgctttcagcgcgagggatgcgacttcatcgtatcgctcggcggtgggtcgtcgcacgactgcgcgaaaggcatcgggctcgtcacggccggaggcgggcatatccgcgactatgaagggatcgacaaatcgacggtgccgatgacgccgttgatttcgatcaacacgacggcgggcacggccgcggagatgacgcgattctgcatcatcacgaactccagcaatcacgtcaaaatggcgatcgtcgactggcgctgcacgccgctcatcgcgatcgacgatccgtgcctgatggtggcgatgccgcccgcgctgacggccgcgacaggcatggacgcgctcacccacgcggtggaggcctacgtttccaccgccgcgacgccgatcaccgacgcctgcgccgaaaaggccatcgcgctgatcggcgaatggctgccgaaggccgtcgcgaacggcgaatcgatggaggcgcgcgcggccatgtgctacgcgcagtacctcgccgggatggcgttcaacaacgcgtcgctcggctacgtgcatgcgatggcgcaccagctcggcgggttctacaacctgccgcacggggtctgcaacgcgatcctgctgccgcacgtgtgcgagttcaacctgattgccgcgcccgaacggttcgccaccatcgcgtcgctcctcggcgtcaatacggccggatcgagcaccgtcgacgccgcccgggcggccattgcggcgatccgcgggctcagcgcctcgatcggcatccccgccggcctggccgcgctgggcgtcaaggccgaagatcacgaggtgatggcgagcaacgcgcagaaggacgcgtgcatgctgaccaatccgcgcaaggcgacgctcgcgcaggtcatcgcgatcttcgcggcggcgatgtga

SEQ ID NO: 130847 - protein, 637 aa, Burkholderia thailandensis E264
MIFTVIMQFGVIAVNGRIENFARRTSRPGNAGARVGRASGRKRCGSPAPPAPPAPPAPPGSAPSRSAPGRRAARSASVMLVLFLRSVMRHNALNLYCAVLAAITSARRFAYRRAPTAKARAVVSVAILPVCRHAAISSARAFASAAGRRGDSARLSGRGEDRQNRTPHGAARPASAALGDARRRKRRRARSLRNGAACAEFEQAMRAIQSAVHESTAFSRDGTVRAFSFPGQTGDFTRDALTQPGDDMSYLNIAQRTDSFFIPCVTLIGPGCARETGVRAKSLGAKKALIVTDAGLHKMGLSEIVAGHIRDAGLQAVIFAGAEPNPTDVNVHDGVERFQREGCDFIVSLGGGSSHDCAKGIGLVTAGGGHIRDYEGIDKSTVPMTPLISINTTAGTAAEMTRFCIITNSSNHVKMAIVDWRCTPLIAIDDPCLMVAMPPALTAATGMDALTHAVEAYVSTAATPITDACAEKAIALIGEWLPKAVANGESMEARAAMCYAQYLAGMAFNNASLGYVHAMAHQLGGFYNLPHGVCNAILLPHVCEFNLIAAPERFATIASLLGVNTAGSSTVDAARAAIAAIRGLSASIGIPAGLAALGVKAEDHEVMASNAQKDACMLTNPRKATLAQVIAIFAAAM

SEQ ID NO: 130848 - DNA, 1164 bp, Desulfitobacterium hafniense Y51
  CDS (1)..(1164): transl_table=11
atgtctgtcgtgcatcaagtctatggctactacatgccgaccgtcaatcttatgggggccggtgcagcccaggaggccggaaaacaggcaaaaatcctgggaggcaaaacagctcttctggtgacggatgctttccttaatcagagcggactggccaaacagatcgcggagattattgaagctgagggcgtaaaggttgtcatctatcccggagcggaacctaatcctaccgataagaatgttcatgatggcgtggccgtgtttgaaaaagaaaactgcaatatgattgtctcactgggaggggggtctgctcacgattgtgccaaaggtgtgggtttggttgccggaaacggcggcaatatccgtgattttgaaggagtggataaatccgcaaaacctatggtaccgatgattgctgtcaacactacggcaggaacagccagcgagatgacccggttctgtattattaccgatacggaccgccatattaaaatggctatcgtggactggcatgctacccccaatgtctccatcaatgaccccttattgatgatcggaaagcctgcccctctgaccgccgccaccggtatggatgccctgactcacgctgttgaggcctacgtctccactgcagctacccctattactgattcagctgccttgatggcgattaagctcatcagcaagtaccttcgccgtgctgttgccaacggccaggattttgaagcccgggaccaaatggcctatgcccaattcctggccggtatggcctttaacaatgccagcttaggttatgttcacgctatggcccatcagttaggcggtttctataatctgcctcatggtgtttgcaacgccatccttttacctcgtgtatcccgctttaatctgattggaaaccttgagcgcttcgtagacattgccgaagctctgggtgaggaaataaagaatttatcggccagagatgccgcagaaaaggctttgacggcaatgacaaccttatcccaggatatcagcatacccagcggactcactgagctgggcgtaaaagaagaggatctgcaaaccatggccgtcaatgccatgaaagatgcctgcagtctgaccaacccgcgcctggccaagctggaagatatcattcagatttataagaactctttataa

SEQ ID NO: 130849 - protein, 387 aa, Desulfitobacterium hafniense Y51
MSVVHQVYGYYMPTVNLMGAGAAQEAGKQAKILGGKTALLVTDAFLNQSGLAKQIAEIIEAEGVKVVIYPGAEPNPTDKNVHDGVAVFEKENCNMIVSLGGGSAHDCAKGVGLVAGNGGNIRDFEGVDKSAKPMVPMIAVNTTAGTASEMTRFCIITDTDRHIKMAIVDWHATPNVSINDPLLMIGKPAPLTAATGMDALTHAVEAYVSTAATPITDSAALMAIKLISKYLRRAVANGQDFEARDQMAYAQFLAGMAFNNASLGYVHAMAHQLGGFYNLPHGVCNAILLPRVSRFNLIGNLERFVDIAEALGEEIKNLSARDAAEKALTAMTTLSQDISIPSGLTELGVKEEDLQTMAVNAMKDACSLTNPRLAKLEDIIQIYKNSL

SEQ ID NO: 130850 - DNA, 1149 bp, Clostridium perfringens ATCC 13124
  CDS (1)..(1149): transl_table=11
atgagttataaattttttatgccagcaataagtttaatgggagcagattgcttaaaagacgctggtgatcaagttggagaattaggatttaaaaaagctttaatagtaacagataaagttttaggtcaaataggaatagttaaaaaagtaacagatgttttagataataagaatatagaatatgcaatatatgatgaaactaaaccaaacccaacagttaaaaatgttaatgatggtttagcattattaaaagaaaaagaatgtgattttgttatttcattaggtggaggctcagctcatgactgtgctaaaggaatagctttattagctactaatggcggagaaataaaagattatgagggagtagataaatctaaaaaacctcaattaccaatggtaggtataaatacaactgctggtactggtagtgaaatgactttattcgctattataactgatgaagaaagacatataaaaatggctttagtagataagcatttaacaccaataatagcggttaatgatcctattttaatgcttgctatgccaaaatcattaacagcggctactggtatggatgccttaacacacgctatagaggcttatgtttcaactgctgctacaccaataacagatgcttgtgcagagaaagctatagaacttataagtaattatttagtgaatgctgttgaaaatggacaagatgtggaagctagagatatgatggcttatgctgaatacttagcaggaatggcatttaacaatgctagtttaggatatgttcacgctatggctcaccaattaggtggattctacaacttacctcatggggtatgtaatgcaatattattacctcatgttcaagaatataacaaatctacaagtgcttcaagattagctaaaattgctaaaataatgggtggaaacatagaaggattaactgatgagcaaggagcagatctttgcatagatatgataaaatcattatcacaaactataggaattccagagggacttggagtattaggagtaaaagaaagtgattttgaaactttagctactaatgctttaaatgatgcttgttcattaacaaatccaagaaaaggaaacttagaagaagtaatagctatattcaaaaaagcaatgtag

SEQ ID NO: 130851 - protein, 382 aa, Clostridium perfringens ATCC 13124
MSYKFFMPAISLMGADCLKDAGDQVGELGFKKALIVTDKVLGQIGIVKKVTDVLDNKNIEYAIYDETKPNPTVKNVNDGLALLKEKECDFVISLGGGSAHDCAKGIALLATNGGEIKDYEGVDKSKKPQLPMVGINTTAGTGSEMTLFAIITDEERHIKMALVDKHLTPIIAVNDPILMLAMPKSLTAATGMDALTHAIEAYVSTAATPITDACAEKAIELISNYLVNAVENGQDVEARDMMAYAEYLAGMAFNNASLGYVHAMAHQLGGFYNLPHGVCNAILLPHVQEYNKSTSASRLAKIAKIMGGNIEGLTDEQGADLCIDMIKSLSQTIGIPEGLGVLGVKESDFETLATNALNDACSLTNPRKGNLEEVIAIFKKAM

SEQ ID NO: 130852 - DNA, 1149 bp, Shewanella sp. MR-4
  CDS (1)..(1149): transl_table=11
atggctgctaaattttttatcccttccgtcaacgtattaggcaaaggcgccgtcgatgatgctatcggagatatcaaaaccttaggctttaaacgcgcattaatcgtaacggataaacctctcgtcaagattggtctggtcggtgaagtggccgaaaaactcggtcaaaatggcattacttcaaccgtgttcgatggcgtacaacctaacccaaccgtcggtaacgtcgaagcgggtcttgcgctattaaaagctaaccaatgtgattttgtgatttcattaggcggtggctcaccccacgattgcgctaagggtattgccctagttgccaccaacggcggcagcatcaaagactatgaagggttagaccaatctgctaagccacaactgccattagtggccattaacactactgctggcactgccagtgaaatgacccgtttttgtattatcactgacgaagctcgccatatcaaaatggcgattgtcgacaaacataccaccccattactctctgtgaatgaccctgagctgatgctgaaaaaaccagctagcctcacagctgcaacaggtatggacgcgctgacccacgcggttgaagcctatgtgtctatcgctgcgaaccctattaccgatgcctgcgccattaaagccattgaacttatccaaggcaacttagtgaatgcggtaaaacaaggccaagacattgaagcccgtgagcaaatggcctatgcgcaattcttagcgggtatggcctttaacaacgccagcttaggttatgtgcatgcgatggcgcaccaattaggcggtttctacgatctgccccacggtgtgtgtaacgccctgttattaccccatgtgcaagaatacaacgctaaagtggtaccagatcgcttaaaagatattgccaaggcgatgggtgtcgatgtggccaatatgacggatgaacaaggtgctgcggcggcaatcaccgcgattaaggccctatccgttgcggtaaacattccagaaaacctgacattactcggggttaaagcggaagatattccaacgttggccgaaaacgccttaaaggatgcctgtggtttcactaaccctaaacaggcaacccatgaagagatctgccaaatcttcactaacgcgttataa

SEQ ID NO: 130853 - protein, 382 aa, Shewanella sp. MR-4
MAAKFFIPSVNVLGKGAVDDAIGDIKTLGFKRALIVTDKPLVKIGLVGEVAEKLGQNGITSTVFDGVQPNPTVGNVEAGLALLKANQCDFVISLGGGSPHDCAKGIALVATNGGSIKDYEGLDQSAKPQLPLVAINTTAGTASEMTRFCIITDEARHIKMAIVDKHTTPLLSVNDPELMLKKPASLTAATGMDALTHAVEAYVSIAANPITDACAIKAIELIQGNLVNAVKQGQDIEAREQMAYAQFLAGMAFNNASLGYVHAMAHQLGGFYDLPHGVCNALLLPHVQEYNAKVVPDRLKDIAKAMGVDVANMTDEQGAAAAITAIKALSVAVNIPENLTLLGVKAEDIPTLAENALKDACGFTNPKQATHEEICQIFTNAL

SEQ ID NO: 130854 - DNA, 1170 bp, Pediococcus pentosaceus ATCC 25745
  CDS (1)..(1170): transl_table=11
atgaaagaaaattttgatttccttatgcctagtgtcaacttctttggctctggagttattgcaaagattggtgaccgcgctaagatggtcaatatgtctaaagtattgatcgttactgataaatttttggaaaaaatggaaaatggacccgttgaacaaacccttcgttcacttgatcaagcgggtgtcgattacgttatttacaacggagtagagcctaatcctaaagttagaaatatccaagaagcaaaacaagtttatttggataatgactgtgatggaattatcactattggtggtggttcagctcatgatgctggaaaaggtactggtattattttgacgaatggcgacgatatcaccaaacttgctggaatcgaaacgctcgaaaatgcacttccaccattgatcgcggttaatactactgcaggaactgcttcagaattaactcgtcactgcgttattaccaacgaagaaacgcatcttaagttcgtagtggtttcgtggcgtaatgttcccctcgtatcatttaatgatccaaaattaatgctcggggttccacctgctctaactgctgcaactgggatggacacatttgtccaagccattgaaccttacgtttctactaaccgcaacgatattactgatggtcaatgtctccaagctatcaagttagtggaagaaagccttcgtgaagctgtatctaacggtgaaaacctagaagctagaactaagatggtagaagctgaaatgttgggagggatggctttcaataatgccgatcttggttacgtacatgctatggcccatcaattaggtggacaatacgacgctcctcatggcgtttgctgtgctatcctattaccaattgtagaacgcttcaacttagttgcttgccctgatcgtttcgcagacttagctgtcgccatgggtgaaaatatcgacggcctttccattagagctgccgctgataaagctattgatgccatgcaacaacttaacgacgatgttggtattccaagaagtatcaaagatttgggtgctgatcctaaagatttcgaactaatggctgaaaatgctttgaaggatggcaatgccttctccaacccacgcaaagctactaagcaacaaattgtggaacttttccaacaagcttacgacgcaaaataa

SEQ ID NO: 130855 - protein, 389 aa, Pediococcus pentosaceus ATCC 25745
MKENFDFLMPSVNFFGSGVIAKIGDRAKMVNMSKVLIVTDKFLEKMENGPVEQTLRSLDQAGVDYVIYNGVEPNPKVRNIQEAKQVYLDNDCDGIITIGGGSAHDAGKGTGIILTNGDDITKLAGIETLENALPPLIAVNTTAGTASELTRHCVITNEETHLKFVVVSWRNVPLVSFNDPKLMLGVPPALTAATGMDTFVQAIEPYVSTNRNDITDGQCLQAIKLVEESLREAVSNGENLEARTKMVEAEMLGGMAFNNADLGYVHAMAHQLGGQYDAPHGVCCAILLPIVERFNLVACPDRFADLAVAMGENIDGLSIRAAADKAIDAMQQLNDDVGIPRSIKDLGADPKDFELMAENALKDGNAFSNPRKATKQQIVELFQQAYDAK

SEQ ID NO: 130856 - DNA, 1173 bp, Oenococcus oeni PSU-1
  CDS (1)..(1173): transl_table=11
atggtagagcgtgcatatgattttttgatgcccagtgttaatttctttggtccgggggtcatttcaaaaattggcgaacgtgcaaaaatgctgggaatgaagaaaccggttattgtaactgataagtttcttgagaatttaaaaaatggtgctgttgctcaaacacttgcttctttaaaaaaatccggtgtcgattatgttgtttataacgaagtcgaaccgaacccaaaaattcataacattaaagaagtcaaaacattgtacgagaaggaggacgctgattcaattattacggttggtggtggatcagcccatgataccggaaaaggtgccggcatcattatgacgaatggcgacgacattacaaaattggccggcatcgagacgctgaaaaatccgctgcctccgttgattgctgttaacacgacagccgggactggttcggaattgacccggcatgctgttatcactaatgaagagacgcacctcaaattcgttgttgtttcctggagaaatattcctcttgtgtcgtttaatgatccgacattgatgttagacattccaaagggactaacagctgcaactggtatggatgcttttgttcaagcagttgaaccttatgtttcggttgatcataatccgattactgattcacaatgcattcaggcgattaaattaattgaaagcagtttacgtgaagctgttgctaacggacacaatcttcaagctcgtaccaaaatggtcgaagccgagatgttggctggaatggcctttaataatgccaatctcggttatgtacatgcaatggctcatcagttgggtggccagtatgatgccccacatggtgtttgctgtgcgttgcttcttccttatgctgaagaatacaatttaatcgccgatccggaacgttttgccgaactggcacggattatgggcgaaaatactgatggattgtcaagcagagacgccgccgaattatcaattaaagcaatgaaacagctatctgaagatgttggtataccacactcgattaaagatatcggcgcaaaacccgaagacttcgacttaatggcagaaaatgccttaaaagacggcaatgcattttccaatccacgtaaaggtactaaagaggatatcgttaaaatattccaagaagcttacgatgcaaaatga

SEQ ID NO: 130857 - protein, 390 aa, Oenococcus oeni PSU-1
MVERAYDFLMPSVNFFGPGVISKIGERAKMLGMKKPVIVTDKFLENLKNGAVAQTLASLKKSGVDYVVYNEVEPNPKIHNIKEVKTLYEKEDADSIITVGGGSAHDTGKGAGIIMTNGDDITKLAGIETLKNPLPPLIAVNTTAGTGSELTRHAVITNEETHLKFVVVSWRNIPLVSFNDPTLMLDIPKGLTAATGMDAFVQAVEPYVSVDHNPITDSQCIQAIKLIESSLREAVANGHNLQARTKMVEAEMLAGMAFNNANLGYVHAMAHQLGGQYDAPHGVCCALLLPYAEEYNLIADPERFAELARIMGENTDGLSSRDAAELSIKAMKQLSEDVGIPHSIKDIGAKPEDFDLMAENALKDGNAFSNPRKGTKEDIVKIFQEAYDAK

SEQ ID NO: 130858 - DNA, 1149 bp, Shewanella sp. ANA-3
  CDS (1)..(1149): transl_table=11
atggctgctaaattttttatcccttccgtcaacgtattaggcaaaggcgccgtcaatgacgctatcggagatatcaaaaccttaggctttaaacgcgcgttaatcgtgacggataaacctctagtcaagattggtctggtcggtgaagtggccgaaaagctcggtcaaaacggcattacttcaaccgtgtttgatggcgtgcaacccaacccaaccgtcggtaacgtcgaagcgggtcttgcactattaaaagccaatcaatgtgattttgtgatttcattaggcggcggttcaccccacgattgcgctaagggtatcgccttggttgccaccaacggcggcagcatcaaagactatgaagggttagaccaatccgctaagccacaactgccattagtagccattaacactactgctggtaccgccagtgaaatgacccgtttttgtatcatcactgacgaagctcgccatattaaaatggcaattgtcgataaacacaccaccccattattgtctgtgaatgaccctgagctgatgctgaaaaaaccagcgagcctcaccgccgcaacaggcatggacgcgctgacccacgcggttgaagcctatgtgtctatcgctgctaacccaattaccgatgcctgcgccattaaggccattgaacttatccaaggcaacttagtgaatgcggtaaagcaaggccaagatattgaggcccgtgagcaaatggcctatgcgcaattcttggcgggtatggccttcaacaacgccagcttaggttatgtacatgcgatggcgcaccaattaggcggtttctacgacctgccccacggtgtgtgtaacgccctattattaccccatgtgcaagaatacaacgccaaagtggtaccagaacgcttaaaggatattgctaaggcgatgggtgtcgatgtagccaatatgacggatgaacaaggtgcagcggcggcgatcgccgcgattaaggccctatccgttgcggtaaacattccagaaaacctgacattactcggggttaaagcggaagatattccaaccctggccgaaaacgccttaaaggatgcctgtggtttcactaaccctaaacaggcaacccatgaagagatctgccagatcttcgctaacgcgttataa

SEQ ID NO: 130859 - protein, 382 aa, Shewanella sp. ANA-3
MAAKFFIPSVNVLGKGAVNDAIGDIKTLGFKRALIVTDKPLVKIGLVGEVAEKLGQNGITSTVFDGVQPNPTVGNVEAGLALLKANQCDFVISLGGGSPHDCAKGIALVATNGGSIKDYEGLDQSAKPQLPLVAINTTAGTASEMTRFCIITDEARHIKMAIVDKHTTPLLSVNDPELMLKKPASLTAATGMDALTHAVEAYVSIAANPITDACAIKAIELIQGNLVNAVKQGQDIEAREQMAYAQFLAGMAFNNASLGYVHAMAHQLGGFYDLPHGVCNALLLPHVQEYNAKVVPERLKDIAKAMGVDVANMTDEQGAAAAIAAIKALSVAVNIPENLTLLGVKAEDIPTLAENALKDACGFTNPKQATHEEICQIFANAL

SEQ ID NO: 130860 - DNA, 1140 bp, Listeria monocytogenes str. 1/2a F6854
  CDS (1)..(1140): transl_table=11
atgcaaaaagttagttttaaaacagatctttacattggccaaggagcaacagatcgtttacttgattttaaagacaaacaaatctttatcgtaacggatccatttatggttagttccggaatgattaacgcgattacagacaaaattgatccatcgaatacatatacgatttttagcgaaattattccagacccaccgattgaaaacgtggtagcaggaatcgaagttctaaatgaatgtgatgcaaacttgatgattgcaattggtggtggctcagcgattgatgcagcgaaagcgatgaaattcttcggtcaaaaacttggtacggtgcgcgcaatgcctttcatcgttatcccgacaactagtggaactggttcagaagtaactagtttttctgttattacaaacaaagaaaaagcaatcaaatacccactaattacagatgctattttaccagatgaagcaattttagacgctgacttagtaaaatctgttccaccagcaatcacagcagatacaggtatggatgtattaacgcatgcgcttgaagcctatgtatctacaaaagcaaatgattactcggatgcaatggcagaaaaagttatccaattagttttcacatacttagaacgtgcttacaaagatggcaatgatttagaagctcgcgaaaaaatgcataatgcgtcttgtcttgcaggaatggcttttaacattacttcgcttggcttaaatcacggtattgcgcatacagctggtgcgaaatttaaaatcccgcatggccgtatgaacacattacttttaccacacgtaattagttataacgctggaattacaagtgattttggtaacaatccagataaccgagcagcagaacgttatacagcaatcgctaaattactgaaaatgccagcatcgaatacacgtcttggcgttcgcagcttaattaatgccattaaacaacttcaaaagaaactcaatatgccaactacattaacagaatgtggtattagccgcactgatttaaatgaaaatattgctcaaatcgctgaaggtgcgctaaatgacggatgcactgcaacaaatccaagaacaccgactgaaacagatgttagcgcgattcttgagaagatgttggcataa

SEQ ID NO: 130861 - protein, 379 aa, Listeria monocytogenes str. 1/2a F6854
MQKVSFKTDLYIGQGATDRLLDFKDKQIFIVTDPFMVSSGMINAITDKIDPSNTYTIFSEIIPDPPIENVVAGIEVLNECDANLMIAIGGGSAIDAAKAMKFFGQKLGTVRAMPFIVIPTTSGTGSEVTSFSVITNKEKAIKYPLITDAILPDEAILDADLVKSVPPAITADTGMDVLTHALEAYVSTKANDYSDAMAEKVIQLVFTYLERAYKDGNDLEAREKMHNASCLAGMAFNITSLGLNHGIAHTAGAKFKIPHGRMNTLLLPHVISYNAGITSDFGNNPDNRAAERYTAIAKLLKMPASNTRLGVRSLINAIKQLQKKLNMPTTLTECGISRTDLNENIAQIAEGALNDGCTATNPRTPTETDVSAILEKMLA

SEQ ID NO: 130862 - DNA, 2217 bp, Bacillus cereus G9241
  CDS (1)..(2217): transl_table=11
atgtttaaagcattgatcgcgataaaaacgagaaatccaattattttcgcatttcatccttccgcacaaaaatgttccattgcagcggcgaaaacagtatatgatgcagcagtgaaggcgggagcgccaaaacattgtattcagtggattgaaaaaccttctgttgaagcaacgaaacaattaatgaatcatgaaggagttgcacttgttttggcaactggaggggctggtatggtgaaatcggcttattctactgggaaaccagcgctaggtgtaggtcctggtaatgtaccatgctacatagagaaatcggcgcatgtaaaacgagcagttaatgatttaattttatcaaaaacatttgataacggtatgatttgtgcatcagaacaagcaatcattgtagataaggaaatttacgatgatgtgaaaacagaaatgattgcaaacaattgttactttgtaacagaagaagagagaagaaaattagaaaagcttgttattaacgaaaatacatgtgcagtaaatagtgatattgttgggaaatcagcacagtatattgccgaattagtagggattactgtacctgaaaatacaaaaatgcttgtagctgaaatacaaggtatcggagcagcgtatccactatctcgtgagaaactgagtccagtattagcttgtgtaaaagcgaattccttagaagaaggatttacatattgtgaagaaatgttaaacctcggtggtttaggacattcagcagttatccattctgtaaataaagaagtgcaaaagcaatttggattacgtatgaaagcttgccgccttattgtaaatgccccttcatcacaaggtggaatcggtgatatatataatggatttattccatcacttacgcttggttgcggttcctacgggaaaaactcggtttctcaaaacgtaacagcgacgcatttattaaatataaaaaggttggcaaatagaaaaaagaatatgcagtggttcaaattaccaccaaaaatttattttgaaaaacatgcgacagcatatttagcaaatatgcctaacatttcacgtgcatttattgtaacagatccaggaatggttgagcacggatatgtagatacggtctcgcattatttacgtaaacatgcaaatgatgtgaaagttgaagttttctttgaggttgagccagatccatcagatgaaactgtgtttaaaggtgcggaaatgatgagaagttttcagccggatgtaattatcgcacttggtggtggttcagcgatggatgcagcgaaagggatgtggcttttctatgagcacccagaaacaacattctatggaattaaacagaagtttttagatataagaaaacgtacatgtaaatatccggaattaggaagtaaagcgcagtttgttgccattccaacaacatctggaacaggatcagaagtgacaccatttgcggttattacagataagaaaaataatataaagtatccactcgcggattatgaattaacgccagatgtagcaattgttgatccgcaatttgtaatgacagtaccaccacatgtaacagcagacactgggatggacgtattaacgcatgcaatcgaggcatatgtgtctgttttagcaaatgattatactgatggattagcattaaaggccattgatctcgtatttaaatatttaccaagagcatttaaagatggaaatgatgaagaagcacgagaaaaaatgcataatgcttctgcaatcgcaggaatggcatttgcaaatgcttttctaggtattaatcacagtttagcacataaaattgggccagaattccatattccgcatgggcgtgcaaatgccattcttatgccacacgtagttcgctataatgctattaagccaagaaaacacgcattgttcccaaaatatgagcattttgtagctgatgaacgctatgcacatattgcgagaatgctcgggcttccagcaagttcggcggcagaaggtgtggaatcacttgtccaagcaattattgagcttggaaaaagtttaaatataaatatgagtattgcaggacaaggagttgctaaagaccaatttgaagaggttgttggagtattggcagaaagagcttttgaagatcaatgtacaacagctaatccaaaattacctctcatttcagagttgaaagaaatttatatgaaagcatataaaggtgaataa

SEQ ID NO: 130863 - protein, 738 aa, Bacillus cereus G9241
MFKALIAIKTRNPIIFAFHPSAQKCSIAAAKTVYDAAVKAGAPKHCIQWIEKPSVEATKQLMNHEGVALVLATGGAGMVKSAYSTGKPALGVGPGNVPCYIEKSAHVKRAVNDLILSKTFDNGMICASEQAIIVDKEIYDDVKTEMIANNCYFVTEEERRKLEKLVINENTCAVNSDIVGKSAQYIAELVGITVPENTKMLVAEIQGIGAAYPLSREKLSPVLACVKANSLEEGFTYCEEMLNLGGLGHSAVIHSVNKEVQKQFGLRMKACRLIVNAPSSQGGIGDIYNGFIPSLTLGCGSYGKNSVSQNVTATHLLNIKRLANRKKNMQWFKLPPKIYFEKHATAYLANMPNISRAFIVTDPGMVEHGYVDTVSHYLRKHANDVKVEVFFEVEPDPSDETVFKGAEMMRSFQPDVIIALGGGSAMDAAKGMWLFYEHPETTFYGIKQKFLDIRKRTCKYPELGSKAQFVAIPTTSGTGSEVTPFAVITDKKNNIKYPLADYELTPDVAIVDPQFVMTVPPHVTADTGMDVLTHAIEAYVSVLANDYTDGLALKAIDLVFKYLPRAFKDGNDEEAREKMHNASAIAGMAFANAFLGINHSLAHKIGPEFHIPHGRANAILMPHVVRYNAIKPRKHALFPKYEHFVADERYAHIARMLGLPASSAAEGVESLVQAIIELGKSLNINMSIAGQGVAKDQFEEVVGVLAERAFEDQCTTANPKLPLISELKEIYMKAYKGE

SEQ ID NO: 130864 - DNA, 2217 bp, Bacillus anthracis str. A2012
  CDS (1)..(2217): transl_table=11
atgtttaaagcattaatagcgataaaaacgagaaatccaattattttcgcatttcatccttcagcacaaaactgttctgttgcagccgcgaaaacagtatacgatgcagcggtgaaggcgggggcaccaaaacattgtattcagtggattgaaaagccttctgtcgaagcaacgaaacaattaatgaaccatgaaggtgttgcgcttgttttagcaactggaggggctggtatggtgaaatcagcttattctactggaaaaccagcgctaggtgtaggtcctggtaatgtaccatgttatatagagaaatcagcgcatataaaacgagcggttaatgatttgattttatcaaaaacgtttgataacgggatgatttgtgcatcagaacaagcaatcattgtagacaaggaaatttatgatgatgtgaaaacagaaatgattacaaatgattgttactttgtaacagaggaagagagaagaaaattagaaaagcttgttattaatgaaaatacatgtgcagtaaatagtgatattgtagggaaatctgcacagtatattgccgaattagttggaattactgtacctaaaaatacaaaaatgcttgtagctgaaatacaaggcatcggagccgcatatccactatctcgtgagaagttaagtccagtattagcttgtgtaaaagcaaattcattagaagaaggatttacatattgtgaagaaatgttaaacctcggtggcttagggcattcagcagttatccattctgtaaataaagaagtgcaaaagcaatttggattacgtatgaaagcttgccgccttattgtaaatgctccttcatcacaaggtggaatcggtgacatatataatggatttattccatcacttacgcttggctgcggttcctacgggaaaaactcggtttctcaaaacgtaacagcgacgcacttattaaatataaaaaggttggcaaatagaaaaaagaatatgcagtggttcaaattaccaccaaaaatttattttgaaaaacatgcgacagcatatttagcaaatatgcctaacatttcacgtgcgtttattgtaacggatccaggaatggttgagcatggatatgtagatacggtcgcgcattatttacgtaaacatgcaaatgatgtgaaagtagaagttttctttgaggttgagccagatccatcagatgaaactgtttttaaaggtgcggaaatgatgagaagttttcagcctgatgtcatcatcgcacttggtggtggttcagcgatggatgcagcgaaagggatgtggcttttctatgagtacccagaaacaacattctatggaattaaacagaagtttttagatataagaaaacgtacatgtaaatatccggaattaggaagtaaggcgcagtttgttgccattccaacaacatctggaacaggatcagaagtgacaccatttgcggttattacagataagaaaaataatataaagtatccacttgccgattatgaattaacgccagatgtagcaattgttgatccgcaatttgtaatgacagtaccaccacatgtaacagcagatactgggatggacgtattaacgcatgcaatcgaggcatatgtgtctgttttagcaaatgattatacagatggattagcattaaaggccattgatctcgtatttaaatatttaccaagagcatttaaagatggacatgatgaagaagcacgagaaaaaatgcataatgcttctgcaattgcagggatggcatttgcaaatgcattcctaggtattaatcacagtttagcgcataaaattggaccagaattccatattccgcatggacgtgcgaatgcaattcttatgccgcacgtaattcgttataatgctattaagccaagaaaacatgcattgttcccaaaatatgagcactttgtggctgatgaacgctatgcacatattgcgagaatgctcgggctaccagcaagttcggtggcagaaggtgtagaatcactcgacaaagcaattattgatctcggaaaaagtttaaatataaatatgagtattgcgggacaaggagttgctaaagaccaatttgaagaggttgttggattattagcagaaagagcttttgaagatcaatgtacaacagctaatccgaaattacctctcatttcagagctgaaagaaatttatatgaaagcatataaaggtgagtaa

SEQ ID NO: 130865 - protein, 738 aa, Bacillus anthracis str. A2012
MFKALIAIKTRNPIIFAFHPSAQNCSVAAAKTVYDAAVKAGAPKHCIQWIEKPSVEATKQLMNHEGVALVLATGGAGMVKSAYSTGKPALGVGPGNVPCYIEKSAHIKRAVNDLILSKTFDNGMICASEQAIIVDKEIYDDVKTEMITNDCYFVTEEERRKLEKLVINENTCAVNSDIVGKSAQYIAELVGITVPKNTKMLVAEIQGIGAAYPLSREKLSPVLACVKANSLEEGFTYCEEMLNLGGLGHSAVIHSVNKEVQKQFGLRMKACRLIVNAPSSQGGIGDIYNGFIPSLTLGCGSYGKNSVSQNVTATHLLNIKRLANRKKNMQWFKLPPKIYFEKHATAYLANMPNISRAFIVTDPGMVEHGYVDTVAHYLRKHANDVKVEVFFEVEPDPSDETVFKGAEMMRSFQPDVIIALGGGSAMDAAKGMWLFYEYPETTFYGIKQKFLDIRKRTCKYPELGSKAQFVAIPTTSGTGSEVTPFAVITDKKNNIKYPLADYELTPDVAIVDPQFVMTVPPHVTADTGMDVLTHAIEAYVSVLANDYTDGLALKAIDLVFKYLPRAFKDGHDEEAREKMHNASAIAGMAFANAFLGINHSLAHKIGPEFHIPHGRANAILMPHVIRYNAIKPRKHALFPKYEHFVADERYAHIARMLGLPASSVAEGVESLDKAIIDLGKSLNINMSIAGQGVAKDQFEEVVGLLAERAFEDQCTTANPKLPLISELKEIYMKAYKGE

SEQ ID NO: 130866 - DNA, 1149 bp, Photobacterium sp. SKA34
  CDS (1)..(1149): transl_table=11
atgagcagtgcattctatattcctactgttaacttcatgggcgcaggctgtttgactcaagctgctgatgcgattaaatctcacggttttaaaaaagcacttattgttaccgataaagtattgaaccaaattggtgtggttactcaagtggctttattgctcactgagcgtgatattgactctgtggtttatgatggtactcagccaaacccaaccattaaaaacgttgatgaaggtttagcgttactaaaagaaaaccaatgtgattttgtgatttctcttggtggtggttctccacatgactgtgcgaaaggtattgcgctattggctgccaacggtggtcacattggtgattacgaaggtgttgaccgatctgcaaaagcacagctgcctgtggttgctattaacactacagcgggtactgcatcggagatgacccgtttctgtattatcactgatgaagaacgtcatattaagatggcgattgtcgataaaaatacgactccattaatatctgtaaatgatcctcagttaatgttggcaaaacctgcatcattaactgctgcaacagggatggatgcattaactcacgctatcgaagcgtatgtttcaatagccgcaacaccaattactgatgcagtggcgattaaagcgattgagttaattcaacaaaacctacgtaccgcagtaaaagatggacaaaacttgaatgctcgtgagcaaatggcatatgcgcagtttatggctggtatggcatttaacaacgcgtcactcggttatgtacatgcgatggcgcatcagttagggggttattacaatcttcctcatggtgtatgtaatgcagtattactaccgcatgttcagcgttataacgcacaagtatcagctgagcgtttacgtgatgttgctaaagcaatgggtgttgatgtcgaaggtatgactgcagagcagggtgctaatgcagcactggaagcgattgtggcgctatctaaagatgttggcattccattaggtttaaaagtacttggtgtgaaagaagaagatatcccattattggctgacaatgcattgaacgatgcttgtggtttcactaaccctaaacaagcaactcatgaagaaatttcacagatctttatggcagcaatgtaa

SEQ ID NO: 130867 - protein, 382 aa, Photobacterium sp. SKA34
MSSAFYIPTVNFMGAGCLTQAADAIKSHGFKKALIVTDKVLNQIGVVTQVALLLTERDIDSVVYDGTQPNPTIKNVDEGLALLKENQCDFVISLGGGSPHDCAKGIALLAANGGHIGDYEGVDRSAKAQLPVVAINTTAGTASEMTRFCIITDEERHIKMAIVDKNTTPLISVNDPQLMLAKPASLTAATGMDALTHAIEAYVSIAATPITDAVAIKAIELIQQNLRTAVKDGQNLNAREQMAYAQFMAGMAFNNASLGYVHAMAHQLGGYYNLPHGVCNAVLLPHVQRYNAQVSAERLRDVAKAMGVDVEGMTAEQGANAALEAIVALSKDVGIPLGLKVLGVKEEDIPLLADNALNDACGFTNPKQATHEEISQIFMAAM

SEQ ID NO: 130868 - DNA, 1149 bp, Vibrio sp. Ex25
  CDS (1)..(1149): transl_table=11
atgacaagtgcattttttatccctacggtaaacctaatgggcgctggttgtttaaaagacgcagcagacagcatccaatctcaaggctttaaaaaaggtttgatcgttacggataagatccttaaccaaatcggtgtagtcaaacaagttcaagaccttctcactgaacgcgacgtagcaaccgttgtgtacgatggcactcaaccaaaccctactatcaccaacgttaatgatggcttagctttactaaaagaaaacgaatgtgacttcgttatctcactcggaggcggctcaccgcacgattgtgcaaaaggtatcgctttagtggcgtcaaacggcggcaagatcggcgattacgaaggcgttgaccaatccgcaaaaccaatgctgcctctcgtatcaatcaacacaacggctggtaccgcttctgaaatgacgcgtttctgcatcatcacagatgaagagcgccacattaagatggcgattgtggacaagcacacaacaccattgatgtcagtgaatgatcctgagttgatgcttgctaaacctgcgtctcttactgccgcaacaggtatggatgcgctaacacatgcgattgaagcttacgtatctatcgctgcgacaccaatcactgacgcggtagcaatcaaagcaattgaactgattcaagctcaccttcgcacagcagtgaaaaacggtgaaaaccttgaagctcgcgagcaaatggcatacgcacagttcatggcaggtatggcattcaacaacgcatctcttggttacgttcacgcaatggcgcaccaactaggcggcttctacgacctgccacacggtgtatgtaacgcgattcttctacctcacgtacaacgttacaatgcgcaagtatgtccagagcgtttacgtgacgttgctaaagcaatgggtgttgatgttgaaggtatgtcagcagagcaaggtgctgcggcggccattgatgctatcgttgagcttgctaaagatgtcggcatcccatcaggcattaaagagcttggtgcgaagctagaagatatcccaaccttagcggacaacgcgctaaaagacgcttgtggtttcaccaacccgaaacaagcaacgcacgaagagatctctaagatcttcgaagaagcgatgtag

SEQ ID NO: 130869 - protein, 382 aa, Vibrio sp. Ex25
MTSAFFIPTVNLMGAGCLKDAADSIQSQGFKKGLIVTDKILNQIGVVKQVQDLLTERDVATVVYDGTQPNPTITNVNDGLALLKENECDFVISLGGGSPHDCAKGIALVASNGGKIGDYEGVDQSAKPMLPLVSINTTAGTASEMTRFCIITDEERHIKMAIVDKHTTPLMSVNDPELMLAKPASLTAATGMDALTHAIEAYVSIAATPITDAVAIKAIELIQAHLRTAVKNGENLEAREQMAYAQFMAGMAFNNASLGYVHAMAHQLGGFYDLPHGVCNAILLPHVQRYNAQVCPERLRDVAKAMGVDVEGMSAEQGAAAAIDAIVELAKDVGIPSGIKELGAKLEDIPTLADNALKDACGFTNPKQATHEEISKIFEEAM

SEQ ID NO: 130870 - DNA, 1158 bp, Clostridium pasteurianum
  CDS (1)..(1158): transl_table=11
atgagaatgtatgattttttagcaccaaatgtaaactttatgggagcaggtgcaataaaattagtgggagaaagatgtaaaatattaggcggaaagaaagctttaatagttacagataaattcttgagaaatatggaagatggagctgtagctcaaacggttaaatatattaaagaagcaggaatagatgttgctttttatgatgatgtagagcctaatcctaaggatactaatgttagagatggattaaaagtatatagaaaagaaaactgtgatttaatagttactgtaggaggaggaagttctcatgactgtggaaagggaataggtattgcagctacacacgagggagatctttatgactatgctggtatagaaacccttactaatccattgcctccgatagtagctgtaaatacaacagctggaacaggcagcgaggttactcgtcattgtgttatcacaaacacaaaaacaaagattaaatttgttattgtaagctggagaaatctgccgttagtatccattaatgatccaatacttatgattaaaaagcctgcaggattaacagcagctacaggaatggatgccttaactcatgccatagagtcctatgtttctaaagatgcaaacccagtaacagatgccttagctatacaagcaataaaattaatagctaacaatctgcgtcaggcagtagcccttggagaaaatctggaagctagagaaaatatggcctacgcatcacttctggcaggaatggcatttaataatgcaaatttaggatatgtacatgctatggcacatcaattaggaggcctgtatgatatggcacatggtgttgccaatgccatgttattaccacatgtagaacgctataatcttatatcaaatcctaagaaatttgcagatatagcagaattcatgggagagaatattgaaggactttcagtaatggaagcagcagaaaaagctatagatgctatgtttagactttcaaaggatgttgggataccagcaagtcttaaagaaatgggagttaatgaaggagattttgaatatatggcaaaaatggcattgaaagatggaaatgcattcagtaatccaagaaaaggtaatgaaaaagatatagttaaaatatttagagaagcattttaa

SEQ ID NO: 130871 - protein, 385 aa, Clostridium pasteurianum
MRMYDFLAPNVNFMGAGAIKLVGERCKILGGKKALIVTDKFLRNMEDGAVAQTVKYIKEAGIDVAFYDDVEPNPKDTNVRDGLKVYRKENCDLIVTVGGGSSHDCGKGIGIAATHEGDLYDYAGIETLTNPLPPIVAVNTTAGTGSEVTRHCVITNTKTKIKFVIVSWRNLPLVSINDPILMIKKPAGLTAATGMDALTHAIESYVSKDANPVTDALAIQAIKLIANNLRQAVALGENLEARENMAYASLLAGMAFNNANLGYVHAMAHQLGGLYDMAHGVANAMLLPHVERYNLISNPKKFADIAEFMGENIEGLSVMEAAEKAIDAMFRLSKDVGIPASLKEMGVNEGDFEYMAKMALKDGNAFSNPRKGNEKDIVKIFREAF

SEQ ID NO: 130872 - DNA, 1152 bp, Zymomonas mobilis
  CDS (1)..(1152): transl_table=11
atggcttcttcaactttttatattcctttcgtcaacgaaatgggcgaaggttcgcttgaaaaagcaatcaaggatcttaacggcagcggctttaaaaatgcgctgatcgtttctgatgctttcatgaacaaatccggtgttgtgaagcaggttgctgacctgttgaaagcacagggtattaattctgctgtttatgatggcgttatgccgaacccgactgttaccgcagttctggaaggccttaagatcctgaaggataacaattcagacttcgtcatctccctcggtggtggttctccccatgactgcgccaaagccatcgctctggtcgcaaccaatggtggtgaagtcaaagactacgaaggtatcgacaaatctaagaaacctgccctgcctttgatgtcaatcaacacgacggctggtacggcttctgaaatgacgcgtttctgcatcatcactgatgaagtccgtcacgttaagatggccattgttgaccgtcacgttaccccgatggtttccgtcaacgatcctctgttgatggttggtatgccaaaaggcctgaccgccgccaccggtatggatgctctgacccacgcatttgaagcttattcttcaacggcagctactccgatcaccgatgcttgcgctttgaaagcagcttccatgatcgctaagaatctgaagaccgcttgcgacaacggtaaggatatgccggctcgtgaagctatggcttatgcccaattcctcgctggtatggccttcaacaacgcttcgcttggttatgtccatgctatggctcaccagttgggcggttactacaacctgccgcatggtgtctgcaacgctgttctgcttccgcatgttctggcttataacgcctctgtcgttgctggtcgtctgaaagacgttggtgttgctatgggtctcgatatcgccaatctcggtgataaagaaggcgcagaagccaccattcaggctgttcgcgatctggctgctcccattggtattccagcaaacctgaccgagctgggtgctaagaaagaagatgtgccgcttcttgctgaccacgctctgaaagatgcttgtgctctgaccaacccgcgtcagggtgatcagaaagaagttgaagaactcttcctgagcgctttctaa

SEQ ID NO: 130873 - protein, 383 aa, Zymomonas mobilis
MASSTFYIPFVNEMGEGSLEKAIKDLNGSGFKNALIVSDAFMNKSGVVKQVADLLKAQGINSAVYDGVMPNPTVTAVLEGLKILKDNNSDFVISLGGGSPHDCAKAIALVATNGGEVKDYEGIDKSKKPALPLMSINTTAGTASEMTRFCIITDEVRHVKMAIVDRHVTPMVSVNDPLLMVGMPKGLTAATGMDALTHAFEAYSSTAATPITDACALKAASMIAKNLKTACDNGKDMPAREAMAYAQFLAGMAFNNASLGYVHAMAHQLGGYYNLPHGVCNAVLLPHVLAYNASVVAGRLKDVGVAMGLDIANLGDKEGAEATIQAVRDLAAPIGIPANLTELGAKKEDVPLLADHALKDACALTNPRQGDQKEVEELFLSAF

SEQ ID NO: 130874 - DNA, 2625 bp, Thermoanaerobacter ethanolicus
  CDS (1)..(2625): transl_table=11
atgcctaacttattacaagaaagaagagaagtaaaagaaaaaacagaagtgaaagaaacgctggatgttaaaagacaaatagaccaattagtagaaaaagcacaaagagcacaagaaaaattcatgtcttatacccaagaacaaatagataaaatagttaaagctatggctttggctggtattgaaaatcatgtgagattggcaaaattagcccatgaagaaacaaaaatgggtgtttatgaagacaaaataacgaaaaatctttttgcagtagaatatgtgtacaattatataaaagacaaaaagactgtcggcgtccttagtgaaaacttagaagaaaattatatggaagtggcagaacctgtaggagttatagccggcgtaacacccgttacaaaccctacttctacaacaatgttcaaaagcttaatcgctattaaaacaagaaatccaataatttttagctttcacccaaaagcattaaaatgtagtatagaaacagcaaagaccatgtacgaggcagcattaaaagctggtgcaccagaaggatgcataggttggattgaaacgccttcaattgaagcaacgcaacttctcatgacacatcccggcgtctcccttatcctcgcaacaggcggcgctggaatggtaaaagccgcttacagctcaggaaaacccgcccttggcgtaggtcctggcaatgtcccctgctacattgaaaaaactgcaaatattaaaagagcagtctcagacctaatacttagcaaaacttttgacaatggcacagtatgcgcatcagaacaagctgtgataatagacgaagaaatagcagatgaagtgaaaaaattaatgaaagaatatggttgctattttctcaataaagaagagactaaaatgctagaagaattcgctatagacaaaaacaccggtttaatgaatccagcagttgtaggtcaaccggcaacaaaaattgctgaaatggctggatttaaagtacctgaaaacacaaaaatacttgtagctgaatatcctgctgtaggaccagaatatcctctctccagagaaaagctaagtccaatacttgctttatacacagtcaaagattacaacgaaggcataaaaagatgtgaagaaatgacagaattcggcggacttggtcactctgcagtaatacattctgaaaaccaacaaattattaatgaatttgcaaaaagagtacgagcaggaagaattcttgtaaacgcccctgcttctcaaggagctattggagatatttataacacggctatcccatctttgactttgggttgcggtacaatgggtagaaattcaacaacagataatgtaagtgtttataaccttataaacataaaacgagtttttataagaaaagagagaatgaaatggttcagagttccaccacaaatttattttgaaagagggtcattacaatatctgtcacaagtaaaaggcaaaaaagcctttattgtaacagaccctgtgatggttaaattaggttttgtagataaagtaacgtatcaattagataaggcaaatattaaatatgaaatattctctgaagttgaaccagatccttcagttgacactgtagaaaaaggggtaaaaataatgagagggtttgagcctgacttactaatagctgtaggtggtggttctgcaatagatgcagcgaagggaatgtggcttttctacgaataccctgatacaaaattcgaagacttaaggttaaaatttatggacataagaaaaagaacttatagatttcctgaactggggaaaaaagctttatttatcgcaataccaaccaccagcggtagcggtacaggttctgaagttactgcctttgcagttataacagacaaaaagaaaaatataaagtaccctctcacagattacgaattaacaccagatatcgctataatagaccctgacctcacaatgacaataccaccctctgtcacagcagacactggtatggacgctttaacccatgctattgaagcctatgtatctgtaatggcatcagactatacagacgctctcgcagaaaaagctataaaattgatatttgaatatctacctaaagcatacaaaaacgggcaagataaagtcgcccgcgaaaagatgcacaatgcttcatgcatagctggaatggccttcacaaatgcatttttaggaataaaccatagtatggctcatatacttggtgctaaattccatcttccacacggaagagcaaatgcaatacttctgccctatgtcatagaatacaatgctgagttacctaaaaaatttgcttcattcccacaatatgaatatcccaaagcagccgagaaatatgcagaaattgcaaaattcttgggacttcctgcatcaaccattgaagaaggagtaaaaagcctcattgaagcaataaaaaatcttatgaaagagcttaatcttcctttgacacttaaagaagcaggcataaataaagaagaattcgaaaaacaaataatggaaatgtctgatatagcctttaatgaccagtgcaccggttcaaacccaagaatgccattggtatccgaaattgcagaaatatatagaaaagcctatggagaataa

SEQ ID NO: 130875 - protein, 874 aa, Thermoanaerobacter ethanolicus
MPNLLQERREVKEKTEVKETLDVKRQIDQLVEKAQRAQEKFMSYTQEQIDKIVKAMALAGIENHVRLAKLAHEETKMGVYEDKITKNLFAVEYVYNYIKDKKTVGVLSENLEENYMEVAEPVGVIAGVTPVTNPTSTTMFKSLIAIKTRNPIIFSFHPKALKCSIETAKTMYEAALKAGAPEGCIGWIETPSIEATQLLMTHPGVSLILATGGAGMVKAAYSSGKPALGVGPGNVPCYIEKTANIKRAVSDLILSKTFDNGTVCASEQAVIIDEEIADEVKKLMKEYGCYFLNKEETKMLEEFAIDKNTGLMNPAVVGQPATKIAEMAGFKVPENTKILVAEYPAVGPEYPLSREKLSPILALYTVKDYNEGIKRCEEMTEFGGLGHSAVIHSENQQIINEFAKRVRAGRILVNAPASQGAIGDIYNTAIPSLTLGCGTMGRNSTTDNVSVYNLINIKRVFIRKERMKWFRVPPQIYFERGSLQYLSQVKGKKAFIVTDPVMVKLGFVDKVTYQLDKANIKYEIFSEVEPDPSVDTVEKGVKIMRGFEPDLLIAVGGGSAIDAAKGMWLFYEYPDTKFEDLRLKFMDIRKRTYRFPELGKKALFIAIPTTSGSGTGSEVTAFAVITDKKKNIKYPLTDYELTPDIAIIDPDLTMTIPPSVTADTGMDALTHAIEAYVSVMASDYTDALAEKAIKLIFEYLPKAYKNGQDKVAREKMHNASCIAGMAFTNAFLGINHSMAHILGAKFHLPHGRANAILLPYVIEYNAELPKKFASFPQYEYPKAAEKYAEIAKFLGLPASTIEEGVKSLIEAIKNLMKELNLPLTLKEAGINKEEFEKQIMEMSDIAFNDQCTGSNPRMPLVSEIAEIYRKAYGE

SEQ ID NO: 130876 - DNA, 1167 bp, Citrobacter freundii
  CDS (1)..(1167): transl_table=11
atgagctatcgtatgtttgattatctggtgccaaacgttaacttttttggccccaacgccatttccgtagtcggcgaacgctgccagctgctgggggggaataaagccctgctggtcaccgacaaaggcctgcgggcaattaaagatggcgcggtggacaaaaccctgcattatctgcgggaggccgggatcgaggtggcgatctttgacggcgtcgagccgaacccgaaagacaccaacgtgcgcgacggcctcgccgtgtttcgccgcgaacagtgcgacatcatcgtcaccgtgggcggcggcagcccgcacgattgcggcaaaggcatcggcatcgccgccacccatgagggggcgatctgtaccagtatgccggaatcgagaccctggaccaacccgctgccgcctatcgtcgcggtcaacaccaccgccggcaccgccagcgaggtcacccgccactgcgtcctgaccaacaccgaaagcaaagtgaagtttgtgatcgtcagctggcgcaacctgccgtcggtctctatcaacgatccgctgctgatgatcggtaaaccggccgccctgaccgcggcgaccgggatggatgccctgacccacgccgtagaggcctatatctccaaagacgctagcccggtgacggacgccgccgccatgcaggcgatccgcctcatcgcccgcaacctgcgccaggccgtggccctcggcagcaatctgcaggcgcgggaaaacatggcctatgcctctctgctggccgggatggctttcaataacgccaacctcggctacgtgcacgccatggcgcaccagctgggcggcctgtacgacatgccgcacggcgtggccaacgctgtcctgctgccgcatgtggcccgctacaacctgatcgccaacccggagaaattcgccgatattgctgaactgatgggcgaaaatatcaccggactgtccactctcgacgcggcggaaaaagccatcgccgctatcacgcgtctgtcgatggatatcggtattccgcagcatctgcgcgatctgggagtaaaagaggccgacttcccctacatggcggagatggctctgaaagacggcaatgcgttctcgaacccgcgtaaaggcaacgagcaggagattgccgcgattttccgtcaggcattctga

SEQ ID NO: 130877 - protein, 388 aa, Citrobacter freundii
MSYRMFDYLVPNVNFFGPNAISVVGERCQLLGGNKALLVTDKGLRAIKDGAVDKTLHYLREAGIEVAIFDGVEPNPKDTNVRDGLAVFRREQCDIIVTVGGGSPHDCGKGIGIAATHEGAICTSMPESRPWTNPLPPIVAVNTTAGTASEVTRHCVLTNTESKVKFVIVSWRNLPSVSINDPLLMIGKPAALTAATGMDALTHAVEAYISKDASPVTDAAAMQAIRLIARNLRQAVALGSNLQARENMAYASLLAGMAFNNANLGYVHAMAHQLGGLYDMPHGVANAVLLPHVARYNLIANPEKFADIAELMGENITGLSTLDAAEKAIAAITRLSMDIGIPQHLRDLGVKEADFPYMAEMALKDGNAFSNPRKGNEQEIAAIFRQAF

SEQ ID NO: 130878 - DNA, 1164 bp, Escherichia blattae
  CDS (1)..(1164): transl_table=11
atgagcgaccgcatgtatgacttcctggttccaaatgtgaacttctttggcccgggcgccgtttctgttgttggccagcgctgccagctgctggggggtaaaaaagccctgctggtgaccgataagggcctgcgcgccattaaagacggtgctgtcgatcagaccgtgaagcacctgaaagccgccggtattgaggtggtcattttcgacggggtcgagccgaacccgaaagacaccaacgtactcgacggcctggccatgttccgtaaagagcagtgcgatatgataatcaccgtcggcggcggcagcccgcacgactgcggtaaaggcattggtattgcggccacccacccgggtgatctgtacagctatgccggtatcgaaacactcaccaacccgctgccgcccattattgcggtcaacaccaccgccgggaccgccagcgaagtcacccgccactgcgtgctgactaacaccaaaaccaaagtaaaatttgtgattgtcagctggcgcaacctgccttccgtctccattaacgatccgctgctgatgatcggcaagcccgccgggctgaccgccgccaccggtatggatgccctgacccacgcggtagaggcctatatctccaaagacgccaacccggttaccgatgcctctgctattcaggccatcaaactgattgccaccaacctgcgtcaggccgtcgccctggggaccaacctcaaagcccgtgaaaacatggcctgcgcctctctgctggccgggatggcctttaacaacgccaacctgggctatgttcacgccatggctcaccagctgggcggcctgtacgacatggcccacggggtggcgaacgcggtcctgctgccccatgtctgccgctataacctgattgccaacccggaaaaatttgccgatatcgccacctttatgggggaaaacaccaccggtctttccaccatggacgcagcggagctggccatcagcgccattgcccgtctgtctaaagatgtcgggatcccgcagcacctgcgtgaactgggggtaaaagaggccgacttcccgtacatggcagaaatggccctgaaagacggcaacgccttctctaacccgcgtaaagggaacgaaaaagagattgccgacatcttccgccaggcattctga

SEQ ID NO: 130879 - protein, 387 aa, Escherichia blattae
MSDRMYDFLVPNVNFFGPGAVSVVGQRCQLLGGKKALLVTDKGLRAIKDGAVDQTVKHLKAAGIEVVIFDGVEPNPKDTNVLDGLAMFRKEQCDMIITVGGGSPHDCGKGIGIAATHPGDLYSYAGIETLTNPLPPIIAVNTTAGTASEVTRHCVLTNTKTKVKFVIVSWRNLPSVSINDPLLMIGKPAGLTAATGMDALTHAVEAYISKDANPVTDASAIQAIKLIATNLRQAVALGTNLKARENMACASLLAGMAFNNANLGYVHAMAHQLGGLYDMAHGVANAVLLPHVCRYNLIANPEKFADIATFMGENTTGLSTMDAAELAISAIARLSKDVGIPQHLRELGVKEADFPYMAEMALKDGNAFSNPRKGNEKEIADIFRQAF

SEQ ID NO: 130880 - DNA, 1164 bp, Clostridium pasteurianum
  CDS (1)..(1164): transl_table=11
atgagctatcgtatgtttgattatctggtgccaaatgtgaacttttttggcccgaatgctatttccgttgtcggcgaacgctgcaaactgttgggcggtaaaaaagcgctgctggtgactgataaaggtctgcgagccattaaggacggcgcggttgataaaaccctcgaacatctgcgtgaagccggtattgacgtggtggtgtttgacggcgtcgagccaaaccctaaagacaccaacgtgcgcgacggcctggacgtttttcgtaaagagcaatgcgatatcatcgttaccgtcggcggtggtagcccgcatgactgcggtaaaggcatcggtatcgcggcgacgcacgaaggcgatctctatagctatgccgggattgaaaccctgaccaatccgctgccgccgatcgtcgcggtgaataccaccgccggtaccgccagcgaagtcacccgtcactgcgtgctgaccaataccaaaaccaaagtgaagtttgtgattgtcagttggcgcaacctgccgtcggtttccattaatgaccctctgctgatgctcggcaaacctgcgccactgactgcggcaacaggaatggacgccctgacccacgccgttgaggcctatatttcaaaagatgccaacccggttaccgacgccgccgctatccaggcaattcgtctgatcgcccgcaacttacgccaggccgtagcactgggcagcaacctgaaagctcgcgagaatatggcctatgcctctttgctggcgggtatggccttcaacaacgccaaccttggctacgttcacgcgatggcgcatcagcttggcggtctgtacgacatgccgcacggcgtggcaaatgccgtcctgctgccgcacgtggcgcgctataacctgatcgctaatccggagaaatttgccgacatcgcggagtttatgggtgagaacactgacggtctgtccaccatggatgctgccgagctggcgattcgcgccatcgctcgcctgtcagccgatatcggtattccgcagcatctgcgcgagctgggcgtcaaagaagccgatttcccgtatatggcggaaatggcgctgaaagacggcaatgccttctccaacccgcgcaaagggaacgagaaagaaattgccgagattttccgccaggcattctga

SEQ ID NO: 130881 - protein, 387 aa, Clostridium pasteurianum
MSYRMFDYLVPNVNFFGPNAISVVGERCKLLGGKKALLVTDKGLRAIKDGAVDKTLEHLREAGIDVVVFDGVEPNPKDTNVRDGLDVFRKEQCDIIVTVGGGSPHDCGKGIGIAATHEGDLYSYAGIETLTNPLPPIVAVNTTAGTASEVTRHCVLTNTKTKVKFVIVSWRNLPSVSINDPLLMLGKPAPLTAATGMDALTHAVEAYISKDANPVTDAAAIQAIRLIARNLRQAVALGSNLKARENMAYASLLAGMAFNNANLGYVHAMAHQLGGLYDMPHGVANAVLLPHVARYNLIANPEKFADIAEFMGENTDGLSTMDAAELAIRAIARLSADIGIPQHLRELGVKEADFPYMAEMALKDGNAFSNPRKGNEKEIAEIFRQAF

SEQ ID NO: 130882 - DNA, 1388 bp, Klebsiella pneumoniae
  CDS (2)..(1165): transl_table=11
tatgagctatcgtatgtttgattatctggtgccaaacgttaacttttttggccccaacgccatttccgtagtcggcgaacgctgccagctgctgggggggaaaaaagccctgctggtcaccgacaaaggcctgcgggcaattaaagatggcgcggtggacaaaaccctgcattatctgcgggaggccgggatcgaggtggcgatctttgacggcgtcgagccgaacccgaaagacaccaacgtgcgcgacggcctcgccgtgtttcgccgcgaacagtgcgacatcatcgtcaccgtgggcggcggcagcccgcacgattgcggcaaaggcatcggcatcgccgccacccatgagggcgatctgtaccagtatgccggaatcgagaccctgaccaacccgctgccgcctatcgtcgcggtcaataccaccgccggcaccgccagcgaggtcacccgccactgcgtcctgaccaacaccgaaaccaaagtgaagtttgtgatcgtcagctggcgcaacctgccgtcggtctctatcaacgatccgctgctgatgatcggtaaaccggccgccctgaccgcggcgaccgggatggatgccctgacccacgccgtagaggcctatatctccaaagacgctaacccggtgacggacgccgccgccatgcaggcgatccgcctcatcgcccgcaacctgcgccaggccgtggccctcggcagcaatctgcaggcgcgggaatacatggcctatgcctctctgctggccgggatggctttcaataacgccaacctcggctacgtgcacgccatggcgcaccagctgggcggcctgtacgacatgccgcacggcgtggccaacgctgtcctgctgccgcatgtggcgcgctacaacctgatcgccaacccggagaaattcgccgatatcgctgaactgatgggcgaaaatatcaccggactgtccactctcgacgcggcggaaaaagccatcgccgctatcacgcgtctgtcgatggatatcggtattccgcagcatctgcgcgatctgggggtaaaagagaccgacttcccctacatggcggagatggctctgaaagacggcaatgcgttctcgaacccgcgtaaaggcaacgagcaggagattgccgcgattttccgccaggcattctgagtgttaacgaggggaccgtcatgtcgctttcaccgccaggcgtacgcctgttttacgatccgcgcgggcaccatgccggcgccatcaatgagctgtgctgggggctggaggagcagggggtcccctgccagaccataacctatgacggaggcggtgacgccgctgcgctgggcgccctggcggccagaagctcgcccctgcgggtgggtattgggctcagcgc

SEQ ID NO: 130883 - protein, 387 aa, Klebsiella pneumoniae
MSYRMFDYLVPNVNFFGPNAISVVGERCQLLGGKKALLVTDKGLRAIKDGAVDKTLHYLREAGIEVAIFDGVEPNPKDTNVRDGLAVFRREQCDIIVTVGGGSPHDCGKGIGIAATHEGDLYQYAGIETLTNPLPPIVAVNTTAGTASEVTRHCVLTNTETKVKFVIVSWRNLPSVSINDPLLMIGKPAALTAATGMDALTHAVEAYISKDANPVTDAAAMQAIRLIARNLRQAVALGSNLQAREYMAYASLLAGMAFNNANLGYVHAMAHQLGGLYDMPHGVANAVLLPHVARYNLIANPEKFADIAELMGENITGLSTLDAAEKAIAAITRLSMDIGIPQHLRDLGVKETDFPYMAEMALKDGNAFSNPRKGNEQEIAAIFRQAF

SEQ ID NO: 130884 - DNA, 1158 bp, Clostridium butyricum
  CDS (1)..(1158): transl_table=11
atgagaatgtatgattatttagtaccaagtgtaaactttatgggagcaaattcagtatcagtagtaggtgaaagatgcaaaatattaggtggaaaaaaagcattgatagttacagataagtttctaaaagatatggaaggtggagctgttgaattaacagttaaatatttaaaagaagctggattagatgttgtatattatgacggagttgaaccaaatccaaaagatgttaatgttatagaaggattaaaaatatttaaagaagaaaattgtgacatgatagtaactgtaggtggaggaagttcgcatgattgcggtaagggaataggaattgctgcaacacatgaaggagatctttatgattatgcaggaatagaaacacttgtcaatccattgccaccaatagtagctgtaaatactactgcaggaactgctagtgaattaactcgtcattgtgtattgactaatacaaaaaagaaaataaaatttgttatagttagctggagaaatttgcctctagtatctataaatgatccaatgcttatggtcaaaaaacctgcaggattaacagcagctacaggaatggatgctttaacacatgcaatagaagcatatgtatcaaaagatgcaaatccagtaacagatgcttcagcaatacaagctattaaattaatttcacaaaatttaagacaagctgtagctttaggagaaaatcttgaagcaagagaaaatatggcttatgcatcattactagcgggaatggcatttaataatgctaatttaggatatgtacatgcaatggctcatcaattagggggactgtatgatatgcctcatggagttgctaatgctatgctattaccacatgttgaacgttataatatgctatcaaatcctaagaagtttgcagatatagcagaatttatgggagaaaatatatctggactttctgtaatggaagcagcagagaaagccataaatgcaatgttcaggctttcagaggatgttggaattccgaaaagtctaaaggagatgggagtgaaacaagaagattttgagcatatggcagaactagctcttttagatggaaatgcctttagcaatccaagaaaaggaaatgcaaaagatattataaatatttttaaggctgcttattaa

SEQ ID NO: 130885 - protein, 385 aa, Clostridium butyricum
MRMYDYLVPSVNFMGANSVSVVGERCKILGGKKALIVTDKFLKDMEGGAVELTVKYLKEAGLDVVYYDGVEPNPKDVNVIEGLKIFKEENCDMIVTVGGGSSHDCGKGIGIAATHEGDLYDYAGIETLVNPLPPIVAVNTTAGTASELTRHCVLTNTKKKIKFVIVSWRNLPLVSINDPMLMVKKPAGLTAATGMDALTHAIEAYVSKDANPVTDASAIQAIKLISQNLRQAVALGENLEARENMAYASLLAGMAFNNANLGYVHAMAHQLGGLYDMPHGVANAMLLPHVERYNMLSNPKKFADIAEFMGENISGLSVMEAAEKAINAMFRLSEDVGIPKSLKEMGVKQEDFEHMAELALLDGNAFSNPRKGNAKDIINIFKAAY

SEQ ID NO: 130886 - DNA, 1152 bp, Escherichia coli
  CDS (1)..(1152): transl_table=11
atggcagcttcaacgttctttattccttctgtgaatgtcatcggcgctgattcattgactgatgcaatgaatatgatggcagattatggatttacccgtaccttaattgtcactgacaatatgttaacgaaattaggtatggcgggcgatgtgcaaaaagcactggaagaacgcaatatttttagcgttatttatgatggcacccaacctaaccccaccacggaaaacgtcgccgcaggtttgaaattacttaaagagaataattgcgatagcgtgatctccttaggcggtggttctccacacgactgcgcaaaaggtattgcgctggtggcagccaatggcggcgatattcgcgattacgaaggcgttgaccgctctgcaaaaccgcagctgccgatgatcgccatcaataccacggcgggtacggcctctgaaatgacccgtttctgcatcatcactgacgaagcgcgtcatatcaaaatggcgattgttgataaacatgtcactccgctgctttctgtcaatgactcctctctgatgattggtatgccgaagtcactgaccgccgcaacgggtatggatgccttaacgcacgctatcgaagcatatgtttctattgccgccacgccgatcactgacgcttgtgcactgaaagccgtgaccatgattgccgaaaacctgccgttagccgttgaagatggcagtaatgcgaaagcgcgtgaagcaatggcttatgcccagttcctcgccggtatggcgttcaataatgcttctctgggttatgttcatgcgatggcgcaccagctgggcggtttctacaacctgccacacggtgtatgtaacgccgttttgctgccgcacgttcaggtattcaacagcaaagtcgccgctgcacgtctgcgtgactgtgccgctgcaatgggcgtgaacgtgacaggtaaaaacgacgcggaaggtgctgaagcctgcattaacgccatccgtgaactggcgaagaaagtggatatcccggcaggcctacgcgacctgaacgtgaaagaagaagatttcgcggtattggcgactaatgccctgaaagatgcctgtggctttactaacccgatccaggcaactcacgaagaaattgtggcgatttatcgcgcagcgatgtaa

SEQ ID NO: 130887 - protein, 383 aa, Escherichia coli
MAASTFFIPSVNVIGADSLTDAMNMMADYGFTRTLIVTDNMLTKLGMAGDVQKALEERNIFSVIYDGTQPNPTTENVAAGLKLLKENNCDSVISLGGGSPHDCAKGIALVAANGGDIRDYEGVDRSAKPQLPMIAINTTAGTASEMTRFCIITDEARHIKMAIVDKHVTPLLSVNDSSLMIGMPKSLTAATGMDALTHAIEAYVSIAATPITDACALKAVTMIAENLPLAVEDGSNAKAREAMAYAQFLAGMAFNNASLGYVHAMAHQLGGFYNLPHGVCNAVLLPHVQVFNSKVAAARLRDCAAAMGVNVTGKNDAEGAEACINAIRELAKKVDIPAGLRDLNVKEEDFAVLATNALKDACGFTNPIQATHEEIVAIYRAAM

SEQ ID NO: 130888 - DNA, 1747 bp, Zymomonas mobilis
  CDS (432)..(1583): transl_table=11
aaaggcaaaatcggtaaccacatctcaattattaaacaatacttcataataaaaagacaactttttcataatttgcataagtcttgatgtaaaaaatacatatttagaaagaacaagcagccttgctcatcaccgctgtcgcgagtagaaaaatctcggctttcagaaaaagaggccgcttcgttaaacagactataaatgtgctggaataaagcgaaccccttgatctgataaaactgatagacatattgcttttgcgctgcccgattgctgaaaatgcgtaaaaggtgattttactcgttttcaggaaaaactttgagaaaacgtctcgaaaacgggattaaaacgcaaaaacaatagaaagcgatttcgcgaaaatggttgttttcgggttgttgctttaaactagtatgtagggtgaggttatagctatggcttcttcaactttttatattcctttcgtcaacgaaatgggcgaaggttcgcttgaaaaagcaatcaaggatcttaacggcagcggctttaaaaatgcgctgatcgtttctgatgctttcatgaacaaatccggtgttgtgaagcaggttgctgacctgttgaaagcacagggtattaattctgctgtttatgatggcgttatgccgaacccgactgttaccgcagttctggaaggccttaagatcctgaaggataacaattcagacttcgtcatctccctcggtggtggttctccccatgactgcgccaaagccatcgctctggtcgcaaccaatggtggtgaagtcaaagactacgaaggtatcgacaaatctaagaaacctgccctgcctttgatgtcaatcaacacgacggctggtacggcttctgaaatgacgcgtttctgcatcatcactgatgaagtccgtcacgttaagatggccattgttgaccgtcacgttaccccgatggtttccgtcaacgatcctctgttgatggttggtatgccaaaaggcctgaccgccgccaccggtatggatgctctgacccacgcatttgaagcttattcttcaacggcagctactccgatcaccgatgcttgcgccttgaaggctgcgtccatgatcgctaagaatctgaagaccgcttgcgacaacggtaaggatatgccagctcgtgaagctatggcttatgcccaattcctcgctggtatggccttcaacaacgcttcgcttggttatgtccatgctatggctcaccagttgggcggctactacaacctgccgcatggtgtctgcaacgctgttctgcttccgcatgttctggcttataacgcctctgtcgttgctggtcgtctgaaagacgttggtgttgctatgggtctcgatatcgccaatctcggtgataaagaaggcgcagaagccaccattcaggctgttcgcgatctggctgcttccattggtattccagcaaatctgaccgagctgggtgctaagaaagaagatgtgccgcttcttgctgaccacgctctgaaagatgcttgtgctctgaccaacccgcgtcagggtgatcagaaagaagttgaagaactcttcctgagcgctttctaatttcaaaacaggaaaacggttttccgtcctgtcttgattttcaagcaaacaatgcctccgatttctaatcggaggcatttgtttttgtttattgcaaaaacaaaaaatattgttacaaatttttacaggctattaagcctaccgtcataaataatttgccattt

SEQ ID NO: 130889 - protein, 383 aa, Zymomonas mobilis
MASSTFYIPFVNEMGEGSLEKAIKDLNGSGFKNALIVSDAFMNKSGVVKQVADLLKAQGINSAVYDGVMPNPTVTAVLEGLKILKDNNSDFVISLGGGSPHDCAKAIALVATNGGEVKDYEGIDKSKKPALPLMSINTTAGTASEMTRFCIITDEVRHVKMAIVDRHVTPMVSVNDPLLMVGMPKGLTAATGMDALTHAFEAYSSTAATPITDACALKAASMIAKNLKTACDNGKDMPAREAMAYAQFLAGMAFNNASLGYVHAMAHQLGGYYNLPHGVCNAVLLPHVLAYNASVVAGRLKDVGVAMGLDIANLGDKEGAEATIQAVRDLAASIGIPANLTELGAKKEDVPLLADHALKDACALTNPRQGDQKEVEELFLSAF

SEQ ID NO: 130890 - DNA, 1269 bp, Schizosaccharomyces pombe
  CDS (1)..(1269)
atgtccattcttcgttctccatttcgtttaattcgatcgcctgctcgattctttccgtcactctttcattcctcttgtaatcaatcttttactaatggcttaaagcatcaatcaacctcttcgaaagccatgcctgttagcgcattctacataccttctttcaaccttttcggtaaaggttgtcttgctgaagccgccaagcaaattaagatgagcggcttcaaaaacaccttaattgttaccgatcctggtattattaaggtcggtttgtatgacaaagttaaggctctgttggaagaacaaagcatcactgttcacctttacgatggtgttcaacctaatcccaccgttggaaatgtcaaccaaggtctcgaaatcgttaagaaggaaaactgtgattctatggtatcaattggtggtggttctgctcacgattgtgccaaaggtattgctttgttagctactaatggcggtaaaattgcggattatgaaggtgttgataaatcctccaaacctcaacttcccttgattgcaatcaatacgactgcaggaactgcttctgaaatgactcgtttcgcaattatcaccgaagagacccgtcatattaaaatggctattatcgataagcatactatgcctatcctttccgttaacgatcctgaaacaatgtatggattacctccttccttgaccgctgctactggtatggacgctttgactcatgctgttgaagcttacgtctctactgctgctaatcccatcaccgatgcttgtgctgtcaaatgcatcgaactcgttaataagtatttgaagcgtgctgtcgacaacggcaaggacgaagaggctagagacaatatggcttatgccgaattccttggtggtatggcatttaacaacgcatctttgggttatgttcatgctatggctcatcaacttggtggtttctacggtattccacatggcgtctgtaacgctgttcttcttgcccatgtacagaaatttaattctagggatccaagagcaaatgctcgccttggtgatattgcttttcacttgggttgtgaagagcatactgccgaagcagctcttgaccgcatcagtcaacttgttcttgaagttaaaattcgtcctcatctagttgatctaggtgtcaaggaaaaagattttgatgtcttggttgaccacgctatgaaggatgcttgtggtgctactaaccctattcagcctacacatgacgaggtaaaggctattttcaaatcggctatgtaa

SEQ ID NO: 130891 - protein, 422 aa, Schizosaccharomyces pombe
MSILRSPFRLIRSPARFFPSLFHSSCNQSFTNGLKHQSTSSKAMPVSAFYIPSFNLFGKGCLAEAAKQIKMSGFKNTLIVTDPGIIKVGLYDKVKALLEEQSITVHLYDGVQPNPTVGNVNQGLEIVKKENCDSMVSIGGGSAHDCAKGIALLATNGGKIADYEGVDKSSKPQLPLIAINTTAGTASEMTRFAIITEETRHIKMAIIDKHTMPILSVNDPETMYGLPPSLTAATGMDALTHAVEAYVSTAANPITDACAVKCIELVNKYLKRAVDNGKDEEARDNMAYAEFLGGMAFNNASLGYVHAMAHQLGGFYGIPHGVCNAVLLAHVQKFNSRDPRANARLGDIAFHLGCEEHTAEAALDRISQLVLEVKIRPHLVDLGVKEKDFDVLVDHAMKDACGATNPIQPTHDEVKAIFKSAM

SEQ ID NO: 130892 - DNA, 1164 bp, Citrobacter freundii
  CDS (1)..(1164): transl_table=11
atgagctatcgtatgtttgattacctggtgccaaatgtgaacttctttggccccaatgctatttccgtggtcggcgaacgctgcaaactgttgggcggtaaaaaagcgctgctggtcactgataaaggtctgcgggcgattaaagacggcgcggtagataaaaccctcacacatctgcgtgaagccggtattgacgtcgtggtttttgacggcgttgagccaaaccccaaagacaccaacgtgcgcgacggcctggaggtctttcggaaagagcattgcgacatcatcgttaccgttggcggcggtagcccgcatgactgcggtaaaggcatcggtatcgccgcgactcacgaaggggatctctacagctatgccgggattgaaaccctgaccaacccgctgccgccgatcgttgcggtgaataccaccgccggtaccgccagcgaagtcacccgccactgcgtgctgaccaataccaaaaccaaagtgaagtttgtgattgtcagctggcgcaacctgccgtcggtctccattaacgatccgctgctaatgctcggcaagccagccccactgactgcggctaccgggatggacgccctgacccacgccgtggaagcctacatttccaaagatgccaacccggtcaccgacgctgccgctatccaggcgatccgcctgatcgcccgtaacttgcgccaggccgtggcgctgggcagcaacctgaaagctcgcgagaacatggcctacgcctccctgctggcgggtatggccttcaacaacgccaacctcggctacgttcacgcgatggcgcatcagcttggcggtctttacgacatgccgcacggcgtggcgaatgccgtactgctgccgcacgtagcgcgctataacctgatcgctaacccggaaaaatttgccgacatcgcagagtttatgggcgagaacacggacggactctccaccatggatgccgccgagctggccattcatgctattgcccgcctctccgccgacatcggtattccgcagcatctgcgcgatctgggcgtcaaagaagccgatttcccgtatatggctgaaatggcactgaaggacggcaacgccttctccaacccacgcaaagggaacgagaaagaaattgccgagatcttccgtcaggcattctga

SEQ ID NO: 130893 - protein, 387 aa, Citrobacter freundii
MSYRMFDYLVPNVNFFGPNAISVVGERCKLLGGKKALLVTDKGLRAIKDGAVDKTLTHLREAGIDVVVFDGVEPNPKDTNVRDGLEVFRKEHCDIIVTVGGGSPHDCGKGIGIAATHEGDLYSYAGIETLTNPLPPIVAVNTTAGTASEVTRHCVLTNTKTKVKFVIVSWRNLPSVSINDPLLMLGKPAPLTAATGMDALTHAVEAYISKDANPVTDAAAIQAIRLIARNLRQAVALGSNLKARENMAYASLLAGMAFNNANLGYVHAMAHQLGGLYDMPHGVANAVLLPHVARYNLIANPEKFADIAEFMGENTDGLSTMDAAELAIHAIARLSADIGIPQHLRDLGVKEADFPYMAEMALKDGNAFSNPRKGNEKEIAEIFRQAF

SEQ ID NO: 130894 - DNA, 1164 bp, Klebsiella pneumoniae
  CDS (1)..(1164): transl_table=11
atgagctatcgtatgtttgattatctggtgccaaacgttaacttttttggccccaacgccatttccgtagtcggcgaacgctgccagctgctgggggggaaaaaagccctgctggtcaccgacaaaggcctgcgggcaattaaagatggcgcggtggacaaaaccctgcattatctgcgggaggccgggatcgaggtggcgatctttgacggcgtcgagccgaacccgaaagacaccaacgtgcgcgacggcctcgccgtgtttcgccgcgaacagtgcgacatcatcgtcaccgtgggcggcggcagcccgcacgattgcggcaaaggcatcggcatcgccgccacccatgagggcgatctgtaccagtatgccggaatcgagaccctgaccaacccgctgccgcctatcgtcgcggtcaataccaccgccggcaccgccagcgaggtcacccgccactgcgtcctgaccaacaccgaaaccaaagtgaagtttgtgatcgtcagctggcgcaacctgccgtcggtctctatcaacgatccactgctgatgatcggtaaaccggccgccctgaccgcggcgaccgggatggatgccctgacccacgccgtagaggcctatatctccaaagacgctaacccggtgacggacgccgccgccatgcaggcgatccgcctcatcgcccgcaacctgcgccaggccgtggccctcggcagcaatctgcaggcgcgggaaaacatggcctatgcttctctgctggccgggatggctttcaataacgccaacctcggctacgtgcacgccatggcgcaccagctgggcggcctgtacgacatgccgcacggcgtggccaacgctgtcctgctgccgcatgtggcgcgctacaacctgatcgccaacccggagaaattcgccgatatcgctgaactgatgggcgaaaatatcaccggactgtccactctcgacgcggcggaaaaagccatcgccgctatcacgcgtctgtcgatggatatcggtattccgcagcatctgcgcgatctgggggtaaaagaggccgacttcccctacatggcggagatggctctaaaagacggcaatgcgttctcgaacccgcgtaaaggcaacgagcaggagattgccgcgattttccgccaggcattctga

SEQ ID NO: 130895 - protein, 387 aa, Klebsiella pneumoniae
MSYRMFDYLVPNVNFFGPNAISVVGERCQLLGGKKALLVTDKGLRAIKDGAVDKTLHYLREAGIEVAIFDGVEPNPKDTNVRDGLAVFRREQCDIIVTVGGGSPHDCGKGIGIAATHEGDLYQYAGIETLTNPLPPIVAVNTTAGTASEVTRHCVLTNTETKVKFVIVSWRNLPSVSINDPLLMIGKPAALTAATGMDALTHAVEAYISKDANPVTDAAAMQAIRLIARNLRQAVALGSNLQARENMAYASLLAGMAFNNANLGYVHAMAHQLGGLYDMPHGVANAVLLPHVARYNLIANPEKFADIAELMGENITGLSTLDAAEKAIAAITRLSMDIGIPQHLRDLGVKEADFPYMAEMALKDGNAFSNPRKGNEQEIAAIFRQAF

SEQ ID NO: 130896 - DNA, 23 bp, Artificial sequence
  primer
atgcttgggatcacgtatgccgt

SEQ ID NO: 130897 - DNA, 28 bp, Artificial sequence
  primer
ttaatattcataggctttcttgataatg

SEQ ID NO: 130898 - protein, 412 aa, Artificial sequence
  consensus sequence
  Variant (2)..(6): Xaa in position 2 to 6 is any amino acid
  Variant (8)..(22): Xaa in position 8 to 22 is any amino acid
  Variant (23)..(26): Xaa in position 23 to 26 is any or no amino acid
  Variant (32)..(37): Xaa in position 32 to 37 is any amino acid
  Variant (38)..(39): Xaa in position 38 to 39 is any or no amino acid
  Variant (41)..(48): Xaa in position 41 to 48 is any amino acid
  Variant (50)..(62): Xaa in position 50 to 62 is any amino acid
  Variant (63)..(65): Xaa in position 63 to 65 is any or no amino acid
  Variant (69)..(72): Xaa in position 69 to 72 is any amino acid
  Variant (74)..(75): Xaa in position 74 to 75 is any amino acid
  Variant (77)..(85): Xaa in position 77 to 85 is any amino acid
  Variant (87)..(91): Xaa in position 87 to 91 is any amino acid
  Variant (96)..(97): Xaa in position 96 to 97 is any amino acid
  Variant (99)..(100): Xaa in position 99 to 100 is any amino acid
  Variant (102)..(116): Xaa in position 102 to 116 is any amino acid
  Variant (117)..(138): Xaa in position 117 to 138 is any or no amino acid
  Variant (140)..(141): Xaa in position 140 to 141 is any amino acid
  Variant (143)..(144): Xaa in position 143 to 144 is any amino acid
  Variant (149)..(150): Xaa in position 149 to 150 is any amino acid
  Variant (152)..(152): Xaa in position 152 is any amino acid
  Variant (155)..(155): Xaa in position 155 is any amino acid
  Variant (157)..(160): Xaa in position 157 to 160 is any amino acid
  Variant (163)..(168): Xaa in position 163 to 168 is any amino acid
  Variant (170)..(178): Xaa in position 170 to 178 is any amino acid
  Variant (180)..(184): Xaa in position 180 to 184 is any amino acid
  Variant (187)..(188): Xaa in position 187 to 188 is any amino acid
  Variant (190)..(192): Xaa in position 190 to 192 is any amino acid
  Variant (194)..(195): Xaa in position 194 to 195 is any amino acid
  Variant (209)..(209): Xaa in position 209 is any amino acid
  Variant (215)..(216): Xaa in position 215 to 216 is any amino acid
  Variant (218)..(220): Xaa in position 218 to 220 is any amino acid
  Variant (223)..(224): Xaa in position 223 to 224 is any amino acid
  Variant (226)..(227): Xaa in position 226 to 227 is any amino acid
  Variant (229)..(231): Xaa in position 229 to 231 is any amino acid
  Variant (233)..(235): Xaa in position 233 to 235 is any amino acid
  Variant (237)..(238): Xaa in position 237 to 238 is any amino acid
  Variant (240)..(242): Xaa in position 240 to 242 is any amino acid
  Variant (244)..(245): Xaa in position 244 to 245 is any amino acid
  Variant (246)..(247): Xaa in position 246 to 247 is any or no amino acid
  Variant (250)..(251): Xaa in position 250 to 251 is any amino acid
  Variant (253)..(254): Xaa in position 253 to 254 is any amino acid
  Variant (256)..(258): Xaa in position 256 to 258 is any amino acid
  Variant (267)..(267): Xaa in position 267 is any amino acid
  Variant (270)..(270): Xaa in position 270 is any amino acid
  Variant (273)..(273): Xaa in position 273 is any amino acid
  Variant (280)..(284): Xaa in position 280 to 284 is any amino acid
  Variant (288)..(289): Xaa in position 288 to 289 is any amino acid
  Variant (292)..(292): Xaa in position 292 is any amino acid
  Variant (296)..(296): Xaa in position 296 is any amino acid
  Variant (298)..(300): Xaa in position 298 to 300 is any amino acid
  Variant (302)..(307): Xaa in position 302 to 307 is any amino acid
  Variant (308)..(321): Xaa in position 308 to 321 is any or no amino acid
  Variant (323)..(326): Xaa in position 323 to 326 is any amino acid
  Variant (328)..(330): Xaa in position 328 to 330 is any amino acid
  Variant (332)..(342): Xaa in position 332 to 342 is any amino acid
  Variant (343)..(349): Xaa in position 343 to 349 is any or no amino acid
  Variant (351)..(353): Xaa in position 351 to 353 is any amino acid
  Variant (355)..(359): Xaa in position 355 to 359 is any amino acid
  Variant (362)..(367): Xaa in position 362 to 367 is any amino acid
  Variant (369)..(372): Xaa in position 369 to 372 is any amino acid
  Variant (373)..(378): Xaa in position 373 to 378 is any or no amino acid
  Variant (380)..(383): Xaa in position 380 to 383 is any amino acid
  Variant (385)..(386): Xaa in position 385 to 386 is any amino acid
  Variant (388)..(389): Xaa in position 388 to 389 is any amino acid
  Variant (391)..(391): Xaa in position 391 is any amino acid
  Variant (393)..(395): Xaa in position 393 to 395 is any amino acid
  Variant (398)..(407): Xaa in position 398 to 407 is any amino acid
  Variant (409)..(411): Xaa in position 409 to 411 is any amino acid
PXXXXXGXXXXXXXXXXXXXXXXXXXLIVTDXXXXXXXXGXXXXXXXXLXXXXXXXXXXXXXXXXPNPXXXXVXXGXXXXXXXXXDXXXXXGGGSXXDXXKXXXXXXXXXXXXXXXXXXXXXXXXXXXXXXXXXXXXXPXXAXXTTAGXXTXSEXTXXXXITXXXXXXKXXXXXXXXXPXXXXXDPXXMXXXPXXLTAATGMDALTHAXEAYVSXXAXXXTDXXAXXAXXXIXXXLXXAXXXGXXXXARXXMXXAXXXAGMAFNNAXLGXVHXMAHQLGXXXXXPHGXXNAXLLPXVXXXNXXXXXXXXXXXXXXXXXXXXRXXXXAXXXGXXXXXXXXXXXXXXXXXXAXXXLXXXXXIPXXXXXXGXXXXXXXXXXDXXXXAXXAXXDXCXXXNPXXXXXXXXXXIXXXA

SEQ ID NO: 130899 - protein, 60 aa, Artificial sequence
  protein pattern
  Variant (2)..(5): Xaa in position 2 to 5 is any amino acid
  Variant (6)..(6): Xaa in position 6 is Ala or Thr
  Variant (8)..(8): Xaa in position 8 is Ala, Asp, Glu or Thr
  Variant (9)..(9): Xaa in position 9 is any amino acid
  Variant (10)..(10): Xaa in position 10 is Leu or Met
  Variant (11)..(12): Xaa in position 11 to 12 is any amino acid
  Variant (13)..(13): Xaa in position 13 is Ala or Gly
  Variant (14)..(14): Xaa in position 14 is Glu, Gly, Gln or Ser
  Variant (15)..(16): Xaa in position 15 to 16 is any amino acid
  Variant (19)..(19): Xaa in position 19 is Ile, Met or Val
  Variant (22)..(22): Xaa in position 22 is any or no amino acid
  Variant (24)..(24): Xaa in position 24 is any or no amino acid
  Variant (26)..(26): Xaa in position 26 is any amino acid
  Variant (27)..(27): Xaa in position 27 is Leu or Val
  Variant (29)..(29): Xaa in position 29 is any amino acid
  Variant (30)..(30): Xaa in position 30 is Asn or Val
  Variant (32)..(32): Xaa in position 32 is Ala or Ser
  Variant (33)..(33): Xaa in position 33 is Ile, Leu or Met
  Variant (34)..(34): Xaa in position 34 is Ala or Ser
  Variant (36)..(36): Xaa in position 36 is any amino acid
  Variant (37)..(37): Xaa in position 37 is Ile, Leu or Pro
  Variant (39)..(39): Xaa in position 39 is Ala, Gly or Pro
  Variant (40)..(43): Xaa in position 40 to 43 is any amino acid
  Variant (44)..(44): Xaa in position 44 is Ala, Pro or Val
  Variant (47)..(47): Xaa in position 47 is any amino acid
  Variant (48)..(48): Xaa in position 48 is Ala or Cys
  Variant (49)..(49): Xaa in position 49 is Cys or Asn
  Variant (51)..(51): Xaa in position 51 is Ile, Leu, Met or Val
  Variant (53)..(53): Xaa in position 53 is Leu or Met
  Variant (55)..(55): Xaa in position 55 is any amino acid
  Variant (56)..(56): Xaa in position 56 is Ala, Ile or Val
  Variant (57)..(59): Xaa in position 57 to 59 is any amino acid
GXXXXXRXXXXXXXXXAGXAFXNXAXXGXXHXXXHXXGXXXXXXHGXXXAXLXPXXXXXN

SEQ ID NO: 130900 - protein, 39 aa, Artificial sequence
  protein pattern
  Variant (3)..(4): Xaa in position 3 to 4 is any amino acid
  Variant (5)..(5): Xaa in position 5 is any or no amino acid
  Variant (7)..(9): Xaa in position 7 to 9 is any amino acid
  Variant (11)..(12): Xaa in position 11 to 12 is any amino acid
  Variant (13)..(13): Xaa in position 13 is any or no amino acid
  Variant (16)..(16): Xaa in position 16 is Ala or Asp
  Variant (19)..(19): Xaa in position 19 is Leu or Met
  Variant (21)..(21): Xaa in position 21 is Ala, Thr or Val
  Variant (22)..(22): Xaa in position 22 is Phe, Leu or Met
  Variant (23)..(23): Xaa in position 23 is Thr or Val
  Variant (24)..(24): Xaa in position 24 is any amino acid
  Variant (25)..(25): Xaa in position 25 is Ala, Cys or Ser
  Variant (26)..(26): Xaa in position 26 is Phe, Ile or Val
  Variant (28)..(28): Xaa in position 28 is Ala, Pro or Ser
  Variant (29)..(30): Xaa in position 29 to 30 is any amino acid
  Variant (31)..(31): Xaa in position 31 is Ala, Ser or Thr
  Variant (32)..(37): Xaa in position 32 to 37 is any amino acid
  Variant (39)..(39): Xaa in position 39 is Asp or Lys
DPXXXMXXXPXXXTAXTGXDXXXXXXEXXXXXXXXXXTX

SEQ ID NO: 130901 - protein, 31 aa, Artificial sequence
  protein pattern
  Variant (2)..(2): Xaa in position 2 is Ile or Val
  Variant (3)..(3): Xaa in position 3 is Asn, Pro or Thr
  Variant (6)..(6): Xaa in position 6 is Ala or Ser
  Variant (9)..(9): Xaa in position 9 is Ala, Gly or Ser
  Variant (10)..(10): Xaa in position 10 is Ala or Ser
  Variant (12)..(12): Xaa in position 12 is any amino acid
  Variant (14)..(16): Xaa in position 14 to 16 is any amino acid
  Variant (17)..(17): Xaa in position 17 is Ile or Val
  Variant (18)..(18): Xaa in position 18 is Ile or Leu
  Variant (19)..(19): Xaa in position 19 is any amino acid
  Variant (20)..(20): Xaa in position 20 is Asp, Glu or Asn
  Variant (21)..(25): Xaa in position 21 to 25 is any amino acid
  Variant (27)..(29): Xaa in position 27 to 29 is any amino acid
  Variant (30)..(30): Xaa in position 30 is Ala, Ile or Val
  Variant (31)..(31): Xaa in position 31 is Asp or Ser
AXXTTXGTXXEXTXXXXXXXXXXXXKXXXXX

SEQ ID NO: 130902 - protein, 29 aa, Artificial sequence
  protein pattern
  Variant (2)..(2): Xaa in position 2 is any amino acid
  Variant (3)..(3): Xaa in position 3 is any or no amino acid
  Variant (5)..(6): Xaa in position 5 to 6 is any amino acid
  Variant (8)..(8): Xaa in position 8 is any amino acid
  Variant (9)..(9): Xaa in position 9 is Cys or Asn
  Variant (10)..(11): Xaa in position 10 to 11 is any amino acid
  Variant (12)..(12): Xaa in position 12 is Ala, Gly, Ser or Thr
  Variant (15)..(20): Xaa in position 15 to 20 is any amino acid
  Variant (21)..(21): Xaa in position 21 is Asp, Glu or Gln
  Variant (22)..(22): Xaa in position 22 is Ile, Leu or Val
  Variant (23)..(24): Xaa in position 23 to 24 is any amino acid
  Variant (25)..(25): Xaa in position 25 is Ile or Leu
  Variant (26)..(28): Xaa in position 26 to 28 is any amino acid
AXXAXXDXXXXXNPXXXXXXXXXXXXXXA

SEQ ID NO: 130903 - DNA, 1689 bp, Saccharomyces cerevisiae
  CDS (1)..(1689)
atgactgccgtcgcctctactagcgggaagcaagatgctgaccataaccagtctatagagtgtccaaggttttcgcgtggacagaaagagattttgttggaccatgaggatgcgaaggggaaggattcaataatcaactcccccgtgtcagggaggcaatcaataagccctactttgtcgaatgctactaccacgactacgaaatctattatgaatgccaccggcacctccggcgcagtagtaagtaatactccggagcctggtttgaagagagtccccgccgtcactttcagtgatctaaagcaacagcaaaagcaggatagtctgactcagctgaagaacgactcagaaaggaccaagtctccaaatagtaatcctgctcctgtctcaaattccattcctggcaatcatgcagttataccgaaccacaccaacacttcaagaacaacgcaattatctgggtctccactcgtcaacgaaatgaaagattatgatcctaagaaaaaagacagtgctcttaaaatagttgataccatgaagcctgacaaaatcatggccacttcaacgccaataagtagagaaaataataaggtaaccgccaaagcccccaccagtattacacttcgaaaggaagatgcacaagatcaagctaacaatgtttcaggccaaattaatgtgcgttctaccccggaagaaacgccagtgaagcagtccgtcattccttccatcatccccaaaagagagaactccaagaatttggatcccagactacctcaagatgatggaaaattgcacgtgttgtttggcgctacaggttcgttatcggtatttaagatcaagccaatgattaaaaaactagaagaaatatatggacgtgatagaataagcattcaagttatcctcactcaatcagcaacacagtttttcgaacaaagatataccaagaaaattatcaaatcttcagaaaaactaaataaaatgtcgcagtacgaatccactccggcaactccagtgacaccaacaccaggacaatgcaacatggctcaagtagtcgagttacccccacatattcaactatggaccgaccaagatgaatgggacgcatggaaacaacgaactgatcctgtacttcatatagaactacgtcgctgggcggatatactggtagtagctccattaactgcaaacacattatcaaaaattgctttgggcctgtgcgacaatcttctgacaagtgtcattagagcttggaatccgagttatcccattcttttggcaccttctatggtgagtagcacttttaattctatgatgacaaagaagcaactacaaacgataaaggaggaaatgtcctgggtcactgttttcaagccgtctgagaaagttatggatataaatggtgatattggtctcgggggtatgatggactggaatgagattgttaacaaaatcgttatgaaattgggtgggtacccaaaaaataacgaggaagaggacgatgatgaggatgaggaagaagacgacgacgaagaagaagatacagaagataagaacgaaaacaacaacgatgatgatgacgatgacgacgatgacgacgacgacgacgacgacgacgacgacgacgacgacgatgatgacgaggacgaggacgaagcagaaaccccaggtataatagataagcatcaataa

SEQ ID NO: 130904 - protein, 562 aa, Saccharomyces cerevisiae
MTAVASTSGKQDADHNQSIECPRFSRGQKEILLDHEDAKGKDSIINSPVSGRQSISPTLSNATTTTTKSIMNATGTSGAVVSNTPEPGLKRVPAVTFSDLKQQQKQDSLTQLKNDSERTKSPNSNPAPVSNSIPGNHAVIPNHTNTSRTTQLSGSPLVNEMKDYDPKKKDSALKIVDTMKPDKIMATSTPISRENNKVTAKAPTSITLRKEDAQDQANNVSGQINVRSTPEETPVKQSVIPSIIPKRENSKNLDPRLPQDDGKLHVLFGATGSLSVFKIKPMIKKLEEIYGRDRISIQVILTQSATQFFEQRYTKKIIKSSEKLNKMSQYESTPATPVTPTPGQCNMAQVVELPPHIQLWTDQDEWDAWKQRTDPVLHIELRRWADILVVAPLTANTLSKIALGLCDNLLTSVIRAWNPSYPILLAPSMVSSTFNSMMTKKQLQTIKEEMSWVTVFKPSEKVMDINGDIGLGGMMDWNEIVNKIVMKLGGYPKNNEEEDDDEDEEEDDDEEEDTEDKNENNNDDDDDDDDDDDDDDDDDDDDDDDDEDEDEAETPGIIDKHQ

SEQ ID NO: 130905 - DNA, 1947 bp, Eremothecium gossypii
  CDS (1)..(1947)
atgtcggattcttcgggcaagcagcagggcatcatatcaccacacgttacaaatgccgtcaagcgcgcgaaccttgaggggtgcctgacgccgggagcggggccggggcacggtgcttctggaataggctcgcccgggccatcggtttccgcgtgtgtaagccccacccaggcggtaacgaagtcgattatgaacgcgagcggcacctcgggggctgttgtgagcaacacgccggagccgggactgaagcgggtcccaacggtcacgttcagcgacccgaagcagctgccggcgaaacagtcgggcaccggtcaaggcgggcgcgtgatcagcggcgactccacgacgtccggagccacagcgagcgaggacacagatacgcaatcgcacttacagatgaaggtggcgtcgccgatccatcaccccacggcacagcacagcactccgccacctctgctatcgcatggtggggggaatggtgcagccgcggttgggatgtcacatatacgctctacctctccgacaagtggttccgaggttcatccccccaaacaagctgtcggcaatatcgtgcacaagttgcttcaccaattcgatggttcgggtgccggcacacctaccagcgacgtcgagaaattgcatcttcacgacgagcacccacatttctttgtcagcgaccccctgcacacgtcgcccacagtactgcgttcgcgctccaatagtataagcccaaagcccatatcggtgctgtcggaaacgaaaccagccgacatactgaatctcgacagtgctatcgagagcacacagcagcagcagattgcacccaatatcccgaagcgtgaccccggaaagaacgtggatcccaggctgccccaggatgacggaaagttgcatgttcttttcggcgctacaggctcgctttccgtactgaagattaaatcgatgatcaaaaaactcgaagagatttatggttgggaccatatatccattcaagtcatattaactcaagccgctgcgcaattctttgctaataaaaaccccaagaagaagaacctttacgtgtctagcgaaacaaactcattctcaaactccgtggctcaccagggaaacttgcaacagaacaactcagacgcatcctacactgcggtaaatagcgtctccaatacccctgcagttggggggcgcacaccaacgccagcagatcttctccagggcgcagcgccgcaaggcgcgggctccggtctaagccagggcgcagctgcggcgaagattgagctccctccacacatacaagtctggacggatcaagacgagtgggacgtgtggaagcaaagaacagatcccgtactgcatattgaattacgcaggtgggccgatatccttgtcgtcgcgccacttacggcgaatacactttccaaaattgccctgggcctttgtgataacctgctgaccagtgtcattcgggcgtggaatccaatgtttccaatattcttagctcctagcatggttagtggtagttacaactccaccatcactaagcgccatctgaagatgataaaagaagagatgccctggatcactgtattcaaaccgtccgagaaaatcatgggtatccacggcgatatcggacttggcgggatgatggatggtaacgagattgtcgataaagtcgttatgaagctcggcggctaccccaaggatgccgacgaggacgatgacgaggacgataaagcgggcaagaccaatggcaaggaggatgatgacgacgacgacgaggaagagctggacgaggatgacgaggatgacgatgacgacgacgacgatgatgatgatgacgacgatgatgatgatgacgacgacgacgacgacgatgacgatagcagtcagtcgcccttgaagaacgcagcagccacatcgccgtcacactcgtcgactgcccacacgtga

SEQ ID NO: 130906 - protein, 648 aa, Eremothecium gossypii
MSDSSGKQQGIISPHVTNAVKRANLEGCLTPGAGPGHGASGIGSPGPSVSACVSPTQAVTKSIMNASGTSGAVVSNTPEPGLKRVPTVTFSDPKQLPAKQSGTGQGGRVISGDSTTSGATASEDTDTQSHLQMKVASPIHHPTAQHSTPPPLLSHGGGNGAAAVGMSHIRSTSPTSGSEVHPPKQAVGNIVHKLLHQFDGSGAGTPTSDVEKLHLHDEHPHFFVSDPLHTSPTVLRSRSNSISPKPISVLSETKPADILNLDSAIESTQQQQIAPNIPKRDPGKNVDPRLPQDDGKLHVLFGATGSLSVLKIKSMIKKLEEIYGWDHISIQVILTQAAAQFFANKNPKKKNLYVSSETNSFSNSVAHQGNLQQNNSDASYTAVNSVSNTPAVGGRTPTPADLLQGAAPQGAGSGLSQGAAAAKIELPPHIQVWTDQDEWDVWKQRTDPVLHIELRRWADILVVAPLTANTLSKIALGLCDNLLTSVIRAWNPMFPIFLAPSMVSGSYNSTITKRHLKMIKEEMPWITVFKPSEKIMGIHGDIGLGGMMDGNEIVDKVVMKLGGYPKDADEDDDEDDKAGKTNGKEDDDDDDEEELDEDDEDDDDDDDDDDDDDDDDDDDDDDDDDDSSQSPLKNAAATSPSHSSTAHT

SEQ ID NO: 130907 - DNA, 1617 bp, Candida glabrata CBS 138
  CDS (1)..(1617)
atggcaagcaaagttggtttgggcgatgccaatccggagcgggacggtgtacgaagtggtacactggaagagaacggtagagtagcggaaggcagaaccgattctaatagcgggaaggaggctcagactaagtctatcatgaatgccagtggtacatctggtcatgtggtaaacaacactccggagcccggtcttaagagggtaccgactgttactttcagtgacataaagcctgttacgtcgaagagttcagatgttgctgatgttgacaggatagcagagagtatagaaagaactgattttatcagaggtaacaagatatttagtgttggatctggtactacgatcaacaatatcgtaccgaatagaagcagaacacccgatgctattgatccgatagcctttgcagttcatgatactgctgagaatgatcatttacactttgtagtgggtgatacattgcacacaccaggtaagaccagtactttaactagtcctaggtcatctgtcgggtcaaacaaaagtccagatttatccctgcctatcaaggaagaatttggccaacaaataaaagccgtaagcattcccaaagcactggaagcggtcatggaggaaggtacattcaattctttaccctcaaaaattttaaagagggagaactccaaaaacatagaccccaggttacctcaagatgatggcaagcttcatgtgcttctaggtgccacgggtgctgtatctgttttcaagatcaaagtcataataaaaaaacttgaagagatatatggaagagataagattgcggttcaggttatcctaacgcaggcagcgactgagtttttcaacaagaagaatggtaaaaagaacaaaaccgataaagttgctaatgatacccacaacggggaggggaagtcggccgttctcgaaaagacctcagagaatagtgctgtcagccttgaagaagacatcaattgtaccaataccaacgctcataactgtatagagctaaatcacattcatgtatggacagaccaggatgagtgggatgcttggtcccagaggactgatcccgttttacacatagaattgaggaggtgggcagacatattagtaatagccccattaactgccaatacattaacgaagattgctcttggcctgtgtgataatcttttaacaagtgttgtaagagcatggaacccagctttcccaatcttcctggcaccatcgatggtgagcagcacgttcaattccttgatgactaagaagcatttgcaagtgatcaaggatgagatgccttggataacagtttttaaaccctctgagaaagttatgagtattaacggtgagataggtctgggtggtatgatggatagtaacgagattgtagataagattgtcatgcaattgggtggctatccagaagacaccgaggagaacgatatagaagatggtgatgacgacgatgaagacgatgagaaagcaagtactacaccgaaagaagtagatgacgacgatgaggatgaagatgaagatgatgaagatgatgaagatgatgatgacgacgaagatgacgaagacgacgaagaagaccagatatccaagtcaacaaccaactag

SEQ ID NO: 130908 - protein, 538 aa, Candida glabrata CBS 138
MASKVGLGDANPERDGVRSGTLEENGRVAEGRTDSNSGKEAQTKSIMNASGTSGHVVNNTPEPGLKRVPTVTFSDIKPVTSKSSDVADVDRIAESIERTDFIRGNKIFSVGSGTTINNIVPNRSRTPDAIDPIAFAVHDTAENDHLHFVVGDTLHTPGKTSTLTSPRSSVGSNKSPDLSLPIKEEFGQQIKAVSIPKALEAVMEEGTFNSLPSKILKRENSKNIDPRLPQDDGKLHVLLGATGAVSVFKIKVIIKKLEEIYGRDKIAVQVILTQAATEFFNKKNGKKNKTDKVANDTHNGEGKSAVLEKTSENSAVSLEEDINCTNTNAHNCIELNHIHVWTDQDEWDAWSQRTDPVLHIELRRWADILVIAPLTANTLTKIALGLCDNLLTSVVRAWNPAFPIFLAPSMVSSTFNSLMTKKHLQVIKDEMPWITVFKPSEKVMSINGEIGLGGMMDSNEIVDKIVMQLGGYPEDTEENDIEDGDDDDEDDEKASTTPKEVDDDDEDEDEDDEDDEDDDDDEDDEDDEEDQISKSTTN

SEQ ID NO: 130909 - DNA, 1716 bp, Candida glabrata CBS 138
  CDS (1)..(1716)
atgagagggaagatggatgcggataaggagtcagtggcggcggcctccatgtctccgacgctttctgtcggtgcgggtaccacgaagtcgatcatgaatgtcggcgggaagtcaggagctgtggtgagcaatacgcctgaaccaggtctgaaaaggatacccactgtgacgtttagtgattccaagatagttggatcgaataagtttggtgccagtgacgagcggaagccaggcgcgctaggaggtgcggaatctgctctggatagcaaggagctagagagtcaggggatggtaaatttgccacagatactacatgacaaattggtcgatagaagaacaccatctaatgggttgcctgacatacaagtgcctttaccggagaaagaggagcatccgcattttctggtcgaggacccattgcacagtccaaaggttaggtccagggctaacagtttgagccccagcacgccacaagttgatctgaatggtgtacctttgagcacagctatagttaacgggaatgatgtcaaaccaggaataaaacccattacttctaatccattggagagggatggttctgtttccgtgagtaagggatccgagcaacctctcctagaatctgtgatcgaagaagctagttctactccaggtatggcgaatattcccaagagagaaaatgcaaagaacttggacatgagactcccacaggatgatggtaagatacatattctatttggtgcgacgggctccatggctgtcttcaagatcaagccgatggtgaaaaaattggtagatatctacggtaaggataggattagcattcaagtagtgttaaccaaaagtgctgagaaattcttgaacaagaaagtcgtaaagaaggtaaagcctcaccctgagagtaatgaggacccactcgatgtggtgacgaatataccaggcggcacgataaacgagtgtgcaaaactgaaaaatggcggcgctgatgcgcagggatcccaacagtcgaatgggtccacgaactcgactccagataagacagcgatcggcaacaatcctttccagctggaaggtggtccagtgatacagatatggcgagaccaggatgaatgggatgtgtggaagcaaagaagcgaccctgtgttgcatattgaattgagaagatgggccgatattttggtggttgcgcctttgacagccaacacgttgtcaaagatagccttaggcctgtgtgataatctgctgacatgcgttataagggcttggaatccaaatttcccaatatttttggcaccatccatggttagcagcacattcaattccgtaatgacaaaaaagcagttggctattatcaaggaagagatgccatggataacagtgtttaagccatcagagaaagtgatgggcataaacggagatataggtcttggtggcatgatggatccaaacgaaatagtggataaggttgtaatgaaattgggcgggtacccaaaggaagaggacgaagatgaggatgatgaggatgaagatgaggacgaagacgaagagaacgagacttgtcaagagggagaaaataagaaagatgaagatgaagatgaggatgaagacgacgatgacgatgaagacgacgatgacgatgaagatgaagatgaagatgaggaggatgaaaacaatggtggtgctgaagaaacactacagcctgttgagaacagtcagtag

SEQ ID NO: 130910 - protein, 571 aa, Candida glabrata CBS 138
MRGKMDADKESVAAASMSPTLSVGAGTTKSIMNVGGKSGAVVSNTPEPGLKRIPTVTFSDSKIVGSNKFGASDERKPGALGGAESALDSKELESQGMVNLPQILHDKLVDRRTPSNGLPDIQVPLPEKEEHPHFLVEDPLHSPKVRSRANSLSPSTPQVDLNGVPLSTAIVNGNDVKPGIKPITSNPLERDGSVSVSKGSEQPLLESVIEEASSTPGMANIPKRENAKNLDMRLPQDDGKIHILFGATGSMAVFKIKPMVKKLVDIYGKDRISIQVVLTKSAEKFLNKKVVKKVKPHPESNEDPLDVVTNIPGGTINECAKLKNGGADAQGSQQSNGSTNSTPDKTAIGNNPFQLEGGPVIQIWRDQDEWDVWKQRSDPVLHIELRRWADILVVAPLTANTLSKIALGLCDNLLTCVIRAWNPNFPIFLAPSMVSSTFNSVMTKKQLAIIKEEMPWITVFKPSEKVMGINGDIGLGGMMDPNEIVDKVVMKLGGYPKEEDEDEDDEDEDEDEDEENETCQEGENKKDEDEDEDEDDDDDEDDDDDEDEDEDEEDENNGGAEETLQPVENSQ

SEQ ID NO: 130911 - DNA, 1950 bp, Kluyveromyces lactis NRRL Y-1140
  CDS (1)..(1950)
atgagtccaataactcctcactctccggagagccagccctctttggtgtcccctagatttgtgaatcttggcgaacaaagaaattcagagatgctcaattcgacaggtagcgctgttggatcgtctgcttctcagactacgtctccggtcaataaaccggccagtccttctgttagtattactaaatctattatgaatgccagtgggacttctggtgctgttgtgagtaatactccagcatctggtttgaaacgagttccaactgtgactttcactgatgctaagcatgccgtactcaaacagcaagccgctgcagaacaagcgtcagccttacttaacagtttgaacaatccaagcaaggtagcgtccccagttgtttcggataaagcagggtcgcctccgcctgtggaattaaccacttctgtaaaacaaccaactgcaggaactgcaattgaacaaaggattcagtcccccttgagtaaatcacaggaggatttaagggttaggaaagctcctgccaacgtacacaagacttctgcggtggaacaaaccgccggtggtgccgagaccgagcctaagacaccactggaagccactattcaagaaggagtcgaaggtatcaaccttggttctcaagcagagacatctaaacctcaagaagaacaacatcctcattttgtcgtgaatgatgaattacattctccaagtttcaaatcaagatccagatccaacagtatatcaccaatgccaaatggatcacaaaccaacgcagctcccactttcaaactaaatgaaacaacaattcctgaagatgaacaggtaatagcctcagaaccacctgtggaaatcgcgcagatagtggctccaaatatcccaaagagagaagctgccaagaacgtagatccaaggttaccacaagatgacgggaaactacacatcttgtttggagctaccggttcgttatcagtattgaagatcaaatcaatgattaaaaaattagaagaaatatatggtagagacagggtgtcgattcaagtcattttaacacaagctgctgctcaattcttcgcaaatagaacacttaacaggaagaaggggtcgatttcaggccagtcccacacacaaggtcaaacgcaggttgctcaaactccatcagtatcatctcctttgtctcaagaacctacggtagcatctaccgatatcccatccaacaccgtacccatagggcaagaaacaaagtcaactgatggtaatacgatatccacagcggccaagattgaacttcctccacatatccaagtgtggttggatcaagatgagtgggacgcgtggaagcaaagaacggatcccgtattacacattgaactccgtcgttgggcagacattctcgtagtggctcctcttactgctaacaccttatctaagattgccttgggcctatgtgataatttgttgacaagtgtaataagagcttggaatccactgttcccaatatttttggcaccatccatggtaagcaacagttataactcttccatcacgaagagacaccttaacatgattaaagaagaaatgccttggattaccgtattcaaaccatcagagaaagttgttgggatatacggtgatataggacttggtggaatgatggatggtaatgagatcgtagacaaggtggttatgaagttaggagggtatccagaagacgaaaaccaagaggaaggcgaagaagatgaagacgaagatgacgacgatgaagaagatcgatctgataagaagaacttggatgatgatgatgacgacgatgacgatgatgatgatgatgatgatgacgatgacgatgacgacgacgacgacgatgacgaagaggaagatgatgaagtgaatgaaatcgatgaagtcaagagtctacacgaaaccgtaacatcgccaccatccaccgacgcataa

SEQ ID NO: 130912 - protein, 649 aa, Kluyveromyces lactis NRRL Y-1140
MSPITPHSPESQPSLVSPRFVNLGEQRNSEMLNSTGSAVGSSASQTTSPVNKPASPSVSITKSIMNASGTSGAVVSNTPASGLKRVPTVTFTDAKHAVLKQQAAAEQASALLNSLNNPSKVASPVVSDKAGSPPPVELTTSVKQPTAGTAIEQRIQSPLSKSQEDLRVRKAPANVHKTSAVEQTAGGAETEPKTPLEATIQEGVEGINLGSQAETSKPQEEQHPHFVVNDELHSPSFKSRSRSNSISPMPNGSQTNAAPTFKLNETTIPEDEQVIASEPPVEIAQIVAPNIPKREAAKNVDPRLPQDDGKLHILFGATGSLSVLKIKSMIKKLEEIYGRDRVSIQVILTQAAAQFFANRTLNRKKGSISGQSHTQGQTQVAQTPSVSSPLSQEPTVASTDIPSNTVPIGQETKSTDGNTISTAAKIELPPHIQVWLDQDEWDAWKQRTDPVLHIELRRWADILVVAPLTANTLSKIALGLCDNLLTSVIRAWNPLFPIFLAPSMVSNSYNSSITKRHLNMIKEEMPWITVFKPSEKVVGIYGDIGLGGMMDGNEIVDKVVMKLGGYPEDENQEEGEEDEDEDDDDEEDRSDKKNLDDDDDDDDDDDDDDDDDDDDDDDDDDEEEDDEVNEIDEVKSLHETVTSPPSTDA

SEQ ID NO: 130913 - DNA, 1680 bp, Debaryomyces hansenii CBS767; identical to SEQ ID NO: 68220
  CDS (1)..(1680)

SEQ ID NO: 130914 - protein, 559 aa, Debaryomyces hansenii CBS767; identical to SEQ ID NO: 68221

SEQ ID NO: 130915 - DNA, 1617 bp, Candida albicans SC5314; identical to SEQ ID NO: 68230
  CDS (1)..(1617): transl_table=12

SEQ ID NO: 130916 - protein, 538 aa, Candida albicans SC5314; identical to SEQ ID NO: 68231

SEQ ID NO: 130917 - DNA, 2196 bp, Candida albicans SC5314; identical to SEQ ID NO: 68232
  CDS (1)..(2196): transl_table=12

SEQ ID NO: 130918 - protein, 731 aa, Candida albicans SC5314; identical to SEQ ID NO: 68233

SEQ ID NO: 130919 - DNA, 2187 bp, Candida tropicalis
  CDS (307)..(1902): transl_table=12
atagtttgtgttccactcccaagaaattggaaaaatggtaaaaagcccattacgtaatcacaaaccgtgagaaattttttttcacagtgaagccagaagcagaagaaaaaatttaatagcaattgtgtggaatttatttgtttttttttttttccctttgaatttctctatggaatttttttttgtttgtttgtttgattaaccattatcaataaaaaacgaaatattgaaaatcataatctattttaaatttacttaatttcttcacattagttcactatctatcactgatttgtcattatagaaatgccttctgataaggatattaaatctcctgctcaaccaaaaaaggaagaagaaattccaaaatcaatcttgactagaatttcatcgccaccacctattttaaatcaaccagatgcaaatataattcatcatcctcaaccgcaagtccctcaatcatcactgaatattccagggattaagttatctcctcaaatttccacttctctggaaaatagagaaattgttatggctggtggggcttatttaaaagaaagaatggaatcaccagattcattaaaccacaaaccaactctattacaacctgataaaagtgaatctattccaagtattgattatactttaaatcctcctaaagaaagtcaacatcataaatctccttctgtacatgcacatttctatgtcgaagaaactttaagacctgttagaaatagatcaagaagtggttcaaattcaaataataatttaactccaattacaagtccacaacatagtgaaccttcttcaattcttaataaagatgcaattaaaagtcaagaaagcttaagagcaacaacaaattcaatttcttcagcagctgctagcaatcaaagcacgccaagatccattattagcggtggtggtggtggtggtggtggtgcgaatactgccacatcttcaaattcaacaacatcaaataccgctctagccgcacagggtaccaccaccaccaccaccacaacaaatagcaatagtaacactacaactactaaaggtgaacagaatagtaatattgatcctcgtttacctcaagatgatgggaaattccacgttttaattggtgtttgtggtgcattatcagttggtaaagttaaattgattgttaataaattacttgaaatttatacatctgataaaatttccattcaagttatattaacaaaatcaagtgaaaatttccttttaccagaaactttaaatgttttagaaaatgttaaaaaagttcgtgtttggacagatattgatgaatggacaacttggaaaacaagactggatcctgttttacatattgaattaagaagatgggctgatatcttattagtttgtccattaactgcaaatactttggctaaaatttctttaggtatatgtgataatttattaactaatgttatcagagcttggaatagttcttatccaattttattagcaccagcaatggatagtcattcttatagttcaagtacaaccaagagacaattgagattaattgctgatgatatgccatggattgaagttttaaaacctctggaaaaagtttttggaagttatggtgatattggtatgggtggtatgactgattggaatgaaatcgtcaatagaatcgtcatgaaattgggtggttatccagaagatgaagatgaagacgaagctgatgactcaaaggataatattgatgaatccgcaattatagatgacgacgatgacgatgatgacgatgatgatgatgacgacgacgacgacgacgatgatgatgatgacgatgatgacgatgaagaagatccaccacaacaacaatcaaccaccgataactccaaagatgaaactactaacctttgattctacatattgttttattaattctttcccatttttttttttgttttactttcatatatacctttaatattttattaatacattaatataaatagaactgtacaatatttatcaatctttaagttgtcttattttttcatctctccagtttaaataatcctcaccaattaaagttgaagtatcattagtgataccacttattcttcttaatttactattcattgattcatgttcaaaaaaactcggctgattttaataggtgataaatcaaatggtgatgaatta

SEQ ID NO: 130920 - protein, 531 aa, Candida tropicalis; identical to SEQ ID NO: 68335

SEQ ID NO: 130921 - DNA, 3022 bp, Saccharomyces cerevisiae
  CDS (390)..(2414)
tgtttttcataaatatctgtgtagtgtgtactagttggcagctgccctttttctttttcttttttttttttttttttttttttttttcacgtggtttttctatgacgttttccaaaacaagcgtgtcatgtgagcttttttgccctttaactttctggttggagagtccaaaagaccgaaaaggtaagaaaacgttttattgctcagtatgccctccccttatgagatgaatggtgttacagcactttgaagagggctcgttttgaggactttttgatcaggattaatactagattgccaaaaaaaggatagccttttataagattactttagttcaaagaagagaccagaaagaggaatactggccataattatagtgcagagacgcaatgacaaacaaatctagcctgaagaacaataggaaaggggttgcttcgaatactctctctggagctgagcaggccaatataggttcatcggcaatgcctgacacaaattctacgggaccattttcttccgtttctagtctggacactcctgtagtaaggaaatcaactagtcccactggttcacaaactaagtcaatcatgaatgctagcggaacttctggggcagttgtaagtaatacaccagagccagggttaaaaaggataccaactgttacattcagcgatccaaagttgggtagtctcaggtcggatgtggagcaaactccacctaaccaggtggccagacagtccagcgaaaagaaagcaacgtctgtacacatcgcagcggagggtgcaaatcaaggaagaaacttgaaagacataaatacaaaagtaccaaaagatggcgaggcttctgcttcttctttttcgactccaacctctattctctccaatgctgatatggggaataacatatccagcctgctggctaaaaagctaagtttcaccggtggaacagattctattttaaactctgacaatagttccgatagccccagaaaggagcacccacatttctacgtggaagatcctttacacaccccatcagttagatcaaggtctaacagtactagtcctcgcccctctgtggtagtgaatacatttaaccccatcaacattgaacgagagggctccatatcaaagactggagagcccacattgttggagtctgtcttggaagaagcaatgtctcccaatgcagtctcaaatcccttgaagagagaaaatattatgaccaatatggatccaaggcttccccaagatgacggcaagctacacgttctttttggggcaacaggttctttgtctgttttcaaactcaagcacatgatcagaaaattagaagaaatttacggaagggacaaaatatgcatacaagttatactaactaactcagcaaccaaattttttgcaatgaagtatatgaggaaaaataagaaacaacacaatagtatcgatacttctttcaacagcaccaattctaatgctggcaatataactggtaacaagaaaaaagtagcctctcttgaaaaatttagcattcagaagacgtcttcaaactcagcggcttctcagacaaataataaacaggaggaagaaaaacaaatggcctctactactggatttccttcgacacttggtggtagtcgtacgtacagcaactcttcaaacgttgtatcgcaacatcctcaaattgaactgccagcacatatacaattttggacagaccaagacgagtgggatgtatggcgacaacgaactgatcctgtattacacatagaactacgtcgttgggcagatatactagttgtcgcaccattaaccgcaaacacgttggccaagattgcccttggtttatgtgacaaccttttgacaagtgtaataagggcatggaatccaacgtttcccatattcctagcgccttcaatgggtagcggtacgttcaattccataatgactaaaaaacattttcgaattattcaagaagagatgccttgggtaactgtatttaaaccctcagaaaaagtcatgggcataaacggtgacatcgggttaagtgggatgatggatgcaaatgagattgttggcaagatagtcgtcaaactaggtggttatcccgatgtttctgcgggaaaggaagaagaagaggatgaagataacgatgaggaggatgataataagaagaacgatactggtggtaaagatgaagataatgacgacgacgacgatgacgatgatgatgatgacgatgatgacgacgacgacgacgacgacgacgacgacgacgacgacgatgatgatgatgacgacgatgatgacgacgatgatgacgacgacgacgacgacgatgaagatgacgaagacgaagatgaagacgatgaaggaaaaaagaaagaagataaaggagggctacagcgatcttaaataggactaatttcattattgtaaaacttttgaactatatatatctttacatagaataaatttgcattaatcactgataaccagaagagaaggctaaaaataggcaagtaggacacttaactcattttccaaagggagttttatgtctcatagttagcgcttacgatgctgcggaggtgcgtcgtcactctatcggatgttcattctgagggaaagggagtggttcaaatccgatttaaccttgccagcttatcgcaaagcgggtgagatcaaatgctccacagctctgcggttcgtttcacctttctgttttctgcgagcttcggccctgtcagggaaaaaaagaaagaagggggcggtggcaaagactgcatcggcccagaagcaaagaagatataaaagggaaatacttgccaccgaagtcttagactttgcataagagatattctcgcctttcccgcttgaagagttcctgactctatcatacatcttggataaaaggatcaagcagcctatccgctaaaccgctatttattctgctttactgattcatttacatcaagtgaagcacaaaactatcaaaatcaccaaaagaatagaaactaaaa

SEQ ID NO: 130922 - protein, 674 aa, Saccharomyces cerevisiae
MTNKSSLKNNRKGVASNTLSGAEQANIGSSAMPDTNSTGPFSSVSSLDTPVVRKSTSPTGSQTKSIMNASGTSGAVVSNTPEPGLKRIPTVTFSDPKLGSLRSDVEQTPPNQVARQSSEKKATSVHIAAEGANQGRNLKDINTKVPKDGEASASSFSTPTSILSNADMGNNISSLLAKKLSFTGGTDSILNSDNSSDSPRKEHPHFYVEDPLHTPSVRSRSNSTSPRPSVVVNTFNPINIEREGSISKTGEPTLLESVLEEAMSPNAVSNPLKRENIMTNMDPRLPQDDGKLHVLFGATGSLSVFKLKHMIRKLEEIYGRDKICIQVILTNSATKFFAMKYMRKNKKQHNSIDTSFNSTNSNAGNITGNKKKVASLEKFSIQKTSSNSAASQTNNKQEEEKQMASTTGFPSTLGGSRTYSNSSNVVSQHPQIELPAHIQFWTDQDEWDVWRQRTDPVLHIELRRWADILVVAPLTANTLAKIALGLCDNLLTSVIRAWNPTFPIFLAPSMGSGTFNSIMTKKHFRIIQEEMPWVTVFKPSEKVMGINGDIGLSGMMDANEIVGKIVVKLGGYPDVSAGKEEEEDEDNDEEDDNKKNDTGGKDEDNDDDDDDDDDDDDDDDDDDDDDDDDDDDDDDDDDDDDDDDDDDDDDEDDEDEDEDDEGKKKEDKGGLQRS

SEQ ID NO: 130923 - DNA, 22 bp, Artificial sequence
  primer
atgactgccgtcgcctctacta

SEQ ID NO: 130924 - DNA, 27 bp, Artificial sequence
  primer
ttattgatgcttatctattatacctgg

SEQ ID NO: 130925 - protein, 650 aa, Artificial sequence
  consensus sequence
  Variant (2)..(6): Xaa in position 2 to 6 is any amino acid
  Variant (7)..(7): Xaa in position 7 is any or no amino acid
  Variant (9)..(119): Xaa in position 9 to 119 is any amino acid
  Variant (120)..(165): Xaa in position 120 to 165 is any or no amino acid
  Variant (167)..(207): Xaa in position 167 to 207 is any amino acid
  Variant (208)..(252): Xaa in position 208 to 252 is any or no amino acid
  Variant (254)..(256): Xaa in position 254 to 256 is any amino acid
  Variant (257)..(257): Xaa in position 257 is any or no amino acid
  Variant (259)..(259): Xaa in position 259 is any amino acid
  Variant (265)..(271): Xaa in position 265 to 271 is any amino acid
  Variant (277)..(277): Xaa in position 277 is any amino acid
  Variant (279)..(279): Xaa in position 279 is any amino acid
  Variant (281)..(281): Xaa in position 281 is any amino acid
  Variant (283)..(284): Xaa in position 283 to 284 is any amino acid
  Variant (286)..(287): Xaa in position 286 to 287 is any amino acid
  Variant (290)..(290): Xaa in position 290 is any amino acid
  Variant (292)..(292): Xaa in position 292 is any amino acid
  Variant (294)..(297): Xaa in position 294 to 297 is any amino acid
  Variant (300)..(300): Xaa in position 300 is any amino acid
  Variant (304)..(305): Xaa in position 304 to 305 is any amino acid
  Variant (307)..(307): Xaa in position 307 is any amino acid
  Variant (316)..(320): Xaa in position 316 to 320 is any amino acid
  Variant (322)..(338): Xaa in position 322 to 338 is any amino acid
  Variant (339)..(425): Xaa in position 339 to 425 is any or no amino acid
  Variant (427)..(427): Xaa in position 427 is any amino acid
  Variant (429)..(429): Xaa in position 429 is any amino acid
  Variant (433)..(434): Xaa in position 433 to 434 is any amino acid
  Variant (436)..(437): Xaa in position 436 to 437 is any amino acid
  Variant (439)..(439): Xaa in position 439 is any amino acid
  Variant (442)..(446): Xaa in position 442 to 446 is any amino acid
  Variant (460)..(460): Xaa in position 460 is any amino acid
  Variant (462)..(462): Xaa in position 462 is any amino acid
  Variant (470)..(470): Xaa in position 470 is any amino acid
  Variant (473)..(473): Xaa in position 473 is any amino acid
  Variant (476)..(476): Xaa in position 476 is any amino acid
  Variant (483)..(483): Xaa in position 483 is any amino acid
  Variant (490)..(492): Xaa in position 490 to 492 is any amino acid
  Variant (493)..(498): Xaa in position 493 to 498 is any or no amino acid
  Variant (501)..(501): Xaa in position 501 is any amino acid
  Variant (505)..(505): Xaa in position 505 is any amino acid
  Variant (507)..(507): Xaa in position 507 is any amino acid
  Variant (509)..(512): Xaa in position 509 to 512 is any amino acid
  Variant (514)..(515): Xaa in position 514 to 515 is any amino acid
  Variant (518)..(519): Xaa in position 518 to 519 is any amino acid
  Variant (521)..(522): Xaa in position 521 to 522 is any amino acid
  Variant (524)..(526): Xaa in position 524 to 526 is any amino acid
  Variant (531)..(531): Xaa in position 531 is any amino acid
  Variant (533)..(533): Xaa in position 533 is any amino acid
  Variant (536)..(536): Xaa in position 536 is any amino acid
  Variant (540)..(542): Xaa in position 540 to 542 is any amino acid
  Variant (543)..(543): Xaa in position 543 is any or no amino acid
  Variant (548)..(548): Xaa in position 548 is any amino acid
  Variant (554)..(554): Xaa in position 554 is any amino acid
  Variant (559)..(561): Xaa in position 559 to 561 is any amino acid
  Variant (563)..(563): Xaa in position 563 is any amino acid
  Variant (570)..(577): Xaa in position 570 to 577 is any amino acid
  Variant (578)..(607): Xaa in position 578 to 607 is any or no amino acid
  Variant (609)..(620): Xaa in position 609 to 620 is any amino acid
  Variant (622)..(627): Xaa in position 622 to 627 is any amino acid
  Variant (647)..(647): Xaa in position 647 is any amino acid
  Variant (649)..(649): Xaa in position 649 is any amino acid
IXXXXXXSXXXXXXXXXXXXXXXXXXXXXXXXXXXXXXXXXXXXXXXXXXXXXXXXXXXXXXXXXXXXXXXXXXXXXXXXXXXXXXXXXXXXXXXXXXXXXXXXXXXXXXXXXXXXXXXXXXXXXXXXXXXXXXXXXXXXXXXXXXXXXXXXXXXXXXXXXXXXXSXXXXXXXXXXXXXXXXXXXXXXXXXXXXXXXXXXXXXXXXXXXXXXXXXXXXXXXXXXXXXXXXXXXXXXXXXXXXXXXXXXXXXXEXXXXNXDPRLPXXXXXXXQDDGKXHXLXGXXGXXSVXKXKXXXXKLXEIYXXDXISIQVILTXXXXXFXXXXXXXXXXXXXXXXXXXXXXXXXXXXXXXXXXXXXXXXXXXXXXXXXXXXXXXXXXXXXXXXXXXXXXXXXXXXXXXXXXXXXXXXXXXXXXXXXXXXXXXXWXDXDEWXXWXXRXDPXXXXXVLHIELRRWADILXVXPLTANTLXKIXLGXCDNLLTXVIRAWNXXXXXXXXXPIXLAPXMXSXXXXSXXTKXXLXXIXXXMPWIXVXKPXEKVXXXXGDIGXGGMMDXNEIVXXXVXKLGGYPXXXXXXXXXXXXXXXXXXXXXXXXXXXXXXXXXXXXXXDXXXXXXXXXXXXDXXXXXXDDDDDDDDDDDDDDDDDDDXDXD

SEQ ID NO: 130926 - protein, 55 aa, Artificial sequence
  protein pattern
  Variant (2)..(2): Xaa in position 2 is any amino acid
  Variant (18)..(18): Xaa in position 18 is any or no amino acid
  Variant (20)..(20): Xaa in position 20 is any amino acid
  Variant (21)..(21): Xaa in position 21 is any or no amino acid
  Variant (29)..(29): Xaa in position 29 is Ala, Ser or Thr
  Variant (32)..(32): Xaa in position 32 is Ala or Ser
  Variant (35)..(35): Xaa in position 35 is Ile or Leu
  Variant (42)..(42): Xaa in position 42 is Cys, Asn or Ser
  Variant (44)..(44): Xaa in position 44 is Ile or Val
  Variant (49)..(49): Xaa in position 49 is Pro, Ser or Thr
  Variant (50)..(50): Xaa in position 50 is any amino acid
  Variant (51)..(51): Xaa in position 51 is Phe or Tyr
  Variant (54)..(54): Xaa in position 54 is Phe or Leu
RXDPVLHIELRRWADILXVXXPLTANTLXKIXLGXCDNLLTXVXRAWNXXXPIXL

SEQ ID NO: 130927 - protein, 55 aa, Artificial sequence
  protein pattern
  Variant (11)..(11): Xaa in position 11 is Phe or Leu
  Variant (13)..(13): Xaa in position 13 is Ile or Val
  Variant (15)..(15): Xaa in position 15 is Phe, Ile or Leu
  Variant (17)..(17): Xaa in position 17 is Ala or Val
  Variant (18)..(18): Xaa in position 18 is Cys or Thr
  Variant (20)..(20): Xaa in position 20 is Ala or Ser
  Variant (21)..(21): Xaa in position 21 is Leu or Val
  Variant (23)..(23): Xaa in position 23 is Thr or Val
  Variant (24)..(24): Xaa in position 24 is any amino acid
  Variant (26)..(26): Xaa in position 26 is Ile, Leu or Val
  Variant (28)..(28): Xaa in position 28 is any amino acid
  Variant (29)..(29): Xaa in position 29 is Ile or Met
  Variant (30)..(30): Xaa in position 30 is Ile or Val
  Variant (31)..(31): Xaa in position 31 is any amino acid
  Variant (34)..(34): Xaa in position 34 is any amino acid
  Variant (38)..(38): Xaa in position 38 is Gly or Thr
  Variant (39)..(39): Xaa in position 39 is any amino acid
  Variant (40)..(40): Xaa in position 40 is Asp or Glu
  Variant (41)..(41): Xaa in position 41 is His, Lys or Arg
  Variant (42)..(42): Xaa in position 42 is Ile or Val
  Variant (43)..(43): Xaa in position 43 is Ala, Cys or Ser
  Variant (44)..(44): Xaa in position 44 is Ile or Val
  Variant (46)..(46): Xaa in position 46 is Ile or Val
  Variant (50)..(50): Xaa in position 50 is any amino acid
  Variant (51)..(52): Xaa in position 51 to 52 is Ala or Ser
  Variant (53)..(53): Xaa in position 53 is Ala, Glu or Thr
  Variant (54)..(54): Xaa in position 54 is any amino acid
DPRLPQDDGKXHXLXGXXGXXSXXKXKXXXXKLXEIYXXXXXXXQXILTXXXXXF

SEQ ID NO: 130928 - protein, 26 aa, Artificial sequence
  protein pattern
  Variant (2)..(2): Xaa in position 2 is any amino acid
  Variant (5)..(5): Xaa in position 5 is Leu or Met
  Variant (9)..(9): Xaa in position 9 is any amino acid
  Variant (11)..(11): Xaa in position 11 is any amino acid
  Variant (16)..(16): Xaa in position 16 is Asp or Asn
  Variant (17)..(17): Xaa in position 17 is Lys or Arg
  Variant (18)..(18): Xaa in position 18 is Ile or Val
  Variant (20)..(20): Xaa in position 20 is Leu or Met
  Variant (21)..(21): Xaa in position 21 is any amino acid
GXIGXGGMXDXNEIVXXXVXXLGGYP

SEQ ID NO: 130929 - protein, 27 aa, Artificial sequence
  protein pattern
  Variant (2)..(3): Xaa in position 2 to 3 is any amino acid
  Variant (6)..(6): Xaa in position 6 is Lys or Arg
  Variant (7)..(7): Xaa in position 7 is any amino acid
  Variant (8)..(8): Xaa in position 8 is Phe or Leu
  Variant (9)..(10): Xaa in position 9 to 10 is any amino acid
  Variant (12)..(12): Xaa in position 12 is any amino acid
  Variant (13)..(14): Xaa in position 13 to 14 is Asp or Glu
  Variant (16)..(16): Xaa in position 16 is Pro or Ser
  Variant (18)..(18): Xaa in position 18 is Ile or Val
  Variant (19)..(19): Xaa in position 19 is Glu or Thr
  Variant (21)..(21): Xaa in position 21 is Phe or Leu
  Variant (24)..(24): Xaa in position 24 is any amino acid
  Variant (27)..(27): Xaa in position 27 is Ile or Val
SXXTKXXXXXIXXXMXWXXVXKPXEKX

SEQ ID NO: 130930 - protein, 15 aa, Artificial sequence
  protein pattern
  Variant (2)..(4): Xaa in position 2 to 4 is any amino acid
  Variant (5)..(5): Xaa in position 5 is any or no amino acid
  Variant (7)..(8): Xaa in position 7 to 8 is any or no amino acid
  Variant (10)..(10): Xaa in position 10 is any amino acid
  Variant (12)..(12): Xaa in position 12 is Glu, Gln or Ser
EXXXXIXXWXDXDEW

SEQ ID NO: 130931 - protein, 24 aa, Artificial sequence
  protein pattern
  Variant (2)..(3): Xaa in position 2 to 3 is any amino acid
  Variant (4)..(4): Xaa in position 4 is Gly, Thr or Val
  Variant (5)..(5): Xaa in position 5 is any amino acid
  Variant (6)..(6): Xaa in position 6 is Gly, Thr or Val
  Variant (7)..(7): Xaa in position 7 is Ser or Val
  Variant (8)..(8): Xaa in position 8 is Asn or Ser
  Variant (10)..(11): Xaa in position 10 to 11 is any or no amino acid
  Variant (13)..(13): Xaa in position 13 is Pro or Ser
  Variant (14)..(14): Xaa in position 14 is any amino acid
  Variant (15)..(15): Xaa in position 15 is Asp, Pro, Ser or Thr
  Variant (16)..(16): Xaa in position 16 is any amino acid
  Variant (17)..(17): Xaa in position 17 is Leu or Val
  Variant (18)..(20): Xaa in position 18 to 20 is any amino acid
  Variant (21)..(21): Xaa in position 21 is Gly or Pro
  Variant (22)..(22): Xaa in position 22 is Ala, Ser or Thr
  Variant (23)..(23): Xaa in position 23 is any amino acid
  Variant (24)..(24): Xaa in position 24 is Ser or Thr
GXXXXXXXNXXTXXXXXXXXXXXX

SEQ ID NO: 130932 - DNA, 915 bp, Saccharomyces cerevisiae
  CDS (1)..(915)
atgaagatgttgaggcgtacaaaggtaaatttttcaaaattgctttacaagattactaaactagcaatagtactgacgatcctatatatttattttacgcccaaaatcgtctcccgaaacaatgcatcattgcagcatatttttcctcataaatatggcgattatgaaatcaatttggtcatagcgcaccctgacgacgaagttatgtttttttcccccataatttctcaactgaattcgtactttccgagaaccgtcccatttaacataatctgcttatcaaagggcaacgccgaaggtcttggcgaaaccagggtaagagaattaaatgagtcggccgctttattgctacacaatgaaagagcagtctccgtacaggtgatggatttccaggatggtatggacgaaatatgggatattgattctataacttcttctctttcacaaaagatagatataaagaatcataacttgaaccagattatcgttacctttgattcatatggtgtatcaaatcatatcaaccacaaaagctgttatgctgccgttaaaaagttggtggatgattatgctcaacctaagaccaaaagaaatgaacaaccacctcatgtcactgcgctttatttgagaagctacaagaacaacatcgttttaaagtacaactcctttatttgggaaatcctaaaaatactttacgacctgatttctccattccgtagaataattcaggcgcttccgcctaacacagccgccgaaaaagacaagctttcacttatgaatacacatgcacaatacgtactagcgtttgccactatgctaaatgctcacgaatcccaagttgtgtggtttagatacggatggtggatattttccagatttgtcttcgttaatgaatttgatgtttatacatattag

SEQ ID NO: 130933 - protein, 304 aa, Saccharomyces cerevisiae
MKMLRRTKVNFSKLLYKITKLAIVLTILYIYFTPKIVSRNNASLQHIFPHKYGDYEINLVIAHPDDEVMFFSPIISQLNSYFPRTVPFNIICLSKGNAEGLGETRVRELNESAALLLHNERAVSVQVMDFQDGMDEIWDIDSITSSLSQKIDIKNHNLNQIIVTFDSYGVSNHINHKSCYAAVKKLVDDYAQPKTKRNEQPPHVTALYLRSYKNNIVLKYNSFIWEILKILYDLISPFRRIIQALPPNTAAEKDKLSLMNTHAQYVLAFATMLNAHESQVVWFRYGWWIFSRFVFVNEFDVYTY

SEQ ID NO: 130934 - DNA, 789 bp, Oryza sativa (japonica cultivar-group)
  CDS (1)..(789)
atggcgtggatctggatgctcatggcggcgggggccgtgctcctgtgggcggtttctctggggcgggtgctctcctcctcctcgccggcgtgtctgcctgccaactccaccttcctctcccctcctcgcggcgacaggatgagccggaatgtcctcctcgttctcgcccaccccgacgacgaatccatgttttttgctccgactattcttttcctcaagtcaaaaggtcacagcattcatatcttgtgcttgtctcaaggcaatgctgatggccttggaaatatccgcaaagaggaactctaccttgcctgtgtcactcttaagattccagctgagcaagttaaagtcttggaccactcagaactgcaggatggatttcataaaaattgggatcatggactaatagcagaacttaccctggcacaatcccagttatggaatatcgacacgattgttgccttcgattcccgaggagtatcaggccatccaaatcattgcgatgttcatcatggaatctgcaagcttctgcgtgacaacgggcaaggacacattgaagcatgggagcttgtaagcttgaacatttttcgcaagtacagtggtccagttgacatttggctatcttccaccctctcctcaagctcaaaacaaccaacttatactcttgttaataatagcccttccagaagctttgaggcaatggcttcacacaaaagccagtgggtttggttcaggagattgtttgtcctattctcaagctacacatacataaatgtgctccaaaaaatttga

SEQ ID NO: 130935 - protein, 262 aa, Oryza sativa (japonica cultivar-group)
MAWIWMLMAAGAVLLWAVSLGRVLSSSSPACLPANSTFLSPPRGDRMSRNVLLVLAHPDDESMFFAPTILFLKSKGHSIHILCLSQGNADGLGNIRKEELYLACVTLKIPAEQVKVLDHSELQDGFHKNWDHGLIAELTLAQSQLWNIDTIVAFDSRGVSGHPNHCDVHHGICKLLRDNGQGHIEAWELVSLNIFRKYSGPVDIWLSSTLSSSSKQPTYTLVNNSPSRSFEAMASHKSQWVWFRRLFVLFSSYTYINVLQKI

SEQ ID NO: 130936 - DNA, 774 bp, Arabidopsis thaliana
  CDS (1)..(774)
atggcatggcttgtggtttctgtttctctgattgttatatggttggcttctttctgcaaaatattcttccgagcaacatctatctccggagctgctattcttgatgatggtaaaacccctcagaagaaaaatgtactgtttgttatcgcacatcctgatgatgaatcgatgttcttttctccaacaataaactacttagcttccaatgcttgcaatcttcacatgttatgcttgtccactggtaacgctgatggtatgggaagcattaggaacaatgagctgcatcgggcatgtgcggtgctcaaggttccgcttcaacagttaaagattctgaaccatcctaatttgcaggatggttttggccaattatggagccacgatttgctaacagagatcatcgaagaagaagtcactaaacacgatatccacacaataataacattcgataactatggtgtttcgggtcattgcaatcaccgagatgtgcatcgtggagtattaaagttcttgcagactaattcaggaagaaatgtcaaagcttgggaactcgtaagccttaatatctttcgcaagtactgtggacctgtcgacatttggctgtcaattttatccgccaaaatacatccgagcaaggtaatcatcataaacgagcagccttggaaaagcttcaaagcaatggcacaacatttaagccagtgggtttggtttcgaaagctttttgtttcgttttcaagctatacatatgcgaatacacttagtagaatcaacccttga

SEQ ID NO: 130937 - protein, 257 aa, Arabidopsis thaliana
MAWLVVSVSLIVIWLASFCKIFFRATSISGAAILDDGKTPQKKNVLFVIAHPDDESMFFSPTINYLASNACNLHMLCLSTGNADGMGSIRNNELHRACAVLKVPLQQLKILNHPNLQDGFGQLWSHDLLTEIIEEEVTKHDIHTIITFDNYGVSGHCNHRDVHRGVLKFLQTNSGRNVKAWELVSLNIFRKYCGPVDIWLSILSAKIHPSKVIIINEQPWKSFKAMAQHLSQWVWFRKLFVSFSSYTYANTLSRINP

SEQ ID NO: 130938 - DNA, 657 bp, Arabidopsis thaliana
  CDS (1)..(657)
atgtttgttatcgcacatcctgatgatgagtcaatgttcttttctccaacaataaactacttcacttccactgcctgcaatcttcacatcttatgcttctccactggtaacgctgatggtatgggaagcattagggaccaagagctgcatcgggcatgtgcggtgctcaaggttccgcttcaacagttaaagattctggaccatccaaatttgcaggatggttttgggcaattatggagccacgatttgctaacagagatcatcgaagaagaagtcactaatcactatatccacacaataataacattcgataactatggtgtttggggtcattgcaatcaccgagatgtgcatcgtggagtattaaagttcttgcagactaattcaggaagaaatgtcaaagcttgggaacttgtaagccttaatatctttcgcaagtactgtggacctgtcgacatttggctgtctattttatccgccaaaagacatccgagtaaggtaatcatcataaacaagcagccttggaaaagcttcaaagcaatggcacaacatttaagccagtgggtttggtttcggaagctttttgttttgttttcaagctatacatatgtgaatacacttgatagaatcaaccctgagtcaaacgagctcttgtag

SEQ ID NO: 130939 - protein, 218 aa, Arabidopsis thaliana
MFVIAHPDDESMFFSPTINYFTSTACNLHILCFSTGNADGMGSIRDQELHRACAVLKVPLQQLKILDHPNLQDGFGQLWSHDLLTEIIEEEVTNHYIHTIITFDNYGVWGHCNHRDVHRGVLKFLQTNSGRNVKAWELVSLNIFRKYCGPVDIWLSILSAKRHPSKVIIINKQPWKSFKAMAQHLSQWVWFRKLFVLFSSYTYVNTLDRINPESNELL

SEQ ID NO: 130940 - DNA, 741 bp, Encephalitozoon cuniculi GB-M1
  CDS (1)..(741)
atgcaaggaaagctcgggatgctgttctaccttaatatcgagttctcaggacaccctaggatgttcaagaagttttccagatttaaaacattttttctagttgtgtcggtgatctttgtattaagaaatataaggaggctaagaggctcactattactacctggtagatatctgctgcttatcgcacatccagatgatgagtccatgttttttgcgccatccctgctaagtctagggggggatattgacattctttgcttgtctaatggtaacaaagaagggaagggaaaggaaagagaaaaggaactgaggaaagtgggatgctacactggagcgaaggtgcttataaccacattcttttccgatggggaagactgggacccggtgatgatctacataaagctcttggcgatctatatactaaggccgtttgacgttcttatgacgtttgacgaggcaggtgtatctggacacaaaaatcacatctcttgcagtaagggtgcgggactgtttctgaagatacacagtgtaaagggcctgctgctgaagtccaagaacctgtttcagaagtatggggttgacatgagcttttctaggatctcctccacggttcccttcagcatgtacatggaacccgtcaaaatgatgtgcttccacaggtctcagatggtgtggttcaggtatctctatgtgctcttttcaaacttcatgtcttacaacgattttactgttataaactga

SEQ ID NO: 130941 - protein, 246 aa, Encephalitozoon cuniculi GB-M1
MQGKLGMLFYLNIEFSGHPRMFKKFSRFKTFFLVVSVIFVLRNIRRLRGSLLLPGRYLLLIAHPDDESMFFAPSLLSLGGDIDILCLSNGNKEGKGKEREKELRKVGCYTGAKVLITTFFSDGEDWDPVMIYIKLLAIYILRPFDVLMTFDEAGVSGHKNHISCSKGAGLFLKIHSVKGLLLKSKNLFQKYGVDMSFSRISSTVPFSMYMEPVKMMCFHRSQMVWFRYLYVLFSNFMSYNDFTVIN

SEQ ID NO: 130942 - DNA, 777 bp, Arabidopsis thaliana
  CDS (1)..(777)
atggttgttgtttttctatctctgattgttgttatatgggtggcttctttcttcaaaattttcttccgagctacatctatctccagagccactattcttgatgatgggaagaaaaatgtgatgtttgttatcgcacatcctgatgatgagtcaatgttcttttctccaacaataaactacttcacttccactgcctgcaatcttcacatcttatgcttctccactggtaacgctgatggtatgggaagcattagggaccaagagctgcatcgggcatgtgcggtgctcaaggttccgcttcaacagttaaagattctggaccatccaaatttgcaggatggttttgggcaattatggagccacgatttgctaacagagatcatcgaagaagaagtcactaatcactatatccacacaataataacattcgataactatggtgtttggggtcattgcaatcaccgagatgtgcatcgtggagtattaaagttcttgcagactaattcaggaagaaatgtcaaagcttgggaacttgtaagccttaatatctttcgcaagtactgtggacctgtcgacatttggctgtctattttatccgccaaaagacatccgagtaaggtaatcatcataaacaagcagccttggaaaagcttcaaagcaatggcacaacatttaagccagtgggtttggtttcggaagctttttgttttgttttcaagctatacatatgtgaatacacttgatagaatcaaccctgagtcaaacgagctcttgtag

SEQ ID NO: 130943 - protein, 258 aa, Arabidopsis thaliana
MVVVFLSLIVVIWVASFFKIFFRATSISRATILDDGKKNVMFVIAHPDDESMFFSPTINYFTSTACNLHILCFSTGNADGMGSIRDQELHRACAVLKVPLQQLKILDHPNLQDGFGQLWSHDLLTEIIEEEVTNHYIHTIITFDNYGVWGHCNHRDVHRGVLKFLQTNSGRNVKAWELVSLNIFRKYCGPVDIWLSILSAKRHPSKVIIINKQPWKSFKAMAQHLSQWVWFRKLFVLFSSYTYVNTLDRINPESNELL

SEQ ID NO: 130944 - DNA, 858 bp, Magnaporthe grisea 70-15
  CDS (1)..(858)
atgtcgacgactctactgacggccgggcttttggtcctgctcgcgccgtgtttgtatatttacacagcatcggtagcggcgacgcgattcccggcgctacgcaacaagcgcatatgcctcctgatcgcccaccctgacgacgaggccatgttctttgcgcccaccgtgcttgcactcacgcgccctgagactggcaaccacgtcaagattctatgcctgagcagcggcaacgcagacgggttgggggagacgcgcaagaaggagctggtcaagagcggcatgctcctgggcctgcgcaacgaggacgacgtctttgtcatcgagtctgacgcctttcaagactccatgacagcgacttgggatgccacagccatctccagccttctcacgtccgcctttgtcccgaacccagccgcaggcgcaatgatcgacgtcctggtgaccttcgacaagggcggcgtctcgtcgcacccgaaccacatctccctataccacggcgcgcgagcctttgtatcctcgggatcggccgtagacctctacactttgacttcggtcccatttttgcgcaaatacgcttcgatcatcgacgcgttcatgacgcttgccatgagctggggtctccagggagtctcggaggccaagagccccgaaagactcgtgtttatgaactcgttgatgccaggcaaggcgcaggagggcggtggtagcaatgacggcggggcgagctatggaacagcttggcgcgccatgaccgaggctcacaagagtcaaatggtatggttccggtatgggtggattacattgagtaggtacatggttgtgaatgacttgaagttggaggggacgagtgcctcgtga

SEQ ID NO: 130945 - protein, 285 aa, Magnaporthe grisea 70-15
MSTTLLTAGLLVLLAPCLYIYTASVAATRFPALRNKRICLLIAHPDDEAMFFAPTVLALTRPETGNHVKILCLSSGNADGLGETRKKELVKSGMLLGLRNEDDVFVIESDAFQDSMTATWDATAISSLLTSAFVPNPAAGAMIDVLVTFDKGGVSSHPNHISLYHGARAFVSSGSAVDLYTLTSVPFLRKYASIIDAFMTLAMSWGLQGVSEAKSPERLVFMNSLMPGKAQEGGGSNDGGASYGTAWRAMTEAHKSQMVWFRYGWITLSRYMVVNDLKLEGTSAS

SEQ ID NO: 130946 - DNA, 2124 bp, Gibberella zeae PH-1
  CDS (1)..(2124)
atggactctggcgatggccagagagactcgccgctctcaataacctccaatattgcaggcattttgacatttgtcgttgccattgcggcagcattctacgcccgtctcacatatctacggaatagtgatgacgagttcttccgcgtcaaaacgtctttgtcgtggtataagaccgaatccacatggctggcagatcttgtaacagccatcaatgcccagcatgaaggcttccattcgcatcagcccgagtatcagatgtattcctttgtaatggacgacctgcttaatcttgaacagcgtctgctggacattgttgctgagacggaggccaagtcgagcatgagcgacgatggtgaaagctggacactcatgccacggggttggagcggccgcacaacagtagccatggcttggttacgggtgcgaaccaaggctctggagctagtcagacagcgggaaggtctaacagcaagggtgcagttcatgcaaatgagtatgatctcctctcgactgcgggaccttgaatcgaggacgaaatggcgagaaatgaagatggatgagagttcacggaagcttgaatctctaattgagaaccaaagagatcgaattcatcggctggaagacctcgtacgacggtggacacatcgtgatcattctagtctttcacgggccgggacgttgacggatcctgaggtcaaaggtgtagaatgggcaggttcagtggatggtgacggctctacagcaatatctgagtcagcagacgcaattccatcgaggagtgatgatcgcatctcaggtttcgaagattcgttctgtaagaggcgacaagaggggtccttcgccatcgagctcgcgctgtcgacgatcggcttcagcaaacagatcacgaccctttgcgaaatcaacgagggtctccttgtttggaccagtgcgatcaggttgctcgagtttgatatccttgacggacttttctttgcgttgacgagccatgattgggtgcgaaccgaatgttactggaataggcttagcgcatcccacaccaatggaagcctcgggccatgccgcactgcacttcaatgcatgaaggcgatttctctatggcttgaaagatgggcaagggtcttgtcaggcggtgaaccgttgggtgattttacagcgggcagtgattcgcccaccaacgatccgacccgaactgccatctttcagaaatactgtccgttgcaaccgaagccgagtcgcattatcgtttctgaagccaccgccgacatgaacgttcttcacatctttgcaggcctcgccgtcgtggtgccgagcatttacatgctcacagcgaaccaggcccaatcgaccatcaagaacaagcgcgtctgtctcttgatcgcacaccccgatgacgaagccatgttcttctcgcccaccgtcctcgccctcacacgacccgagaacggaaaccacgttaaaattctatgcttgagcactggagatgccgacgggctaggagacgttcgcaagcaagagctggtcaagagcggtttggcgctgggactgcaaaacgaggatgatgtctttgtcgtggacaaccccactgacttcccagactccatgaacagaatgtgggataagaacctgatcgctcgcctactaggaagcacatttgcgcccaagttcggccacgagcgcaagaataacctcaagcctacagccgccattgacatcctcgtcacatttgacagcaacggcgtgtcttctcaccccaaccacatctccctatacctgggtgcccgttccttcattcaggctctcactacgactgagtcggaatggccgagccctgtcgatctatataccttaaaatctgtgggcattgtgcgcaaatactcggccttcatggactttgttcctacactgctctcgcatctcggagtcaataatgagaacaaggaccgtcccgaaggtctggttttcatgaaccagcttgttggccgaggcgcatacggcactgcttggagtgccatgacccaggcgcacaggagccagatggtctggttccgctatggctggatcaccctcagccgatacatggtcatcaatgacctgcgtctcgaaaaggtcaaggcacagtga

SEQ ID NO: 130947 - protein, 707 aa, Gibberella zeae PH-1
MDSGDGQRDSPLSITSNIAGILTFVVAIAAAFYARLTYLRNSDDEFFRVKTSLSWYKTESTWLADLVTAINAQHEGFHSHQPEYQMYSFVMDDLLNLEQRLLDIVAETEAKSSMSDDGESWTLMPRGWSGRTTVAMAWLRVRTKALELVRQREGLTARVQFMQMSMISSRLRDLESRTKWREMKMDESSRKLESLIENQRDRIHRLEDLVRRWTHRDHSSLSRAGTLTDPEVKGVEWAGSVDGDGSTAISESADAIPSRSDDRISGFEDSFCKRRQEGSFAIELALSTIGFSKQITTLCEINEGLLVWTSAIRLLEFDILDGLFFALTSHDWVRTECYWNRLSASHTNGSLGPCRTALQCMKAISLWLERWARVLSGGEPLGDFTAGSDSPTNDPTRTAIFQKYCPLQPKPSRIIVSEATADMNVLHIFAGLAVVVPSIYMLTANQAQSTIKNKRVCLLIAHPDDEAMFFSPTVLALTRPENGNHVKILCLSTGDADGLGDVRKQELVKSGLALGLQNEDDVFVVDNPTDFPDSMNRMWDKNLIARLLGSTFAPKFGHERKNNLKPTAAIDILVTFDSNGVSSHPNHISLYLGARSFIQALTTTESEWPSPVDLYTLKSVGIVRKYSAFMDFVPTLLSHLGVNNENKDRPEGLVFMNQLVGRGAYGTAWSAMTQAHRSQMVWFRYGWITLSRYMVINDLRLEKVKAQ

SEQ ID NO: 130948 - DNA, 915 bp, Candida glabrata CBS 138
  CDS (1)..(915)
atgctgaagaggccaaatacaccaacaatgaaatccataagaaacttcccgttctcgaaactcctgtttaagctgacgaagctgacgataatctttcaagtactgtacatatacttcactcctaaggtagaagacctgaacaaagagaacttgacgaaactgctacctacccatgacaactttggtgtgttgaatctggtgattgcacacccagatgatgaaattatgttcttttccccaactatactgcaactaatcgatcatgtccaggaactcaacgttgtctgtctgtcaaatggtgatgccgatggactcggcgaactaagagcgaaagaactgaaagacgctatcgggtatttgactgtaaacaggaacctcagaaatgtgtcccttaacatcctcgattacaccgatggccaaaacgaagtttggtctggtgtcgccacagatttgaagaaatatatcttgacctccgaacctggtgtcaaacagaaagatatcatcttgacctttgatagggaaggtatctctggtcacaggaatcacattgcctgtaacgaaggcgttatctcctacctcaagaccatcaaatcaaacagctttgttttcttggaattgaaatcattgtccacatggcaaatcataagcaaatactccggtgttgtcccaaaattgttagaaatcatctataacaagatcagagccagcaataaaaccttcgtgtcatacttacctaatagagattctattgccacagacagtaacgtgtgctttataagcacttttgaccaatatgctctctcctttgccgcaatgtgctacgcccacaaatcccagatggtctggtttaggtacttatggtggtcattctcaagatacgtatttgtgaatgacctatcacgtatcactgtttag

SEQ ID NO: 130949 - protein, 304 aa, Candida glabrata CBS 138
MLKRPNTPTMKSIRNFPFSKLLFKLTKLTIIFQVLYIYFTPKVEDLNKENLTKLLPTHDNFGVLNLVIAHPDDEIMFFSPTILQLIDHVQELNVVCLSNGDADGLGELRAKELKDAIGYLTVNRNLRNVSLNILDYTDGQNEVWSGVATDLKKYILTSEPGVKQKDIILTFDREGISGHRNHIACNEGVISYLKTIKSNSFVFLELKSLSTWQIISKYSGVVPKLLEIIYNKIRASNKTFVSYLPNRDSIATDSNVCFISTFDQYALSFAAMCYAHKSQMVWFRYLWWSFSRYVFVNDLSRITV

SEQ ID NO: 130950 - DNA, 792 bp, Kluyveromyces lactis NRRL Y-1140
  CDS (1)..(792)
atgatacttttacgtggattgaataagttcgttctatggtatctcgtgtttcttgtgatctatggttgcttgacaaaaaccataaaggaacataaccgatggtacttccatgaactggtctctgaaagtatggtttcgaaattgacttctgtgacattggttgttgcgcatccggatgatgaagttatgttcttcagtccgactttaacacaattcaatgaattgttacctataagtataccaattaatgtagtatgtatgactgctggtgatgcagatggattaggtcatattcggaagcaagagttagttgattcgttacgcataatgttccatggtagacaattcggttgcgatgtcttggattttgaggatggcatggatgccgtctgggaccaagtattgcttgaaaaacaattgaggtcttcaattccagattctaatccattggtccttacttttgaccaattcggagtttctggtcatataaaccatatctcatgcggaagactggttgaaaagctaccgtattcacataaactacatctacgaagtgaccagcccatctatgtgaaatactctgctttcatcgccggtattttccagttgggaattagtaccgtttatccagattatggtaaacctagatgttttatttccacattgccgcagtaccttttggccgcaagtgctatgtcattggctcatacgtcccagatggtttggttcagagtcgggtggtggctttttagtagattctgtttcattaatgagttgatcacatctatttga

SEQ ID NO: 130951 - protein, 263 aa, Kluyveromyces lactis NRRL Y-1140
MILLRGLNKFVLWYLVFLVIYGCLTKTIKEHNRWYFHELVSESMVSKLTSVTLVVAHPDDEVMFFSPTLTQFNELLPISIPINVVCMTAGDADGLGHIRKQELVDSLRIMFHGRQFGCDVLDFEDGMDAVWDQVLLEKQLRSSIPDSNPLVLTFDQFGVSGHINHISCGRLVEKLPYSHKLHLRSDQPIYVKYSAFIAGIFQLGISTVYPDYGKPRCFISTLPQYLLAASAMSLAHTSQMVWFRVGWWLFSRFCFINELITSI

SEQ ID NO: 130952 - DNA, 921 bp, Debaryomyces hansenii CBS767
  CDS (1)..(921)
atgttggttagaatatggaggtttgtattgagagtgattggcttatcctttttactttggctaattttatccactactatacctcaaattatagctaaatatagtcattccaatgagtctgagaatctagcttgtccttataattcgataacatcaccttcacctttaccaatacataatgctaatgtatactttataattggacatcctgatgatgaggtgatgtttttttcgccaacgttaatcgagttaaacaaaaaggagtataataatagagtaaagttaatatgcttttccaatggtgatgcagttcatgaatctatgggccgtgtgcgaacagaggaattgtataagtcaggaggcatattgggtcttaaagagaacgatataaaggtaattgatagctttaaagatggtatggacgaaaaatgggatgtagatgacattcagaggacattagaagaaacggttggcaagaaatctaaggaaacattggtattaattacatttgatgaagatggtgtatcgaaacatccaaaccacatttctctttattatggcactaaaaagttttttcaaacgtattacaataatcctgaacgcaatggtaaattatatgttttaaaaagtttaaattttttggagaagtattcatttaacatattgacaaacgtggaattattcgtggatcacttatctaaattgttaataagtaatattttgaagattaaggtgaatgtcagtttttttaacaataaaactaataatcagtctattaagatatactctgatttgaacatgcttagtgttagttatgcagctatgtcatatggccattattctcaaatggtctggtttagatatggatggttaatattgagtaggtacttaacttttaatcatttaatcgagattaattaa

SEQ ID NO: 130953 - protein, 306 aa, Debaryomyces hansenii CBS767
MLVRIWRFVLRVIGLSFLLWLILSTTIPQIIAKYSHSNESENLACPYNSITSPSPLPIHNANVYFIIGHPDDEVMFFSPTLIELNKKEYNNRVKLICFSNGDAVHESMGRVRTEELYKSGGILGLKENDIKVIDSFKDGMDEKWDVDDIQRTLEETVGKKSKETLVLITFDEDGVSKHPNHISLYYGTKKFFQTYYNNPERNGKLYVLKSLNFLEKYSFNILTNVELFVDHLSKLLISNILKIKVNVSFFNNKTNNQSIKIYSDLNMLSVSYAAMSYGHYSQMVWFRYGWLILSRYLTFNHLIEIN

SEQ ID NO: 130954 - DNA, 756 bp, Yarrowia lipolytica CLIB122
  CDS (1)..(756)
atgcgagtaggactaattgtgctcatcattgggtttttgtggtggacgccctcgtggctgactaagcgactcaacaagaaccacgctgagcccaccatcatcgacaatcatatcactcttctcattgcgcatcccgacgacgaggccatgtttttcggccctaccctcgaccttctgacgcgcaaagaacacaaaaacaaagtgtctattctgtgtctttctactggaaacgacgagggactgggcgaaattcgaaaatcagaacttgttgagtcagcggccatcttcggggtgtcggctgaaaaagttcacgtcctggaccgcccagagctgcaggatggtatggaaaacgaatgggatagaaccatggttgccggagtgattgaggaagttgtacccaccactcagactattgtcacgttcgacgccgagggtgtttcgggccatatcaaccatagatcagtctactatggagcactttactacgccaaagaaaaccctggagtcactgtgtggactctggagtctgtgcccgtgtaccgcaaatacactgcagtcattgacggatttgtcaccactttgttgcggtctatacttccctcaaactctcgagtttccaccgccgcagattacaaggcgtaccaggatgctcgaaaggccatggtaaaggctcatgtgagtcagatgaagtggttccgatacggatggattactttgtccagatacatgtggtttaatgagctggtgagagcctag

SEQ ID NO: 130955 - protein, 251 aa, Yarrowia lipolytica CLIB122
MRVGLIVLIIGFLWWTPSWLTKRLNKNHAEPTIIDNHITLLIAHPDDEAMFFGPTLDLLTRKEHKNKVSILCLSTGNDEGLGEIRKSELVESAAIFGVSAEKVHVLDRPELQDGMENEWDRTMVAGVIEEVVPTTQTIVTFDAEGVSGHINHRSVYYGALYYAKENPGVTVWTLESVPVYRKYTAVIDGFVTTLLRSILPSNSRVSTAADYKAYQDARKAMVKAHVSQMKWFRYGWITLSRYMWFNELVRA

SEQ ID NO: 130956 - DNA, 915 bp, Aspergillus nidulans FGSC A4
  CDS (1)..(915)
atgaacccagaccctcaggcgctcatctcaattggcttcgccattgcagcggctttccttttctggaccctctcctcaaccacaacgtccccttttgcccgcacattcccgcagctctacaacaagcggatatgtctgctcatcgcgcaccccgacgacgaagcaatgttctttgcgccgacattgctggctttaacaaagccagagctagggaaccatatcaagattctgtgtttgagtagcggggacgccgacggcctgggccacatccgacgcggcgaactccagaaaagcgcaaaacgcctaggcattcgcggagataacgacgtgctggttctcgatgacccacggttccaggatgggatggggaacagttgggcgaagaacgagatcgccgcgctacttactgcaacgtttgcgccgaacgcatcagcatccgcgtccaagtcgatgtcgcgcaaacaagcaaaatctagagacgaagcgcccaccgctacaatcgacgtcctcctgacctttgacgcccacggtgtatcgaaccacatcaaccaccgctcgctctaccacggcgcgcgccattttctcagtatgctgatgaaagataaatccgggtattcgtgtcctgttacgctgtatacacttagaacgacgaatctgctacggaagtatatcggtgtactggatgcgccgtttacaatggtcaagggggttttggatggtttgtttgcagtttcgtcgtctaaaactaggaaaaacgccaaagaccaaatgccggcaaaactgctcttcgttagctccgtgggcgagtggatgacggcacagtcggctatggtgaaggcgcatcagagccagatgatttggtttcgatgggggtggattggaattggcagaacaactgatatcgatgatgtataa

SEQ ID NO: 130957 - protein, 304 aa, Aspergillus nidulans FGSC A4
MNPDPQALISIGFAIAAAFLFWTLSSTTTSPFARTFPQLYNKRICLLIAHPDDEAMFFAPTLLALTKPELGNHIKILCLSSGDADGLGHIRRGELQKSAKRLGIRGDNDVLVLDDPRFQDGMGNSWAKNEIAALLTATFAPNASASASKSMSRKQAKSRDEAPTATIDVLLTFDAHGVSNHINHRSLYHGARHFLSMLMKDKSGYSCPVTLYTLRTTNLLRKYIGVLDAPFTMVKGVLDGLFAVSSSKTRKNAKDQMPAKLLFVSSVGEWMTAQSAMVKAHQSQMIWFRWGWIGIGRTTDIDDV

SEQ ID NO: 130958 - DNA, 1062 bp, Candida albicans SC5314
  CDS (1)..(1062): transl_table=12
atgattttcaaactaccgttaatccttttgagattgtatatcacatcatttataatttggattttccaaacaactattcttccacaaacattaactaaattaaccaatgtttcaatcaagactcaaactttccaacattattatccatatacttcattagtcaacactcctaaaaattccaattccataaacattataactaattcaaatataacatatataatagctcaccctgatgatgaagtaatgtttttcgctccatcaataattgaattgaaaaaaccaaaatataataatcaaatcaatttaatttgtttttcaaaaggaaattatattaaatcaatggatgaaatacgtcaatcggaattgattcaatcgagtagaattttaggaattgatcaagtttcgatattggattatcaagatggtatgaatgaaacttggcaattgaatgatattgtacaaagtttacatgaaaatttatcacccacaagtagtggtagtgatactaatagcaataacaagccatcagtgttgattacatttgatgatcaaggagtatcaaatcatcctaatcatatttcattatttcacggtacgaagaaatatattcaagaattacgacgcaaactggaaaataagaataaaaccagaataaaaactactactactactattaattatattgacattgatagttccagttcaaccaaattttatgttcttaaaagtttgaatttttttgaaaaatatagttttacaatacttggtaatattgaaattttatttaattttatttcattattaattaaaaaatttataaatattaatattaatgttagttttttcagtaatcaaattattaaatcaaaatttgataataacaacaataatttacaattacaaaatttaaatgatattagattttattctgatttgaatatgcttagtttgagttatgcagccatggcttatggacattttagtcaaatggtctggtttagatacgcttggttattattaagtagatatcttacatataatcatctcatagaacaataa

SEQ ID NO: 130959 - protein, 353 aa, Candida albicans SC5314
MIFKLPLILLRLYITSFIIWIFQTTILPQTLTKLTNVSIKTQTFQHYYPYTSLVNTPKNSNSINIITNSNITYIIAHPDDEVMFFAPSIIELKKPKYNNQINLICFSKGNYIKSMDEIRQSELIQSSRILGIDQVSILDYQDGMNETWQLNDIVQSLHENLSPTSSGSDTNSNNKPSVLITFDDQGVSNHPNHISLFHGTKKYIQELRRKSENKNKTRIKTTTTTINYIDIDSSSSTKFYVLKSLNFFEKYSFTILGNIEILFNFISLLIKKFINININVSFFSNQIIKSKFDNNNNNLQLQNLNDIRFYSDLNMLSLSYAAMAYGHFSQMVWFRYAWLLLSRYLTYNHLIEQ

SEQ ID NO: 130960 - DNA, 903 bp, Ustilago maydis 521
  CDS (1)..(903)
atggcagatcgacccgcaaatctcatgcagatggcgcggatggccattccgcgaccacaattcttcctcgtcgtcttggtcggttcgatcctcgtccagtttctgatcgcaggcctgcgaatccagcatgataacaaagacctggcgatttcggcaagaattcggacactgccctcttcagcgctgctcgtcaccgcccatccggatgacgaggccatgttttttgcgcctgccattcaggcgctcgctgcggcaggcacaacaattttcgccttgtgcctctccaccggtaacgctaccggtctcggtctggaacgcacccaagaactctttggcagctacaatcaactcggtctaccctctaccagagtcaaatacctcgacgatgtacaattgcaagattccatgcaagtcacctggccaaacgactacgtctccaccgttgttgcgaaccacatcgactccatctcgcgctccaaccgcatcgacgcgctcattaccttcgacaagcagggtgtctctggccatctcaatcacattgcaacgtacaatggcacacgcgataccgccgtcgcccgcaacctcactctctacgttctgccctccttggaagtgtgggaaaagtacagctcggtcccatttgccgtttgggagtcgattgcctactccggatacgtgcctgcagctccagcagctggtgcaagctcagagccgtacaagcccgcctcagagatcctcatcctggcgagcccagcccagtacctcgaagcagtacgagccatgttcaagcaccaaacccagctcgaatggtttcgatacctctacatcgtcttcagcagatacatgttctccaacaagttggtgctctggacaccccagctcgaccttgatacagagcaatga

SEQ ID NO: 130961 - protein, 300 aa, Ustilago maydis 521
MADRPANLMQMARMAIPRPQFFLVVLVGSILVQFLIAGLRIQHDNKDLAISARIRTLPSSALLVTAHPDDEAMFFAPAIQALAAAGTTIFALCLSTGNATGLGLERTQELFGSYNQLGLPSTRVKYLDDVQLQDSMQVTWPNDYVSTVVANHIDSISRSNRIDALITFDKQGVSGHLNHIATYNGTRDTAVARNLTLYVLPSLEVWEKYSSVPFAVWESIAYSGYVPAAPAAGASSEPYKPASEILILASPAQYLEAVRAMFKHQTQLEWFRYLYIVFSRYMFSNKLVLWTPQLDLDTEQ

SEQ ID NO: 130962 - DNA, 879 bp, Tribolium castaneum
  CDS (1)..(879)
atgagtctaggtttcgaatcgttggtgtccctcgtctcagcctcttggaagaatctaaccgttcgagtccaggaatacacgaaagaaaccgtggagcatttaatcgtagccgtgtccgtgtacatcatagtatgcgtgtttttgtacctttccatctctcgctggaagataatccacttcaaaaaagacgtaaaaaacccccatcgtgttttactagtaatcgcacatcctgacgacgaatgcatgttttttggccccactgttttgaacttcaccaaacagaaccaatgtaaagtgttcctgatgtgtctttcgacagggcaaaattacggactggggaaaacccgcaaacaggaattgtacaaatcgtgtcgcatgctgggcattgacgatagctgtatcacggtgtgcaaccacacgaacttgcccgatcaaatgggggccaaatggccgattgaattggtcgctaaattgattttaaaccacgtggagacctacagcattgacacgcttgtcacctttgataaacacggagttagctatcatctcaatcactgcagtatttactacgcgatcgctcatctcagcattgagaaaaaattgcccaaggaatgttctgtttatgttctagagactgttaatttgttgaggaagtattggctcctgttggatattcccgtctcgtttcttttgtccaggataaggtatttagtgacttctgcagaccgcgctataatccacaaggccatgaaacagcatcagtcccaattagtttggtttcgacgtctctatatgcttttctcaaggtatatgttaattaattcgctacagttaatggaattgtcggatatagaattagatttagaaatagacgactaa

SEQ ID NO: 130963 - protein, 292 aa, Tribolium castaneum
MSLGFESLVSLVSASWKNLTVRVQEYTKETVEHLIVAVSVYIIVCVFLYLSISRWKIIHFKKDVKNPHRVLLVIAHPDDECMFFGPTVLNFTKQNQCKVFLMCLSTGQNYGLGKTRKQELYKSCRMLGIDDSCITVCNHTNLPDQMGAKWPIELVAKLILNHVETYSIDTLVTFDKHGVSYHLNHCSIYYAIAHLSIEKKLPKECSVYVLETVNLLRKYWLLLDIPVSFLLSRIRYLVTSADRAIIHKAMKQHQSQLVWFRRLYMLFSRYMLINSLQLMELSDIELDLEIDD

SEQ ID NO: 130964 - DNA, 873 bp, Aspergillus niger
  CDS (1)..(873)
atggcatattcagcgctgatcatcccatcggctgccgtctttctgtatcttcttctggcatactacctggcgggagatccccggcttgttccacacaccatccagcaagcgcggaacgttctccttgtcacggcacatcccgatgacgagactctgttctttagcccaactattcttcacggccgcaacaacccggacgtcacccgttccttgttggtattatcgacaggcgaaggcgactatcatggccaaggagatatccgcaaaggggagatcgaacgcagttgcgcggctctcggcatcccctccgatcgctgtgtcgtcctcgagcatggtgcattacaggataacccaaagaagtggtggcgccaggatgtcatccaggatatagtggctcattacgttcacatgtggaaagtggatctaaagatctatactttcgacgatggtggagtatccggccatatcaaccatagggccgtcagtgccggagttcggtacgtcgaccatacatcaccactgcgaaaaagtctgactgtgagtaggaaatatgcagagagctttccgcatgccccgccggtctacgcgctacagagtacattcctcctgcgcaagtactcgtcgcttattgatctgatcttgacatcagtgccattctcatggcgcatcggagcagcggtcttgacagccccaccggtgcccacagagcacgatacatatggaaataaagcgctgctggtaagcccgtggcagacctatcttactgcgcgaacagcattcagtcagcatgatagtcagtactcgtgggatcgcgtgctgtacttggtagtgagccgttatatgtggttcaataatctataccggatagcctaa

SEQ ID NO: 130965 - protein, 290 aa, Aspergillus niger
MAYSALIIPSAAVFLYLLLAYYLAGDPRLVPHTIQQARNVLLVTAHPDDETLFFSPTILHGRNNPDVTRSLLVLSTGEGDYHGQGDIRKGEIERSCAALGIPSDRCVVLEHGALQDNPKKWWRQDVIQDIVAHYVHMWKVDLKIYTFDDGGVSGHINHRAVSAGVRYVDHTSPLRKSLTVSRKYAESFPHAPPVYALQSTFLLRKYSSLIDLILTSVPFSWRIGAAVLTAPPVPTEHDTYGNKALLVSPWQTYLTARTAFSQHDSQYSWDRVLYLVVSRYMWFNNLYRIA

SEQ ID NO: 130966 - DNA, 903 bp, Aspergillus niger
  CDS (1)..(903)
atgtctccgtcaaccttgctctccctcggttccgcgattctagccgtgttcctcttctggacattatcctcaaccacgtcctcacccttcggcggtgcattcccacgtctatacaacaagcggatatgtctgctgatcgcccaccctgacgatgaagccatgttcttcgcgcccacggtattggccctgaccaggccggaatacggcaaccacctcaagatcctctgcctcagcagtggagacgccgacggactgggccacatccgcaaaaaggagctcgtgaaaagcgccctgcaactgggcctacgccaagaatcggacgtatacatcatcgacgacccctcccgtttccgcgacagcatgtcaatccagtggacagagtccgacgtatcagctgttctcgaacacgcctttgctcctgaactcagcgatagcaccaattccaagaagaagtcgaataaagctggctctgcacctacggcgactatcgacgtgctcttgaccttcgataagggaggtatcagcaaccactctaatcaccgatctctgtaccacggcgctgttcatttcctgcgtaccctgatgaaggacaaacccgggtatacctgtccggtcactctgtatacgctcaccacgacgaatcttctgcgtaagtacgctggtattctggatgcgccgtttacgatggttcggggcgcgctgaactccctaattggccgtggtgggagctccaagggccagcttccttctcggcttctgtttgtcagctccgttaatgaatggatgactgcgcagtcggctatggtcaaggcacatcagagccagatggtgtggttccggtggggttggattacgattggtcggtacatggtggtgaatgacttgaaggcggagaagatatga

SEQ ID NO: 130967 - protein, 300 aa, Aspergillus niger
MSPSTLLSLGSAILAVFLFWTLSSTTSSPFGGAFPRLYNKRICLLIAHPDDEAMFFAPTVLALTRPEYGNHLKILCLSSGDADGLGHIRKKELVKSALQLGLRQESDVYIIDDPSRFRDSMSIQWTESDVSAVLEHAFAPELSDSTNSKKKSNKAGSAPTATIDVLLTFDKGGISNHSNHRSLYHGAVHFLRTLMKDKPGYTCPVTLYTLTTTNLLRKYAGILDAPFTMVRGALNSLIGRGGSSKGQLPSRLLFVSSVNEWMTAQSAMVKAHQSQMVWFRWGWITIGRYMVVNDLKAEKI
